United States Patent Application Publication US 2018/0305689 A1 - sequence listing, part 70

SEQ ID NO: 966889 - RNA, 19 nt, Artificial Sequence
  Description of Artificial Sequence: Synthetic oligonucleotide
  Antisense strand to SEQ ID NO: 966888
uccuucguggaagacccgc

SEQ ID NO: 966890 - RNA, 19 nt, Artificial Sequence
  Description of Artificial Sequence: Synthetic oligonucleotide
  Sense strand starting at position 442 of SEQ ID NO: 913954
aguggcuugcaaugucaaa

SEQ ID NO: 966891 - RNA, 19 nt, Artificial Sequence
  Description of Artificial Sequence: Synthetic oligonucleotide
  Antisense strand to SEQ ID NO: 966890
uuugacauugcaagccacu

SEQ ID NO: 966892 - RNA, 19 nt, Artificial Sequence
  Description of Artificial Sequence: Synthetic oligonucleotide
  Sense strand starting at position 2818 of SEQ ID NO: 913955
cggaaacucgcgucuuuca

SEQ ID NO: 966893 - RNA, 19 nt, Artificial Sequence
  Description of Artificial Sequence: Synthetic oligonucleotide
  Antisense strand to SEQ ID NO: 966892
ugaaagacgcgaguuuccg

SEQ ID NO: 966894 - RNA, 19 nt, Artificial Sequence
  Description of Artificial Sequence: Synthetic oligonucleotide
  Sense strand starting at position 3939 of SEQ ID NO: 913955
cugcauauuuggucuuuga

SEQ ID NO: 966895 - RNA, 19 nt, Artificial Sequence
  Description of Artificial Sequence: Synthetic oligonucleotide
  Antisense strand to SEQ ID NO: 966894
ucaaagaccaaauaugcag

SEQ ID NO: 966896 - RNA, 19 nt, Artificial Sequence
  Description of Artificial Sequence: Synthetic oligonucleotide
  Sense strand starting at position 3458 of SEQ ID NO: 913955
uggguaauaguccaaauuc

SEQ ID NO: 966897 - RNA, 19 nt, Artificial Sequence
  Description of Artificial Sequence: Synthetic oligonucleotide
  Antisense strand to SEQ ID NO: 966896
gaauuuggacuauuaccca

SEQ ID NO: 966898 - RNA, 19 nt, Artificial Sequence
  Description of Artificial Sequence: Synthetic oligonucleotide
  Sense strand starting at position 2701 of SEQ ID NO: 913955
gggaacuccugguuuaaag

SEQ ID NO: 966899 - RNA, 19 nt, Artificial Sequence
  Description of Artificial Sequence: Synthetic oligonucleotide
  Antisense strand to SEQ ID NO: 966898
cuuuaaaccaggaguuccc

SEQ ID NO: 966900 - RNA, 19 nt, Artificial Sequence
  Description of Artificial Sequence: Synthetic oligonucleotide
  Sense strand starting at position 3852 of SEQ ID NO: 913955
ugcaucaucccgccuguau

SEQ ID NO: 966901 - RNA, 19 nt, Artificial Sequence
  Description of Artificial Sequence: Synthetic oligonucleotide
  Antisense strand to SEQ ID NO: 966900
auacaggcgggaugaugca

SEQ ID NO: 966902 - RNA, 19 nt, Artificial Sequence
  Description of Artificial Sequence: Synthetic oligonucleotide
  Sense strand starting at position 375 of SEQ ID NO: 913955
cgaaucauaccuggauuaa

SEQ ID NO: 966903 - RNA, 19 nt, Artificial Sequence
  Description of Artificial Sequence: Synthetic oligonucleotide
  Antisense strand to SEQ ID NO: 966902
uuaauccagguaugauucg

SEQ ID NO: 966904 - RNA, 19 nt, Artificial Sequence
  Description of Artificial Sequence: Synthetic oligonucleotide
  Sense strand starting at position 3083 of SEQ ID NO: 913955
cgacuuaagaaacggacau

SEQ ID NO: 966905 - RNA, 19 nt, Artificial Sequence
  Description of Artificial Sequence: Synthetic oligonucleotide
  Antisense strand to SEQ ID NO: 966904
auguccguuucuuaagucg

SEQ ID NO: 966906 - RNA, 19 nt, Artificial Sequence
  Description of Artificial Sequence: Synthetic oligonucleotide
  Sense strand starting at position 3796 of SEQ ID NO: 913955
acguaacugcuacagaaga

SEQ ID NO: 966907 - RNA, 19 nt, Artificial Sequence
  Description of Artificial Sequence: Synthetic oligonucleotide
  Antisense strand to SEQ ID NO: 966906
ucuucuguagcaguuacgu

SEQ ID NO: 966908 - RNA, 19 nt, Artificial Sequence
  Description of Artificial Sequence: Synthetic oligonucleotide
  Sense strand starting at position 284 of SEQ ID NO: 913955
gucagagauaaaugauugu

SEQ ID NO: 966909 - RNA, 19 nt, Artificial Sequence
  Description of Artificial Sequence: Synthetic oligonucleotide
  Antisense strand to SEQ ID NO: 966908
acaaucauuuaucucugac

SEQ ID NO: 966910 - RNA, 19 nt, Artificial Sequence
  Description of Artificial Sequence: Synthetic oligonucleotide
  Sense strand starting at position 3057 of SEQ ID NO: 913955
ucccuuacucaagggaagu

SEQ ID NO: 966911 - RNA, 19 nt, Artificial Sequence
  Description of Artificial Sequence: Synthetic oligonucleotide
  Antisense strand to SEQ ID NO: 966910
acuucccuugaguaaggga

SEQ ID NO: 966912 - RNA, 19 nt, Artificial Sequence
  Description of Artificial Sequence: Synthetic oligonucleotide
  Sense strand starting at position 3162 of SEQ ID NO: 913955
cugagaagaugccuucuau

SEQ ID NO: 966913 - RNA, 19 nt, Artificial Sequence
  Description of Artificial Sequence: Synthetic oligonucleotide
  Antisense strand to SEQ ID NO: 966912
auagaaggcaucuucucag

SEQ ID NO: 966914 - RNA, 19 nt, Artificial Sequence
  Description of Artificial Sequence: Synthetic oligonucleotide
  Sense strand starting at position 3211 of SEQ ID NO: 913955
uuuggagccaguuaacagu

SEQ ID NO: 966915 - RNA, 19 nt, Artificial Sequence
  Description of Artificial Sequence: Synthetic oligonucleotide
  Antisense strand to SEQ ID NO: 966914
acuguuaacuggcuccaaa

SEQ ID NO: 966916 - RNA, 19 nt, Artificial Sequence
  Description of Artificial Sequence: Synthetic oligonucleotide
  Sense strand starting at position 3224 of SEQ ID NO: 913955
aacaguuaauuguugugaa

SEQ ID NO: 966917 - RNA, 19 nt, Artificial Sequence
  Description of Artificial Sequence: Synthetic oligonucleotide
  Antisense strand to SEQ ID NO: 966916
uucacaacaauuaacuguu

SEQ ID NO: 966918 - RNA, 19 nt, Artificial Sequence
  Description of Artificial Sequence: Synthetic oligonucleotide
  Sense strand starting at position 3708 of SEQ ID NO: 913955
auccaaaguuagguguaau

SEQ ID NO: 966919 - RNA, 19 nt, Artificial Sequence
  Description of Artificial Sequence: Synthetic oligonucleotide
  Antisense strand to SEQ ID NO: 966918
auuacaccuaacuuuggau

SEQ ID NO: 966920 - RNA, 19 nt, Artificial Sequence
  Description of Artificial Sequence: Synthetic oligonucleotide
  Sense strand starting at position 638 of SEQ ID NO: 913955
gugccucugaguuaugaga

SEQ ID NO: 966921 - RNA, 19 nt, Artificial Sequence
  Description of Artificial Sequence: Synthetic oligonucleotide
  Antisense strand to SEQ ID NO: 966920
ucucauaacucagaggcac

SEQ ID NO: 966922 - RNA, 19 nt, Artificial Sequence
  Description of Artificial Sequence: Synthetic oligonucleotide
  Sense strand starting at position 2000 of SEQ ID NO: 913955
agggacauauuuggucaaa

SEQ ID NO: 966923 - RNA, 19 nt, Artificial Sequence
  Description of Artificial Sequence: Synthetic oligonucleotide
  Antisense strand to SEQ ID NO: 966922
uuugaccaaauaugucccu

SEQ ID NO: 966924 - RNA, 19 nt, Artificial Sequence
  Description of Artificial Sequence: Synthetic oligonucleotide
  Sense strand starting at position 2699 of SEQ ID NO: 913955
ucgggaacuccugguuuaa

SEQ ID NO: 966925 - RNA, 19 nt, Artificial Sequence
  Description of Artificial Sequence: Synthetic oligonucleotide
  Antisense strand to SEQ ID NO: 966924
uuaaaccaggaguucccga

SEQ ID NO: 966926 - RNA, 19 nt, Artificial Sequence
  Description of Artificial Sequence: Synthetic oligonucleotide
  Sense strand starting at position 373 of SEQ ID NO: 913955
gccgaaucauaccuggauu

SEQ ID NO: 966927 - RNA, 19 nt, Artificial Sequence
  Description of Artificial Sequence: Synthetic oligonucleotide
  Antisense strand to SEQ ID NO: 966926
aauccagguaugauucggc

SEQ ID NO: 966928 - RNA, 19 nt, Artificial Sequence
  Description of Artificial Sequence: Synthetic oligonucleotide
  Sense strand starting at position 3842 of SEQ ID NO: 913955
agauaaagcgugcaucauc

SEQ ID NO: 966929 - RNA, 19 nt, Artificial Sequence
  Description of Artificial Sequence: Synthetic oligonucleotide
  Antisense strand to SEQ ID NO: 966928
gaugaugcacgcuuuaucu

SEQ ID NO: 966930 - RNA, 19 nt, Artificial Sequence
  Description of Artificial Sequence: Synthetic oligonucleotide
  Sense strand starting at position 182 of SEQ ID NO: 913955
gcauaaggcucucuacuga

SEQ ID NO: 966931 - RNA, 19 nt, Artificial Sequence
  Description of Artificial Sequence: Synthetic oligonucleotide
  Antisense strand to SEQ ID NO: 966930
ucaguagagagccuuaugc

SEQ ID NO: 966932 - RNA, 19 nt, Artificial Sequence
  Description of Artificial Sequence: Synthetic oligonucleotide
  Sense strand starting at position 3711 of SEQ ID NO: 913955
caaaguuagguguaaucgu

SEQ ID NO: 966933 - RNA, 19 nt, Artificial Sequence
  Description of Artificial Sequence: Synthetic oligonucleotide
  Antisense strand to SEQ ID NO: 966932
acgauuacaccuaacuuug

SEQ ID NO: 966934 - RNA, 19 nt, Artificial Sequence
  Description of Artificial Sequence: Synthetic oligonucleotide
  Sense strand starting at position 3071 of SEQ ID NO: 913955
gaaguaauagugcgacuua

SEQ ID NO: 966935 - RNA, 19 nt, Artificial Sequence
  Description of Artificial Sequence: Synthetic oligonucleotide
  Antisense strand to SEQ ID NO: 966934
uaagucgcacuauuacuuc

SEQ ID NO: 966936 - RNA, 19 nt, Artificial Sequence
  Description of Artificial Sequence: Synthetic oligonucleotide
  Sense strand starting at position 930 of SEQ ID NO: 913955
ccgggucuuugagcugaga

SEQ ID NO: 966937 - RNA, 19 nt, Artificial Sequence
  Description of Artificial Sequence: Synthetic oligonucleotide
  Antisense strand to SEQ ID NO: 966936
ucucagcucaaagacccgg

SEQ ID NO: 966938 - RNA, 19 nt, Artificial Sequence
  Description of Artificial Sequence: Synthetic oligonucleotide
  Sense strand starting at position 82 of SEQ ID NO: 913955
uguccugugugaucuaaua

SEQ ID NO: 966939 - RNA, 19 nt, Artificial Sequence
  Description of Artificial Sequence: Synthetic oligonucleotide
  Antisense strand to SEQ ID NO: 966938
uauuagaucacacaggaca

SEQ ID NO: 966940 - RNA, 19 nt, Artificial Sequence
  Description of Artificial Sequence: Synthetic oligonucleotide
  Sense strand starting at position 2930 of SEQ ID NO: 913955
ucccuaugugcuuauuagu

SEQ ID NO: 966941 - RNA, 19 nt, Artificial Sequence
  Description of Artificial Sequence: Synthetic oligonucleotide
  Antisense strand to SEQ ID NO: 966940
acuaauaagcacauaggga

SEQ ID NO: 966942 - RNA, 19 nt, Artificial Sequence
  Description of Artificial Sequence: Synthetic oligonucleotide
  Sense strand starting at position 794 of SEQ ID NO: 913955
ucggguguugagugacaau

SEQ ID NO: 966943 - RNA, 19 nt, Artificial Sequence
  Description of Artificial Sequence: Synthetic oligonucleotide
  Antisense strand to SEQ ID NO: 966942
auugucacucaacacccga

SEQ ID NO: 966944 - RNA, 19 nt, Artificial Sequence
  Description of Artificial Sequence: Synthetic oligonucleotide
  Sense strand starting at position 3840 of SEQ ID NO: 913955
ccagauaaagcgugcauca

SEQ ID NO: 966945 - RNA, 19 nt, Artificial Sequence
  Description of Artificial Sequence: Synthetic oligonucleotide
  Antisense strand to SEQ ID NO: 966944
ugaugcacgcuuuaucugg

SEQ ID NO: 966946 - RNA, 19 nt, Artificial Sequence
  Description of Artificial Sequence: Synthetic oligonucleotide
  Sense strand starting at position 3152 of SEQ ID NO: 913955
aggccaacaucugagaaga

SEQ ID NO: 966947 - RNA, 19 nt, Artificial Sequence
  Description of Artificial Sequence: Synthetic oligonucleotide
  Antisense strand to SEQ ID NO: 966946
ucuucucagauguuggccu

SEQ ID NO: 966948 - RNA, 19 nt, Artificial Sequence
  Description of Artificial Sequence: Synthetic oligonucleotide
  Sense strand starting at position 168 of SEQ ID NO: 913955
uuuaauacuuugccgcaua

SEQ ID NO: 966949 - RNA, 19 nt, Artificial Sequence
  Description of Artificial Sequence: Synthetic oligonucleotide
  Antisense strand to SEQ ID NO: 966948
uaugcggcaaaguauuaaa

SEQ ID NO: 966950 - RNA, 19 nt, Artificial Sequence
  Description of Artificial Sequence: Synthetic oligonucleotide
  Sense strand starting at position 3450 of SEQ ID NO: 913955
aucguucguggguaauagu

SEQ ID NO: 966951 - RNA, 19 nt, Artificial Sequence
  Description of Artificial Sequence: Synthetic oligonucleotide
  Antisense strand to SEQ ID NO: 966950
acuauuacccacgaacgau

SEQ ID NO: 966952 - RNA, 19 nt, Artificial Sequence
  Description of Artificial Sequence: Synthetic oligonucleotide
  Sense strand starting at position 3154 of SEQ ID NO: 913955
gccaacaucugagaagaug

SEQ ID NO: 966953 - RNA, 19 nt, Artificial Sequence
  Description of Artificial Sequence: Synthetic oligonucleotide
  Antisense strand to SEQ ID NO: 966952
caucuucucagauguuggc

SEQ ID NO: 966954 - RNA, 19 nt, Artificial Sequence
  Description of Artificial Sequence: Synthetic oligonucleotide
  Sense strand starting at position 3449 of SEQ ID NO: 913955
uaucguucguggguaauag

SEQ ID NO: 966955 - RNA, 19 nt, Artificial Sequence
  Description of Artificial Sequence: Synthetic oligonucleotide
  Antisense strand to SEQ ID NO: 966954
cuauuacccacgaacgaua

SEQ ID NO: 966956 - RNA, 19 nt, Artificial Sequence
  Description of Artificial Sequence: Synthetic oligonucleotide
  Sense strand starting at position 636 of SEQ ID NO: 913955
ccgugccucugaguuauga

SEQ ID NO: 966957 - RNA, 19 nt, Artificial Sequence
  Description of Artificial Sequence: Synthetic oligonucleotide
  Antisense strand to SEQ ID NO: 966956
ucauaacucagaggcacgg

SEQ ID NO: 966958 - RNA, 19 nt, Artificial Sequence
  Description of Artificial Sequence: Synthetic oligonucleotide
  Sense strand starting at position 3829 of SEQ ID NO: 913955
ggccaaggguuccagauaa

SEQ ID NO: 966959 - RNA, 19 nt, Artificial Sequence
  Description of Artificial Sequence: Synthetic oligonucleotide
  Antisense strand to SEQ ID NO: 966958
uuaucuggaacccuuggcc

SEQ ID NO: 966960 - RNA, 19 nt, Artificial Sequence
  Description of Artificial Sequence: Synthetic oligonucleotide
  Sense strand starting at position 3720 of SEQ ID NO: 913955
guguaaucgucagcucccu

SEQ ID NO: 966961 - RNA, 19 nt, Artificial Sequence
  Description of Artificial Sequence: Synthetic oligonucleotide
  Antisense strand to SEQ ID NO: 966960
agggagcugacgauuacac

SEQ ID NO: 966962 - RNA, 19 nt, Artificial Sequence
  Description of Artificial Sequence: Synthetic oligonucleotide
  Sense strand starting at position 3794 of SEQ ID NO: 913955
ggacguaacugcuacagaa

SEQ ID NO: 966963 - RNA, 19 nt, Artificial Sequence
  Description of Artificial Sequence: Synthetic oligonucleotide
  Antisense strand to SEQ ID NO: 966962
uucuguagcaguuacgucc

SEQ ID NO: 966964 - RNA, 19 nt, Artificial Sequence
  Description of Artificial Sequence: Synthetic oligonucleotide
  Sense strand starting at position 1431 of SEQ ID NO: 913955
gcgggaauucgcugcaagu

SEQ ID NO: 966965 - RNA, 19 nt, Artificial Sequence
  Description of Artificial Sequence: Synthetic oligonucleotide
  Antisense strand to SEQ ID NO: 966964
acuugcagcgaauucccgc

SEQ ID NO: 966966 - RNA, 19 nt, Artificial Sequence
  Description of Artificial Sequence: Synthetic oligonucleotide
  Sense strand starting at position 3447 of SEQ ID NO: 913955
gcuaucguucguggguaau

SEQ ID NO: 966967 - RNA, 19 nt, Artificial Sequence
  Description of Artificial Sequence: Synthetic oligonucleotide
  Antisense strand to SEQ ID NO: 966966
auuacccacgaacgauagc

SEQ ID NO: 966968 - RNA, 19 nt, Artificial Sequence
  Description of Artificial Sequence: Synthetic oligonucleotide
  Sense strand starting at position 797 of SEQ ID NO: 913955
gguguugagugacaaucau

SEQ ID NO: 966969 - RNA, 19 nt, Artificial Sequence
  Description of Artificial Sequence: Synthetic oligonucleotide
  Antisense strand to SEQ ID NO: 966968
augauugucacucaacacc

SEQ ID NO: 966970 - RNA, 19 nt, Artificial Sequence
  Description of Artificial Sequence: Synthetic oligonucleotide
  Sense strand starting at position 3445 of SEQ ID NO: 913955
cugcuaucguucgugggua

SEQ ID NO: 966971 - RNA, 19 nt, Artificial Sequence
  Description of Artificial Sequence: Synthetic oligonucleotide
  Antisense strand to SEQ ID NO: 966970
uacccacgaacgauagcag

SEQ ID NO: 966972 - RNA, 19 nt, Artificial Sequence
  Description of Artificial Sequence: Synthetic oligonucleotide
  Sense strand starting at position 105 of SEQ ID NO: 913956
gggcuuccuacugagaacu

SEQ ID NO: 966973 - RNA, 19 nt, Artificial Sequence
  Description of Artificial Sequence: Synthetic oligonucleotide
  Antisense strand to SEQ ID NO: 966972
aguucucaguaggaagccc

SEQ ID NO: 966974 - RNA, 19 nt, Artificial Sequence
  Description of Artificial Sequence: Synthetic oligonucleotide
  Sense strand starting at position 1811 of SEQ ID NO: 913956
cgaaucauaccuggauuaa

SEQ ID NO: 966975 - RNA, 19 nt, Artificial Sequence
  Description of Artificial Sequence: Synthetic oligonucleotide
  Antisense strand to SEQ ID NO: 966974
uuaauccagguaugauucg

SEQ ID NO: 966976 - RNA, 19 nt, Artificial Sequence
  Description of Artificial Sequence: Synthetic oligonucleotide
  Sense strand starting at position 576 of SEQ ID NO: 913956
ugccaaagccaugagauca

SEQ ID NO: 966977 - RNA, 19 nt, Artificial Sequence
  Description of Artificial Sequence: Synthetic oligonucleotide
  Antisense strand to SEQ ID NO: 966976
ugaucucauggcuuuggca

SEQ ID NO: 966978 - RNA, 19 nt, Artificial Sequence
  Description of Artificial Sequence: Synthetic oligonucleotide
  Sense strand starting at position 1720 of SEQ ID NO: 913956
gucagagauaaaugauugu

SEQ ID NO: 966979 - RNA, 19 nt, Artificial Sequence
  Description of Artificial Sequence: Synthetic oligonucleotide
  Antisense strand to SEQ ID NO: 966978
acaaucauuuaucucugac

SEQ ID NO: 966980 - RNA, 19 nt, Artificial Sequence
  Description of Artificial Sequence: Synthetic oligonucleotide
  Sense strand starting at position 609 of SEQ ID NO: 913956
ugaggucuagguugaggau

SEQ ID NO: 966981 - RNA, 19 nt, Artificial Sequence
  Description of Artificial Sequence: Synthetic oligonucleotide
  Antisense strand to SEQ ID NO: 966980
auccucaaccuagaccuca

SEQ ID NO: 966982 - RNA, 19 nt, Artificial Sequence
  Description of Artificial Sequence: Synthetic oligonucleotide
  Sense strand starting at position 606 of SEQ ID NO: 913956
gagugaggucuagguugag

SEQ ID NO: 966983 - RNA, 19 nt, Artificial Sequence
  Description of Artificial Sequence: Synthetic oligonucleotide
  Antisense strand to SEQ ID NO: 966982
cucaaccuagaccucacuc

SEQ ID NO: 966984 - RNA, 19 nt, Artificial Sequence
  Description of Artificial Sequence: Synthetic oligonucleotide
  Sense strand starting at position 2074 of SEQ ID NO: 913956
gugccucugaguuaugaga

SEQ ID NO: 966985 - RNA, 19 nt, Artificial Sequence
  Description of Artificial Sequence: Synthetic oligonucleotide
  Antisense strand to SEQ ID NO: 966984
ucucauaacucagaggcac

SEQ ID NO: 966986 - RNA, 19 nt, Artificial Sequence
  Description of Artificial Sequence: Synthetic oligonucleotide
  Sense strand starting at position 1278 of SEQ ID NO: 913956
aagcucugccucgauaaag

SEQ ID NO: 966987 - RNA, 19 nt, Artificial Sequence
  Description of Artificial Sequence: Synthetic oligonucleotide
  Antisense strand to SEQ ID NO: 966986
cuuuaucgaggcagagcuu

SEQ ID NO: 966988 - RNA, 19 nt, Artificial Sequence
  Description of Artificial Sequence: Synthetic oligonucleotide
  Sense strand starting at position 1240 of SEQ ID NO: 913956
gcuuacuucuaagugagag

SEQ ID NO: 966989 - RNA, 19 nt, Artificial Sequence
  Description of Artificial Sequence: Synthetic oligonucleotide
  Antisense strand to SEQ ID NO: 966988
cucucacuuagaaguaagc

SEQ ID NO: 966990 - RNA, 19 nt, Artificial Sequence
  Description of Artificial Sequence: Synthetic oligonucleotide
  Sense strand starting at position 3436 of SEQ ID NO: 913956
agggacauauuuggucaaa

SEQ ID NO: 966991 - RNA, 19 nt, Artificial Sequence
  Description of Artificial Sequence: Synthetic oligonucleotide
  Antisense strand to SEQ ID NO: 966990
uuugaccaaauaugucccu

SEQ ID NO: 966992 - RNA, 19 nt, Artificial Sequence
  Description of Artificial Sequence: Synthetic oligonucleotide
  Sense strand starting at position 227 of SEQ ID NO: 913956
uagcgugugcuggugcaua

SEQ ID NO: 966993 - RNA, 19 nt, Artificial Sequence
  Description of Artificial Sequence: Synthetic oligonucleotide
  Antisense strand to SEQ ID NO: 966992
uaugcaccagcacacgcua

SEQ ID NO: 966994 - RNA, 19 nt, Artificial Sequence
  Description of Artificial Sequence: Synthetic oligonucleotide
  Sense strand starting at position 1809 of SEQ ID NO: 913956
gccgaaucauaccuggauu

SEQ ID NO: 966995 - RNA, 19 nt, Artificial Sequence
  Description of Artificial Sequence: Synthetic oligonucleotide
  Antisense strand to SEQ ID NO: 966994
aauccagguaugauucggc

SEQ ID NO: 966996 - RNA, 19 nt, Artificial Sequence
  Description of Artificial Sequence: Synthetic oligonucleotide
  Sense strand starting at position 575 of SEQ ID NO: 913956
cugccaaagccaugagauc

SEQ ID NO: 966997 - RNA, 19 nt, Artificial Sequence
  Description of Artificial Sequence: Synthetic oligonucleotide
  Antisense strand to SEQ ID NO: 966996
gaucucauggcuuuggcag

SEQ ID NO: 966998 - RNA, 19 nt, Artificial Sequence
  Description of Artificial Sequence: Synthetic oligonucleotide
  Sense strand starting at position 1393 of SEQ ID NO: 913956
ggaaguagcaucugccaaa

SEQ ID NO: 966999 - RNA, 19 nt, Artificial Sequence
  Description of Artificial Sequence: Synthetic oligonucleotide
  Antisense strand to SEQ ID NO: 966998
uuuggcagaugcuacuucc

SEQ ID NO: 967000 - RNA, 19 nt, Artificial Sequence
  Description of Artificial Sequence: Synthetic oligonucleotide
  Sense strand starting at position 385 of SEQ ID NO: 913956
ucuguuguacccugaagac

SEQ ID NO: 967001 - RNA, 19 nt, Artificial Sequence
  Description of Artificial Sequence: Synthetic oligonucleotide
  Antisense strand to SEQ ID NO: 967000
gucuucaggguacaacaga

SEQ ID NO: 967002 - RNA, 19 nt, Artificial Sequence
  Description of Artificial Sequence: Synthetic oligonucleotide
  Sense strand starting at position 867 of SEQ ID NO: 913956
gucugaagcuugucaagag

SEQ ID NO: 967003 - RNA, 19 nt, Artificial Sequence
  Description of Artificial Sequence: Synthetic oligonucleotide
  Antisense strand to SEQ ID NO: 967002
cucuugacaagcuucagac

SEQ ID NO: 967004 - RNA, 19 nt, Artificial Sequence
  Description of Artificial Sequence: Synthetic oligonucleotide
  Sense strand starting at position 1394 of SEQ ID NO: 913956
gaaguagcaucugccaaau

SEQ ID NO: 967005 - RNA, 19 nt, Artificial Sequence
  Description of Artificial Sequence: Synthetic oligonucleotide
  Antisense strand to SEQ ID NO: 967004
auuuggcagaugcuacuuc

SEQ ID NO: 967006 - RNA, 19 nt, Artificial Sequence
  Description of Artificial Sequence: Synthetic oligonucleotide
  Sense strand starting at position 1618 of SEQ ID NO: 913956
gcauaaggcucucuacuga

SEQ ID NO: 967007 - RNA, 19 nt, Artificial Sequence
  Description of Artificial Sequence: Synthetic oligonucleotide
  Antisense strand to SEQ ID NO: 967006
ucaguagagagccuuaugc

SEQ ID NO: 967008 - RNA, 19 nt, Artificial Sequence
  Description of Artificial Sequence: Synthetic oligonucleotide
  Sense strand starting at position 268 of SEQ ID NO: 913956
gaaugaaugccgugguaca

SEQ ID NO: 967009 - RNA, 19 nt, Artificial Sequence
  Description of Artificial Sequence: Synthetic oligonucleotide
  Antisense strand to SEQ ID NO: 967008
uguaccacggcauucauuc

SEQ ID NO: 967010 - RNA, 19 nt, Artificial Sequence
  Description of Artificial Sequence: Synthetic oligonucleotide
  Sense strand starting at position 2366 of SEQ ID NO: 913956
ccgggucuuugagcugaga

SEQ ID NO: 967011 - RNA, 19 nt, Artificial Sequence
  Description of Artificial Sequence: Synthetic oligonucleotide
  Antisense strand to SEQ ID NO: 967010
ucucagcucaaagacccgg

SEQ ID NO: 967012 - RNA, 19 nt, Artificial Sequence
  Description of Artificial Sequence: Synthetic oligonucleotide
  Sense strand starting at position 365 of SEQ ID NO: 913956
cuaagaucuuugguugcuu

SEQ ID NO: 967013 - RNA, 19 nt, Artificial Sequence
  Description of Artificial Sequence: Synthetic oligonucleotide
  Antisense strand to SEQ ID NO: 967012
aagcaaccaaagaucuuag

SEQ ID NO: 967014 - RNA, 19 nt, Artificial Sequence
  Description of Artificial Sequence: Synthetic oligonucleotide
  Sense strand starting at position 1277 of SEQ ID NO: 913956
gaagcucugccucgauaaa

SEQ ID NO: 967015 - RNA, 19 nt, Artificial Sequence
  Description of Artificial Sequence: Synthetic oligonucleotide
  Antisense strand to SEQ ID NO: 967014
uuuaucgaggcagagcuuc

SEQ ID NO: 967016 - RNA, 19 nt, Artificial Sequence
  Description of Artificial Sequence: Synthetic oligonucleotide
  Sense strand starting at position 1518 of SEQ ID NO: 913956
uguccugugugaucuaaua

SEQ ID NO: 967017 - RNA, 19 nt, Artificial Sequence
  Description of Artificial Sequence: Synthetic oligonucleotide
  Antisense strand to SEQ ID NO: 967016
uauuagaucacacaggaca

SEQ ID NO: 967018 - RNA, 19 nt, Artificial Sequence
  Description of Artificial Sequence: Synthetic oligonucleotide
  Sense strand starting at position 2230 of SEQ ID NO: 913956
ucggguguugagugacaau

SEQ ID NO: 967019 - RNA, 19 nt, Artificial Sequence
  Description of Artificial Sequence: Synthetic oligonucleotide
  Antisense strand to SEQ ID NO: 967018
auugucacucaacacccga

SEQ ID NO: 967020 - RNA, 19 nt, Artificial Sequence
  Description of Artificial Sequence: Synthetic oligonucleotide
  Sense strand starting at position 1604 of SEQ ID NO: 913956
uuuaauacuuugccgcaua

SEQ ID NO: 967021 - RNA, 19 nt, Artificial Sequence
  Description of Artificial Sequence: Synthetic oligonucleotide
  Antisense strand to SEQ ID NO: 967020
uaugcggcaaaguauuaaa

SEQ ID NO: 967022 - RNA, 19 nt, Artificial Sequence
  Description of Artificial Sequence: Synthetic oligonucleotide
  Sense strand starting at position 2072 of SEQ ID NO: 913956
ccgugccucugaguuauga

SEQ ID NO: 967023 - RNA, 19 nt, Artificial Sequence
  Description of Artificial Sequence: Synthetic oligonucleotide
  Antisense strand to SEQ ID NO: 967022
ucauaacucagaggcacgg

SEQ ID NO: 967024 - RNA, 19 nt, Artificial Sequence
  Description of Artificial Sequence: Synthetic oligonucleotide
  Sense strand starting at position 2867 of SEQ ID NO: 913956
gcgggaauucgcugcaagu

SEQ ID NO: 967025 - RNA, 19 nt, Artificial Sequence
  Description of Artificial Sequence: Synthetic oligonucleotide
  Antisense strand to SEQ ID NO: 967024
acuugcagcgaauucccgc

SEQ ID NO: 967026 - RNA, 19 nt, Artificial Sequence
  Description of Artificial Sequence: Synthetic oligonucleotide
  Sense strand starting at position 2233 of SEQ ID NO: 913956
gguguugagugacaaucau

SEQ ID NO: 967027 - RNA, 19 nt, Artificial Sequence
  Description of Artificial Sequence: Synthetic oligonucleotide
  Antisense strand to SEQ ID NO: 967026
augauugucacucaacacc

SEQ ID NO: 967028 - RNA, 19 nt, Artificial Sequence
  Description of Artificial Sequence: Synthetic oligonucleotide
  Sense strand starting at position 328 of SEQ ID NO: 913956
acuaguuccucccauaagu

SEQ ID NO: 967029 - RNA, 19 nt, Artificial Sequence
  Description of Artificial Sequence: Synthetic oligonucleotide
  Antisense strand to SEQ ID NO: 967028
acuuaugggaggaacuagu

SEQ ID NO: 967030 - RNA, 19 nt, Artificial Sequence
  Description of Artificial Sequence: Synthetic oligonucleotide
  Sense strand starting at position 2076 of SEQ ID NO: 913956
gccucugaguuaugagaga

SEQ ID NO: 967031 - RNA, 19 nt, Artificial Sequence
  Description of Artificial Sequence: Synthetic oligonucleotide
  Antisense strand to SEQ ID NO: 967030
ucucucauaacucagaggc

SEQ ID NO: 967032 - RNA, 19 nt, Artificial Sequence
  Description of Artificial Sequence: Synthetic oligonucleotide
  Sense strand starting at position 1526 of SEQ ID NO: 913956
gugaucuaauaaugcacua

SEQ ID NO: 967033 - RNA, 19 nt, Artificial Sequence
  Description of Artificial Sequence: Synthetic oligonucleotide
  Antisense strand to SEQ ID NO: 967032
uagugcauuauuagaucac

SEQ ID NO: 967034 - RNA, 19 nt, Artificial Sequence
  Description of Artificial Sequence: Synthetic oligonucleotide
  Sense strand starting at position 1237 of SEQ ID NO: 913956
ugugcuuacuucuaaguga

SEQ ID NO: 967035 - RNA, 19 nt, Artificial Sequence
  Description of Artificial Sequence: Synthetic oligonucleotide
  Antisense strand to SEQ ID NO: 967034
ucacuuagaaguaagcaca

SEQ ID NO: 967036 - RNA, 19 nt, Artificial Sequence
  Description of Artificial Sequence: Synthetic oligonucleotide
  Sense strand starting at position 1516 of SEQ ID NO: 913956
uuuguccugugugaucuaa

SEQ ID NO: 967037 - RNA, 19 nt, Artificial Sequence
  Description of Artificial Sequence: Synthetic oligonucleotide
  Antisense strand to SEQ ID NO: 967036
uuagaucacacaggacaaa

SEQ ID NO: 967038 - RNA, 19 nt, Artificial Sequence
  Description of Artificial Sequence: Synthetic oligonucleotide
  Sense strand starting at position 266 of SEQ ID NO: 913956
augaaugaaugccguggua

SEQ ID NO: 967039 - RNA, 19 nt, Artificial Sequence
  Description of Artificial Sequence: Synthetic oligonucleotide
  Antisense strand to SEQ ID NO: 967038
uaccacggcauucauucau

SEQ ID NO: 967040 - RNA, 19 nt, Artificial Sequence
  Description of Artificial Sequence: Synthetic oligonucleotide
  Sense strand starting at position 1605 of SEQ ID NO: 913956
uuaauacuuugccgcauaa

SEQ ID NO: 967041 - RNA, 19 nt, Artificial Sequence
  Description of Artificial Sequence: Synthetic oligonucleotide
  Antisense strand to SEQ ID NO: 967040
uuaugcggcaaaguauuaa

SEQ ID NO: 967042 - RNA, 19 nt, Artificial Sequence
  Description of Artificial Sequence: Synthetic oligonucleotide
  Sense strand starting at position 2070 of SEQ ID NO: 913956
ggccgugccucugaguuau

SEQ ID NO: 967043 - RNA, 19 nt, Artificial Sequence
  Description of Artificial Sequence: Synthetic oligonucleotide
  Antisense strand to SEQ ID NO: 967042
auaacucagaggcacggcc

SEQ ID NO: 967044 - RNA, 19 nt, Artificial Sequence
  Description of Artificial Sequence: Synthetic oligonucleotide
  Sense strand starting at position 2562 of SEQ ID NO: 913957
ugcugaaucccuuagaaac

SEQ ID NO: 967045 - RNA, 19 nt, Artificial Sequence
  Description of Artificial Sequence: Synthetic oligonucleotide
  Antisense strand to SEQ ID NO: 967044
guuucuaagggauucagca

SEQ ID NO: 967046 - RNA, 19 nt, Artificial Sequence
  Description of Artificial Sequence: Synthetic oligonucleotide
  Sense strand starting at position 1064 of SEQ ID NO: 913957
agaaauagguuauuaagug

SEQ ID NO: 967047 - RNA, 19 nt, Artificial Sequence
  Description of Artificial Sequence: Synthetic oligonucleotide
  Antisense strand to SEQ ID NO: 967046
cacuuaauaaccuauuucu

SEQ ID NO: 967048 - RNA, 19 nt, Artificial Sequence
  Description of Artificial Sequence: Synthetic oligonucleotide
  Sense strand starting at position 1142 of SEQ ID NO: 913957
ggagauccggacggugaaa

SEQ ID NO: 967049 - RNA, 19 nt, Artificial Sequence
  Description of Artificial Sequence: Synthetic oligonucleotide
  Antisense strand to SEQ ID NO: 967048
uuucaccguccggaucucc

SEQ ID NO: 967050 - RNA, 19 nt, Artificial Sequence
  Description of Artificial Sequence: Synthetic oligonucleotide
  Sense strand starting at position 63 of SEQ ID NO: 913957
agauaauacuugcuuuaug

SEQ ID NO: 967051 - RNA, 19 nt, Artificial Sequence
  Description of Artificial Sequence: Synthetic oligonucleotide
  Antisense strand to SEQ ID NO: 967050
cauaaagcaaguauuaucu

SEQ ID NO: 967052 - RNA, 19 nt, Artificial Sequence
  Description of Artificial Sequence: Synthetic oligonucleotide
  Sense strand starting at position 2514 of SEQ ID NO: 913957
ggaggaggcuucccugauc

SEQ ID NO: 967053 - RNA, 19 nt, Artificial Sequence
  Description of Artificial Sequence: Synthetic oligonucleotide
  Antisense strand to SEQ ID NO: 967052
gaucagggaagccuccucc

SEQ ID NO: 967054 - RNA, 19 nt, Artificial Sequence
  Description of Artificial Sequence: Synthetic oligonucleotide
  Sense strand starting at position 1070 of SEQ ID NO: 913957
agguuauuaagugaagcga

SEQ ID NO: 967055 - RNA, 19 nt, Artificial Sequence
  Description of Artificial Sequence: Synthetic oligonucleotide
  Antisense strand to SEQ ID NO: 967054
ucgcuucacuuaauaaccu

SEQ ID NO: 967056 - RNA, 19 nt, Artificial Sequence
  Description of Artificial Sequence: Synthetic oligonucleotide
  Sense strand starting at position 2560 of SEQ ID NO: 913957
uuugcugaaucccuuagaa

SEQ ID NO: 967057 - RNA, 19 nt, Artificial Sequence
  Description of Artificial Sequence: Synthetic oligonucleotide
  Antisense strand to SEQ ID NO: 967056
uucuaagggauucagcaaa

SEQ ID NO: 967058 - RNA, 19 nt, Artificial Sequence
  Description of Artificial Sequence: Synthetic oligonucleotide
  Sense strand starting at position 2323 of SEQ ID NO: 913957
agccgaaucccuugggaag

SEQ ID NO: 967059 - RNA, 19 nt, Artificial Sequence
  Description of Artificial Sequence: Synthetic oligonucleotide
  Antisense strand to SEQ ID NO: 967058
cuucccaagggauucggcu

SEQ ID NO: 967060 - RNA, 19 nt, Artificial Sequence
  Description of Artificial Sequence: Synthetic oligonucleotide
  Sense strand starting at position 2334 of SEQ ID NO: 913957
uugggaagcugcuuaaagu

SEQ ID NO: 967061 - RNA, 19 nt, Artificial Sequence
  Description of Artificial Sequence: Synthetic oligonucleotide
  Antisense strand to SEQ ID NO: 967060
acuuuaagcagcuucccaa

SEQ ID NO: 967062 - RNA, 19 nt, Artificial Sequence
  Description of Artificial Sequence: Synthetic oligonucleotide
  Sense strand starting at position 443 of SEQ ID NO: 913957
cguccuaagaaacguagua

SEQ ID NO: 967063 - RNA, 19 nt, Artificial Sequence
  Description of Artificial Sequence: Synthetic oligonucleotide
  Antisense strand to SEQ ID NO: 967062
uacuacguuucuuaggacg

SEQ ID NO: 967064 - RNA, 19 nt, Artificial Sequence
  Description of Artificial Sequence: Synthetic oligonucleotide
  Sense strand starting at position 1065 of SEQ ID NO: 913957
gaaauagguuauuaaguga

SEQ ID NO: 967065 - RNA, 19 nt, Artificial Sequence
  Description of Artificial Sequence: Synthetic oligonucleotide
  Antisense strand to SEQ ID NO: 967064
ucacuuaauaaccuauuuc

SEQ ID NO: 967066 - RNA, 19 nt, Artificial Sequence
  Description of Artificial Sequence: Synthetic oligonucleotide
  Sense strand starting at position 2974 of SEQ ID NO: 913957
gcucgcgacuugugacagu

SEQ ID NO: 967067 - RNA, 19 nt, Artificial Sequence
  Description of Artificial Sequence: Synthetic oligonucleotide
  Antisense strand to SEQ ID NO: 967066
acugucacaagucgcgagc

SEQ ID NO: 967068 - RNA, 19 nt, Artificial Sequence
  Description of Artificial Sequence: Synthetic oligonucleotide
  Sense strand starting at position 162 of SEQ ID NO: 913958
aaauuaauacgugaaugug

SEQ ID NO: 967069 - RNA, 19 nt, Artificial Sequence
  Description of Artificial Sequence: Synthetic oligonucleotide
  Antisense strand to SEQ ID NO: 967068
cacauucacguauuaauuu

SEQ ID NO: 967070 - RNA, 19 nt, Artificial Sequence
  Description of Artificial Sequence: Synthetic oligonucleotide
  Sense strand starting at position 433 of SEQ ID NO: 913958
gguaaagcucuuuacagag

SEQ ID NO: 967071 - RNA, 19 nt, Artificial Sequence
  Description of Artificial Sequence: Synthetic oligonucleotide
  Antisense strand to SEQ ID NO: 967070
cucuguaaagagcuuuacc

SEQ ID NO: 967072 - RNA, 19 nt, Artificial Sequence
  Description of Artificial Sequence: Synthetic oligonucleotide
  Sense strand starting at position 2464 of SEQ ID NO: 913958
ggaagugaucgcgcuguac

SEQ ID NO: 967073 - RNA, 19 nt, Artificial Sequence
  Description of Artificial Sequence: Synthetic oligonucleotide
  Antisense strand to SEQ ID NO: 967072
guacagcgcgaucacuucc

SEQ ID NO: 967074 - RNA, 19 nt, Artificial Sequence
  Description of Artificial Sequence: Synthetic oligonucleotide
  Sense strand starting at position 19 of SEQ ID NO: 913958
cucucuugggaucauguau

SEQ ID NO: 967075 - RNA, 19 nt, Artificial Sequence
  Description of Artificial Sequence: Synthetic oligonucleotide
  Antisense strand to SEQ ID NO: 967074
auacaugaucccaagagag

SEQ ID NO: 967076 - RNA, 19 nt, Artificial Sequence
  Description of Artificial Sequence: Synthetic oligonucleotide
  Sense strand starting at position 297 of SEQ ID NO: 913958
ggaauaaccuacuuacugu

SEQ ID NO: 967077 - RNA, 19 nt, Artificial Sequence
  Description of Artificial Sequence: Synthetic oligonucleotide
  Antisense strand to SEQ ID NO: 967076
acaguaaguagguuauucc

SEQ ID NO: 967078 - RNA, 19 nt, Artificial Sequence
  Description of Artificial Sequence: Synthetic oligonucleotide
  Sense strand starting at position 1855 of SEQ ID NO: 913958
gguugcguucgccugggaa

SEQ ID NO: 967079 - RNA, 19 nt, Artificial Sequence
  Description of Artificial Sequence: Synthetic oligonucleotide
  Antisense strand to SEQ ID NO: 967078
uucccaggcgaacgcaacc

SEQ ID NO: 967080 - RNA, 19 nt, Artificial Sequence
  Description of Artificial Sequence: Synthetic oligonucleotide
  Sense strand starting at position 95 of SEQ ID NO: 913958
gguagcuaugaucaucuua

SEQ ID NO: 967081 - RNA, 19 nt, Artificial Sequence
  Description of Artificial Sequence: Synthetic oligonucleotide
  Antisense strand to SEQ ID NO: 967080
uaagaugaucauagcuacc

SEQ ID NO: 967082 - RNA, 19 nt, Artificial Sequence
  Description of Artificial Sequence: Synthetic oligonucleotide
  Sense strand starting at position 432 of SEQ ID NO: 913958
ggguaaagcucuuuacaga

SEQ ID NO: 967083 - RNA, 19 nt, Artificial Sequence
  Description of Artificial Sequence: Synthetic oligonucleotide
  Antisense strand to SEQ ID NO: 967082
ucuguaaagagcuuuaccc

SEQ ID NO: 967084 - RNA, 19 nt, Artificial Sequence
  Description of Artificial Sequence: Synthetic oligonucleotide
  Sense strand starting at position 473 of SEQ ID NO: 913958
cagcucugccagggaaaga

SEQ ID NO: 967085 - RNA, 19 nt, Artificial Sequence
  Description of Artificial Sequence: Synthetic oligonucleotide
  Antisense strand to SEQ ID NO: 967084
ucuuucccuggcagagcug

SEQ ID NO: 967086 - RNA, 19 nt, Artificial Sequence
  Description of Artificial Sequence: Synthetic oligonucleotide
  Sense strand starting at position 35 of SEQ ID NO: 913958
uauuuaggcuuggagauaa

SEQ ID NO: 967087 - RNA, 19 nt, Artificial Sequence
  Description of Artificial Sequence: Synthetic oligonucleotide
  Antisense strand to SEQ ID NO: 967086
uuaucuccaagccuaaaua

SEQ ID NO: 967088 - RNA, 19 nt, Artificial Sequence
  Description of Artificial Sequence: Synthetic oligonucleotide
  Sense strand starting at position 1082 of SEQ ID NO: 913958
guggcuuccagagaucagu

SEQ ID NO: 967089 - RNA, 19 nt, Artificial Sequence
  Description of Artificial Sequence: Synthetic oligonucleotide
  Antisense strand to SEQ ID NO: 967088
acugaucucuggaagccac

SEQ ID NO: 967090 - RNA, 19 nt, Artificial Sequence
  Description of Artificial Sequence: Synthetic oligonucleotide
  Sense strand starting at position 417 of SEQ ID NO: 913958
gaucguaucaccgaagggu

SEQ ID NO: 967091 - RNA, 19 nt, Artificial Sequence
  Description of Artificial Sequence: Synthetic oligonucleotide
  Antisense strand to SEQ ID NO: 967090
acccuucggugauacgauc

SEQ ID NO: 967092 - RNA, 19 nt, Artificial Sequence
  Description of Artificial Sequence: Synthetic oligonucleotide
  Sense strand starting at position 165 of SEQ ID NO: 913958
uuaauacgugaaugugaau

SEQ ID NO: 967093 - RNA, 19 nt, Artificial Sequence
  Description of Artificial Sequence: Synthetic oligonucleotide
  Antisense strand to SEQ ID NO: 967092
auucacauucacguauuaa

SEQ ID NO: 967094 - RNA, 19 nt, Artificial Sequence
  Description of Artificial Sequence: Synthetic oligonucleotide
  Sense strand starting at position 176 of SEQ ID NO: 913958
augugaauauguucucuca

SEQ ID NO: 967095 - RNA, 19 nt, Artificial Sequence
  Description of Artificial Sequence: Synthetic oligonucleotide
  Antisense strand to SEQ ID NO: 967094
ugagagaacauauucacau

SEQ ID NO: 967096 - RNA, 19 nt, Artificial Sequence
  Description of Artificial Sequence: Synthetic oligonucleotide
  Sense strand starting at position 420 of SEQ ID NO: 913958
cguaucaccgaaggguaaa

SEQ ID NO: 967097 - RNA, 19 nt, Artificial Sequence
  Description of Artificial Sequence: Synthetic oligonucleotide
  Antisense strand to SEQ ID NO: 967096
uuuacccuucggugauacg

SEQ ID NO: 967098 - RNA, 19 nt, Artificial Sequence
  Description of Artificial Sequence: Synthetic oligonucleotide
  Sense strand starting at position 178 of SEQ ID NO: 913958
gugaauauguucucucauc

SEQ ID NO: 967099 - RNA, 19 nt, Artificial Sequence
  Description of Artificial Sequence: Synthetic oligonucleotide
  Antisense strand to SEQ ID NO: 967098
gaugagagaacauauucac

SEQ ID NO: 967100 - RNA, 19 nt, Artificial Sequence
  Description of Artificial Sequence: Synthetic oligonucleotide
  Sense strand starting at position 605 of SEQ ID NO: 913958
cuauuaacccgagguugca

SEQ ID NO: 967101 - RNA, 19 nt, Artificial Sequence
  Description of Artificial Sequence: Synthetic oligonucleotide
  Antisense strand to SEQ ID NO: 967100
ugcaaccucggguuaauag

SEQ ID NO: 967102 - RNA, 19 nt, Artificial Sequence
  Description of Artificial Sequence: Synthetic oligonucleotide
  Sense strand starting at position 3734 of SEQ ID NO: 913958
ucuaguggcccgcaagauu

SEQ ID NO: 967103 - RNA, 19 nt, Artificial Sequence
  Description of Artificial Sequence: Synthetic oligonucleotide
  Antisense strand to SEQ ID NO: 967102
aaucuugcgggccacuaga

SEQ ID NO: 967104 - RNA, 19 nt, Artificial Sequence
  Description of Artificial Sequence: Synthetic oligonucleotide
  Sense strand starting at position 186 of SEQ ID NO: 913958
guucucucaucucuagcua

SEQ ID NO: 967105 - RNA, 19 nt, Artificial Sequence
  Description of Artificial Sequence: Synthetic oligonucleotide
  Antisense strand to SEQ ID NO: 967104
uagcuagagaugagagaac

SEQ ID NO: 967106 - RNA, 19 nt, Artificial Sequence
  Description of Artificial Sequence: Synthetic oligonucleotide
  Sense strand starting at position 1113 of SEQ ID NO: 913958
gccaaagguuucuugucuu

SEQ ID NO: 967107 - RNA, 19 nt, Artificial Sequence
  Description of Artificial Sequence: Synthetic oligonucleotide
  Antisense strand to SEQ ID NO: 967106
aagacaagaaaccuuuggc

SEQ ID NO: 967108 - RNA, 19 nt, Artificial Sequence
  Description of Artificial Sequence: Synthetic oligonucleotide
  Sense strand starting at position 2563 of SEQ ID NO: 913958
ucugccagguuccauuuaa

SEQ ID NO: 967109 - RNA, 19 nt, Artificial Sequence
  Description of Artificial Sequence: Synthetic oligonucleotide
  Antisense strand to SEQ ID NO: 967108
uuaaauggaaccuggcaga

SEQ ID NO: 967110 - RNA, 19 nt, Artificial Sequence
  Description of Artificial Sequence: Synthetic oligonucleotide
  Sense strand starting at position 2400 of SEQ ID NO: 913958
ccguuucuuccucgacauu

SEQ ID NO: 967111 - RNA, 19 nt, Artificial Sequence
  Description of Artificial Sequence: Synthetic oligonucleotide
  Antisense strand to SEQ ID NO: 967110
aaugucgaggaagaaacgg

SEQ ID NO: 967112 - RNA, 19 nt, Artificial Sequence
  Description of Artificial Sequence: Synthetic oligonucleotide
  Sense strand starting at position 2398 of SEQ ID NO: 913958
agccguuucuuccucgaca

SEQ ID NO: 967113 - RNA, 19 nt, Artificial Sequence
  Description of Artificial Sequence: Synthetic oligonucleotide
  Antisense strand to SEQ ID NO: 967112
ugucgaggaagaaacggcu

SEQ ID NO: 967114 - RNA, 19 nt, Artificial Sequence
  Description of Artificial Sequence: Synthetic oligonucleotide
  Sense strand starting at position 157 of SEQ ID NO: 913958
cccugaaauuaauacguga

SEQ ID NO: 967115 - RNA, 19 nt, Artificial Sequence
  Description of Artificial Sequence: Synthetic oligonucleotide
  Antisense strand to SEQ ID NO: 967114
ucacguauuaauuucaggg

SEQ ID NO: 967116 - RNA, 19 nt, Artificial Sequence
  Description of Artificial Sequence: Synthetic oligonucleotide
  Sense strand starting at position 282 of SEQ ID NO: 913958
cugagauauucucgaggaa

SEQ ID NO: 967117 - RNA, 19 nt, Artificial Sequence
  Description of Artificial Sequence: Synthetic oligonucleotide
  Antisense strand to SEQ ID NO: 967116
uuccucgagaauaucucag

SEQ ID NO: 967118 - RNA, 19 nt, Artificial Sequence
  Description of Artificial Sequence: Synthetic oligonucleotide
  Sense strand starting at position 213 of SEQ ID NO: 913958
agucuucuaugucagggaa

SEQ ID NO: 967119 - RNA, 19 nt, Artificial Sequence
  Description of Artificial Sequence: Synthetic oligonucleotide
  Antisense strand to SEQ ID NO: 967118
uucccugacauagaagacu

SEQ ID NO: 967120 - RNA, 19 nt, Artificial Sequence
  Description of Artificial Sequence: Synthetic oligonucleotide
  Sense strand starting at position 2399 of SEQ ID NO: 913958
gccguuucuuccucgacau

SEQ ID NO: 967121 - RNA, 19 nt, Artificial Sequence
  Description of Artificial Sequence: Synthetic oligonucleotide
  Antisense strand to SEQ ID NO: 967120
augucgaggaagaaacggc

SEQ ID NO: 967122 - RNA, 19 nt, Artificial Sequence
  Description of Artificial Sequence: Synthetic oligonucleotide
  Sense strand starting at position 413 of SEQ ID NO: 913958
ucaagaucguaucaccgaa

SEQ ID NO: 967123 - RNA, 19 nt, Artificial Sequence
  Description of Artificial Sequence: Synthetic oligonucleotide
  Antisense strand to SEQ ID NO: 967122
uucggugauacgaucuuga

SEQ ID NO: 967124 - RNA, 19 nt, Artificial Sequence
  Description of Artificial Sequence: Synthetic oligonucleotide
  Sense strand starting at position 1179 of SEQ ID NO: 913958
gccuuugacugagaagcca

SEQ ID NO: 967125 - RNA, 19 nt, Artificial Sequence
  Description of Artificial Sequence: Synthetic oligonucleotide
  Antisense strand to SEQ ID NO: 967124
uggcuucucagucaaaggc

SEQ ID NO: 967126 - RNA, 19 nt, Artificial Sequence
  Description of Artificial Sequence: Synthetic oligonucleotide
  Sense strand starting at position 2605 of SEQ ID NO: 913958
cacugaucuuccggaugga

SEQ ID NO: 967127 - RNA, 19 nt, Artificial Sequence
  Description of Artificial Sequence: Synthetic oligonucleotide
  Antisense strand to SEQ ID NO: 967126
uccauccggaagaucagug

SEQ ID NO: 967128 - RNA, 19 nt, Artificial Sequence
  Description of Artificial Sequence: Synthetic oligonucleotide
  Sense strand starting at position 208 of SEQ ID NO: 913958
gcaauagucuucuauguca

SEQ ID NO: 967129 - RNA, 19 nt, Artificial Sequence
  Description of Artificial Sequence: Synthetic oligonucleotide
  Antisense strand to SEQ ID NO: 967128
ugacauagaagacuauugc

SEQ ID NO: 967130 - RNA, 19 nt, Artificial Sequence
  Description of Artificial Sequence: Synthetic oligonucleotide
  Sense strand starting at position 324 of SEQ ID NO: 913958
guaaaucuguggcagcuaa

SEQ ID NO: 967131 - RNA, 19 nt, Artificial Sequence
  Description of Artificial Sequence: Synthetic oligonucleotide
  Antisense strand to SEQ ID NO: 967130
uuagcugccacagauuuac

SEQ ID NO: 967132 - RNA, 19 nt, Artificial Sequence
  Description of Artificial Sequence: Synthetic oligonucleotide
  Sense strand starting at position 594 of SEQ ID NO: 913958
gcagcugucuccuauuaac

SEQ ID NO: 967133 - RNA, 19 nt, Artificial Sequence
  Description of Artificial Sequence: Synthetic oligonucleotide
  Antisense strand to SEQ ID NO: 967132
guuaauaggagacagcugc

SEQ ID NO: 967134 - RNA, 19 nt, Artificial Sequence
  Description of Artificial Sequence: Synthetic oligonucleotide
  Sense strand starting at position 15 of SEQ ID NO: 913958
acgccucucuugggaucau

SEQ ID NO: 967135 - RNA, 19 nt, Artificial Sequence
  Description of Artificial Sequence: Synthetic oligonucleotide
  Antisense strand to SEQ ID NO: 967134
augaucccaagagaggcgu

SEQ ID NO: 967136 - RNA, 19 nt, Artificial Sequence
  Description of Artificial Sequence: Synthetic oligonucleotide
  Sense strand starting at position 758 of SEQ ID NO: 913958
ccgcgauucugccaaugua

SEQ ID NO: 967137 - RNA, 19 nt, Artificial Sequence
  Description of Artificial Sequence: Synthetic oligonucleotide
  Antisense strand to SEQ ID NO: 967136
uacauuggcagaaucgcgg

SEQ ID NO: 967138 - RNA, 19 nt, Artificial Sequence
  Description of Artificial Sequence: Synthetic oligonucleotide
  Sense strand starting at position 2463 of SEQ ID NO: 913958
aggaagugaucgcgcugua

SEQ ID NO: 967139 - RNA, 19 nt, Artificial Sequence
  Description of Artificial Sequence: Synthetic oligonucleotide
  Antisense strand to SEQ ID NO: 967138
uacagcgcgaucacuuccu

SEQ ID NO: 967140 - RNA, 19 nt, Artificial Sequence
  Description of Artificial Sequence: Synthetic oligonucleotide
  Sense strand starting at position 1357 of SEQ ID NO: 913959
ggaagugaucgcgcuguac

SEQ ID NO: 967141 - RNA, 19 nt, Artificial Sequence
  Description of Artificial Sequence: Synthetic oligonucleotide
  Antisense strand to SEQ ID NO: 967140
guacagcgcgaucacuucc

SEQ ID NO: 967142 - RNA, 19 nt, Artificial Sequence
  Description of Artificial Sequence: Synthetic oligonucleotide
  Sense strand starting at position 3533 of SEQ ID NO: 913959
cucccuuggccagaauuaa

SEQ ID NO: 967143 - RNA, 19 nt, Artificial Sequence
  Description of Artificial Sequence: Synthetic oligonucleotide
  Antisense strand to SEQ ID NO: 967142
uuaauucuggccaagggag

SEQ ID NO: 967144 - RNA, 19 nt, Artificial Sequence
  Description of Artificial Sequence: Synthetic oligonucleotide
  Sense strand starting at position 3899 of SEQ ID NO: 913959
gcaaauuacauguggagag

SEQ ID NO: 967145 - RNA, 19 nt, Artificial Sequence
  Description of Artificial Sequence: Synthetic oligonucleotide
  Antisense strand to SEQ ID NO: 967144
cucuccacauguaauuugc

SEQ ID NO: 967146 - RNA, 19 nt, Artificial Sequence
  Description of Artificial Sequence: Synthetic oligonucleotide
  Sense strand starting at position 3290 of SEQ ID NO: 913959
guguuuguugaacagauaa

SEQ ID NO: 967147 - RNA, 19 nt, Artificial Sequence
  Description of Artificial Sequence: Synthetic oligonucleotide
  Antisense strand to SEQ ID NO: 967146
uuaucuguucaacaaacac

SEQ ID NO: 967148 - RNA, 19 nt, Artificial Sequence
  Description of Artificial Sequence: Synthetic oligonucleotide
  Sense strand starting at position 748 of SEQ ID NO: 913959
gguugcguucgccugggaa

SEQ ID NO: 967149 - RNA, 19 nt, Artificial Sequence
  Description of Artificial Sequence: Synthetic oligonucleotide
  Antisense strand to SEQ ID NO: 967148
uucccaggcgaacgcaacc

SEQ ID NO: 967150 - RNA, 19 nt, Artificial Sequence
  Description of Artificial Sequence: Synthetic oligonucleotide
  Sense strand starting at position 3759 of SEQ ID NO: 913959
ggagaauccuggguugggu

SEQ ID NO: 967151 - RNA, 19 nt, Artificial Sequence
  Description of Artificial Sequence: Synthetic oligonucleotide
  Antisense strand to SEQ ID NO: 967150
acccaacccaggauucucc

SEQ ID NO: 967152 - RNA, 19 nt, Artificial Sequence
  Description of Artificial Sequence: Synthetic oligonucleotide
  Sense strand starting at position 3326 of SEQ ID NO: 913959
uaagaagaggccuguucua

SEQ ID NO: 967153 - RNA, 19 nt, Artificial Sequence
  Description of Artificial Sequence: Synthetic oligonucleotide
  Antisense strand to SEQ ID NO: 967152
uagaacaggccucuucuua

SEQ ID NO: 967154 - RNA, 19 nt, Artificial Sequence
  Description of Artificial Sequence: Synthetic oligonucleotide
  Sense strand starting at position 3679 of SEQ ID NO: 913959
uuacucugauaagugcaaa

SEQ ID NO: 967155 - RNA, 19 nt, Artificial Sequence
  Description of Artificial Sequence: Synthetic oligonucleotide
  Antisense strand to SEQ ID NO: 967154
uuugcacuuaucagaguaa

SEQ ID NO: 967156 - RNA, 19 nt, Artificial Sequence
  Description of Artificial Sequence: Synthetic oligonucleotide
  Sense strand starting at position 3569 of SEQ ID NO: 913959
ccuguugguccucagaauc

SEQ ID NO: 967157 - RNA, 19 nt, Artificial Sequence
  Description of Artificial Sequence: Synthetic oligonucleotide
  Antisense strand to SEQ ID NO: 967156
gauucugaggaccaacagg

SEQ ID NO: 967158 - RNA, 19 nt, Artificial Sequence
  Description of Artificial Sequence: Synthetic oligonucleotide
  Sense strand starting at position 3580 of SEQ ID NO: 913959
ucagaaucaccuggccuau

SEQ ID NO: 967159 - RNA, 19 nt, Artificial Sequence
  Description of Artificial Sequence: Synthetic oligonucleotide
  Antisense strand to SEQ ID NO: 967158
auaggccaggugauucuga

SEQ ID NO: 967160 - RNA, 19 nt, Artificial Sequence
  Description of Artificial Sequence: Synthetic oligonucleotide
  Sense strand starting at position 3216 of SEQ ID NO: 913959
agugcucacccacgaagaa

SEQ ID NO: 967161 - RNA, 19 nt, Artificial Sequence
  Description of Artificial Sequence: Synthetic oligonucleotide
  Antisense strand to SEQ ID NO: 967160
uucuucgugggugagcacu

SEQ ID NO: 967162 - RNA, 19 nt, Artificial Sequence
  Description of Artificial Sequence: Synthetic oligonucleotide
  Sense strand starting at position 3846 of SEQ ID NO: 913959
ggagcugcgcuggagaaua

SEQ ID NO: 967163 - RNA, 19 nt, Artificial Sequence
  Description of Artificial Sequence: Synthetic oligonucleotide
  Antisense strand to SEQ ID NO: 967162
uauucuccagcgcagcucc

SEQ ID NO: 967164 - RNA, 19 nt, Artificial Sequence
  Description of Artificial Sequence: Synthetic oligonucleotide
  Sense strand starting at position 3568 of SEQ ID NO: 913959
cccuguugguccucagaau

SEQ ID NO: 967165 - RNA, 19 nt, Artificial Sequence
  Description of Artificial Sequence: Synthetic oligonucleotide
  Antisense strand to SEQ ID NO: 967164
auucugaggaccaacaggg

SEQ ID NO: 967166 - RNA, 19 nt, Artificial Sequence
  Description of Artificial Sequence: Synthetic oligonucleotide
  Sense strand starting at position 3624 of SEQ ID NO: 913959
uccaauuucugggagcuca

SEQ ID NO: 967167 - RNA, 19 nt, Artificial Sequence
  Description of Artificial Sequence: Synthetic oligonucleotide
  Antisense strand to SEQ ID NO: 967166
ugagcucccagaaauugga

SEQ ID NO: 967168 - RNA, 19 nt, Artificial Sequence
  Description of Artificial Sequence: Synthetic oligonucleotide
  Sense strand starting at position 2627 of SEQ ID NO: 913959
ucuaguggcccgcaagauu

SEQ ID NO: 967169 - RNA, 19 nt, Artificial Sequence
  Description of Artificial Sequence: Synthetic oligonucleotide
  Antisense strand to SEQ ID NO: 967168
aaucuugcgggccacuaga

SEQ ID NO: 967170 - RNA, 19 nt, Artificial Sequence
  Description of Artificial Sequence: Synthetic oligonucleotide
  Sense strand starting at position 3451 of SEQ ID NO: 913959
ggcucaucccucugagcau

SEQ ID NO: 967171 - RNA, 19 nt, Artificial Sequence
  Description of Artificial Sequence: Synthetic oligonucleotide
  Antisense strand to SEQ ID NO: 967170
augcucagagggaugagcc

SEQ ID NO: 967172 - RNA, 19 nt, Artificial Sequence
  Description of Artificial Sequence: Synthetic oligonucleotide
  Sense strand starting at position 6 of SEQ ID NO: 913959
gccaaagguuucuugucuu

SEQ ID NO: 967173 - RNA, 19 nt, Artificial Sequence
  Description of Artificial Sequence: Synthetic oligonucleotide
  Antisense strand to SEQ ID NO: 967172
aagacaagaaaccuuuggc

SEQ ID NO: 967174 - RNA, 19 nt, Artificial Sequence
  Description of Artificial Sequence: Synthetic oligonucleotide
  Sense strand starting at position 1456 of SEQ ID NO: 913959
ucugccagguuccauuuaa

SEQ ID NO: 967175 - RNA, 19 nt, Artificial Sequence
  Description of Artificial Sequence: Synthetic oligonucleotide
  Antisense strand to SEQ ID NO: 967174
uuaaauggaaccuggcaga

SEQ ID NO: 967176 - RNA, 19 nt, Artificial Sequence
  Description of Artificial Sequence: Synthetic oligonucleotide
  Sense strand starting at position 3622 of SEQ ID NO: 913959
aguccaauuucugggagcu

SEQ ID NO: 967177 - RNA, 19 nt, Artificial Sequence
  Description of Artificial Sequence: Synthetic oligonucleotide
  Antisense strand to SEQ ID NO: 967176
agcucccagaaauuggacu

SEQ ID NO: 967178 - RNA, 19 nt, Artificial Sequence
  Description of Artificial Sequence: Synthetic oligonucleotide
  Sense strand starting at position 1293 of SEQ ID NO: 913959
ccguuucuuccucgacauu

SEQ ID NO: 967179 - RNA, 19 nt, Artificial Sequence
  Description of Artificial Sequence: Synthetic oligonucleotide
  Antisense strand to SEQ ID NO: 967178
aaugucgaggaagaaacgg

SEQ ID NO: 967180 - RNA, 19 nt, Artificial Sequence
  Description of Artificial Sequence: Synthetic oligonucleotide
  Sense strand starting at position 1291 of SEQ ID NO: 913959
agccguuucuuccucgaca

SEQ ID NO: 967181 - RNA, 19 nt, Artificial Sequence
  Description of Artificial Sequence: Synthetic oligonucleotide
  Antisense strand to SEQ ID NO: 967180
ugucgaggaagaaacggcu

SEQ ID NO: 967182 - RNA, 19 nt, Artificial Sequence
  Description of Artificial Sequence: Synthetic oligonucleotide
  Sense strand starting at position 1292 of SEQ ID NO: 913959
gccguuucuuccucgacau

SEQ ID NO: 967183 - RNA, 19 nt, Artificial Sequence
  Description of Artificial Sequence: Synthetic oligonucleotide
  Antisense strand to SEQ ID NO: 967182
augucgaggaagaaacggc

SEQ ID NO: 967184 - RNA, 19 nt, Artificial Sequence
  Description of Artificial Sequence: Synthetic oligonucleotide
  Sense strand starting at position 3674 of SEQ ID NO: 913959
cuagguuacucugauaagu

SEQ ID NO: 967185 - RNA, 19 nt, Artificial Sequence
  Description of Artificial Sequence: Synthetic oligonucleotide
  Antisense strand to SEQ ID NO: 967184
acuuaucagaguaaccuag

SEQ ID NO: 967186 - RNA, 19 nt, Artificial Sequence
  Description of Artificial Sequence: Synthetic oligonucleotide
  Sense strand starting at position 72 of SEQ ID NO: 913959
gccuuugacugagaagcca

SEQ ID NO: 967187 - RNA, 19 nt, Artificial Sequence
  Description of Artificial Sequence: Synthetic oligonucleotide
  Antisense strand to SEQ ID NO: 967186
uggcuucucagucaaaggc

SEQ ID NO: 967188 - RNA, 19 nt, Artificial Sequence
  Description of Artificial Sequence: Synthetic oligonucleotide
  Sense strand starting at position 1498 of SEQ ID NO: 913959
cacugaucuuccggaugga

SEQ ID NO: 967189 - RNA, 19 nt, Artificial Sequence
  Description of Artificial Sequence: Synthetic oligonucleotide
  Antisense strand to SEQ ID NO: 967188
uccauccggaagaucagug

SEQ ID NO: 967190 - RNA, 19 nt, Artificial Sequence
  Description of Artificial Sequence: Synthetic oligonucleotide
  Sense strand starting at position 3516 of SEQ ID NO: 913959
gcuggauggucugaucucu

SEQ ID NO: 967191 - RNA, 19 nt, Artificial Sequence
  Description of Artificial Sequence: Synthetic oligonucleotide
  Antisense strand to SEQ ID NO: 967190
agagaucagaccauccagc

SEQ ID NO: 967192 - RNA, 19 nt, Artificial Sequence
  Description of Artificial Sequence: Synthetic oligonucleotide
  Sense strand starting at position 3075 of SEQ ID NO: 913959
agcuccacguacugaaaua

SEQ ID NO: 967193 - RNA, 19 nt, Artificial Sequence
  Description of Artificial Sequence: Synthetic oligonucleotide
  Antisense strand to SEQ ID NO: 967192
uauuucaguacguggagcu

SEQ ID NO: 967194 - RNA, 19 nt, Artificial Sequence
  Description of Artificial Sequence: Synthetic oligonucleotide
  Sense strand starting at position 3286 of SEQ ID NO: 913959
guggguguuuguugaacag

SEQ ID NO: 967195 - RNA, 19 nt, Artificial Sequence
  Description of Artificial Sequence: Synthetic oligonucleotide
  Antisense strand to SEQ ID NO: 967194
cuguucaacaaacacccac

SEQ ID NO: 967196 - RNA, 19 nt, Artificial Sequence
  Description of Artificial Sequence: Synthetic oligonucleotide
  Sense strand starting at position 1356 of SEQ ID NO: 913959
aggaagugaucgcgcugua

SEQ ID NO: 967197 - RNA, 19 nt, Artificial Sequence
  Description of Artificial Sequence: Synthetic oligonucleotide
  Antisense strand to SEQ ID NO: 967196
uacagcgcgaucacuuccu

SEQ ID NO: 967198 - RNA, 19 nt, Artificial Sequence
  Description of Artificial Sequence: Synthetic oligonucleotide
  Sense strand starting at position 3737 of SEQ ID NO: 913960
uggugaaaccuccacucua

SEQ ID NO: 967199 - RNA, 19 nt, Artificial Sequence
  Description of Artificial Sequence: Synthetic oligonucleotide
  Antisense strand to SEQ ID NO: 967198
uagaguggagguuucacca

SEQ ID NO: 967200 - RNA, 19 nt, Artificial Sequence
  Description of Artificial Sequence: Synthetic oligonucleotide
  Sense strand starting at position 2763 of SEQ ID NO: 913960
cguuaagucagugcuuucu

SEQ ID NO: 967201 - RNA, 19 nt, Artificial Sequence
  Description of Artificial Sequence: Synthetic oligonucleotide
  Antisense strand to SEQ ID NO: 967200
agaaagcacugacuuaacg

SEQ ID NO: 967202 - RNA, 19 nt, Artificial Sequence
  Description of Artificial Sequence: Synthetic oligonucleotide
  Sense strand starting at position 839 of SEQ ID NO: 913960
cuacuuuauuggguagaag

SEQ ID NO: 967203 - RNA, 19 nt, Artificial Sequence
  Description of Artificial Sequence: Synthetic oligonucleotide
  Antisense strand to SEQ ID NO: 967202
cuucuacccaauaaaguag

SEQ ID NO: 967204 - RNA, 19 nt, Artificial Sequence
  Description of Artificial Sequence: Synthetic oligonucleotide
  Sense strand starting at position 2657 of SEQ ID NO: 913960
cuaguuuacacguaaggaa

SEQ ID NO: 967205 - RNA, 19 nt, Artificial Sequence
  Description of Artificial Sequence: Synthetic oligonucleotide
  Antisense strand to SEQ ID NO: 967204
uuccuuacguguaaacuag

SEQ ID NO: 967206 - RNA, 19 nt, Artificial Sequence
  Description of Artificial Sequence: Synthetic oligonucleotide
  Sense strand starting at position 3901 of SEQ ID NO: 913960
guguucugagugcuuugca

SEQ ID NO: 967207 - RNA, 19 nt, Artificial Sequence
  Description of Artificial Sequence: Synthetic oligonucleotide
  Antisense strand to SEQ ID NO: 967206
ugcaaagcacucagaacac

SEQ ID NO: 967208 - RNA, 19 nt, Artificial Sequence
  Description of Artificial Sequence: Synthetic oligonucleotide
  Sense strand starting at position 3684 of SEQ ID NO: 913960
ccaagacuggcggaucauu

SEQ ID NO: 967209 - RNA, 19 nt, Artificial Sequence
  Description of Artificial Sequence: Synthetic oligonucleotide
  Antisense strand to SEQ ID NO: 967208
aaugauccgccagucuugg

SEQ ID NO: 967210 - RNA, 19 nt, Artificial Sequence
  Description of Artificial Sequence: Synthetic oligonucleotide
  Sense strand starting at position 160 of SEQ ID NO: 913960
guggacuagucauugggaa

SEQ ID NO: 967211 - RNA, 19 nt, Artificial Sequence
  Description of Artificial Sequence: Synthetic oligonucleotide
  Antisense strand to SEQ ID NO: 967210
uucccaaugacuaguccac

SEQ ID NO: 967212 - RNA, 19 nt, Artificial Sequence
  Description of Artificial Sequence: Synthetic oligonucleotide
  Sense strand starting at position 435 of SEQ ID NO: 913960
aucaaugacccuugugaau

SEQ ID NO: 967213 - RNA, 19 nt, Artificial Sequence
  Description of Artificial Sequence: Synthetic oligonucleotide
  Antisense strand to SEQ ID NO: 967212
auucacaagggucauugau

SEQ ID NO: 967214 - RNA, 19 nt, Artificial Sequence
  Description of Artificial Sequence: Synthetic oligonucleotide
  Sense strand starting at position 2069 of SEQ ID NO: 913960
gcgcaaguucucgcccaaa

SEQ ID NO: 967215 - RNA, 19 nt, Artificial Sequence
  Description of Artificial Sequence: Synthetic oligonucleotide
  Antisense strand to SEQ ID NO: 967214
uuugggcgagaacuugcgc

SEQ ID NO: 967216 - RNA, 19 nt, Artificial Sequence
  Description of Artificial Sequence: Synthetic oligonucleotide
  Sense strand starting at position 558 of SEQ ID NO: 913960
agggaaugcuuccuuauua

SEQ ID NO: 967217 - RNA, 19 nt, Artificial Sequence
  Description of Artificial Sequence: Synthetic oligonucleotide
  Antisense strand to SEQ ID NO: 967216
uaauaaggaagcauucccu

SEQ ID NO: 967218 - RNA, 19 nt, Artificial Sequence
  Description of Artificial Sequence: Synthetic oligonucleotide
  Sense strand starting at position 2587 of SEQ ID NO: 913960
ggaagugcucgguaaauag

SEQ ID NO: 967219 - RNA, 19 nt, Artificial Sequence
  Description of Artificial Sequence: Synthetic oligonucleotide
  Antisense strand to SEQ ID NO: 967218
cuauuuaccgagcacuucc

SEQ ID NO: 967220 - RNA, 19 nt, Artificial Sequence
  Description of Artificial Sequence: Synthetic oligonucleotide
  Sense strand starting at position 559 of SEQ ID NO: 913960
gggaaugcuuccuuauuag

SEQ ID NO: 967221 - RNA, 19 nt, Artificial Sequence
  Description of Artificial Sequence: Synthetic oligonucleotide
  Antisense strand to SEQ ID NO: 967220
cuaauaaggaagcauuccc

SEQ ID NO: 967222 - RNA, 19 nt, Artificial Sequence
  Description of Artificial Sequence: Synthetic oligonucleotide
  Sense strand starting at position 810 of SEQ ID NO: 913960
uuggaaagaugagaaagau

SEQ ID NO: 967223 - RNA, 19 nt, Artificial Sequence
  Description of Artificial Sequence: Synthetic oligonucleotide
  Antisense strand to SEQ ID NO: 967222
aucuuucucaucuuuccaa

SEQ ID NO: 967224 - RNA, 19 nt, Artificial Sequence
  Description of Artificial Sequence: Synthetic oligonucleotide
  Sense strand starting at position 2421 of SEQ ID NO: 913960
uuaaguggcccuuaucacu

SEQ ID NO: 967225 - RNA, 19 nt, Artificial Sequence
  Description of Artificial Sequence: Synthetic oligonucleotide
  Antisense strand to SEQ ID NO: 967224
agugauaagggccacuuaa

SEQ ID NO: 967226 - RNA, 19 nt, Artificial Sequence
  Description of Artificial Sequence: Synthetic oligonucleotide
  Sense strand starting at position 3621 of SEQ ID NO: 913960
auguauuaguagccaacaa

SEQ ID NO: 967227 - RNA, 19 nt, Artificial Sequence
  Description of Artificial Sequence: Synthetic oligonucleotide
  Antisense strand to SEQ ID NO: 967226
uuguuggcuacuaauacau

SEQ ID NO: 967228 - RNA, 19 nt, Artificial Sequence
  Description of Artificial Sequence: Synthetic oligonucleotide
  Sense strand starting at position 1167 of SEQ ID NO: 913960
agaccuggccgccauagau

SEQ ID NO: 967229 - RNA, 19 nt, Artificial Sequence
  Description of Artificial Sequence: Synthetic oligonucleotide
  Antisense strand to SEQ ID NO: 967228
aucuauggcggccaggucu

SEQ ID NO: 967230 - RNA, 19 nt, Artificial Sequence
  Description of Artificial Sequence: Synthetic oligonucleotide
  Sense strand starting at position 1071 of SEQ ID NO: 913960
uugagaggccuugguuaca

SEQ ID NO: 967231 - RNA, 19 nt, Artificial Sequence
  Description of Artificial Sequence: Synthetic oligonucleotide
  Antisense strand to SEQ ID NO: 967230
uguaaccaaggccucucaa

SEQ ID NO: 967232 - RNA, 19 nt, Artificial Sequence
  Description of Artificial Sequence: Synthetic oligonucleotide
  Sense strand starting at position 2417 of SEQ ID NO: 913960
cagauuaaguggcccuuau

SEQ ID NO: 967233 - RNA, 19 nt, Artificial Sequence
  Description of Artificial Sequence: Synthetic oligonucleotide
  Antisense strand to SEQ ID NO: 967232
auaagggccacuuaaucug

SEQ ID NO: 967234 - RNA, 19 nt, Artificial Sequence
  Description of Artificial Sequence: Synthetic oligonucleotide
  Sense strand starting at position 963 of SEQ ID NO: 913960
gcggauuucuugguguucu

SEQ ID NO: 967235 - RNA, 19 nt, Artificial Sequence
  Description of Artificial Sequence: Synthetic oligonucleotide
  Antisense strand to SEQ ID NO: 967234
agaacaccaagaaauccgc

SEQ ID NO: 967236 - RNA, 19 nt, Artificial Sequence
  Description of Artificial Sequence: Synthetic oligonucleotide
  Sense strand starting at position 151 of SEQ ID NO: 913960
ugguuuaacguggacuagu

SEQ ID NO: 967237 - RNA, 19 nt, Artificial Sequence
  Description of Artificial Sequence: Synthetic oligonucleotide
  Antisense strand to SEQ ID NO: 967236
acuaguccacguuaaacca

SEQ ID NO: 967238 - RNA, 19 nt, Artificial Sequence
  Description of Artificial Sequence: Synthetic oligonucleotide
  Sense strand starting at position 1205 of SEQ ID NO: 913960
guccacgacuuauuauuau

SEQ ID NO: 967239 - RNA, 19 nt, Artificial Sequence
  Description of Artificial Sequence: Synthetic oligonucleotide
  Antisense strand to SEQ ID NO: 967238
auaauaauaagucguggac

SEQ ID NO: 967240 - RNA, 19 nt, Artificial Sequence
  Description of Artificial Sequence: Synthetic oligonucleotide
  Sense strand starting at position 424 of SEQ ID NO: 913960
accugugccucaucaauga

SEQ ID NO: 967241 - RNA, 19 nt, Artificial Sequence
  Description of Artificial Sequence: Synthetic oligonucleotide
  Antisense strand to SEQ ID NO: 967240
ucauugaugaggcacaggu

SEQ ID NO: 967242 - RNA, 19 nt, Artificial Sequence
  Description of Artificial Sequence: Synthetic oligonucleotide
  Sense strand starting at position 1713 of SEQ ID NO: 913960
gagagaugcugcccaaggu

SEQ ID NO: 967243 - RNA, 19 nt, Artificial Sequence
  Description of Artificial Sequence: Synthetic oligonucleotide
  Antisense strand to SEQ ID NO: 967242
accuugggcagcaucucuc

SEQ ID NO: 967244 - RNA, 19 nt, Artificial Sequence
  Description of Artificial Sequence: Synthetic oligonucleotide
  Sense strand starting at position 149 of SEQ ID NO: 913960
caugguuuaacguggacua

SEQ ID NO: 967245 - RNA, 19 nt, Artificial Sequence
  Description of Artificial Sequence: Synthetic oligonucleotide
  Antisense strand to SEQ ID NO: 967244
uaguccacguuaaaccaug

SEQ ID NO: 967246 - RNA, 19 nt, Artificial Sequence
  Description of Artificial Sequence: Synthetic oligonucleotide
  Sense strand starting at position 890 of SEQ ID NO: 913960
guuacaucuacagaugcgu

SEQ ID NO: 967247 - RNA, 19 nt, Artificial Sequence
  Description of Artificial Sequence: Synthetic oligonucleotide
  Antisense strand to SEQ ID NO: 967246
acgcaucuguagauguaac

SEQ ID NO: 967248 - RNA, 19 nt, Artificial Sequence
  Description of Artificial Sequence: Synthetic oligonucleotide
  Sense strand starting at position 3489 of SEQ ID NO: 913960
ggccaaucuccugguugau

SEQ ID NO: 967249 - RNA, 19 nt, Artificial Sequence
  Description of Artificial Sequence: Synthetic oligonucleotide
  Antisense strand to SEQ ID NO: 967248
aucaaccaggagauuggcc

SEQ ID NO: 967250 - RNA, 19 nt, Artificial Sequence
  Description of Artificial Sequence: Synthetic oligonucleotide
  Sense strand starting at position 1198 of SEQ ID NO: 913960
gcaaacuguccacgacuua

SEQ ID NO: 967251 - RNA, 19 nt, Artificial Sequence
  Description of Artificial Sequence: Synthetic oligonucleotide
  Antisense strand to SEQ ID NO: 967250
uaagucguggacaguuugc

SEQ ID NO: 967252 - RNA, 19 nt, Artificial Sequence
  Description of Artificial Sequence: Synthetic oligonucleotide
  Sense strand starting at position 2737 of SEQ ID NO: 913960
cgucucugucuacaaucuu

SEQ ID NO: 967253 - RNA, 19 nt, Artificial Sequence
  Description of Artificial Sequence: Synthetic oligonucleotide
  Antisense strand to SEQ ID NO: 967252
aagauuguagacagagacg

SEQ ID NO: 967254 - RNA, 19 nt, Artificial Sequence
  Description of Artificial Sequence: Synthetic oligonucleotide
  Sense strand starting at position 962 of SEQ ID NO: 913960
cgcggauuucuugguguuc

SEQ ID NO: 967255 - RNA, 19 nt, Artificial Sequence
  Description of Artificial Sequence: Synthetic oligonucleotide
  Antisense strand to SEQ ID NO: 967254
gaacaccaagaaauccgcg

SEQ ID NO: 967256 - RNA, 19 nt, Artificial Sequence
  Description of Artificial Sequence: Synthetic oligonucleotide
  Sense strand starting at position 2584 of SEQ ID NO: 913960
ccuggaagugcucgguaaa

SEQ ID NO: 967257 - RNA, 19 nt, Artificial Sequence
  Description of Artificial Sequence: Synthetic oligonucleotide
  Antisense strand to SEQ ID NO: 967256
uuuaccgagcacuuccagg

SEQ ID NO: 967258 - RNA, 19 nt, Artificial Sequence
  Description of Artificial Sequence: Synthetic oligonucleotide
  Sense strand starting at position 2585 of SEQ ID NO: 913960
cuggaagugcucgguaaau

SEQ ID NO: 967259 - RNA, 19 nt, Artificial Sequence
  Description of Artificial Sequence: Synthetic oligonucleotide
  Antisense strand to SEQ ID NO: 967258
auuuaccgagcacuuccag

SEQ ID NO: 967260 - RNA, 19 nt, Artificial Sequence
  Description of Artificial Sequence: Synthetic oligonucleotide
  Sense strand starting at position 1698 of SEQ ID NO: 913960
acacuaaacuguuaagaga

SEQ ID NO: 967261 - RNA, 19 nt, Artificial Sequence
  Description of Artificial Sequence: Synthetic oligonucleotide
  Antisense strand to SEQ ID NO: 967260
ucucuuaacaguuuagugu

SEQ ID NO: 967262 - RNA, 19 nt, Artificial Sequence
  Description of Artificial Sequence: Synthetic oligonucleotide
  Sense strand starting at position 1176 of SEQ ID NO: 913960
cgccauagaugguuccauu

SEQ ID NO: 967263 - RNA, 19 nt, Artificial Sequence
  Description of Artificial Sequence: Synthetic oligonucleotide
  Antisense strand to SEQ ID NO: 967262
aauggaaccaucuauggcg

SEQ ID NO: 967264 - RNA, 19 nt, Artificial Sequence
  Description of Artificial Sequence: Synthetic oligonucleotide
  Sense strand starting at position 1701 of SEQ ID NO: 913960
cuaaacuguuaagagagau

SEQ ID NO: 967265 - RNA, 19 nt, Artificial Sequence
  Description of Artificial Sequence: Synthetic oligonucleotide
  Antisense strand to SEQ ID NO: 967264
aucucucuuaacaguuuag

SEQ ID NO: 967266 - RNA, 19 nt, Artificial Sequence
  Description of Artificial Sequence: Synthetic oligonucleotide
  Sense strand starting at position 417 of SEQ ID NO: 913960
gccaaauaccugugccuca

SEQ ID NO: 967267 - RNA, 19 nt, Artificial Sequence
  Description of Artificial Sequence: Synthetic oligonucleotide
  Antisense strand to SEQ ID NO: 967266
ugaggcacagguauuuggc

SEQ ID NO: 967268 - RNA, 19 nt, Artificial Sequence
  Description of Artificial Sequence: Synthetic oligonucleotide
  Sense strand starting at position 3904 of SEQ ID NO: 913960
uucugagugcuuugcaaau

SEQ ID NO: 967269 - RNA, 19 nt, Artificial Sequence
  Description of Artificial Sequence: Synthetic oligonucleotide
  Antisense strand to SEQ ID NO: 967268
auuugcaaagcacucagaa

SEQ ID NO: 967270 - RNA, 19 nt, Artificial Sequence
  Description of Artificial Sequence: Synthetic oligonucleotide
  Sense strand starting at position 164 of SEQ ID NO: 913960
acuagucauugggaaacua

SEQ ID NO: 967271 - RNA, 19 nt, Artificial Sequence
  Description of Artificial Sequence: Synthetic oligonucleotide
  Antisense strand to SEQ ID NO: 967270
uaguuucccaaugacuagu

SEQ ID NO: 967272 - RNA, 19 nt, Artificial Sequence
  Description of Artificial Sequence: Synthetic oligonucleotide
  Sense strand starting at position 2734 of SEQ ID NO: 913960
ucccgucucugucuacaau

SEQ ID NO: 967273 - RNA, 19 nt, Artificial Sequence
  Description of Artificial Sequence: Synthetic oligonucleotide
  Antisense strand to SEQ ID NO: 967272
auuguagacagagacggga

SEQ ID NO: 967274 - RNA, 19 nt, Artificial Sequence
  Description of Artificial Sequence: Synthetic oligonucleotide
  Sense strand starting at position 3571 of SEQ ID NO: 913960
gguugaauguguuuccugu

SEQ ID NO: 967275 - RNA, 19 nt, Artificial Sequence
  Description of Artificial Sequence: Synthetic oligonucleotide
  Antisense strand to SEQ ID NO: 967274
acaggaaacacauucaacc

SEQ ID NO: 967276 - RNA, 19 nt, Artificial Sequence
  Description of Artificial Sequence: Synthetic oligonucleotide
  Sense strand starting at position 454 of SEQ ID NO: 913960
ggcugcuucuuuguccaga

SEQ ID NO: 967277 - RNA, 19 nt, Artificial Sequence
  Description of Artificial Sequence: Synthetic oligonucleotide
  Antisense strand to SEQ ID NO: 967276
ucuggacaaagaagcagcc

SEQ ID NO: 967278 - RNA, 19 nt, Artificial Sequence
  Description of Artificial Sequence: Synthetic oligonucleotide
  Sense strand starting at position 3420 of SEQ ID NO: 913961
ucauuaaguguagaacuca

SEQ ID NO: 967279 - RNA, 19 nt, Artificial Sequence
  Description of Artificial Sequence: Synthetic oligonucleotide
  Antisense strand to SEQ ID NO: 967278
ugaguucuacacuuaauga

SEQ ID NO: 967280 - RNA, 19 nt, Artificial Sequence
  Description of Artificial Sequence: Synthetic oligonucleotide
  Sense strand starting at position 3415 of SEQ ID NO: 913961
acaaaucauuaaguguaga

SEQ ID NO: 967281 - RNA, 19 nt, Artificial Sequence
  Description of Artificial Sequence: Synthetic oligonucleotide
  Antisense strand to SEQ ID NO: 967280
ucuacacuuaaugauuugu

SEQ ID NO: 967282 - RNA, 19 nt, Artificial Sequence
  Description of Artificial Sequence: Synthetic oligonucleotide
  Sense strand starting at position 3749 of SEQ ID NO: 913961
ggcuacuaggaauaauguu

SEQ ID NO: 967283 - RNA, 19 nt, Artificial Sequence
  Description of Artificial Sequence: Synthetic oligonucleotide
  Antisense strand to SEQ ID NO: 967282
aacauuauuccuaguagcc

SEQ ID NO: 967284 - RNA, 19 nt, Artificial Sequence
  Description of Artificial Sequence: Synthetic oligonucleotide
  Sense strand starting at position 655 of SEQ ID NO: 913961
gucacagguccucaaauua

SEQ ID NO: 967285 - RNA, 19 nt, Artificial Sequence
  Description of Artificial Sequence: Synthetic oligonucleotide
  Antisense strand to SEQ ID NO: 967284
uaauuugaggaccugugac

SEQ ID NO: 967286 - RNA, 19 nt, Artificial Sequence
  Description of Artificial Sequence: Synthetic oligonucleotide
  Sense strand starting at position 3094 of SEQ ID NO: 913961
gugacuaauggcuacuaua

SEQ ID NO: 967287 - RNA, 19 nt, Artificial Sequence
  Description of Artificial Sequence: Synthetic oligonucleotide
  Antisense strand to SEQ ID NO: 967286
uauaguagccauuagucac

SEQ ID NO: 967288 - RNA, 19 nt, Artificial Sequence
  Description of Artificial Sequence: Synthetic oligonucleotide
  Sense strand starting at position 499 of SEQ ID NO: 913961
gggcaacauuccucaaaca

SEQ ID NO: 967289 - RNA, 19 nt, Artificial Sequence
  Description of Artificial Sequence: Synthetic oligonucleotide
  Antisense strand to SEQ ID NO: 967288
uguuugaggaauguugccc

SEQ ID NO: 967290 - RNA, 19 nt, Artificial Sequence
  Description of Artificial Sequence: Synthetic oligonucleotide
  Sense strand starting at position 2757 of SEQ ID NO: 913961
auccaaagauaggcuuauu

SEQ ID NO: 967291 - RNA, 19 nt, Artificial Sequence
  Description of Artificial Sequence: Synthetic oligonucleotide
  Antisense strand to SEQ ID NO: 967290
aauaagccuaucuuuggau

SEQ ID NO: 967292 - RNA, 19 nt, Artificial Sequence
  Description of Artificial Sequence: Synthetic oligonucleotide
  Sense strand starting at position 1652 of SEQ ID NO: 913961
cuaauauauuaagcuggau

SEQ ID NO: 967293 - RNA, 19 nt, Artificial Sequence
  Description of Artificial Sequence: Synthetic oligonucleotide
  Antisense strand to SEQ ID NO: 967292
auccagcuuaauauauuag

SEQ ID NO: 967294 - RNA, 19 nt, Artificial Sequence
  Description of Artificial Sequence: Synthetic oligonucleotide
  Sense strand starting at position 1950 of SEQ ID NO: 913961
guaccaucuccagacaggu

SEQ ID NO: 967295 - RNA, 19 nt, Artificial Sequence
  Description of Artificial Sequence: Synthetic oligonucleotide
  Antisense strand to SEQ ID NO: 967294
accugucuggagaugguac

SEQ ID NO: 967296 - RNA, 19 nt, Artificial Sequence
  Description of Artificial Sequence: Synthetic oligonucleotide
  Sense strand starting at position 1608 of SEQ ID NO: 913961
agguuaaggcugcagaaau

SEQ ID NO: 967297 - RNA, 19 nt, Artificial Sequence
  Description of Artificial Sequence: Synthetic oligonucleotide
  Antisense strand to SEQ ID NO: 967296
auuucugcagccuuaaccu

SEQ ID NO: 967298 - RNA, 19 nt, Artificial Sequence
  Description of Artificial Sequence: Synthetic oligonucleotide
  Sense strand starting at position 1655 of SEQ ID NO: 913961
auauauuaagcuggaucua

SEQ ID NO: 967299 - RNA, 19 nt, Artificial Sequence
  Description of Artificial Sequence: Synthetic oligonucleotide
  Antisense strand to SEQ ID NO: 967298
uagauccagcuuaauauau

SEQ ID NO: 967300 - RNA, 19 nt, Artificial Sequence
  Description of Artificial Sequence: Synthetic oligonucleotide
  Sense strand starting at position 3216 of SEQ ID NO: 913961
aguguaaagucaccagaaa

SEQ ID NO: 967301 - RNA, 19 nt, Artificial Sequence
  Description of Artificial Sequence: Synthetic oligonucleotide
  Antisense strand to SEQ ID NO: 967300
uuucuggugacuuuacacu

SEQ ID NO: 967302 - RNA, 19 nt, Artificial Sequence
  Description of Artificial Sequence: Synthetic oligonucleotide
  Sense strand starting at position 554 of SEQ ID NO: 913961
ugugcugagggaugacaaa

SEQ ID NO: 967303 - RNA, 19 nt, Artificial Sequence
  Description of Artificial Sequence: Synthetic oligonucleotide
  Antisense strand to SEQ ID NO: 967302
uuugucaucccucagcaca

SEQ ID NO: 967304 - RNA, 19 nt, Artificial Sequence
  Description of Artificial Sequence: Synthetic oligonucleotide
  Sense strand starting at position 2768 of SEQ ID NO: 913961
ggcuuauuacuguauaaau

SEQ ID NO: 967305 - RNA, 19 nt, Artificial Sequence
  Description of Artificial Sequence: Synthetic oligonucleotide
  Antisense strand to SEQ ID NO: 967304
auuuauacaguaauaagcc

SEQ ID NO: 967306 - RNA, 19 nt, Artificial Sequence
  Description of Artificial Sequence: Synthetic oligonucleotide
  Sense strand starting at position 527 of SEQ ID NO: 913961
guaauaaacgugcacagaa

SEQ ID NO: 967307 - RNA, 19 nt, Artificial Sequence
  Description of Artificial Sequence: Synthetic oligonucleotide
  Antisense strand to SEQ ID NO: 967306
uucugugcacguuuauuac

SEQ ID NO: 967308 - RNA, 19 nt, Artificial Sequence
  Description of Artificial Sequence: Synthetic oligonucleotide
  Sense strand starting at position 3675 of SEQ ID NO: 913961
auccuuacuguugaaugua

SEQ ID NO: 967309 - RNA, 19 nt, Artificial Sequence
  Description of Artificial Sequence: Synthetic oligonucleotide
  Antisense strand to SEQ ID NO: 967308
uacauucaacaguaaggau

SEQ ID NO: 967310 - RNA, 19 nt, Artificial Sequence
  Description of Artificial Sequence: Synthetic oligonucleotide
  Sense strand starting at position 3428 of SEQ ID NO: 913961
uguagaacucagugaauau

SEQ ID NO: 967311 - RNA, 19 nt, Artificial Sequence
  Description of Artificial Sequence: Synthetic oligonucleotide
  Antisense strand to SEQ ID NO: 967310
auauucacugaguucuaca

SEQ ID NO: 967312 - RNA, 19 nt, Artificial Sequence
  Description of Artificial Sequence: Synthetic oligonucleotide
  Sense strand starting at position 2534 of SEQ ID NO: 913961
aaacuuuccgaggguacaa

SEQ ID NO: 967313 - RNA, 19 nt, Artificial Sequence
  Description of Artificial Sequence: Synthetic oligonucleotide
  Antisense strand to SEQ ID NO: 967312
uuguacccucggaaaguuu

SEQ ID NO: 967314 - RNA, 19 nt, Artificial Sequence
  Description of Artificial Sequence: Synthetic oligonucleotide
  Sense strand starting at position 3084 of SEQ ID NO: 913961
agagcuacacgugacuaau

SEQ ID NO: 967315 - RNA, 19 nt, Artificial Sequence
  Description of Artificial Sequence: Synthetic oligonucleotide
  Antisense strand to SEQ ID NO: 967314
auuagucacguguagcucu

SEQ ID NO: 967316 - RNA, 19 nt, Artificial Sequence
  Description of Artificial Sequence: Synthetic oligonucleotide
  Sense strand starting at position 3875 of SEQ ID NO: 913961
uauauaucuggguaugcua

SEQ ID NO: 967317 - RNA, 19 nt, Artificial Sequence
  Description of Artificial Sequence: Synthetic oligonucleotide
  Antisense strand to SEQ ID NO: 967316
uagcauacccagauauaua

SEQ ID NO: 967318 - RNA, 19 nt, Artificial Sequence
  Description of Artificial Sequence: Synthetic oligonucleotide
  Sense strand starting at position 548 of SEQ ID NO: 913961
gaaagcugugcugagggau

SEQ ID NO: 967319 - RNA, 19 nt, Artificial Sequence
  Description of Artificial Sequence: Synthetic oligonucleotide
  Antisense strand to SEQ ID NO: 967318
aucccucagcacagcuuuc

SEQ ID NO: 967320 - RNA, 19 nt, Artificial Sequence
  Description of Artificial Sequence: Synthetic oligonucleotide
  Sense strand starting at position 2631 of SEQ ID NO: 913961
gcauguuacauaugaagga

SEQ ID NO: 967321 - RNA, 19 nt, Artificial Sequence
  Description of Artificial Sequence: Synthetic oligonucleotide
  Antisense strand to SEQ ID NO: 967320
uccuucauauguaacaugc

SEQ ID NO: 967322 - RNA, 19 nt, Artificial Sequence
  Description of Artificial Sequence: Synthetic oligonucleotide
  Sense strand starting at position 488 of SEQ ID NO: 913961
ucaagaguacugggcaaca

SEQ ID NO: 967323 - RNA, 19 nt, Artificial Sequence
  Description of Artificial Sequence: Synthetic oligonucleotide
  Antisense strand to SEQ ID NO: 967322
uguugcccaguacucuuga

SEQ ID NO: 967324 - RNA, 19 nt, Artificial Sequence
  Description of Artificial Sequence: Synthetic oligonucleotide
  Sense strand starting at position 2533 of SEQ ID NO: 913961
gaaacuuuccgaggguaca

SEQ ID NO: 967325 - RNA, 19 nt, Artificial Sequence
  Description of Artificial Sequence: Synthetic oligonucleotide
  Antisense strand to SEQ ID NO: 967324
uguacccucggaaaguuuc

SEQ ID NO: 967326 - RNA, 19 nt, Artificial Sequence
  Description of Artificial Sequence: Synthetic oligonucleotide
  Sense strand starting at position 153 of SEQ ID NO: 913961
uuugguggcaauuaagagu

SEQ ID NO: 967327 - RNA, 19 nt, Artificial Sequence
  Description of Artificial Sequence: Synthetic oligonucleotide
  Antisense strand to SEQ ID NO: 967326
acucuuaauugccaccaaa

SEQ ID NO: 967328 - RNA, 19 nt, Artificial Sequence
  Description of Artificial Sequence: Synthetic oligonucleotide
  Sense strand starting at position 3180 of SEQ ID NO: 913961
augugaaguuaacugacuu

SEQ ID NO: 967329 - RNA, 19 nt, Artificial Sequence
  Description of Artificial Sequence: Synthetic oligonucleotide
  Antisense strand to SEQ ID NO: 967328
aagucaguuaacuucacau

SEQ ID NO: 967330 - RNA, 19 nt, Artificial Sequence
  Description of Artificial Sequence: Synthetic oligonucleotide
  Sense strand starting at position 916 of SEQ ID NO: 913961
cuuugacuuccuuagagcu

SEQ ID NO: 967331 - RNA, 19 nt, Artificial Sequence
  Description of Artificial Sequence: Synthetic oligonucleotide
  Antisense strand to SEQ ID NO: 967330
agcucuaaggaagucaaag

SEQ ID NO: 967332 - RNA, 19 nt, Artificial Sequence
  Description of Artificial Sequence: Synthetic oligonucleotide
  Sense strand starting at position 1565 of SEQ ID NO: 913961
gggccagcaucauuaagga

SEQ ID NO: 967333 - RNA, 19 nt, Artificial Sequence
  Description of Artificial Sequence: Synthetic oligonucleotide
  Antisense strand to SEQ ID NO: 967332
uccuuaaugaugcuggccc

SEQ ID NO: 967334 - RNA, 19 nt, Artificial Sequence
  Description of Artificial Sequence: Synthetic oligonucleotide
  Sense strand starting at position 933 of SEQ ID NO: 913961
cuaagugagcucuaaguca

SEQ ID NO: 967335 - RNA, 19 nt, Artificial Sequence
  Description of Artificial Sequence: Synthetic oligonucleotide
  Antisense strand to SEQ ID NO: 967334
ugacuuagagcucacuuag

SEQ ID NO: 967336 - RNA, 19 nt, Artificial Sequence
  Description of Artificial Sequence: Synthetic oligonucleotide
  Sense strand starting at position 1432 of SEQ ID NO: 913961
ggugacugucgguauaaag

SEQ ID NO: 967337 - RNA, 19 nt, Artificial Sequence
  Description of Artificial Sequence: Synthetic oligonucleotide
  Antisense strand to SEQ ID NO: 967336
cuuuauaccgacagucacc

SEQ ID NO: 967338 - RNA, 19 nt, Artificial Sequence
  Description of Artificial Sequence: Synthetic oligonucleotide
  Sense strand starting at position 2832 of SEQ ID NO: 913961
guagucguccaugaggaag

SEQ ID NO: 967339 - RNA, 19 nt, Artificial Sequence
  Description of Artificial Sequence: Synthetic oligonucleotide
  Antisense strand to SEQ ID NO: 967338
cuuccucauggacgacuac

SEQ ID NO: 967340 - RNA, 19 nt, Artificial Sequence
  Description of Artificial Sequence: Synthetic oligonucleotide
  Sense strand starting at position 1119 of SEQ ID NO: 913961
ugacaaugucauggagcua

SEQ ID NO: 967341 - RNA, 19 nt, Artificial Sequence
  Description of Artificial Sequence: Synthetic oligonucleotide
  Antisense strand to SEQ ID NO: 967340
uagcuccaugacauuguca

SEQ ID NO: 967342 - RNA, 19 nt, Artificial Sequence
  Description of Artificial Sequence: Synthetic oligonucleotide
  Sense strand starting at position 941 of SEQ ID NO: 913961
gcucuaagucaaggagacu

SEQ ID NO: 967343 - RNA, 19 nt, Artificial Sequence
  Description of Artificial Sequence: Synthetic oligonucleotide
  Antisense strand to SEQ ID NO: 967342
agucuccuugacuuagagc

SEQ ID NO: 967344 - RNA, 19 nt, Artificial Sequence
  Description of Artificial Sequence: Synthetic oligonucleotide
  Sense strand starting at position 2182 of SEQ ID NO: 913961
uggacagaacucuggcuuu

SEQ ID NO: 967345 - RNA, 19 nt, Artificial Sequence
  Description of Artificial Sequence: Synthetic oligonucleotide
  Antisense strand to SEQ ID NO: 967344
aaagccagaguucugucca

SEQ ID NO: 967346 - RNA, 19 nt, Artificial Sequence
  Description of Artificial Sequence: Synthetic oligonucleotide
  Sense strand starting at position 654 of SEQ ID NO: 913961
agucacagguccucaaauu

SEQ ID NO: 967347 - RNA, 19 nt, Artificial Sequence
  Description of Artificial Sequence: Synthetic oligonucleotide
  Antisense strand to SEQ ID NO: 967346
aauuugaggaccugugacu

SEQ ID NO: 967348 - RNA, 19 nt, Artificial Sequence
  Description of Artificial Sequence: Synthetic oligonucleotide
  Sense strand starting at position 3942 of SEQ ID NO: 913961
cccaucaacugugucagaa

SEQ ID NO: 967349 - RNA, 19 nt, Artificial Sequence
  Description of Artificial Sequence: Synthetic oligonucleotide
  Antisense strand to SEQ ID NO: 967348
uucugacacaguugauggg

SEQ ID NO: 967350 - RNA, 19 nt, Artificial Sequence
  Description of Artificial Sequence: Synthetic oligonucleotide
  Sense strand starting at position 586 of SEQ ID NO: 913961
ucaucugugcauuacuaca

SEQ ID NO: 967351 - RNA, 19 nt, Artificial Sequence
  Description of Artificial Sequence: Synthetic oligonucleotide
  Antisense strand to SEQ ID NO: 967350
uguaguaaugcacagauga

SEQ ID NO: 967352 - RNA, 19 nt, Artificial Sequence
  Description of Artificial Sequence: Synthetic oligonucleotide
  Sense strand starting at position 2514 of SEQ ID NO: 913961
augcguuucgcacuagcau

SEQ ID NO: 967353 - RNA, 19 nt, Artificial Sequence
  Description of Artificial Sequence: Synthetic oligonucleotide
  Antisense strand to SEQ ID NO: 967352
augcuagugcgaaacgcau

SEQ ID NO: 967354 - RNA, 19 nt, Artificial Sequence
  Description of Artificial Sequence: Synthetic oligonucleotide
  Sense strand starting at position 2762 of SEQ ID NO: 913961
aagauaggcuuauuacugu

SEQ ID NO: 967355 - RNA, 19 nt, Artificial Sequence
  Description of Artificial Sequence: Synthetic oligonucleotide
  Antisense strand to SEQ ID NO: 967354
acaguaauaagccuaucuu

SEQ ID NO: 967356 - RNA, 19 nt, Artificial Sequence
  Description of Artificial Sequence: Synthetic oligonucleotide
  Sense strand starting at position 3887 of SEQ ID NO: 913961
uaugcuaagcuuuaguaga

SEQ ID NO: 967357 - RNA, 19 nt, Artificial Sequence
  Description of Artificial Sequence: Synthetic oligonucleotide
  Antisense strand to SEQ ID NO: 967356
ucuacuaaagcuuagcaua

SEQ ID NO: 967358 - RNA, 19 nt, Artificial Sequence
  Description of Artificial Sequence: Synthetic oligonucleotide
  Sense strand starting at position 2437 of SEQ ID NO: 913962
agcccuaguccgcuagagu

SEQ ID NO: 967359 - RNA, 19 nt, Artificial Sequence
  Description of Artificial Sequence: Synthetic oligonucleotide
  Antisense strand to SEQ ID NO: 967358
acucuagcggacuagggcu

SEQ ID NO: 967360 - RNA, 19 nt, Artificial Sequence
  Description of Artificial Sequence: Synthetic oligonucleotide
  Sense strand starting at position 31 of SEQ ID NO: 913962
ugagauguuuaacugaauu

SEQ ID NO: 967361 - RNA, 19 nt, Artificial Sequence
  Description of Artificial Sequence: Synthetic oligonucleotide
  Antisense strand to SEQ ID NO: 967360
aauucaguuaaacaucuca

SEQ ID NO: 967362 - RNA, 19 nt, Artificial Sequence
  Description of Artificial Sequence: Synthetic oligonucleotide
  Sense strand starting at position 469 of SEQ ID NO: 913962
aggaaauagucccugaagu

SEQ ID NO: 967363 - RNA, 19 nt, Artificial Sequence
  Description of Artificial Sequence: Synthetic oligonucleotide
  Antisense strand to SEQ ID NO: 967362
acuucagggacuauuuccu

SEQ ID NO: 967364 - RNA, 19 nt, Artificial Sequence
  Description of Artificial Sequence: Synthetic oligonucleotide
  Sense strand starting at position 470 of SEQ ID NO: 913962
ggaaauagucccugaagug

SEQ ID NO: 967365 - RNA, 19 nt, Artificial Sequence
  Description of Artificial Sequence: Synthetic oligonucleotide
  Antisense strand to SEQ ID NO: 967364
cacuucagggacuauuucc

SEQ ID NO: 967366 - RNA, 19 nt, Artificial Sequence
  Description of Artificial Sequence: Synthetic oligonucleotide
  Sense strand starting at position 2245 of SEQ ID NO: 913962
cgagguggcccagaacaau

SEQ ID NO: 967367 - RNA, 19 nt, Artificial Sequence
  Description of Artificial Sequence: Synthetic oligonucleotide
  Antisense strand to SEQ ID NO: 967366
auuguucugggccaccucg

SEQ ID NO: 967368 - RNA, 19 nt, Artificial Sequence
  Description of Artificial Sequence: Synthetic oligonucleotide
  Sense strand starting at position 1453 of SEQ ID NO: 913962
acugcagagaguugacaua

SEQ ID NO: 967369 - RNA, 19 nt, Artificial Sequence
  Description of Artificial Sequence: Synthetic oligonucleotide
  Antisense strand to SEQ ID NO: 967368
uaugucaacucucugcagu

SEQ ID NO: 967370 - RNA, 19 nt, Artificial Sequence
  Description of Artificial Sequence: Synthetic oligonucleotide
  Sense strand starting at position 1700 of SEQ ID NO: 913962
uuauauaacucaguggcaa

SEQ ID NO: 967371 - RNA, 19 nt, Artificial Sequence
  Description of Artificial Sequence: Synthetic oligonucleotide
  Antisense strand to SEQ ID NO: 967370
uugccacugaguuauauaa

SEQ ID NO: 967372 - RNA, 19 nt, Artificial Sequence
  Description of Artificial Sequence: Synthetic oligonucleotide
  Sense strand starting at position 3696 of SEQ ID NO: 913962
cacguagacccuuagaguu

SEQ ID NO: 967373 - RNA, 19 nt, Artificial Sequence
  Description of Artificial Sequence: Synthetic oligonucleotide
  Antisense strand to SEQ ID NO: 967372
aacucuaagggucuacgug

SEQ ID NO: 967374 - RNA, 19 nt, Artificial Sequence
  Description of Artificial Sequence: Synthetic oligonucleotide
  Sense strand starting at position 2602 of SEQ ID NO: 913962
uugaacucuugggcuaauu

SEQ ID NO: 967375 - RNA, 19 nt, Artificial Sequence
  Description of Artificial Sequence: Synthetic oligonucleotide
  Antisense strand to SEQ ID NO: 967374
aauuagcccaagaguucaa

SEQ ID NO: 967376 - RNA, 19 nt, Artificial Sequence
  Description of Artificial Sequence: Synthetic oligonucleotide
  Sense strand starting at position 171 of SEQ ID NO: 913962
agggcccgucucuauuaaa

SEQ ID NO: 967377 - RNA, 19 nt, Artificial Sequence
  Description of Artificial Sequence: Synthetic oligonucleotide
  Antisense strand to SEQ ID NO: 967376
uuuaauagagacgggcccu

SEQ ID NO: 967378 - RNA, 19 nt, Artificial Sequence
  Description of Artificial Sequence: Synthetic oligonucleotide
  Sense strand starting at position 1686 of SEQ ID NO: 913962
cccaaauagugucuuuaua

SEQ ID NO: 967379 - RNA, 19 nt, Artificial Sequence
  Description of Artificial Sequence: Synthetic oligonucleotide
  Antisense strand to SEQ ID NO: 967378
uauaaagacacuauuuggg

SEQ ID NO: 967380 - RNA, 19 nt, Artificial Sequence
  Description of Artificial Sequence: Synthetic oligonucleotide
  Sense strand starting at position 1447 of SEQ ID NO: 913962
ccgguaacugcagagaguu

SEQ ID NO: 967381 - RNA, 19 nt, Artificial Sequence
  Description of Artificial Sequence: Synthetic oligonucleotide
  Antisense strand to SEQ ID NO: 967380
aacucucugcaguuaccgg

SEQ ID NO: 967382 - RNA, 19 nt, Artificial Sequence
  Description of Artificial Sequence: Synthetic oligonucleotide
  Sense strand starting at position 3452 of SEQ ID NO: 913962
gcaggagaacgguguaaac

SEQ ID NO: 967383 - RNA, 19 nt, Artificial Sequence
  Description of Artificial Sequence: Synthetic oligonucleotide
  Antisense strand to SEQ ID NO: 967382
guuuacaccguucuccugc

SEQ ID NO: 967384 - RNA, 19 nt, Artificial Sequence
  Description of Artificial Sequence: Synthetic oligonucleotide
  Sense strand starting at position 353 of SEQ ID NO: 913962
guaacauauuaugugguau

SEQ ID NO: 967385 - RNA, 19 nt, Artificial Sequence
  Description of Artificial Sequence: Synthetic oligonucleotide
  Antisense strand to SEQ ID NO: 967384
auaccacauaauauguuac

SEQ ID NO: 967386 - RNA, 19 nt, Artificial Sequence
  Description of Artificial Sequence: Synthetic oligonucleotide
  Sense strand starting at position 3340 of SEQ ID NO: 913962
ucgcuauagaucgaaagca

SEQ ID NO: 967387 - RNA, 19 nt, Artificial Sequence
  Description of Artificial Sequence: Synthetic oligonucleotide
  Antisense strand to SEQ ID NO: 967386
ugcuuucgaucuauagcga

SEQ ID NO: 967388 - RNA, 19 nt, Artificial Sequence
  Description of Artificial Sequence: Synthetic oligonucleotide
  Sense strand starting at position 1506 of SEQ ID NO: 913962
uucggaaugucacucucau

SEQ ID NO: 967389 - RNA, 19 nt, Artificial Sequence
  Description of Artificial Sequence: Synthetic oligonucleotide
  Antisense strand to SEQ ID NO: 967388
augagagugacauuccgaa

SEQ ID NO: 967390 - RNA, 19 nt, Artificial Sequence
  Description of Artificial Sequence: Synthetic oligonucleotide
  Sense strand starting at position 1469 of SEQ ID NO: 913962
auagaauugcauuguuucu

SEQ ID NO: 967391 - RNA, 19 nt, Artificial Sequence
  Description of Artificial Sequence: Synthetic oligonucleotide
  Antisense strand to SEQ ID NO: 967390
agaaacaaugcaauucuau

SEQ ID NO: 967392 - RNA, 19 nt, Artificial Sequence
  Description of Artificial Sequence: Synthetic oligonucleotide
  Sense strand starting at position 3331 of SEQ ID NO: 913962
agcucaggaucgcuauaga

SEQ ID NO: 967393 - RNA, 19 nt, Artificial Sequence
  Description of Artificial Sequence: Synthetic oligonucleotide
  Antisense strand to SEQ ID NO: 967392
ucuauagcgauccugagcu

SEQ ID NO: 967394 - RNA, 19 nt, Artificial Sequence
  Description of Artificial Sequence: Synthetic oligonucleotide
  Sense strand starting at position 1501 of SEQ ID NO: 913962
uuacuuucggaaugucacu

SEQ ID NO: 967395 - RNA, 19 nt, Artificial Sequence
  Description of Artificial Sequence: Synthetic oligonucleotide
  Antisense strand to SEQ ID NO: 967394
agugacauuccgaaaguaa

SEQ ID NO: 967396 - RNA, 19 nt, Artificial Sequence
  Description of Artificial Sequence: Synthetic oligonucleotide
  Sense strand starting at position 1490 of SEQ ID NO: 913962
agcuuaaucgguuacuuuc

SEQ ID NO: 967397 - RNA, 19 nt, Artificial Sequence
  Description of Artificial Sequence: Synthetic oligonucleotide
  Antisense strand to SEQ ID NO: 967396
gaaaguaaccgauuaagcu

SEQ ID NO: 967398 - RNA, 19 nt, Artificial Sequence
  Description of Artificial Sequence: Synthetic oligonucleotide
  Sense strand starting at position 3329 of SEQ ID NO: 913962
ugagcucaggaucgcuaua

SEQ ID NO: 967399 - RNA, 19 nt, Artificial Sequence
  Description of Artificial Sequence: Synthetic oligonucleotide
  Antisense strand to SEQ ID NO: 967398
uauagcgauccugagcuca

SEQ ID NO: 967400 - RNA, 19 nt, Artificial Sequence
  Description of Artificial Sequence: Synthetic oligonucleotide
  Sense strand starting at position 1435 of SEQ ID NO: 913962
ucuccuuucuauccgguaa

SEQ ID NO: 967401 - RNA, 19 nt, Artificial Sequence
  Description of Artificial Sequence: Synthetic oligonucleotide
  Antisense strand to SEQ ID NO: 967400
uuaccggauagaaaggaga

SEQ ID NO: 967402 - RNA, 19 nt, Artificial Sequence
  Description of Artificial Sequence: Synthetic oligonucleotide
  Sense strand starting at position 2880 of SEQ ID NO: 913962
uguuuaacccuacgugacu

SEQ ID NO: 967403 - RNA, 19 nt, Artificial Sequence
  Description of Artificial Sequence: Synthetic oligonucleotide
  Antisense strand to SEQ ID NO: 967402
agucacguaggguuaaaca

SEQ ID NO: 967404 - RNA, 19 nt, Artificial Sequence
  Description of Artificial Sequence: Synthetic oligonucleotide
  Sense strand starting at position 1801 of SEQ ID NO: 913962
cggagaggucccggucacu

SEQ ID NO: 967405 - RNA, 19 nt, Artificial Sequence
  Description of Artificial Sequence: Synthetic oligonucleotide
  Antisense strand to SEQ ID NO: 967404
agugaccgggaccucuccg

SEQ ID NO: 967406 - RNA, 19 nt, Artificial Sequence
  Description of Artificial Sequence: Synthetic oligonucleotide
  Sense strand starting at position 2745 of SEQ ID NO: 913962
cccuguuucuguuccauca

SEQ ID NO: 967407 - RNA, 19 nt, Artificial Sequence
  Description of Artificial Sequence: Synthetic oligonucleotide
  Antisense strand to SEQ ID NO: 967406
ugauggaacagaaacaggg

SEQ ID NO: 967408 - RNA, 19 nt, Artificial Sequence
  Description of Artificial Sequence: Synthetic oligonucleotide
  Sense strand starting at position 1485 of SEQ ID NO: 913962
ucuuuagcuuaaucgguua

SEQ ID NO: 967409 - RNA, 19 nt, Artificial Sequence
  Description of Artificial Sequence: Synthetic oligonucleotide
  Antisense strand to SEQ ID NO: 967408
uaaccgauuaagcuaaaga

SEQ ID NO: 967410 - RNA, 19 nt, Artificial Sequence
  Description of Artificial Sequence: Synthetic oligonucleotide
  Sense strand starting at position 1488 of SEQ ID NO: 913962
uuagcuuaaucgguuacuu

SEQ ID NO: 967411 - RNA, 19 nt, Artificial Sequence
  Description of Artificial Sequence: Synthetic oligonucleotide
  Antisense strand to SEQ ID NO: 967410
aaguaaccgauuaagcuaa

SEQ ID NO: 967412 - RNA, 19 nt, Artificial Sequence
  Description of Artificial Sequence: Synthetic oligonucleotide
  Sense strand starting at position 497 of SEQ ID NO: 913962
uaccuaggaugugaauuaa

SEQ ID NO: 967413 - RNA, 19 nt, Artificial Sequence
  Description of Artificial Sequence: Synthetic oligonucleotide
  Antisense strand to SEQ ID NO: 967412
uuaauucacauccuaggua

SEQ ID NO: 967414 - RNA, 19 nt, Artificial Sequence
  Description of Artificial Sequence: Synthetic oligonucleotide
  Sense strand starting at position 197 of SEQ ID NO: 913962
aaauaaaugucggauuaug

SEQ ID NO: 967415 - RNA, 19 nt, Artificial Sequence
  Description of Artificial Sequence: Synthetic oligonucleotide
  Antisense strand to SEQ ID NO: 967414
cauaauccgacauuuauuu

SEQ ID NO: 967416 - RNA, 19 nt, Artificial Sequence
  Description of Artificial Sequence: Synthetic oligonucleotide
  Sense strand starting at position 2438 of SEQ ID NO: 913962
gcccuaguccgcuagaguc

SEQ ID NO: 967417 - RNA, 19 nt, Artificial Sequence
  Description of Artificial Sequence: Synthetic oligonucleotide
  Antisense strand to SEQ ID NO: 967416
gacucuagcggacuagggc

SEQ ID NO: 967418 - RNA, 19 nt, Artificial Sequence
  Description of Artificial Sequence: Synthetic oligonucleotide
  Sense strand starting at position 441 of SEQ ID NO: 913962
uggaauuguugaggaugga

SEQ ID NO: 967419 - RNA, 19 nt, Artificial Sequence
  Description of Artificial Sequence: Synthetic oligonucleotide
  Antisense strand to SEQ ID NO: 967418
uccauccucaacaauucca

SEQ ID NO: 967420 - RNA, 19 nt, Artificial Sequence
  Description of Artificial Sequence: Synthetic oligonucleotide
  Sense strand starting at position 1476 of SEQ ID NO: 913962
ugcauuguuucuuuagcuu

SEQ ID NO: 967421 - RNA, 19 nt, Artificial Sequence
  Description of Artificial Sequence: Synthetic oligonucleotide
  Antisense strand to SEQ ID NO: 967420
aagcuaaagaaacaaugca

SEQ ID NO: 967422 - RNA, 19 nt, Artificial Sequence
  Description of Artificial Sequence: Synthetic oligonucleotide
  Sense strand starting at position 2570 of SEQ ID NO: 913962
agugcagugcgcgaucaua

SEQ ID NO: 967423 - RNA, 19 nt, Artificial Sequence
  Description of Artificial Sequence: Synthetic oligonucleotide
  Antisense strand to SEQ ID NO: 967422
uaugaucgcgcacugcacu

SEQ ID NO: 967424 - RNA, 19 nt, Artificial Sequence
  Description of Artificial Sequence: Synthetic oligonucleotide
  Sense strand starting at position 2601 of SEQ ID NO: 913962
cuugaacucuugggcuaau

SEQ ID NO: 967425 - RNA, 19 nt, Artificial Sequence
  Description of Artificial Sequence: Synthetic oligonucleotide
  Antisense strand to SEQ ID NO: 967424
auuagcccaagaguucaag

SEQ ID NO: 967426 - RNA, 19 nt, Artificial Sequence
  Description of Artificial Sequence: Synthetic oligonucleotide
  Sense strand starting at position 352 of SEQ ID NO: 913962
gguaacauauuauguggua

SEQ ID NO: 967427 - RNA, 19 nt, Artificial Sequence
  Description of Artificial Sequence: Synthetic oligonucleotide
  Antisense strand to SEQ ID NO: 967426
uaccacauaauauguuacc

SEQ ID NO: 967428 - RNA, 19 nt, Artificial Sequence
  Description of Artificial Sequence: Synthetic oligonucleotide
  Sense strand starting at position 1496 of SEQ ID NO: 913962
aucgguuacuuucggaaug

SEQ ID NO: 967429 - RNA, 19 nt, Artificial Sequence
  Description of Artificial Sequence: Synthetic oligonucleotide
  Antisense strand to SEQ ID NO: 967428
cauuccgaaaguaaccgau

SEQ ID NO: 967430 - RNA, 19 nt, Artificial Sequence
  Description of Artificial Sequence: Synthetic oligonucleotide
  Sense strand starting at position 1498 of SEQ ID NO: 913962
cgguuacuuucggaauguc

SEQ ID NO: 967431 - RNA, 19 nt, Artificial Sequence
  Description of Artificial Sequence: Synthetic oligonucleotide
  Antisense strand to SEQ ID NO: 967430
gacauuccgaaaguaaccg

SEQ ID NO: 967432 - RNA, 19 nt, Artificial Sequence
  Description of Artificial Sequence: Synthetic oligonucleotide
  Sense strand starting at position 1437 of SEQ ID NO: 913962
uccuuucuauccgguaacu

SEQ ID NO: 967433 - RNA, 19 nt, Artificial Sequence
  Description of Artificial Sequence: Synthetic oligonucleotide
  Antisense strand to SEQ ID NO: 967432
aguuaccggauagaaagga

SEQ ID NO: 967434 - RNA, 19 nt, Artificial Sequence
  Description of Artificial Sequence: Synthetic oligonucleotide
  Sense strand starting at position 1497 of SEQ ID NO: 913962
ucgguuacuuucggaaugu

SEQ ID NO: 967435 - RNA, 19 nt, Artificial Sequence
  Description of Artificial Sequence: Synthetic oligonucleotide
  Antisense strand to SEQ ID NO: 967434
acauuccgaaaguaaccga

SEQ ID NO: 967436 - RNA, 19 nt, Artificial Sequence
  Description of Artificial Sequence: Synthetic oligonucleotide
  Sense strand starting at position 3760 of SEQ ID NO: 913962
uugcaagucugccgaaguu

SEQ ID NO: 967437 - RNA, 19 nt, Artificial Sequence
  Description of Artificial Sequence: Synthetic oligonucleotide
  Antisense strand to SEQ ID NO: 967436
aacuucggcagacuugcaa

SEQ ID NO: 967438 - RNA, 19 nt, Artificial Sequence
  Description of Artificial Sequence: Synthetic oligonucleotide
  Sense strand starting at position 2053 of SEQ ID NO: 913963
agcccuaguccgcuagagu

SEQ ID NO: 967439 - RNA, 19 nt, Artificial Sequence
  Description of Artificial Sequence: Synthetic oligonucleotide
  Antisense strand to SEQ ID NO: 967438
acucuagcggacuagggcu

SEQ ID NO: 967440 - RNA, 19 nt, Artificial Sequence
  Description of Artificial Sequence: Synthetic oligonucleotide
  Sense strand starting at position 85 of SEQ ID NO: 913963
aggaaauagucccugaagu

SEQ ID NO: 967441 - RNA, 19 nt, Artificial Sequence
  Description of Artificial Sequence: Synthetic oligonucleotide
  Antisense strand to SEQ ID NO: 967440
acuucagggacuauuuccu

SEQ ID NO: 967442 - RNA, 19 nt, Artificial Sequence
  Description of Artificial Sequence: Synthetic oligonucleotide
  Sense strand starting at position 3855 of SEQ ID NO: 913963
cggauauugacauagcauc

SEQ ID NO: 967443 - RNA, 19 nt, Artificial Sequence
  Description of Artificial Sequence: Synthetic oligonucleotide
  Antisense strand to SEQ ID NO: 967442
gaugcuaugucaauauccg

SEQ ID NO: 967444 - RNA, 19 nt, Artificial Sequence
  Description of Artificial Sequence: Synthetic oligonucleotide
  Sense strand starting at position 3843 of SEQ ID NO: 913963
auuccauaacuacggauau

SEQ ID NO: 967445 - RNA, 19 nt, Artificial Sequence
  Description of Artificial Sequence: Synthetic oligonucleotide
  Antisense strand to SEQ ID NO: 967444
auauccguaguuauggaau

SEQ ID NO: 967446 - RNA, 19 nt, Artificial Sequence
  Description of Artificial Sequence: Synthetic oligonucleotide
  Sense strand starting at position 86 of SEQ ID NO: 913963
ggaaauagucccugaagug

SEQ ID NO: 967447 - RNA, 19 nt, Artificial Sequence
  Description of Artificial Sequence: Synthetic oligonucleotide
  Antisense strand to SEQ ID NO: 967446
cacuucagggacuauuucc

SEQ ID NO: 967448 - RNA, 19 nt, Artificial Sequence
  Description of Artificial Sequence: Synthetic oligonucleotide
  Sense strand starting at position 1861 of SEQ ID NO: 913963
cgagguggcccagaacaau

SEQ ID NO: 967449 - RNA, 19 nt, Artificial Sequence
  Description of Artificial Sequence: Synthetic oligonucleotide
  Antisense strand to SEQ ID NO: 967448
auuguucugggccaccucg

SEQ ID NO: 967450 - RNA, 19 nt, Artificial Sequence
  Description of Artificial Sequence: Synthetic oligonucleotide
  Sense strand starting at position 1069 of SEQ ID NO: 913963
acugcagagaguugacaua

SEQ ID NO: 967451 - RNA, 19 nt, Artificial Sequence
  Description of Artificial Sequence: Synthetic oligonucleotide
  Antisense strand to SEQ ID NO: 967450
uaugucaacucucugcagu

SEQ ID NO: 967452 - RNA, 19 nt, Artificial Sequence
  Description of Artificial Sequence: Synthetic oligonucleotide
  Sense strand starting at position 3969 of SEQ ID NO: 913963
gcaugacgucuuuauagaa

SEQ ID NO: 967453 - RNA, 19 nt, Artificial Sequence
  Description of Artificial Sequence: Synthetic oligonucleotide
  Antisense strand to SEQ ID NO: 967452
uucuauaaagacgucaugc

SEQ ID NO: 967454 - RNA, 19 nt, Artificial Sequence
  Description of Artificial Sequence: Synthetic oligonucleotide
  Sense strand starting at position 1316 of SEQ ID NO: 913963
uuauauaacucaguggcaa

SEQ ID NO: 967455 - RNA, 19 nt, Artificial Sequence
  Description of Artificial Sequence: Synthetic oligonucleotide
  Antisense strand to SEQ ID NO: 967454
uugccacugaguuauauaa

SEQ ID NO: 967456 - RNA, 19 nt, Artificial Sequence
  Description of Artificial Sequence: Synthetic oligonucleotide
  Sense strand starting at position 3312 of SEQ ID NO: 913963
cacguagacccuuagaguu

SEQ ID NO: 967457 - RNA, 19 nt, Artificial Sequence
  Description of Artificial Sequence: Synthetic oligonucleotide
  Antisense strand to SEQ ID NO: 967456
aacucuaagggucuacgug

SEQ ID NO: 967458 - RNA, 19 nt, Artificial Sequence
  Description of Artificial Sequence: Synthetic oligonucleotide
  Sense strand starting at position 3928 of SEQ ID NO: 913963
gaguuacuuccagaacguc

SEQ ID NO: 967459 - RNA, 19 nt, Artificial Sequence
  Description of Artificial Sequence: Synthetic oligonucleotide
  Antisense strand to SEQ ID NO: 967458
gacguucuggaaguaacuc

SEQ ID NO: 967460 - RNA, 19 nt, Artificial Sequence
  Description of Artificial Sequence: Synthetic oligonucleotide
  Sense strand starting at position 2218 of SEQ ID NO: 913963
uugaacucuugggcuaauu

SEQ ID NO: 967461 - RNA, 19 nt, Artificial Sequence
  Description of Artificial Sequence: Synthetic oligonucleotide
  Antisense strand to SEQ ID NO: 967460
aauuagcccaagaguucaa

SEQ ID NO: 967462 - RNA, 19 nt, Artificial Sequence
  Description of Artificial Sequence: Synthetic oligonucleotide
  Sense strand starting at position 1302 of SEQ ID NO: 913963
cccaaauagugucuuuaua

SEQ ID NO: 967463 - RNA, 19 nt, Artificial Sequence
  Description of Artificial Sequence: Synthetic oligonucleotide
  Antisense strand to SEQ ID NO: 967462
uauaaagacacuauuuggg

SEQ ID NO: 967464 - RNA, 19 nt, Artificial Sequence
  Description of Artificial Sequence: Synthetic oligonucleotide
  Sense strand starting at position 1063 of SEQ ID NO: 913963
ccgguaacugcagagaguu

SEQ ID NO: 967465 - RNA, 19 nt, Artificial Sequence
  Description of Artificial Sequence: Synthetic oligonucleotide
  Antisense strand to SEQ ID NO: 967464
aacucucugcaguuaccgg

SEQ ID NO: 967466 - RNA, 19 nt, Artificial Sequence
  Description of Artificial Sequence: Synthetic oligonucleotide
  Sense strand starting at position 3068 of SEQ ID NO: 913963
gcaggagaacgguguaaac

SEQ ID NO: 967467 - RNA, 19 nt, Artificial Sequence
  Description of Artificial Sequence: Synthetic oligonucleotide
  Antisense strand to SEQ ID NO: 967466
guuuacaccguucuccugc

SEQ ID NO: 967468 - RNA, 19 nt, Artificial Sequence
  Description of Artificial Sequence: Synthetic oligonucleotide
  Sense strand starting at position 2956 of SEQ ID NO: 913963
ucgcuauagaucgaaagca

SEQ ID NO: 967469 - RNA, 19 nt, Artificial Sequence
  Description of Artificial Sequence: Synthetic oligonucleotide
  Antisense strand to SEQ ID NO: 967468
ugcuuucgaucuauagcga

SEQ ID NO: 967470 - RNA, 19 nt, Artificial Sequence
  Description of Artificial Sequence: Synthetic oligonucleotide
  Sense strand starting at position 3981 of SEQ ID NO: 913963
uauagaauuuggugacaau

SEQ ID NO: 967471 - RNA, 19 nt, Artificial Sequence
  Description of Artificial Sequence: Synthetic oligonucleotide
  Antisense strand to SEQ ID NO: 967470
auugucaccaaauucuaua

SEQ ID NO: 967472 - RNA, 19 nt, Artificial Sequence
  Description of Artificial Sequence: Synthetic oligonucleotide
  Sense strand starting at position 1122 of SEQ ID NO: 913963
uucggaaugucacucucau

SEQ ID NO: 967473 - RNA, 19 nt, Artificial Sequence
  Description of Artificial Sequence: Synthetic oligonucleotide
  Antisense strand to SEQ ID NO: 967472
augagagugacauuccgaa

SEQ ID NO: 967474 - RNA, 19 nt, Artificial Sequence
  Description of Artificial Sequence: Synthetic oligonucleotide
  Sense strand starting at position 3814 of SEQ ID NO: 913963
ccagcaucucuuuguaaga

SEQ ID NO: 967475 - RNA, 19 nt, Artificial Sequence
  Description of Artificial Sequence: Synthetic oligonucleotide
  Antisense strand to SEQ ID NO: 967474
ucuuacaaagagaugcugg

SEQ ID NO: 967476 - RNA, 19 nt, Artificial Sequence
  Description of Artificial Sequence: Synthetic oligonucleotide
  Sense strand starting at position 1085 of SEQ ID NO: 913963
auagaauugcauuguuucu

SEQ ID NO: 967477 - RNA, 19 nt, Artificial Sequence
  Description of Artificial Sequence: Synthetic oligonucleotide
  Antisense strand to SEQ ID NO: 967476
agaaacaaugcaauucuau

SEQ ID NO: 967478 - RNA, 19 nt, Artificial Sequence
  Description of Artificial Sequence: Synthetic oligonucleotide
  Sense strand starting at position 2947 of SEQ ID NO: 913963
agcucaggaucgcuauaga

SEQ ID NO: 967479 - RNA, 19 nt, Artificial Sequence
  Description of Artificial Sequence: Synthetic oligonucleotide
  Antisense strand to SEQ ID NO: 967478
ucuauagcgauccugagcu

SEQ ID NO: 967480 - RNA, 19 nt, Artificial Sequence
  Description of Artificial Sequence: Synthetic oligonucleotide
  Sense strand starting at position 1117 of SEQ ID NO: 913963
uuacuuucggaaugucacu

SEQ ID NO: 967481 - RNA, 19 nt, Artificial Sequence
  Description of Artificial Sequence: Synthetic oligonucleotide
  Antisense strand to SEQ ID NO: 967480
agugacauuccgaaaguaa

SEQ ID NO: 967482 - RNA, 19 nt, Artificial Sequence
  Description of Artificial Sequence: Synthetic oligonucleotide
  Sense strand starting at position 1106 of SEQ ID NO: 913963
agcuuaaucgguuacuuuc

SEQ ID NO: 967483 - RNA, 19 nt, Artificial Sequence
  Description of Artificial Sequence: Synthetic oligonucleotide
  Antisense strand to SEQ ID NO: 967482
gaaaguaaccgauuaagcu

SEQ ID NO: 967484 - RNA, 19 nt, Artificial Sequence
  Description of Artificial Sequence: Synthetic oligonucleotide
  Sense strand starting at position 3712 of SEQ ID NO: 913963
aaguucgguuggucauaaa

SEQ ID NO: 967485 - RNA, 19 nt, Artificial Sequence
  Description of Artificial Sequence: Synthetic oligonucleotide
  Antisense strand to SEQ ID NO: 967484
uuuaugaccaaccgaacuu

SEQ ID NO: 967486 - RNA, 19 nt, Artificial Sequence
  Description of Artificial Sequence: Synthetic oligonucleotide
  Sense strand starting at position 3711 of SEQ ID NO: 913963
aaaguucgguuggucauaa

SEQ ID NO: 967487 - RNA, 19 nt, Artificial Sequence
  Description of Artificial Sequence: Synthetic oligonucleotide
  Antisense strand to SEQ ID NO: 967486
uuaugaccaaccgaacuuu

SEQ ID NO: 967488 - RNA, 19 nt, Artificial Sequence
  Description of Artificial Sequence: Synthetic oligonucleotide
  Sense strand starting at position 3979 of SEQ ID NO: 913963
uuuauagaauuuggugaca

SEQ ID NO: 967489 - RNA, 19 nt, Artificial Sequence
  Description of Artificial Sequence: Synthetic oligonucleotide
  Antisense strand to SEQ ID NO: 967488
ugucaccaaauucuauaaa

SEQ ID NO: 967490 - RNA, 19 nt, Artificial Sequence
  Description of Artificial Sequence: Synthetic oligonucleotide
  Sense strand starting at position 3710 of SEQ ID NO: 913963
gaaaguucgguuggucaua

SEQ ID NO: 967491 - RNA, 19 nt, Artificial Sequence
  Description of Artificial Sequence: Synthetic oligonucleotide
  Antisense strand to SEQ ID NO: 967490
uaugaccaaccgaacuuuc

SEQ ID NO: 967492 - RNA, 19 nt, Artificial Sequence
  Description of Artificial Sequence: Synthetic oligonucleotide
  Sense strand starting at position 2945 of SEQ ID NO: 913963
ugagcucaggaucgcuaua

SEQ ID NO: 967493 - RNA, 19 nt, Artificial Sequence
  Description of Artificial Sequence: Synthetic oligonucleotide
  Antisense strand to SEQ ID NO: 967492
uauagcgauccugagcuca

SEQ ID NO: 967494 - RNA, 19 nt, Artificial Sequence
  Description of Artificial Sequence: Synthetic oligonucleotide
  Sense strand starting at position 3871 of SEQ ID NO: 913963
aucucauuguuucuuuagu

SEQ ID NO: 967495 - RNA, 19 nt, Artificial Sequence
  Description of Artificial Sequence: Synthetic oligonucleotide
  Antisense strand to SEQ ID NO: 967494
acuaaagaaacaaugagau

SEQ ID NO: 967496 - RNA, 19 nt, Artificial Sequence
  Description of Artificial Sequence: Synthetic oligonucleotide
  Sense strand starting at position 1051 of SEQ ID NO: 913963
ucuccuuucuauccgguaa

SEQ ID NO: 967497 - RNA, 19 nt, Artificial Sequence
  Description of Artificial Sequence: Synthetic oligonucleotide
  Antisense strand to SEQ ID NO: 967496
uuaccggauagaaaggaga

SEQ ID NO: 967498 - RNA, 19 nt, Artificial Sequence
  Description of Artificial Sequence: Synthetic oligonucleotide
  Sense strand starting at position 2496 of SEQ ID NO: 913963
uguuuaacccuacgugacu

SEQ ID NO: 967499 - RNA, 19 nt, Artificial Sequence
  Description of Artificial Sequence: Synthetic oligonucleotide
  Antisense strand to SEQ ID NO: 967498
agucacguaggguuaaaca

SEQ ID NO: 967500 - RNA, 19 nt, Artificial Sequence
  Description of Artificial Sequence: Synthetic oligonucleotide
  Sense strand starting at position 1417 of SEQ ID NO: 913963
cggagaggucccggucacu

SEQ ID NO: 967501 - RNA, 19 nt, Artificial Sequence
  Description of Artificial Sequence: Synthetic oligonucleotide
  Antisense strand to SEQ ID NO: 967500
agugaccgggaccucuccg

SEQ ID NO: 967502 - RNA, 19 nt, Artificial Sequence
  Description of Artificial Sequence: Synthetic oligonucleotide
  Sense strand starting at position 3869 of SEQ ID NO: 913963
gcaucucauuguuucuuua

SEQ ID NO: 967503 - RNA, 19 nt, Artificial Sequence
  Description of Artificial Sequence: Synthetic oligonucleotide
  Antisense strand to SEQ ID NO: 967502
uaaagaaacaaugagaugc

SEQ ID NO: 967504 - RNA, 19 nt, Artificial Sequence
  Description of Artificial Sequence: Synthetic oligonucleotide
  Sense strand starting at position 2361 of SEQ ID NO: 913963
cccuguuucuguuccauca

SEQ ID NO: 967505 - RNA, 19 nt, Artificial Sequence
  Description of Artificial Sequence: Synthetic oligonucleotide
  Antisense strand to SEQ ID NO: 967504
ugauggaacagaaacaggg

SEQ ID NO: 967506 - RNA, 19 nt, Artificial Sequence
  Description of Artificial Sequence: Synthetic oligonucleotide
  Sense strand starting at position 3873 of SEQ ID NO: 913963
cucauuguuucuuuaguuu

SEQ ID NO: 967507 - RNA, 19 nt, Artificial Sequence
  Description of Artificial Sequence: Synthetic oligonucleotide
  Antisense strand to SEQ ID NO: 967506
aaacuaaagaaacaaugag

SEQ ID NO: 967508 - RNA, 19 nt, Artificial Sequence
  Description of Artificial Sequence: Synthetic oligonucleotide
  Sense strand starting at position 3872 of SEQ ID NO: 913963
ucucauuguuucuuuaguu

SEQ ID NO: 967509 - RNA, 19 nt, Artificial Sequence
  Description of Artificial Sequence: Synthetic oligonucleotide
  Antisense strand to SEQ ID NO: 967508
aacuaaagaaacaaugaga

SEQ ID NO: 967510 - RNA, 19 nt, Artificial Sequence
  Description of Artificial Sequence: Synthetic oligonucleotide
  Sense strand starting at position 1101 of SEQ ID NO: 913963
ucuuuagcuuaaucgguua

SEQ ID NO: 967511 - RNA, 19 nt, Artificial Sequence
  Description of Artificial Sequence: Synthetic oligonucleotide
  Antisense strand to SEQ ID NO: 967510
uaaccgauuaagcuaaaga

SEQ ID NO: 967512 - RNA, 19 nt, Artificial Sequence
  Description of Artificial Sequence: Synthetic oligonucleotide
  Sense strand starting at position 1104 of SEQ ID NO: 913963
uuagcuuaaucgguuacuu

SEQ ID NO: 967513 - RNA, 19 nt, Artificial Sequence
  Description of Artificial Sequence: Synthetic oligonucleotide
  Antisense strand to SEQ ID NO: 967512
aaguaaccgauuaagcuaa

SEQ ID NO: 967514 - RNA, 19 nt, Artificial Sequence
  Description of Artificial Sequence: Synthetic oligonucleotide
  Sense strand starting at position 113 of SEQ ID NO: 913963
uaccuaggaugugaauuaa

SEQ ID NO: 967515 - RNA, 19 nt, Artificial Sequence
  Description of Artificial Sequence: Synthetic oligonucleotide
  Antisense strand to SEQ ID NO: 967514
uuaauucacauccuaggua

SEQ ID NO: 967516 - RNA, 19 nt, Artificial Sequence
  Description of Artificial Sequence: Synthetic oligonucleotide
  Sense strand starting at position 2054 of SEQ ID NO: 913963
gcccuaguccgcuagaguc

SEQ ID NO: 967517 - RNA, 19 nt, Artificial Sequence
  Description of Artificial Sequence: Synthetic oligonucleotide
  Antisense strand to SEQ ID NO: 967516
gacucuagcggacuagggc

SEQ ID NO: 967518 - RNA, 19 nt, Artificial Sequence
  Description of Artificial Sequence: Synthetic oligonucleotide
  Sense strand starting at position 1701 of SEQ ID NO: 913964
ccagaagcacuguaacuaa

SEQ ID NO: 967519 - RNA, 19 nt, Artificial Sequence
  Description of Artificial Sequence: Synthetic oligonucleotide
  Antisense strand to SEQ ID NO: 967518
uuaguuacagugcuucugg

SEQ ID NO: 967520 - RNA, 19 nt, Artificial Sequence
  Description of Artificial Sequence: Synthetic oligonucleotide
  Sense strand starting at position 3650 of SEQ ID NO: 913964
cgucaaugaagggaguaua

SEQ ID NO: 967521 - RNA, 19 nt, Artificial Sequence
  Description of Artificial Sequence: Synthetic oligonucleotide
  Antisense strand to SEQ ID NO: 967520
uauacucccuucauugacg

SEQ ID NO: 967522 - RNA, 19 nt, Artificial Sequence
  Description of Artificial Sequence: Synthetic oligonucleotide
  Sense strand starting at position 155 of SEQ ID NO: 913964
cgagacuugaguggaaaga

SEQ ID NO: 967523 - RNA, 19 nt, Artificial Sequence
  Description of Artificial Sequence: Synthetic oligonucleotide
  Antisense strand to SEQ ID NO: 967522
ucuuuccacucaagucucg

SEQ ID NO: 967524 - RNA, 19 nt, Artificial Sequence
  Description of Artificial Sequence: Synthetic oligonucleotide
  Sense strand starting at position 154 of SEQ ID NO: 913964
acgagacuugaguggaaag

SEQ ID NO: 967525 - RNA, 19 nt, Artificial Sequence
  Description of Artificial Sequence: Synthetic oligonucleotide
  Antisense strand to SEQ ID NO: 967524
cuuuccacucaagucucgu

SEQ ID NO: 967526 - RNA, 19 nt, Artificial Sequence
  Description of Artificial Sequence: Synthetic oligonucleotide
  Sense strand starting at position 438 of SEQ ID NO: 913964
caucuucuaguagaagagu

SEQ ID NO: 967527 - RNA, 19 nt, Artificial Sequence
  Description of Artificial Sequence: Synthetic oligonucleotide
  Antisense strand to SEQ ID NO: 967526
acucuucuacuagaagaug

SEQ ID NO: 967528 - RNA, 19 nt, Artificial Sequence
  Description of Artificial Sequence: Synthetic oligonucleotide
  Sense strand starting at position 528 of SEQ ID NO: 913964
cuuggaagucugcaaauag

SEQ ID NO: 967529 - RNA, 19 nt, Artificial Sequence
  Description of Artificial Sequence: Synthetic oligonucleotide
  Antisense strand to SEQ ID NO: 967528
cuauuugcagacuuccaag

SEQ ID NO: 967530 - RNA, 19 nt, Artificial Sequence
  Description of Artificial Sequence: Synthetic oligonucleotide
  Sense strand starting at position 516 of SEQ ID NO: 913964
cuauguaaauuacuuggaa

SEQ ID NO: 967531 - RNA, 19 nt, Artificial Sequence
  Description of Artificial Sequence: Synthetic oligonucleotide
  Antisense strand to SEQ ID NO: 967530
uuccaaguaauuuacauag

SEQ ID NO: 967532 - RNA, 19 nt, Artificial Sequence
  Description of Artificial Sequence: Synthetic oligonucleotide
  Sense strand starting at position 1408 of SEQ ID NO: 913964
uuuggauuaggcugauaaa

SEQ ID NO: 967533 - RNA, 19 nt, Artificial Sequence
  Description of Artificial Sequence: Synthetic oligonucleotide
  Antisense strand to SEQ ID NO: 967532
uuuaucagccuaauccaaa

SEQ ID NO: 967534 - RNA, 19 nt, Artificial Sequence
  Description of Artificial Sequence: Synthetic oligonucleotide
  Sense strand starting at position 801 of SEQ ID NO: 913964
ugagauuacuggguucuga

SEQ ID NO: 967535 - RNA, 19 nt, Artificial Sequence
  Description of Artificial Sequence: Synthetic oligonucleotide
  Antisense strand to SEQ ID NO: 967534
ucagaacccaguaaucuca

SEQ ID NO: 967536 - RNA, 19 nt, Artificial Sequence
  Description of Artificial Sequence: Synthetic oligonucleotide
  Sense strand starting at position 3374 of SEQ ID NO: 913964
ugagaaaugagcggauuac

SEQ ID NO: 967537 - RNA, 19 nt, Artificial Sequence
  Description of Artificial Sequence: Synthetic oligonucleotide
  Antisense strand to SEQ ID NO: 967536
guaauccgcucauuucuca

SEQ ID NO: 967538 - RNA, 19 nt, Artificial Sequence
  Description of Artificial Sequence: Synthetic oligonucleotide
  Sense strand starting at position 3364 of SEQ ID NO: 913964
ugcgucugugugagaaaug

SEQ ID NO: 967539 - RNA, 19 nt, Artificial Sequence
  Description of Artificial Sequence: Synthetic oligonucleotide
  Antisense strand to SEQ ID NO: 967538
cauuucucacacagacgca

SEQ ID NO: 967540 - RNA, 19 nt, Artificial Sequence
  Description of Artificial Sequence: Synthetic oligonucleotide
  Sense strand starting at position 1451 of SEQ ID NO: 913964
uuaguaucuguacauaacu

SEQ ID NO: 967541 - RNA, 19 nt, Artificial Sequence
  Description of Artificial Sequence: Synthetic oligonucleotide
  Antisense strand to SEQ ID NO: 967540
aguuauguacagauacuaa

SEQ ID NO: 967542 - RNA, 19 nt, Artificial Sequence
  Description of Artificial Sequence: Synthetic oligonucleotide
  Sense strand starting at position 954 of SEQ ID NO: 913964
acuugcaaugguuacauua

SEQ ID NO: 967543 - RNA, 19 nt, Artificial Sequence
  Description of Artificial Sequence: Synthetic oligonucleotide
  Antisense strand to SEQ ID NO: 967542
uaauguaaccauugcaagu

SEQ ID NO: 967544 - RNA, 19 nt, Artificial Sequence
  Description of Artificial Sequence: Synthetic oligonucleotide
  Sense strand starting at position 3464 of SEQ ID NO: 913964
uccuuacugccagaaaggu

SEQ ID NO: 967545 - RNA, 19 nt, Artificial Sequence
  Description of Artificial Sequence: Synthetic oligonucleotide
  Antisense strand to SEQ ID NO: 967544
accuuucuggcaguaagga

SEQ ID NO: 967546 - RNA, 19 nt, Artificial Sequence
  Description of Artificial Sequence: Synthetic oligonucleotide
  Sense strand starting at position 453 of SEQ ID NO: 913964
gaguuagcucuuuguauuu

SEQ ID NO: 967547 - RNA, 19 nt, Artificial Sequence
  Description of Artificial Sequence: Synthetic oligonucleotide
  Antisense strand to SEQ ID NO: 967546
aaauacaaagagcuaacuc

SEQ ID NO: 967548 - RNA, 19 nt, Artificial Sequence
  Description of Artificial Sequence: Synthetic oligonucleotide
  Sense strand starting at position 1354 of SEQ ID NO: 913964
guaaccaagugauuaccau

SEQ ID NO: 967549 - RNA, 19 nt, Artificial Sequence
  Description of Artificial Sequence: Synthetic oligonucleotide
  Antisense strand to SEQ ID NO: 967548
augguaaucacuugguuac

SEQ ID NO: 967550 - RNA, 19 nt, Artificial Sequence
  Description of Artificial Sequence: Synthetic oligonucleotide
  Sense strand starting at position 3593 of SEQ ID NO: 913964
ucauucaugcgcguagcaa

SEQ ID NO: 967551 - RNA, 19 nt, Artificial Sequence
  Description of Artificial Sequence: Synthetic oligonucleotide
  Antisense strand to SEQ ID NO: 967550
uugcuacgcgcaugaauga

SEQ ID NO: 967552 - RNA, 19 nt, Artificial Sequence
  Description of Artificial Sequence: Synthetic oligonucleotide
  Sense strand starting at position 3373 of SEQ ID NO: 913964
gugagaaaugagcggauua

SEQ ID NO: 967553 - RNA, 19 nt, Artificial Sequence
  Description of Artificial Sequence: Synthetic oligonucleotide
  Antisense strand to SEQ ID NO: 967552
uaauccgcucauuucucac

SEQ ID NO: 967554 - RNA, 19 nt, Artificial Sequence
  Description of Artificial Sequence: Synthetic oligonucleotide
  Sense strand starting at position 800 of SEQ ID NO: 913964
uugagauuacuggguucug

SEQ ID NO: 967555 - RNA, 19 nt, Artificial Sequence
  Description of Artificial Sequence: Synthetic oligonucleotide
  Antisense strand to SEQ ID NO: 967554
cagaacccaguaaucucaa

SEQ ID NO: 967556 - RNA, 19 nt, Artificial Sequence
  Description of Artificial Sequence: Synthetic oligonucleotide
  Sense strand starting at position 233 of SEQ ID NO: 913964
aaaugaugcuaaguaaggu

SEQ ID NO: 967557 - RNA, 19 nt, Artificial Sequence
  Description of Artificial Sequence: Synthetic oligonucleotide
  Antisense strand to SEQ ID NO: 967556
accuuacuuagcaucauuu

SEQ ID NO: 967558 - RNA, 19 nt, Artificial Sequence
  Description of Artificial Sequence: Synthetic oligonucleotide
  Sense strand starting at position 2466 of SEQ ID NO: 913964
gcgcgaacucugucccuuu

SEQ ID NO: 967559 - RNA, 19 nt, Artificial Sequence
  Description of Artificial Sequence: Synthetic oligonucleotide
  Antisense strand to SEQ ID NO: 967558
aaagggacagaguucgcgc

SEQ ID NO: 967560 - RNA, 19 nt, Artificial Sequence
  Description of Artificial Sequence: Synthetic oligonucleotide
  Sense strand starting at position 519 of SEQ ID NO: 913964
uguaaauuacuuggaaguc

SEQ ID NO: 967561 - RNA, 19 nt, Artificial Sequence
  Description of Artificial Sequence: Synthetic oligonucleotide
  Antisense strand to SEQ ID NO: 967560
gacuuccaaguaauuuaca

SEQ ID NO: 967562 - RNA, 19 nt, Artificial Sequence
  Description of Artificial Sequence: Synthetic oligonucleotide
  Sense strand starting at position 3343 of SEQ ID NO: 913964
cggacauuccucggaaaca

SEQ ID NO: 967563 - RNA, 19 nt, Artificial Sequence
  Description of Artificial Sequence: Synthetic oligonucleotide
  Antisense strand to SEQ ID NO: 967562
uguuuccgaggaauguccg

SEQ ID NO: 967564 - RNA, 19 nt, Artificial Sequence
  Description of Artificial Sequence: Synthetic oligonucleotide
  Sense strand starting at position 2129 of SEQ ID NO: 913964
gaaacaucccgagggcauu

SEQ ID NO: 967565 - RNA, 19 nt, Artificial Sequence
  Description of Artificial Sequence: Synthetic oligonucleotide
  Antisense strand to SEQ ID NO: 967564
aaugcccucgggauguuuc

SEQ ID NO: 967566 - RNA, 19 nt, Artificial Sequence
  Description of Artificial Sequence: Synthetic oligonucleotide
  Sense strand starting at position 1411 of SEQ ID NO: 913964
ggauuaggcugauaaauuu

SEQ ID NO: 967567 - RNA, 19 nt, Artificial Sequence
  Description of Artificial Sequence: Synthetic oligonucleotide
  Antisense strand to SEQ ID NO: 967566
aaauuuaucagccuaaucc

SEQ ID NO: 967568 - RNA, 19 nt, Artificial Sequence
  Description of Artificial Sequence: Synthetic oligonucleotide
  Sense strand starting at position 1459 of SEQ ID NO: 913964
uguacauaacuuugguuaa

SEQ ID NO: 967569 - RNA, 19 nt, Artificial Sequence
  Description of Artificial Sequence: Synthetic oligonucleotide
  Antisense strand to SEQ ID NO: 967568
uuaaccaaaguuauguaca

SEQ ID NO: 967570 - RNA, 19 nt, Artificial Sequence
  Description of Artificial Sequence: Synthetic oligonucleotide
  Sense strand starting at position 463 of SEQ ID NO: 913964
uuuguauuuguugguguau

SEQ ID NO: 967571 - RNA, 19 nt, Artificial Sequence
  Description of Artificial Sequence: Synthetic oligonucleotide
  Antisense strand to SEQ ID NO: 967570
auacaccaacaaauacaaa

SEQ ID NO: 967572 - RNA, 19 nt, Artificial Sequence
  Description of Artificial Sequence: Synthetic oligonucleotide
  Sense strand starting at position 1333 of SEQ ID NO: 913964
aaacgugcugaauagcaau

SEQ ID NO: 967573 - RNA, 19 nt, Artificial Sequence
  Description of Artificial Sequence: Synthetic oligonucleotide
  Antisense strand to SEQ ID NO: 967572
auugcuauucagcacguuu

SEQ ID NO: 967574 - RNA, 19 nt, Artificial Sequence
  Description of Artificial Sequence: Synthetic oligonucleotide
  Sense strand starting at position 3342 of SEQ ID NO: 913964
ccggacauuccucggaaac

SEQ ID NO: 967575 - RNA, 19 nt, Artificial Sequence
  Description of Artificial Sequence: Synthetic oligonucleotide
  Antisense strand to SEQ ID NO: 967574
guuuccgaggaauguccgg

SEQ ID NO: 967576 - RNA, 19 nt, Artificial Sequence
  Description of Artificial Sequence: Synthetic oligonucleotide
  Sense strand starting at position 1326 of SEQ ID NO: 913964
uugauauaaacgugcugaa

SEQ ID NO: 967577 - RNA, 19 nt, Artificial Sequence
  Description of Artificial Sequence: Synthetic oligonucleotide
  Antisense strand to SEQ ID NO: 967576
uucagcacguuuauaucaa

SEQ ID NO: 967578 - RNA, 19 nt, Artificial Sequence
  Description of Artificial Sequence: Synthetic oligonucleotide
  Sense strand starting at position 242 of SEQ ID NO: 913964
uaaguaaggucuguuugac

SEQ ID NO: 967579 - RNA, 19 nt, Artificial Sequence
  Description of Artificial Sequence: Synthetic oligonucleotide
  Antisense strand to SEQ ID NO: 967578
gucaaacagaccuuacuua

SEQ ID NO: 967580 - RNA, 19 nt, Artificial Sequence
  Description of Artificial Sequence: Synthetic oligonucleotide
  Sense strand starting at position 3720 of SEQ ID NO: 913964
ugaagauugacuugugcuu

SEQ ID NO: 967581 - RNA, 19 nt, Artificial Sequence
  Description of Artificial Sequence: Synthetic oligonucleotide
  Antisense strand to SEQ ID NO: 967580
aagcacaagucaaucuuca

SEQ ID NO: 967582 - RNA, 19 nt, Artificial Sequence
  Description of Artificial Sequence: Synthetic oligonucleotide
  Sense strand starting at position 62 of SEQ ID NO: 913964
agcucuuauuagguacuua

SEQ ID NO: 967583 - RNA, 19 nt, Artificial Sequence
  Description of Artificial Sequence: Synthetic oligonucleotide
  Antisense strand to SEQ ID NO: 967582
uaaguaccuaauaagagcu

SEQ ID NO: 967584 - RNA, 19 nt, Artificial Sequence
  Description of Artificial Sequence: Synthetic oligonucleotide
  Sense strand starting at position 241 of SEQ ID NO: 913964
cuaaguaaggucuguuuga

SEQ ID NO: 967585 - RNA, 19 nt, Artificial Sequence
  Description of Artificial Sequence: Synthetic oligonucleotide
  Antisense strand to SEQ ID NO: 967584
ucaaacagaccuuacuuag

SEQ ID NO: 967586 - RNA, 19 nt, Artificial Sequence
  Description of Artificial Sequence: Synthetic oligonucleotide
  Sense strand starting at position 1448 of SEQ ID NO: 913964
guauuaguaucuguacaua

SEQ ID NO: 967587 - RNA, 19 nt, Artificial Sequence
  Description of Artificial Sequence: Synthetic oligonucleotide
  Antisense strand to SEQ ID NO: 967586
uauguacagauacuaauac

SEQ ID NO: 967588 - RNA, 19 nt, Artificial Sequence
  Description of Artificial Sequence: Synthetic oligonucleotide
  Sense strand starting at position 1015 of SEQ ID NO: 913964
cuuccuaugcguuauuaaa

SEQ ID NO: 967589 - RNA, 19 nt, Artificial Sequence
  Description of Artificial Sequence: Synthetic oligonucleotide
  Antisense strand to SEQ ID NO: 967588
uuuaauaacgcauaggaag

SEQ ID NO: 967590 - RNA, 19 nt, Artificial Sequence
  Description of Artificial Sequence: Synthetic oligonucleotide
  Sense strand starting at position 2177 of SEQ ID NO: 913964
uccggacugcggcaaagau

SEQ ID NO: 967591 - RNA, 19 nt, Artificial Sequence
  Description of Artificial Sequence: Synthetic oligonucleotide
  Antisense strand to SEQ ID NO: 967590
aucuuugccgcaguccgga

SEQ ID NO: 967592 - RNA, 19 nt, Artificial Sequence
  Description of Artificial Sequence: Synthetic oligonucleotide
  Sense strand starting at position 835 of SEQ ID NO: 913964
gccuaauuccauugaguac

SEQ ID NO: 967593 - RNA, 19 nt, Artificial Sequence
  Description of Artificial Sequence: Synthetic oligonucleotide
  Antisense strand to SEQ ID NO: 967592
guacucaauggaauuaggc

SEQ ID NO: 967594 - RNA, 19 nt, Artificial Sequence
  Description of Artificial Sequence: Synthetic oligonucleotide
  Sense strand starting at position 3641 of SEQ ID NO: 913964
uguucugggcgucaaugaa

SEQ ID NO: 967595 - RNA, 19 nt, Artificial Sequence
  Description of Artificial Sequence: Synthetic oligonucleotide
  Antisense strand to SEQ ID NO: 967594
uucauugacgcccagaaca

SEQ ID NO: 967596 - RNA, 19 nt, Artificial Sequence
  Description of Artificial Sequence: Synthetic oligonucleotide
  Sense strand starting at position 3649 of SEQ ID NO: 913964
gcgucaaugaagggaguau

SEQ ID NO: 967597 - RNA, 19 nt, Artificial Sequence
  Description of Artificial Sequence: Synthetic oligonucleotide
  Antisense strand to SEQ ID NO: 967596
auacucccuucauugacgc

SEQ ID NO: 967598 - RNA, 19 nt, Artificial Sequence
  Description of Artificial Sequence: Synthetic oligonucleotide
  Sense strand starting at position 822 of SEQ ID NO: 913965
ccagaagcacuguaacuaa

SEQ ID NO: 967599 - RNA, 19 nt, Artificial Sequence
  Description of Artificial Sequence: Synthetic oligonucleotide
  Antisense strand to SEQ ID NO: 967598
uuaguuacagugcuucugg

SEQ ID NO: 967600 - RNA, 19 nt, Artificial Sequence
  Description of Artificial Sequence: Synthetic oligonucleotide
  Sense strand starting at position 2771 of SEQ ID NO: 913965
cgucaaugaagggaguaua

SEQ ID NO: 967601 - RNA, 19 nt, Artificial Sequence
  Description of Artificial Sequence: Synthetic oligonucleotide
  Antisense strand to SEQ ID NO: 967600
uauacucccuucauugacg

SEQ ID NO: 967602 - RNA, 19 nt, Artificial Sequence
  Description of Artificial Sequence: Synthetic oligonucleotide
  Sense strand starting at position 3971 of SEQ ID NO: 913965
ucacuuucuggguauacaa

SEQ ID NO: 967603 - RNA, 19 nt, Artificial Sequence
  Description of Artificial Sequence: Synthetic oligonucleotide
  Antisense strand to SEQ ID NO: 967602
uuguauacccagaaaguga

SEQ ID NO: 967604 - RNA, 19 nt, Artificial Sequence
  Description of Artificial Sequence: Synthetic oligonucleotide
  Sense strand starting at position 3903 of SEQ ID NO: 913965
ugaucagauuugucggcua

SEQ ID NO: 967605 - RNA, 19 nt, Artificial Sequence
  Description of Artificial Sequence: Synthetic oligonucleotide
  Antisense strand to SEQ ID NO: 967604
uagccgacaaaucugauca

SEQ ID NO: 967606 - RNA, 19 nt, Artificial Sequence
  Description of Artificial Sequence: Synthetic oligonucleotide
  Sense strand starting at position 3815 of SEQ ID NO: 913965
uagguuagauggucaggaa

SEQ ID NO: 967607 - RNA, 19 nt, Artificial Sequence
  Description of Artificial Sequence: Synthetic oligonucleotide
  Antisense strand to SEQ ID NO: 967606
uuccugaccaucuaaccua

SEQ ID NO: 967608 - RNA, 19 nt, Artificial Sequence
  Description of Artificial Sequence: Synthetic oligonucleotide
  Sense strand starting at position 529 of SEQ ID NO: 913965
uuuggauuaggcugauaaa

SEQ ID NO: 967609 - RNA, 19 nt, Artificial Sequence
  Description of Artificial Sequence: Synthetic oligonucleotide
  Antisense strand to SEQ ID NO: 967608
uuuaucagccuaauccaaa

SEQ ID NO: 967610 - RNA, 19 nt, Artificial Sequence
  Description of Artificial Sequence: Synthetic oligonucleotide
  Sense strand starting at position 3916 of SEQ ID NO: 913965
cggcuagaauauuugugua

SEQ ID NO: 967611 - RNA, 19 nt, Artificial Sequence
  Description of Artificial Sequence: Synthetic oligonucleotide
  Antisense strand to SEQ ID NO: 967610
uacacaaauauucuagccg

SEQ ID NO: 967612 - RNA, 19 nt, Artificial Sequence
  Description of Artificial Sequence: Synthetic oligonucleotide
  Sense strand starting at position 2495 of SEQ ID NO: 913965
ugagaaaugagcggauuac

SEQ ID NO: 967613 - RNA, 19 nt, Artificial Sequence
  Description of Artificial Sequence: Synthetic oligonucleotide
  Antisense strand to SEQ ID NO: 967612
guaauccgcucauuucuca

SEQ ID NO: 967614 - RNA, 19 nt, Artificial Sequence
  Description of Artificial Sequence: Synthetic oligonucleotide
  Sense strand starting at position 3806 of SEQ ID NO: 913965
uuuauaaccuagguuagau

SEQ ID NO: 967615 - RNA, 19 nt, Artificial Sequence
  Description of Artificial Sequence: Synthetic oligonucleotide
  Antisense strand to SEQ ID NO: 967614
aucuaaccuagguuauaaa

SEQ ID NO: 967616 - RNA, 19 nt, Artificial Sequence
  Description of Artificial Sequence: Synthetic oligonucleotide
  Sense strand starting at position 3747 of SEQ ID NO: 913965
aaaguaggauggguguuaa

SEQ ID NO: 967617 - RNA, 19 nt, Artificial Sequence
  Description of Artificial Sequence: Synthetic oligonucleotide
  Antisense strand to SEQ ID NO: 967616
uuaacacccauccuacuuu

SEQ ID NO: 967618 - RNA, 19 nt, Artificial Sequence
  Description of Artificial Sequence: Synthetic oligonucleotide
  Sense strand starting at position 2485 of SEQ ID NO: 913965
ugcgucugugugagaaaug

SEQ ID NO: 967619 - RNA, 19 nt, Artificial Sequence
  Description of Artificial Sequence: Synthetic oligonucleotide
  Antisense strand to SEQ ID NO: 967618
cauuucucacacagacgca

SEQ ID NO: 967620 - RNA, 19 nt, Artificial Sequence
  Description of Artificial Sequence: Synthetic oligonucleotide
  Sense strand starting at position 572 of SEQ ID NO: 913965
uuaguaucuguacauaacu

SEQ ID NO: 967621 - RNA, 19 nt, Artificial Sequence
  Description of Artificial Sequence: Synthetic oligonucleotide
  Antisense strand to SEQ ID NO: 967620
aguuauguacagauacuaa

SEQ ID NO: 967622 - RNA, 19 nt, Artificial Sequence
  Description of Artificial Sequence: Synthetic oligonucleotide
  Sense strand starting at position 75 of SEQ ID NO: 913965
acuugcaaugguuacauua

SEQ ID NO: 967623 - RNA, 19 nt, Artificial Sequence
  Description of Artificial Sequence: Synthetic oligonucleotide
  Antisense strand to SEQ ID NO: 967622
uaauguaaccauugcaagu

SEQ ID NO: 967624 - RNA, 19 nt, Artificial Sequence
  Description of Artificial Sequence: Synthetic oligonucleotide
  Sense strand starting at position 2585 of SEQ ID NO: 913965
uccuuacugccagaaaggu

SEQ ID NO: 967625 - RNA, 19 nt, Artificial Sequence
  Description of Artificial Sequence: Synthetic oligonucleotide
  Antisense strand to SEQ ID NO: 967624
accuuucuggcaguaagga

SEQ ID NO: 967626 - RNA, 19 nt, Artificial Sequence
  Description of Artificial Sequence: Synthetic oligonucleotide
  Sense strand starting at position 475 of SEQ ID NO: 913965
guaaccaagugauuaccau

SEQ ID NO: 967627 - RNA, 19 nt, Artificial Sequence
  Description of Artificial Sequence: Synthetic oligonucleotide
  Antisense strand to SEQ ID NO: 967626
augguaaucacuugguuac

SEQ ID NO: 967628 - RNA, 19 nt, Artificial Sequence
  Description of Artificial Sequence: Synthetic oligonucleotide
  Sense strand starting at position 2714 of SEQ ID NO: 913965
ucauucaugcgcguagcaa

SEQ ID NO: 967629 - RNA, 19 nt, Artificial Sequence
  Description of Artificial Sequence: Synthetic oligonucleotide
  Antisense strand to SEQ ID NO: 967628
uugcuacgcgcaugaauga

SEQ ID NO: 967630 - RNA, 19 nt, Artificial Sequence
  Description of Artificial Sequence: Synthetic oligonucleotide
  Sense strand starting at position 3931 of SEQ ID NO: 913965
uguaaucggaaaggguaau

SEQ ID NO: 967631 - RNA, 19 nt, Artificial Sequence
  Description of Artificial Sequence: Synthetic oligonucleotide
  Antisense strand to SEQ ID NO: 967630
auuacccuuuccgauuaca

SEQ ID NO: 967632 - RNA, 19 nt, Artificial Sequence
  Description of Artificial Sequence: Synthetic oligonucleotide
  Sense strand starting at position 2494 of SEQ ID NO: 913965
gugagaaaugagcggauua

SEQ ID NO: 967633 - RNA, 19 nt, Artificial Sequence
  Description of Artificial Sequence: Synthetic oligonucleotide
  Antisense strand to SEQ ID NO: 967632
uaauccgcucauuucucac

SEQ ID NO: 967634 - RNA, 19 nt, Artificial Sequence
  Description of Artificial Sequence: Synthetic oligonucleotide
  Sense strand starting at position 1587 of SEQ ID NO: 913965
gcgcgaacucugucccuuu

SEQ ID NO: 967635 - RNA, 19 nt, Artificial Sequence
  Description of Artificial Sequence: Synthetic oligonucleotide
  Antisense strand to SEQ ID NO: 967634
aaagggacagaguucgcgc

SEQ ID NO: 967636 - RNA, 19 nt, Artificial Sequence
  Description of Artificial Sequence: Synthetic oligonucleotide
  Sense strand starting at position 3805 of SEQ ID NO: 913965
guuuauaaccuagguuaga

SEQ ID NO: 967637 - RNA, 19 nt, Artificial Sequence
  Description of Artificial Sequence: Synthetic oligonucleotide
  Antisense strand to SEQ ID NO: 967636
ucuaaccuagguuauaaac

SEQ ID NO: 967638 - RNA, 19 nt, Artificial Sequence
  Description of Artificial Sequence: Synthetic oligonucleotide
  Sense strand starting at position 2464 of SEQ ID NO: 913965
cggacauuccucggaaaca

SEQ ID NO: 967639 - RNA, 19 nt, Artificial Sequence
  Description of Artificial Sequence: Synthetic oligonucleotide
  Antisense strand to SEQ ID NO: 967638
uguuuccgaggaauguccg

SEQ ID NO: 967640 - RNA, 19 nt, Artificial Sequence
  Description of Artificial Sequence: Synthetic oligonucleotide
  Sense strand starting at position 3418 of SEQ ID NO: 913965
guaaauuauuaccugucaa

SEQ ID NO: 967641 - RNA, 19 nt, Artificial Sequence
  Description of Artificial Sequence: Synthetic oligonucleotide
  Antisense strand to SEQ ID NO: 967640
uugacagguaauaauuuac

SEQ ID NO: 967642 - RNA, 19 nt, Artificial Sequence
  Description of Artificial Sequence: Synthetic oligonucleotide
  Sense strand starting at position 1250 of SEQ ID NO: 913965
gaaacaucccgagggcauu

SEQ ID NO: 967643 - RNA, 19 nt, Artificial Sequence
  Description of Artificial Sequence: Synthetic oligonucleotide
  Antisense strand to SEQ ID NO: 967642
aaugcccucgggauguuuc

SEQ ID NO: 967644 - RNA, 19 nt, Artificial Sequence
  Description of Artificial Sequence: Synthetic oligonucleotide
  Sense strand starting at position 532 of SEQ ID NO: 913965
ggauuaggcugauaaauuu

SEQ ID NO: 967645 - RNA, 19 nt, Artificial Sequence
  Description of Artificial Sequence: Synthetic oligonucleotide
  Antisense strand to SEQ ID NO: 967644
aaauuuaucagccuaaucc

SEQ ID NO: 967646 - RNA, 19 nt, Artificial Sequence
  Description of Artificial Sequence: Synthetic oligonucleotide
  Sense strand starting at position 3417 of SEQ ID NO: 913965
gguaaauuauuaccuguca

SEQ ID NO: 967647 - RNA, 19 nt, Artificial Sequence
  Description of Artificial Sequence: Synthetic oligonucleotide
  Antisense strand to SEQ ID NO: 967646
ugacagguaauaauuuacc

SEQ ID NO: 967648 - RNA, 19 nt, Artificial Sequence
  Description of Artificial Sequence: Synthetic oligonucleotide
  Sense strand starting at position 580 of SEQ ID NO: 913965
uguacauaacuuugguuaa

SEQ ID NO: 967649 - RNA, 19 nt, Artificial Sequence
  Description of Artificial Sequence: Synthetic oligonucleotide
  Antisense strand to SEQ ID NO: 967648
uuaaccaaaguuauguaca

SEQ ID NO: 967650 - RNA, 19 nt, Artificial Sequence
  Description of Artificial Sequence: Synthetic oligonucleotide
  Sense strand starting at position 454 of SEQ ID NO: 913965
aaacgugcugaauagcaau

SEQ ID NO: 967651 - RNA, 19 nt, Artificial Sequence
  Description of Artificial Sequence: Synthetic oligonucleotide
  Antisense strand to SEQ ID NO: 967650
auugcuauucagcacguuu

SEQ ID NO: 967652 - RNA, 19 nt, Artificial Sequence
  Description of Artificial Sequence: Synthetic oligonucleotide
  Sense strand starting at position 2463 of SEQ ID NO: 913965
ccggacauuccucggaaac

SEQ ID NO: 967653 - RNA, 19 nt, Artificial Sequence
  Description of Artificial Sequence: Synthetic oligonucleotide
  Antisense strand to SEQ ID NO: 967652
guuuccgaggaauguccgg

SEQ ID NO: 967654 - RNA, 19 nt, Artificial Sequence
  Description of Artificial Sequence: Synthetic oligonucleotide
  Sense strand starting at position 3143 of SEQ ID NO: 913965
cauagaugucuguaugcug

SEQ ID NO: 967655 - RNA, 19 nt, Artificial Sequence
  Description of Artificial Sequence: Synthetic oligonucleotide
  Antisense strand to SEQ ID NO: 967654
cagcauacagacaucuaug

SEQ ID NO: 967656 - RNA, 19 nt, Artificial Sequence
  Description of Artificial Sequence: Synthetic oligonucleotide
  Sense strand starting at position 3970 of SEQ ID NO: 913965
gucacuuucuggguauaca

SEQ ID NO: 967657 - RNA, 19 nt, Artificial Sequence
  Description of Artificial Sequence: Synthetic oligonucleotide
  Antisense strand to SEQ ID NO: 967656
uguauacccagaaagugac

SEQ ID NO: 967658 - RNA, 19 nt, Artificial Sequence
  Description of Artificial Sequence: Synthetic oligonucleotide
  Sense strand starting at position 3966 of SEQ ID NO: 913965
uaaugucacuuucugggua

SEQ ID NO: 967659 - RNA, 19 nt, Artificial Sequence
  Description of Artificial Sequence: Synthetic oligonucleotide
  Antisense strand to SEQ ID NO: 967658
uacccagaaagugacauua

SEQ ID NO: 967660 - RNA, 19 nt, Artificial Sequence
  Description of Artificial Sequence: Synthetic oligonucleotide
  Sense strand starting at position 447 of SEQ ID NO: 913965
uugauauaaacgugcugaa

SEQ ID NO: 967661 - RNA, 19 nt, Artificial Sequence
  Description of Artificial Sequence: Synthetic oligonucleotide
  Antisense strand to SEQ ID NO: 967660
uucagcacguuuauaucaa

SEQ ID NO: 967662 - RNA, 19 nt, Artificial Sequence
  Description of Artificial Sequence: Synthetic oligonucleotide
  Sense strand starting at position 2841 of SEQ ID NO: 913965
ugaagauugacuugugcuu

SEQ ID NO: 967663 - RNA, 19 nt, Artificial Sequence
  Description of Artificial Sequence: Synthetic oligonucleotide
  Antisense strand to SEQ ID NO: 967662
aagcacaagucaaucuuca

SEQ ID NO: 967664 - RNA, 19 nt, Artificial Sequence
  Description of Artificial Sequence: Synthetic oligonucleotide
  Sense strand starting at position 569 of SEQ ID NO: 913965
guauuaguaucuguacaua

SEQ ID NO: 967665 - RNA, 19 nt, Artificial Sequence
  Description of Artificial Sequence: Synthetic oligonucleotide
  Antisense strand to SEQ ID NO: 967664
uauguacagauacuaauac

SEQ ID NO: 967666 - RNA, 19 nt, Artificial Sequence
  Description of Artificial Sequence: Synthetic oligonucleotide
  Sense strand starting at position 136 of SEQ ID NO: 913965
cuuccuaugcguuauuaaa

SEQ ID NO: 967667 - RNA, 19 nt, Artificial Sequence
  Description of Artificial Sequence: Synthetic oligonucleotide
  Antisense strand to SEQ ID NO: 967666
uuuaauaacgcauaggaag

SEQ ID NO: 967668 - RNA, 19 nt, Artificial Sequence
  Description of Artificial Sequence: Synthetic oligonucleotide
  Sense strand starting at position 3962 of SEQ ID NO: 913965
guauuaaugucacuuucug

SEQ ID NO: 967669 - RNA, 19 nt, Artificial Sequence
  Description of Artificial Sequence: Synthetic oligonucleotide
  Antisense strand to SEQ ID NO: 967668
cagaaagugacauuaauac

SEQ ID NO: 967670 - RNA, 19 nt, Artificial Sequence
  Description of Artificial Sequence: Synthetic oligonucleotide
  Sense strand starting at position 1298 of SEQ ID NO: 913965
uccggacugcggcaaagau

SEQ ID NO: 967671 - RNA, 19 nt, Artificial Sequence
  Description of Artificial Sequence: Synthetic oligonucleotide
  Antisense strand to SEQ ID NO: 967670
aucuuugccgcaguccgga

SEQ ID NO: 967672 - RNA, 19 nt, Artificial Sequence
  Description of Artificial Sequence: Synthetic oligonucleotide
  Sense strand starting at position 2762 of SEQ ID NO: 913965
uguucugggcgucaaugaa

SEQ ID NO: 967673 - RNA, 19 nt, Artificial Sequence
  Description of Artificial Sequence: Synthetic oligonucleotide
  Antisense strand to SEQ ID NO: 967672
uucauugacgcccagaaca

SEQ ID NO: 967674 - RNA, 19 nt, Artificial Sequence
  Description of Artificial Sequence: Synthetic oligonucleotide
  Sense strand starting at position 2770 of SEQ ID NO: 913965
gcgucaaugaagggaguau

SEQ ID NO: 967675 - RNA, 19 nt, Artificial Sequence
  Description of Artificial Sequence: Synthetic oligonucleotide
  Antisense strand to SEQ ID NO: 967674
auacucccuucauugacgc

SEQ ID NO: 967676 - RNA, 19 nt, Artificial Sequence
  Description of Artificial Sequence: Synthetic oligonucleotide
  Sense strand starting at position 2330 of SEQ ID NO: 913965
guuuguuguuuaccaagaa

SEQ ID NO: 967677 - RNA, 19 nt, Artificial Sequence
  Description of Artificial Sequence: Synthetic oligonucleotide
  Antisense strand to SEQ ID NO: 967676
uucuugguaaacaacaaac

SEQ ID NO: 967678 - RNA, 19 nt, Artificial Sequence
  Description of Artificial Sequence: Synthetic oligonucleotide
  Sense strand starting at position 3322 of SEQ ID NO: 913966
agagguugcagugagaaac

SEQ ID NO: 967679 - RNA, 19 nt, Artificial Sequence
  Description of Artificial Sequence: Synthetic oligonucleotide
  Antisense strand to SEQ ID NO: 967678
guuucucacugcaaccucu

SEQ ID NO: 967680 - RNA, 19 nt, Artificial Sequence
  Description of Artificial Sequence: Synthetic oligonucleotide
  Sense strand starting at position 1169 of SEQ ID NO: 913966
gccgaauagcugucccagu

SEQ ID NO: 967681 - RNA, 19 nt, Artificial Sequence
  Description of Artificial Sequence: Synthetic oligonucleotide
  Antisense strand to SEQ ID NO: 967680
acugggacagcuauucggc

SEQ ID NO: 967682 - RNA, 19 nt, Artificial Sequence
  Description of Artificial Sequence: Synthetic oligonucleotide
  Sense strand starting at position 2859 of SEQ ID NO: 913966
gaaguagccagucaggaua

SEQ ID NO: 967683 - RNA, 19 nt, Artificial Sequence
  Description of Artificial Sequence: Synthetic oligonucleotide
  Antisense strand to SEQ ID NO: 967682
uauccugacuggcuacuuc

SEQ ID NO: 967684 - RNA, 19 nt, Artificial Sequence
  Description of Artificial Sequence: Synthetic oligonucleotide
  Sense strand starting at position 1195 of SEQ ID NO: 913966
agcuaaguacccuacuaga

SEQ ID NO: 967685 - RNA, 19 nt, Artificial Sequence
  Description of Artificial Sequence: Synthetic oligonucleotide
  Antisense strand to SEQ ID NO: 967684
ucuaguaggguacuuagcu

SEQ ID NO: 967686 - RNA, 19 nt, Artificial Sequence
  Description of Artificial Sequence: Synthetic oligonucleotide
  Sense strand starting at position 693 of SEQ ID NO: 913966
ggauaaaggucacuucuca

SEQ ID NO: 967687 - RNA, 19 nt, Artificial Sequence
  Description of Artificial Sequence: Synthetic oligonucleotide
  Antisense strand to SEQ ID NO: 967686
ugagaagugaccuuuaucc

SEQ ID NO: 967688 - RNA, 19 nt, Artificial Sequence
  Description of Artificial Sequence: Synthetic oligonucleotide
  Sense strand starting at position 3332 of SEQ ID NO: 913966
gugagaaacucugucaaga

SEQ ID NO: 967689 - RNA, 19 nt, Artificial Sequence
  Description of Artificial Sequence: Synthetic oligonucleotide
  Antisense strand to SEQ ID NO: 967688
ucuugacagaguuucucac

SEQ ID NO: 967690 - RNA, 19 nt, Artificial Sequence
  Description of Artificial Sequence: Synthetic oligonucleotide
  Sense strand starting at position 2363 of SEQ ID NO: 913966
ggaggaaucucaucuaugu

SEQ ID NO: 967691 - RNA, 19 nt, Artificial Sequence
  Description of Artificial Sequence: Synthetic oligonucleotide
  Antisense strand to SEQ ID NO: 967690
acauagaugagauuccucc

SEQ ID NO: 967692 - RNA, 19 nt, Artificial Sequence
  Description of Artificial Sequence: Synthetic oligonucleotide
  Sense strand starting at position 2846 of SEQ ID NO: 913966
gaagguaaugggugaagua

SEQ ID NO: 967693 - RNA, 19 nt, Artificial Sequence
  Description of Artificial Sequence: Synthetic oligonucleotide
  Antisense strand to SEQ ID NO: 967692
uacuucacccauuaccuuc

SEQ ID NO: 967694 - RNA, 19 nt, Artificial Sequence
  Description of Artificial Sequence: Synthetic oligonucleotide
  Sense strand starting at position 2551 of SEQ ID NO: 913966
gagacagagugaucagucu

SEQ ID NO: 967695 - RNA, 19 nt, Artificial Sequence
  Description of Artificial Sequence: Synthetic oligonucleotide
  Antisense strand to SEQ ID NO: 967694
agacugaucacucugucuc

SEQ ID NO: 967696 - RNA, 19 nt, Artificial Sequence
  Description of Artificial Sequence: Synthetic oligonucleotide
  Sense strand starting at position 2351 of SEQ ID NO: 913966
ggcugugagauuggaggaa

SEQ ID NO: 967697 - RNA, 19 nt, Artificial Sequence
  Description of Artificial Sequence: Synthetic oligonucleotide
  Antisense strand to SEQ ID NO: 967696
uuccuccaaucucacagcc

SEQ ID NO: 967698 - RNA, 19 nt, Artificial Sequence
  Description of Artificial Sequence: Synthetic oligonucleotide
  Sense strand starting at position 331 of SEQ ID NO: 913966
cccaacucaguuuauguaa

SEQ ID NO: 967699 - RNA, 19 nt, Artificial Sequence
  Description of Artificial Sequence: Synthetic oligonucleotide
  Antisense strand to SEQ ID NO: 967698
uuacauaaacugaguuggg

SEQ ID NO: 967700 - RNA, 19 nt, Artificial Sequence
  Description of Artificial Sequence: Synthetic oligonucleotide
  Sense strand starting at position 3863 of SEQ ID NO: 913966
aguucuuaccacgagguaa

SEQ ID NO: 967701 - RNA, 19 nt, Artificial Sequence
  Description of Artificial Sequence: Synthetic oligonucleotide
  Antisense strand to SEQ ID NO: 967700
uuaccucgugguaagaacu

SEQ ID NO: 967702 - RNA, 19 nt, Artificial Sequence
  Description of Artificial Sequence: Synthetic oligonucleotide
  Sense strand starting at position 939 of SEQ ID NO: 913966
gagcaauacccagggcaga

SEQ ID NO: 967703 - RNA, 19 nt, Artificial Sequence
  Description of Artificial Sequence: Synthetic oligonucleotide
  Antisense strand to SEQ ID NO: 967702
ucugcccuggguauugcuc

SEQ ID NO: 967704 - RNA, 19 nt, Artificial Sequence
  Description of Artificial Sequence: Synthetic oligonucleotide
  Sense strand starting at position 3811 of SEQ ID NO: 913966
gcucaaugcuuauuuguua

SEQ ID NO: 967705 - RNA, 19 nt, Artificial Sequence
  Description of Artificial Sequence: Synthetic oligonucleotide
  Antisense strand to SEQ ID NO: 967704
uaacaaauaagcauugagc

SEQ ID NO: 967706 - RNA, 19 nt, Artificial Sequence
  Description of Artificial Sequence: Synthetic oligonucleotide
  Sense strand starting at position 3875 of SEQ ID NO: 913966
gagguaagaguccauugcu

SEQ ID NO: 967707 - RNA, 19 nt, Artificial Sequence
  Description of Artificial Sequence: Synthetic oligonucleotide
  Antisense strand to SEQ ID NO: 967706
agcaauggacucuuaccuc

SEQ ID NO: 967708 - RNA, 19 nt, Artificial Sequence
  Description of Artificial Sequence: Synthetic oligonucleotide
  Sense strand starting at position 2478 of SEQ ID NO: 913966
cugcucuaccucgaugaaa

SEQ ID NO: 967709 - RNA, 19 nt, Artificial Sequence
  Description of Artificial Sequence: Synthetic oligonucleotide
  Antisense strand to SEQ ID NO: 967708
uuucaucgagguagagcag

SEQ ID NO: 967710 - RNA, 19 nt, Artificial Sequence
  Description of Artificial Sequence: Synthetic oligonucleotide
  Sense strand starting at position 406 of SEQ ID NO: 913966
cgacucaaacucugaguga

SEQ ID NO: 967711 - RNA, 19 nt, Artificial Sequence
  Description of Artificial Sequence: Synthetic oligonucleotide
  Antisense strand to SEQ ID NO: 967710
ucacucagaguuugagucg

SEQ ID NO: 967712 - RNA, 19 nt, Artificial Sequence
  Description of Artificial Sequence: Synthetic oligonucleotide
  Sense strand starting at position 3520 of SEQ ID NO: 913966
ccaauagacugugcauaca

SEQ ID NO: 967713 - RNA, 19 nt, Artificial Sequence
  Description of Artificial Sequence: Synthetic oligonucleotide
  Antisense strand to SEQ ID NO: 967712
uguaugcacagucuauugg

SEQ ID NO: 967714 - RNA, 19 nt, Artificial Sequence
  Description of Artificial Sequence: Synthetic oligonucleotide
  Sense strand starting at position 2960 of SEQ ID NO: 913966
uuagguuaucucuauguug

SEQ ID NO: 967715 - RNA, 19 nt, Artificial Sequence
  Description of Artificial Sequence: Synthetic oligonucleotide
  Antisense strand to SEQ ID NO: 967714
caacauagagauaaccuaa

SEQ ID NO: 967716 - RNA, 19 nt, Artificial Sequence
  Description of Artificial Sequence: Synthetic oligonucleotide
  Sense strand starting at position 2730 of SEQ ID NO: 913966
guuauagauuggcuauaca

SEQ ID NO: 967717 - RNA, 19 nt, Artificial Sequence
  Description of Artificial Sequence: Synthetic oligonucleotide
  Antisense strand to SEQ ID NO: 967716
uguauagccaaucuauaac

SEQ ID NO: 967718 - RNA, 19 nt, Artificial Sequence
  Description of Artificial Sequence: Synthetic oligonucleotide
  Sense strand starting at position 3549 of SEQ ID NO: 913966
cucagacugcucuaagcua

SEQ ID NO: 967719 - RNA, 19 nt, Artificial Sequence
  Description of Artificial Sequence: Synthetic oligonucleotide
  Antisense strand to SEQ ID NO: 967718
uagcuuagagcagucugag

SEQ ID NO: 967720 - RNA, 19 nt, Artificial Sequence
  Description of Artificial Sequence: Synthetic oligonucleotide
  Sense strand starting at position 2956 of SEQ ID NO: 913966
agaguuagguuaucucuau

SEQ ID NO: 967721 - RNA, 19 nt, Artificial Sequence
  Description of Artificial Sequence: Synthetic oligonucleotide
  Antisense strand to SEQ ID NO: 967720
auagagauaaccuaacucu

SEQ ID NO: 967722 - RNA, 19 nt, Artificial Sequence
  Description of Artificial Sequence: Synthetic oligonucleotide
  Sense strand starting at position 708 of SEQ ID NO: 913966
cucagauacccuggucacu

SEQ ID NO: 967723 - RNA, 19 nt, Artificial Sequence
  Description of Artificial Sequence: Synthetic oligonucleotide
  Antisense strand to SEQ ID NO: 967722
agugaccaggguaucugag

SEQ ID NO: 967724 - RNA, 19 nt, Artificial Sequence
  Description of Artificial Sequence: Synthetic oligonucleotide
  Sense strand starting at position 2727 of SEQ ID NO: 913966
caaguuauagauuggcuau

SEQ ID NO: 967725 - RNA, 19 nt, Artificial Sequence
  Description of Artificial Sequence: Synthetic oligonucleotide
  Antisense strand to SEQ ID NO: 967724
auagccaaucuauaacuug

SEQ ID NO: 967726 - RNA, 19 nt, Artificial Sequence
  Description of Artificial Sequence: Synthetic oligonucleotide
  Sense strand starting at position 1265 of SEQ ID NO: 913966
gcccguaucuggucaauuu

SEQ ID NO: 967727 - RNA, 19 nt, Artificial Sequence
  Description of Artificial Sequence: Synthetic oligonucleotide
  Antisense strand to SEQ ID NO: 967726
aaauugaccagauacgggc

SEQ ID NO: 967728 - RNA, 19 nt, Artificial Sequence
  Description of Artificial Sequence: Synthetic oligonucleotide
  Sense strand starting at position 3932 of SEQ ID NO: 913966
aggugcucaguacauuauu

SEQ ID NO: 967729 - RNA, 19 nt, Artificial Sequence
  Description of Artificial Sequence: Synthetic oligonucleotide
  Antisense strand to SEQ ID NO: 967728
aauaauguacugagcaccu

SEQ ID NO: 967730 - RNA, 19 nt, Artificial Sequence
  Description of Artificial Sequence: Synthetic oligonucleotide
  Sense strand starting at position 2957 of SEQ ID NO: 913966
gaguuagguuaucucuaug

SEQ ID NO: 967731 - RNA, 19 nt, Artificial Sequence
  Description of Artificial Sequence: Synthetic oligonucleotide
  Antisense strand to SEQ ID NO: 967730
cauagagauaaccuaacuc

SEQ ID NO: 967732 - RNA, 19 nt, Artificial Sequence
  Description of Artificial Sequence: Synthetic oligonucleotide
  Sense strand starting at position 367 of SEQ ID NO: 913966
auggcagaauuguucucua

SEQ ID NO: 967733 - RNA, 19 nt, Artificial Sequence
  Description of Artificial Sequence: Synthetic oligonucleotide
  Antisense strand to SEQ ID NO: 967732
uagagaacaauucugccau

SEQ ID NO: 967734 - RNA, 19 nt, Artificial Sequence
  Description of Artificial Sequence: Synthetic oligonucleotide
  Sense strand starting at position 3862 of SEQ ID NO: 913966
aaguucuuaccacgaggua

SEQ ID NO: 967735 - RNA, 19 nt, Artificial Sequence
  Description of Artificial Sequence: Synthetic oligonucleotide
  Antisense strand to SEQ ID NO: 967734
uaccucgugguaagaacuu

SEQ ID NO: 967736 - RNA, 19 nt, Artificial Sequence
  Description of Artificial Sequence: Synthetic oligonucleotide
  Sense strand starting at position 2082 of SEQ ID NO: 913966
uguuuacuuggcuacgaau

SEQ ID NO: 967737 - RNA, 19 nt, Artificial Sequence
  Description of Artificial Sequence: Synthetic oligonucleotide
  Antisense strand to SEQ ID NO: 967736
auucguagccaaguaaaca

SEQ ID NO: 967738 - RNA, 19 nt, Artificial Sequence
  Description of Artificial Sequence: Synthetic oligonucleotide
  Sense strand starting at position 2750 of SEQ ID NO: 913966
uguacuuuguaucccaaau

SEQ ID NO: 967739 - RNA, 19 nt, Artificial Sequence
  Description of Artificial Sequence: Synthetic oligonucleotide
  Antisense strand to SEQ ID NO: 967738
auuugggauacaaaguaca

SEQ ID NO: 967740 - RNA, 19 nt, Artificial Sequence
  Description of Artificial Sequence: Synthetic oligonucleotide
  Sense strand starting at position 370 of SEQ ID NO: 913966
gcagaauuguucucuaauu

SEQ ID NO: 967741 - RNA, 19 nt, Artificial Sequence
  Description of Artificial Sequence: Synthetic oligonucleotide
  Antisense strand to SEQ ID NO: 967740
aauuagagaacaauucugc

SEQ ID NO: 967742 - RNA, 19 nt, Artificial Sequence
  Description of Artificial Sequence: Synthetic oligonucleotide
  Sense strand starting at position 3507 of SEQ ID NO: 913966
ucaugucuuugagccaaua

SEQ ID NO: 967743 - RNA, 19 nt, Artificial Sequence
  Description of Artificial Sequence: Synthetic oligonucleotide
  Antisense strand to SEQ ID NO: 967742
uauuggcucaaagacauga

SEQ ID NO: 967744 - RNA, 19 nt, Artificial Sequence
  Description of Artificial Sequence: Synthetic oligonucleotide
  Sense strand starting at position 3517 of SEQ ID NO: 913966
gagccaauagacugugcau

SEQ ID NO: 967745 - RNA, 19 nt, Artificial Sequence
  Description of Artificial Sequence: Synthetic oligonucleotide
  Antisense strand to SEQ ID NO: 967744
augcacagucuauuggcuc

SEQ ID NO: 967746 - RNA, 19 nt, Artificial Sequence
  Description of Artificial Sequence: Synthetic oligonucleotide
  Sense strand starting at position 3906 of SEQ ID NO: 913966
guuaaaucucagugucuag

SEQ ID NO: 967747 - RNA, 19 nt, Artificial Sequence
  Description of Artificial Sequence: Synthetic oligonucleotide
  Antisense strand to SEQ ID NO: 967746
cuagacacugagauuuaac

SEQ ID NO: 967748 - RNA, 19 nt, Artificial Sequence
  Description of Artificial Sequence: Synthetic oligonucleotide
  Sense strand starting at position 1317 of SEQ ID NO: 913966
caaguagguucugauuuau

SEQ ID NO: 967749 - RNA, 19 nt, Artificial Sequence
  Description of Artificial Sequence: Synthetic oligonucleotide
  Antisense strand to SEQ ID NO: 967748
auaaaucagaaccuacuug

SEQ ID NO: 967750 - RNA, 19 nt, Artificial Sequence
  Description of Artificial Sequence: Synthetic oligonucleotide
  Sense strand starting at position 3905 of SEQ ID NO: 913966
uguuaaaucucagugucua

SEQ ID NO: 967751 - RNA, 19 nt, Artificial Sequence
  Description of Artificial Sequence: Synthetic oligonucleotide
  Antisense strand to SEQ ID NO: 967750
uagacacugagauuuaaca

SEQ ID NO: 967752 - RNA, 19 nt, Artificial Sequence
  Description of Artificial Sequence: Synthetic oligonucleotide
  Sense strand starting at position 2342 of SEQ ID NO: 913966
cucugaaccggcugugaga

SEQ ID NO: 967753 - RNA, 19 nt, Artificial Sequence
  Description of Artificial Sequence: Synthetic oligonucleotide
  Antisense strand to SEQ ID NO: 967752
ucucacagccgguucagag

SEQ ID NO: 967754 - RNA, 19 nt, Artificial Sequence
  Description of Artificial Sequence: Synthetic oligonucleotide
  Sense strand starting at position 2344 of SEQ ID NO: 913966
cugaaccggcugugagauu

SEQ ID NO: 967755 - RNA, 19 nt, Artificial Sequence
  Description of Artificial Sequence: Synthetic oligonucleotide
  Antisense strand to SEQ ID NO: 967754
aaucucacagccgguucag

SEQ ID NO: 967756 - RNA, 19 nt, Artificial Sequence
  Description of Artificial Sequence: Synthetic oligonucleotide
  Sense strand starting at position 2178 of SEQ ID NO: 913966
ccgucaccuucugugaaga

SEQ ID NO: 967757 - RNA, 19 nt, Artificial Sequence
  Description of Artificial Sequence: Synthetic oligonucleotide
  Antisense strand to SEQ ID NO: 967756
ucuucacagaaggugacgg

SEQ ID NO: 967758 - RNA, 19 nt, Artificial Sequence
  Description of Artificial Sequence: Synthetic oligonucleotide
  Sense strand starting at position 1332 of SEQ ID NO: 913967
agcaaaguucuagacccaa

SEQ ID NO: 967759 - RNA, 19 nt, Artificial Sequence
  Description of Artificial Sequence: Synthetic oligonucleotide
  Antisense strand to SEQ ID NO: 967758
uugggucuagaacuuugcu

SEQ ID NO: 967760 - RNA, 19 nt, Artificial Sequence
  Description of Artificial Sequence: Synthetic oligonucleotide
  Sense strand starting at position 3709 of SEQ ID NO: 913967
agaaccuugccugaacacu

SEQ ID NO: 967761 - RNA, 19 nt, Artificial Sequence
  Description of Artificial Sequence: Synthetic oligonucleotide
  Antisense strand to SEQ ID NO: 967760
aguguucaggcaagguucu

SEQ ID NO: 967762 - RNA, 19 nt, Artificial Sequence
  Description of Artificial Sequence: Synthetic oligonucleotide
  Sense strand starting at position 1270 of SEQ ID NO: 913967
cccaaaguucugcaaagga

SEQ ID NO: 967763 - RNA, 19 nt, Artificial Sequence
  Description of Artificial Sequence: Synthetic oligonucleotide
  Antisense strand to SEQ ID NO: 967762
uccuuugcagaacuuuggg

SEQ ID NO: 967764 - RNA, 19 nt, Artificial Sequence
  Description of Artificial Sequence: Synthetic oligonucleotide
  Sense strand starting at position 289 of SEQ ID NO: 913967
gcggcuucacugguuuauu

SEQ ID NO: 967765 - RNA, 19 nt, Artificial Sequence
  Description of Artificial Sequence: Synthetic oligonucleotide
  Antisense strand to SEQ ID NO: 967764
aauaaaccagugaagccgc

SEQ ID NO: 967766 - RNA, 19 nt, Artificial Sequence
  Description of Artificial Sequence: Synthetic oligonucleotide
  Sense strand starting at position 1703 of SEQ ID NO: 913967
ggaaguuugcgacagggaa

SEQ ID NO: 967767 - RNA, 19 nt, Artificial Sequence
  Description of Artificial Sequence: Synthetic oligonucleotide
  Antisense strand to SEQ ID NO: 967766
uucccugucgcaaacuucc

SEQ ID NO: 967768 - RNA, 19 nt, Artificial Sequence
  Description of Artificial Sequence: Synthetic oligonucleotide
  Sense strand starting at position 2953 of SEQ ID NO: 913967
ugaaguccagguggaaaua

SEQ ID NO: 967769 - RNA, 19 nt, Artificial Sequence
  Description of Artificial Sequence: Synthetic oligonucleotide
  Antisense strand to SEQ ID NO: 967768
uauuuccaccuggacuuca

SEQ ID NO: 967770 - RNA, 19 nt, Artificial Sequence
  Description of Artificial Sequence: Synthetic oligonucleotide
  Sense strand starting at position 1074 of SEQ ID NO: 913967
auuggagugcaauaguaag

SEQ ID NO: 967771 - RNA, 19 nt, Artificial Sequence
  Description of Artificial Sequence: Synthetic oligonucleotide
  Antisense strand to SEQ ID NO: 967770
cuuacuauugcacuccaau

SEQ ID NO: 967772 - RNA, 19 nt, Artificial Sequence
  Description of Artificial Sequence: Synthetic oligonucleotide
  Sense strand starting at position 3707 of SEQ ID NO: 913967
ggagaaccuugccugaaca

SEQ ID NO: 967773 - RNA, 19 nt, Artificial Sequence
  Description of Artificial Sequence: Synthetic oligonucleotide
  Antisense strand to SEQ ID NO: 967772
uguucaggcaagguucucc

SEQ ID NO: 967774 - RNA, 19 nt, Artificial Sequence
  Description of Artificial Sequence: Synthetic oligonucleotide
  Sense strand starting at position 1308 of SEQ ID NO: 913967
aaggaauaguguuccuaga

SEQ ID NO: 967775 - RNA, 19 nt, Artificial Sequence
  Description of Artificial Sequence: Synthetic oligonucleotide
  Antisense strand to SEQ ID NO: 967774
ucuaggaacacuauuccuu

SEQ ID NO: 967776 - RNA, 19 nt, Artificial Sequence
  Description of Artificial Sequence: Synthetic oligonucleotide
  Sense strand starting at position 1153 of SEQ ID NO: 913967
gcgacuugccaagugugua

SEQ ID NO: 967777 - RNA, 19 nt, Artificial Sequence
  Description of Artificial Sequence: Synthetic oligonucleotide
  Antisense strand to SEQ ID NO: 967776
uacacacuuggcaagucgc

SEQ ID NO: 967778 - RNA, 19 nt, Artificial Sequence
  Description of Artificial Sequence: Synthetic oligonucleotide
  Sense strand starting at position 54 of SEQ ID NO: 913967
ugcuacagagcccauaaau

SEQ ID NO: 967779 - RNA, 19 nt, Artificial Sequence
  Description of Artificial Sequence: Synthetic oligonucleotide
  Antisense strand to SEQ ID NO: 967778
auuuaugggcucuguagca

SEQ ID NO: 967780 - RNA, 19 nt, Artificial Sequence
  Description of Artificial Sequence: Synthetic oligonucleotide
  Sense strand starting at position 433 of SEQ ID NO: 913967
cuggaaaucuuggcucaaa

SEQ ID NO: 967781 - RNA, 19 nt, Artificial Sequence
  Description of Artificial Sequence: Synthetic oligonucleotide
  Antisense strand to SEQ ID NO: 967780
uuugagccaagauuuccag

SEQ ID NO: 967782 - RNA, 19 nt, Artificial Sequence
  Description of Artificial Sequence: Synthetic oligonucleotide
  Sense strand starting at position 982 of SEQ ID NO: 913967
auugcuuuccucuacagga

SEQ ID NO: 967783 - RNA, 19 nt, Artificial Sequence
  Description of Artificial Sequence: Synthetic oligonucleotide
  Antisense strand to SEQ ID NO: 967782
uccuguagaggaaagcaau

SEQ ID NO: 967784 - RNA, 19 nt, Artificial Sequence
  Description of Artificial Sequence: Synthetic oligonucleotide
  Sense strand starting at position 1220 of SEQ ID NO: 913967
gcacccuuugaugaguaca

SEQ ID NO: 967785 - RNA, 19 nt, Artificial Sequence
  Description of Artificial Sequence: Synthetic oligonucleotide
  Antisense strand to SEQ ID NO: 967784
uguacucaucaaagggugc

SEQ ID NO: 967786 - RNA, 19 nt, Artificial Sequence
  Description of Artificial Sequence: Synthetic oligonucleotide
  Sense strand starting at position 3952 of SEQ ID NO: 913967
agugcaucuggacaacuuu

SEQ ID NO: 967787 - RNA, 19 nt, Artificial Sequence
  Description of Artificial Sequence: Synthetic oligonucleotide
  Antisense strand to SEQ ID NO: 967786
aaaguuguccagaugcacu

SEQ ID NO: 967788 - RNA, 19 nt, Artificial Sequence
  Description of Artificial Sequence: Synthetic oligonucleotide
  Sense strand starting at position 1477 of SEQ ID NO: 913967
acgcguuuggcccuguaga

SEQ ID NO: 967789 - RNA, 19 nt, Artificial Sequence
  Description of Artificial Sequence: Synthetic oligonucleotide
  Antisense strand to SEQ ID NO: 967788
ucuacagggccaaacgcgu

SEQ ID NO: 967790 - RNA, 19 nt, Artificial Sequence
  Description of Artificial Sequence: Synthetic oligonucleotide
  Sense strand starting at position 1222 of SEQ ID NO: 913967
acccuuugaugaguacauu

SEQ ID NO: 967791 - RNA, 19 nt, Artificial Sequence
  Description of Artificial Sequence: Synthetic oligonucleotide
  Antisense strand to SEQ ID NO: 967790
aauguacucaucaaagggu

SEQ ID NO: 967792 - RNA, 19 nt, Artificial Sequence
  Description of Artificial Sequence: Synthetic oligonucleotide
  Sense strand starting at position 16 of SEQ ID NO: 913967
guuugacagcucuaaccau

SEQ ID NO: 967793 - RNA, 19 nt, Artificial Sequence
  Description of Artificial Sequence: Synthetic oligonucleotide
  Antisense strand to SEQ ID NO: 967792
augguuagagcugucaaac

SEQ ID NO: 967794 - RNA, 19 nt, Artificial Sequence
  Description of Artificial Sequence: Synthetic oligonucleotide
  Sense strand starting at position 1310 of SEQ ID NO: 913967
ggaauaguguuccuagauc

SEQ ID NO: 967795 - RNA, 19 nt, Artificial Sequence
  Description of Artificial Sequence: Synthetic oligonucleotide
  Antisense strand to SEQ ID NO: 967794
gaucuaggaacacuauucc

SEQ ID NO: 967796 - RNA, 19 nt, Artificial Sequence
  Description of Artificial Sequence: Synthetic oligonucleotide
  Sense strand starting at position 3105 of SEQ ID NO: 913967
agaagugugacaugagucu

SEQ ID NO: 967797 - RNA, 19 nt, Artificial Sequence
  Description of Artificial Sequence: Synthetic oligonucleotide
  Antisense strand to SEQ ID NO: 967796
agacucaugucacacuucu

SEQ ID NO: 967798 - RNA, 19 nt, Artificial Sequence
  Description of Artificial Sequence: Synthetic oligonucleotide
  Sense strand starting at position 1107 of SEQ ID NO: 913967
cuccguuaucaucauuaug

SEQ ID NO: 967799 - RNA, 19 nt, Artificial Sequence
  Description of Artificial Sequence: Synthetic oligonucleotide
  Antisense strand to SEQ ID NO: 967798
cauaaugaugauaacggag

SEQ ID NO: 967800 - RNA, 19 nt, Artificial Sequence
  Description of Artificial Sequence: Synthetic oligonucleotide
  Sense strand starting at position 1069 of SEQ ID NO: 913967
uauccauuggagugcaaua

SEQ ID NO: 967801 - RNA, 19 nt, Artificial Sequence
  Description of Artificial Sequence: Synthetic oligonucleotide
  Antisense strand to SEQ ID NO: 967800
uauugcacuccaauggaua

SEQ ID NO: 967802 - RNA, 19 nt, Artificial Sequence
  Description of Artificial Sequence: Synthetic oligonucleotide
  Sense strand starting at position 3651 of SEQ ID NO: 913967
ggauccuagugauugcauu

SEQ ID NO: 967803 - RNA, 19 nt, Artificial Sequence
  Description of Artificial Sequence: Synthetic oligonucleotide
  Antisense strand to SEQ ID NO: 967802
aaugcaaucacuaggaucc

SEQ ID NO: 967804 - RNA, 19 nt, Artificial Sequence
  Description of Artificial Sequence: Synthetic oligonucleotide
  Sense strand starting at position 683 of SEQ ID NO: 913967
gccuguaguacauggaaca

SEQ ID NO: 967805 - RNA, 19 nt, Artificial Sequence
  Description of Artificial Sequence: Synthetic oligonucleotide
  Antisense strand to SEQ ID NO: 967804
uguuccauguacuacaggc

SEQ ID NO: 967806 - RNA, 19 nt, Artificial Sequence
  Description of Artificial Sequence: Synthetic oligonucleotide
  Sense strand starting at position 1318 of SEQ ID NO: 913967
guuccuagaucccuagcaa

SEQ ID NO: 967807 - RNA, 19 nt, Artificial Sequence
  Description of Artificial Sequence: Synthetic oligonucleotide
  Antisense strand to SEQ ID NO: 967806
uugcuagggaucuaggaac

SEQ ID NO: 967808 - RNA, 19 nt, Artificial Sequence
  Description of Artificial Sequence: Synthetic oligonucleotide
  Sense strand starting at position 647 of SEQ ID NO: 913967
ggcugugauuaacuaccuu

SEQ ID NO: 967809 - RNA, 19 nt, Artificial Sequence
  Description of Artificial Sequence: Synthetic oligonucleotide
  Antisense strand to SEQ ID NO: 967808
aagguaguuaaucacagcc

SEQ ID NO: 967810 - RNA, 19 nt, Artificial Sequence
  Description of Artificial Sequence: Synthetic oligonucleotide
  Sense strand starting at position 638 of SEQ ID NO: 913967
gagccaggaggcugugauu

SEQ ID NO: 967811 - RNA, 19 nt, Artificial Sequence
  Description of Artificial Sequence: Synthetic oligonucleotide
  Antisense strand to SEQ ID NO: 967810
aaucacagccuccuggcuc

SEQ ID NO: 967812 - RNA, 19 nt, Artificial Sequence
  Description of Artificial Sequence: Synthetic oligonucleotide
  Sense strand starting at position 262 of SEQ ID NO: 913967
gccuguuccugaccaugga

SEQ ID NO: 967813 - RNA, 19 nt, Artificial Sequence
  Description of Artificial Sequence: Synthetic oligonucleotide
  Antisense strand to SEQ ID NO: 967812
uccauggucaggaacaggc

SEQ ID NO: 967814 - RNA, 19 nt, Artificial Sequence
  Description of Artificial Sequence: Synthetic oligonucleotide
  Sense strand starting at position 963 of SEQ ID NO: 913967
aguaauuccuuguuuacuu

SEQ ID NO: 967815 - RNA, 19 nt, Artificial Sequence
  Description of Artificial Sequence: Synthetic oligonucleotide
  Antisense strand to SEQ ID NO: 967814
aaguaaacaaggaauuacu

SEQ ID NO: 967816 - RNA, 19 nt, Artificial Sequence
  Description of Artificial Sequence: Synthetic oligonucleotide
  Sense strand starting at position 960 of SEQ ID NO: 913967
ucuaguaauuccuuguuua

SEQ ID NO: 967817 - RNA, 19 nt, Artificial Sequence
  Description of Artificial Sequence: Synthetic oligonucleotide
  Antisense strand to SEQ ID NO: 967816
uaaacaaggaauuacuaga

SEQ ID NO: 967818 - RNA, 19 nt, Artificial Sequence
  Description of Artificial Sequence: Synthetic oligonucleotide
  Sense strand starting at position 964 of SEQ ID NO: 913967
guaauuccuuguuuacuua

SEQ ID NO: 967819 - RNA, 19 nt, Artificial Sequence
  Description of Artificial Sequence: Synthetic oligonucleotide
  Antisense strand to SEQ ID NO: 967818
uaaguaaacaaggaauuac

SEQ ID NO: 967820 - RNA, 19 nt, Artificial Sequence
  Description of Artificial Sequence: Synthetic oligonucleotide
  Sense strand starting at position 961 of SEQ ID NO: 913967
cuaguaauuccuuguuuac

SEQ ID NO: 967821 - RNA, 19 nt, Artificial Sequence
  Description of Artificial Sequence: Synthetic oligonucleotide
  Antisense strand to SEQ ID NO: 967820
guaaacaaggaauuacuag

SEQ ID NO: 967822 - RNA, 19 nt, Artificial Sequence
  Description of Artificial Sequence: Synthetic oligonucleotide
  Sense strand starting at position 3156 of SEQ ID NO: 913967
ggguuucuuucugccaaau

SEQ ID NO: 967823 - RNA, 19 nt, Artificial Sequence
  Description of Artificial Sequence: Synthetic oligonucleotide
  Antisense strand to SEQ ID NO: 967822
auuuggcagaaagaaaccc

SEQ ID NO: 967824 - RNA, 19 nt, Artificial Sequence
  Description of Artificial Sequence: Synthetic oligonucleotide
  Sense strand starting at position 674 of SEQ ID NO: 913967
cuuuaaugagccuguagua

SEQ ID NO: 967825 - RNA, 19 nt, Artificial Sequence
  Description of Artificial Sequence: Synthetic oligonucleotide
  Antisense strand to SEQ ID NO: 967824
uacuacaggcucauuaaag

SEQ ID NO: 967826 - RNA, 19 nt, Artificial Sequence
  Description of Artificial Sequence: Synthetic oligonucleotide
  Sense strand starting at position 3116 of SEQ ID NO: 913967
augagucuccaucggcuaa

SEQ ID NO: 967827 - RNA, 19 nt, Artificial Sequence
  Description of Artificial Sequence: Synthetic oligonucleotide
  Antisense strand to SEQ ID NO: 967826
uuagccgauggagacucau

SEQ ID NO: 967828 - RNA, 19 nt, Artificial Sequence
  Description of Artificial Sequence: Synthetic oligonucleotide
  Sense strand starting at position 563 of SEQ ID NO: 913967
aguguauauuaccugcuau

SEQ ID NO: 967829 - RNA, 19 nt, Artificial Sequence
  Description of Artificial Sequence: Synthetic oligonucleotide
  Antisense strand to SEQ ID NO: 967828
auagcagguaauauacacu

SEQ ID NO: 967830 - RNA, 19 nt, Artificial Sequence
  Description of Artificial Sequence: Synthetic oligonucleotide
  Sense strand starting at position 1109 of SEQ ID NO: 913967
ccguuaucaucauuaugug

SEQ ID NO: 967831 - RNA, 19 nt, Artificial Sequence
  Description of Artificial Sequence: Synthetic oligonucleotide
  Antisense strand to SEQ ID NO: 967830
cacauaaugaugauaacgg

SEQ ID NO: 967832 - RNA, 19 nt, Artificial Sequence
  Description of Artificial Sequence: Synthetic oligonucleotide
  Sense strand starting at position 3821 of SEQ ID NO: 913967
agacauuucuacugagcau

SEQ ID NO: 967833 - RNA, 19 nt, Artificial Sequence
  Description of Artificial Sequence: Synthetic oligonucleotide
  Antisense strand to SEQ ID NO: 967832
augcucaguagaaaugucu

SEQ ID NO: 967834 - RNA, 19 nt, Artificial Sequence
  Description of Artificial Sequence: Synthetic oligonucleotide
  Sense strand starting at position 3154 of SEQ ID NO: 913967
cuggguuucuuucugccaa

SEQ ID NO: 967835 - RNA, 19 nt, Artificial Sequence
  Description of Artificial Sequence: Synthetic oligonucleotide
  Antisense strand to SEQ ID NO: 967834
uuggcagaaagaaacccag

SEQ ID NO: 967836 - RNA, 19 nt, Artificial Sequence
  Description of Artificial Sequence: Synthetic oligonucleotide
  Sense strand starting at position 3805 of SEQ ID NO: 913967
uuguguucuuugucauaga

SEQ ID NO: 967837 - RNA, 19 nt, Artificial Sequence
  Description of Artificial Sequence: Synthetic oligonucleotide
  Antisense strand to SEQ ID NO: 967836
ucuaugacaaagaacacaa

SEQ ID NO: 967838 - RNA, 19 nt, Artificial Sequence
  Description of Artificial Sequence: Synthetic oligonucleotide
  Sense strand starting at position 2805 of SEQ ID NO: 913968
ccuuauuaugcugagaaua

SEQ ID NO: 967839 - RNA, 19 nt, Artificial Sequence
  Description of Artificial Sequence: Synthetic oligonucleotide
  Antisense strand to SEQ ID NO: 967838
uauucucagcauaauaagg

SEQ ID NO: 967840 - RNA, 19 nt, Artificial Sequence
  Description of Artificial Sequence: Synthetic oligonucleotide
  Sense strand starting at position 2482 of SEQ ID NO: 913968
gggucagucccugaaauga

SEQ ID NO: 967841 - RNA, 19 nt, Artificial Sequence
  Description of Artificial Sequence: Synthetic oligonucleotide
  Antisense strand to SEQ ID NO: 967840
ucauuucagggacugaccc

SEQ ID NO: 967842 - RNA, 19 nt, Artificial Sequence
  Description of Artificial Sequence: Synthetic oligonucleotide
  Sense strand starting at position 434 of SEQ ID NO: 913968
acagacauccaucgaaauc

SEQ ID NO: 967843 - RNA, 19 nt, Artificial Sequence
  Description of Artificial Sequence: Synthetic oligonucleotide
  Antisense strand to SEQ ID NO: 967842
gauuucgauggaugucugu

SEQ ID NO: 967844 - RNA, 19 nt, Artificial Sequence
  Description of Artificial Sequence: Synthetic oligonucleotide
  Sense strand starting at position 17 of SEQ ID NO: 913968
guaaacuuauuacuuagga

SEQ ID NO: 967845 - RNA, 19 nt, Artificial Sequence
  Description of Artificial Sequence: Synthetic oligonucleotide
  Antisense strand to SEQ ID NO: 967844
uccuaaguaauaaguuuac

SEQ ID NO: 967846 - RNA, 19 nt, Artificial Sequence
  Description of Artificial Sequence: Synthetic oligonucleotide
  Sense strand starting at position 132 of SEQ ID NO: 913968
agaaguugccaggaaguua

SEQ ID NO: 967847 - RNA, 19 nt, Artificial Sequence
  Description of Artificial Sequence: Synthetic oligonucleotide
  Antisense strand to SEQ ID NO: 967846
uaacuuccuggcaacuucu

SEQ ID NO: 967848 - RNA, 19 nt, Artificial Sequence
  Description of Artificial Sequence: Synthetic oligonucleotide
  Sense strand starting at position 3037 of SEQ ID NO: 913968
acagcauuauuuccgguua

SEQ ID NO: 967849 - RNA, 19 nt, Artificial Sequence
  Description of Artificial Sequence: Synthetic oligonucleotide
  Antisense strand to SEQ ID NO: 967848
uaaccggaaauaaugcugu

SEQ ID NO: 967850 - RNA, 19 nt, Artificial Sequence
  Description of Artificial Sequence: Synthetic oligonucleotide
  Sense strand starting at position 2662 of SEQ ID NO: 913968
gcuuaaccaguagaaucau

SEQ ID NO: 967851 - RNA, 19 nt, Artificial Sequence
  Description of Artificial Sequence: Synthetic oligonucleotide
  Antisense strand to SEQ ID NO: 967850
augauucuacugguuaagc

SEQ ID NO: 967852 - RNA, 19 nt, Artificial Sequence
  Description of Artificial Sequence: Synthetic oligonucleotide
  Sense strand starting at position 2953 of SEQ ID NO: 913968
uggaaacugucaccuuaag

SEQ ID NO: 967853 - RNA, 19 nt, Artificial Sequence
  Description of Artificial Sequence: Synthetic oligonucleotide
  Antisense strand to SEQ ID NO: 967852
cuuaaggugacaguuucca

SEQ ID NO: 967854 - RNA, 19 nt, Artificial Sequence
  Description of Artificial Sequence: Synthetic oligonucleotide
  Sense strand starting at position 2893 of SEQ ID NO: 913968
agucgucauccugugcuau

SEQ ID NO: 967855 - RNA, 19 nt, Artificial Sequence
  Description of Artificial Sequence: Synthetic oligonucleotide
  Antisense strand to SEQ ID NO: 967854
auagcacaggaugacgacu

SEQ ID NO: 967856 - RNA, 19 nt, Artificial Sequence
  Description of Artificial Sequence: Synthetic oligonucleotide
  Sense strand starting at position 2660 of SEQ ID NO: 913968
uggcuuaaccaguagaauc

SEQ ID NO: 967857 - RNA, 19 nt, Artificial Sequence
  Description of Artificial Sequence: Synthetic oligonucleotide
  Antisense strand to SEQ ID NO: 967856
gauucuacugguuaagcca

SEQ ID NO: 967858 - RNA, 19 nt, Artificial Sequence
  Description of Artificial Sequence: Synthetic oligonucleotide
  Sense strand starting at position 170 of SEQ ID NO: 913968
agucauuaagcuggauaaa

SEQ ID NO: 967859 - RNA, 19 nt, Artificial Sequence
  Description of Artificial Sequence: Synthetic oligonucleotide
  Antisense strand to SEQ ID NO: 967858
uuuauccagcuuaaugacu

SEQ ID NO: 967860 - RNA, 19 nt, Artificial Sequence
  Description of Artificial Sequence: Synthetic oligonucleotide
  Sense strand starting at position 2574 of SEQ ID NO: 913968
gggagacucccacguaaua

SEQ ID NO: 967861 - RNA, 19 nt, Artificial Sequence
  Description of Artificial Sequence: Synthetic oligonucleotide
  Antisense strand to SEQ ID NO: 967860
uauuacgugggagucuccc

SEQ ID NO: 967862 - RNA, 19 nt, Artificial Sequence
  Description of Artificial Sequence: Synthetic oligonucleotide
  Sense strand starting at position 3304 of SEQ ID NO: 913968
uggauaaacuucuuguauu

SEQ ID NO: 967863 - RNA, 19 nt, Artificial Sequence
  Description of Artificial Sequence: Synthetic oligonucleotide
  Antisense strand to SEQ ID NO: 967862
aauacaagaaguuuaucca

SEQ ID NO: 967864 - RNA, 19 nt, Artificial Sequence
  Description of Artificial Sequence: Synthetic oligonucleotide
  Sense strand starting at position 3477 of SEQ ID NO: 913968
agauaaugguuugccaaau

SEQ ID NO: 967865 - RNA, 19 nt, Artificial Sequence
  Description of Artificial Sequence: Synthetic oligonucleotide
  Antisense strand to SEQ ID NO: 967864
auuuggcaaaccauuaucu

SEQ ID NO: 967866 - RNA, 19 nt, Artificial Sequence
  Description of Artificial Sequence: Synthetic oligonucleotide
  Sense strand starting at position 3544 of SEQ ID NO: 913968
aggaauaaguguuugcaaa

SEQ ID NO: 967867 - RNA, 19 nt, Artificial Sequence
  Description of Artificial Sequence: Synthetic oligonucleotide
  Antisense strand to SEQ ID NO: 967866
uuugcaaacacuuauuccu

SEQ ID NO: 967868 - RNA, 19 nt, Artificial Sequence
  Description of Artificial Sequence: Synthetic oligonucleotide
  Sense strand starting at position 2998 of SEQ ID NO: 913968
uugccauaggcugacauau

SEQ ID NO: 967869 - RNA, 19 nt, Artificial Sequence
  Description of Artificial Sequence: Synthetic oligonucleotide
  Antisense strand to SEQ ID NO: 967868
auaugucagccuauggcaa

SEQ ID NO: 967870 - RNA, 19 nt, Artificial Sequence
  Description of Artificial Sequence: Synthetic oligonucleotide
  Sense strand starting at position 582 of SEQ ID NO: 913968
auccuaucgaaguggauua

SEQ ID NO: 967871 - RNA, 19 nt, Artificial Sequence
  Description of Artificial Sequence: Synthetic oligonucleotide
  Antisense strand to SEQ ID NO: 967870
uaauccacuucgauaggau

SEQ ID NO: 967872 - RNA, 19 nt, Artificial Sequence
  Description of Artificial Sequence: Synthetic oligonucleotide
  Sense strand starting at position 583 of SEQ ID NO: 913968
uccuaucgaaguggauuaa

SEQ ID NO: 967873 - RNA, 19 nt, Artificial Sequence
  Description of Artificial Sequence: Synthetic oligonucleotide
  Antisense strand to SEQ ID NO: 967872
uuaauccacuucgauagga

SEQ ID NO: 967874 - RNA, 19 nt, Artificial Sequence
  Description of Artificial Sequence: Synthetic oligonucleotide
  Sense strand starting at position 3545 of SEQ ID NO: 913968
ggaauaaguguuugcaaag

SEQ ID NO: 967875 - RNA, 19 nt, Artificial Sequence
  Description of Artificial Sequence: Synthetic oligonucleotide
  Antisense strand to SEQ ID NO: 967874
cuuugcaaacacuuauucc

SEQ ID NO: 967876 - RNA, 19 nt, Artificial Sequence
  Description of Artificial Sequence: Synthetic oligonucleotide
  Sense strand starting at position 3478 of SEQ ID NO: 913968
gauaaugguuugccaaauu

SEQ ID NO: 967877 - RNA, 19 nt, Artificial Sequence
  Description of Artificial Sequence: Synthetic oligonucleotide
  Antisense strand to SEQ ID NO: 967876
aauuuggcaaaccauuauc

SEQ ID NO: 967878 - RNA, 19 nt, Artificial Sequence
  Description of Artificial Sequence: Synthetic oligonucleotide
  Sense strand starting at position 3499 of SEQ ID NO: 913968
uagugauuaagugagcgau

SEQ ID NO: 967879 - RNA, 19 nt, Artificial Sequence
  Description of Artificial Sequence: Synthetic oligonucleotide
  Antisense strand to SEQ ID NO: 967878
aucgcucacuuaaucacua

SEQ ID NO: 967880 - RNA, 19 nt, Artificial Sequence
  Description of Artificial Sequence: Synthetic oligonucleotide
  Sense strand starting at position 2940 of SEQ ID NO: 913968
cggaguagguucuuggaaa

SEQ ID NO: 967881 - RNA, 19 nt, Artificial Sequence
  Description of Artificial Sequence: Synthetic oligonucleotide
  Antisense strand to SEQ ID NO: 967880
uuuccaagaaccuacuccg

SEQ ID NO: 967882 - RNA, 19 nt, Artificial Sequence
  Description of Artificial Sequence: Synthetic oligonucleotide
  Sense strand starting at position 3503 of SEQ ID NO: 913968
gauuaagugagcgaugguu

SEQ ID NO: 967883 - RNA, 19 nt, Artificial Sequence
  Description of Artificial Sequence: Synthetic oligonucleotide
  Antisense strand to SEQ ID NO: 967882
aaccaucgcucacuuaauc

SEQ ID NO: 967884 - RNA, 19 nt, Artificial Sequence
  Description of Artificial Sequence: Synthetic oligonucleotide
  Sense strand starting at position 2406 of SEQ ID NO: 913968
gacccagccaggugugaaa

SEQ ID NO: 967885 - RNA, 19 nt, Artificial Sequence
  Description of Artificial Sequence: Synthetic oligonucleotide
  Antisense strand to SEQ ID NO: 967884
uuucacaccuggcuggguc

SEQ ID NO: 967886 - RNA, 19 nt, Artificial Sequence
  Description of Artificial Sequence: Synthetic oligonucleotide
  Sense strand starting at position 506 of SEQ ID NO: 913968
ggcuaaggucauggucaaa

SEQ ID NO: 967887 - RNA, 19 nt, Artificial Sequence
  Description of Artificial Sequence: Synthetic oligonucleotide
  Antisense strand to SEQ ID NO: 967886
uuugaccaugaccuuagcc

SEQ ID NO: 967888 - RNA, 19 nt, Artificial Sequence
  Description of Artificial Sequence: Synthetic oligonucleotide
  Sense strand starting at position 1013 of SEQ ID NO: 913968
acuugugcccaguaauauu

SEQ ID NO: 967889 - RNA, 19 nt, Artificial Sequence
  Description of Artificial Sequence: Synthetic oligonucleotide
  Antisense strand to SEQ ID NO: 967888
aauauuacugggcacaagu

SEQ ID NO: 967890 - RNA, 19 nt, Artificial Sequence
  Description of Artificial Sequence: Synthetic oligonucleotide
  Sense strand starting at position 2802 of SEQ ID NO: 913968
agcccuuauuaugcugaga

SEQ ID NO: 967891 - RNA, 19 nt, Artificial Sequence
  Description of Artificial Sequence: Synthetic oligonucleotide
  Antisense strand to SEQ ID NO: 967890
ucucagcauaauaagggcu

SEQ ID NO: 967892 - RNA, 19 nt, Artificial Sequence
  Description of Artificial Sequence: Synthetic oligonucleotide
  Sense strand starting at position 2481 of SEQ ID NO: 913968
cgggucagucccugaaaug

SEQ ID NO: 967893 - RNA, 19 nt, Artificial Sequence
  Description of Artificial Sequence: Synthetic oligonucleotide
  Antisense strand to SEQ ID NO: 967892
cauuucagggacugacccg

SEQ ID NO: 967894 - RNA, 19 nt, Artificial Sequence
  Description of Artificial Sequence: Synthetic oligonucleotide
  Sense strand starting at position 2997 of SEQ ID NO: 913968
uuugccauaggcugacaua

SEQ ID NO: 967895 - RNA, 19 nt, Artificial Sequence
  Description of Artificial Sequence: Synthetic oligonucleotide
  Antisense strand to SEQ ID NO: 967894
uaugucagccuauggcaaa

SEQ ID NO: 967896 - RNA, 19 nt, Artificial Sequence
  Description of Artificial Sequence: Synthetic oligonucleotide
  Sense strand starting at position 2895 of SEQ ID NO: 913968
ucgucauccugugcuauuu

SEQ ID NO: 967897 - RNA, 19 nt, Artificial Sequence
  Description of Artificial Sequence: Synthetic oligonucleotide
  Antisense strand to SEQ ID NO: 967896
aaauagcacaggaugacga

SEQ ID NO: 967898 - RNA, 19 nt, Artificial Sequence
  Description of Artificial Sequence: Synthetic oligonucleotide
  Sense strand starting at position 167 of SEQ ID NO: 913968
gucagucauuaagcuggau

SEQ ID NO: 967899 - RNA, 19 nt, Artificial Sequence
  Description of Artificial Sequence: Synthetic oligonucleotide
  Antisense strand to SEQ ID NO: 967898
auccagcuuaaugacugac

SEQ ID NO: 967900 - RNA, 19 nt, Artificial Sequence
  Description of Artificial Sequence: Synthetic oligonucleotide
  Sense strand starting at position 2480 of SEQ ID NO: 913968
ccgggucagucccugaaau

SEQ ID NO: 967901 - RNA, 19 nt, Artificial Sequence
  Description of Artificial Sequence: Synthetic oligonucleotide
  Antisense strand to SEQ ID NO: 967900
auuucagggacugacccgg

SEQ ID NO: 967902 - RNA, 19 nt, Artificial Sequence
  Description of Artificial Sequence: Synthetic oligonucleotide
  Sense strand starting at position 564 of SEQ ID NO: 913968
cuccgaucauguuuccuga

SEQ ID NO: 967903 - RNA, 19 nt, Artificial Sequence
  Description of Artificial Sequence: Synthetic oligonucleotide
  Antisense strand to SEQ ID NO: 967902
ucaggaaacaugaucggag

SEQ ID NO: 967904 - RNA, 19 nt, Artificial Sequence
  Description of Artificial Sequence: Synthetic oligonucleotide
  Sense strand starting at position 3546 of SEQ ID NO: 913968
gaauaaguguuugcaaagc

SEQ ID NO: 967905 - RNA, 19 nt, Artificial Sequence
  Description of Artificial Sequence: Synthetic oligonucleotide
  Antisense strand to SEQ ID NO: 967904
gcuuugcaaacacuuauuc

SEQ ID NO: 967906 - RNA, 19 nt, Artificial Sequence
  Description of Artificial Sequence: Synthetic oligonucleotide
  Sense strand starting at position 3502 of SEQ ID NO: 913968
ugauuaagugagcgauggu

SEQ ID NO: 967907 - RNA, 19 nt, Artificial Sequence
  Description of Artificial Sequence: Synthetic oligonucleotide
  Antisense strand to SEQ ID NO: 967906
accaucgcucacuuaauca

SEQ ID NO: 967908 - RNA, 19 nt, Artificial Sequence
  Description of Artificial Sequence: Synthetic oligonucleotide
  Sense strand starting at position 1010 of SEQ ID NO: 913968
ccgacuugugcccaguaau

SEQ ID NO: 967909 - RNA, 19 nt, Artificial Sequence
  Description of Artificial Sequence: Synthetic oligonucleotide
  Antisense strand to SEQ ID NO: 967908
auuacugggcacaagucgg

SEQ ID NO: 967910 - RNA, 19 nt, Artificial Sequence
  Description of Artificial Sequence: Synthetic oligonucleotide
  Sense strand starting at position 2419 of SEQ ID NO: 913968
gugaaaugcugcagggaga

SEQ ID NO: 967911 - RNA, 19 nt, Artificial Sequence
  Description of Artificial Sequence: Synthetic oligonucleotide
  Antisense strand to SEQ ID NO: 967910
ucucccugcagcauuucac

SEQ ID NO: 967912 - RNA, 19 nt, Artificial Sequence
  Description of Artificial Sequence: Synthetic oligonucleotide
  Sense strand starting at position 1705 of SEQ ID NO: 913968
ggucuugcucgccaggaca

SEQ ID NO: 967913 - RNA, 19 nt, Artificial Sequence
  Description of Artificial Sequence: Synthetic oligonucleotide
  Antisense strand to SEQ ID NO: 967912
uguccuggcgagcaagacc

SEQ ID NO: 967914 - RNA, 19 nt, Artificial Sequence
  Description of Artificial Sequence: Synthetic oligonucleotide
  Sense strand starting at position 3487 of SEQ ID NO: 913968
uugccaaauuucuagugau

SEQ ID NO: 967915 - RNA, 19 nt, Artificial Sequence
  Description of Artificial Sequence: Synthetic oligonucleotide
  Antisense strand to SEQ ID NO: 967914
aucacuagaaauuuggcaa

SEQ ID NO: 967916 - RNA, 19 nt, Artificial Sequence
  Description of Artificial Sequence: Synthetic oligonucleotide
  Sense strand starting at position 163 of SEQ ID NO: 913968
gugagucagucauuaagcu

SEQ ID NO: 967917 - RNA, 19 nt, Artificial Sequence
  Description of Artificial Sequence: Synthetic oligonucleotide
  Antisense strand to SEQ ID NO: 967916
agcuuaaugacugacucac

SEQ ID NO: 967918 - RNA, 19 nt, Artificial Sequence
  Description of Artificial Sequence: Synthetic oligonucleotide
  Sense strand starting at position 389 of SEQ ID NO: 913969
gucacauaacgugaaacaa

SEQ ID NO: 967919 - RNA, 19 nt, Artificial Sequence
  Description of Artificial Sequence: Synthetic oligonucleotide
  Antisense strand to SEQ ID NO: 967918
uuguuucacguuaugugac

SEQ ID NO: 967920 - RNA, 19 nt, Artificial Sequence
  Description of Artificial Sequence: Synthetic oligonucleotide
  Sense strand starting at position 3546 of SEQ ID NO: 913969
caauaauaggagcgacaga

SEQ ID NO: 967921 - RNA, 19 nt, Artificial Sequence
  Description of Artificial Sequence: Synthetic oligonucleotide
  Antisense strand to SEQ ID NO: 967920
ucugucgcuccuauuauug

SEQ ID NO: 967922 - RNA, 19 nt, Artificial Sequence
  Description of Artificial Sequence: Synthetic oligonucleotide
  Sense strand starting at position 261 of SEQ ID NO: 913969
gguguaucgacagagaaug

SEQ ID NO: 967923 - RNA, 19 nt, Artificial Sequence
  Description of Artificial Sequence: Synthetic oligonucleotide
  Antisense strand to SEQ ID NO: 967922
cauucucugucgauacacc

SEQ ID NO: 967924 - RNA, 19 nt, Artificial Sequence
  Description of Artificial Sequence: Synthetic oligonucleotide
  Sense strand starting at position 3378 of SEQ ID NO: 913969
gcugcagucggcuugaaca

SEQ ID NO: 967925 - RNA, 19 nt, Artificial Sequence
  Description of Artificial Sequence: Synthetic oligonucleotide
  Antisense strand to SEQ ID NO: 967924
uguucaagccgacugcagc

SEQ ID NO: 967926 - RNA, 19 nt, Artificial Sequence
  Description of Artificial Sequence: Synthetic oligonucleotide
  Sense strand starting at position 374 of SEQ ID NO: 913969
guaacaaagauauggguca

SEQ ID NO: 967927 - RNA, 19 nt, Artificial Sequence
  Description of Artificial Sequence: Synthetic oligonucleotide
  Antisense strand to SEQ ID NO: 967926
ugacccauaucuuuguuac

SEQ ID NO: 967928 - RNA, 19 nt, Artificial Sequence
  Description of Artificial Sequence: Synthetic oligonucleotide
  Sense strand starting at position 3022 of SEQ ID NO: 913969
cuucguuucgugucuagga

SEQ ID NO: 967929 - RNA, 19 nt, Artificial Sequence
  Description of Artificial Sequence: Synthetic oligonucleotide
  Antisense strand to SEQ ID NO: 967928
uccuagacacgaaacgaag

SEQ ID NO: 967930 - RNA, 19 nt, Artificial Sequence
  Description of Artificial Sequence: Synthetic oligonucleotide
  Sense strand starting at position 1177 of SEQ ID NO: 913969
uuugcuuacugauuuagca

SEQ ID NO: 967931 - RNA, 19 nt, Artificial Sequence
  Description of Artificial Sequence: Synthetic oligonucleotide
  Antisense strand to SEQ ID NO: 967930
ugcuaaaucaguaagcaaa

SEQ ID NO: 967932 - RNA, 19 nt, Artificial Sequence
  Description of Artificial Sequence: Synthetic oligonucleotide
  Sense strand starting at position 279 of SEQ ID NO: 913969
ggauaaagugcggacuaau

SEQ ID NO: 967933 - RNA, 19 nt, Artificial Sequence
  Description of Artificial Sequence: Synthetic oligonucleotide
  Antisense strand to SEQ ID NO: 967932
auuaguccgcacuuuaucc

SEQ ID NO: 967934 - RNA, 19 nt, Artificial Sequence
  Description of Artificial Sequence: Synthetic oligonucleotide
  Sense strand starting at position 2868 of SEQ ID NO: 913969
ggcuucuuggaugagaucu

SEQ ID NO: 967935 - RNA, 19 nt, Artificial Sequence
  Description of Artificial Sequence: Synthetic oligonucleotide
  Antisense strand to SEQ ID NO: 967934
agaucucauccaagaagcc

SEQ ID NO: 967936 - RNA, 19 nt, Artificial Sequence
  Description of Artificial Sequence: Synthetic oligonucleotide
  Sense strand starting at position 456 of SEQ ID NO: 913969
guaacaagacauugucaga

SEQ ID NO: 967937 - RNA, 19 nt, Artificial Sequence
  Description of Artificial Sequence: Synthetic oligonucleotide
  Antisense strand to SEQ ID NO: 967936
ucugacaaugucuuguuac

SEQ ID NO: 967938 - RNA, 19 nt, Artificial Sequence
  Description of Artificial Sequence: Synthetic oligonucleotide
  Sense strand starting at position 1231 of SEQ ID NO: 913969
guuacuuaucaaggacaug

SEQ ID NO: 967939 - RNA, 19 nt, Artificial Sequence
  Description of Artificial Sequence: Synthetic oligonucleotide
  Antisense strand to SEQ ID NO: 967938
cauguccuugauaaguaac

SEQ ID NO: 967940 - RNA, 19 nt, Artificial Sequence
  Description of Artificial Sequence: Synthetic oligonucleotide
  Sense strand starting at position 918 of SEQ ID NO: 913969
accugaaugagauggcuca

SEQ ID NO: 967941 - RNA, 19 nt, Artificial Sequence
  Description of Artificial Sequence: Synthetic oligonucleotide
  Antisense strand to SEQ ID NO: 967940
ugagccaucucauucaggu

SEQ ID NO: 967942 - RNA, 19 nt, Artificial Sequence
  Description of Artificial Sequence: Synthetic oligonucleotide
  Sense strand starting at position 3412 of SEQ ID NO: 913969
agcaauguggaagguaaua

SEQ ID NO: 967943 - RNA, 19 nt, Artificial Sequence
  Description of Artificial Sequence: Synthetic oligonucleotide
  Antisense strand to SEQ ID NO: 967942
uauuaccuuccacauugcu

SEQ ID NO: 967944 - RNA, 19 nt, Artificial Sequence
  Description of Artificial Sequence: Synthetic oligonucleotide
  Sense strand starting at position 1378 of SEQ ID NO: 913969
cuaaacugcuucgucauuu

SEQ ID NO: 967945 - RNA, 19 nt, Artificial Sequence
  Description of Artificial Sequence: Synthetic oligonucleotide
  Antisense strand to SEQ ID NO: 967944
aaaugacgaagcaguuuag

SEQ ID NO: 967946 - RNA, 19 nt, Artificial Sequence
  Description of Artificial Sequence: Synthetic oligonucleotide
  Sense strand starting at position 3579 of SEQ ID NO: 913969
gcgcaucacccgucuucua

SEQ ID NO: 967947 - RNA, 19 nt, Artificial Sequence
  Description of Artificial Sequence: Synthetic oligonucleotide
  Antisense strand to SEQ ID NO: 967946
uagaagacgggugaugcgc

SEQ ID NO: 967948 - RNA, 19 nt, Artificial Sequence
  Description of Artificial Sequence: Synthetic oligonucleotide
  Sense strand starting at position 2867 of SEQ ID NO: 913969
gggcuucuuggaugagauc

SEQ ID NO: 967949 - RNA, 19 nt, Artificial Sequence
  Description of Artificial Sequence: Synthetic oligonucleotide
  Antisense strand to SEQ ID NO: 967948
gaucucauccaagaagccc

SEQ ID NO: 967950 - RNA, 19 nt, Artificial Sequence
  Description of Artificial Sequence: Synthetic oligonucleotide
  Sense strand starting at position 3710 of SEQ ID NO: 913969
gaugacauguggccaacau

SEQ ID NO: 967951 - RNA, 19 nt, Artificial Sequence
  Description of Artificial Sequence: Synthetic oligonucleotide
  Antisense strand to SEQ ID NO: 967950
auguuggccacaugucauc

SEQ ID NO: 967952 - RNA, 19 nt, Artificial Sequence
  Description of Artificial Sequence: Synthetic oligonucleotide
  Sense strand starting at position 2787 of SEQ ID NO: 913969
ggcguugguccuguuugua

SEQ ID NO: 967953 - RNA, 19 nt, Artificial Sequence
  Description of Artificial Sequence: Synthetic oligonucleotide
  Antisense strand to SEQ ID NO: 967952
uacaaacaggaccaacgcc

SEQ ID NO: 967954 - RNA, 19 nt, Artificial Sequence
  Description of Artificial Sequence: Synthetic oligonucleotide
  Sense strand starting at position 388 of SEQ ID NO: 913969
ggucacauaacgugaaaca

SEQ ID NO: 967955 - RNA, 19 nt, Artificial Sequence
  Description of Artificial Sequence: Synthetic oligonucleotide
  Antisense strand to SEQ ID NO: 967954
uguuucacguuaugugacc

SEQ ID NO: 967956 - RNA, 19 nt, Artificial Sequence
  Description of Artificial Sequence: Synthetic oligonucleotide
  Sense strand starting at position 1360 of SEQ ID NO: 913969
cguggauuaccaugaacac

SEQ ID NO: 967957 - RNA, 19 nt, Artificial Sequence
  Description of Artificial Sequence: Synthetic oligonucleotide
  Antisense strand to SEQ ID NO: 967956
guguucaugguaauccacg

SEQ ID NO: 967958 - RNA, 19 nt, Artificial Sequence
  Description of Artificial Sequence: Synthetic oligonucleotide
  Sense strand starting at position 528 of SEQ ID NO: 913969
uguuaugaccgugauaauc

SEQ ID NO: 967959 - RNA, 19 nt, Artificial Sequence
  Description of Artificial Sequence: Synthetic oligonucleotide
  Antisense strand to SEQ ID NO: 967958
gauuaucacggucauaaca

SEQ ID NO: 967960 - RNA, 19 nt, Artificial Sequence
  Description of Artificial Sequence: Synthetic oligonucleotide
  Sense strand starting at position 3586 of SEQ ID NO: 913969
acccgucuucuagggagaa

SEQ ID NO: 967961 - RNA, 19 nt, Artificial Sequence
  Description of Artificial Sequence: Synthetic oligonucleotide
  Antisense strand to SEQ ID NO: 967960
uucucccuagaagacgggu

SEQ ID NO: 967962 - RNA, 19 nt, Artificial Sequence
  Description of Artificial Sequence: Synthetic oligonucleotide
  Sense strand starting at position 2878 of SEQ ID NO: 913969
augagaucucaaggcugca

SEQ ID NO: 967963 - RNA, 19 nt, Artificial Sequence
  Description of Artificial Sequence: Synthetic oligonucleotide
  Antisense strand to SEQ ID NO: 967962
ugcagccuugagaucucau

SEQ ID NO: 967964 - RNA, 19 nt, Artificial Sequence
  Description of Artificial Sequence: Synthetic oligonucleotide
  Sense strand starting at position 1253 of SEQ ID NO: 913969
ggaaacuccugagcgguaa

SEQ ID NO: 967965 - RNA, 19 nt, Artificial Sequence
  Description of Artificial Sequence: Synthetic oligonucleotide
  Antisense strand to SEQ ID NO: 967964
uuaccgcucaggaguuucc

SEQ ID NO: 967966 - RNA, 19 nt, Artificial Sequence
  Description of Artificial Sequence: Synthetic oligonucleotide
  Sense strand starting at position 3504 of SEQ ID NO: 913969
cguaccuccuuauugaaga

SEQ ID NO: 967967 - RNA, 19 nt, Artificial Sequence
  Description of Artificial Sequence: Synthetic oligonucleotide
  Antisense strand to SEQ ID NO: 967966
ucuucaauaaggagguacg

SEQ ID NO: 967968 - RNA, 19 nt, Artificial Sequence
  Description of Artificial Sequence: Synthetic oligonucleotide
  Sense strand starting at position 527 of SEQ ID NO: 913969
auguuaugaccgugauaau

SEQ ID NO: 967969 - RNA, 19 nt, Artificial Sequence
  Description of Artificial Sequence: Synthetic oligonucleotide
  Antisense strand to SEQ ID NO: 967968
auuaucacggucauaacau

SEQ ID NO: 967970 - RNA, 19 nt, Artificial Sequence
  Description of Artificial Sequence: Synthetic oligonucleotide
  Sense strand starting at position 3501 of SEQ ID NO: 913969
acacguaccuccuuauuga

SEQ ID NO: 967971 - RNA, 19 nt, Artificial Sequence
  Description of Artificial Sequence: Synthetic oligonucleotide
  Antisense strand to SEQ ID NO: 967970
ucaauaaggagguacgugu

SEQ ID NO: 967972 - RNA, 19 nt, Artificial Sequence
  Description of Artificial Sequence: Synthetic oligonucleotide
  Sense strand starting at position 1200 of SEQ ID NO: 913969
ucagaauuaugggacagaa

SEQ ID NO: 967973 - RNA, 19 nt, Artificial Sequence
  Description of Artificial Sequence: Synthetic oligonucleotide
  Antisense strand to SEQ ID NO: 967972
uucugucccauaauucuga

SEQ ID NO: 967974 - RNA, 19 nt, Artificial Sequence
  Description of Artificial Sequence: Synthetic oligonucleotide
  Sense strand starting at position 1049 of SEQ ID NO: 913969
uuauaugucguaugggauu

SEQ ID NO: 967975 - RNA, 19 nt, Artificial Sequence
  Description of Artificial Sequence: Synthetic oligonucleotide
  Antisense strand to SEQ ID NO: 967974
aaucccauacgacauauaa

SEQ ID NO: 967976 - RNA, 19 nt, Artificial Sequence
  Description of Artificial Sequence: Synthetic oligonucleotide
  Sense strand starting at position 538 of SEQ ID NO: 913969
gugauaaucuaagagggag

SEQ ID NO: 967977 - RNA, 19 nt, Artificial Sequence
  Description of Artificial Sequence: Synthetic oligonucleotide
  Antisense strand to SEQ ID NO: 967976
cucccucuuagauuaucac

SEQ ID NO: 967978 - RNA, 19 nt, Artificial Sequence
  Description of Artificial Sequence: Synthetic oligonucleotide
  Sense strand starting at position 1375 of SEQ ID NO: 913969
acacuaaacugcuucguca

SEQ ID NO: 967979 - RNA, 19 nt, Artificial Sequence
  Description of Artificial Sequence: Synthetic oligonucleotide
  Antisense strand to SEQ ID NO: 967978
ugacgaagcaguuuagugu

SEQ ID NO: 967980 - RNA, 19 nt, Artificial Sequence
  Description of Artificial Sequence: Synthetic oligonucleotide
  Sense strand starting at position 525 of SEQ ID NO: 913969
guauguuaugaccgugaua

SEQ ID NO: 967981 - RNA, 19 nt, Artificial Sequence
  Description of Artificial Sequence: Synthetic oligonucleotide
  Antisense strand to SEQ ID NO: 967980
uaucacggucauaacauac

SEQ ID NO: 967982 - RNA, 19 nt, Artificial Sequence
  Description of Artificial Sequence: Synthetic oligonucleotide
  Sense strand starting at position 1434 of SEQ ID NO: 913969
guucaauuccgggaggcgu

SEQ ID NO: 967983 - RNA, 19 nt, Artificial Sequence
  Description of Artificial Sequence: Synthetic oligonucleotide
  Antisense strand to SEQ ID NO: 967982
acgccucccggaauugaac

SEQ ID NO: 967984 - RNA, 19 nt, Artificial Sequence
  Description of Artificial Sequence: Synthetic oligonucleotide
  Sense strand starting at position 1377 of SEQ ID NO: 913969
acuaaacugcuucgucauu

SEQ ID NO: 967985 - RNA, 19 nt, Artificial Sequence
  Description of Artificial Sequence: Synthetic oligonucleotide
  Antisense strand to SEQ ID NO: 967984
aaugacgaagcaguuuagu

SEQ ID NO: 967986 - RNA, 19 nt, Artificial Sequence
  Description of Artificial Sequence: Synthetic oligonucleotide
  Sense strand starting at position 288 of SEQ ID NO: 913969
gcggacuaaucguucaauu

SEQ ID NO: 967987 - RNA, 19 nt, Artificial Sequence
  Description of Artificial Sequence: Synthetic oligonucleotide
  Antisense strand to SEQ ID NO: 967986
aauugaacgauuaguccgc

SEQ ID NO: 967988 - RNA, 19 nt, Artificial Sequence
  Description of Artificial Sequence: Synthetic oligonucleotide
  Sense strand starting at position 1144 of SEQ ID NO: 913969
uggcaauauuaugaagaua

SEQ ID NO: 967989 - RNA, 19 nt, Artificial Sequence
  Description of Artificial Sequence: Synthetic oligonucleotide
  Antisense strand to SEQ ID NO: 967988
uaucuucauaauauugcca

SEQ ID NO: 967990 - RNA, 19 nt, Artificial Sequence
  Description of Artificial Sequence: Synthetic oligonucleotide
  Sense strand starting at position 1228 of SEQ ID NO: 913969
gaaguuacuuaucaaggac

SEQ ID NO: 967991 - RNA, 19 nt, Artificial Sequence
  Description of Artificial Sequence: Synthetic oligonucleotide
  Antisense strand to SEQ ID NO: 967990
guccuugauaaguaacuuc

SEQ ID NO: 967992 - RNA, 19 nt, Artificial Sequence
  Description of Artificial Sequence: Synthetic oligonucleotide
  Sense strand starting at position 1447 of SEQ ID NO: 913969
aggcgucaguucucugaac

SEQ ID NO: 967993 - RNA, 19 nt, Artificial Sequence
  Description of Artificial Sequence: Synthetic oligonucleotide
  Antisense strand to SEQ ID NO: 967992
guucagagaacugacgccu

SEQ ID NO: 967994 - RNA, 19 nt, Artificial Sequence
  Description of Artificial Sequence: Synthetic oligonucleotide
  Sense strand starting at position 1448 of SEQ ID NO: 913969
ggcgucaguucucugaaca

SEQ ID NO: 967995 - RNA, 19 nt, Artificial Sequence
  Description of Artificial Sequence: Synthetic oligonucleotide
  Antisense strand to SEQ ID NO: 967994
uguucagagaacugacgcc

SEQ ID NO: 967996 - RNA, 19 nt, Artificial Sequence
  Description of Artificial Sequence: Synthetic oligonucleotide
  Sense strand starting at position 512 of SEQ ID NO: 913969
caaggacauuucuguaugu

SEQ ID NO: 967997 - RNA, 19 nt, Artificial Sequence
  Description of Artificial Sequence: Synthetic oligonucleotide
  Antisense strand to SEQ ID NO: 967996
acauacagaaauguccuug

SEQ ID NO: 967998 - RNA, 19 nt, Artificial Sequence
  Description of Artificial Sequence: Synthetic oligonucleotide
  Sense strand starting at position 3978 of SEQ ID NO: 913970
ggacuagggaauugucauc

SEQ ID NO: 967999 - RNA, 19 nt, Artificial Sequence
  Description of Artificial Sequence: Synthetic oligonucleotide
  Antisense strand to SEQ ID NO: 967998
gaugacaauucccuagucc

SEQ ID NO: 968000 - RNA, 19 nt, Artificial Sequence
  Description of Artificial Sequence: Synthetic oligonucleotide
  Sense strand starting at position 3959 of SEQ ID NO: 913970
gaugauuagugguuaggag

SEQ ID NO: 968001 - RNA, 19 nt, Artificial Sequence
  Description of Artificial Sequence: Synthetic oligonucleotide
  Antisense strand to SEQ ID NO: 968000
cuccuaaccacuaaucauc

SEQ ID NO: 968002 - RNA, 19 nt, Artificial Sequence
  Description of Artificial Sequence: Synthetic oligonucleotide
  Sense strand starting at position 3955 of SEQ ID NO: 913970
agaugaugauuagugguua

SEQ ID NO: 968003 - RNA, 19 nt, Artificial Sequence
  Description of Artificial Sequence: Synthetic oligonucleotide
  Antisense strand to SEQ ID NO: 968002
uaaccacuaaucaucaucu

SEQ ID NO: 968004 - RNA, 19 nt, Artificial Sequence
  Description of Artificial Sequence: Synthetic oligonucleotide
  Sense strand starting at position 175 of SEQ ID NO: 913970
ugaaaccacuguuuagauu

SEQ ID NO: 968005 - RNA, 19 nt, Artificial Sequence
  Description of Artificial Sequence: Synthetic oligonucleotide
  Antisense strand to SEQ ID NO: 968004
aaucuaaacagugguuuca

SEQ ID NO: 968006 - RNA, 19 nt, Artificial Sequence
  Description of Artificial Sequence: Synthetic oligonucleotide
  Sense strand starting at position 2780 of SEQ ID NO: 913970
accaucacugagugaacuu

SEQ ID NO: 968007 - RNA, 19 nt, Artificial Sequence
  Description of Artificial Sequence: Synthetic oligonucleotide
  Antisense strand to SEQ ID NO: 968006
aaguucacucagugauggu

SEQ ID NO: 968008 - RNA, 19 nt, Artificial Sequence
  Description of Artificial Sequence: Synthetic oligonucleotide
  Sense strand starting at position 70 of SEQ ID NO: 913970
ugagaauccuagccaguaa

SEQ ID NO: 968009 - RNA, 19 nt, Artificial Sequence
  Description of Artificial Sequence: Synthetic oligonucleotide
  Antisense strand to SEQ ID NO: 968008
uuacuggcuaggauucuca

SEQ ID NO: 968010 - RNA, 19 nt, Artificial Sequence
  Description of Artificial Sequence: Synthetic oligonucleotide
  Sense strand starting at position 2790 of SEQ ID NO: 913970
agugaacuuggacgaguaa

SEQ ID NO: 968011 - RNA, 19 nt, Artificial Sequence
  Description of Artificial Sequence: Synthetic oligonucleotide
  Antisense strand to SEQ ID NO: 968010
uuacucguccaaguucacu

SEQ ID NO: 968012 - RNA, 19 nt, Artificial Sequence
  Description of Artificial Sequence: Synthetic oligonucleotide
  Sense strand starting at position 3818 of SEQ ID NO: 913970
aagggaucagcuuaugugu

SEQ ID NO: 968013 - RNA, 19 nt, Artificial Sequence
  Description of Artificial Sequence: Synthetic oligonucleotide
  Antisense strand to SEQ ID NO: 968012
acacauaagcugaucccuu

SEQ ID NO: 968014 - RNA, 19 nt, Artificial Sequence
  Description of Artificial Sequence: Synthetic oligonucleotide
  Sense strand starting at position 3983 of SEQ ID NO: 913970
agggaauugucaucucucu

SEQ ID NO: 968015 - RNA, 19 nt, Artificial Sequence
  Description of Artificial Sequence: Synthetic oligonucleotide
  Antisense strand to SEQ ID NO: 968014
agagagaugacaauucccu

SEQ ID NO: 968016 - RNA, 19 nt, Artificial Sequence
  Description of Artificial Sequence: Synthetic oligonucleotide
  Sense strand starting at position 2704 of SEQ ID NO: 913970
gaaggugacuucguggaga

SEQ ID NO: 968017 - RNA, 19 nt, Artificial Sequence
  Description of Artificial Sequence: Synthetic oligonucleotide
  Antisense strand to SEQ ID NO: 968016
ucuccacgaagucaccuuc

SEQ ID NO: 968018 - RNA, 19 nt, Artificial Sequence
  Description of Artificial Sequence: Synthetic oligonucleotide
  Sense strand starting at position 3770 of SEQ ID NO: 913970
ucucaugacccucagugua

SEQ ID NO: 968019 - RNA, 19 nt, Artificial Sequence
  Description of Artificial Sequence: Synthetic oligonucleotide
  Antisense strand to SEQ ID NO: 968018
uacacugagggucaugaga

SEQ ID NO: 968020 - RNA, 19 nt, Artificial Sequence
  Description of Artificial Sequence: Synthetic oligonucleotide
  Sense strand starting at position 3506 of SEQ ID NO: 913970
ggcaaaucugagcagucau

SEQ ID NO: 968021 - RNA, 19 nt, Artificial Sequence
  Description of Artificial Sequence: Synthetic oligonucleotide
  Antisense strand to SEQ ID NO: 968020
augacugcucagauuugcc

SEQ ID NO: 968022 - RNA, 19 nt, Artificial Sequence
  Description of Artificial Sequence: Synthetic oligonucleotide
  Sense strand starting at position 172 of SEQ ID NO: 913970
gguugaaaccacuguuuag

SEQ ID NO: 968023 - RNA, 19 nt, Artificial Sequence
  Description of Artificial Sequence: Synthetic oligonucleotide
  Antisense strand to SEQ ID NO: 968022
cuaaacagugguuucaacc

SEQ ID NO: 968024 - RNA, 19 nt, Artificial Sequence
  Description of Artificial Sequence: Synthetic oligonucleotide
  Sense strand starting at position 2472 of SEQ ID NO: 913970
acucaaguuucgccgauuu

SEQ ID NO: 968025 - RNA, 19 nt, Artificial Sequence
  Description of Artificial Sequence: Synthetic oligonucleotide
  Antisense strand to SEQ ID NO: 968024
aaaucggcgaaacuugagu

SEQ ID NO: 968026 - RNA, 19 nt, Artificial Sequence
  Description of Artificial Sequence: Synthetic oligonucleotide
  Sense strand starting at position 309 of SEQ ID NO: 913970
uugagcugugguuagaauu

SEQ ID NO: 968027 - RNA, 19 nt, Artificial Sequence
  Description of Artificial Sequence: Synthetic oligonucleotide
  Antisense strand to SEQ ID NO: 968026
aauucuaaccacagcucaa

SEQ ID NO: 968028 - RNA, 19 nt, Artificial Sequence
  Description of Artificial Sequence: Synthetic oligonucleotide
  Sense strand starting at position 3867 of SEQ ID NO: 913970
uaaggaccaugucuguuau

SEQ ID NO: 968029 - RNA, 19 nt, Artificial Sequence
  Description of Artificial Sequence: Synthetic oligonucleotide
  Antisense strand to SEQ ID NO: 968028
auaacagacaugguccuua

SEQ ID NO: 968030 - RNA, 19 nt, Artificial Sequence
  Description of Artificial Sequence: Synthetic oligonucleotide
  Sense strand starting at position 2706 of SEQ ID NO: 913970
aggugacuucguggagaca

SEQ ID NO: 968031 - RNA, 19 nt, Artificial Sequence
  Description of Artificial Sequence: Synthetic oligonucleotide
  Antisense strand to SEQ ID NO: 968030
ugucuccacgaagucaccu

SEQ ID NO: 968032 - RNA, 19 nt, Artificial Sequence
  Description of Artificial Sequence: Synthetic oligonucleotide
  Sense strand starting at position 1832 of SEQ ID NO: 913970
cuguccuuagaauggucaa

SEQ ID NO: 968033 - RNA, 19 nt, Artificial Sequence
  Description of Artificial Sequence: Synthetic oligonucleotide
  Antisense strand to SEQ ID NO: 968032
uugaccauucuaaggacag

SEQ ID NO: 968034 - RNA, 19 nt, Artificial Sequence
  Description of Artificial Sequence: Synthetic oligonucleotide
  Sense strand starting at position 3868 of SEQ ID NO: 913970
aaggaccaugucuguuauu

SEQ ID NO: 968035 - RNA, 19 nt, Artificial Sequence
  Description of Artificial Sequence: Synthetic oligonucleotide
  Antisense strand to SEQ ID NO: 968034
aauaacagacaugguccuu

SEQ ID NO: 968036 - RNA, 19 nt, Artificial Sequence
  Description of Artificial Sequence: Synthetic oligonucleotide
  Sense strand starting at position 1564 of SEQ ID NO: 913970
ugguaaugguuuccagacu

SEQ ID NO: 968037 - RNA, 19 nt, Artificial Sequence
  Description of Artificial Sequence: Synthetic oligonucleotide
  Antisense strand to SEQ ID NO: 968036
agucuggaaaccauuacca

SEQ ID NO: 968038 - RNA, 19 nt, Artificial Sequence
  Description of Artificial Sequence: Synthetic oligonucleotide
  Sense strand starting at position 3772 of SEQ ID NO: 913970
ucaugacccucaguguaua

SEQ ID NO: 968039 - RNA, 19 nt, Artificial Sequence
  Description of Artificial Sequence: Synthetic oligonucleotide
  Antisense strand to SEQ ID NO: 968038
uauacacugagggucauga

SEQ ID NO: 968040 - RNA, 19 nt, Artificial Sequence
  Description of Artificial Sequence: Synthetic oligonucleotide
  Sense strand starting at position 3505 of SEQ ID NO: 913970
aggcaaaucugagcaguca

SEQ ID NO: 968041 - RNA, 19 nt, Artificial Sequence
  Description of Artificial Sequence: Synthetic oligonucleotide
  Antisense strand to SEQ ID NO: 968040
ugacugcucagauuugccu

SEQ ID NO: 968042 - RNA, 19 nt, Artificial Sequence
  Description of Artificial Sequence: Synthetic oligonucleotide
  Sense strand starting at position 992 of SEQ ID NO: 913970
caaagugugagcugggauu

SEQ ID NO: 968043 - RNA, 19 nt, Artificial Sequence
  Description of Artificial Sequence: Synthetic oligonucleotide
  Antisense strand to SEQ ID NO: 968042
aaucccagcucacacuuug

SEQ ID NO: 968044 - RNA, 19 nt, Artificial Sequence
  Description of Artificial Sequence: Synthetic oligonucleotide
  Sense strand starting at position 336 of SEQ ID NO: 913970
gguggauggucacuguaug

SEQ ID NO: 968045 - RNA, 19 nt, Artificial Sequence
  Description of Artificial Sequence: Synthetic oligonucleotide
  Antisense strand to SEQ ID NO: 968044
cauacagugaccauccacc

SEQ ID NO: 968046 - RNA, 19 nt, Artificial Sequence
  Description of Artificial Sequence: Synthetic oligonucleotide
  Sense strand starting at position 3921 of SEQ ID NO: 913970
acugaaaucuaugaggaag

SEQ ID NO: 968047 - RNA, 19 nt, Artificial Sequence
  Description of Artificial Sequence: Synthetic oligonucleotide
  Antisense strand to SEQ ID NO: 968046
cuuccucauagauuucagu

SEQ ID NO: 968048 - RNA, 19 nt, Artificial Sequence
  Description of Artificial Sequence: Synthetic oligonucleotide
  Sense strand starting at position 3518 of SEQ ID NO: 913970
cagucaugucuugacuguu

SEQ ID NO: 968049 - RNA, 19 nt, Artificial Sequence
  Description of Artificial Sequence: Synthetic oligonucleotide
  Antisense strand to SEQ ID NO: 968048
aacagucaagacaugacug

SEQ ID NO: 968050 - RNA, 19 nt, Artificial Sequence
  Description of Artificial Sequence: Synthetic oligonucleotide
  Sense strand starting at position 837 of SEQ ID NO: 913970
aaauuuggauucuggaagu

SEQ ID NO: 968051 - RNA, 19 nt, Artificial Sequence
  Description of Artificial Sequence: Synthetic oligonucleotide
  Antisense strand to SEQ ID NO: 968050
acuuccagaauccaaauuu

SEQ ID NO: 968052 - RNA, 19 nt, Artificial Sequence
  Description of Artificial Sequence: Synthetic oligonucleotide
  Sense strand starting at position 3879 of SEQ ID NO: 913970
cuguuauucccaggcauaa

SEQ ID NO: 968053 - RNA, 19 nt, Artificial Sequence
  Description of Artificial Sequence: Synthetic oligonucleotide
  Antisense strand to SEQ ID NO: 968052
uuaugccugggaauaacag

SEQ ID NO: 968054 - RNA, 19 nt, Artificial Sequence
  Description of Artificial Sequence: Synthetic oligonucleotide
  Sense strand starting at position 252 of SEQ ID NO: 913970
ggcuaucuugcucacuuau

SEQ ID NO: 968055 - RNA, 19 nt, Artificial Sequence
  Description of Artificial Sequence: Synthetic oligonucleotide
  Antisense strand to SEQ ID NO: 968054
auaagugagcaagauagcc

SEQ ID NO: 968056 - RNA, 19 nt, Artificial Sequence
  Description of Artificial Sequence: Synthetic oligonucleotide
  Sense strand starting at position 1192 of SEQ ID NO: 913970
ggacauucuguccgauucu

SEQ ID NO: 968057 - RNA, 19 nt, Artificial Sequence
  Description of Artificial Sequence: Synthetic oligonucleotide
  Antisense strand to SEQ ID NO: 968056
agaaucggacagaaugucc

SEQ ID NO: 968058 - RNA, 19 nt, Artificial Sequence
  Description of Artificial Sequence: Synthetic oligonucleotide
  Sense strand starting at position 3938 of SEQ ID NO: 913970
agauguucugccugguaag

SEQ ID NO: 968059 - RNA, 19 nt, Artificial Sequence
  Description of Artificial Sequence: Synthetic oligonucleotide
  Antisense strand to SEQ ID NO: 968058
cuuaccaggcagaacaucu

SEQ ID NO: 968060 - RNA, 19 nt, Artificial Sequence
  Description of Artificial Sequence: Synthetic oligonucleotide
  Sense strand starting at position 3939 of SEQ ID NO: 913970
gauguucugccugguaaga

SEQ ID NO: 968061 - RNA, 19 nt, Artificial Sequence
  Description of Artificial Sequence: Synthetic oligonucleotide
  Antisense strand to SEQ ID NO: 968060
ucuuaccaggcagaacauc

SEQ ID NO: 968062 - RNA, 19 nt, Artificial Sequence
  Description of Artificial Sequence: Synthetic oligonucleotide
  Sense strand starting at position 3935 of SEQ ID NO: 913970
ggaagauguucugccuggu

SEQ ID NO: 968063 - RNA, 19 nt, Artificial Sequence
  Description of Artificial Sequence: Synthetic oligonucleotide
  Antisense strand to SEQ ID NO: 968062
accaggcagaacaucuucc

SEQ ID NO: 968064 - RNA, 19 nt, Artificial Sequence
  Description of Artificial Sequence: Synthetic oligonucleotide
  Sense strand starting at position 782 of SEQ ID NO: 913970
uuccuuuccuggucuugau

SEQ ID NO: 968065 - RNA, 19 nt, Artificial Sequence
  Description of Artificial Sequence: Synthetic oligonucleotide
  Antisense strand to SEQ ID NO: 968064
aucaagaccaggaaaggaa

SEQ ID NO: 968066 - RNA, 19 nt, Artificial Sequence
  Description of Artificial Sequence: Synthetic oligonucleotide
  Sense strand starting at position 3004 of SEQ ID NO: 913970
gugccugcugguuaggaau

SEQ ID NO: 968067 - RNA, 19 nt, Artificial Sequence
  Description of Artificial Sequence: Synthetic oligonucleotide
  Antisense strand to SEQ ID NO: 968066
auuccuaaccagcaggcac

SEQ ID NO: 968068 - RNA, 19 nt, Artificial Sequence
  Description of Artificial Sequence: Synthetic oligonucleotide
  Sense strand starting at position 1670 of SEQ ID NO: 913970
ccugguucuuacccugagu

SEQ ID NO: 968069 - RNA, 19 nt, Artificial Sequence
  Description of Artificial Sequence: Synthetic oligonucleotide
  Antisense strand to SEQ ID NO: 968068
acucaggguaagaaccagg

SEQ ID NO: 968070 - RNA, 19 nt, Artificial Sequence
  Description of Artificial Sequence: Synthetic oligonucleotide
  Sense strand starting at position 1672 of SEQ ID NO: 913970
ugguucuuacccugaguuu

SEQ ID NO: 968071 - RNA, 19 nt, Artificial Sequence
  Description of Artificial Sequence: Synthetic oligonucleotide
  Antisense strand to SEQ ID NO: 968070
aaacucaggguaagaacca

SEQ ID NO: 968072 - RNA, 19 nt, Artificial Sequence
  Description of Artificial Sequence: Synthetic oligonucleotide
  Sense strand starting at position 821 of SEQ ID NO: 913970
uuggccuucuguccucaaa

SEQ ID NO: 968073 - RNA, 19 nt, Artificial Sequence
  Description of Artificial Sequence: Synthetic oligonucleotide
  Antisense strand to SEQ ID NO: 968072
uuugaggacagaaggccaa

SEQ ID NO: 968074 - RNA, 19 nt, Artificial Sequence
  Description of Artificial Sequence: Synthetic oligonucleotide
  Sense strand starting at position 823 of SEQ ID NO: 913970
ggccuucuguccucaaauu

SEQ ID NO: 968075 - RNA, 19 nt, Artificial Sequence
  Description of Artificial Sequence: Synthetic oligonucleotide
  Antisense strand to SEQ ID NO: 968074
aauuugaggacagaaggcc

SEQ ID NO: 968076 - RNA, 19 nt, Artificial Sequence
  Description of Artificial Sequence: Synthetic oligonucleotide
  Sense strand starting at position 251 of SEQ ID NO: 913970
gggcuaucuugcucacuua

SEQ ID NO: 968077 - RNA, 19 nt, Artificial Sequence
  Description of Artificial Sequence: Synthetic oligonucleotide
  Antisense strand to SEQ ID NO: 968076
uaagugagcaagauagccc

SEQ ID NO: 968078 - RNA, 19 nt, Artificial Sequence
  Description of Artificial Sequence: Synthetic oligonucleotide
  Sense strand starting at position 3646 of SEQ ID NO: 913971
gguauauaugcacaauaua

SEQ ID NO: 968079 - RNA, 19 nt, Artificial Sequence
  Description of Artificial Sequence: Synthetic oligonucleotide
  Antisense strand to SEQ ID NO: 968078
uauauugugcauauauacc

SEQ ID NO: 968080 - RNA, 19 nt, Artificial Sequence
  Description of Artificial Sequence: Synthetic oligonucleotide
  Sense strand starting at position 575 of SEQ ID NO: 913971
ggaauauuguuaucuaaag

SEQ ID NO: 968081 - RNA, 19 nt, Artificial Sequence
  Description of Artificial Sequence: Synthetic oligonucleotide
  Antisense strand to SEQ ID NO: 968080
cuuuagauaacaauauucc

SEQ ID NO: 968082 - RNA, 19 nt, Artificial Sequence
  Description of Artificial Sequence: Synthetic oligonucleotide
  Sense strand starting at position 2697 of SEQ ID NO: 913971
uggaacuauccaugauauc

SEQ ID NO: 968083 - RNA, 19 nt, Artificial Sequence
  Description of Artificial Sequence: Synthetic oligonucleotide
  Antisense strand to SEQ ID NO: 968082
gauaucauggauaguucca

SEQ ID NO: 968084 - RNA, 19 nt, Artificial Sequence
  Description of Artificial Sequence: Synthetic oligonucleotide
  Sense strand starting at position 771 of SEQ ID NO: 913971
caggguggucuugauauaa

SEQ ID NO: 968085 - RNA, 19 nt, Artificial Sequence
  Description of Artificial Sequence: Synthetic oligonucleotide
  Antisense strand to SEQ ID NO: 968084
uuauaucaagaccacccug

SEQ ID NO: 968086 - RNA, 19 nt, Artificial Sequence
  Description of Artificial Sequence: Synthetic oligonucleotide
  Sense strand starting at position 637 of SEQ ID NO: 913971
agauguugcccacaggaau

SEQ ID NO: 968087 - RNA, 19 nt, Artificial Sequence
  Description of Artificial Sequence: Synthetic oligonucleotide
  Antisense strand to SEQ ID NO: 968086
auuccugugggcaacaucu

SEQ ID NO: 968088 - RNA, 19 nt, Artificial Sequence
  Description of Artificial Sequence: Synthetic oligonucleotide
  Sense strand starting at position 1383 of SEQ ID NO: 913971
cucugaugccuugacagau

SEQ ID NO: 968089 - RNA, 19 nt, Artificial Sequence
  Description of Artificial Sequence: Synthetic oligonucleotide
  Antisense strand to SEQ ID NO: 968088
aucugucaaggcaucagag

SEQ ID NO: 968090 - RNA, 19 nt, Artificial Sequence
  Description of Artificial Sequence: Synthetic oligonucleotide
  Sense strand starting at position 2585 of SEQ ID NO: 913971
caguaugaugugggacuaa

SEQ ID NO: 968091 - RNA, 19 nt, Artificial Sequence
  Description of Artificial Sequence: Synthetic oligonucleotide
  Antisense strand to SEQ ID NO: 968090
uuagucccacaucauacug

SEQ ID NO: 968092 - RNA, 19 nt, Artificial Sequence
  Description of Artificial Sequence: Synthetic oligonucleotide
  Sense strand starting at position 22 of SEQ ID NO: 913971
agaaacaugcaucggauau

SEQ ID NO: 968093 - RNA, 19 nt, Artificial Sequence
  Description of Artificial Sequence: Synthetic oligonucleotide
  Antisense strand to SEQ ID NO: 968092
auauccgaugcauguuucu

SEQ ID NO: 968094 - RNA, 19 nt, Artificial Sequence
  Description of Artificial Sequence: Synthetic oligonucleotide
  Sense strand starting at position 2583 of SEQ ID NO: 913971
gacaguaugaugugggacu

SEQ ID NO: 968095 - RNA, 19 nt, Artificial Sequence
  Description of Artificial Sequence: Synthetic oligonucleotide
  Antisense strand to SEQ ID NO: 968094
agucccacaucauacuguc

SEQ ID NO: 968096 - RNA, 19 nt, Artificial Sequence
  Description of Artificial Sequence: Synthetic oligonucleotide
  Sense strand starting at position 28 of SEQ ID NO: 913971
augcaucggauauaguaua

SEQ ID NO: 968097 - RNA, 19 nt, Artificial Sequence
  Description of Artificial Sequence: Synthetic oligonucleotide
  Antisense strand to SEQ ID NO: 968096
uauacuauauccgaugcau

SEQ ID NO: 968098 - RNA, 19 nt, Artificial Sequence
  Description of Artificial Sequence: Synthetic oligonucleotide
  Sense strand starting at position 26 of SEQ ID NO: 913971
acaugcaucggauauagua

SEQ ID NO: 968099 - RNA, 19 nt, Artificial Sequence
  Description of Artificial Sequence: Synthetic oligonucleotide
  Antisense strand to SEQ ID NO: 968098
uacuauauccgaugcaugu

SEQ ID NO: 968100 - RNA, 19 nt, Artificial Sequence
  Description of Artificial Sequence: Synthetic oligonucleotide
  Sense strand starting at position 1331 of SEQ ID NO: 913971
gugacuccuccugauucua

SEQ ID NO: 968101 - RNA, 19 nt, Artificial Sequence
  Description of Artificial Sequence: Synthetic oligonucleotide
  Antisense strand to SEQ ID NO: 968100
uagaaucaggaggagucac

SEQ ID NO: 968102 - RNA, 19 nt, Artificial Sequence
  Description of Artificial Sequence: Synthetic oligonucleotide
  Sense strand starting at position 3886 of SEQ ID NO: 913971
gagaguggucgauggauaa

SEQ ID NO: 968103 - RNA, 19 nt, Artificial Sequence
  Description of Artificial Sequence: Synthetic oligonucleotide
  Antisense strand to SEQ ID NO: 968102
uuauccaucgaccacucuc

SEQ ID NO: 968104 - RNA, 19 nt, Artificial Sequence
  Description of Artificial Sequence: Synthetic oligonucleotide
  Sense strand starting at position 2470 of SEQ ID NO: 913971
auggcuuacaggugagaua

SEQ ID NO: 968105 - RNA, 19 nt, Artificial Sequence
  Description of Artificial Sequence: Synthetic oligonucleotide
  Antisense strand to SEQ ID NO: 968104
uaucucaccuguaagccau

SEQ ID NO: 968106 - RNA, 19 nt, Artificial Sequence
  Description of Artificial Sequence: Synthetic oligonucleotide
  Sense strand starting at position 775 of SEQ ID NO: 913971
guggucuugauauaaaguu

SEQ ID NO: 968107 - RNA, 19 nt, Artificial Sequence
  Description of Artificial Sequence: Synthetic oligonucleotide
  Antisense strand to SEQ ID NO: 968106
aacuuuauaucaagaccac

SEQ ID NO: 968108 - RNA, 19 nt, Artificial Sequence
  Description of Artificial Sequence: Synthetic oligonucleotide
  Sense strand starting at position 42 of SEQ ID NO: 913971
guauaauaacuacgugaag

SEQ ID NO: 968109 - RNA, 19 nt, Artificial Sequence
  Description of Artificial Sequence: Synthetic oligonucleotide
  Antisense strand to SEQ ID NO: 968108
cuucacguaguuauuauac

SEQ ID NO: 968110 - RNA, 19 nt, Artificial Sequence
  Description of Artificial Sequence: Synthetic oligonucleotide
  Sense strand starting at position 716 of SEQ ID NO: 913971
gcuacucacguagacagau

SEQ ID NO: 968111 - RNA, 19 nt, Artificial Sequence
  Description of Artificial Sequence: Synthetic oligonucleotide
  Antisense strand to SEQ ID NO: 968110
aucugucuacgugaguagc

SEQ ID NO: 968112 - RNA, 19 nt, Artificial Sequence
  Description of Artificial Sequence: Synthetic oligonucleotide
  Sense strand starting at position 585 of SEQ ID NO: 913971
uaucuaaaguucccggaua

SEQ ID NO: 968113 - RNA, 19 nt, Artificial Sequence
  Description of Artificial Sequence: Synthetic oligonucleotide
  Antisense strand to SEQ ID NO: 968112
uauccgggaacuuuagaua

SEQ ID NO: 968114 - RNA, 19 nt, Artificial Sequence
  Description of Artificial Sequence: Synthetic oligonucleotide
  Sense strand starting at position 587 of SEQ ID NO: 913971
ucuaaaguucccggauaua

SEQ ID NO: 968115 - RNA, 19 nt, Artificial Sequence
  Description of Artificial Sequence: Synthetic oligonucleotide
  Antisense strand to SEQ ID NO: 968114
uauauccgggaacuuuaga

SEQ ID NO: 968116 - RNA, 19 nt, Artificial Sequence
  Description of Artificial Sequence: Synthetic oligonucleotide
  Sense strand starting at position 3532 of SEQ ID NO: 913971
caguguguugaauagaugu

SEQ ID NO: 968117 - RNA, 19 nt, Artificial Sequence
  Description of Artificial Sequence: Synthetic oligonucleotide
  Antisense strand to SEQ ID NO: 968116
acaucuauucaacacacug

SEQ ID NO: 968118 - RNA, 19 nt, Artificial Sequence
  Description of Artificial Sequence: Synthetic oligonucleotide
  Sense strand starting at position 852 of SEQ ID NO: 913971
gagagaugccugggaugcu

SEQ ID NO: 968119 - RNA, 19 nt, Artificial Sequence
  Description of Artificial Sequence: Synthetic oligonucleotide
  Antisense strand to SEQ ID NO: 968118
agcaucccaggcaucucuc

SEQ ID NO: 968120 - RNA, 19 nt, Artificial Sequence
  Description of Artificial Sequence: Synthetic oligonucleotide
  Sense strand starting at position 2677 of SEQ ID NO: 913971
ucguaaacuugagcacaaa

SEQ ID NO: 968121 - RNA, 19 nt, Artificial Sequence
  Description of Artificial Sequence: Synthetic oligonucleotide
  Antisense strand to SEQ ID NO: 968120
uuugugcucaaguuuacga

SEQ ID NO: 968122 - RNA, 19 nt, Artificial Sequence
  Description of Artificial Sequence: Synthetic oligonucleotide
  Sense strand starting at position 3543 of SEQ ID NO: 913971
auagaugucuccucuccca

SEQ ID NO: 968123 - RNA, 19 nt, Artificial Sequence
  Description of Artificial Sequence: Synthetic oligonucleotide
  Antisense strand to SEQ ID NO: 968122
ugggagaggagacaucuau

SEQ ID NO: 968124 - RNA, 19 nt, Artificial Sequence
  Description of Artificial Sequence: Synthetic oligonucleotide
  Sense strand starting at position 3024 of SEQ ID NO: 913971
ucuugagugucccuauaaa

SEQ ID NO: 968125 - RNA, 19 nt, Artificial Sequence
  Description of Artificial Sequence: Synthetic oligonucleotide
  Antisense strand to SEQ ID NO: 968124
uuuauagggacacucaaga

SEQ ID NO: 968126 - RNA, 19 nt, Artificial Sequence
  Description of Artificial Sequence: Synthetic oligonucleotide
  Sense strand starting at position 2738 of SEQ ID NO: 913971
aacugcaggucucugaauu

SEQ ID NO: 968127 - RNA, 19 nt, Artificial Sequence
  Description of Artificial Sequence: Synthetic oligonucleotide
  Antisense strand to SEQ ID NO: 968126
aauucagagaccugcaguu

SEQ ID NO: 968128 - RNA, 19 nt, Artificial Sequence
  Description of Artificial Sequence: Synthetic oligonucleotide
  Sense strand starting at position 1327 of SEQ ID NO: 913971
uuuggugacuccuccugau

SEQ ID NO: 968129 - RNA, 19 nt, Artificial Sequence
  Description of Artificial Sequence: Synthetic oligonucleotide
  Antisense strand to SEQ ID NO: 968128
aucaggaggagucaccaaa

SEQ ID NO: 968130 - RNA, 19 nt, Artificial Sequence
  Description of Artificial Sequence: Synthetic oligonucleotide
  Sense strand starting at position 2739 of SEQ ID NO: 913971
acugcaggucucugaauua

SEQ ID NO: 968131 - RNA, 19 nt, Artificial Sequence
  Description of Artificial Sequence: Synthetic oligonucleotide
  Antisense strand to SEQ ID NO: 968130
uaauucagagaccugcagu

SEQ ID NO: 968132 - RNA, 19 nt, Artificial Sequence
  Description of Artificial Sequence: Synthetic oligonucleotide
  Sense strand starting at position 622 of SEQ ID NO: 913971
agaugcucgcuccacagau

SEQ ID NO: 968133 - RNA, 19 nt, Artificial Sequence
  Description of Artificial Sequence: Synthetic oligonucleotide
  Antisense strand to SEQ ID NO: 968132
aucuguggagcgagcaucu

SEQ ID NO: 968134 - RNA, 19 nt, Artificial Sequence
  Description of Artificial Sequence: Synthetic oligonucleotide
  Sense strand starting at position 968 of SEQ ID NO: 913971
gcugaaucuggcuacugua

SEQ ID NO: 968135 - RNA, 19 nt, Artificial Sequence
  Description of Artificial Sequence: Synthetic oligonucleotide
  Antisense strand to SEQ ID NO: 968134
uacaguagccagauucagc

SEQ ID NO: 968136 - RNA, 19 nt, Artificial Sequence
  Description of Artificial Sequence: Synthetic oligonucleotide
  Sense strand starting at position 2717 of SEQ ID NO: 913971
ggauuaaucugcuuucuuu

SEQ ID NO: 968137 - RNA, 19 nt, Artificial Sequence
  Description of Artificial Sequence: Synthetic oligonucleotide
  Antisense strand to SEQ ID NO: 968136
aaagaaagcagauuaaucc

SEQ ID NO: 968138 - RNA, 19 nt, Artificial Sequence
  Description of Artificial Sequence: Synthetic oligonucleotide
  Sense strand starting at position 767 of SEQ ID NO: 913971
cccucaggguggucuugau

SEQ ID NO: 968139 - RNA, 19 nt, Artificial Sequence
  Description of Artificial Sequence: Synthetic oligonucleotide
  Antisense strand to SEQ ID NO: 968138
aucaagaccacccugaggg

SEQ ID NO: 968140 - RNA, 19 nt, Artificial Sequence
  Description of Artificial Sequence: Synthetic oligonucleotide
  Sense strand starting at position 709 of SEQ ID NO: 913971
cacagaugcuacucacgua

SEQ ID NO: 968141 - RNA, 19 nt, Artificial Sequence
  Description of Artificial Sequence: Synthetic oligonucleotide
  Antisense strand to SEQ ID NO: 968140
uacgugaguagcaucugug

SEQ ID NO: 968142 - RNA, 19 nt, Artificial Sequence
  Description of Artificial Sequence: Synthetic oligonucleotide
  Sense strand starting at position 2424 of SEQ ID NO: 913971
agaguccuagguugucuau

SEQ ID NO: 968143 - RNA, 19 nt, Artificial Sequence
  Description of Artificial Sequence: Synthetic oligonucleotide
  Antisense strand to SEQ ID NO: 968142
auagacaaccuaggacucu

SEQ ID NO: 968144 - RNA, 19 nt, Artificial Sequence
  Description of Artificial Sequence: Synthetic oligonucleotide
  Sense strand starting at position 3505 of SEQ ID NO: 913971
uuccaagaaucucaaagga

SEQ ID NO: 968145 - RNA, 19 nt, Artificial Sequence
  Description of Artificial Sequence: Synthetic oligonucleotide
  Antisense strand to SEQ ID NO: 968144
uccuuugagauucuuggaa

SEQ ID NO: 968146 - RNA, 19 nt, Artificial Sequence
  Description of Artificial Sequence: Synthetic oligonucleotide
  Sense strand starting at position 3700 of SEQ ID NO: 913971
ucugucauuuacgacaaca

SEQ ID NO: 968147 - RNA, 19 nt, Artificial Sequence
  Description of Artificial Sequence: Synthetic oligonucleotide
  Antisense strand to SEQ ID NO: 968146
uguugucguaaaugacaga

SEQ ID NO: 968148 - RNA, 19 nt, Artificial Sequence
  Description of Artificial Sequence: Synthetic oligonucleotide
  Sense strand starting at position 1729 of SEQ ID NO: 913971
gagagcagcuguuuccaca

SEQ ID NO: 968149 - RNA, 19 nt, Artificial Sequence
  Description of Artificial Sequence: Synthetic oligonucleotide
  Antisense strand to SEQ ID NO: 968148
uguggaaacagcugcucuc

SEQ ID NO: 968150 - RNA, 19 nt, Artificial Sequence
  Description of Artificial Sequence: Synthetic oligonucleotide
  Sense strand starting at position 3022 of SEQ ID NO: 913971
agucuugagugucccuaua

SEQ ID NO: 968151 - RNA, 19 nt, Artificial Sequence
  Description of Artificial Sequence: Synthetic oligonucleotide
  Antisense strand to SEQ ID NO: 968150
uauagggacacucaagacu

SEQ ID NO: 968152 - RNA, 19 nt, Artificial Sequence
  Description of Artificial Sequence: Synthetic oligonucleotide
  Sense strand starting at position 2426 of SEQ ID NO: 913971
aguccuagguugucuauau

SEQ ID NO: 968153 - RNA, 19 nt, Artificial Sequence
  Description of Artificial Sequence: Synthetic oligonucleotide
  Antisense strand to SEQ ID NO: 968152
auauagacaaccuaggacu

SEQ ID NO: 968154 - RNA, 19 nt, Artificial Sequence
  Description of Artificial Sequence: Synthetic oligonucleotide
  Sense strand starting at position 559 of SEQ ID NO: 913971
guaaauagaugggauugga

SEQ ID NO: 968155 - RNA, 19 nt, Artificial Sequence
  Description of Artificial Sequence: Synthetic oligonucleotide
  Antisense strand to SEQ ID NO: 968154
uccaaucccaucuauuuac

SEQ ID NO: 968156 - RNA, 19 nt, Artificial Sequence
  Description of Artificial Sequence: Synthetic oligonucleotide
  Sense strand starting at position 807 of SEQ ID NO: 913971
uguguucucagucaggguu

SEQ ID NO: 968157 - RNA, 19 nt, Artificial Sequence
  Description of Artificial Sequence: Synthetic oligonucleotide
  Antisense strand to SEQ ID NO: 968156
aacccugacugagaacaca

SEQ ID NO: 968158 - RNA, 19 nt, Artificial Sequence
  Description of Artificial Sequence: Synthetic oligonucleotide
  Sense strand starting at position 2104 of SEQ ID NO: 913972
ggaugagaucagggcaauu

SEQ ID NO: 968159 - RNA, 19 nt, Artificial Sequence
  Description of Artificial Sequence: Synthetic oligonucleotide
  Antisense strand to SEQ ID NO: 968158
aauugcccugaucucaucc

SEQ ID NO: 968160 - RNA, 19 nt, Artificial Sequence
  Description of Artificial Sequence: Synthetic oligonucleotide
  Sense strand starting at position 3556 of SEQ ID NO: 913972
aagugacuugaucaaagcu

SEQ ID NO: 968161 - RNA, 19 nt, Artificial Sequence
  Description of Artificial Sequence: Synthetic oligonucleotide
  Antisense strand to SEQ ID NO: 968160
agcuuugaucaagucacuu

SEQ ID NO: 968162 - RNA, 19 nt, Artificial Sequence
  Description of Artificial Sequence: Synthetic oligonucleotide
  Sense strand starting at position 2644 of SEQ ID NO: 913972
ucagcauaaguggaucaua

SEQ ID NO: 968163 - RNA, 19 nt, Artificial Sequence
  Description of Artificial Sequence: Synthetic oligonucleotide
  Antisense strand to SEQ ID NO: 968162
uaugauccacuuaugcuga

SEQ ID NO: 968164 - RNA, 19 nt, Artificial Sequence
  Description of Artificial Sequence: Synthetic oligonucleotide
  Sense strand starting at position 610 of SEQ ID NO: 913972
gagagacuuaagggugagu

SEQ ID NO: 968165 - RNA, 19 nt, Artificial Sequence
  Description of Artificial Sequence: Synthetic oligonucleotide
  Antisense strand to SEQ ID NO: 968164
acucacccuuaagucucuc

SEQ ID NO: 968166 - RNA, 19 nt, Artificial Sequence
  Description of Artificial Sequence: Synthetic oligonucleotide
  Sense strand starting at position 1423 of SEQ ID NO: 913972
cagggaagguuucccagau

SEQ ID NO: 968167 - RNA, 19 nt, Artificial Sequence
  Description of Artificial Sequence: Synthetic oligonucleotide
  Antisense strand to SEQ ID NO: 968166
aucugggaaaccuucccug

SEQ ID NO: 968168 - RNA, 19 nt, Artificial Sequence
  Description of Artificial Sequence: Synthetic oligonucleotide
  Sense strand starting at position 2429 of SEQ ID NO: 913972
aggaauuaauagucacuuu

SEQ ID NO: 968169 - RNA, 19 nt, Artificial Sequence
  Description of Artificial Sequence: Synthetic oligonucleotide
  Antisense strand to SEQ ID NO: 968168
aaagugacuauuaauuccu

SEQ ID NO: 968170 - RNA, 19 nt, Artificial Sequence
  Description of Artificial Sequence: Synthetic oligonucleotide
  Sense strand starting at position 1447 of SEQ ID NO: 913972
acaggaagcucagugaaau

SEQ ID NO: 968171 - RNA, 19 nt, Artificial Sequence
  Description of Artificial Sequence: Synthetic oligonucleotide
  Antisense strand to SEQ ID NO: 968170
auuucacugagcuuccugu

SEQ ID NO: 968172 - RNA, 19 nt, Artificial Sequence
  Description of Artificial Sequence: Synthetic oligonucleotide
  Sense strand starting at position 1134 of SEQ ID NO: 913972
agggacagcucccuugaga

SEQ ID NO: 968173 - RNA, 19 nt, Artificial Sequence
  Description of Artificial Sequence: Synthetic oligonucleotide
  Antisense strand to SEQ ID NO: 968172
ucucaagggagcugucccu

SEQ ID NO: 968174 - RNA, 19 nt, Artificial Sequence
  Description of Artificial Sequence: Synthetic oligonucleotide
  Sense strand starting at position 2367 of SEQ ID NO: 913972
ccuacauagucuccaagga

SEQ ID NO: 968175 - RNA, 19 nt, Artificial Sequence
  Description of Artificial Sequence: Synthetic oligonucleotide
  Antisense strand to SEQ ID NO: 968174
uccuuggagacuauguagg

SEQ ID NO: 968176 - RNA, 19 nt, Artificial Sequence
  Description of Artificial Sequence: Synthetic oligonucleotide
  Sense strand starting at position 2740 of SEQ ID NO: 913972
uuagaagucagaggguuua

SEQ ID NO: 968177 - RNA, 19 nt, Artificial Sequence
  Description of Artificial Sequence: Synthetic oligonucleotide
  Antisense strand to SEQ ID NO: 968176
uaaacccucugacuucuaa

SEQ ID NO: 968178 - RNA, 19 nt, Artificial Sequence
  Description of Artificial Sequence: Synthetic oligonucleotide
  Sense strand starting at position 1784 of SEQ ID NO: 913972
gaaguagcuauugacggau

SEQ ID NO: 968179 - RNA, 19 nt, Artificial Sequence
  Description of Artificial Sequence: Synthetic oligonucleotide
  Antisense strand to SEQ ID NO: 968178
auccgucaauagcuacuuc

SEQ ID NO: 968180 - RNA, 19 nt, Artificial Sequence
  Description of Artificial Sequence: Synthetic oligonucleotide
  Sense strand starting at position 750 of SEQ ID NO: 913972
uuucuaaucccuugaugag

SEQ ID NO: 968181 - RNA, 19 nt, Artificial Sequence
  Description of Artificial Sequence: Synthetic oligonucleotide
  Antisense strand to SEQ ID NO: 968180
cucaucaagggauuagaaa

SEQ ID NO: 968182 - RNA, 19 nt, Artificial Sequence
  Description of Artificial Sequence: Synthetic oligonucleotide
  Sense strand starting at position 1499 of SEQ ID NO: 913972
ggauaaguaugucccagau

SEQ ID NO: 968183 - RNA, 19 nt, Artificial Sequence
  Description of Artificial Sequence: Synthetic oligonucleotide
  Antisense strand to SEQ ID NO: 968182
aucugggacauacuuaucc

SEQ ID NO: 968184 - RNA, 19 nt, Artificial Sequence
  Description of Artificial Sequence: Synthetic oligonucleotide
  Sense strand starting at position 2371 of SEQ ID NO: 913972
cauagucuccaaggagagu

SEQ ID NO: 968185 - RNA, 19 nt, Artificial Sequence
  Description of Artificial Sequence: Synthetic oligonucleotide
  Antisense strand to SEQ ID NO: 968184
acucuccuuggagacuaug

SEQ ID NO: 968186 - RNA, 19 nt, Artificial Sequence
  Description of Artificial Sequence: Synthetic oligonucleotide
  Sense strand starting at position 2423 of SEQ ID NO: 913972
agcgguaggaauuaauagu

SEQ ID NO: 968187 - RNA, 19 nt, Artificial Sequence
  Description of Artificial Sequence: Synthetic oligonucleotide
  Antisense strand to SEQ ID NO: 968186
acuauuaauuccuaccgcu

SEQ ID NO: 968188 - RNA, 19 nt, Artificial Sequence
  Description of Artificial Sequence: Synthetic oligonucleotide
  Sense strand starting at position 1458 of SEQ ID NO: 913972
agugaaaugugaguuugag

SEQ ID NO: 968189 - RNA, 19 nt, Artificial Sequence
  Description of Artificial Sequence: Synthetic oligonucleotide
  Antisense strand to SEQ ID NO: 968188
cucaaacucacauuucacu

SEQ ID NO: 968190 - RNA, 19 nt, Artificial Sequence
  Description of Artificial Sequence: Synthetic oligonucleotide
  Sense strand starting at position 3251 of SEQ ID NO: 913972
ucaaauguuugucuggaaa

SEQ ID NO: 968191 - RNA, 19 nt, Artificial Sequence
  Description of Artificial Sequence: Synthetic oligonucleotide
  Antisense strand to SEQ ID NO: 968190
uuuccagacaaacauuuga

SEQ ID NO: 968192 - RNA, 19 nt, Artificial Sequence
  Description of Artificial Sequence: Synthetic oligonucleotide
  Sense strand starting at position 621 of SEQ ID NO: 913972
gggugaguccgggaaguau

SEQ ID NO: 968193 - RNA, 19 nt, Artificial Sequence
  Description of Artificial Sequence: Synthetic oligonucleotide
  Antisense strand to SEQ ID NO: 968192
auacuucccggacucaccc

SEQ ID NO: 968194 - RNA, 19 nt, Artificial Sequence
  Description of Artificial Sequence: Synthetic oligonucleotide
  Sense strand starting at position 161 of SEQ ID NO: 913972
ggauuugguucuugauuuc

SEQ ID NO: 968195 - RNA, 19 nt, Artificial Sequence
  Description of Artificial Sequence: Synthetic oligonucleotide
  Antisense strand to SEQ ID NO: 968194
gaaaucaagaaccaaaucc

SEQ ID NO: 968196 - RNA, 19 nt, Artificial Sequence
  Description of Artificial Sequence: Synthetic oligonucleotide
  Sense strand starting at position 1487 of SEQ ID NO: 913972
aagaauuugucaggauaag

SEQ ID NO: 968197 - RNA, 19 nt, Artificial Sequence
  Description of Artificial Sequence: Synthetic oligonucleotide
  Antisense strand to SEQ ID NO: 968196
cuuauccugacaaauucuu

SEQ ID NO: 968198 - RNA, 19 nt, Artificial Sequence
  Description of Artificial Sequence: Synthetic oligonucleotide
  Sense strand starting at position 2590 of SEQ ID NO: 913972
aucugagugcagggacauu

SEQ ID NO: 968199 - RNA, 19 nt, Artificial Sequence
  Description of Artificial Sequence: Synthetic oligonucleotide
  Antisense strand to SEQ ID NO: 968198
aaugucccugcacucagau

SEQ ID NO: 968200 - RNA, 19 nt, Artificial Sequence
  Description of Artificial Sequence: Synthetic oligonucleotide
  Sense strand starting at position 311 of SEQ ID NO: 913972
caaacagugugagcauaau

SEQ ID NO: 968201 - RNA, 19 nt, Artificial Sequence
  Description of Artificial Sequence: Synthetic oligonucleotide
  Antisense strand to SEQ ID NO: 968200
auuaugcucacacuguuug

SEQ ID NO: 968202 - RNA, 19 nt, Artificial Sequence
  Description of Artificial Sequence: Synthetic oligonucleotide
  Sense strand starting at position 2727 of SEQ ID NO: 913972
uccuuugaguuucuuagaa

SEQ ID NO: 968203 - RNA, 19 nt, Artificial Sequence
  Description of Artificial Sequence: Synthetic oligonucleotide
  Antisense strand to SEQ ID NO: 968202
uucuaagaaacucaaagga

SEQ ID NO: 968204 - RNA, 19 nt, Artificial Sequence
  Description of Artificial Sequence: Synthetic oligonucleotide
  Sense strand starting at position 1485 of SEQ ID NO: 913972
cgaagaauuugucaggaua

SEQ ID NO: 968205 - RNA, 19 nt, Artificial Sequence
  Description of Artificial Sequence: Synthetic oligonucleotide
  Antisense strand to SEQ ID NO: 968204
uauccugacaaauucuucg

SEQ ID NO: 968206 - RNA, 19 nt, Artificial Sequence
  Description of Artificial Sequence: Synthetic oligonucleotide
  Sense strand starting at position 3321 of SEQ ID NO: 913972
auguguuuggcugaagacu

SEQ ID NO: 968207 - RNA, 19 nt, Artificial Sequence
  Description of Artificial Sequence: Synthetic oligonucleotide
  Antisense strand to SEQ ID NO: 968206
agucuucagccaaacacau

SEQ ID NO: 968208 - RNA, 19 nt, Artificial Sequence
  Description of Artificial Sequence: Synthetic oligonucleotide
  Sense strand starting at position 2636 of SEQ ID NO: 913972
guuuacacucagcauaagu

SEQ ID NO: 968209 - RNA, 19 nt, Artificial Sequence
  Description of Artificial Sequence: Synthetic oligonucleotide
  Antisense strand to SEQ ID NO: 968208
acuuaugcugaguguaaac

SEQ ID NO: 968210 - RNA, 19 nt, Artificial Sequence
  Description of Artificial Sequence: Synthetic oligonucleotide
  Sense strand starting at position 3250 of SEQ ID NO: 913972
cucaaauguuugucuggaa

SEQ ID NO: 968211 - RNA, 19 nt, Artificial Sequence
  Description of Artificial Sequence: Synthetic oligonucleotide
  Antisense strand to SEQ ID NO: 968210
uuccagacaaacauuugag

SEQ ID NO: 968212 - RNA, 19 nt, Artificial Sequence
  Description of Artificial Sequence: Synthetic oligonucleotide
  Sense strand starting at position 3319 of SEQ ID NO: 913972
aaauguguuuggcugaaga

SEQ ID NO: 968213 - RNA, 19 nt, Artificial Sequence
  Description of Artificial Sequence: Synthetic oligonucleotide
  Antisense strand to SEQ ID NO: 968212
ucuucagccaaacacauuu

SEQ ID NO: 968214 - RNA, 19 nt, Artificial Sequence
  Description of Artificial Sequence: Synthetic oligonucleotide
  Sense strand starting at position 620 of SEQ ID NO: 913972
agggugaguccgggaagua

SEQ ID NO: 968215 - RNA, 19 nt, Artificial Sequence
  Description of Artificial Sequence: Synthetic oligonucleotide
  Antisense strand to SEQ ID NO: 968214
uacuucccggacucacccu

SEQ ID NO: 968216 - RNA, 19 nt, Artificial Sequence
  Description of Artificial Sequence: Synthetic oligonucleotide
  Sense strand starting at position 230 of SEQ ID NO: 913972
cuguguugccuuuaggaag

SEQ ID NO: 968217 - RNA, 19 nt, Artificial Sequence
  Description of Artificial Sequence: Synthetic oligonucleotide
  Antisense strand to SEQ ID NO: 968216
cuuccuaaaggcaacacag

SEQ ID NO: 968218 - RNA, 19 nt, Artificial Sequence
  Description of Artificial Sequence: Synthetic oligonucleotide
  Sense strand starting at position 3249 of SEQ ID NO: 913972
ucucaaauguuugucugga

SEQ ID NO: 968219 - RNA, 19 nt, Artificial Sequence
  Description of Artificial Sequence: Synthetic oligonucleotide
  Antisense strand to SEQ ID NO: 968218
uccagacaaacauuugaga

SEQ ID NO: 968220 - RNA, 19 nt, Artificial Sequence
  Description of Artificial Sequence: Synthetic oligonucleotide
  Sense strand starting at position 1645 of SEQ ID NO: 913972
gacagaucgugaccucucu

SEQ ID NO: 968221 - RNA, 19 nt, Artificial Sequence
  Description of Artificial Sequence: Synthetic oligonucleotide
  Antisense strand to SEQ ID NO: 968220
agagaggucacgaucuguc

SEQ ID NO: 968222 - RNA, 19 nt, Artificial Sequence
  Description of Artificial Sequence: Synthetic oligonucleotide
  Sense strand starting at position 353 of SEQ ID NO: 913972
guccaacugccuuggacaa

SEQ ID NO: 968223 - RNA, 19 nt, Artificial Sequence
  Description of Artificial Sequence: Synthetic oligonucleotide
  Antisense strand to SEQ ID NO: 968222
uuguccaaggcaguuggac

SEQ ID NO: 968224 - RNA, 19 nt, Artificial Sequence
  Description of Artificial Sequence: Synthetic oligonucleotide
  Sense strand starting at position 2539 of SEQ ID NO: 913972
cuggcucugacgcauaaau

SEQ ID NO: 968225 - RNA, 19 nt, Artificial Sequence
  Description of Artificial Sequence: Synthetic oligonucleotide
  Antisense strand to SEQ ID NO: 968224
auuuaugcgucagagccag

SEQ ID NO: 968226 - RNA, 19 nt, Artificial Sequence
  Description of Artificial Sequence: Synthetic oligonucleotide
  Sense strand starting at position 322 of SEQ ID NO: 913972
agcauaauccaguggcaag

SEQ ID NO: 968227 - RNA, 19 nt, Artificial Sequence
  Description of Artificial Sequence: Synthetic oligonucleotide
  Antisense strand to SEQ ID NO: 968226
cuugccacuggauuaugcu

SEQ ID NO: 968228 - RNA, 19 nt, Artificial Sequence
  Description of Artificial Sequence: Synthetic oligonucleotide
  Sense strand starting at position 444 of SEQ ID NO: 913972
ugcagcauagaugguuaaa

SEQ ID NO: 968229 - RNA, 19 nt, Artificial Sequence
  Description of Artificial Sequence: Synthetic oligonucleotide
  Antisense strand to SEQ ID NO: 968228
uuuaaccaucuaugcugca

SEQ ID NO: 968230 - RNA, 19 nt, Artificial Sequence
  Description of Artificial Sequence: Synthetic oligonucleotide
  Sense strand starting at position 260 of SEQ ID NO: 913972
uguugauuccaaugucuga

SEQ ID NO: 968231 - RNA, 19 nt, Artificial Sequence
  Description of Artificial Sequence: Synthetic oligonucleotide
  Antisense strand to SEQ ID NO: 968230
ucagacauuggaaucaaca

SEQ ID NO: 968232 - RNA, 19 nt, Artificial Sequence
  Description of Artificial Sequence: Synthetic oligonucleotide
  Sense strand starting at position 958 of SEQ ID NO: 913972
aggugugcaccuuauaucu

SEQ ID NO: 968233 - RNA, 19 nt, Artificial Sequence
  Description of Artificial Sequence: Synthetic oligonucleotide
  Antisense strand to SEQ ID NO: 968232
agauauaaggugcacaccu

SEQ ID NO: 968234 - RNA, 19 nt, Artificial Sequence
  Description of Artificial Sequence: Synthetic oligonucleotide
  Sense strand starting at position 1611 of SEQ ID NO: 913972
ggcagcucuaaguggauaa

SEQ ID NO: 968235 - RNA, 19 nt, Artificial Sequence
  Description of Artificial Sequence: Synthetic oligonucleotide
  Antisense strand to SEQ ID NO: 968234
uuauccacuuagagcugcc

SEQ ID NO: 968236 - RNA, 19 nt, Artificial Sequence
  Description of Artificial Sequence: Synthetic oligonucleotide
  Sense strand starting at position 1455 of SEQ ID NO: 913972
cucagugaaaugugaguuu

SEQ ID NO: 968237 - RNA, 19 nt, Artificial Sequence
  Description of Artificial Sequence: Synthetic oligonucleotide
  Antisense strand to SEQ ID NO: 968236
aaacucacauuucacugag

SEQ ID NO: 968238 - RNA, 19 nt, Artificial Sequence
  Description of Artificial Sequence: Synthetic oligonucleotide
  Sense strand starting at position 486 of SEQ ID NO: 913973
auaugaaaucagugugaaa

SEQ ID NO: 968239 - RNA, 19 nt, Artificial Sequence
  Description of Artificial Sequence: Synthetic oligonucleotide
  Antisense strand to SEQ ID NO: 968238
uuucacacugauuucauau

SEQ ID NO: 968240 - RNA, 19 nt, Artificial Sequence
  Description of Artificial Sequence: Synthetic oligonucleotide
  Sense strand starting at position 2298 of SEQ ID NO: 913973
cugguaagggagugauaga

SEQ ID NO: 968241 - RNA, 19 nt, Artificial Sequence
  Description of Artificial Sequence: Synthetic oligonucleotide
  Antisense strand to SEQ ID NO: 968240
ucuaucacucccuuaccag

SEQ ID NO: 968242 - RNA, 19 nt, Artificial Sequence
  Description of Artificial Sequence: Synthetic oligonucleotide
  Sense strand starting at position 2089 of SEQ ID NO: 913973
guuuguuacgagccaguuu

SEQ ID NO: 968243 - RNA, 19 nt, Artificial Sequence
  Description of Artificial Sequence: Synthetic oligonucleotide
  Antisense strand to SEQ ID NO: 968242
aaacuggcucguaacaaac

SEQ ID NO: 968244 - RNA, 19 nt, Artificial Sequence
  Description of Artificial Sequence: Synthetic oligonucleotide
  Sense strand starting at position 2813 of SEQ ID NO: 913973
gagaaauucugguucugag

SEQ ID NO: 968245 - RNA, 19 nt, Artificial Sequence
  Description of Artificial Sequence: Synthetic oligonucleotide
  Antisense strand to SEQ ID NO: 968244
cucagaaccagaauuucuc

SEQ ID NO: 968246 - RNA, 19 nt, Artificial Sequence
  Description of Artificial Sequence: Synthetic oligonucleotide
  Sense strand starting at position 488 of SEQ ID NO: 913973
augaaaucagugugaaauu

SEQ ID NO: 968247 - RNA, 19 nt, Artificial Sequence
  Description of Artificial Sequence: Synthetic oligonucleotide
  Antisense strand to SEQ ID NO: 968246
aauuucacacugauuucau

SEQ ID NO: 968248 - RNA, 19 nt, Artificial Sequence
  Description of Artificial Sequence: Synthetic oligonucleotide
  Sense strand starting at position 2447 of SEQ ID NO: 913973
caaaguuuagagcacagua

SEQ ID NO: 968249 - RNA, 19 nt, Artificial Sequence
  Description of Artificial Sequence: Synthetic oligonucleotide
  Antisense strand to SEQ ID NO: 968248
uacugugcucuaaacuuug

SEQ ID NO: 968250 - RNA, 19 nt, Artificial Sequence
  Description of Artificial Sequence: Synthetic oligonucleotide
  Sense strand starting at position 2959 of SEQ ID NO: 913973
guaggacauuccuugauag

SEQ ID NO: 968251 - RNA, 19 nt, Artificial Sequence
  Description of Artificial Sequence: Synthetic oligonucleotide
  Antisense strand to SEQ ID NO: 968250
cuaucaaggaauguccuac

SEQ ID NO: 968252 - RNA, 19 nt, Artificial Sequence
  Description of Artificial Sequence: Synthetic oligonucleotide
  Sense strand starting at position 2619 of SEQ ID NO: 913973
ucaccaagccugggagaau

SEQ ID NO: 968253 - RNA, 19 nt, Artificial Sequence
  Description of Artificial Sequence: Synthetic oligonucleotide
  Antisense strand to SEQ ID NO: 968252
auucucccaggcuugguga

SEQ ID NO: 968254 - RNA, 19 nt, Artificial Sequence
  Description of Artificial Sequence: Synthetic oligonucleotide
  Sense strand starting at position 2674 of SEQ ID NO: 913973
ggagcucuugcagaucaag

SEQ ID NO: 968255 - RNA, 19 nt, Artificial Sequence
  Description of Artificial Sequence: Synthetic oligonucleotide
  Antisense strand to SEQ ID NO: 968254
cuugaucugcaagagcucc

SEQ ID NO: 968256 - RNA, 19 nt, Artificial Sequence
  Description of Artificial Sequence: Synthetic oligonucleotide
  Sense strand starting at position 3680 of SEQ ID NO: 913973
agucuauguggguacagau

SEQ ID NO: 968257 - RNA, 19 nt, Artificial Sequence
  Description of Artificial Sequence: Synthetic oligonucleotide
  Antisense strand to SEQ ID NO: 968256
aucuguacccacauagacu

SEQ ID NO: 968258 - RNA, 19 nt, Artificial Sequence
  Description of Artificial Sequence: Synthetic oligonucleotide
  Sense strand starting at position 362 of SEQ ID NO: 913973
cguugauaaguauauuaca

SEQ ID NO: 968259 - RNA, 19 nt, Artificial Sequence
  Description of Artificial Sequence: Synthetic oligonucleotide
  Antisense strand to SEQ ID NO: 968258
uguaauauacuuaucaacg

SEQ ID NO: 968260 - RNA, 19 nt, Artificial Sequence
  Description of Artificial Sequence: Synthetic oligonucleotide
  Sense strand starting at position 2960 of SEQ ID NO: 913973
uaggacauuccuugauagu

SEQ ID NO: 968261 - RNA, 19 nt, Artificial Sequence
  Description of Artificial Sequence: Synthetic oligonucleotide
  Antisense strand to SEQ ID NO: 968260
acuaucaaggaauguccua

SEQ ID NO: 968262 - RNA, 19 nt, Artificial Sequence
  Description of Artificial Sequence: Synthetic oligonucleotide
  Sense strand starting at position 2586 of SEQ ID NO: 913973
gugucucgucuggcuguaa

SEQ ID NO: 968263 - RNA, 19 nt, Artificial Sequence
  Description of Artificial Sequence: Synthetic oligonucleotide
  Antisense strand to SEQ ID NO: 968262
uuacagccagacgagacac

SEQ ID NO: 968264 - RNA, 19 nt, Artificial Sequence
  Description of Artificial Sequence: Synthetic oligonucleotide
  Sense strand starting at position 3908 of SEQ ID NO: 913973
aggaaucauugcgucaaag

SEQ ID NO: 968265 - RNA, 19 nt, Artificial Sequence
  Description of Artificial Sequence: Synthetic oligonucleotide
  Antisense strand to SEQ ID NO: 968264
cuuugacgcaaugauuccu

SEQ ID NO: 968266 - RNA, 19 nt, Artificial Sequence
  Description of Artificial Sequence: Synthetic oligonucleotide
  Sense strand starting at position 360 of SEQ ID NO: 913973
agcguugauaaguauauua

SEQ ID NO: 968267 - RNA, 19 nt, Artificial Sequence
  Description of Artificial Sequence: Synthetic oligonucleotide
  Antisense strand to SEQ ID NO: 968266
uaauauacuuaucaacgcu

SEQ ID NO: 968268 - RNA, 19 nt, Artificial Sequence
  Description of Artificial Sequence: Synthetic oligonucleotide
  Sense strand starting at position 3342 of SEQ ID NO: 913973
auguuuaucucagucauaa

SEQ ID NO: 968269 - RNA, 19 nt, Artificial Sequence
  Description of Artificial Sequence: Synthetic oligonucleotide
  Antisense strand to SEQ ID NO: 968268
uuaugacugagauaaacau

SEQ ID NO: 968270 - RNA, 19 nt, Artificial Sequence
  Description of Artificial Sequence: Synthetic oligonucleotide
  Sense strand starting at position 3871 of SEQ ID NO: 913973
auauuccuguauguacaua

SEQ ID NO: 968271 - RNA, 19 nt, Artificial Sequence
  Description of Artificial Sequence: Synthetic oligonucleotide
  Antisense strand to SEQ ID NO: 968270
uauguacauacaggaauau

SEQ ID NO: 968272 - RNA, 19 nt, Artificial Sequence
  Description of Artificial Sequence: Synthetic oligonucleotide
  Sense strand starting at position 3026 of SEQ ID NO: 913973
ggauucuuguagcuuagag

SEQ ID NO: 968273 - RNA, 19 nt, Artificial Sequence
  Description of Artificial Sequence: Synthetic oligonucleotide
  Antisense strand to SEQ ID NO: 968272
cucuaagcuacaagaaucc

SEQ ID NO: 968274 - RNA, 19 nt, Artificial Sequence
  Description of Artificial Sequence: Synthetic oligonucleotide
  Sense strand starting at position 3675 of SEQ ID NO: 913973
agaucagucuaugugggua

SEQ ID NO: 968275 - RNA, 19 nt, Artificial Sequence
  Description of Artificial Sequence: Synthetic oligonucleotide
  Antisense strand to SEQ ID NO: 968274
uacccacauagacugaucu

SEQ ID NO: 968276 - RNA, 19 nt, Artificial Sequence
  Description of Artificial Sequence: Synthetic oligonucleotide
  Sense strand starting at position 3679 of SEQ ID NO: 913973
cagucuauguggguacaga

SEQ ID NO: 968277 - RNA, 19 nt, Artificial Sequence
  Description of Artificial Sequence: Synthetic oligonucleotide
  Antisense strand to SEQ ID NO: 968276
ucuguacccacauagacug

SEQ ID NO: 968278 - RNA, 19 nt, Artificial Sequence
  Description of Artificial Sequence: Synthetic oligonucleotide
  Sense strand starting at position 2285 of SEQ ID NO: 913973
gaaacucacugcucuggua

SEQ ID NO: 968279 - RNA, 19 nt, Artificial Sequence
  Description of Artificial Sequence: Synthetic oligonucleotide
  Antisense strand to SEQ ID NO: 968278
uaccagagcagugaguuuc

SEQ ID NO: 968280 - RNA, 19 nt, Artificial Sequence
  Description of Artificial Sequence: Synthetic oligonucleotide
  Sense strand starting at position 2792 of SEQ ID NO: 913973
gcaagauaguagccucaga

SEQ ID NO: 968281 - RNA, 19 nt, Artificial Sequence
  Description of Artificial Sequence: Synthetic oligonucleotide
  Antisense strand to SEQ ID NO: 968280
ucugaggcuacuaucuugc

SEQ ID NO: 968282 - RNA, 19 nt, Artificial Sequence
  Description of Artificial Sequence: Synthetic oligonucleotide
  Sense strand starting at position 3361 of SEQ ID NO: 913973
cauuaaaucuuggcugggu

SEQ ID NO: 968283 - RNA, 19 nt, Artificial Sequence
  Description of Artificial Sequence: Synthetic oligonucleotide
  Antisense strand to SEQ ID NO: 968282
acccagccaagauuuaaug

SEQ ID NO: 968284 - RNA, 19 nt, Artificial Sequence
  Description of Artificial Sequence: Synthetic oligonucleotide
  Sense strand starting at position 3674 of SEQ ID NO: 913973
gagaucagucuaugugggu

SEQ ID NO: 968285 - RNA, 19 nt, Artificial Sequence
  Description of Artificial Sequence: Synthetic oligonucleotide
  Antisense strand to SEQ ID NO: 968284
acccacauagacugaucuc

SEQ ID NO: 968286 - RNA, 19 nt, Artificial Sequence
  Description of Artificial Sequence: Synthetic oligonucleotide
  Sense strand starting at position 2631 of SEQ ID NO: 913973
ggagaaugccuuuguccau

SEQ ID NO: 968287 - RNA, 19 nt, Artificial Sequence
  Description of Artificial Sequence: Synthetic oligonucleotide
  Antisense strand to SEQ ID NO: 968286
auggacaaaggcauucucc

SEQ ID NO: 968288 - RNA, 19 nt, Artificial Sequence
  Description of Artificial Sequence: Synthetic oligonucleotide
  Sense strand starting at position 3124 of SEQ ID NO: 913973
ugcgguagagcauaaagua

SEQ ID NO: 968289 - RNA, 19 nt, Artificial Sequence
  Description of Artificial Sequence: Synthetic oligonucleotide
  Antisense strand to SEQ ID NO: 968288
uacuuuaugcucuaccgca

SEQ ID NO: 968290 - RNA, 19 nt, Artificial Sequence
  Description of Artificial Sequence: Synthetic oligonucleotide
  Sense strand starting at position 2638 of SEQ ID NO: 913973
gccuuuguccaucaagggu

SEQ ID NO: 968291 - RNA, 19 nt, Artificial Sequence
  Description of Artificial Sequence: Synthetic oligonucleotide
  Antisense strand to SEQ ID NO: 968290
acccuugauggacaaaggc

SEQ ID NO: 968292 - RNA, 19 nt, Artificial Sequence
  Description of Artificial Sequence: Synthetic oligonucleotide
  Sense strand starting at position 2632 of SEQ ID NO: 913973
gagaaugccuuuguccauc

SEQ ID NO: 968293 - RNA, 19 nt, Artificial Sequence
  Description of Artificial Sequence: Synthetic oligonucleotide
  Antisense strand to SEQ ID NO: 968292
gauggacaaaggcauucuc

SEQ ID NO: 968294 - RNA, 19 nt, Artificial Sequence
  Description of Artificial Sequence: Synthetic oligonucleotide
  Sense strand starting at position 3882 of SEQ ID NO: 913973
uguacauauuucugaaagg

SEQ ID NO: 968295 - RNA, 19 nt, Artificial Sequence
  Description of Artificial Sequence: Synthetic oligonucleotide
  Antisense strand to SEQ ID NO: 968294
ccuuucagaaauauguaca

SEQ ID NO: 968296 - RNA, 19 nt, Artificial Sequence
  Description of Artificial Sequence: Synthetic oligonucleotide
  Sense strand starting at position 2046 of SEQ ID NO: 913973
gggugaggucuugggcuca

SEQ ID NO: 968297 - RNA, 19 nt, Artificial Sequence
  Description of Artificial Sequence: Synthetic oligonucleotide
  Antisense strand to SEQ ID NO: 968296
ugagcccaagaccucaccc

SEQ ID NO: 968298 - RNA, 19 nt, Artificial Sequence
  Description of Artificial Sequence: Synthetic oligonucleotide
  Sense strand starting at position 354 of SEQ ID NO: 913973
ugaagcagcguugauaagu

SEQ ID NO: 968299 - RNA, 19 nt, Artificial Sequence
  Description of Artificial Sequence: Synthetic oligonucleotide
  Antisense strand to SEQ ID NO: 968298
acuuaucaacgcugcuuca

SEQ ID NO: 968300 - RNA, 19 nt, Artificial Sequence
  Description of Artificial Sequence: Synthetic oligonucleotide
  Sense strand starting at position 1505 of SEQ ID NO: 913973
ugagucuguuuccucucaa

SEQ ID NO: 968301 - RNA, 19 nt, Artificial Sequence
  Description of Artificial Sequence: Synthetic oligonucleotide
  Antisense strand to SEQ ID NO: 968300
uugagaggaaacagacuca

SEQ ID NO: 968302 - RNA, 19 nt, Artificial Sequence
  Description of Artificial Sequence: Synthetic oligonucleotide
  Sense strand starting at position 2752 of SEQ ID NO: 913973
cacgcuaaccagugaucca

SEQ ID NO: 968303 - RNA, 19 nt, Artificial Sequence
  Description of Artificial Sequence: Synthetic oligonucleotide
  Antisense strand to SEQ ID NO: 968302
uggaucacugguuagcgug

SEQ ID NO: 968304 - RNA, 19 nt, Artificial Sequence
  Description of Artificial Sequence: Synthetic oligonucleotide
  Sense strand starting at position 2755 of SEQ ID NO: 913973
gcuaaccagugauccaguu

SEQ ID NO: 968305 - RNA, 19 nt, Artificial Sequence
  Description of Artificial Sequence: Synthetic oligonucleotide
  Antisense strand to SEQ ID NO: 968304
aacuggaucacugguuagc

SEQ ID NO: 968306 - RNA, 19 nt, Artificial Sequence
  Description of Artificial Sequence: Synthetic oligonucleotide
  Sense strand starting at position 2120 of SEQ ID NO: 913973
gacuaagacucggagggaa

SEQ ID NO: 968307 - RNA, 19 nt, Artificial Sequence
  Description of Artificial Sequence: Synthetic oligonucleotide
  Antisense strand to SEQ ID NO: 968306
uucccuccgagucuuaguc

SEQ ID NO: 968308 - RNA, 19 nt, Artificial Sequence
  Description of Artificial Sequence: Synthetic oligonucleotide
  Sense strand starting at position 3182 of SEQ ID NO: 913973
acgaauucccuccguccaa

SEQ ID NO: 968309 - RNA, 19 nt, Artificial Sequence
  Description of Artificial Sequence: Synthetic oligonucleotide
  Antisense strand to SEQ ID NO: 968308
uuggacggagggaauucgu

SEQ ID NO: 968310 - RNA, 19 nt, Artificial Sequence
  Description of Artificial Sequence: Synthetic oligonucleotide
  Sense strand starting at position 2184 of SEQ ID NO: 913973
cccugucuccugggaguuu

SEQ ID NO: 968311 - RNA, 19 nt, Artificial Sequence
  Description of Artificial Sequence: Synthetic oligonucleotide
  Antisense strand to SEQ ID NO: 968310
aaacucccaggagacaggg

SEQ ID NO: 968312 - RNA, 19 nt, Artificial Sequence
  Description of Artificial Sequence: Synthetic oligonucleotide
  Sense strand starting at position 359 of SEQ ID NO: 913973
cagcguugauaaguauauu

SEQ ID NO: 968313 - RNA, 19 nt, Artificial Sequence
  Description of Artificial Sequence: Synthetic oligonucleotide
  Antisense strand to SEQ ID NO: 968312
aauauacuuaucaacgcug

SEQ ID NO: 968314 - RNA, 19 nt, Artificial Sequence
  Description of Artificial Sequence: Synthetic oligonucleotide
  Sense strand starting at position 2974 of SEQ ID NO: 913973
auaguuucgccagguggga

SEQ ID NO: 968315 - RNA, 19 nt, Artificial Sequence
  Description of Artificial Sequence: Synthetic oligonucleotide
  Antisense strand to SEQ ID NO: 968314
ucccaccuggcgaaacuau

SEQ ID NO: 968316 - RNA, 19 nt, Artificial Sequence
  Description of Artificial Sequence: Synthetic oligonucleotide
  Sense strand starting at position 3292 of SEQ ID NO: 913973
guauauacaugagaucaag

SEQ ID NO: 968317 - RNA, 19 nt, Artificial Sequence
  Description of Artificial Sequence: Synthetic oligonucleotide
  Antisense strand to SEQ ID NO: 968316
cuugaucucauguauauac

SEQ ID NO: 968318 - RNA, 19 nt, Artificial Sequence
  Description of Artificial Sequence: Synthetic oligonucleotide
  Sense strand starting at position 3966 of SEQ ID NO: 913974
uuuggagaccguuaugaag

SEQ ID NO: 968319 - RNA, 19 nt, Artificial Sequence
  Description of Artificial Sequence: Synthetic oligonucleotide
  Antisense strand to SEQ ID NO: 968318
cuucauaacggucuccaaa

SEQ ID NO: 968320 - RNA, 19 nt, Artificial Sequence
  Description of Artificial Sequence: Synthetic oligonucleotide
  Sense strand starting at position 3825 of SEQ ID NO: 913974
guuaguuaucaggaaauuc

SEQ ID NO: 968321 - RNA, 19 nt, Artificial Sequence
  Description of Artificial Sequence: Synthetic oligonucleotide
  Antisense strand to SEQ ID NO: 968320
gaauuuccugauaacuaac

SEQ ID NO: 968322 - RNA, 19 nt, Artificial Sequence
  Description of Artificial Sequence: Synthetic oligonucleotide
  Sense strand starting at position 2548 of SEQ ID NO: 913974
gggcuuauugcuuucggca

SEQ ID NO: 968323 - RNA, 19 nt, Artificial Sequence
  Description of Artificial Sequence: Synthetic oligonucleotide
  Antisense strand to SEQ ID NO: 968322
ugccgaaagcaauaagccc

SEQ ID NO: 968324 - RNA, 19 nt, Artificial Sequence
  Description of Artificial Sequence: Synthetic oligonucleotide
  Sense strand starting at position 2549 of SEQ ID NO: 913974
ggcuuauugcuuucggcag

SEQ ID NO: 968325 - RNA, 19 nt, Artificial Sequence
  Description of Artificial Sequence: Synthetic oligonucleotide
  Antisense strand to SEQ ID NO: 968324
cugccgaaagcaauaagcc

SEQ ID NO: 968326 - RNA, 19 nt, Artificial Sequence
  Description of Artificial Sequence: Synthetic oligonucleotide
  Sense strand starting at position 2799 of SEQ ID NO: 913974
uuuauuugugcaggcaaga

SEQ ID NO: 968327 - RNA, 19 nt, Artificial Sequence
  Description of Artificial Sequence: Synthetic oligonucleotide
  Antisense strand to SEQ ID NO: 968326
ucuugccugcacaaauaaa

SEQ ID NO: 968328 - RNA, 19 nt, Artificial Sequence
  Description of Artificial Sequence: Synthetic oligonucleotide
  Sense strand starting at position 3237 of SEQ ID NO: 913974
ggaacauagcagggauucu

SEQ ID NO: 968329 - RNA, 19 nt, Artificial Sequence
  Description of Artificial Sequence: Synthetic oligonucleotide
  Antisense strand to SEQ ID NO: 968328
agaaucccugcuauguucc

SEQ ID NO: 968330 - RNA, 19 nt, Artificial Sequence
  Description of Artificial Sequence: Synthetic oligonucleotide
  Sense strand starting at position 3608 of SEQ ID NO: 913974
cugucuucuggagagacuu

SEQ ID NO: 968331 - RNA, 19 nt, Artificial Sequence
  Description of Artificial Sequence: Synthetic oligonucleotide
  Antisense strand to SEQ ID NO: 968330
aagucucuccagaagacag

SEQ ID NO: 968332 - RNA, 19 nt, Artificial Sequence
  Description of Artificial Sequence: Synthetic oligonucleotide
  Sense strand starting at position 2663 of SEQ ID NO: 913974
cuugauaaggauuggguua

SEQ ID NO: 968333 - RNA, 19 nt, Artificial Sequence
  Description of Artificial Sequence: Synthetic oligonucleotide
  Antisense strand to SEQ ID NO: 968332
uaacccaauccuuaucaag

SEQ ID NO: 968334 - RNA, 19 nt, Artificial Sequence
  Description of Artificial Sequence: Synthetic oligonucleotide
  Sense strand starting at position 2627 of SEQ ID NO: 913974
auuugcagcuugguuuaaa

SEQ ID NO: 968335 - RNA, 19 nt, Artificial Sequence
  Description of Artificial Sequence: Synthetic oligonucleotide
  Antisense strand to SEQ ID NO: 968334
uuuaaaccaagcugcaaau

SEQ ID NO: 968336 - RNA, 19 nt, Artificial Sequence
  Description of Artificial Sequence: Synthetic oligonucleotide
  Sense strand starting at position 2625 of SEQ ID NO: 913974
aaauuugcagcuugguuua

SEQ ID NO: 968337 - RNA, 19 nt, Artificial Sequence
  Description of Artificial Sequence: Synthetic oligonucleotide
  Antisense strand to SEQ ID NO: 968336
uaaaccaagcugcaaauuu

SEQ ID NO: 968338 - RNA, 19 nt, Artificial Sequence
  Description of Artificial Sequence: Synthetic oligonucleotide
  Sense strand starting at position 2804 of SEQ ID NO: 913974
uugugcaggcaagaauaaa

SEQ ID NO: 968339 - RNA, 19 nt, Artificial Sequence
  Description of Artificial Sequence: Synthetic oligonucleotide
  Antisense strand to SEQ ID NO: 968338
uuuauucuugccugcacaa

SEQ ID NO: 968340 - RNA, 19 nt, Artificial Sequence
  Description of Artificial Sequence: Synthetic oligonucleotide
  Sense strand starting at position 653 of SEQ ID NO: 913974
augcuugucacauagggau

SEQ ID NO: 968341 - RNA, 19 nt, Artificial Sequence
  Description of Artificial Sequence: Synthetic oligonucleotide
  Antisense strand to SEQ ID NO: 968340
aucccuaugugacaagcau

SEQ ID NO: 968342 - RNA, 19 nt, Artificial Sequence
  Description of Artificial Sequence: Synthetic oligonucleotide
  Sense strand starting at position 2668 of SEQ ID NO: 913974
uaaggauuggguuaggugu

SEQ ID NO: 968343 - RNA, 19 nt, Artificial Sequence
  Description of Artificial Sequence: Synthetic oligonucleotide
  Antisense strand to SEQ ID NO: 968342
acaccuaacccaauccuua

SEQ ID NO: 968344 - RNA, 19 nt, Artificial Sequence
  Description of Artificial Sequence: Synthetic oligonucleotide
  Sense strand starting at position 882 of SEQ ID NO: 913974
cacaguucgcuggagagaa

SEQ ID NO: 968345 - RNA, 19 nt, Artificial Sequence
  Description of Artificial Sequence: Synthetic oligonucleotide
  Antisense strand to SEQ ID NO: 968344
uucucuccagcgaacugug

SEQ ID NO: 968346 - RNA, 19 nt, Artificial Sequence
  Description of Artificial Sequence: Synthetic oligonucleotide
  Sense strand starting at position 2714 of SEQ ID NO: 913974
aacaaaguccuagggcaua

SEQ ID NO: 968347 - RNA, 19 nt, Artificial Sequence
  Description of Artificial Sequence: Synthetic oligonucleotide
  Antisense strand to SEQ ID NO: 968346
uaugcccuaggacuuuguu

SEQ ID NO: 968348 - RNA, 19 nt, Artificial Sequence
  Description of Artificial Sequence: Synthetic oligonucleotide
  Sense strand starting at position 2146 of SEQ ID NO: 913974
agcgucuggacugaggaau

SEQ ID NO: 968349 - RNA, 19 nt, Artificial Sequence
  Description of Artificial Sequence: Synthetic oligonucleotide
  Antisense strand to SEQ ID NO: 968348
auuccucaguccagacgcu

SEQ ID NO: 968350 - RNA, 19 nt, Artificial Sequence
  Description of Artificial Sequence: Synthetic oligonucleotide
  Sense strand starting at position 3821 of SEQ ID NO: 913974
ccagguuaguuaucaggaa

SEQ ID NO: 968351 - RNA, 19 nt, Artificial Sequence
  Description of Artificial Sequence: Synthetic oligonucleotide
  Antisense strand to SEQ ID NO: 968350
uuccugauaacuaaccugg

SEQ ID NO: 968352 - RNA, 19 nt, Artificial Sequence
  Description of Artificial Sequence: Synthetic oligonucleotide
  Sense strand starting at position 3162 of SEQ ID NO: 913974
cccuuccugccugaggaua

SEQ ID NO: 968353 - RNA, 19 nt, Artificial Sequence
  Description of Artificial Sequence: Synthetic oligonucleotide
  Antisense strand to SEQ ID NO: 968352
uauccucaggcaggaaggg

SEQ ID NO: 968354 - RNA, 19 nt, Artificial Sequence
  Description of Artificial Sequence: Synthetic oligonucleotide
  Sense strand starting at position 2846 of SEQ ID NO: 913974
gacaguucuaacuguggag

SEQ ID NO: 968355 - RNA, 19 nt, Artificial Sequence
  Description of Artificial Sequence: Synthetic oligonucleotide
  Antisense strand to SEQ ID NO: 968354
cuccacaguuagaacuguc

SEQ ID NO: 968356 - RNA, 19 nt, Artificial Sequence
  Description of Artificial Sequence: Synthetic oligonucleotide
  Sense strand starting at position 3891 of SEQ ID NO: 913974
uccagauuacuuggcugga

SEQ ID NO: 968357 - RNA, 19 nt, Artificial Sequence
  Description of Artificial Sequence: Synthetic oligonucleotide
  Antisense strand to SEQ ID NO: 968356
uccagccaaguaaucugga

SEQ ID NO: 968358 - RNA, 19 nt, Artificial Sequence
  Description of Artificial Sequence: Synthetic oligonucleotide
  Sense strand starting at position 655 of SEQ ID NO: 913974
gcuugucacauagggauga

SEQ ID NO: 968359 - RNA, 19 nt, Artificial Sequence
  Description of Artificial Sequence: Synthetic oligonucleotide
  Antisense strand to SEQ ID NO: 968358
ucaucccuaugugacaagc

SEQ ID NO: 968360 - RNA, 19 nt, Artificial Sequence
  Description of Artificial Sequence: Synthetic oligonucleotide
  Sense strand starting at position 3333 of SEQ ID NO: 913974
gcucucuuagugggaagga

SEQ ID NO: 968361 - RNA, 19 nt, Artificial Sequence
  Description of Artificial Sequence: Synthetic oligonucleotide
  Antisense strand to SEQ ID NO: 968360
uccuucccacuaagagagc

SEQ ID NO: 968362 - RNA, 19 nt, Artificial Sequence
  Description of Artificial Sequence: Synthetic oligonucleotide
  Sense strand starting at position 2158 of SEQ ID NO: 913974
gaggaaucgagaggcuugu

SEQ ID NO: 968363 - RNA, 19 nt, Artificial Sequence
  Description of Artificial Sequence: Synthetic oligonucleotide
  Antisense strand to SEQ ID NO: 968362
acaagccucucgauuccuc

SEQ ID NO: 968364 - RNA, 19 nt, Artificial Sequence
  Description of Artificial Sequence: Synthetic oligonucleotide
  Sense strand starting at position 2162 of SEQ ID NO: 913974
aaucgagaggcuuguaaau

SEQ ID NO: 968365 - RNA, 19 nt, Artificial Sequence
  Description of Artificial Sequence: Synthetic oligonucleotide
  Antisense strand to SEQ ID NO: 968364
auuuacaagccucucgauu

SEQ ID NO: 968366 - RNA, 19 nt, Artificial Sequence
  Description of Artificial Sequence: Synthetic oligonucleotide
  Sense strand starting at position 3713 of SEQ ID NO: 913974
agaagacuguggucaguuu

SEQ ID NO: 968367 - RNA, 19 nt, Artificial Sequence
  Description of Artificial Sequence: Synthetic oligonucleotide
  Antisense strand to SEQ ID NO: 968366
aaacugaccacagucuucu

SEQ ID NO: 968368 - RNA, 19 nt, Artificial Sequence
  Description of Artificial Sequence: Synthetic oligonucleotide
  Sense strand starting at position 2407 of SEQ ID NO: 913974
ucaucaacgcgacaaaugu

SEQ ID NO: 968369 - RNA, 19 nt, Artificial Sequence
  Description of Artificial Sequence: Synthetic oligonucleotide
  Antisense strand to SEQ ID NO: 968368
acauuugucgcguugauga

SEQ ID NO: 968370 - RNA, 19 nt, Artificial Sequence
  Description of Artificial Sequence: Synthetic oligonucleotide
  Sense strand starting at position 2385 of SEQ ID NO: 913974
agcugauggagcugugaag

SEQ ID NO: 968371 - RNA, 19 nt, Artificial Sequence
  Description of Artificial Sequence: Synthetic oligonucleotide
  Antisense strand to SEQ ID NO: 968370
cuucacagcuccaucagcu

SEQ ID NO: 968372 - RNA, 19 nt, Artificial Sequence
  Description of Artificial Sequence: Synthetic oligonucleotide
  Sense strand starting at position 2415 of SEQ ID NO: 913974
gcgacaaauguacgagaca

SEQ ID NO: 968373 - RNA, 19 nt, Artificial Sequence
  Description of Artificial Sequence: Synthetic oligonucleotide
  Antisense strand to SEQ ID NO: 968372
ugucucguacauuugucgc

SEQ ID NO: 968374 - RNA, 19 nt, Artificial Sequence
  Description of Artificial Sequence: Synthetic oligonucleotide
  Sense strand starting at position 3662 of SEQ ID NO: 913974
gacugagucagcgaugcua

SEQ ID NO: 968375 - RNA, 19 nt, Artificial Sequence
  Description of Artificial Sequence: Synthetic oligonucleotide
  Antisense strand to SEQ ID NO: 968374
uagcaucgcugacucaguc

SEQ ID NO: 968376 - RNA, 19 nt, Artificial Sequence
  Description of Artificial Sequence: Synthetic oligonucleotide
  Sense strand starting at position 3064 of SEQ ID NO: 913974
aucauagagccuuguuuau

SEQ ID NO: 968377 - RNA, 19 nt, Artificial Sequence
  Description of Artificial Sequence: Synthetic oligonucleotide
  Antisense strand to SEQ ID NO: 968376
auaaacaaggcucuaugau

SEQ ID NO: 968378 - RNA, 19 nt, Artificial Sequence
  Description of Artificial Sequence: Synthetic oligonucleotide
  Sense strand starting at position 3812 of SEQ ID NO: 913974
ccgaaacucccagguuagu

SEQ ID NO: 968379 - RNA, 19 nt, Artificial Sequence
  Description of Artificial Sequence: Synthetic oligonucleotide
  Antisense strand to SEQ ID NO: 968378
acuaaccugggaguuucgg

SEQ ID NO: 968380 - RNA, 19 nt, Artificial Sequence
  Description of Artificial Sequence: Synthetic oligonucleotide
  Sense strand starting at position 2701 of SEQ ID NO: 913974
acaggauugugggaacaaa

SEQ ID NO: 968381 - RNA, 19 nt, Artificial Sequence
  Description of Artificial Sequence: Synthetic oligonucleotide
  Antisense strand to SEQ ID NO: 968380
uuuguucccacaauccugu

SEQ ID NO: 968382 - RNA, 19 nt, Artificial Sequence
  Description of Artificial Sequence: Synthetic oligonucleotide
  Sense strand starting at position 2553 of SEQ ID NO: 913974
uauugcuuucggcaguaag

SEQ ID NO: 968383 - RNA, 19 nt, Artificial Sequence
  Description of Artificial Sequence: Synthetic oligonucleotide
  Antisense strand to SEQ ID NO: 968382
cuuacugccgaaagcaaua

SEQ ID NO: 968384 - RNA, 19 nt, Artificial Sequence
  Description of Artificial Sequence: Synthetic oligonucleotide
  Sense strand starting at position 2752 of SEQ ID NO: 913974
ugaaguguuaacgggucuu

SEQ ID NO: 968385 - RNA, 19 nt, Artificial Sequence
  Description of Artificial Sequence: Synthetic oligonucleotide
  Antisense strand to SEQ ID NO: 968384
aagacccguuaacacuuca

SEQ ID NO: 968386 - RNA, 19 nt, Artificial Sequence
  Description of Artificial Sequence: Synthetic oligonucleotide
  Sense strand starting at position 648 of SEQ ID NO: 913974
uguuuaugcuugucacaua

SEQ ID NO: 968387 - RNA, 19 nt, Artificial Sequence
  Description of Artificial Sequence: Synthetic oligonucleotide
  Antisense strand to SEQ ID NO: 968386
uaugugacaagcauaaaca

SEQ ID NO: 968388 - RNA, 19 nt, Artificial Sequence
  Description of Artificial Sequence: Synthetic oligonucleotide
  Sense strand starting at position 1024 of SEQ ID NO: 913974
gguggauacucacauggaa

SEQ ID NO: 968389 - RNA, 19 nt, Artificial Sequence
  Description of Artificial Sequence: Synthetic oligonucleotide
  Antisense strand to SEQ ID NO: 968388
uuccaugugaguauccacc

SEQ ID NO: 968390 - RNA, 19 nt, Artificial Sequence
  Description of Artificial Sequence: Synthetic oligonucleotide
  Sense strand starting at position 3621 of SEQ ID NO: 913974
agacuucugugcuugcuga

SEQ ID NO: 968391 - RNA, 19 nt, Artificial Sequence
  Description of Artificial Sequence: Synthetic oligonucleotide
  Antisense strand to SEQ ID NO: 968390
ucagcaagcacagaagucu

SEQ ID NO: 968392 - RNA, 19 nt, Artificial Sequence
  Description of Artificial Sequence: Synthetic oligonucleotide
  Sense strand starting at position 3912 of SEQ ID NO: 913974
cugucaugcugauugcuga

SEQ ID NO: 968393 - RNA, 19 nt, Artificial Sequence
  Description of Artificial Sequence: Synthetic oligonucleotide
  Antisense strand to SEQ ID NO: 968392
ucagcaaucagcaugacag

SEQ ID NO: 968394 - RNA, 19 nt, Artificial Sequence
  Description of Artificial Sequence: Synthetic oligonucleotide
  Sense strand starting at position 3664 of SEQ ID NO: 913974
cugagucagcgaugcuaua

SEQ ID NO: 968395 - RNA, 19 nt, Artificial Sequence
  Description of Artificial Sequence: Synthetic oligonucleotide
  Antisense strand to SEQ ID NO: 968394
uauagcaucgcugacucag

SEQ ID NO: 968396 - RNA, 19 nt, Artificial Sequence
  Description of Artificial Sequence: Synthetic oligonucleotide
  Sense strand starting at position 3973 of SEQ ID NO: 913974
accguuaugaagcgugaca

SEQ ID NO: 968397 - RNA, 19 nt, Artificial Sequence
  Description of Artificial Sequence: Synthetic oligonucleotide
  Antisense strand to SEQ ID NO: 968396
ugucacgcuucauaacggu

SEQ ID NO: 968398 - RNA, 19 nt, Artificial Sequence
  Description of Artificial Sequence: Synthetic oligonucleotide
  Sense strand starting at position 242 of SEQ ID NO: 913975
gcugccagucuguuuccaa

SEQ ID NO: 968399 - RNA, 19 nt, Artificial Sequence
  Description of Artificial Sequence: Synthetic oligonucleotide
  Antisense strand to SEQ ID NO: 968398
uuggaaacagacuggcagc

SEQ ID NO: 968400 - RNA, 19 nt, Artificial Sequence
  Description of Artificial Sequence: Synthetic oligonucleotide
  Sense strand starting at position 767 of SEQ ID NO: 913975
guacuuugggaugaaguua

SEQ ID NO: 968401 - RNA, 19 nt, Artificial Sequence
  Description of Artificial Sequence: Synthetic oligonucleotide
  Antisense strand to SEQ ID NO: 968400
uaacuucaucccaaaguac

SEQ ID NO: 968402 - RNA, 19 nt, Artificial Sequence
  Description of Artificial Sequence: Synthetic oligonucleotide
  Sense strand starting at position 2953 of SEQ ID NO: 913975
gcuuaugccagcuuuguga

SEQ ID NO: 968403 - RNA, 19 nt, Artificial Sequence
  Description of Artificial Sequence: Synthetic oligonucleotide
  Antisense strand to SEQ ID NO: 968402
ucacaaagcuggcauaagc

SEQ ID NO: 968404 - RNA, 19 nt, Artificial Sequence
  Description of Artificial Sequence: Synthetic oligonucleotide
  Sense strand starting at position 2690 of SEQ ID NO: 913975
augccagaggcagaauauu

SEQ ID NO: 968405 - RNA, 19 nt, Artificial Sequence
  Description of Artificial Sequence: Synthetic oligonucleotide
  Antisense strand to SEQ ID NO: 968404
aauauucugccucuggcau

SEQ ID NO: 968406 - RNA, 19 nt, Artificial Sequence
  Description of Artificial Sequence: Synthetic oligonucleotide
  Sense strand starting at position 1379 of SEQ ID NO: 913975
cgagaucuuguagauuaac

SEQ ID NO: 968407 - RNA, 19 nt, Artificial Sequence
  Description of Artificial Sequence: Synthetic oligonucleotide
  Antisense strand to SEQ ID NO: 968406
guuaaucuacaagaucucg

SEQ ID NO: 968408 - RNA, 19 nt, Artificial Sequence
  Description of Artificial Sequence: Synthetic oligonucleotide
  Sense strand starting at position 1159 of SEQ ID NO: 913975
ucaggauauuccuuacuag

SEQ ID NO: 968409 - RNA, 19 nt, Artificial Sequence
  Description of Artificial Sequence: Synthetic oligonucleotide
  Antisense strand to SEQ ID NO: 968408
cuaguaaggaauauccuga

SEQ ID NO: 968410 - RNA, 19 nt, Artificial Sequence
  Description of Artificial Sequence: Synthetic oligonucleotide
  Sense strand starting at position 2570 of SEQ ID NO: 913975
ggagaugugagaggucaug

SEQ ID NO: 968411 - RNA, 19 nt, Artificial Sequence
  Description of Artificial Sequence: Synthetic oligonucleotide
  Antisense strand to SEQ ID NO: 968410
caugaccucucacaucucc

SEQ ID NO: 968412 - RNA, 19 nt, Artificial Sequence
  Description of Artificial Sequence: Synthetic oligonucleotide
  Sense strand starting at position 775 of SEQ ID NO: 913975
ggaugaaguuagccaaaua

SEQ ID NO: 968413 - RNA, 19 nt, Artificial Sequence
  Description of Artificial Sequence: Synthetic oligonucleotide
  Antisense strand to SEQ ID NO: 968412
uauuuggcuaacuucaucc

SEQ ID NO: 968414 - RNA, 19 nt, Artificial Sequence
  Description of Artificial Sequence: Synthetic oligonucleotide
  Sense strand starting at position 2282 of SEQ ID NO: 913975
uguauacaugugcaaagaa

SEQ ID NO: 968415 - RNA, 19 nt, Artificial Sequence
  Description of Artificial Sequence: Synthetic oligonucleotide
  Antisense strand to SEQ ID NO: 968414
uucuuugcacauguauaca

SEQ ID NO: 968416 - RNA, 19 nt, Artificial Sequence
  Description of Artificial Sequence: Synthetic oligonucleotide
  Sense strand starting at position 2019 of SEQ ID NO: 913975
gcugaaaugaaaugaugua

SEQ ID NO: 968417 - RNA, 19 nt, Artificial Sequence
  Description of Artificial Sequence: Synthetic oligonucleotide
  Antisense strand to SEQ ID NO: 968416
uacaucauuucauuucagc

SEQ ID NO: 968418 - RNA, 19 nt, Artificial Sequence
  Description of Artificial Sequence: Synthetic oligonucleotide
  Sense strand starting at position 704 of SEQ ID NO: 913975
cgcagauagaauuauguga

SEQ ID NO: 968419 - RNA, 19 nt, Artificial Sequence
  Description of Artificial Sequence: Synthetic oligonucleotide
  Antisense strand to SEQ ID NO: 968418
ucacauaauucuaucugcg

SEQ ID NO: 968420 - RNA, 19 nt, Artificial Sequence
  Description of Artificial Sequence: Synthetic oligonucleotide
  Sense strand starting at position 3615 of SEQ ID NO: 913975
ggguuccuugcagaauaca

SEQ ID NO: 968421 - RNA, 19 nt, Artificial Sequence
  Description of Artificial Sequence: Synthetic oligonucleotide
  Antisense strand to SEQ ID NO: 968420
uguauucugcaaggaaccc

SEQ ID NO: 968422 - RNA, 19 nt, Artificial Sequence
  Description of Artificial Sequence: Synthetic oligonucleotide
  Sense strand starting at position 2713 of SEQ ID NO: 913975
uuggauguauuacugauca

SEQ ID NO: 968423 - RNA, 19 nt, Artificial Sequence
  Description of Artificial Sequence: Synthetic oligonucleotide
  Antisense strand to SEQ ID NO: 968422
ugaucaguaauacauccaa

SEQ ID NO: 968424 - RNA, 19 nt, Artificial Sequence
  Description of Artificial Sequence: Synthetic oligonucleotide
  Sense strand starting at position 3983 of SEQ ID NO: 913975
ugacuucugggugaguuau

SEQ ID NO: 968425 - RNA, 19 nt, Artificial Sequence
  Description of Artificial Sequence: Synthetic oligonucleotide
  Antisense strand to SEQ ID NO: 968424
auaacucacccagaaguca

SEQ ID NO: 968426 - RNA, 19 nt, Artificial Sequence
  Description of Artificial Sequence: Synthetic oligonucleotide
  Sense strand starting at position 1109 of SEQ ID NO: 913975
uuaacuccugaguauaguu

SEQ ID NO: 968427 - RNA, 19 nt, Artificial Sequence
  Description of Artificial Sequence: Synthetic oligonucleotide
  Antisense strand to SEQ ID NO: 968426
aacuauacucaggaguuaa

SEQ ID NO: 968428 - RNA, 19 nt, Artificial Sequence
  Description of Artificial Sequence: Synthetic oligonucleotide
  Sense strand starting at position 2846 of SEQ ID NO: 913975
cuaugcuacaggugaagaa

SEQ ID NO: 968429 - RNA, 19 nt, Artificial Sequence
  Description of Artificial Sequence: Synthetic oligonucleotide
  Antisense strand to SEQ ID NO: 968428
uucuucaccuguagcauag

SEQ ID NO: 968430 - RNA, 19 nt, Artificial Sequence
  Description of Artificial Sequence: Synthetic oligonucleotide
  Sense strand starting at position 2662 of SEQ ID NO: 913975
auuagagguuagcuugaga

SEQ ID NO: 968431 - RNA, 19 nt, Artificial Sequence
  Description of Artificial Sequence: Synthetic oligonucleotide
  Antisense strand to SEQ ID NO: 968430
ucucaagcuaaccucuaau

SEQ ID NO: 968432 - RNA, 19 nt, Artificial Sequence
  Description of Artificial Sequence: Synthetic oligonucleotide
  Sense strand starting at position 874 of SEQ ID NO: 913975
ggaaaugaguuggugguga

SEQ ID NO: 968433 - RNA, 19 nt, Artificial Sequence
  Description of Artificial Sequence: Synthetic oligonucleotide
  Antisense strand to SEQ ID NO: 968432
ucaccaccaacucauuucc

SEQ ID NO: 968434 - RNA, 19 nt, Artificial Sequence
  Description of Artificial Sequence: Synthetic oligonucleotide
  Sense strand starting at position 1162 of SEQ ID NO: 913975
ggauauuccuuacuaguau

SEQ ID NO: 968435 - RNA, 19 nt, Artificial Sequence
  Description of Artificial Sequence: Synthetic oligonucleotide
  Antisense strand to SEQ ID NO: 968434
auacuaguaaggaauaucc

SEQ ID NO: 968436 - RNA, 19 nt, Artificial Sequence
  Description of Artificial Sequence: Synthetic oligonucleotide
  Sense strand starting at position 2523 of SEQ ID NO: 913975
gcuauugauuacuuuagga

SEQ ID NO: 968437 - RNA, 19 nt, Artificial Sequence
  Description of Artificial Sequence: Synthetic oligonucleotide
  Antisense strand to SEQ ID NO: 968436
uccuaaaguaaucaauagc

SEQ ID NO: 968438 - RNA, 19 nt, Artificial Sequence
  Description of Artificial Sequence: Synthetic oligonucleotide
  Sense strand starting at position 2708 of SEQ ID NO: 913975
uugguuuggauguauuacu

SEQ ID NO: 968439 - RNA, 19 nt, Artificial Sequence
  Description of Artificial Sequence: Synthetic oligonucleotide
  Antisense strand to SEQ ID NO: 968438
aguaauacauccaaaccaa

SEQ ID NO: 968440 - RNA, 19 nt, Artificial Sequence
  Description of Artificial Sequence: Synthetic oligonucleotide
  Sense strand starting at position 2826 of SEQ ID NO: 913975
gguggauuccauuauuguu

SEQ ID NO: 968441 - RNA, 19 nt, Artificial Sequence
  Description of Artificial Sequence: Synthetic oligonucleotide
  Antisense strand to SEQ ID NO: 968440
aacaauaauggaauccacc

SEQ ID NO: 968442 - RNA, 19 nt, Artificial Sequence
  Description of Artificial Sequence: Synthetic oligonucleotide
  Sense strand starting at position 766 of SEQ ID NO: 913975
aguacuuugggaugaaguu

SEQ ID NO: 968443 - RNA, 19 nt, Artificial Sequence
  Description of Artificial Sequence: Synthetic oligonucleotide
  Antisense strand to SEQ ID NO: 968442
aacuucaucccaaaguacu

SEQ ID NO: 968444 - RNA, 19 nt, Artificial Sequence
  Description of Artificial Sequence: Synthetic oligonucleotide
  Sense strand starting at position 1446 of SEQ ID NO: 913975
guaucucuauaguuaaaca

SEQ ID NO: 968445 - RNA, 19 nt, Artificial Sequence
  Description of Artificial Sequence: Synthetic oligonucleotide
  Antisense strand to SEQ ID NO: 968444
uguuuaacuauagagauac

SEQ ID NO: 968446 - RNA, 19 nt, Artificial Sequence
  Description of Artificial Sequence: Synthetic oligonucleotide
  Sense strand starting at position 607 of SEQ ID NO: 913975
aucucucaggguuguagaa

SEQ ID NO: 968447 - RNA, 19 nt, Artificial Sequence
  Description of Artificial Sequence: Synthetic oligonucleotide
  Antisense strand to SEQ ID NO: 968446
uucuacaacccugagagau

SEQ ID NO: 968448 - RNA, 19 nt, Artificial Sequence
  Description of Artificial Sequence: Synthetic oligonucleotide
  Sense strand starting at position 2005 of SEQ ID NO: 913975
gaguguuuacauuagcuga

SEQ ID NO: 968449 - RNA, 19 nt, Artificial Sequence
  Description of Artificial Sequence: Synthetic oligonucleotide
  Antisense strand to SEQ ID NO: 968448
ucagcuaauguaaacacuc

SEQ ID NO: 968450 - RNA, 19 nt, Artificial Sequence
  Description of Artificial Sequence: Synthetic oligonucleotide
  Sense strand starting at position 2579 of SEQ ID NO: 913975
agaggucauguuugugaag

SEQ ID NO: 968451 - RNA, 19 nt, Artificial Sequence
  Description of Artificial Sequence: Synthetic oligonucleotide
  Antisense strand to SEQ ID NO: 968450
cuucacaaacaugaccucu

SEQ ID NO: 968452 - RNA, 19 nt, Artificial Sequence
  Description of Artificial Sequence: Synthetic oligonucleotide
  Sense strand starting at position 2153 of SEQ ID NO: 913975
cuguaaauuuaggauuacu

SEQ ID NO: 968453 - RNA, 19 nt, Artificial Sequence
  Description of Artificial Sequence: Synthetic oligonucleotide
  Antisense strand to SEQ ID NO: 968452
aguaauccuaaauuuacag

SEQ ID NO: 968454 - RNA, 19 nt, Artificial Sequence
  Description of Artificial Sequence: Synthetic oligonucleotide
  Sense strand starting at position 3084 of SEQ ID NO: 913975
gcuaccauuguccagaagu

SEQ ID NO: 968455 - RNA, 19 nt, Artificial Sequence
  Description of Artificial Sequence: Synthetic oligonucleotide
  Antisense strand to SEQ ID NO: 968454
acuucuggacaaugguagc

SEQ ID NO: 968456 - RNA, 19 nt, Artificial Sequence
  Description of Artificial Sequence: Synthetic oligonucleotide
  Sense strand starting at position 2008 of SEQ ID NO: 913975
uguuuacauuagcugaaau

SEQ ID NO: 968457 - RNA, 19 nt, Artificial Sequence
  Description of Artificial Sequence: Synthetic oligonucleotide
  Antisense strand to SEQ ID NO: 968456
auuucagcuaauguaaaca

SEQ ID NO: 968458 - RNA, 19 nt, Artificial Sequence
  Description of Artificial Sequence: Synthetic oligonucleotide
  Sense strand starting at position 23 of SEQ ID NO: 913975
acaauagcuugucuagauu

SEQ ID NO: 968459 - RNA, 19 nt, Artificial Sequence
  Description of Artificial Sequence: Synthetic oligonucleotide
  Antisense strand to SEQ ID NO: 968458
aaucuagacaagcuauugu

SEQ ID NO: 968460 - RNA, 19 nt, Artificial Sequence
  Description of Artificial Sequence: Synthetic oligonucleotide
  Sense strand starting at position 1108 of SEQ ID NO: 913975
uuuaacuccugaguauagu

SEQ ID NO: 968461 - RNA, 19 nt, Artificial Sequence
  Description of Artificial Sequence: Synthetic oligonucleotide
  Antisense strand to SEQ ID NO: 968460
acuauacucaggaguuaaa

SEQ ID NO: 968462 - RNA, 19 nt, Artificial Sequence
  Description of Artificial Sequence: Synthetic oligonucleotide
  Sense strand starting at position 2493 of SEQ ID NO: 913975
aguuccuagcccuauuauu

SEQ ID NO: 968463 - RNA, 19 nt, Artificial Sequence
  Description of Artificial Sequence: Synthetic oligonucleotide
  Antisense strand to SEQ ID NO: 968462
aauaauagggcuaggaacu

SEQ ID NO: 968464 - RNA, 19 nt, Artificial Sequence
  Description of Artificial Sequence: Synthetic oligonucleotide
  Sense strand starting at position 3082 of SEQ ID NO: 913975
uggcuaccauuguccagaa

SEQ ID NO: 968465 - RNA, 19 nt, Artificial Sequence
  Description of Artificial Sequence: Synthetic oligonucleotide
  Antisense strand to SEQ ID NO: 968464
uucuggacaaugguagcca

SEQ ID NO: 968466 - RNA, 19 nt, Artificial Sequence
  Description of Artificial Sequence: Synthetic oligonucleotide
  Sense strand starting at position 589 of SEQ ID NO: 913975
uucugaggguuguuaucca

SEQ ID NO: 968467 - RNA, 19 nt, Artificial Sequence
  Description of Artificial Sequence: Synthetic oligonucleotide
  Antisense strand to SEQ ID NO: 968466
uggauaacaacccucagaa

SEQ ID NO: 968468 - RNA, 19 nt, Artificial Sequence
  Description of Artificial Sequence: Synthetic oligonucleotide
  Sense strand starting at position 1999 of SEQ ID NO: 913975
ggugaugaguguuuacauu

SEQ ID NO: 968469 - RNA, 19 nt, Artificial Sequence
  Description of Artificial Sequence: Synthetic oligonucleotide
  Antisense strand to SEQ ID NO: 968468
aauguaaacacucaucacc

SEQ ID NO: 968470 - RNA, 19 nt, Artificial Sequence
  Description of Artificial Sequence: Synthetic oligonucleotide
  Sense strand starting at position 3952 of SEQ ID NO: 913975
guguuuggccagcaaauga

SEQ ID NO: 968471 - RNA, 19 nt, Artificial Sequence
  Description of Artificial Sequence: Synthetic oligonucleotide
  Antisense strand to SEQ ID NO: 968470
ucauuugcuggccaaacac

SEQ ID NO: 968472 - RNA, 19 nt, Artificial Sequence
  Description of Artificial Sequence: Synthetic oligonucleotide
  Sense strand starting at position 3231 of SEQ ID NO: 913975
ugacuuuagucaguccacu

SEQ ID NO: 968473 - RNA, 19 nt, Artificial Sequence
  Description of Artificial Sequence: Synthetic oligonucleotide
  Antisense strand to SEQ ID NO: 968472
aguggacugacuaaaguca

SEQ ID NO: 968474 - RNA, 19 nt, Artificial Sequence
  Description of Artificial Sequence: Synthetic oligonucleotide
  Sense strand starting at position 68 of SEQ ID NO: 913975
aauuaagagucugcauguu

SEQ ID NO: 968475 - RNA, 19 nt, Artificial Sequence
  Description of Artificial Sequence: Synthetic oligonucleotide
  Antisense strand to SEQ ID NO: 968474
aacaugcagacucuuaauu

SEQ ID NO: 968476 - RNA, 19 nt, Artificial Sequence
  Description of Artificial Sequence: Synthetic oligonucleotide
  Sense strand starting at position 2007 of SEQ ID NO: 913975
guguuuacauuagcugaaa

SEQ ID NO: 968477 - RNA, 19 nt, Artificial Sequence
  Description of Artificial Sequence: Synthetic oligonucleotide
  Antisense strand to SEQ ID NO: 968476
uuucagcuaauguaaacac

SEQ ID NO: 968478 - RNA, 19 nt, Artificial Sequence
  Description of Artificial Sequence: Synthetic oligonucleotide
  Sense strand starting at position 3506 of SEQ ID NO: 913976
uguuauccugaacaaguaa

SEQ ID NO: 968479 - RNA, 19 nt, Artificial Sequence
  Description of Artificial Sequence: Synthetic oligonucleotide
  Antisense strand to SEQ ID NO: 968478
uuacuuguucaggauaaca

SEQ ID NO: 968480 - RNA, 19 nt, Artificial Sequence
  Description of Artificial Sequence: Synthetic oligonucleotide
  Sense strand starting at position 75 of SEQ ID NO: 913976
gacuaagaaugguuguaaa

SEQ ID NO: 968481 - RNA, 19 nt, Artificial Sequence
  Description of Artificial Sequence: Synthetic oligonucleotide
  Antisense strand to SEQ ID NO: 968480
uuuacaaccauucuuaguc

SEQ ID NO: 968482 - RNA, 19 nt, Artificial Sequence
  Description of Artificial Sequence: Synthetic oligonucleotide
  Sense strand starting at position 1244 of SEQ ID NO: 913976
cuugcucuaguguauuuau

SEQ ID NO: 968483 - RNA, 19 nt, Artificial Sequence
  Description of Artificial Sequence: Synthetic oligonucleotide
  Antisense strand to SEQ ID NO: 968482
auaaauacacuagagcaag

SEQ ID NO: 968484 - RNA, 19 nt, Artificial Sequence
  Description of Artificial Sequence: Synthetic oligonucleotide
  Sense strand starting at position 632 of SEQ ID NO: 913976
uuugaaggaugguuagacu

SEQ ID NO: 968485 - RNA, 19 nt, Artificial Sequence
  Description of Artificial Sequence: Synthetic oligonucleotide
  Antisense strand to SEQ ID NO: 968484
agucuaaccauccuucaaa

SEQ ID NO: 968486 - RNA, 19 nt, Artificial Sequence
  Description of Artificial Sequence: Synthetic oligonucleotide
  Sense strand starting at position 3800 of SEQ ID NO: 913976
aggaaaguuauccaagugu

SEQ ID NO: 968487 - RNA, 19 nt, Artificial Sequence
  Description of Artificial Sequence: Synthetic oligonucleotide
  Antisense strand to SEQ ID NO: 968486
acacuuggauaacuuuccu

SEQ ID NO: 968488 - RNA, 19 nt, Artificial Sequence
  Description of Artificial Sequence: Synthetic oligonucleotide
  Sense strand starting at position 1116 of SEQ ID NO: 913976
ugagucuuacacugaauaa

SEQ ID NO: 968489 - RNA, 19 nt, Artificial Sequence
  Description of Artificial Sequence: Synthetic oligonucleotide
  Antisense strand to SEQ ID NO: 968488
uuauucaguguaagacuca

SEQ ID NO: 968490 - RNA, 19 nt, Artificial Sequence
  Description of Artificial Sequence: Synthetic oligonucleotide
  Sense strand starting at position 3799 of SEQ ID NO: 913976
caggaaaguuauccaagug

SEQ ID NO: 968491 - RNA, 19 nt, Artificial Sequence
  Description of Artificial Sequence: Synthetic oligonucleotide
  Antisense strand to SEQ ID NO: 968490
cacuuggauaacuuuccug

SEQ ID NO: 968492 - RNA, 19 nt, Artificial Sequence
  Description of Artificial Sequence: Synthetic oligonucleotide
  Sense strand starting at position 3965 of SEQ ID NO: 913976
accacauuggaaugucuga

SEQ ID NO: 968493 - RNA, 19 nt, Artificial Sequence
  Description of Artificial Sequence: Synthetic oligonucleotide
  Antisense strand to SEQ ID NO: 968492
ucagacauuccaauguggu

SEQ ID NO: 968494 - RNA, 19 nt, Artificial Sequence
  Description of Artificial Sequence: Synthetic oligonucleotide
  Sense strand starting at position 184 of SEQ ID NO: 913976
aucccaggaguuuauguua

SEQ ID NO: 968495 - RNA, 19 nt, Artificial Sequence
  Description of Artificial Sequence: Synthetic oligonucleotide
  Antisense strand to SEQ ID NO: 968494
uaacauaaacuccugggau

SEQ ID NO: 968496 - RNA, 19 nt, Artificial Sequence
  Description of Artificial Sequence: Synthetic oligonucleotide
  Sense strand starting at position 1320 of SEQ ID NO: 913976
cgggaccugguccaauauu

SEQ ID NO: 968497 - RNA, 19 nt, Artificial Sequence
  Description of Artificial Sequence: Synthetic oligonucleotide
  Antisense strand to SEQ ID NO: 968496
aauauuggaccaggucccg

SEQ ID NO: 968498 - RNA, 19 nt, Artificial Sequence
  Description of Artificial Sequence: Synthetic oligonucleotide
  Sense strand starting at position 2456 of SEQ ID NO: 913976
ugagguucacggcagauaa

SEQ ID NO: 968499 - RNA, 19 nt, Artificial Sequence
  Description of Artificial Sequence: Synthetic oligonucleotide
  Antisense strand to SEQ ID NO: 968498
uuaucugccgugaaccuca

SEQ ID NO: 968500 - RNA, 19 nt, Artificial Sequence
  Description of Artificial Sequence: Synthetic oligonucleotide
  Sense strand starting at position 1247 of SEQ ID NO: 913976
gcucuaguguauuuauuac

SEQ ID NO: 968501 - RNA, 19 nt, Artificial Sequence
  Description of Artificial Sequence: Synthetic oligonucleotide
  Antisense strand to SEQ ID NO: 968500
guaauaaauacacuagagc

SEQ ID NO: 968502 - RNA, 19 nt, Artificial Sequence
  Description of Artificial Sequence: Synthetic oligonucleotide
  Sense strand starting at position 1126 of SEQ ID NO: 913976
acugaauaauugguuaagu

SEQ ID NO: 968503 - RNA, 19 nt, Artificial Sequence
  Description of Artificial Sequence: Synthetic oligonucleotide
  Antisense strand to SEQ ID NO: 968502
acuuaaccaauuauucagu

SEQ ID NO: 968504 - RNA, 19 nt, Artificial Sequence
  Description of Artificial Sequence: Synthetic oligonucleotide
  Sense strand starting at position 1220 of SEQ ID NO: 913976
aacauucgccacgacagaa

SEQ ID NO: 968505 - RNA, 19 nt, Artificial Sequence
  Description of Artificial Sequence: Synthetic oligonucleotide
  Antisense strand to SEQ ID NO: 968504
uucugucguggcgaauguu

SEQ ID NO: 968506 - RNA, 19 nt, Artificial Sequence
  Description of Artificial Sequence: Synthetic oligonucleotide
  Sense strand starting at position 3542 of SEQ ID NO: 913976
gagguagcaucacugacaa

SEQ ID NO: 968507 - RNA, 19 nt, Artificial Sequence
  Description of Artificial Sequence: Synthetic oligonucleotide
  Antisense strand to SEQ ID NO: 968506
uugucagugaugcuaccuc

SEQ ID NO: 968508 - RNA, 19 nt, Artificial Sequence
  Description of Artificial Sequence: Synthetic oligonucleotide
  Sense strand starting at position 3467 of SEQ ID NO: 913976
gacagugagaagugguaau

SEQ ID NO: 968509 - RNA, 19 nt, Artificial Sequence
  Description of Artificial Sequence: Synthetic oligonucleotide
  Antisense strand to SEQ ID NO: 968508
auuaccacuucucacuguc

SEQ ID NO: 968510 - RNA, 19 nt, Artificial Sequence
  Description of Artificial Sequence: Synthetic oligonucleotide
  Sense strand starting at position 646 of SEQ ID NO: 913976
agacuuuagagugguggau

SEQ ID NO: 968511 - RNA, 19 nt, Artificial Sequence
  Description of Artificial Sequence: Synthetic oligonucleotide
  Antisense strand to SEQ ID NO: 968510
auccaccacucuaaagucu

SEQ ID NO: 968512 - RNA, 19 nt, Artificial Sequence
  Description of Artificial Sequence: Synthetic oligonucleotide
  Sense strand starting at position 645 of SEQ ID NO: 913976
uagacuuuagaguggugga

SEQ ID NO: 968513 - RNA, 19 nt, Artificial Sequence
  Description of Artificial Sequence: Synthetic oligonucleotide
  Antisense strand to SEQ ID NO: 968512
uccaccacucuaaagucua

SEQ ID NO: 968514 - RNA, 19 nt, Artificial Sequence
  Description of Artificial Sequence: Synthetic oligonucleotide
  Sense strand starting at position 191 of SEQ ID NO: 913976
gaguuuauguuacuaagag

SEQ ID NO: 968515 - RNA, 19 nt, Artificial Sequence
  Description of Artificial Sequence: Synthetic oligonucleotide
  Antisense strand to SEQ ID NO: 968514
cucuuaguaacauaaacuc

SEQ ID NO: 968516 - RNA, 19 nt, Artificial Sequence
  Description of Artificial Sequence: Synthetic oligonucleotide
  Sense strand starting at position 178 of SEQ ID NO: 913976
gaccacaucccaggaguuu

SEQ ID NO: 968517 - RNA, 19 nt, Artificial Sequence
  Description of Artificial Sequence: Synthetic oligonucleotide
  Antisense strand to SEQ ID NO: 968516
aaacuccugggaugugguc

SEQ ID NO: 968518 - RNA, 19 nt, Artificial Sequence
  Description of Artificial Sequence: Synthetic oligonucleotide
  Sense strand starting at position 119 of SEQ ID NO: 913976
auuggaaucuagcuucuaa

SEQ ID NO: 968519 - RNA, 19 nt, Artificial Sequence
  Description of Artificial Sequence: Synthetic oligonucleotide
  Antisense strand to SEQ ID NO: 968518
uuagaagcuagauuccaau

SEQ ID NO: 968520 - RNA, 19 nt, Artificial Sequence
  Description of Artificial Sequence: Synthetic oligonucleotide
  Sense strand starting at position 3398 of SEQ ID NO: 913976
cagaaaggucucugcagag

SEQ ID NO: 968521 - RNA, 19 nt, Artificial Sequence
  Description of Artificial Sequence: Synthetic oligonucleotide
  Antisense strand to SEQ ID NO: 968520
cucugcagagaccuuucug

SEQ ID NO: 968522 - RNA, 19 nt, Artificial Sequence
  Description of Artificial Sequence: Synthetic oligonucleotide
  Sense strand starting at position 1018 of SEQ ID NO: 913976
augaccuucgugcaaauaa

SEQ ID NO: 968523 - RNA, 19 nt, Artificial Sequence
  Description of Artificial Sequence: Synthetic oligonucleotide
  Antisense strand to SEQ ID NO: 968522
uuauuugcacgaaggucau

SEQ ID NO: 968524 - RNA, 19 nt, Artificial Sequence
  Description of Artificial Sequence: Synthetic oligonucleotide
  Sense strand starting at position 1127 of SEQ ID NO: 913976
cugaauaauugguuaaguc

SEQ ID NO: 968525 - RNA, 19 nt, Artificial Sequence
  Description of Artificial Sequence: Synthetic oligonucleotide
  Antisense strand to SEQ ID NO: 968524
gacuuaaccaauuauucag

SEQ ID NO: 968526 - RNA, 19 nt, Artificial Sequence
  Description of Artificial Sequence: Synthetic oligonucleotide
  Sense strand starting at position 3111 of SEQ ID NO: 913976
agcucuguaccugaacuua

SEQ ID NO: 968527 - RNA, 19 nt, Artificial Sequence
  Description of Artificial Sequence: Synthetic oligonucleotide
  Antisense strand to SEQ ID NO: 968526
uaaguucagguacagagcu

SEQ ID NO: 968528 - RNA, 19 nt, Artificial Sequence
  Description of Artificial Sequence: Synthetic oligonucleotide
  Sense strand starting at position 731 of SEQ ID NO: 913976
uuaugaagacaucgaugca

SEQ ID NO: 968529 - RNA, 19 nt, Artificial Sequence
  Description of Artificial Sequence: Synthetic oligonucleotide
  Antisense strand to SEQ ID NO: 968528
ugcaucgaugucuucauaa

SEQ ID NO: 968530 - RNA, 19 nt, Artificial Sequence
  Description of Artificial Sequence: Synthetic oligonucleotide
  Sense strand starting at position 734 of SEQ ID NO: 913976
ugaagacaucgaugcauac

SEQ ID NO: 968531 - RNA, 19 nt, Artificial Sequence
  Description of Artificial Sequence: Synthetic oligonucleotide
  Antisense strand to SEQ ID NO: 968530
guaugcaucgaugucuuca

SEQ ID NO: 968532 - RNA, 19 nt, Artificial Sequence
  Description of Artificial Sequence: Synthetic oligonucleotide
  Sense strand starting at position 3972 of SEQ ID NO: 913976
uggaaugucugagcuaaca

SEQ ID NO: 968533 - RNA, 19 nt, Artificial Sequence
  Description of Artificial Sequence: Synthetic oligonucleotide
  Antisense strand to SEQ ID NO: 968532
uguuagcucagacauucca

SEQ ID NO: 968534 - RNA, 19 nt, Artificial Sequence
  Description of Artificial Sequence: Synthetic oligonucleotide
  Sense strand starting at position 3371 of SEQ ID NO: 913976
augauugccucccuggaga

SEQ ID NO: 968535 - RNA, 19 nt, Artificial Sequence
  Description of Artificial Sequence: Synthetic oligonucleotide
  Antisense strand to SEQ ID NO: 968534
ucuccagggaggcaaucau

SEQ ID NO: 968536 - RNA, 19 nt, Artificial Sequence
  Description of Artificial Sequence: Synthetic oligonucleotide
  Sense strand starting at position 214 of SEQ ID NO: 913976
ggaagaaugucccuccagu

SEQ ID NO: 968537 - RNA, 19 nt, Artificial Sequence
  Description of Artificial Sequence: Synthetic oligonucleotide
  Antisense strand to SEQ ID NO: 968536
acuggagggacauucuucc

SEQ ID NO: 968538 - RNA, 19 nt, Artificial Sequence
  Description of Artificial Sequence: Synthetic oligonucleotide
  Sense strand starting at position 296 of SEQ ID NO: 913976
gcuguaaauaaaggauagu

SEQ ID NO: 968539 - RNA, 19 nt, Artificial Sequence
  Description of Artificial Sequence: Synthetic oligonucleotide
  Antisense strand to SEQ ID NO: 968538
acuauccuuuauuuacagc

SEQ ID NO: 968540 - RNA, 19 nt, Artificial Sequence
  Description of Artificial Sequence: Synthetic oligonucleotide
  Sense strand starting at position 1386 of SEQ ID NO: 913976
uugagcacuuuccuugaaa

SEQ ID NO: 968541 - RNA, 19 nt, Artificial Sequence
  Description of Artificial Sequence: Synthetic oligonucleotide
  Antisense strand to SEQ ID NO: 968540
uuucaaggaaagugcucaa

SEQ ID NO: 968542 - RNA, 19 nt, Artificial Sequence
  Description of Artificial Sequence: Synthetic oligonucleotide
  Sense strand starting at position 1387 of SEQ ID NO: 913976
ugagcacuuuccuugaaau

SEQ ID NO: 968543 - RNA, 19 nt, Artificial Sequence
  Description of Artificial Sequence: Synthetic oligonucleotide
  Antisense strand to SEQ ID NO: 968542
auuucaaggaaagugcuca

SEQ ID NO: 968544 - RNA, 19 nt, Artificial Sequence
  Description of Artificial Sequence: Synthetic oligonucleotide
  Sense strand starting at position 3753 of SEQ ID NO: 913976
gagucauugcaugauuagu

SEQ ID NO: 968545 - RNA, 19 nt, Artificial Sequence
  Description of Artificial Sequence: Synthetic oligonucleotide
  Antisense strand to SEQ ID NO: 968544
acuaaucaugcaaugacuc

SEQ ID NO: 968546 - RNA, 19 nt, Artificial Sequence
  Description of Artificial Sequence: Synthetic oligonucleotide
  Sense strand starting at position 1050 of SEQ ID NO: 913976
cgugaauccuacuuaacag

SEQ ID NO: 968547 - RNA, 19 nt, Artificial Sequence
  Description of Artificial Sequence: Synthetic oligonucleotide
  Antisense strand to SEQ ID NO: 968546
cuguuaaguaggauucacg

SEQ ID NO: 968548 - RNA, 19 nt, Artificial Sequence
  Description of Artificial Sequence: Synthetic oligonucleotide
  Sense strand starting at position 3747 of SEQ ID NO: 913976
ccaaaugagucauugcaug

SEQ ID NO: 968549 - RNA, 19 nt, Artificial Sequence
  Description of Artificial Sequence: Synthetic oligonucleotide
  Antisense strand to SEQ ID NO: 968548
caugcaaugacucauuugg

SEQ ID NO: 968550 - RNA, 19 nt, Artificial Sequence
  Description of Artificial Sequence: Synthetic oligonucleotide
  Sense strand starting at position 3766 of SEQ ID NO: 913976
auuaguaagcaaggcaaau

SEQ ID NO: 968551 - RNA, 19 nt, Artificial Sequence
  Description of Artificial Sequence: Synthetic oligonucleotide
  Antisense strand to SEQ ID NO: 968550
auuugccuugcuuacuaau

SEQ ID NO: 968552 - RNA, 19 nt, Artificial Sequence
  Description of Artificial Sequence: Synthetic oligonucleotide
  Sense strand starting at position 73 of SEQ ID NO: 913976
gugacuaagaaugguugua

SEQ ID NO: 968553 - RNA, 19 nt, Artificial Sequence
  Description of Artificial Sequence: Synthetic oligonucleotide
  Antisense strand to SEQ ID NO: 968552
uacaaccauucuuagucac

SEQ ID NO: 968554 - RNA, 19 nt, Artificial Sequence
  Description of Artificial Sequence: Synthetic oligonucleotide
  Sense strand starting at position 187 of SEQ ID NO: 913976
ccaggaguuuauguuacua

SEQ ID NO: 968555 - RNA, 19 nt, Artificial Sequence
  Description of Artificial Sequence: Synthetic oligonucleotide
  Antisense strand to SEQ ID NO: 968554
uaguaacauaaacuccugg

SEQ ID NO: 968556 - RNA, 19 nt, Artificial Sequence
  Description of Artificial Sequence: Synthetic oligonucleotide
  Sense strand starting at position 3798 of SEQ ID NO: 913976
gcaggaaaguuauccaagu

SEQ ID NO: 968557 - RNA, 19 nt, Artificial Sequence
  Description of Artificial Sequence: Synthetic oligonucleotide
  Antisense strand to SEQ ID NO: 968556
acuuggauaacuuuccugc

SEQ ID NO: 968558 - RNA, 19 nt, Artificial Sequence
  Description of Artificial Sequence: Synthetic oligonucleotide
  Sense strand starting at position 102 of SEQ ID NO: 913977
gccauauaucuugauacag

SEQ ID NO: 968559 - RNA, 19 nt, Artificial Sequence
  Description of Artificial Sequence: Synthetic oligonucleotide
  Antisense strand to SEQ ID NO: 968558
cuguaucaagauauauggc

SEQ ID NO: 968560 - RNA, 19 nt, Artificial Sequence
  Description of Artificial Sequence: Synthetic oligonucleotide
  Sense strand starting at position 2707 of SEQ ID NO: 913977
aaguucucugaggauguga

SEQ ID NO: 968561 - RNA, 19 nt, Artificial Sequence
  Description of Artificial Sequence: Synthetic oligonucleotide
  Antisense strand to SEQ ID NO: 968560
ucacauccucagagaacuu

SEQ ID NO: 968562 - RNA, 19 nt, Artificial Sequence
  Description of Artificial Sequence: Synthetic oligonucleotide
  Sense strand starting at position 2213 of SEQ ID NO: 913977
agauaauuuguuugcaagc

SEQ ID NO: 968563 - RNA, 19 nt, Artificial Sequence
  Description of Artificial Sequence: Synthetic oligonucleotide
  Antisense strand to SEQ ID NO: 968562
gcuugcaaacaaauuaucu

SEQ ID NO: 968564 - RNA, 19 nt, Artificial Sequence
  Description of Artificial Sequence: Synthetic oligonucleotide
  Sense strand starting at position 2400 of SEQ ID NO: 913977
aaagaaggguuagucgaaa

SEQ ID NO: 968565 - RNA, 19 nt, Artificial Sequence
  Description of Artificial Sequence: Synthetic oligonucleotide
  Antisense strand to SEQ ID NO: 968564
uuucgacuaacccuucuuu

SEQ ID NO: 968566 - RNA, 19 nt, Artificial Sequence
  Description of Artificial Sequence: Synthetic oligonucleotide
  Sense strand starting at position 3293 of SEQ ID NO: 913977
ugaccucgacuguaaauga

SEQ ID NO: 968567 - RNA, 19 nt, Artificial Sequence
  Description of Artificial Sequence: Synthetic oligonucleotide
  Antisense strand to SEQ ID NO: 968566
ucauuuacagucgagguca

SEQ ID NO: 968568 - RNA, 19 nt, Artificial Sequence
  Description of Artificial Sequence: Synthetic oligonucleotide
  Sense strand starting at position 119 of SEQ ID NO: 913977
agguauacgcuacaagaga

SEQ ID NO: 968569 - RNA, 19 nt, Artificial Sequence
  Description of Artificial Sequence: Synthetic oligonucleotide
  Antisense strand to SEQ ID NO: 968568
ucucuuguagcguauaccu

SEQ ID NO: 968570 - RNA, 19 nt, Artificial Sequence
  Description of Artificial Sequence: Synthetic oligonucleotide
  Sense strand starting at position 2429 of SEQ ID NO: 913977
aacgguggagcauaaauau

SEQ ID NO: 968571 - RNA, 19 nt, Artificial Sequence
  Description of Artificial Sequence: Synthetic oligonucleotide
  Antisense strand to SEQ ID NO: 968570
auauuuaugcuccaccguu

SEQ ID NO: 968572 - RNA, 19 nt, Artificial Sequence
  Description of Artificial Sequence: Synthetic oligonucleotide
  Sense strand starting at position 2197 of SEQ ID NO: 913977
ggcuucguuaguuugcaga

SEQ ID NO: 968573 - RNA, 19 nt, Artificial Sequence
  Description of Artificial Sequence: Synthetic oligonucleotide
  Antisense strand to SEQ ID NO: 968572
ucugcaaacuaacgaagcc

SEQ ID NO: 968574 - RNA, 19 nt, Artificial Sequence
  Description of Artificial Sequence: Synthetic oligonucleotide
  Sense strand starting at position 3186 of SEQ ID NO: 913977
uguuaucugaaucagaggu

SEQ ID NO: 968575 - RNA, 19 nt, Artificial Sequence
  Description of Artificial Sequence: Synthetic oligonucleotide
  Antisense strand to SEQ ID NO: 968574
accucugauucagauaaca

SEQ ID NO: 968576 - RNA, 19 nt, Artificial Sequence
  Description of Artificial Sequence: Synthetic oligonucleotide
  Sense strand starting at position 3065 of SEQ ID NO: 913977
uuauuugcgaacuggguua

SEQ ID NO: 968577 - RNA, 19 nt, Artificial Sequence
  Description of Artificial Sequence: Synthetic oligonucleotide
  Antisense strand to SEQ ID NO: 968576
uaacccaguucgcaaauaa

SEQ ID NO: 968578 - RNA, 19 nt, Artificial Sequence
  Description of Artificial Sequence: Synthetic oligonucleotide
  Sense strand starting at position 3761 of SEQ ID NO: 913977
gauuccagaugggaaauuu

SEQ ID NO: 968579 - RNA, 19 nt, Artificial Sequence
  Description of Artificial Sequence: Synthetic oligonucleotide
  Antisense strand to SEQ ID NO: 968578
aaauuucccaucuggaauc

SEQ ID NO: 968580 - RNA, 19 nt, Artificial Sequence
  Description of Artificial Sequence: Synthetic oligonucleotide
  Sense strand starting at position 931 of SEQ ID NO: 913977
cgguaaacacuauaagcaa

SEQ ID NO: 968581 - RNA, 19 nt, Artificial Sequence
  Description of Artificial Sequence: Synthetic oligonucleotide
  Antisense strand to SEQ ID NO: 968580
uugcuuauaguguuuaccg

SEQ ID NO: 968582 - RNA, 19 nt, Artificial Sequence
  Description of Artificial Sequence: Synthetic oligonucleotide
  Sense strand starting at position 3250 of SEQ ID NO: 913977
ugacuuuaugcagagagug

SEQ ID NO: 968583 - RNA, 19 nt, Artificial Sequence
  Description of Artificial Sequence: Synthetic oligonucleotide
  Antisense strand to SEQ ID NO: 968582
cacucucugcauaaaguca

SEQ ID NO: 968584 - RNA, 19 nt, Artificial Sequence
  Description of Artificial Sequence: Synthetic oligonucleotide
  Sense strand starting at position 2214 of SEQ ID NO: 913977
gauaauuuguuugcaagcu

SEQ ID NO: 968585 - RNA, 19 nt, Artificial Sequence
  Description of Artificial Sequence: Synthetic oligonucleotide
  Antisense strand to SEQ ID NO: 968584
agcuugcaaacaaauuauc

SEQ ID NO: 968586 - RNA, 19 nt, Artificial Sequence
  Description of Artificial Sequence: Synthetic oligonucleotide
  Sense strand starting at position 2210 of SEQ ID NO: 913977
ugcagauaauuuguuugca

SEQ ID NO: 968587 - RNA, 19 nt, Artificial Sequence
  Description of Artificial Sequence: Synthetic oligonucleotide
  Antisense strand to SEQ ID NO: 968586
ugcaaacaaauuaucugca

SEQ ID NO: 968588 - RNA, 19 nt, Artificial Sequence
  Description of Artificial Sequence: Synthetic oligonucleotide
  Sense strand starting at position 117 of SEQ ID NO: 913977
acagguauacgcuacaaga

SEQ ID NO: 968589 - RNA, 19 nt, Artificial Sequence
  Description of Artificial Sequence: Synthetic oligonucleotide
  Antisense strand to SEQ ID NO: 968588
ucuuguagcguauaccugu

SEQ ID NO: 968590 - RNA, 19 nt, Artificial Sequence
  Description of Artificial Sequence: Synthetic oligonucleotide
  Sense strand starting at position 3924 of SEQ ID NO: 913977
auugaugagugguuugaaa

SEQ ID NO: 968591 - RNA, 19 nt, Artificial Sequence
  Description of Artificial Sequence: Synthetic oligonucleotide
  Antisense strand to SEQ ID NO: 968590
uuucaaaccacucaucaau

SEQ ID NO: 968592 - RNA, 19 nt, Artificial Sequence
  Description of Artificial Sequence: Synthetic oligonucleotide
  Sense strand starting at position 3914 of SEQ ID NO: 913977
guuugacaucauugaugag

SEQ ID NO: 968593 - RNA, 19 nt, Artificial Sequence
  Description of Artificial Sequence: Synthetic oligonucleotide
  Antisense strand to SEQ ID NO: 968592
cucaucaaugaugucaaac

SEQ ID NO: 968594 - RNA, 19 nt, Artificial Sequence
  Description of Artificial Sequence: Synthetic oligonucleotide
  Sense strand starting at position 2474 of SEQ ID NO: 913977
uuuagcaauuucucgagca

SEQ ID NO: 968595 - RNA, 19 nt, Artificial Sequence
  Description of Artificial Sequence: Synthetic oligonucleotide
  Antisense strand to SEQ ID NO: 968594
ugcucgagaaauugcuaaa

SEQ ID NO: 968596 - RNA, 19 nt, Artificial Sequence
  Description of Artificial Sequence: Synthetic oligonucleotide
  Sense strand starting at position 3190 of SEQ ID NO: 913977
aucugaaucagagguguag

SEQ ID NO: 968597 - RNA, 19 nt, Artificial Sequence
  Description of Artificial Sequence: Synthetic oligonucleotide
  Antisense strand to SEQ ID NO: 968596
cuacaccucugauucagau

SEQ ID NO: 968598 - RNA, 19 nt, Artificial Sequence
  Description of Artificial Sequence: Synthetic oligonucleotide
  Sense strand starting at position 3527 of SEQ ID NO: 913977
ucuguauaaugguugaaag

SEQ ID NO: 968599 - RNA, 19 nt, Artificial Sequence
  Description of Artificial Sequence: Synthetic oligonucleotide
  Antisense strand to SEQ ID NO: 968598
cuuucaaccauuauacaga

SEQ ID NO: 968600 - RNA, 19 nt, Artificial Sequence
  Description of Artificial Sequence: Synthetic oligonucleotide
  Sense strand starting at position 2702 of SEQ ID NO: 913977
aaggcaaguucucugagga

SEQ ID NO: 968601 - RNA, 19 nt, Artificial Sequence
  Description of Artificial Sequence: Synthetic oligonucleotide
  Antisense strand to SEQ ID NO: 968600
uccucagagaacuugccuu

SEQ ID NO: 968602 - RNA, 19 nt, Artificial Sequence
  Description of Artificial Sequence: Synthetic oligonucleotide
  Sense strand starting at position 531 of SEQ ID NO: 913977
caagcugaguacuugggaa

SEQ ID NO: 968603 - RNA, 19 nt, Artificial Sequence
  Description of Artificial Sequence: Synthetic oligonucleotide
  Antisense strand to SEQ ID NO: 968602
uucccaaguacucagcuug

SEQ ID NO: 968604 - RNA, 19 nt, Artificial Sequence
  Description of Artificial Sequence: Synthetic oligonucleotide
  Sense strand starting at position 3911 of SEQ ID NO: 913977
guuguuugacaucauugau

SEQ ID NO: 968605 - RNA, 19 nt, Artificial Sequence
  Description of Artificial Sequence: Synthetic oligonucleotide
  Antisense strand to SEQ ID NO: 968604
aucaaugaugucaaacaac

SEQ ID NO: 968606 - RNA, 19 nt, Artificial Sequence
  Description of Artificial Sequence: Synthetic oligonucleotide
  Sense strand starting at position 3519 of SEQ ID NO: 913977
gguccucaucuguauaaug

SEQ ID NO: 968607 - RNA, 19 nt, Artificial Sequence
  Description of Artificial Sequence: Synthetic oligonucleotide
  Antisense strand to SEQ ID NO: 968606
cauuauacagaugaggacc

SEQ ID NO: 968608 - RNA, 19 nt, Artificial Sequence
  Description of Artificial Sequence: Synthetic oligonucleotide
  Sense strand starting at position 3544 of SEQ ID NO: 913977
aggguuuggccucacuaua

SEQ ID NO: 968609 - RNA, 19 nt, Artificial Sequence
  Description of Artificial Sequence: Synthetic oligonucleotide
  Antisense strand to SEQ ID NO: 968608
uauagugaggccaaacccu

SEQ ID NO: 968610 - RNA, 19 nt, Artificial Sequence
  Description of Artificial Sequence: Synthetic oligonucleotide
  Sense strand starting at position 3237 of SEQ ID NO: 913977
agacuuaccuaugugacuu

SEQ ID NO: 968611 - RNA, 19 nt, Artificial Sequence
  Description of Artificial Sequence: Synthetic oligonucleotide
  Antisense strand to SEQ ID NO: 968610
aagucacauagguaagucu

SEQ ID NO: 968612 - RNA, 19 nt, Artificial Sequence
  Description of Artificial Sequence: Synthetic oligonucleotide
  Sense strand starting at position 590 of SEQ ID NO: 913977
ugguguaaaccucauagug

SEQ ID NO: 968613 - RNA, 19 nt, Artificial Sequence
  Description of Artificial Sequence: Synthetic oligonucleotide
  Antisense strand to SEQ ID NO: 968612
cacuaugagguuuacacca

SEQ ID NO: 968614 - RNA, 19 nt, Artificial Sequence
  Description of Artificial Sequence: Synthetic oligonucleotide
  Sense strand starting at position 3926 of SEQ ID NO: 913977
ugaugagugguuugaaauu

SEQ ID NO: 968615 - RNA, 19 nt, Artificial Sequence
  Description of Artificial Sequence: Synthetic oligonucleotide
  Antisense strand to SEQ ID NO: 968614
aauuucaaaccacucauca

SEQ ID NO: 968616 - RNA, 19 nt, Artificial Sequence
  Description of Artificial Sequence: Synthetic oligonucleotide
  Sense strand starting at position 147 of SEQ ID NO: 913977
guagauacaguguaagguu

SEQ ID NO: 968617 - RNA, 19 nt, Artificial Sequence
  Description of Artificial Sequence: Synthetic oligonucleotide
  Antisense strand to SEQ ID NO: 968616
aaccuuacacuguaucuac

SEQ ID NO: 968618 - RNA, 19 nt, Artificial Sequence
  Description of Artificial Sequence: Synthetic oligonucleotide
  Sense strand starting at position 3247 of SEQ ID NO: 913977
augugacuuuaugcagaga

SEQ ID NO: 968619 - RNA, 19 nt, Artificial Sequence
  Description of Artificial Sequence: Synthetic oligonucleotide
  Antisense strand to SEQ ID NO: 968618
ucucugcauaaagucacau

SEQ ID NO: 968620 - RNA, 19 nt, Artificial Sequence
  Description of Artificial Sequence: Synthetic oligonucleotide
  Sense strand starting at position 3521 of SEQ ID NO: 913977
uccucaucuguauaauggu

SEQ ID NO: 968621 - RNA, 19 nt, Artificial Sequence
  Description of Artificial Sequence: Synthetic oligonucleotide
  Antisense strand to SEQ ID NO: 968620
accauuauacagaugagga

SEQ ID NO: 968622 - RNA, 19 nt, Artificial Sequence
  Description of Artificial Sequence: Synthetic oligonucleotide
  Sense strand starting at position 3342 of SEQ ID NO: 913977
guucucagagucugauaaa

SEQ ID NO: 968623 - RNA, 19 nt, Artificial Sequence
  Description of Artificial Sequence: Synthetic oligonucleotide
  Antisense strand to SEQ ID NO: 968622
uuuaucagacucugagaac

SEQ ID NO: 968624 - RNA, 19 nt, Artificial Sequence
  Description of Artificial Sequence: Synthetic oligonucleotide
  Sense strand starting at position 2971 of SEQ ID NO: 913977
acaaauguccagugguaag

SEQ ID NO: 968625 - RNA, 19 nt, Artificial Sequence
  Description of Artificial Sequence: Synthetic oligonucleotide
  Antisense strand to SEQ ID NO: 968624
cuuaccacuggacauuugu

SEQ ID NO: 968626 - RNA, 19 nt, Artificial Sequence
  Description of Artificial Sequence: Synthetic oligonucleotide
  Sense strand starting at position 2703 of SEQ ID NO: 913977
aggcaaguucucugaggau

SEQ ID NO: 968627 - RNA, 19 nt, Artificial Sequence
  Description of Artificial Sequence: Synthetic oligonucleotide
  Antisense strand to SEQ ID NO: 968626
auccucagagaacuugccu

SEQ ID NO: 968628 - RNA, 19 nt, Artificial Sequence
  Description of Artificial Sequence: Synthetic oligonucleotide
  Sense strand starting at position 2709 of SEQ ID NO: 913977
guucucugaggaugugaua

SEQ ID NO: 968629 - RNA, 19 nt, Artificial Sequence
  Description of Artificial Sequence: Synthetic oligonucleotide
  Antisense strand to SEQ ID NO: 968628
uaucacauccucagagaac

SEQ ID NO: 968630 - RNA, 19 nt, Artificial Sequence
  Description of Artificial Sequence: Synthetic oligonucleotide
  Sense strand starting at position 17 of SEQ ID NO: 913977
cgcgguguguauacacaua

SEQ ID NO: 968631 - RNA, 19 nt, Artificial Sequence
  Description of Artificial Sequence: Synthetic oligonucleotide
  Antisense strand to SEQ ID NO: 968630
uauguguauacacaccgcg

SEQ ID NO: 968632 - RNA, 19 nt, Artificial Sequence
  Description of Artificial Sequence: Synthetic oligonucleotide
  Sense strand starting at position 2718 of SEQ ID NO: 913977
ggaugugauaucugagcug

SEQ ID NO: 968633 - RNA, 19 nt, Artificial Sequence
  Description of Artificial Sequence: Synthetic oligonucleotide
  Antisense strand to SEQ ID NO: 968632
cagcucagauaucacaucc

SEQ ID NO: 968634 - RNA, 19 nt, Artificial Sequence
  Description of Artificial Sequence: Synthetic oligonucleotide
  Sense strand starting at position 3173 of SEQ ID NO: 913977
gaggaagccuaccuguuau

SEQ ID NO: 968635 - RNA, 19 nt, Artificial Sequence
  Description of Artificial Sequence: Synthetic oligonucleotide
  Antisense strand to SEQ ID NO: 968634
auaacagguaggcuuccuc

SEQ ID NO: 968636 - RNA, 19 nt, Artificial Sequence
  Description of Artificial Sequence: Synthetic oligonucleotide
  Sense strand starting at position 787 of SEQ ID NO: 913977
gcagaaacugccuggauau

SEQ ID NO: 968637 - RNA, 19 nt, Artificial Sequence
  Description of Artificial Sequence: Synthetic oligonucleotide
  Antisense strand to SEQ ID NO: 968636
auauccaggcaguuucugc

SEQ ID NO: 968638 - RNA, 19 nt, Artificial Sequence
  Description of Artificial Sequence: Synthetic oligonucleotide
  Sense strand starting at position 1054 of SEQ ID NO: 913978
gacauuaaguggguaauaa

SEQ ID NO: 968639 - RNA, 19 nt, Artificial Sequence
  Description of Artificial Sequence: Synthetic oligonucleotide
  Antisense strand to SEQ ID NO: 968638
uuauuacccacuuaauguc

SEQ ID NO: 968640 - RNA, 19 nt, Artificial Sequence
  Description of Artificial Sequence: Synthetic oligonucleotide
  Sense strand starting at position 1838 of SEQ ID NO: 913978
caggaaagugaaugcaaau

SEQ ID NO: 968641 - RNA, 19 nt, Artificial Sequence
  Description of Artificial Sequence: Synthetic oligonucleotide
  Antisense strand to SEQ ID NO: 968640
auuugcauucacuuuccug

SEQ ID NO: 968642 - RNA, 19 nt, Artificial Sequence
  Description of Artificial Sequence: Synthetic oligonucleotide
  Sense strand starting at position 1053 of SEQ ID NO: 913978
agacauuaaguggguaaua

SEQ ID NO: 968643 - RNA, 19 nt, Artificial Sequence
  Description of Artificial Sequence: Synthetic oligonucleotide
  Antisense strand to SEQ ID NO: 968642
uauuacccacuuaaugucu

SEQ ID NO: 968644 - RNA, 19 nt, Artificial Sequence
  Description of Artificial Sequence: Synthetic oligonucleotide
  Sense strand starting at position 1051 of SEQ ID NO: 913978
auagacauuaaguggguaa

SEQ ID NO: 968645 - RNA, 19 nt, Artificial Sequence
  Description of Artificial Sequence: Synthetic oligonucleotide
  Antisense strand to SEQ ID NO: 968644
uuacccacuuaaugucuau

SEQ ID NO: 968646 - RNA, 19 nt, Artificial Sequence
  Description of Artificial Sequence: Synthetic oligonucleotide
  Sense strand starting at position 1824 of SEQ ID NO: 913978
cuacuauaauuagucagga

SEQ ID NO: 968647 - RNA, 19 nt, Artificial Sequence
  Description of Artificial Sequence: Synthetic oligonucleotide
  Antisense strand to SEQ ID NO: 968646
uccugacuaauuauaguag

SEQ ID NO: 968648 - RNA, 19 nt, Artificial Sequence
  Description of Artificial Sequence: Synthetic oligonucleotide
  Sense strand starting at position 2209 of SEQ ID NO: 913978
uggugcauccaauacaaua

SEQ ID NO: 968649 - RNA, 19 nt, Artificial Sequence
  Description of Artificial Sequence: Synthetic oligonucleotide
  Antisense strand to SEQ ID NO: 968648
uauuguauuggaugcacca

SEQ ID NO: 968650 - RNA, 19 nt, Artificial Sequence
  Description of Artificial Sequence: Synthetic oligonucleotide
  Sense strand starting at position 1813 of SEQ ID NO: 913978
cgaauagaugccuacuaua

SEQ ID NO: 968651 - RNA, 19 nt, Artificial Sequence
  Description of Artificial Sequence: Synthetic oligonucleotide
  Antisense strand to SEQ ID NO: 968650
uauaguaggcaucuauucg

SEQ ID NO: 968652 - RNA, 19 nt, Artificial Sequence
  Description of Artificial Sequence: Synthetic oligonucleotide
  Sense strand starting at position 188 of SEQ ID NO: 913978
gaaugcucacucuagaagu

SEQ ID NO: 968653 - RNA, 19 nt, Artificial Sequence
  Description of Artificial Sequence: Synthetic oligonucleotide
  Antisense strand to SEQ ID NO: 968652
acuucuagagugagcauuc

SEQ ID NO: 968654 - RNA, 19 nt, Artificial Sequence
  Description of Artificial Sequence: Synthetic oligonucleotide
  Sense strand starting at position 2954 of SEQ ID NO: 913978
ugaggauacuucucagagu

SEQ ID NO: 968655 - RNA, 19 nt, Artificial Sequence
  Description of Artificial Sequence: Synthetic oligonucleotide
  Antisense strand to SEQ ID NO: 968654
acucugagaaguauccuca

SEQ ID NO: 968656 - RNA, 19 nt, Artificial Sequence
  Description of Artificial Sequence: Synthetic oligonucleotide
  Sense strand starting at position 983 of SEQ ID NO: 913978
agcuaugugaaccaaguga

SEQ ID NO: 968657 - RNA, 19 nt, Artificial Sequence
  Description of Artificial Sequence: Synthetic oligonucleotide
  Antisense strand to SEQ ID NO: 968656
ucacuugguucacauagcu

SEQ ID NO: 968658 - RNA, 19 nt, Artificial Sequence
  Description of Artificial Sequence: Synthetic oligonucleotide
  Sense strand starting at position 190 of SEQ ID NO: 913978
augcucacucuagaaguca

SEQ ID NO: 968659 - RNA, 19 nt, Artificial Sequence
  Description of Artificial Sequence: Synthetic oligonucleotide
  Antisense strand to SEQ ID NO: 968658
ugacuucuagagugagcau

SEQ ID NO: 968660 - RNA, 19 nt, Artificial Sequence
  Description of Artificial Sequence: Synthetic oligonucleotide
  Sense strand starting at position 2772 of SEQ ID NO: 913978
ggauacagccuuugauaau

SEQ ID NO: 968661 - RNA, 19 nt, Artificial Sequence
  Description of Artificial Sequence: Synthetic oligonucleotide
  Antisense strand to SEQ ID NO: 968660
auuaucaaaggcuguaucc

SEQ ID NO: 968662 - RNA, 19 nt, Artificial Sequence
  Description of Artificial Sequence: Synthetic oligonucleotide
  Sense strand starting at position 1561 of SEQ ID NO: 913978
aguugauauaucugaaacg

SEQ ID NO: 968663 - RNA, 19 nt, Artificial Sequence
  Description of Artificial Sequence: Synthetic oligonucleotide
  Antisense strand to SEQ ID NO: 968662
cguuucagauauaucaacu

SEQ ID NO: 968664 - RNA, 19 nt, Artificial Sequence
  Description of Artificial Sequence: Synthetic oligonucleotide
  Sense strand starting at position 1571 of SEQ ID NO: 913978
ucugaaacguaaucaaacu

SEQ ID NO: 968665 - RNA, 19 nt, Artificial Sequence
  Description of Artificial Sequence: Synthetic oligonucleotide
  Antisense strand to SEQ ID NO: 968664
aguuugauuacguuucaga

SEQ ID NO: 968666 - RNA, 19 nt, Artificial Sequence
  Description of Artificial Sequence: Synthetic oligonucleotide
  Sense strand starting at position 1404 of SEQ ID NO: 913978
aucgacugucuaugaggaa

SEQ ID NO: 968667 - RNA, 19 nt, Artificial Sequence
  Description of Artificial Sequence: Synthetic oligonucleotide
  Antisense strand to SEQ ID NO: 968666
uuccucauagacagucgau

SEQ ID NO: 968668 - RNA, 19 nt, Artificial Sequence
  Description of Artificial Sequence: Synthetic oligonucleotide
  Sense strand starting at position 206 of SEQ ID NO: 913978
ucagcugucauguaggaaa

SEQ ID NO: 968669 - RNA, 19 nt, Artificial Sequence
  Description of Artificial Sequence: Synthetic oligonucleotide
  Antisense strand to SEQ ID NO: 968668
uuuccuacaugacagcuga

SEQ ID NO: 968670 - RNA, 19 nt, Artificial Sequence
  Description of Artificial Sequence: Synthetic oligonucleotide
  Sense strand starting at position 2969 of SEQ ID NO: 913978
gaguuauggaaauguucug

SEQ ID NO: 968671 - RNA, 19 nt, Artificial Sequence
  Description of Artificial Sequence: Synthetic oligonucleotide
  Antisense strand to SEQ ID NO: 968670
cagaacauuuccauaacuc

SEQ ID NO: 968672 - RNA, 19 nt, Artificial Sequence
  Description of Artificial Sequence: Synthetic oligonucleotide
  Sense strand starting at position 812 of SEQ ID NO: 913978
gucuaauaugaauggcaua

SEQ ID NO: 968673 - RNA, 19 nt, Artificial Sequence
  Description of Artificial Sequence: Synthetic oligonucleotide
  Antisense strand to SEQ ID NO: 968672
uaugccauucauauuagac

SEQ ID NO: 968674 - RNA, 19 nt, Artificial Sequence
  Description of Artificial Sequence: Synthetic oligonucleotide
  Sense strand starting at position 3047 of SEQ ID NO: 913978
gaguuuauugaauguaacu

SEQ ID NO: 968675 - RNA, 19 nt, Artificial Sequence
  Description of Artificial Sequence: Synthetic oligonucleotide
  Antisense strand to SEQ ID NO: 968674
aguuacauucaauaaacuc

SEQ ID NO: 968676 - RNA, 19 nt, Artificial Sequence
  Description of Artificial Sequence: Synthetic oligonucleotide
  Sense strand starting at position 1398 of SEQ ID NO: 913978
ggaauaaucgacugucuau

SEQ ID NO: 968677 - RNA, 19 nt, Artificial Sequence
  Description of Artificial Sequence: Synthetic oligonucleotide
  Antisense strand to SEQ ID NO: 968676
auagacagucgauuauucc

SEQ ID NO: 968678 - RNA, 19 nt, Artificial Sequence
  Description of Artificial Sequence: Synthetic oligonucleotide
  Sense strand starting at position 1812 of SEQ ID NO: 913978
acgaauagaugccuacuau

SEQ ID NO: 968679 - RNA, 19 nt, Artificial Sequence
  Description of Artificial Sequence: Synthetic oligonucleotide
  Antisense strand to SEQ ID NO: 968678
auaguaggcaucuauucgu

SEQ ID NO: 968680 - RNA, 19 nt, Artificial Sequence
  Description of Artificial Sequence: Synthetic oligonucleotide
  Sense strand starting at position 2028 of SEQ ID NO: 913978
uuaaacagauccuuagcga

SEQ ID NO: 968681 - RNA, 19 nt, Artificial Sequence
  Description of Artificial Sequence: Synthetic oligonucleotide
  Antisense strand to SEQ ID NO: 968680
ucgcuaaggaucuguuuaa

SEQ ID NO: 968682 - RNA, 19 nt, Artificial Sequence
  Description of Artificial Sequence: Synthetic oligonucleotide
  Sense strand starting at position 2261 of SEQ ID NO: 913978
uugauacaugcgcaacuaa

SEQ ID NO: 968683 - RNA, 19 nt, Artificial Sequence
  Description of Artificial Sequence: Synthetic oligonucleotide
  Antisense strand to SEQ ID NO: 968682
uuaguugcgcauguaucaa

SEQ ID NO: 968684 - RNA, 19 nt, Artificial Sequence
  Description of Artificial Sequence: Synthetic oligonucleotide
  Sense strand starting at position 2182 of SEQ ID NO: 913978
ucaacugguguacgaauaa

SEQ ID NO: 968685 - RNA, 19 nt, Artificial Sequence
  Description of Artificial Sequence: Synthetic oligonucleotide
  Antisense strand to SEQ ID NO: 968684
uuauucguacaccaguuga

SEQ ID NO: 968686 - RNA, 19 nt, Artificial Sequence
  Description of Artificial Sequence: Synthetic oligonucleotide
  Sense strand starting at position 2358 of SEQ ID NO: 913978
ggaauacugcucuaccgua

SEQ ID NO: 968687 - RNA, 19 nt, Artificial Sequence
  Description of Artificial Sequence: Synthetic oligonucleotide
  Antisense strand to SEQ ID NO: 968686
uacgguagagcaguauucc

SEQ ID NO: 968688 - RNA, 19 nt, Artificial Sequence
  Description of Artificial Sequence: Synthetic oligonucleotide
  Sense strand starting at position 3837 of SEQ ID NO: 913978
ggcuaaucucccuagcauu

SEQ ID NO: 968689 - RNA, 19 nt, Artificial Sequence
  Description of Artificial Sequence: Synthetic oligonucleotide
  Antisense strand to SEQ ID NO: 968688
aaugcuagggagauuagcc

SEQ ID NO: 968690 - RNA, 19 nt, Artificial Sequence
  Description of Artificial Sequence: Synthetic oligonucleotide
  Sense strand starting at position 2942 of SEQ ID NO: 913978
cuguaaguggcaugaggau

SEQ ID NO: 968691 - RNA, 19 nt, Artificial Sequence
  Description of Artificial Sequence: Synthetic oligonucleotide
  Antisense strand to SEQ ID NO: 968690
auccucaugccacuuacag

SEQ ID NO: 968692 - RNA, 19 nt, Artificial Sequence
  Description of Artificial Sequence: Synthetic oligonucleotide
  Sense strand starting at position 2991 of SEQ ID NO: 913978
cuuaaugugcugcagacau

SEQ ID NO: 968693 - RNA, 19 nt, Artificial Sequence
  Description of Artificial Sequence: Synthetic oligonucleotide
  Antisense strand to SEQ ID NO: 968692
augucugcagcacauuaag

SEQ ID NO: 968694 - RNA, 19 nt, Artificial Sequence
  Description of Artificial Sequence: Synthetic oligonucleotide
  Sense strand starting at position 208 of SEQ ID NO: 913978
agcugucauguaggaaauc

SEQ ID NO: 968695 - RNA, 19 nt, Artificial Sequence
  Description of Artificial Sequence: Synthetic oligonucleotide
  Antisense strand to SEQ ID NO: 968694
gauuuccuacaugacagcu

SEQ ID NO: 968696 - RNA, 19 nt, Artificial Sequence
  Description of Artificial Sequence: Synthetic oligonucleotide
  Sense strand starting at position 3 of SEQ ID NO: 913978
uuggguuguacgcacuaaa

SEQ ID NO: 968697 - RNA, 19 nt, Artificial Sequence
  Description of Artificial Sequence: Synthetic oligonucleotide
  Antisense strand to SEQ ID NO: 968696
uuuagugcguacaacccaa

SEQ ID NO: 968698 - RNA, 19 nt, Artificial Sequence
  Description of Artificial Sequence: Synthetic oligonucleotide
  Sense strand starting at position 2998 of SEQ ID NO: 913978
ugcugcagacauggucaaa

SEQ ID NO: 968699 - RNA, 19 nt, Artificial Sequence
  Description of Artificial Sequence: Synthetic oligonucleotide
  Antisense strand to SEQ ID NO: 968698
uuugaccaugucugcagca

SEQ ID NO: 968700 - RNA, 19 nt, Artificial Sequence
  Description of Artificial Sequence: Synthetic oligonucleotide
  Sense strand starting at position 2260 of SEQ ID NO: 913978
auugauacaugcgcaacua

SEQ ID NO: 968701 - RNA, 19 nt, Artificial Sequence
  Description of Artificial Sequence: Synthetic oligonucleotide
  Antisense strand to SEQ ID NO: 968700
uaguugcgcauguaucaau

SEQ ID NO: 968702 - RNA, 19 nt, Artificial Sequence
  Description of Artificial Sequence: Synthetic oligonucleotide
  Sense strand starting at position 2125 of SEQ ID NO: 913978
uguuuauagcaguauuagu

SEQ ID NO: 968703 - RNA, 19 nt, Artificial Sequence
  Description of Artificial Sequence: Synthetic oligonucleotide
  Antisense strand to SEQ ID NO: 968702
acuaauacugcuauaaaca

SEQ ID NO: 968704 - RNA, 19 nt, Artificial Sequence
  Description of Artificial Sequence: Synthetic oligonucleotide
  Sense strand starting at position 199 of SEQ ID NO: 913978
cuagaagucagcugucaug

SEQ ID NO: 968705 - RNA, 19 nt, Artificial Sequence
  Description of Artificial Sequence: Synthetic oligonucleotide
  Antisense strand to SEQ ID NO: 968704
caugacagcugacuucuag

SEQ ID NO: 968706 - RNA, 19 nt, Artificial Sequence
  Description of Artificial Sequence: Synthetic oligonucleotide
  Sense strand starting at position 182 of SEQ ID NO: 913978
gucuuagaaugcucacucu

SEQ ID NO: 968707 - RNA, 19 nt, Artificial Sequence
  Description of Artificial Sequence: Synthetic oligonucleotide
  Antisense strand to SEQ ID NO: 968706
agagugagcauucuaagac

SEQ ID NO: 968708 - RNA, 19 nt, Artificial Sequence
  Description of Artificial Sequence: Synthetic oligonucleotide
  Sense strand starting at position 746 of SEQ ID NO: 913978
guaguaugcagcuaaaggu

SEQ ID NO: 968709 - RNA, 19 nt, Artificial Sequence
  Description of Artificial Sequence: Synthetic oligonucleotide
  Antisense strand to SEQ ID NO: 968708
accuuuagcugcauacuac

SEQ ID NO: 968710 - RNA, 19 nt, Artificial Sequence
  Description of Artificial Sequence: Synthetic oligonucleotide
  Sense strand starting at position 3836 of SEQ ID NO: 913978
gggcuaaucucccuagcau

SEQ ID NO: 968711 - RNA, 19 nt, Artificial Sequence
  Description of Artificial Sequence: Synthetic oligonucleotide
  Antisense strand to SEQ ID NO: 968710
augcuagggagauuagccc

SEQ ID NO: 968712 - RNA, 19 nt, Artificial Sequence
  Description of Artificial Sequence: Synthetic oligonucleotide
  Sense strand starting at position 612 of SEQ ID NO: 913978
agaugaaauuaucaccuga

SEQ ID NO: 968713 - RNA, 19 nt, Artificial Sequence
  Description of Artificial Sequence: Synthetic oligonucleotide
  Antisense strand to SEQ ID NO: 968712
ucaggugauaauuucaucu

SEQ ID NO: 968714 - RNA, 19 nt, Artificial Sequence
  Description of Artificial Sequence: Synthetic oligonucleotide
  Sense strand starting at position 3923 of SEQ ID NO: 913978
ugaacauuguaccaagaga

SEQ ID NO: 968715 - RNA, 19 nt, Artificial Sequence
  Description of Artificial Sequence: Synthetic oligonucleotide
  Antisense strand to SEQ ID NO: 968714
ucucuugguacaauguuca

SEQ ID NO: 968716 - RNA, 19 nt, Artificial Sequence
  Description of Artificial Sequence: Synthetic oligonucleotide
  Sense strand starting at position 3879 of SEQ ID NO: 913978
agggaaauauaucaaacgu

SEQ ID NO: 968717 - RNA, 19 nt, Artificial Sequence
  Description of Artificial Sequence: Synthetic oligonucleotide
  Antisense strand to SEQ ID NO: 968716
acguuugauauauuucccu

SEQ ID NO: 968718 - RNA, 19 nt, Artificial Sequence
  Description of Artificial Sequence: Synthetic oligonucleotide
  Sense strand starting at position 3221 of SEQ ID NO: 913979
acaaauggucaacgagaac

SEQ ID NO: 968719 - RNA, 19 nt, Artificial Sequence
  Description of Artificial Sequence: Synthetic oligonucleotide
  Antisense strand to SEQ ID NO: 968718
guucucguugaccauuugu

SEQ ID NO: 968720 - RNA, 19 nt, Artificial Sequence
  Description of Artificial Sequence: Synthetic oligonucleotide
  Sense strand starting at position 2482 of SEQ ID NO: 913979
guugcuguuauuguucuua

SEQ ID NO: 968721 - RNA, 19 nt, Artificial Sequence
  Description of Artificial Sequence: Synthetic oligonucleotide
  Antisense strand to SEQ ID NO: 968720
uaagaacaauaacagcaac

SEQ ID NO: 968722 - RNA, 19 nt, Artificial Sequence
  Description of Artificial Sequence: Synthetic oligonucleotide
  Sense strand starting at position 2180 of SEQ ID NO: 913979
acuguuucucuagagacua

SEQ ID NO: 968723 - RNA, 19 nt, Artificial Sequence
  Description of Artificial Sequence: Synthetic oligonucleotide
  Antisense strand to SEQ ID NO: 968722
uagucucuagagaaacagu

SEQ ID NO: 968724 - RNA, 19 nt, Artificial Sequence
  Description of Artificial Sequence: Synthetic oligonucleotide
  Sense strand starting at position 1685 of SEQ ID NO: 913979
gagucaaagccugaaucca

SEQ ID NO: 968725 - RNA, 19 nt, Artificial Sequence
  Description of Artificial Sequence: Synthetic oligonucleotide
  Antisense strand to SEQ ID NO: 968724
uggauucaggcuuugacuc

SEQ ID NO: 968726 - RNA, 19 nt, Artificial Sequence
  Description of Artificial Sequence: Synthetic oligonucleotide
  Sense strand starting at position 450 of SEQ ID NO: 913979
ucaugugguuaagucauuu

SEQ ID NO: 968727 - RNA, 19 nt, Artificial Sequence
  Description of Artificial Sequence: Synthetic oligonucleotide
  Antisense strand to SEQ ID NO: 968726
aaaugacuuaaccacauga

SEQ ID NO: 968728 - RNA, 19 nt, Artificial Sequence
  Description of Artificial Sequence: Synthetic oligonucleotide
  Sense strand starting at position 1798 of SEQ ID NO: 913979
aguuaauguacuggaaaga

SEQ ID NO: 968729 - RNA, 19 nt, Artificial Sequence
  Description of Artificial Sequence: Synthetic oligonucleotide
  Antisense strand to SEQ ID NO: 968728
ucuuuccaguacauuaacu

SEQ ID NO: 968730 - RNA, 19 nt, Artificial Sequence
  Description of Artificial Sequence: Synthetic oligonucleotide
  Sense strand starting at position 234 of SEQ ID NO: 913979
aguagagaaaguugaaagu

SEQ ID NO: 968731 - RNA, 19 nt, Artificial Sequence
  Description of Artificial Sequence: Synthetic oligonucleotide
  Antisense strand to SEQ ID NO: 968730
acuuucaacuuucucuacu

SEQ ID NO: 968732 - RNA, 19 nt, Artificial Sequence
  Description of Artificial Sequence: Synthetic oligonucleotide
  Sense strand starting at position 2177 of SEQ ID NO: 913979
agaacuguuucucuagaga

SEQ ID NO: 968733 - RNA, 19 nt, Artificial Sequence
  Description of Artificial Sequence: Synthetic oligonucleotide
  Antisense strand to SEQ ID NO: 968732
ucucuagagaaacaguucu

SEQ ID NO: 968734 - RNA, 19 nt, Artificial Sequence
  Description of Artificial Sequence: Synthetic oligonucleotide
  Sense strand starting at position 2933 of SEQ ID NO: 913979
gguaaaucuuacuuuggaa

SEQ ID NO: 968735 - RNA, 19 nt, Artificial Sequence
  Description of Artificial Sequence: Synthetic oligonucleotide
  Antisense strand to SEQ ID NO: 968734
uuccaaaguaagauuuacc

SEQ ID NO: 968736 - RNA, 19 nt, Artificial Sequence
  Description of Artificial Sequence: Synthetic oligonucleotide
  Sense strand starting at position 383 of SEQ ID NO: 913979
auggcauuacaaugacuga

SEQ ID NO: 968737 - RNA, 19 nt, Artificial Sequence
  Description of Artificial Sequence: Synthetic oligonucleotide
  Antisense strand to SEQ ID NO: 968736
ucagucauuguaaugccau

SEQ ID NO: 968738 - RNA, 19 nt, Artificial Sequence
  Description of Artificial Sequence: Synthetic oligonucleotide
  Sense strand starting at position 2932 of SEQ ID NO: 913979
ggguaaaucuuacuuugga

SEQ ID NO: 968739 - RNA, 19 nt, Artificial Sequence
  Description of Artificial Sequence: Synthetic oligonucleotide
  Antisense strand to SEQ ID NO: 968738
uccaaaguaagauuuaccc

SEQ ID NO: 968740 - RNA, 19 nt, Artificial Sequence
  Description of Artificial Sequence: Synthetic oligonucleotide
  Sense strand starting at position 2947 of SEQ ID NO: 913979
uggaauuggcaaugaauuc

SEQ ID NO: 968741 - RNA, 19 nt, Artificial Sequence
  Description of Artificial Sequence: Synthetic oligonucleotide
  Antisense strand to SEQ ID NO: 968740
gaauucauugccaauucca

SEQ ID NO: 968742 - RNA, 19 nt, Artificial Sequence
  Description of Artificial Sequence: Synthetic oligonucleotide
  Sense strand starting at position 2037 of SEQ ID NO: 913979
gcaaguaaauuauuacaag

SEQ ID NO: 968743 - RNA, 19 nt, Artificial Sequence
  Description of Artificial Sequence: Synthetic oligonucleotide
  Antisense strand to SEQ ID NO: 968742
cuuguaauaauuuacuugc

SEQ ID NO: 968744 - RNA, 19 nt, Artificial Sequence
  Description of Artificial Sequence: Synthetic oligonucleotide
  Sense strand starting at position 1673 of SEQ ID NO: 913979
cuaguaggccaagagucaa

SEQ ID NO: 968745 - RNA, 19 nt, Artificial Sequence
  Description of Artificial Sequence: Synthetic oligonucleotide
  Antisense strand to SEQ ID NO: 968744
uugacucuuggccuacuag

SEQ ID NO: 968746 - RNA, 19 nt, Artificial Sequence
  Description of Artificial Sequence: Synthetic oligonucleotide
  Sense strand starting at position 2207 of SEQ ID NO: 913979
ugauuccuucuugauguga

SEQ ID NO: 968747 - RNA, 19 nt, Artificial Sequence
  Description of Artificial Sequence: Synthetic oligonucleotide
  Antisense strand to SEQ ID NO: 968746
ucacaucaagaaggaauca

SEQ ID NO: 968748 - RNA, 19 nt, Artificial Sequence
  Description of Artificial Sequence: Synthetic oligonucleotide
  Sense strand starting at position 2632 of SEQ ID NO: 913979
aucaacuugccaugagaau

SEQ ID NO: 968749 - RNA, 19 nt, Artificial Sequence
  Description of Artificial Sequence: Synthetic oligonucleotide
  Antisense strand to SEQ ID NO: 968748
auucucauggcaaguugau

SEQ ID NO: 968750 - RNA, 19 nt, Artificial Sequence
  Description of Artificial Sequence: Synthetic oligonucleotide
  Sense strand starting at position 954 of SEQ ID NO: 913979
uuuacaaaccuguggauua

SEQ ID NO: 968751 - RNA, 19 nt, Artificial Sequence
  Description of Artificial Sequence: Synthetic oligonucleotide
  Antisense strand to SEQ ID NO: 968750
uaauccacagguuuguaaa

SEQ ID NO: 968752 - RNA, 19 nt, Artificial Sequence
  Description of Artificial Sequence: Synthetic oligonucleotide
  Sense strand starting at position 430 of SEQ ID NO: 913979
acuacauaugugcaagagu

SEQ ID NO: 968753 - RNA, 19 nt, Artificial Sequence
  Description of Artificial Sequence: Synthetic oligonucleotide
  Antisense strand to SEQ ID NO: 968752
acucuugcacauauguagu

SEQ ID NO: 968754 - RNA, 19 nt, Artificial Sequence
  Description of Artificial Sequence: Synthetic oligonucleotide
  Sense strand starting at position 433 of SEQ ID NO: 913979
acauaugugcaagaguauc

SEQ ID NO: 968755 - RNA, 19 nt, Artificial Sequence
  Description of Artificial Sequence: Synthetic oligonucleotide
  Antisense strand to SEQ ID NO: 968754
gauacucuugcacauaugu

SEQ ID NO: 968756 - RNA, 19 nt, Artificial Sequence
  Description of Artificial Sequence: Synthetic oligonucleotide
  Sense strand starting at position 428 of SEQ ID NO: 913979
ggacuacauaugugcaaga

SEQ ID NO: 968757 - RNA, 19 nt, Artificial Sequence
  Description of Artificial Sequence: Synthetic oligonucleotide
  Antisense strand to SEQ ID NO: 968756
ucuugcacauauguagucc

SEQ ID NO: 968758 - RNA, 19 nt, Artificial Sequence
  Description of Artificial Sequence: Synthetic oligonucleotide
  Sense strand starting at position 2379 of SEQ ID NO: 913979
acugauauacuauguaucu

SEQ ID NO: 968759 - RNA, 19 nt, Artificial Sequence
  Description of Artificial Sequence: Synthetic oligonucleotide
  Antisense strand to SEQ ID NO: 968758
agauacauaguauaucagu

SEQ ID NO: 968760 - RNA, 19 nt, Artificial Sequence
  Description of Artificial Sequence: Synthetic oligonucleotide
  Sense strand starting at position 3639 of SEQ ID NO: 913979
gggagaacuacaugcaugu

SEQ ID NO: 968761 - RNA, 19 nt, Artificial Sequence
  Description of Artificial Sequence: Synthetic oligonucleotide
  Antisense strand to SEQ ID NO: 968760
acaugcauguaguucuccc

SEQ ID NO: 968762 - RNA, 19 nt, Artificial Sequence
  Description of Artificial Sequence: Synthetic oligonucleotide
  Sense strand starting at position 882 of SEQ ID NO: 913979
aucuaaagccuguauagua

SEQ ID NO: 968763 - RNA, 19 nt, Artificial Sequence
  Description of Artificial Sequence: Synthetic oligonucleotide
  Antisense strand to SEQ ID NO: 968762
uacuauacaggcuuuagau

SEQ ID NO: 968764 - RNA, 19 nt, Artificial Sequence
  Description of Artificial Sequence: Synthetic oligonucleotide
  Sense strand starting at position 1143 of SEQ ID NO: 913979
acaguaagcucccuaugaa

SEQ ID NO: 968765 - RNA, 19 nt, Artificial Sequence
  Description of Artificial Sequence: Synthetic oligonucleotide
  Antisense strand to SEQ ID NO: 968764
uucauagggagcuuacugu

SEQ ID NO: 968766 - RNA, 19 nt, Artificial Sequence
  Description of Artificial Sequence: Synthetic oligonucleotide
  Sense strand starting at position 599 of SEQ ID NO: 913979
uguuguuugaaauacaugu

SEQ ID NO: 968767 - RNA, 19 nt, Artificial Sequence
  Description of Artificial Sequence: Synthetic oligonucleotide
  Antisense strand to SEQ ID NO: 968766
acauguauuucaaacaaca

SEQ ID NO: 968768 - RNA, 19 nt, Artificial Sequence
  Description of Artificial Sequence: Synthetic oligonucleotide
  Sense strand starting at position 1166 of SEQ ID NO: 913979
gaaaguauuucucauggac

SEQ ID NO: 968769 - RNA, 19 nt, Artificial Sequence
  Description of Artificial Sequence: Synthetic oligonucleotide
  Antisense strand to SEQ ID NO: 968768
guccaugagaaauacuuuc

SEQ ID NO: 968770 - RNA, 19 nt, Artificial Sequence
  Description of Artificial Sequence: Synthetic oligonucleotide
  Sense strand starting at position 1295 of SEQ ID NO: 913979
ugugaagagugguuacuaa

SEQ ID NO: 968771 - RNA, 19 nt, Artificial Sequence
  Description of Artificial Sequence: Synthetic oligonucleotide
  Antisense strand to SEQ ID NO: 968770
uuaguaaccacucuucaca

SEQ ID NO: 968772 - RNA, 19 nt, Artificial Sequence
  Description of Artificial Sequence: Synthetic oligonucleotide
  Sense strand starting at position 2390 of SEQ ID NO: 913979
auguaucugcaucacuauu

SEQ ID NO: 968773 - RNA, 19 nt, Artificial Sequence
  Description of Artificial Sequence: Synthetic oligonucleotide
  Antisense strand to SEQ ID NO: 968772
aauagugaugcagauacau

SEQ ID NO: 968774 - RNA, 19 nt, Artificial Sequence
  Description of Artificial Sequence: Synthetic oligonucleotide
  Sense strand starting at position 1700 of SEQ ID NO: 913979
uccagauuaccgcacucua

SEQ ID NO: 968775 - RNA, 19 nt, Artificial Sequence
  Description of Artificial Sequence: Synthetic oligonucleotide
  Antisense strand to SEQ ID NO: 968774
uagagugcgguaaucugga

SEQ ID NO: 968776 - RNA, 19 nt, Artificial Sequence
  Description of Artificial Sequence: Synthetic oligonucleotide
  Sense strand starting at position 1146 of SEQ ID NO: 913979
guaagcucccuaugaaaca

SEQ ID NO: 968777 - RNA, 19 nt, Artificial Sequence
  Description of Artificial Sequence: Synthetic oligonucleotide
  Antisense strand to SEQ ID NO: 968776
uguuucauagggagcuuac

SEQ ID NO: 968778 - RNA, 19 nt, Artificial Sequence
  Description of Artificial Sequence: Synthetic oligonucleotide
  Sense strand starting at position 2473 of SEQ ID NO: 913979
uuguguguuguugcuguua

SEQ ID NO: 968779 - RNA, 19 nt, Artificial Sequence
  Description of Artificial Sequence: Synthetic oligonucleotide
  Antisense strand to SEQ ID NO: 968778
uaacagcaacaacacacaa

SEQ ID NO: 968780 - RNA, 19 nt, Artificial Sequence
  Description of Artificial Sequence: Synthetic oligonucleotide
  Sense strand starting at position 2223 of SEQ ID NO: 913979
ugaugcuuagcccaaaucu

SEQ ID NO: 968781 - RNA, 19 nt, Artificial Sequence
  Description of Artificial Sequence: Synthetic oligonucleotide
  Antisense strand to SEQ ID NO: 968780
agauuugggcuaagcauca

SEQ ID NO: 968782 - RNA, 19 nt, Artificial Sequence
  Description of Artificial Sequence: Synthetic oligonucleotide
  Sense strand starting at position 3846 of SEQ ID NO: 913979
agcuuaguaagugaagcau

SEQ ID NO: 968783 - RNA, 19 nt, Artificial Sequence
  Description of Artificial Sequence: Synthetic oligonucleotide
  Antisense strand to SEQ ID NO: 968782
augcuucacuuacuaagcu

SEQ ID NO: 968784 - RNA, 19 nt, Artificial Sequence
  Description of Artificial Sequence: Synthetic oligonucleotide
  Sense strand starting at position 2259 of SEQ ID NO: 913979
cuauucugguacuucuaua

SEQ ID NO: 968785 - RNA, 19 nt, Artificial Sequence
  Description of Artificial Sequence: Synthetic oligonucleotide
  Antisense strand to SEQ ID NO: 968784
uauagaaguaccagaauag

SEQ ID NO: 968786 - RNA, 19 nt, Artificial Sequence
  Description of Artificial Sequence: Synthetic oligonucleotide
  Sense strand starting at position 447 of SEQ ID NO: 913979
guaucaugugguuaaguca

SEQ ID NO: 968787 - RNA, 19 nt, Artificial Sequence
  Description of Artificial Sequence: Synthetic oligonucleotide
  Antisense strand to SEQ ID NO: 968786
ugacuuaaccacaugauac

SEQ ID NO: 968788 - RNA, 19 nt, Artificial Sequence
  Description of Artificial Sequence: Synthetic oligonucleotide
  Sense strand starting at position 3852 of SEQ ID NO: 913979
guaagugaagcaugucaaa

SEQ ID NO: 968789 - RNA, 19 nt, Artificial Sequence
  Description of Artificial Sequence: Synthetic oligonucleotide
  Antisense strand to SEQ ID NO: 968788
uuugacaugcuucacuuac

SEQ ID NO: 968790 - RNA, 19 nt, Artificial Sequence
  Description of Artificial Sequence: Synthetic oligonucleotide
  Sense strand starting at position 2218 of SEQ ID NO: 913979
ugaugugaugcuuagccca

SEQ ID NO: 968791 - RNA, 19 nt, Artificial Sequence
  Description of Artificial Sequence: Synthetic oligonucleotide
  Antisense strand to SEQ ID NO: 968790
ugggcuaagcaucacauca

SEQ ID NO: 968792 - RNA, 19 nt, Artificial Sequence
  Description of Artificial Sequence: Synthetic oligonucleotide
  Sense strand starting at position 574 of SEQ ID NO: 913979
aucuaucccuggucuuuau

SEQ ID NO: 968793 - RNA, 19 nt, Artificial Sequence
  Description of Artificial Sequence: Synthetic oligonucleotide
  Antisense strand to SEQ ID NO: 968792
auaaagaccagggauagau

SEQ ID NO: 968794 - RNA, 19 nt, Artificial Sequence
  Description of Artificial Sequence: Synthetic oligonucleotide
  Sense strand starting at position 890 of SEQ ID NO: 913979
ccuguauaguauguuaaau

SEQ ID NO: 968795 - RNA, 19 nt, Artificial Sequence
  Description of Artificial Sequence: Synthetic oligonucleotide
  Antisense strand to SEQ ID NO: 968794
auuuaacauacuauacagg

SEQ ID NO: 968796 - RNA, 19 nt, Artificial Sequence
  Description of Artificial Sequence: Synthetic oligonucleotide
  Sense strand starting at position 287 of SEQ ID NO: 913979
gccucuuaaggcugggauu

SEQ ID NO: 968797 - RNA, 19 nt, Artificial Sequence
  Description of Artificial Sequence: Synthetic oligonucleotide
  Antisense strand to SEQ ID NO: 968796
aaucccagccuuaagaggc

SEQ ID NO: 968798 - RNA, 19 nt, Artificial Sequence
  Description of Artificial Sequence: Synthetic oligonucleotide
  Sense strand starting at position 1406 of SEQ ID NO: 913980
ugauuuagcuguuugaucu

SEQ ID NO: 968799 - RNA, 19 nt, Artificial Sequence
  Description of Artificial Sequence: Synthetic oligonucleotide
  Antisense strand to SEQ ID NO: 968798
agaucaaacagcuaaauca

SEQ ID NO: 968800 - RNA, 19 nt, Artificial Sequence
  Description of Artificial Sequence: Synthetic oligonucleotide
  Sense strand starting at position 1209 of SEQ ID NO: 913980
cgaggaaaugguuaucgga

SEQ ID NO: 968801 - RNA, 19 nt, Artificial Sequence
  Description of Artificial Sequence: Synthetic oligonucleotide
  Antisense strand to SEQ ID NO: 968800
uccgauaaccauuuccucg

SEQ ID NO: 968802 - RNA, 19 nt, Artificial Sequence
  Description of Artificial Sequence: Synthetic oligonucleotide
  Sense strand starting at position 818 of SEQ ID NO: 913980
ugugaucuuggauacuuua

SEQ ID NO: 968803 - RNA, 19 nt, Artificial Sequence
  Description of Artificial Sequence: Synthetic oligonucleotide
  Antisense strand to SEQ ID NO: 968802
uaaaguauccaagaucaca

SEQ ID NO: 968804 - RNA, 19 nt, Artificial Sequence
  Description of Artificial Sequence: Synthetic oligonucleotide
  Sense strand starting at position 1407 of SEQ ID NO: 913980
gauuuagcuguuugaucuc

SEQ ID NO: 968805 - RNA, 19 nt, Artificial Sequence
  Description of Artificial Sequence: Synthetic oligonucleotide
  Antisense strand to SEQ ID NO: 968804
gagaucaaacagcuaaauc

SEQ ID NO: 968806 - RNA, 19 nt, Artificial Sequence
  Description of Artificial Sequence: Synthetic oligonucleotide
  Sense strand starting at position 2169 of SEQ ID NO: 913980
cuuuguaccagaugaggaa

SEQ ID NO: 968807 - RNA, 19 nt, Artificial Sequence
  Description of Artificial Sequence: Synthetic oligonucleotide
  Antisense strand to SEQ ID NO: 968806
uuccucaucugguacaaag

SEQ ID NO: 968808 - RNA, 19 nt, Artificial Sequence
  Description of Artificial Sequence: Synthetic oligonucleotide
  Sense strand starting at position 904 of SEQ ID NO: 913980
cugggaguaucacuugaga

SEQ ID NO: 968809 - RNA, 19 nt, Artificial Sequence
  Description of Artificial Sequence: Synthetic oligonucleotide
  Antisense strand to SEQ ID NO: 968808
ucucaagugauacucccag

SEQ ID NO: 968810 - RNA, 19 nt, Artificial Sequence
  Description of Artificial Sequence: Synthetic oligonucleotide
  Sense strand starting at position 3509 of SEQ ID NO: 913980
cgaugaaacaguuagaugu

SEQ ID NO: 968811 - RNA, 19 nt, Artificial Sequence
  Description of Artificial Sequence: Synthetic oligonucleotide
  Antisense strand to SEQ ID NO: 968810
acaucuaacuguuucaucg

SEQ ID NO: 968812 - RNA, 19 nt, Artificial Sequence
  Description of Artificial Sequence: Synthetic oligonucleotide
  Sense strand starting at position 1522 of SEQ ID NO: 913980
ucccucugacuauaguaua

SEQ ID NO: 968813 - RNA, 19 nt, Artificial Sequence
  Description of Artificial Sequence: Synthetic oligonucleotide
  Antisense strand to SEQ ID NO: 968812
uauacuauagucagaggga

SEQ ID NO: 968814 - RNA, 19 nt, Artificial Sequence
  Description of Artificial Sequence: Synthetic oligonucleotide
  Sense strand starting at position 2235 of SEQ ID NO: 913980
ggaagaguugcucauucag

SEQ ID NO: 968815 - RNA, 19 nt, Artificial Sequence
  Description of Artificial Sequence: Synthetic oligonucleotide
  Antisense strand to SEQ ID NO: 968814
cugaaugagcaacucuucc

SEQ ID NO: 968816 - RNA, 19 nt, Artificial Sequence
  Description of Artificial Sequence: Synthetic oligonucleotide
  Sense strand starting at position 260 of SEQ ID NO: 913980
agugauggcccucaaggau

SEQ ID NO: 968817 - RNA, 19 nt, Artificial Sequence
  Description of Artificial Sequence: Synthetic oligonucleotide
  Antisense strand to SEQ ID NO: 968816
auccuugagggccaucacu

SEQ ID NO: 968818 - RNA, 19 nt, Artificial Sequence
  Description of Artificial Sequence: Synthetic oligonucleotide
  Sense strand starting at position 3382 of SEQ ID NO: 913980
uugugcugauuuccacuua

SEQ ID NO: 968819 - RNA, 19 nt, Artificial Sequence
  Description of Artificial Sequence: Synthetic oligonucleotide
  Antisense strand to SEQ ID NO: 968818
uaaguggaaaucagcacaa

SEQ ID NO: 968820 - RNA, 19 nt, Artificial Sequence
  Description of Artificial Sequence: Synthetic oligonucleotide
  Sense strand starting at position 808 of SEQ ID NO: 913980
uuaugaggaaugugaucuu

SEQ ID NO: 968821 - RNA, 19 nt, Artificial Sequence
  Description of Artificial Sequence: Synthetic oligonucleotide
  Antisense strand to SEQ ID NO: 968820
aagaucacauuccucauaa

SEQ ID NO: 968822 - RNA, 19 nt, Artificial Sequence
  Description of Artificial Sequence: Synthetic oligonucleotide
  Sense strand starting at position 815 of SEQ ID NO: 913980
gaaugugaucuuggauacu

SEQ ID NO: 968823 - RNA, 19 nt, Artificial Sequence
  Description of Artificial Sequence: Synthetic oligonucleotide
  Antisense strand to SEQ ID NO: 968822
aguauccaagaucacauuc

SEQ ID NO: 968824 - RNA, 19 nt, Artificial Sequence
  Description of Artificial Sequence: Synthetic oligonucleotide
  Sense strand starting at position 1275 of SEQ ID NO: 913980
ccagaauucuagcuugaga

SEQ ID NO: 968825 - RNA, 19 nt, Artificial Sequence
  Description of Artificial Sequence: Synthetic oligonucleotide
  Antisense strand to SEQ ID NO: 968824
ucucaagcuagaauucugg

SEQ ID NO: 968826 - RNA, 19 nt, Artificial Sequence
  Description of Artificial Sequence: Synthetic oligonucleotide
  Sense strand starting at position 2258 of SEQ ID NO: 913980
gacagaguguuaccaucaa

SEQ ID NO: 968827 - RNA, 19 nt, Artificial Sequence
  Description of Artificial Sequence: Synthetic oligonucleotide
  Antisense strand to SEQ ID NO: 968826
uugaugguaacacucuguc

SEQ ID NO: 968828 - RNA, 19 nt, Artificial Sequence
  Description of Artificial Sequence: Synthetic oligonucleotide
  Sense strand starting at position 1520 of SEQ ID NO: 913980
uuucccucugacuauagua

SEQ ID NO: 968829 - RNA, 19 nt, Artificial Sequence
  Description of Artificial Sequence: Synthetic oligonucleotide
  Antisense strand to SEQ ID NO: 968828
uacuauagucagagggaaa

SEQ ID NO: 968830 - RNA, 19 nt, Artificial Sequence
  Description of Artificial Sequence: Synthetic oligonucleotide
  Sense strand starting at position 899 of SEQ ID NO: 913980
gauugcugggaguaucacu

SEQ ID NO: 968831 - RNA, 19 nt, Artificial Sequence
  Description of Artificial Sequence: Synthetic oligonucleotide
  Antisense strand to SEQ ID NO: 968830
agugauacucccagcaauc

SEQ ID NO: 968832 - RNA, 19 nt, Artificial Sequence
  Description of Artificial Sequence: Synthetic oligonucleotide
  Sense strand starting at position 116 of SEQ ID NO: 913980
uuaucaaauccaugagguu

SEQ ID NO: 968833 - RNA, 19 nt, Artificial Sequence
  Description of Artificial Sequence: Synthetic oligonucleotide
  Antisense strand to SEQ ID NO: 968832
aaccucauggauuugauaa

SEQ ID NO: 968834 - RNA, 19 nt, Artificial Sequence
  Description of Artificial Sequence: Synthetic oligonucleotide
  Sense strand starting at position 933 of SEQ ID NO: 913980
augagcacuccucaguaca

SEQ ID NO: 968835 - RNA, 19 nt, Artificial Sequence
  Description of Artificial Sequence: Synthetic oligonucleotide
  Antisense strand to SEQ ID NO: 968834
uguacugaggagugcucau

SEQ ID NO: 968836 - RNA, 19 nt, Artificial Sequence
  Description of Artificial Sequence: Synthetic oligonucleotide
  Sense strand starting at position 2135 of SEQ ID NO: 913980
accaaugucuuccugggaa

SEQ ID NO: 968837 - RNA, 19 nt, Artificial Sequence
  Description of Artificial Sequence: Synthetic oligonucleotide
  Antisense strand to SEQ ID NO: 968836
uucccaggaagacauuggu

SEQ ID NO: 968838 - RNA, 19 nt, Artificial Sequence
  Description of Artificial Sequence: Synthetic oligonucleotide
  Sense strand starting at position 1278 of SEQ ID NO: 913980
gaauucuagcuugagagcu

SEQ ID NO: 968839 - RNA, 19 nt, Artificial Sequence
  Description of Artificial Sequence: Synthetic oligonucleotide
  Antisense strand to SEQ ID NO: 968838
agcucucaagcuagaauuc

SEQ ID NO: 968840 - RNA, 19 nt, Artificial Sequence
  Description of Artificial Sequence: Synthetic oligonucleotide
  Sense strand starting at position 285 of SEQ ID NO: 913980
ggagaaaugugcaggagag

SEQ ID NO: 968841 - RNA, 19 nt, Artificial Sequence
  Description of Artificial Sequence: Synthetic oligonucleotide
  Antisense strand to SEQ ID NO: 968840
cucuccugcacauuucucc

SEQ ID NO: 968842 - RNA, 19 nt, Artificial Sequence
  Description of Artificial Sequence: Synthetic oligonucleotide
  Sense strand starting at position 867 of SEQ ID NO: 913980
cuguaacaugaagguuauu

SEQ ID NO: 968843 - RNA, 19 nt, Artificial Sequence
  Description of Artificial Sequence: Synthetic oligonucleotide
  Antisense strand to SEQ ID NO: 968842
aauaaccuucauguuacag

SEQ ID NO: 968844 - RNA, 19 nt, Artificial Sequence
  Description of Artificial Sequence: Synthetic oligonucleotide
  Sense strand starting at position 2157 of SEQ ID NO: 913980
uagaaaggguuccuuugua

SEQ ID NO: 968845 - RNA, 19 nt, Artificial Sequence
  Description of Artificial Sequence: Synthetic oligonucleotide
  Antisense strand to SEQ ID NO: 968844
uacaaaggaacccuuucua

SEQ ID NO: 968846 - RNA, 19 nt, Artificial Sequence
  Description of Artificial Sequence: Synthetic oligonucleotide
  Sense strand starting at position 1239 of SEQ ID NO: 913980
acuuuacuuugaucaugua

SEQ ID NO: 968847 - RNA, 19 nt, Artificial Sequence
  Description of Artificial Sequence: Synthetic oligonucleotide
  Antisense strand to SEQ ID NO: 968846
uacaugaucaaaguaaagu

SEQ ID NO: 968848 - RNA, 19 nt, Artificial Sequence
  Description of Artificial Sequence: Synthetic oligonucleotide
  Sense strand starting at position 2548 of SEQ ID NO: 913980
gcaaguuaacuggaguucu

SEQ ID NO: 968849 - RNA, 19 nt, Artificial Sequence
  Description of Artificial Sequence: Synthetic oligonucleotide
  Antisense strand to SEQ ID NO: 968848
agaacuccaguuaacuugc

SEQ ID NO: 968850 - RNA, 19 nt, Artificial Sequence
  Description of Artificial Sequence: Synthetic oligonucleotide
  Sense strand starting at position 636 of SEQ ID NO: 913980
ggaggacaucucuguccuu

SEQ ID NO: 968851 - RNA, 19 nt, Artificial Sequence
  Description of Artificial Sequence: Synthetic oligonucleotide
  Antisense strand to SEQ ID NO: 968850
aaggacagagauguccucc

SEQ ID NO: 968852 - RNA, 19 nt, Artificial Sequence
  Description of Artificial Sequence: Synthetic oligonucleotide
  Sense strand starting at position 895 of SEQ ID NO: 913980
aucagauugcugggaguau

SEQ ID NO: 968853 - RNA, 19 nt, Artificial Sequence
  Description of Artificial Sequence: Synthetic oligonucleotide
  Antisense strand to SEQ ID NO: 968852
auacucccagcaaucugau

SEQ ID NO: 968854 - RNA, 19 nt, Artificial Sequence
  Description of Artificial Sequence: Synthetic oligonucleotide
  Sense strand starting at position 2446 of SEQ ID NO: 913980
uucuacugccuuuagaagu

SEQ ID NO: 968855 - RNA, 19 nt, Artificial Sequence
  Description of Artificial Sequence: Synthetic oligonucleotide
  Antisense strand to SEQ ID NO: 968854
acuucuaaaggcaguagaa

SEQ ID NO: 968856 - RNA, 19 nt, Artificial Sequence
  Description of Artificial Sequence: Synthetic oligonucleotide
  Sense strand starting at position 2220 of SEQ ID NO: 913980
ugccaaugguuuccaggaa

SEQ ID NO: 968857 - RNA, 19 nt, Artificial Sequence
  Description of Artificial Sequence: Synthetic oligonucleotide
  Antisense strand to SEQ ID NO: 968856
uuccuggaaaccauuggca

SEQ ID NO: 968858 - RNA, 19 nt, Artificial Sequence
  Description of Artificial Sequence: Synthetic oligonucleotide
  Sense strand starting at position 2992 of SEQ ID NO: 913980
gagauagugaguuguacug

SEQ ID NO: 968859 - RNA, 19 nt, Artificial Sequence
  Description of Artificial Sequence: Synthetic oligonucleotide
  Antisense strand to SEQ ID NO: 968858
caguacaacucacuaucuc

SEQ ID NO: 968860 - RNA, 19 nt, Artificial Sequence
  Description of Artificial Sequence: Synthetic oligonucleotide
  Sense strand starting at position 1277 of SEQ ID NO: 913980
agaauucuagcuugagagc

SEQ ID NO: 968861 - RNA, 19 nt, Artificial Sequence
  Description of Artificial Sequence: Synthetic oligonucleotide
  Antisense strand to SEQ ID NO: 968860
gcucucaagcuagaauucu

SEQ ID NO: 968862 - RNA, 19 nt, Artificial Sequence
  Description of Artificial Sequence: Synthetic oligonucleotide
  Sense strand starting at position 1062 of SEQ ID NO: 913980
aggcacuucuaagcaauau

SEQ ID NO: 968863 - RNA, 19 nt, Artificial Sequence
  Description of Artificial Sequence: Synthetic oligonucleotide
  Antisense strand to SEQ ID NO: 968862
auauugcuuagaagugccu

SEQ ID NO: 968864 - RNA, 19 nt, Artificial Sequence
  Description of Artificial Sequence: Synthetic oligonucleotide
  Sense strand starting at position 2496 of SEQ ID NO: 913980
gaggguagcuggucuggaa

SEQ ID NO: 968865 - RNA, 19 nt, Artificial Sequence
  Description of Artificial Sequence: Synthetic oligonucleotide
  Antisense strand to SEQ ID NO: 968864
uuccagaccagcuacccuc

SEQ ID NO: 968866 - RNA, 19 nt, Artificial Sequence
  Description of Artificial Sequence: Synthetic oligonucleotide
  Sense strand starting at position 19 of SEQ ID NO: 913980
agcaauucugugugagaaa

SEQ ID NO: 968867 - RNA, 19 nt, Artificial Sequence
  Description of Artificial Sequence: Synthetic oligonucleotide
  Antisense strand to SEQ ID NO: 968866
uuucucacacagaauugcu

SEQ ID NO: 968868 - RNA, 19 nt, Artificial Sequence
  Description of Artificial Sequence: Synthetic oligonucleotide
  Sense strand starting at position 2988 of SEQ ID NO: 913980
gucugagauagugaguugu

SEQ ID NO: 968869 - RNA, 19 nt, Artificial Sequence
  Description of Artificial Sequence: Synthetic oligonucleotide
  Antisense strand to SEQ ID NO: 968868
acaacucacuaucucagac

SEQ ID NO: 968870 - RNA, 19 nt, Artificial Sequence
  Description of Artificial Sequence: Synthetic oligonucleotide
  Sense strand starting at position 495 of SEQ ID NO: 913980
aaagcugcauuugagagaa

SEQ ID NO: 968871 - RNA, 19 nt, Artificial Sequence
  Description of Artificial Sequence: Synthetic oligonucleotide
  Antisense strand to SEQ ID NO: 968870
uucucucaaaugcagcuuu

SEQ ID NO: 968872 - RNA, 19 nt, Artificial Sequence
  Description of Artificial Sequence: Synthetic oligonucleotide
  Sense strand starting at position 879 of SEQ ID NO: 913980
gguuauuacuacccucauc

SEQ ID NO: 968873 - RNA, 19 nt, Artificial Sequence
  Description of Artificial Sequence: Synthetic oligonucleotide
  Antisense strand to SEQ ID NO: 968872
gaugaggguaguaauaacc

SEQ ID NO: 968874 - RNA, 19 nt, Artificial Sequence
  Description of Artificial Sequence: Synthetic oligonucleotide
  Sense strand starting at position 2990 of SEQ ID NO: 913980
cugagauagugaguuguac

SEQ ID NO: 968875 - RNA, 19 nt, Artificial Sequence
  Description of Artificial Sequence: Synthetic oligonucleotide
  Antisense strand to SEQ ID NO: 968874
guacaacucacuaucucag

SEQ ID NO: 968876 - RNA, 19 nt, Artificial Sequence
  Description of Artificial Sequence: Synthetic oligonucleotide
  Sense strand starting at position 2336 of SEQ ID NO: 913980
auucuuagaccuggugagu

SEQ ID NO: 968877 - RNA, 19 nt, Artificial Sequence
  Description of Artificial Sequence: Synthetic oligonucleotide
  Antisense strand to SEQ ID NO: 968876
acucaccaggucuaagaau

SEQ ID NO: 968878 - RNA, 19 nt, Artificial Sequence
  Description of Artificial Sequence: Synthetic oligonucleotide
  Sense strand starting at position 2214 of SEQ ID NO: 913981
ugaaucucggcacaagaua

SEQ ID NO: 968879 - RNA, 19 nt, Artificial Sequence
  Description of Artificial Sequence: Synthetic oligonucleotide
  Antisense strand to SEQ ID NO: 968878
uaucuugugccgagauuca

SEQ ID NO: 968880 - RNA, 19 nt, Artificial Sequence
  Description of Artificial Sequence: Synthetic oligonucleotide
  Sense strand starting at position 1334 of SEQ ID NO: 913981
aagagugucgauuaacaca

SEQ ID NO: 968881 - RNA, 19 nt, Artificial Sequence
  Description of Artificial Sequence: Synthetic oligonucleotide
  Antisense strand to SEQ ID NO: 968880
uguguuaaucgacacucuu

SEQ ID NO: 968882 - RNA, 19 nt, Artificial Sequence
  Description of Artificial Sequence: Synthetic oligonucleotide
  Sense strand starting at position 3490 of SEQ ID NO: 913981
ugaagauacaaguggguua

SEQ ID NO: 968883 - RNA, 19 nt, Artificial Sequence
  Description of Artificial Sequence: Synthetic oligonucleotide
  Antisense strand to SEQ ID NO: 968882
uaacccacuuguaucuuca

SEQ ID NO: 968884 - RNA, 19 nt, Artificial Sequence
  Description of Artificial Sequence: Synthetic oligonucleotide
  Sense strand starting at position 3387 of SEQ ID NO: 913981
acguaaauggucuaaacac

SEQ ID NO: 968885 - RNA, 19 nt, Artificial Sequence
  Description of Artificial Sequence: Synthetic oligonucleotide
  Antisense strand to SEQ ID NO: 968884
guguuuagaccauuuacgu

SEQ ID NO: 968886 - RNA, 19 nt, Artificial Sequence
  Description of Artificial Sequence: Synthetic oligonucleotide
  Sense strand starting at position 558 of SEQ ID NO: 913981
ggaccaaauguaugauucu

SEQ ID NO: 968887 - RNA, 19 nt, Artificial Sequence
  Description of Artificial Sequence: Synthetic oligonucleotide
  Antisense strand to SEQ ID NO: 968886
agaaucauacauuuggucc

SEQ ID NO: 968888 - RNA, 19 nt, Artificial Sequence
  Description of Artificial Sequence: Synthetic oligonucleotide
  Sense strand starting at position 3136 of SEQ ID NO: 913981
ugugaauugguauacuauc

SEQ ID NO: 968889 - RNA, 19 nt, Artificial Sequence
  Description of Artificial Sequence: Synthetic oligonucleotide
  Antisense strand to SEQ ID NO: 968888
gauaguauaccaauucaca

SEQ ID NO: 968890 - RNA, 19 nt, Artificial Sequence
  Description of Artificial Sequence: Synthetic oligonucleotide
  Sense strand starting at position 1014 of SEQ ID NO: 913981
accuauagccuggauguga

SEQ ID NO: 968891 - RNA, 19 nt, Artificial Sequence
  Description of Artificial Sequence: Synthetic oligonucleotide
  Antisense strand to SEQ ID NO: 968890
ucacauccaggcuauaggu

SEQ ID NO: 968892 - RNA, 19 nt, Artificial Sequence
  Description of Artificial Sequence: Synthetic oligonucleotide
  Sense strand starting at position 3857 of SEQ ID NO: 913981
auaauaaguuugcuaagag

SEQ ID NO: 968893 - RNA, 19 nt, Artificial Sequence
  Description of Artificial Sequence: Synthetic oligonucleotide
  Antisense strand to SEQ ID NO: 968892
cucuuagcaaacuuauuau

SEQ ID NO: 968894 - RNA, 19 nt, Artificial Sequence
  Description of Artificial Sequence: Synthetic oligonucleotide
  Sense strand starting at position 3166 of SEQ ID NO: 913981
gacugugauguguauaaac

SEQ ID NO: 968895 - RNA, 19 nt, Artificial Sequence
  Description of Artificial Sequence: Synthetic oligonucleotide
  Antisense strand to SEQ ID NO: 968894
guuuauacacaucacaguc

SEQ ID NO: 968896 - RNA, 19 nt, Artificial Sequence
  Description of Artificial Sequence: Synthetic oligonucleotide
  Sense strand starting at position 3175 of SEQ ID NO: 913981
guguauaaacccuaaagca

SEQ ID NO: 968897 - RNA, 19 nt, Artificial Sequence
  Description of Artificial Sequence: Synthetic oligonucleotide
  Antisense strand to SEQ ID NO: 968896
ugcuuuaggguuuauacac

SEQ ID NO: 968898 - RNA, 19 nt, Artificial Sequence
  Description of Artificial Sequence: Synthetic oligonucleotide
  Sense strand starting at position 3747 of SEQ ID NO: 913981
uggacacauccgcaauuau

SEQ ID NO: 968899 - RNA, 19 nt, Artificial Sequence
  Description of Artificial Sequence: Synthetic oligonucleotide
  Antisense strand to SEQ ID NO: 968898
auaauugcggaugugucca

SEQ ID NO: 968900 - RNA, 19 nt, Artificial Sequence
  Description of Artificial Sequence: Synthetic oligonucleotide
  Sense strand starting at position 46 of SEQ ID NO: 913981
acuguuugacuuuauagua

SEQ ID NO: 968901 - RNA, 19 nt, Artificial Sequence
  Description of Artificial Sequence: Synthetic oligonucleotide
  Antisense strand to SEQ ID NO: 968900
uacuauaaagucaaacagu

SEQ ID NO: 968902 - RNA, 19 nt, Artificial Sequence
  Description of Artificial Sequence: Synthetic oligonucleotide
  Sense strand starting at position 480 of SEQ ID NO: 913981
acuguuuaucucuggaaag

SEQ ID NO: 968903 - RNA, 19 nt, Artificial Sequence
  Description of Artificial Sequence: Synthetic oligonucleotide
  Antisense strand to SEQ ID NO: 968902
cuuuccagagauaaacagu

SEQ ID NO: 968904 - RNA, 19 nt, Artificial Sequence
  Description of Artificial Sequence: Synthetic oligonucleotide
  Sense strand starting at position 3956 of SEQ ID NO: 913981
gcaagaauacaguaggcuu

SEQ ID NO: 968905 - RNA, 19 nt, Artificial Sequence
  Description of Artificial Sequence: Synthetic oligonucleotide
  Antisense strand to SEQ ID NO: 968904
aagccuacuguauucuugc

SEQ ID NO: 968906 - RNA, 19 nt, Artificial Sequence
  Description of Artificial Sequence: Synthetic oligonucleotide
  Sense strand starting at position 3385 of SEQ ID NO: 913981
aaacguaaauggucuaaac

SEQ ID NO: 968907 - RNA, 19 nt, Artificial Sequence
  Description of Artificial Sequence: Synthetic oligonucleotide
  Antisense strand to SEQ ID NO: 968906
guuuagaccauuuacguuu

SEQ ID NO: 968908 - RNA, 19 nt, Artificial Sequence
  Description of Artificial Sequence: Synthetic oligonucleotide
  Sense strand starting at position 2211 of SEQ ID NO: 913981
caaugaaucucggcacaag

SEQ ID NO: 968909 - RNA, 19 nt, Artificial Sequence
  Description of Artificial Sequence: Synthetic oligonucleotide
  Antisense strand to SEQ ID NO: 968908
cuugugccgagauucauug

SEQ ID NO: 968910 - RNA, 19 nt, Artificial Sequence
  Description of Artificial Sequence: Synthetic oligonucleotide
  Sense strand starting at position 712 of SEQ ID NO: 913981
auugcagaagcaugauaau

SEQ ID NO: 968911 - RNA, 19 nt, Artificial Sequence
  Description of Artificial Sequence: Synthetic oligonucleotide
  Antisense strand to SEQ ID NO: 968910
auuaucaugcuucugcaau

SEQ ID NO: 968912 - RNA, 19 nt, Artificial Sequence
  Description of Artificial Sequence: Synthetic oligonucleotide
  Sense strand starting at position 3133 of SEQ ID NO: 913981
auaugugaauugguauacu

SEQ ID NO: 968913 - RNA, 19 nt, Artificial Sequence
  Description of Artificial Sequence: Synthetic oligonucleotide
  Antisense strand to SEQ ID NO: 968912
aguauaccaauucacauau

SEQ ID NO: 968914 - RNA, 19 nt, Artificial Sequence
  Description of Artificial Sequence: Synthetic oligonucleotide
  Sense strand starting at position 3025 of SEQ ID NO: 913981
caauguauugugcagauua

SEQ ID NO: 968915 - RNA, 19 nt, Artificial Sequence
  Description of Artificial Sequence: Synthetic oligonucleotide
  Antisense strand to SEQ ID NO: 968914
uaaucugcacaauacauug

SEQ ID NO: 968916 - RNA, 19 nt, Artificial Sequence
  Description of Artificial Sequence: Synthetic oligonucleotide
  Sense strand starting at position 3027 of SEQ ID NO: 913981
auguauugugcagauuaua

SEQ ID NO: 968917 - RNA, 19 nt, Artificial Sequence
  Description of Artificial Sequence: Synthetic oligonucleotide
  Antisense strand to SEQ ID NO: 968916
uauaaucugcacaauacau

SEQ ID NO: 968918 - RNA, 19 nt, Artificial Sequence
  Description of Artificial Sequence: Synthetic oligonucleotide
  Sense strand starting at position 3746 of SEQ ID NO: 913981
auggacacauccgcaauua

SEQ ID NO: 968919 - RNA, 19 nt, Artificial Sequence
  Description of Artificial Sequence: Synthetic oligonucleotide
  Antisense strand to SEQ ID NO: 968918
uaauugcggauguguccau

SEQ ID NO: 968920 - RNA, 19 nt, Artificial Sequence
  Description of Artificial Sequence: Synthetic oligonucleotide
  Sense strand starting at position 3065 of SEQ ID NO: 913981
gcauuccaacaguagcaua

SEQ ID NO: 968921 - RNA, 19 nt, Artificial Sequence
  Description of Artificial Sequence: Synthetic oligonucleotide
  Antisense strand to SEQ ID NO: 968920
uaugcuacuguuggaaugc

SEQ ID NO: 968922 - RNA, 19 nt, Artificial Sequence
  Description of Artificial Sequence: Synthetic oligonucleotide
  Sense strand starting at position 3541 of SEQ ID NO: 913981
gccaacgcuagucaaagaa

SEQ ID NO: 968923 - RNA, 19 nt, Artificial Sequence
  Description of Artificial Sequence: Synthetic oligonucleotide
  Antisense strand to SEQ ID NO: 968922
uucuuugacuagcguuggc

SEQ ID NO: 968924 - RNA, 19 nt, Artificial Sequence
  Description of Artificial Sequence: Synthetic oligonucleotide
  Sense strand starting at position 3458 of SEQ ID NO: 913981
cuaugcugccuguaagaaa

SEQ ID NO: 968925 - RNA, 19 nt, Artificial Sequence
  Description of Artificial Sequence: Synthetic oligonucleotide
  Antisense strand to SEQ ID NO: 968924
uuucuuacaggcagcauag

SEQ ID NO: 968926 - RNA, 19 nt, Artificial Sequence
  Description of Artificial Sequence: Synthetic oligonucleotide
  Sense strand starting at position 3159 of SEQ ID NO: 913981
gaaguuagacugugaugug

SEQ ID NO: 968927 - RNA, 19 nt, Artificial Sequence
  Description of Artificial Sequence: Synthetic oligonucleotide
  Antisense strand to SEQ ID NO: 968926
cacaucacagucuaacuuc

SEQ ID NO: 968928 - RNA, 19 nt, Artificial Sequence
  Description of Artificial Sequence: Synthetic oligonucleotide
  Sense strand starting at position 430 of SEQ ID NO: 913981
ucaguuuguuccucauaaa

SEQ ID NO: 968929 - RNA, 19 nt, Artificial Sequence
  Description of Artificial Sequence: Synthetic oligonucleotide
  Antisense strand to SEQ ID NO: 968928
uuuaugaggaacaaacuga

SEQ ID NO: 968930 - RNA, 19 nt, Artificial Sequence
  Description of Artificial Sequence: Synthetic oligonucleotide
  Sense strand starting at position 1339 of SEQ ID NO: 913981
ugucgauuaacacaugugu

SEQ ID NO: 968931 - RNA, 19 nt, Artificial Sequence
  Description of Artificial Sequence: Synthetic oligonucleotide
  Antisense strand to SEQ ID NO: 968930
acacauguguuaaucgaca

SEQ ID NO: 968932 - RNA, 19 nt, Artificial Sequence
  Description of Artificial Sequence: Synthetic oligonucleotide
  Sense strand starting at position 43 of SEQ ID NO: 913981
guuacuguuugacuuuaua

SEQ ID NO: 968933 - RNA, 19 nt, Artificial Sequence
  Description of Artificial Sequence: Synthetic oligonucleotide
  Antisense strand to SEQ ID NO: 968932
uauaaagucaaacaguaac

SEQ ID NO: 968934 - RNA, 19 nt, Artificial Sequence
  Description of Artificial Sequence: Synthetic oligonucleotide
  Sense strand starting at position 287 of SEQ ID NO: 913981
gugggaggcuuguuaaauc

SEQ ID NO: 968935 - RNA, 19 nt, Artificial Sequence
  Description of Artificial Sequence: Synthetic oligonucleotide
  Antisense strand to SEQ ID NO: 968934
gauuuaacaagccucccac

SEQ ID NO: 968936 - RNA, 19 nt, Artificial Sequence
  Description of Artificial Sequence: Synthetic oligonucleotide
  Sense strand starting at position 3646 of SEQ ID NO: 913981
augaauuaauccuaagagg

SEQ ID NO: 968937 - RNA, 19 nt, Artificial Sequence
  Description of Artificial Sequence: Synthetic oligonucleotide
  Antisense strand to SEQ ID NO: 968936
ccucuuaggauuaauucau

SEQ ID NO: 968938 - RNA, 19 nt, Artificial Sequence
  Description of Artificial Sequence: Synthetic oligonucleotide
  Sense strand starting at position 3382 of SEQ ID NO: 913981
guuaaacguaaauggucua

SEQ ID NO: 968939 - RNA, 19 nt, Artificial Sequence
  Description of Artificial Sequence: Synthetic oligonucleotide
  Antisense strand to SEQ ID NO: 968938
uagaccauuuacguuuaac

SEQ ID NO: 968940 - RNA, 19 nt, Artificial Sequence
  Description of Artificial Sequence: Synthetic oligonucleotide
  Sense strand starting at position 429 of SEQ ID NO: 913981
cucaguuuguuccucauaa

SEQ ID NO: 968941 - RNA, 19 nt, Artificial Sequence
  Description of Artificial Sequence: Synthetic oligonucleotide
  Antisense strand to SEQ ID NO: 968940
uuaugaggaacaaacugag

SEQ ID NO: 968942 - RNA, 19 nt, Artificial Sequence
  Description of Artificial Sequence: Synthetic oligonucleotide
  Sense strand starting at position 397 of SEQ ID NO: 913981
guaaauuguuugccuaaua

SEQ ID NO: 968943 - RNA, 19 nt, Artificial Sequence
  Description of Artificial Sequence: Synthetic oligonucleotide
  Antisense strand to SEQ ID NO: 968942
uauuaggcaaacaauuuac

SEQ ID NO: 968944 - RNA, 19 nt, Artificial Sequence
  Description of Artificial Sequence: Synthetic oligonucleotide
  Sense strand starting at position 1327 of SEQ ID NO: 913981
aguauucaagagugucgau

SEQ ID NO: 968945 - RNA, 19 nt, Artificial Sequence
  Description of Artificial Sequence: Synthetic oligonucleotide
  Antisense strand to SEQ ID NO: 968944
aucgacacucuugaauacu

SEQ ID NO: 968946 - RNA, 19 nt, Artificial Sequence
  Description of Artificial Sequence: Synthetic oligonucleotide
  Sense strand starting at position 39 of SEQ ID NO: 913981
acuuguuacuguuugacuu

SEQ ID NO: 968947 - RNA, 19 nt, Artificial Sequence
  Description of Artificial Sequence: Synthetic oligonucleotide
  Antisense strand to SEQ ID NO: 968946
aagucaaacaguaacaagu

SEQ ID NO: 968948 - RNA, 19 nt, Artificial Sequence
  Description of Artificial Sequence: Synthetic oligonucleotide
  Sense strand starting at position 395 of SEQ ID NO: 913981
auguaaauuguuugccuaa

SEQ ID NO: 968949 - RNA, 19 nt, Artificial Sequence
  Description of Artificial Sequence: Synthetic oligonucleotide
  Antisense strand to SEQ ID NO: 968948
uuaggcaaacaauuuacau

SEQ ID NO: 968950 - RNA, 19 nt, Artificial Sequence
  Description of Artificial Sequence: Synthetic oligonucleotide
  Sense strand starting at position 1099 of SEQ ID NO: 913981
guuuaacaacauuguguuu

SEQ ID NO: 968951 - RNA, 19 nt, Artificial Sequence
  Description of Artificial Sequence: Synthetic oligonucleotide
  Antisense strand to SEQ ID NO: 968950
aaacacaauguuguuaaac

SEQ ID NO: 968952 - RNA, 19 nt, Artificial Sequence
  Description of Artificial Sequence: Synthetic oligonucleotide
  Sense strand starting at position 738 of SEQ ID NO: 913981
ugcccuuuggcuuagcaaa

SEQ ID NO: 968953 - RNA, 19 nt, Artificial Sequence
  Description of Artificial Sequence: Synthetic oligonucleotide
  Antisense strand to SEQ ID NO: 968952
uuugcuaagccaaagggca

SEQ ID NO: 968954 - RNA, 19 nt, Artificial Sequence
  Description of Artificial Sequence: Synthetic oligonucleotide
  Sense strand starting at position 236 of SEQ ID NO: 913981
aguuaaaucucagaggaaa

SEQ ID NO: 968955 - RNA, 19 nt, Artificial Sequence
  Description of Artificial Sequence: Synthetic oligonucleotide
  Antisense strand to SEQ ID NO: 968954
uuuccucugagauuuaacu

SEQ ID NO: 968956 - RNA, 19 nt, Artificial Sequence
  Description of Artificial Sequence: Synthetic oligonucleotide
  Sense strand starting at position 396 of SEQ ID NO: 913981
uguaaauuguuugccuaau

SEQ ID NO: 968957 - RNA, 19 nt, Artificial Sequence
  Description of Artificial Sequence: Synthetic oligonucleotide
  Antisense strand to SEQ ID NO: 968956
auuaggcaaacaauuuaca

SEQ ID NO: 968958 - RNA, 19 nt, Artificial Sequence
  Description of Artificial Sequence: Synthetic oligonucleotide
  Sense strand starting at position 3394 of SEQ ID NO: 913982
ugugcauguguucuaaguu

SEQ ID NO: 968959 - RNA, 19 nt, Artificial Sequence
  Description of Artificial Sequence: Synthetic oligonucleotide
  Antisense strand to SEQ ID NO: 968958
aacuuagaacacaugcaca

SEQ ID NO: 968960 - RNA, 19 nt, Artificial Sequence
  Description of Artificial Sequence: Synthetic oligonucleotide
  Sense strand starting at position 3789 of SEQ ID NO: 913982
ugaguacccggauauauac

SEQ ID NO: 968961 - RNA, 19 nt, Artificial Sequence
  Description of Artificial Sequence: Synthetic oligonucleotide
  Antisense strand to SEQ ID NO: 968960
guauauauccggguacuca

SEQ ID NO: 968962 - RNA, 19 nt, Artificial Sequence
  Description of Artificial Sequence: Synthetic oligonucleotide
  Sense strand starting at position 941 of SEQ ID NO: 913982
agauguauccacggaagaa

SEQ ID NO: 968963 - RNA, 19 nt, Artificial Sequence
  Description of Artificial Sequence: Synthetic oligonucleotide
  Antisense strand to SEQ ID NO: 968962
uucuuccguggauacaucu

SEQ ID NO: 968964 - RNA, 19 nt, Artificial Sequence
  Description of Artificial Sequence: Synthetic oligonucleotide
  Sense strand starting at position 3270 of SEQ ID NO: 913982
uggauuggaugaguuaacu

SEQ ID NO: 968965 - RNA, 19 nt, Artificial Sequence
  Description of Artificial Sequence: Synthetic oligonucleotide
  Antisense strand to SEQ ID NO: 968964
aguuaacucauccaaucca

SEQ ID NO: 968966 - RNA, 19 nt, Artificial Sequence
  Description of Artificial Sequence: Synthetic oligonucleotide
  Sense strand starting at position 1037 of SEQ ID NO: 913982
gcccgaaagccucaagaaa

SEQ ID NO: 968967 - RNA, 19 nt, Artificial Sequence
  Description of Artificial Sequence: Synthetic oligonucleotide
  Antisense strand to SEQ ID NO: 968966
uuucuugaggcuuucgggc

SEQ ID NO: 968968 - RNA, 19 nt, Artificial Sequence
  Description of Artificial Sequence: Synthetic oligonucleotide
  Sense strand starting at position 3544 of SEQ ID NO: 913982
ggcucucucaugggaaaca

SEQ ID NO: 968969 - RNA, 19 nt, Artificial Sequence
  Description of Artificial Sequence: Synthetic oligonucleotide
  Antisense strand to SEQ ID NO: 968968
uguuucccaugagagagcc

SEQ ID NO: 968970 - RNA, 19 nt, Artificial Sequence
  Description of Artificial Sequence: Synthetic oligonucleotide
  Sense strand starting at position 1240 of SEQ ID NO: 913982
gcaucuuacuuaccaagga

SEQ ID NO: 968971 - RNA, 19 nt, Artificial Sequence
  Description of Artificial Sequence: Synthetic oligonucleotide
  Antisense strand to SEQ ID NO: 968970
uccuugguaaguaagaugc

SEQ ID NO: 968972 - RNA, 19 nt, Artificial Sequence
  Description of Artificial Sequence: Synthetic oligonucleotide
  Sense strand starting at position 3276 of SEQ ID NO: 913982
ggaugaguuaacuguauau

SEQ ID NO: 968973 - RNA, 19 nt, Artificial Sequence
  Description of Artificial Sequence: Synthetic oligonucleotide
  Antisense strand to SEQ ID NO: 968972
auauacaguuaacucaucc

SEQ ID NO: 968974 - RNA, 19 nt, Artificial Sequence
  Description of Artificial Sequence: Synthetic oligonucleotide
  Sense strand starting at position 3449 of SEQ ID NO: 913982
ggaugcugucaauagaugu

SEQ ID NO: 968975 - RNA, 19 nt, Artificial Sequence
  Description of Artificial Sequence: Synthetic oligonucleotide
  Antisense strand to SEQ ID NO: 968974
acaucuauugacagcaucc

SEQ ID NO: 968976 - RNA, 19 nt, Artificial Sequence
  Description of Artificial Sequence: Synthetic oligonucleotide
  Sense strand starting at position 3263 of SEQ ID NO: 913982
guugcaauggauuggauga

SEQ ID NO: 968977 - RNA, 19 nt, Artificial Sequence
  Description of Artificial Sequence: Synthetic oligonucleotide
  Antisense strand to SEQ ID NO: 968976
ucauccaauccauugcaac

SEQ ID NO: 968978 - RNA, 19 nt, Artificial Sequence
  Description of Artificial Sequence: Synthetic oligonucleotide
  Sense strand starting at position 145 of SEQ ID NO: 913982
auacuuuccgggcaaucau

SEQ ID NO: 968979 - RNA, 19 nt, Artificial Sequence
  Description of Artificial Sequence: Synthetic oligonucleotide
  Antisense strand to SEQ ID NO: 968978
augauugcccggaaaguau

SEQ ID NO: 968980 - RNA, 19 nt, Artificial Sequence
  Description of Artificial Sequence: Synthetic oligonucleotide
  Sense strand starting at position 3744 of SEQ ID NO: 913982
cuuaacuaggaguguuuaa

SEQ ID NO: 968981 - RNA, 19 nt, Artificial Sequence
  Description of Artificial Sequence: Synthetic oligonucleotide
  Antisense strand to SEQ ID NO: 968980
uuaaacacuccuaguuaag

SEQ ID NO: 968982 - RNA, 19 nt, Artificial Sequence
  Description of Artificial Sequence: Synthetic oligonucleotide
  Sense strand starting at position 1138 of SEQ ID NO: 913982
uaaguuucccaagggcaga

SEQ ID NO: 968983 - RNA, 19 nt, Artificial Sequence
  Description of Artificial Sequence: Synthetic oligonucleotide
  Antisense strand to SEQ ID NO: 968982
ucugcccuugggaaacuua

SEQ ID NO: 968984 - RNA, 19 nt, Artificial Sequence
  Description of Artificial Sequence: Synthetic oligonucleotide
  Sense strand starting at position 3337 of SEQ ID NO: 913982
uguuuaaguguuuacugaa

SEQ ID NO: 968985 - RNA, 19 nt, Artificial Sequence
  Description of Artificial Sequence: Synthetic oligonucleotide
  Antisense strand to SEQ ID NO: 968984
uucaguaaacacuuaaaca

SEQ ID NO: 968986 - RNA, 19 nt, Artificial Sequence
  Description of Artificial Sequence: Synthetic oligonucleotide
  Sense strand starting at position 1149 of SEQ ID NO: 913982
agggcagauaggugauguu

SEQ ID NO: 968987 - RNA, 19 nt, Artificial Sequence
  Description of Artificial Sequence: Synthetic oligonucleotide
  Antisense strand to SEQ ID NO: 968986
aacaucaccuaucugcccu

SEQ ID NO: 968988 - RNA, 19 nt, Artificial Sequence
  Description of Artificial Sequence: Synthetic oligonucleotide
  Sense strand starting at position 953 of SEQ ID NO: 913982
ggaagaagcuuugcucuca

SEQ ID NO: 968989 - RNA, 19 nt, Artificial Sequence
  Description of Artificial Sequence: Synthetic oligonucleotide
  Antisense strand to SEQ ID NO: 968988
ugagagcaaagcuucuucc

SEQ ID NO: 968990 - RNA, 19 nt, Artificial Sequence
  Description of Artificial Sequence: Synthetic oligonucleotide
  Sense strand starting at position 3751 of SEQ ID NO: 913982
aggaguguuuaaguucuau

SEQ ID NO: 968991 - RNA, 19 nt, Artificial Sequence
  Description of Artificial Sequence: Synthetic oligonucleotide
  Antisense strand to SEQ ID NO: 968990
auagaacuuaaacacuccu

SEQ ID NO: 968992 - RNA, 19 nt, Artificial Sequence
  Description of Artificial Sequence: Synthetic oligonucleotide
  Sense strand starting at position 2911 of SEQ ID NO: 913982
gggcgaaagcgagaguuua

SEQ ID NO: 968993 - RNA, 19 nt, Artificial Sequence
  Description of Artificial Sequence: Synthetic oligonucleotide
  Antisense strand to SEQ ID NO: 968992
uaaacucucgcuuucgccc

SEQ ID NO: 968994 - RNA, 19 nt, Artificial Sequence
  Description of Artificial Sequence: Synthetic oligonucleotide
  Sense strand starting at position 3188 of SEQ ID NO: 913982
augagcaguuuaucuccua

SEQ ID NO: 968995 - RNA, 19 nt, Artificial Sequence
  Description of Artificial Sequence: Synthetic oligonucleotide
  Antisense strand to SEQ ID NO: 968994
uaggagauaaacugcucau

SEQ ID NO: 968996 - RNA, 19 nt, Artificial Sequence
  Description of Artificial Sequence: Synthetic oligonucleotide
  Sense strand starting at position 3796 of SEQ ID NO: 913982
ccggauauauaccugcuua

SEQ ID NO: 968997 - RNA, 19 nt, Artificial Sequence
  Description of Artificial Sequence: Synthetic oligonucleotide
  Antisense strand to SEQ ID NO: 968996
uaagcagguauauauccgg

SEQ ID NO: 968998 - RNA, 19 nt, Artificial Sequence
  Description of Artificial Sequence: Synthetic oligonucleotide
  Sense strand starting at position 3252 of SEQ ID NO: 913982
cuuauaaggugguugcaau

SEQ ID NO: 968999 - RNA, 19 nt, Artificial Sequence
  Description of Artificial Sequence: Synthetic oligonucleotide
  Antisense strand to SEQ ID NO: 968998
auugcaaccaccuuauaag

SEQ ID NO: 969000 - RNA, 19 nt, Artificial Sequence
  Description of Artificial Sequence: Synthetic oligonucleotide
  Sense strand starting at position 3336 of SEQ ID NO: 913982
uuguuuaaguguuuacuga

SEQ ID NO: 969001 - RNA, 19 nt, Artificial Sequence
  Description of Artificial Sequence: Synthetic oligonucleotide
  Antisense strand to SEQ ID NO: 969000
ucaguaaacacuuaaacaa

SEQ ID NO: 969002 - RNA, 19 nt, Artificial Sequence
  Description of Artificial Sequence: Synthetic oligonucleotide
  Sense strand starting at position 3325 of SEQ ID NO: 913982
aguacauggcuuuguuuaa

SEQ ID NO: 969003 - RNA, 19 nt, Artificial Sequence
  Description of Artificial Sequence: Synthetic oligonucleotide
  Antisense strand to SEQ ID NO: 969002
uuaaacaaagccauguacu

SEQ ID NO: 969004 - RNA, 19 nt, Artificial Sequence
  Description of Artificial Sequence: Synthetic oligonucleotide
  Sense strand starting at position 237 of SEQ ID NO: 913982
aauugauuauccuagggag

SEQ ID NO: 969005 - RNA, 19 nt, Artificial Sequence
  Description of Artificial Sequence: Synthetic oligonucleotide
  Antisense strand to SEQ ID NO: 969004
cucccuaggauaaucaauu

SEQ ID NO: 969006 - RNA, 19 nt, Artificial Sequence
  Description of Artificial Sequence: Synthetic oligonucleotide
  Sense strand starting at position 1108 of SEQ ID NO: 913982
agccuaaguuuagccgaaa

SEQ ID NO: 969007 - RNA, 19 nt, Artificial Sequence
  Description of Artificial Sequence: Synthetic oligonucleotide
  Antisense strand to SEQ ID NO: 969006
uuucggcuaaacuuaggcu

SEQ ID NO: 969008 - RNA, 19 nt, Artificial Sequence
  Description of Artificial Sequence: Synthetic oligonucleotide
  Sense strand starting at position 3391 of SEQ ID NO: 913982
aaaugugcauguguucuaa

SEQ ID NO: 969009 - RNA, 19 nt, Artificial Sequence
  Description of Artificial Sequence: Synthetic oligonucleotide
  Antisense strand to SEQ ID NO: 969008
uuagaacacaugcacauuu

SEQ ID NO: 969010 - RNA, 19 nt, Artificial Sequence
  Description of Artificial Sequence: Synthetic oligonucleotide
  Sense strand starting at position 1 of SEQ ID NO: 913982
uugugacugucuucuaagu

SEQ ID NO: 969011 - RNA, 19 nt, Artificial Sequence
  Description of Artificial Sequence: Synthetic oligonucleotide
  Antisense strand to SEQ ID NO: 969010
acuuagaagacagucacaa

SEQ ID NO: 969012 - RNA, 19 nt, Artificial Sequence
  Description of Artificial Sequence: Synthetic oligonucleotide
  Sense strand starting at position 3388 of SEQ ID NO: 913982
aauaaaugugcauguguuc

SEQ ID NO: 969013 - RNA, 19 nt, Artificial Sequence
  Description of Artificial Sequence: Synthetic oligonucleotide
  Antisense strand to SEQ ID NO: 969012
gaacacaugcacauuuauu

SEQ ID NO: 969014 - RNA, 19 nt, Artificial Sequence
  Description of Artificial Sequence: Synthetic oligonucleotide
  Sense strand starting at position 3042 of SEQ ID NO: 913982
cccucucguuaguugauau

SEQ ID NO: 969015 - RNA, 19 nt, Artificial Sequence
  Description of Artificial Sequence: Synthetic oligonucleotide
  Antisense strand to SEQ ID NO: 969014
auaucaacuaacgagaggg

SEQ ID NO: 969016 - RNA, 19 nt, Artificial Sequence
  Description of Artificial Sequence: Synthetic oligonucleotide
  Sense strand starting at position 143 of SEQ ID NO: 913982
gcauacuuuccgggcaauc

SEQ ID NO: 969017 - RNA, 19 nt, Artificial Sequence
  Description of Artificial Sequence: Synthetic oligonucleotide
  Antisense strand to SEQ ID NO: 969016
gauugcccggaaaguaugc

SEQ ID NO: 969018 - RNA, 19 nt, Artificial Sequence
  Description of Artificial Sequence: Synthetic oligonucleotide
  Sense strand starting at position 240 of SEQ ID NO: 913982
ugauuauccuagggagaaa

SEQ ID NO: 969019 - RNA, 19 nt, Artificial Sequence
  Description of Artificial Sequence: Synthetic oligonucleotide
  Antisense strand to SEQ ID NO: 969018
uuucucccuaggauaauca

SEQ ID NO: 969020 - RNA, 19 nt, Artificial Sequence
  Description of Artificial Sequence: Synthetic oligonucleotide
  Sense strand starting at position 3332 of SEQ ID NO: 913982
ggcuuuguuuaaguguuua

SEQ ID NO: 969021 - RNA, 19 nt, Artificial Sequence
  Description of Artificial Sequence: Synthetic oligonucleotide
  Antisense strand to SEQ ID NO: 969020
uaaacacuuaaacaaagcc

SEQ ID NO: 969022 - RNA, 19 nt, Artificial Sequence
  Description of Artificial Sequence: Synthetic oligonucleotide
  Sense strand starting at position 3041 of SEQ ID NO: 913982
gcccucucguuaguugaua

SEQ ID NO: 969023 - RNA, 19 nt, Artificial Sequence
  Description of Artificial Sequence: Synthetic oligonucleotide
  Antisense strand to SEQ ID NO: 969022
uaucaacuaacgagagggc

SEQ ID NO: 969024 - RNA, 19 nt, Artificial Sequence
  Description of Artificial Sequence: Synthetic oligonucleotide
  Sense strand starting at position 3545 of SEQ ID NO: 913982
gcucucucaugggaaacaa

SEQ ID NO: 969025 - RNA, 19 nt, Artificial Sequence
  Description of Artificial Sequence: Synthetic oligonucleotide
  Antisense strand to SEQ ID NO: 969024
uuguuucccaugagagagc

SEQ ID NO: 969026 - RNA, 19 nt, Artificial Sequence
  Description of Artificial Sequence: Synthetic oligonucleotide
  Sense strand starting at position 3393 of SEQ ID NO: 913982
augugcauguguucuaagu

SEQ ID NO: 969027 - RNA, 19 nt, Artificial Sequence
  Description of Artificial Sequence: Synthetic oligonucleotide
  Antisense strand to SEQ ID NO: 969026
acuuagaacacaugcacau

SEQ ID NO: 969028 - RNA, 19 nt, Artificial Sequence
  Description of Artificial Sequence: Synthetic oligonucleotide
  Sense strand starting at position 1068 of SEQ ID NO: 913982
cggcguccuucucuugaua

SEQ ID NO: 969029 - RNA, 19 nt, Artificial Sequence
  Description of Artificial Sequence: Synthetic oligonucleotide
  Antisense strand to SEQ ID NO: 969028
uaucaagagaaggacgccg

SEQ ID NO: 969030 - RNA, 19 nt, Artificial Sequence
  Description of Artificial Sequence: Synthetic oligonucleotide
  Sense strand starting at position 2251 of SEQ ID NO: 913982
cucgcaauuugccagaucu

SEQ ID NO: 969031 - RNA, 19 nt, Artificial Sequence
  Description of Artificial Sequence: Synthetic oligonucleotide
  Antisense strand to SEQ ID NO: 969030
agaucuggcaaauugcgag

SEQ ID NO: 969032 - RNA, 19 nt, Artificial Sequence
  Description of Artificial Sequence: Synthetic oligonucleotide
  Sense strand starting at position 3013 of SEQ ID NO: 913982
ggaucuguuuccgcguuaa

SEQ ID NO: 969033 - RNA, 19 nt, Artificial Sequence
  Description of Artificial Sequence: Synthetic oligonucleotide
  Antisense strand to SEQ ID NO: 969032
uuaacgcggaaacagaucc

SEQ ID NO: 969034 - RNA, 19 nt, Artificial Sequence
  Description of Artificial Sequence: Synthetic oligonucleotide
  Sense strand starting at position 3446 of SEQ ID NO: 913982
uauggaugcugucaauaga

SEQ ID NO: 969035 - RNA, 19 nt, Artificial Sequence
  Description of Artificial Sequence: Synthetic oligonucleotide
  Antisense strand to SEQ ID NO: 969034
ucuauugacagcauccaua

SEQ ID NO: 969036 - RNA, 19 nt, Artificial Sequence
  Description of Artificial Sequence: Synthetic oligonucleotide
  Sense strand starting at position 15 of SEQ ID NO: 913982
uaagucgcggcuugguaaa

SEQ ID NO: 969037 - RNA, 19 nt, Artificial Sequence
  Description of Artificial Sequence: Synthetic oligonucleotide
  Antisense strand to SEQ ID NO: 969036
uuuaccaagccgcgacuua

SEQ ID NO: 969038 - RNA, 19 nt, Artificial Sequence
  Description of Artificial Sequence: Synthetic oligonucleotide
  Sense strand starting at position 2902 of SEQ ID NO: 913983
agggaaguucaaggaaguu

SEQ ID NO: 969039 - RNA, 19 nt, Artificial Sequence
  Description of Artificial Sequence: Synthetic oligonucleotide
  Antisense strand to SEQ ID NO: 969038
aacuuccuugaacuucccu

SEQ ID NO: 969040 - RNA, 19 nt, Artificial Sequence
  Description of Artificial Sequence: Synthetic oligonucleotide
  Sense strand starting at position 3764 of SEQ ID NO: 913983
acaucugcucuggaugaau

SEQ ID NO: 969041 - RNA, 19 nt, Artificial Sequence
  Description of Artificial Sequence: Synthetic oligonucleotide
  Antisense strand to SEQ ID NO: 969040
auucauccagagcagaugu

SEQ ID NO: 969042 - RNA, 19 nt, Artificial Sequence
  Description of Artificial Sequence: Synthetic oligonucleotide
  Sense strand starting at position 2886 of SEQ ID NO: 913983
agaauuaucguguacaagg

SEQ ID NO: 969043 - RNA, 19 nt, Artificial Sequence
  Description of Artificial Sequence: Synthetic oligonucleotide
  Antisense strand to SEQ ID NO: 969042
ccuuguacacgauaauucu

SEQ ID NO: 969044 - RNA, 19 nt, Artificial Sequence
  Description of Artificial Sequence: Synthetic oligonucleotide
  Sense strand starting at position 2792 of SEQ ID NO: 913983
cacugaguuguugaaauug

SEQ ID NO: 969045 - RNA, 19 nt, Artificial Sequence
  Description of Artificial Sequence: Synthetic oligonucleotide
  Antisense strand to SEQ ID NO: 969044
caauuucaacaacucagug

SEQ ID NO: 969046 - RNA, 19 nt, Artificial Sequence
  Description of Artificial Sequence: Synthetic oligonucleotide
  Sense strand starting at position 1173 of SEQ ID NO: 913983
gguucucuucucuaaggag

SEQ ID NO: 969047 - RNA, 19 nt, Artificial Sequence
  Description of Artificial Sequence: Synthetic oligonucleotide
  Antisense strand to SEQ ID NO: 969046
cuccuuagagaagagaacc

SEQ ID NO: 969048 - RNA, 19 nt, Artificial Sequence
  Description of Artificial Sequence: Synthetic oligonucleotide
  Sense strand starting at position 457 of SEQ ID NO: 913983
gauaguucuuacuugaaag

SEQ ID NO: 969049 - RNA, 19 nt, Artificial Sequence
  Description of Artificial Sequence: Synthetic oligonucleotide
  Antisense strand to SEQ ID NO: 969048
cuuucaaguaagaacuauc

SEQ ID NO: 969050 - RNA, 19 nt, Artificial Sequence
  Description of Artificial Sequence: Synthetic oligonucleotide
  Sense strand starting at position 3067 of SEQ ID NO: 913983
ccuuguucccucuaaggaa

SEQ ID NO: 969051 - RNA, 19 nt, Artificial Sequence
  Description of Artificial Sequence: Synthetic oligonucleotide
  Antisense strand to SEQ ID NO: 969050
uuccuuagagggaacaagg

SEQ ID NO: 969052 - RNA, 19 nt, Artificial Sequence
  Description of Artificial Sequence: Synthetic oligonucleotide
  Sense strand starting at position 3420 of SEQ ID NO: 913983
augguaaugcuacauugau

SEQ ID NO: 969053 - RNA, 19 nt, Artificial Sequence
  Description of Artificial Sequence: Synthetic oligonucleotide
  Antisense strand to SEQ ID NO: 969052
aucaauguagcauuaccau

SEQ ID NO: 969054 - RNA, 19 nt, Artificial Sequence
  Description of Artificial Sequence: Synthetic oligonucleotide
  Sense strand starting at position 2915 of SEQ ID NO: 913983
gaaguuuggcaagggaauu

SEQ ID NO: 969055 - RNA, 19 nt, Artificial Sequence
  Description of Artificial Sequence: Synthetic oligonucleotide
  Antisense strand to SEQ ID NO: 969054
aauucccuugccaaacuuc

SEQ ID NO: 969056 - RNA, 19 nt, Artificial Sequence
  Description of Artificial Sequence: Synthetic oligonucleotide
  Sense strand starting at position 3766 of SEQ ID NO: 913983
aucugcucuggaugaauaa

SEQ ID NO: 969057 - RNA, 19 nt, Artificial Sequence
  Description of Artificial Sequence: Synthetic oligonucleotide
  Antisense strand to SEQ ID NO: 969056
uuauucauccagagcagau

SEQ ID NO: 969058 - RNA, 19 nt, Artificial Sequence
  Description of Artificial Sequence: Synthetic oligonucleotide
  Sense strand starting at position 915 of SEQ ID NO: 913983
gcuauaggugcucaagaaa

SEQ ID NO: 969059 - RNA, 19 nt, Artificial Sequence
  Description of Artificial Sequence: Synthetic oligonucleotide
  Antisense strand to SEQ ID NO: 969058
uuucuugagcaccuauagc

SEQ ID NO: 969060 - RNA, 19 nt, Artificial Sequence
  Description of Artificial Sequence: Synthetic oligonucleotide
  Sense strand starting at position 124 of SEQ ID NO: 913983
ucaguauccuuauuacaga

SEQ ID NO: 969061 - RNA, 19 nt, Artificial Sequence
  Description of Artificial Sequence: Synthetic oligonucleotide
  Antisense strand to SEQ ID NO: 969060
ucuguaauaaggauacuga

SEQ ID NO: 969062 - RNA, 19 nt, Artificial Sequence
  Description of Artificial Sequence: Synthetic oligonucleotide
  Sense strand starting at position 3426 of SEQ ID NO: 913983
augcuacauugaucucaga

SEQ ID NO: 969063 - RNA, 19 nt, Artificial Sequence
  Description of Artificial Sequence: Synthetic oligonucleotide
  Antisense strand to SEQ ID NO: 969062
ucugagaucaauguagcau

SEQ ID NO: 969064 - RNA, 19 nt, Artificial Sequence
  Description of Artificial Sequence: Synthetic oligonucleotide
  Sense strand starting at position 444 of SEQ ID NO: 913983
uucuaaacacagugauagu

SEQ ID NO: 969065 - RNA, 19 nt, Artificial Sequence
  Description of Artificial Sequence: Synthetic oligonucleotide
  Antisense strand to SEQ ID NO: 969064
acuaucacuguguuuagaa

SEQ ID NO: 969066 - RNA, 19 nt, Artificial Sequence
  Description of Artificial Sequence: Synthetic oligonucleotide
  Sense strand starting at position 1659 of SEQ ID NO: 913983
gcuuuacuccuugaaguaa

SEQ ID NO: 969067 - RNA, 19 nt, Artificial Sequence
  Description of Artificial Sequence: Synthetic oligonucleotide
  Antisense strand to SEQ ID NO: 969066
uuacuucaaggaguaaagc

SEQ ID NO: 969068 - RNA, 19 nt, Artificial Sequence
  Description of Artificial Sequence: Synthetic oligonucleotide
  Sense strand starting at position 675 of SEQ ID NO: 913983
ucugucugccaauauauga

SEQ ID NO: 969069 - RNA, 19 nt, Artificial Sequence
  Description of Artificial Sequence: Synthetic oligonucleotide
  Antisense strand to SEQ ID NO: 969068
ucauauauuggcagacaga

SEQ ID NO: 969070 - RNA, 19 nt, Artificial Sequence
  Description of Artificial Sequence: Synthetic oligonucleotide
  Sense strand starting at position 1172 of SEQ ID NO: 913983
ggguucucuucucuaagga

SEQ ID NO: 969071 - RNA, 19 nt, Artificial Sequence
  Description of Artificial Sequence: Synthetic oligonucleotide
  Antisense strand to SEQ ID NO: 969070
uccuuagagaagagaaccc

SEQ ID NO: 969072 - RNA, 19 nt, Artificial Sequence
  Description of Artificial Sequence: Synthetic oligonucleotide
  Sense strand starting at position 2132 of SEQ ID NO: 913983
guaguugugggaugaugag

SEQ ID NO: 969073 - RNA, 19 nt, Artificial Sequence
  Description of Artificial Sequence: Synthetic oligonucleotide
  Antisense strand to SEQ ID NO: 969072
cucaucaucccacaacuac

SEQ ID NO: 969074 - RNA, 19 nt, Artificial Sequence
  Description of Artificial Sequence: Synthetic oligonucleotide
  Sense strand starting at position 3281 of SEQ ID NO: 913983
gcauaauggcugcaauaau

SEQ ID NO: 969075 - RNA, 19 nt, Artificial Sequence
  Description of Artificial Sequence: Synthetic oligonucleotide
  Antisense strand to SEQ ID NO: 969074
auuauugcagccauuaugc

SEQ ID NO: 969076 - RNA, 19 nt, Artificial Sequence
  Description of Artificial Sequence: Synthetic oligonucleotide
  Sense strand starting at position 1276 of SEQ ID NO: 913983
uggguuggaugguuuacua

SEQ ID NO: 969077 - RNA, 19 nt, Artificial Sequence
  Description of Artificial Sequence: Synthetic oligonucleotide
  Antisense strand to SEQ ID NO: 969076
uaguaaaccauccaaccca

SEQ ID NO: 969078 - RNA, 19 nt, Artificial Sequence
  Description of Artificial Sequence: Synthetic oligonucleotide
  Sense strand starting at position 3444 of SEQ ID NO: 913983
agucauauccuaugacagu

SEQ ID NO: 969079 - RNA, 19 nt, Artificial Sequence
  Description of Artificial Sequence: Synthetic oligonucleotide
  Antisense strand to SEQ ID NO: 969078
acugucauaggauaugacu

SEQ ID NO: 969080 - RNA, 19 nt, Artificial Sequence
  Description of Artificial Sequence: Synthetic oligonucleotide
  Sense strand starting at position 2129 of SEQ ID NO: 913983
auaguaguugugggaugau

SEQ ID NO: 969081 - RNA, 19 nt, Artificial Sequence
  Description of Artificial Sequence: Synthetic oligonucleotide
  Antisense strand to SEQ ID NO: 969080
aucaucccacaacuacuau

SEQ ID NO: 969082 - RNA, 19 nt, Artificial Sequence
  Description of Artificial Sequence: Synthetic oligonucleotide
  Sense strand starting at position 900 of SEQ ID NO: 913983
agauaucuuccuugggcua

SEQ ID NO: 969083 - RNA, 19 nt, Artificial Sequence
  Description of Artificial Sequence: Synthetic oligonucleotide
  Antisense strand to SEQ ID NO: 969082
uagcccaaggaagauaucu

SEQ ID NO: 969084 - RNA, 19 nt, Artificial Sequence
  Description of Artificial Sequence: Synthetic oligonucleotide
  Sense strand starting at position 3762 of SEQ ID NO: 913983
uuacaucugcucuggauga

SEQ ID NO: 969085 - RNA, 19 nt, Artificial Sequence
  Description of Artificial Sequence: Synthetic oligonucleotide
  Antisense strand to SEQ ID NO: 969084
ucauccagagcagauguaa

SEQ ID NO: 969086 - RNA, 19 nt, Artificial Sequence
  Description of Artificial Sequence: Synthetic oligonucleotide
  Sense strand starting at position 2158 of SEQ ID NO: 913983
guagauaugugauuaugua

SEQ ID NO: 969087 - RNA, 19 nt, Artificial Sequence
  Description of Artificial Sequence: Synthetic oligonucleotide
  Antisense strand to SEQ ID NO: 969086
uacauaaucacauaucuac

SEQ ID NO: 969088 - RNA, 19 nt, Artificial Sequence
  Description of Artificial Sequence: Synthetic oligonucleotide
  Sense strand starting at position 1842 of SEQ ID NO: 913983
caugauugagucuggcuaa

SEQ ID NO: 969089 - RNA, 19 nt, Artificial Sequence
  Description of Artificial Sequence: Synthetic oligonucleotide
  Antisense strand to SEQ ID NO: 969088
uuagccagacucaaucaug

SEQ ID NO: 969090 - RNA, 19 nt, Artificial Sequence
  Description of Artificial Sequence: Synthetic oligonucleotide
  Sense strand starting at position 3820 of SEQ ID NO: 913983
uggguugugaaauguuaua

SEQ ID NO: 969091 - RNA, 19 nt, Artificial Sequence
  Description of Artificial Sequence: Synthetic oligonucleotide
  Antisense strand to SEQ ID NO: 969090
uauaacauuucacaaccca

SEQ ID NO: 969092 - RNA, 19 nt, Artificial Sequence
  Description of Artificial Sequence: Synthetic oligonucleotide
  Sense strand starting at position 899 of SEQ ID NO: 913983
cagauaucuuccuugggcu

SEQ ID NO: 969093 - RNA, 19 nt, Artificial Sequence
  Description of Artificial Sequence: Synthetic oligonucleotide
  Antisense strand to SEQ ID NO: 969092
agcccaaggaagauaucug

SEQ ID NO: 969094 - RNA, 19 nt, Artificial Sequence
  Description of Artificial Sequence: Synthetic oligonucleotide
  Sense strand starting at position 453 of SEQ ID NO: 913983
cagugauaguucuuacuug

SEQ ID NO: 969095 - RNA, 19 nt, Artificial Sequence
  Description of Artificial Sequence: Synthetic oligonucleotide
  Antisense strand to SEQ ID NO: 969094
caaguaagaacuaucacug

SEQ ID NO: 969096 - RNA, 19 nt, Artificial Sequence
  Description of Artificial Sequence: Synthetic oligonucleotide
  Sense strand starting at position 901 of SEQ ID NO: 913983
gauaucuuccuugggcuau

SEQ ID NO: 969097 - RNA, 19 nt, Artificial Sequence
  Description of Artificial Sequence: Synthetic oligonucleotide
  Antisense strand to SEQ ID NO: 969096
auagcccaaggaagauauc

SEQ ID NO: 969098 - RNA, 19 nt, Artificial Sequence
  Description of Artificial Sequence: Synthetic oligonucleotide
  Sense strand starting at position 914 of SEQ ID NO: 913983
ggcuauaggugcucaagaa

SEQ ID NO: 969099 - RNA, 19 nt, Artificial Sequence
  Description of Artificial Sequence: Synthetic oligonucleotide
  Antisense strand to SEQ ID NO: 969098
uucuugagcaccuauagcc

SEQ ID NO: 969100 - RNA, 19 nt, Artificial Sequence
  Description of Artificial Sequence: Synthetic oligonucleotide
  Sense strand starting at position 2797 of SEQ ID NO: 913983
aguuguugaaauugucaca

SEQ ID NO: 969101 - RNA, 19 nt, Artificial Sequence
  Description of Artificial Sequence: Synthetic oligonucleotide
  Antisense strand to SEQ ID NO: 969100
ugugacaauuucaacaacu

SEQ ID NO: 969102 - RNA, 19 nt, Artificial Sequence
  Description of Artificial Sequence: Synthetic oligonucleotide
  Sense strand starting at position 3865 of SEQ ID NO: 913983
auguacuaucuagaagcgu

SEQ ID NO: 969103 - RNA, 19 nt, Artificial Sequence
  Description of Artificial Sequence: Synthetic oligonucleotide
  Antisense strand to SEQ ID NO: 969102
acgcuucuagauaguacau

SEQ ID NO: 969104 - RNA, 19 nt, Artificial Sequence
  Description of Artificial Sequence: Synthetic oligonucleotide
  Sense strand starting at position 41 of SEQ ID NO: 913983
aguaauaccuaagcucagu

SEQ ID NO: 969105 - RNA, 19 nt, Artificial Sequence
  Description of Artificial Sequence: Synthetic oligonucleotide
  Antisense strand to SEQ ID NO: 969104
acugagcuuagguauuacu

SEQ ID NO: 969106 - RNA, 19 nt, Artificial Sequence
  Description of Artificial Sequence: Synthetic oligonucleotide
  Sense strand starting at position 3453 of SEQ ID NO: 913983
cuaugacagucauuguuuc

SEQ ID NO: 969107 - RNA, 19 nt, Artificial Sequence
  Description of Artificial Sequence: Synthetic oligonucleotide
  Antisense strand to SEQ ID NO: 969106
gaaacaaugacugucauag

SEQ ID NO: 969108 - RNA, 19 nt, Artificial Sequence
  Description of Artificial Sequence: Synthetic oligonucleotide
  Sense strand starting at position 3396 of SEQ ID NO: 913983
cuugcaucucucuaguauu

SEQ ID NO: 969109 - RNA, 19 nt, Artificial Sequence
  Description of Artificial Sequence: Synthetic oligonucleotide
  Antisense strand to SEQ ID NO: 969108
aauacuagagagaugcaag

SEQ ID NO: 969110 - RNA, 19 nt, Artificial Sequence
  Description of Artificial Sequence: Synthetic oligonucleotide
  Sense strand starting at position 2125 of SEQ ID NO: 913983
uuccauaguaguuguggga

SEQ ID NO: 969111 - RNA, 19 nt, Artificial Sequence
  Description of Artificial Sequence: Synthetic oligonucleotide
  Antisense strand to SEQ ID NO: 969110
ucccacaacuacuauggaa

SEQ ID NO: 969112 - RNA, 19 nt, Artificial Sequence
  Description of Artificial Sequence: Synthetic oligonucleotide
  Sense strand starting at position 807 of SEQ ID NO: 913983
guucuuguuccucaauucu

SEQ ID NO: 969113 - RNA, 19 nt, Artificial Sequence
  Description of Artificial Sequence: Synthetic oligonucleotide
  Antisense strand to SEQ ID NO: 969112
agaauugaggaacaagaac

SEQ ID NO: 969114 - RNA, 19 nt, Artificial Sequence
  Description of Artificial Sequence: Synthetic oligonucleotide
  Sense strand starting at position 1453 of SEQ ID NO: 913983
ugaugucaggguugcuaga

SEQ ID NO: 969115 - RNA, 19 nt, Artificial Sequence
  Description of Artificial Sequence: Synthetic oligonucleotide
  Antisense strand to SEQ ID NO: 969114
ucuagcaacccugacauca

SEQ ID NO: 969116 - RNA, 19 nt, Artificial Sequence
  Description of Artificial Sequence: Synthetic oligonucleotide
  Sense strand starting at position 2610 of SEQ ID NO: 913983
ugacucaacuuggaagaaa

SEQ ID NO: 969117 - RNA, 19 nt, Artificial Sequence
  Description of Artificial Sequence: Synthetic oligonucleotide
  Antisense strand to SEQ ID NO: 969116
uuucuuccaaguugaguca

SEQ ID NO: 969118 - RNA, 19 nt, Artificial Sequence
  Description of Artificial Sequence: Synthetic oligonucleotide
  Sense strand starting at position 98 of SEQ ID NO: 913984
cucucagggaugugggaaa

SEQ ID NO: 969119 - RNA, 19 nt, Artificial Sequence
  Description of Artificial Sequence: Synthetic oligonucleotide
  Antisense strand to SEQ ID NO: 969118
uuucccacaucccugagag

SEQ ID NO: 969120 - RNA, 19 nt, Artificial Sequence
  Description of Artificial Sequence: Synthetic oligonucleotide
  Sense strand starting at position 574 of SEQ ID NO: 913984
cgcagaagugcuucauguu

SEQ ID NO: 969121 - RNA, 19 nt, Artificial Sequence
  Description of Artificial Sequence: Synthetic oligonucleotide
  Antisense strand to SEQ ID NO: 969120
aacaugaagcacuucugcg

SEQ ID NO: 969122 - RNA, 19 nt, Artificial Sequence
  Description of Artificial Sequence: Synthetic oligonucleotide
  Sense strand starting at position 2219 of SEQ ID NO: 913984
gagugaagucaccaaccuu

SEQ ID NO: 969123 - RNA, 19 nt, Artificial Sequence
  Description of Artificial Sequence: Synthetic oligonucleotide
  Antisense strand to SEQ ID NO: 969122
aagguuggugacuucacuc

SEQ ID NO: 969124 - RNA, 19 nt, Artificial Sequence
  Description of Artificial Sequence: Synthetic oligonucleotide
  Sense strand starting at position 3200 of SEQ ID NO: 913984
uacagaguuguugaauauu

SEQ ID NO: 969125 - RNA, 19 nt, Artificial Sequence
  Description of Artificial Sequence: Synthetic oligonucleotide
  Antisense strand to SEQ ID NO: 969124
aauauucaacaacucugua

SEQ ID NO: 969126 - RNA, 19 nt, Artificial Sequence
  Description of Artificial Sequence: Synthetic oligonucleotide
  Sense strand starting at position 3506 of SEQ ID NO: 913984
aucugagcuagacauggua

SEQ ID NO: 969127 - RNA, 19 nt, Artificial Sequence
  Description of Artificial Sequence: Synthetic oligonucleotide
  Antisense strand to SEQ ID NO: 969126
uaccaugucuagcucagau

SEQ ID NO: 969128 - RNA, 19 nt, Artificial Sequence
  Description of Artificial Sequence: Synthetic oligonucleotide
  Sense strand starting at position 1625 of SEQ ID NO: 913984
agaaacaggucucccuuaa

SEQ ID NO: 969129 - RNA, 19 nt, Artificial Sequence
  Description of Artificial Sequence: Synthetic oligonucleotide
  Antisense strand to SEQ ID NO: 969128
uuaagggagaccuguuucu

SEQ ID NO: 969130 - RNA, 19 nt, Artificial Sequence
  Description of Artificial Sequence: Synthetic oligonucleotide
  Sense strand starting at position 1510 of SEQ ID NO: 913984
gaucaugggcauugauaag

SEQ ID NO: 969131 - RNA, 19 nt, Artificial Sequence
  Description of Artificial Sequence: Synthetic oligonucleotide
  Antisense strand to SEQ ID NO: 969130
cuuaucaaugcccaugauc

SEQ ID NO: 969132 - RNA, 19 nt, Artificial Sequence
  Description of Artificial Sequence: Synthetic oligonucleotide
  Sense strand starting at position 1044 of SEQ ID NO: 913984
gaggucucacuugaaaguu

SEQ ID NO: 969133 - RNA, 19 nt, Artificial Sequence
  Description of Artificial Sequence: Synthetic oligonucleotide
  Antisense strand to SEQ ID NO: 969132
aacuuucaagugagaccuc

SEQ ID NO: 969134 - RNA, 19 nt, Artificial Sequence
  Description of Artificial Sequence: Synthetic oligonucleotide
  Sense strand starting at position 368 of SEQ ID NO: 913984
uaaagugaugcagagaugu

SEQ ID NO: 969135 - RNA, 19 nt, Artificial Sequence
  Description of Artificial Sequence: Synthetic oligonucleotide
  Antisense strand to SEQ ID NO: 969134
acaucucugcaucacuuua

SEQ ID NO: 969136 - RNA, 19 nt, Artificial Sequence
  Description of Artificial Sequence: Synthetic oligonucleotide
  Sense strand starting at position 370 of SEQ ID NO: 913984
aagugaugcagagauguua

SEQ ID NO: 969137 - RNA, 19 nt, Artificial Sequence
  Description of Artificial Sequence: Synthetic oligonucleotide
  Antisense strand to SEQ ID NO: 969136
uaacaucucugcaucacuu

SEQ ID NO: 969138 - RNA, 19 nt, Artificial Sequence
  Description of Artificial Sequence: Synthetic oligonucleotide
  Sense strand starting at position 3396 of SEQ ID NO: 913984
ugggaagguggucagaguu

SEQ ID NO: 969139 - RNA, 19 nt, Artificial Sequence
  Description of Artificial Sequence: Synthetic oligonucleotide
  Antisense strand to SEQ ID NO: 969138
aacucugaccaccuuccca

SEQ ID NO: 969140 - RNA, 19 nt, Artificial Sequence
  Description of Artificial Sequence: Synthetic oligonucleotide
  Sense strand starting at position 3648 of SEQ ID NO: 913984
accacagaggcaugaguaa

SEQ ID NO: 969141 - RNA, 19 nt, Artificial Sequence
  Description of Artificial Sequence: Synthetic oligonucleotide
  Antisense strand to SEQ ID NO: 969140
uuacucaugccucuguggu

SEQ ID NO: 969142 - RNA, 19 nt, Artificial Sequence
  Description of Artificial Sequence: Synthetic oligonucleotide
  Sense strand starting at position 721 of SEQ ID NO: 913984
aucucuccaggugaguaau

SEQ ID NO: 969143 - RNA, 19 nt, Artificial Sequence
  Description of Artificial Sequence: Synthetic oligonucleotide
  Antisense strand to SEQ ID NO: 969142
auuacucaccuggagagau

SEQ ID NO: 969144 - RNA, 19 nt, Artificial Sequence
  Description of Artificial Sequence: Synthetic oligonucleotide
  Sense strand starting at position 3254 of SEQ ID NO: 913984
ggaugucaaccauguagaa

SEQ ID NO: 969145 - RNA, 19 nt, Artificial Sequence
  Description of Artificial Sequence: Synthetic oligonucleotide
  Antisense strand to SEQ ID NO: 969144
uucuacaugguugacaucc

SEQ ID NO: 969146 - RNA, 19 nt, Artificial Sequence
  Description of Artificial Sequence: Synthetic oligonucleotide
  Sense strand starting at position 639 of SEQ ID NO: 913984
gcgccaaugccucuacuuu

SEQ ID NO: 969147 - RNA, 19 nt, Artificial Sequence
  Description of Artificial Sequence: Synthetic oligonucleotide
  Antisense strand to SEQ ID NO: 969146
aaaguagaggcauuggcgc

SEQ ID NO: 969148 - RNA, 19 nt, Artificial Sequence
  Description of Artificial Sequence: Synthetic oligonucleotide
  Sense strand starting at position 62 of SEQ ID NO: 913984
gggaucaauuaagugguca

SEQ ID NO: 969149 - RNA, 19 nt, Artificial Sequence
  Description of Artificial Sequence: Synthetic oligonucleotide
  Antisense strand to SEQ ID NO: 969148
ugaccacuuaauugauccc

SEQ ID NO: 969150 - RNA, 19 nt, Artificial Sequence
  Description of Artificial Sequence: Synthetic oligonucleotide
  Sense strand starting at position 336 of SEQ ID NO: 913984
guuaccuaauauguaaaga

SEQ ID NO: 969151 - RNA, 19 nt, Artificial Sequence
  Description of Artificial Sequence: Synthetic oligonucleotide
  Antisense strand to SEQ ID NO: 969150
ucuuuacauauuagguaac

SEQ ID NO: 969152 - RNA, 19 nt, Artificial Sequence
  Description of Artificial Sequence: Synthetic oligonucleotide
  Sense strand starting at position 1221 of SEQ ID NO: 913984
guugaaucugcucaaggau

SEQ ID NO: 969153 - RNA, 19 nt, Artificial Sequence
  Description of Artificial Sequence: Synthetic oligonucleotide
  Antisense strand to SEQ ID NO: 969152
auccuugagcagauucaac

SEQ ID NO: 969154 - RNA, 19 nt, Artificial Sequence
  Description of Artificial Sequence: Synthetic oligonucleotide
  Sense strand starting at position 3747 of SEQ ID NO: 913984
cacugaauuggugauuguu

SEQ ID NO: 969155 - RNA, 19 nt, Artificial Sequence
  Description of Artificial Sequence: Synthetic oligonucleotide
  Antisense strand to SEQ ID NO: 969154
aacaaucaccaauucagug

SEQ ID NO: 969156 - RNA, 19 nt, Artificial Sequence
  Description of Artificial Sequence: Synthetic oligonucleotide
  Sense strand starting at position 1507 of SEQ ID NO: 913984
ugugaucaugggcauugau

SEQ ID NO: 969157 - RNA, 19 nt, Artificial Sequence
  Description of Artificial Sequence: Synthetic oligonucleotide
  Antisense strand to SEQ ID NO: 969156
aucaaugcccaugaucaca

SEQ ID NO: 969158 - RNA, 19 nt, Artificial Sequence
  Description of Artificial Sequence: Synthetic oligonucleotide
  Sense strand starting at position 2174 of SEQ ID NO: 913984
uucccacaagucuggaaau

SEQ ID NO: 969159 - RNA, 19 nt, Artificial Sequence
  Description of Artificial Sequence: Synthetic oligonucleotide
  Antisense strand to SEQ ID NO: 969158
auuuccagacuugugggaa

SEQ ID NO: 969160 - RNA, 19 nt, Artificial Sequence
  Description of Artificial Sequence: Synthetic oligonucleotide
  Sense strand starting at position 1557 of SEQ ID NO: 913984
augcuuuaccuagaaaugu

SEQ ID NO: 969161 - RNA, 19 nt, Artificial Sequence
  Description of Artificial Sequence: Synthetic oligonucleotide
  Antisense strand to SEQ ID NO: 969160
acauuucuagguaaagcau

SEQ ID NO: 969162 - RNA, 19 nt, Artificial Sequence
  Description of Artificial Sequence: Synthetic oligonucleotide
  Sense strand starting at position 2196 of SEQ ID NO: 913984
acagaaugcuugguuaaag

SEQ ID NO: 969163 - RNA, 19 nt, Artificial Sequence
  Description of Artificial Sequence: Synthetic oligonucleotide
  Antisense strand to SEQ ID NO: 969162
cuuuaaccaagcauucugu

SEQ ID NO: 969164 - RNA, 19 nt, Artificial Sequence
  Description of Artificial Sequence: Synthetic oligonucleotide
  Sense strand starting at position 1516 of SEQ ID NO: 913984
gggcauugauaagucaaua

SEQ ID NO: 969165 - RNA, 19 nt, Artificial Sequence
  Description of Artificial Sequence: Synthetic oligonucleotide
  Antisense strand to SEQ ID NO: 969164
uauugacuuaucaaugccc

SEQ ID NO: 969166 - RNA, 19 nt, Artificial Sequence
  Description of Artificial Sequence: Synthetic oligonucleotide
  Sense strand starting at position 2395 of SEQ ID NO: 913984
cugcaauuaguugaaagua

SEQ ID NO: 969167 - RNA, 19 nt, Artificial Sequence
  Description of Artificial Sequence: Synthetic oligonucleotide
  Antisense strand to SEQ ID NO: 969166
uacuuucaacuaauugcag

SEQ ID NO: 969168 - RNA, 19 nt, Artificial Sequence
  Description of Artificial Sequence: Synthetic oligonucleotide
  Sense strand starting at position 67 of SEQ ID NO: 913984
caauuaaguggucacagca

SEQ ID NO: 969169 - RNA, 19 nt, Artificial Sequence
  Description of Artificial Sequence: Synthetic oligonucleotide
  Antisense strand to SEQ ID NO: 969168
ugcugugaccacuuaauug

SEQ ID NO: 969170 - RNA, 19 nt, Artificial Sequence
  Description of Artificial Sequence: Synthetic oligonucleotide
  Sense strand starting at position 2760 of SEQ ID NO: 913984
auucuuggacccuguaaag

SEQ ID NO: 969171 - RNA, 19 nt, Artificial Sequence
  Description of Artificial Sequence: Synthetic oligonucleotide
  Antisense strand to SEQ ID NO: 969170
cuuuacaggguccaagaau

SEQ ID NO: 969172 - RNA, 19 nt, Artificial Sequence
  Description of Artificial Sequence: Synthetic oligonucleotide
  Sense strand starting at position 2195 of SEQ ID NO: 913984
gacagaaugcuugguuaaa

SEQ ID NO: 969173 - RNA, 19 nt, Artificial Sequence
  Description of Artificial Sequence: Synthetic oligonucleotide
  Antisense strand to SEQ ID NO: 969172
uuuaaccaagcauucuguc

SEQ ID NO: 969174 - RNA, 19 nt, Artificial Sequence
  Description of Artificial Sequence: Synthetic oligonucleotide
  Sense strand starting at position 1043 of SEQ ID NO: 913984
agaggucucacuugaaagu

SEQ ID NO: 969175 - RNA, 19 nt, Artificial Sequence
  Description of Artificial Sequence: Synthetic oligonucleotide
  Antisense strand to SEQ ID NO: 969174
acuuucaagugagaccucu

SEQ ID NO: 969176 - RNA, 19 nt, Artificial Sequence
  Description of Artificial Sequence: Synthetic oligonucleotide
  Sense strand starting at position 1425 of SEQ ID NO: 913984
ggagccuuuguuuagaacu

SEQ ID NO: 969177 - RNA, 19 nt, Artificial Sequence
  Description of Artificial Sequence: Synthetic oligonucleotide
  Antisense strand to SEQ ID NO: 969176
aguucuaaacaaaggcucc

SEQ ID NO: 969178 - RNA, 19 nt, Artificial Sequence
  Description of Artificial Sequence: Synthetic oligonucleotide
  Sense strand starting at position 3509 of SEQ ID NO: 913984
ugagcuagacaugguauga

SEQ ID NO: 969179 - RNA, 19 nt, Artificial Sequence
  Description of Artificial Sequence: Synthetic oligonucleotide
  Antisense strand to SEQ ID NO: 969178
ucauaccaugucuagcuca

SEQ ID NO: 969180 - RNA, 19 nt, Artificial Sequence
  Description of Artificial Sequence: Synthetic oligonucleotide
  Sense strand starting at position 2744 of SEQ ID NO: 913984
ugcacaccugcagauaauu

SEQ ID NO: 969181 - RNA, 19 nt, Artificial Sequence
  Description of Artificial Sequence: Synthetic oligonucleotide
  Antisense strand to SEQ ID NO: 969180
aauuaucugcaggugugca

SEQ ID NO: 969182 - RNA, 19 nt, Artificial Sequence
  Description of Artificial Sequence: Synthetic oligonucleotide
  Sense strand starting at position 269 of SEQ ID NO: 913984
agauguagugcggaaacau

SEQ ID NO: 969183 - RNA, 19 nt, Artificial Sequence
  Description of Artificial Sequence: Synthetic oligonucleotide
  Antisense strand to SEQ ID NO: 969182
auguuuccgcacuacaucu

SEQ ID NO: 969184 - RNA, 19 nt, Artificial Sequence
  Description of Artificial Sequence: Synthetic oligonucleotide
  Sense strand starting at position 3500 of SEQ ID NO: 913984
ucuugaaucugagcuagac

SEQ ID NO: 969185 - RNA, 19 nt, Artificial Sequence
  Description of Artificial Sequence: Synthetic oligonucleotide
  Antisense strand to SEQ ID NO: 969184
gucuagcucagauucaaga

SEQ ID NO: 969186 - RNA, 19 nt, Artificial Sequence
  Description of Artificial Sequence: Synthetic oligonucleotide
  Sense strand starting at position 2193 of SEQ ID NO: 913984
augacagaaugcuugguua

SEQ ID NO: 969187 - RNA, 19 nt, Artificial Sequence
  Description of Artificial Sequence: Synthetic oligonucleotide
  Antisense strand to SEQ ID NO: 969186
uaaccaagcauucugucau

SEQ ID NO: 969188 - RNA, 19 nt, Artificial Sequence
  Description of Artificial Sequence: Synthetic oligonucleotide
  Sense strand starting at position 1749 of SEQ ID NO: 913984
cugagagcuuaaguuuaag

SEQ ID NO: 969189 - RNA, 19 nt, Artificial Sequence
  Description of Artificial Sequence: Synthetic oligonucleotide
  Antisense strand to SEQ ID NO: 969188
cuuaaacuuaagcucucag

SEQ ID NO: 969190 - RNA, 19 nt, Artificial Sequence
  Description of Artificial Sequence: Synthetic oligonucleotide
  Sense strand starting at position 1988 of SEQ ID NO: 913984
ucuaauguuccagauguuc

SEQ ID NO: 969191 - RNA, 19 nt, Artificial Sequence
  Description of Artificial Sequence: Synthetic oligonucleotide
  Antisense strand to SEQ ID NO: 969190
gaacaucuggaacauuaga

SEQ ID NO: 969192 - RNA, 19 nt, Artificial Sequence
  Description of Artificial Sequence: Synthetic oligonucleotide
  Sense strand starting at position 1506 of SEQ ID NO: 913984
augugaucaugggcauuga

SEQ ID NO: 969193 - RNA, 19 nt, Artificial Sequence
  Description of Artificial Sequence: Synthetic oligonucleotide
  Antisense strand to SEQ ID NO: 969192
ucaaugcccaugaucacau

SEQ ID NO: 969194 - RNA, 19 nt, Artificial Sequence
  Description of Artificial Sequence: Synthetic oligonucleotide
  Sense strand starting at position 1220 of SEQ ID NO: 913984
gguugaaucugcucaagga

SEQ ID NO: 969195 - RNA, 19 nt, Artificial Sequence
  Description of Artificial Sequence: Synthetic oligonucleotide
  Antisense strand to SEQ ID NO: 969194
uccuugagcagauucaacc

SEQ ID NO: 969196 - RNA, 19 nt, Artificial Sequence
  Description of Artificial Sequence: Synthetic oligonucleotide
  Sense strand starting at position 1535 of SEQ ID NO: 913984
uguuaacucaggcagaugu

SEQ ID NO: 969197 - RNA, 19 nt, Artificial Sequence
  Description of Artificial Sequence: Synthetic oligonucleotide
  Antisense strand to SEQ ID NO: 969196
acaucugccugaguuaaca

SEQ ID NO: 969198 - RNA, 19 nt, Artificial Sequence
  Description of Artificial Sequence: Synthetic oligonucleotide
  Sense strand starting at position 2349 of SEQ ID NO: 913985
cguccuguugcucuugaca

SEQ ID NO: 969199 - RNA, 19 nt, Artificial Sequence
  Description of Artificial Sequence: Synthetic oligonucleotide
  Antisense strand to SEQ ID NO: 969198
ugucaagagcaacaggacg

SEQ ID NO: 969200 - RNA, 19 nt, Artificial Sequence
  Description of Artificial Sequence: Synthetic oligonucleotide
  Sense strand starting at position 3905 of SEQ ID NO: 913985
cuguaugguauugauauag

SEQ ID NO: 969201 - RNA, 19 nt, Artificial Sequence
  Description of Artificial Sequence: Synthetic oligonucleotide
  Antisense strand to SEQ ID NO: 969200
cuauaucaauaccauacag

SEQ ID NO: 969202 - RNA, 19 nt, Artificial Sequence
  Description of Artificial Sequence: Synthetic oligonucleotide
  Sense strand starting at position 342 of SEQ ID NO: 913985
aagguagcugguuaaauga

SEQ ID NO: 969203 - RNA, 19 nt, Artificial Sequence
  Description of Artificial Sequence: Synthetic oligonucleotide
  Antisense strand to SEQ ID NO: 969202
ucauuuaaccagcuaccuu

SEQ ID NO: 969204 - RNA, 19 nt, Artificial Sequence
  Description of Artificial Sequence: Synthetic oligonucleotide
  Sense strand starting at position 3974 of SEQ ID NO: 913985
aucugaauucuccaguuug

SEQ ID NO: 969205 - RNA, 19 nt, Artificial Sequence
  Description of Artificial Sequence: Synthetic oligonucleotide
  Antisense strand to SEQ ID NO: 969204
caaacuggagaauucagau

SEQ ID NO: 969206 - RNA, 19 nt, Artificial Sequence
  Description of Artificial Sequence: Synthetic oligonucleotide
  Sense strand starting at position 2931 of SEQ ID NO: 913985
guaccuugaccuggagaua

SEQ ID NO: 969207 - RNA, 19 nt, Artificial Sequence
  Description of Artificial Sequence: Synthetic oligonucleotide
  Antisense strand to SEQ ID NO: 969206
uaucuccaggucaagguac

SEQ ID NO: 969208 - RNA, 19 nt, Artificial Sequence
  Description of Artificial Sequence: Synthetic oligonucleotide
  Sense strand starting at position 2236 of SEQ ID NO: 913985
uuuaguugccaagagauug

SEQ ID NO: 969209 - RNA, 19 nt, Artificial Sequence
  Description of Artificial Sequence: Synthetic oligonucleotide
  Antisense strand to SEQ ID NO: 969208
caaucucuuggcaacuaaa

SEQ ID NO: 969210 - RNA, 19 nt, Artificial Sequence
  Description of Artificial Sequence: Synthetic oligonucleotide
  Sense strand starting at position 1358 of SEQ ID NO: 913985
agagucuuugcaggaagaa

SEQ ID NO: 969211 - RNA, 19 nt, Artificial Sequence
  Description of Artificial Sequence: Synthetic oligonucleotide
  Antisense strand to SEQ ID NO: 969210
uucuuccugcaaagacucu

SEQ ID NO: 969212 - RNA, 19 nt, Artificial Sequence
  Description of Artificial Sequence: Synthetic oligonucleotide
  Sense strand starting at position 2246 of SEQ ID NO: 913985
aagagauuguguucccaaa

SEQ ID NO: 969213 - RNA, 19 nt, Artificial Sequence
  Description of Artificial Sequence: Synthetic oligonucleotide
  Antisense strand to SEQ ID NO: 969212
uuugggaacacaaucucuu

SEQ ID NO: 969214 - RNA, 19 nt, Artificial Sequence
  Description of Artificial Sequence: Synthetic oligonucleotide
  Sense strand starting at position 3916 of SEQ ID NO: 913985
ugauauaguucuguaagaa

SEQ ID NO: 969215 - RNA, 19 nt, Artificial Sequence
  Description of Artificial Sequence: Synthetic oligonucleotide
  Antisense strand to SEQ ID NO: 969214
uucuuacagaacuauauca

SEQ ID NO: 969216 - RNA, 19 nt, Artificial Sequence
  Description of Artificial Sequence: Synthetic oligonucleotide
  Sense strand starting at position 2468 of SEQ ID NO: 913985
ggcuaccuucccuauuaga

SEQ ID NO: 969217 - RNA, 19 nt, Artificial Sequence
  Description of Artificial Sequence: Synthetic oligonucleotide
  Antisense strand to SEQ ID NO: 969216
ucuaauagggaagguagcc

SEQ ID NO: 969218 - RNA, 19 nt, Artificial Sequence
  Description of Artificial Sequence: Synthetic oligonucleotide
  Sense strand starting at position 2930 of SEQ ID NO: 913985
uguaccuugaccuggagau

SEQ ID NO: 969219 - RNA, 19 nt, Artificial Sequence
  Description of Artificial Sequence: Synthetic oligonucleotide
  Antisense strand to SEQ ID NO: 969218
aucuccaggucaagguaca

SEQ ID NO: 969220 - RNA, 19 nt, Artificial Sequence
  Description of Artificial Sequence: Synthetic oligonucleotide
  Sense strand starting at position 2204 of SEQ ID NO: 913985
gggaaagagcucuguuaau

SEQ ID NO: 969221 - RNA, 19 nt, Artificial Sequence
  Description of Artificial Sequence: Synthetic oligonucleotide
  Antisense strand to SEQ ID NO: 969220
auuaacagagcucuuuccc

SEQ ID NO: 969222 - RNA, 19 nt, Artificial Sequence
  Description of Artificial Sequence: Synthetic oligonucleotide
  Sense strand starting at position 338 of SEQ ID NO: 913985
gggaaagguagcugguuaa

SEQ ID NO: 969223 - RNA, 19 nt, Artificial Sequence
  Description of Artificial Sequence: Synthetic oligonucleotide
  Antisense strand to SEQ ID NO: 969222
uuaaccagcuaccuuuccc

SEQ ID NO: 969224 - RNA, 19 nt, Artificial Sequence
  Description of Artificial Sequence: Synthetic oligonucleotide
  Sense strand starting at position 341 of SEQ ID NO: 913985
aaagguagcugguuaaaug

SEQ ID NO: 969225 - RNA, 19 nt, Artificial Sequence
  Description of Artificial Sequence: Synthetic oligonucleotide
  Antisense strand to SEQ ID NO: 969224
cauuuaaccagcuaccuuu

SEQ ID NO: 969226 - RNA, 19 nt, Artificial Sequence
  Description of Artificial Sequence: Synthetic oligonucleotide
  Sense strand starting at position 384 of SEQ ID NO: 913985
gggcucucuuaaguggaga

SEQ ID NO: 969227 - RNA, 19 nt, Artificial Sequence
  Description of Artificial Sequence: Synthetic oligonucleotide
  Antisense strand to SEQ ID NO: 969226
ucuccacuuaagagagccc

SEQ ID NO: 969228 - RNA, 19 nt, Artificial Sequence
  Description of Artificial Sequence: Synthetic oligonucleotide
  Sense strand starting at position 2393 of SEQ ID NO: 913985
agacuuguugcucagugga

SEQ ID NO: 969229 - RNA, 19 nt, Artificial Sequence
  Description of Artificial Sequence: Synthetic oligonucleotide
  Antisense strand to SEQ ID NO: 969228
uccacugagcaacaagucu

SEQ ID NO: 969230 - RNA, 19 nt, Artificial Sequence
  Description of Artificial Sequence: Synthetic oligonucleotide
  Sense strand starting at position 947 of SEQ ID NO: 913985
caaauugggcagugaggua

SEQ ID NO: 969231 - RNA, 19 nt, Artificial Sequence
  Description of Artificial Sequence: Synthetic oligonucleotide
  Antisense strand to SEQ ID NO: 969230
uaccucacugcccaauuug

SEQ ID NO: 969232 - RNA, 19 nt, Artificial Sequence
  Description of Artificial Sequence: Synthetic oligonucleotide
  Sense strand starting at position 2244 of SEQ ID NO: 913985
ccaagagauuguguuccca

SEQ ID NO: 969233 - RNA, 19 nt, Artificial Sequence
  Description of Artificial Sequence: Synthetic oligonucleotide
  Antisense strand to SEQ ID NO: 969232
ugggaacacaaucucuugg

SEQ ID NO: 969234 - RNA, 19 nt, Artificial Sequence
  Description of Artificial Sequence: Synthetic oligonucleotide
  Sense strand starting at position 2352 of SEQ ID NO: 913985
ccuguugcucuugacagau

SEQ ID NO: 969235 - RNA, 19 nt, Artificial Sequence
  Description of Artificial Sequence: Synthetic oligonucleotide
  Antisense strand to SEQ ID NO: 969234
aucugucaagagcaacagg

SEQ ID NO: 969236 - RNA, 19 nt, Artificial Sequence
  Description of Artificial Sequence: Synthetic oligonucleotide
  Sense strand starting at position 2466 of SEQ ID NO: 913985
agggcuaccuucccuauua

SEQ ID NO: 969237 - RNA, 19 nt, Artificial Sequence
  Description of Artificial Sequence: Synthetic oligonucleotide
  Antisense strand to SEQ ID NO: 969236
uaauagggaagguagcccu

SEQ ID NO: 969238 - RNA, 19 nt, Artificial Sequence
  Description of Artificial Sequence: Synthetic oligonucleotide
  Sense strand starting at position 2215 of SEQ ID NO: 913985
cuguuaaucugaguuuaca

SEQ ID NO: 969239 - RNA, 19 nt, Artificial Sequence
  Description of Artificial Sequence: Synthetic oligonucleotide
  Antisense strand to SEQ ID NO: 969238
uguaaacucagauuaacag

SEQ ID NO: 969240 - RNA, 19 nt, Artificial Sequence
  Description of Artificial Sequence: Synthetic oligonucleotide
  Sense strand starting at position 1355 of SEQ ID NO: 913985
gugagagucuuugcaggaa

SEQ ID NO: 969241 - RNA, 19 nt, Artificial Sequence
  Description of Artificial Sequence: Synthetic oligonucleotide
  Antisense strand to SEQ ID NO: 969240
uuccugcaaagacucucac

SEQ ID NO: 969242 - RNA, 19 nt, Artificial Sequence
  Description of Artificial Sequence: Synthetic oligonucleotide
  Sense strand starting at position 1280 of SEQ ID NO: 913985
gacuuuggucugcaggcaa

SEQ ID NO: 969243 - RNA, 19 nt, Artificial Sequence
  Description of Artificial Sequence: Synthetic oligonucleotide
  Antisense strand to SEQ ID NO: 969242
uugccugcagaccaaaguc

SEQ ID NO: 969244 - RNA, 19 nt, Artificial Sequence
  Description of Artificial Sequence: Synthetic oligonucleotide
  Sense strand starting at position 2388 of SEQ ID NO: 913985
ucaggagacuuguugcuca

SEQ ID NO: 969245 - RNA, 19 nt, Artificial Sequence
  Description of Artificial Sequence: Synthetic oligonucleotide
  Antisense strand to SEQ ID NO: 969244
ugagcaacaagucuccuga

SEQ ID NO: 969246 - RNA, 19 nt, Artificial Sequence
  Description of Artificial Sequence: Synthetic oligonucleotide
  Sense strand starting at position 2248 of SEQ ID NO: 913985
gagauuguguucccaaagu

SEQ ID NO: 969247 - RNA, 19 nt, Artificial Sequence
  Description of Artificial Sequence: Synthetic oligonucleotide
  Antisense strand to SEQ ID NO: 969246
acuuugggaacacaaucuc

SEQ ID NO: 969248 - RNA, 19 nt, Artificial Sequence
  Description of Artificial Sequence: Synthetic oligonucleotide
  Sense strand starting at position 3025 of SEQ ID NO: 913985
uuuaaauggguguguaauu

SEQ ID NO: 969249 - RNA, 19 nt, Artificial Sequence
  Description of Artificial Sequence: Synthetic oligonucleotide
  Antisense strand to SEQ ID NO: 969248
aauuacacacccauuuaaa

SEQ ID NO: 969250 - RNA, 19 nt, Artificial Sequence
  Description of Artificial Sequence: Synthetic oligonucleotide
  Sense strand starting at position 3777 of SEQ ID NO: 913985
ucugcucuagaaugucaua

SEQ ID NO: 969251 - RNA, 19 nt, Artificial Sequence
  Description of Artificial Sequence: Synthetic oligonucleotide
  Antisense strand to SEQ ID NO: 969250
uaugacauucuagagcaga

SEQ ID NO: 969252 - RNA, 19 nt, Artificial Sequence
  Description of Artificial Sequence: Synthetic oligonucleotide
  Sense strand starting at position 792 of SEQ ID NO: 913985
ucaggagccuggccuuaau

SEQ ID NO: 969253 - RNA, 19 nt, Artificial Sequence
  Description of Artificial Sequence: Synthetic oligonucleotide
  Antisense strand to SEQ ID NO: 969252
auuaaggccaggcuccuga

SEQ ID NO: 969254 - RNA, 19 nt, Artificial Sequence
  Description of Artificial Sequence: Synthetic oligonucleotide
  Sense strand starting at position 2036 of SEQ ID NO: 913985
ggcuuuauccuuuggacuc

SEQ ID NO: 969255 - RNA, 19 nt, Artificial Sequence
  Description of Artificial Sequence: Synthetic oligonucleotide
  Antisense strand to SEQ ID NO: 969254
gaguccaaaggauaaagcc

SEQ ID NO: 969256 - RNA, 19 nt, Artificial Sequence
  Description of Artificial Sequence: Synthetic oligonucleotide
  Sense strand starting at position 14 of SEQ ID NO: 913985
cugguauaguaucauuuaa

SEQ ID NO: 969257 - RNA, 19 nt, Artificial Sequence
  Description of Artificial Sequence: Synthetic oligonucleotide
  Antisense strand to SEQ ID NO: 969256
uuaaaugauacuauaccag

SEQ ID NO: 969258 - RNA, 19 nt, Artificial Sequence
  Description of Artificial Sequence: Synthetic oligonucleotide
  Sense strand starting at position 2 of SEQ ID NO: 913985
guuaguacuuuacugguau

SEQ ID NO: 969259 - RNA, 19 nt, Artificial Sequence
  Description of Artificial Sequence: Synthetic oligonucleotide
  Antisense strand to SEQ ID NO: 969258
auaccaguaaaguacuaac

SEQ ID NO: 969260 - RNA, 19 nt, Artificial Sequence
  Description of Artificial Sequence: Synthetic oligonucleotide
  Sense strand starting at position 2210 of SEQ ID NO: 913985
gagcucuguuaaucugagu

SEQ ID NO: 969261 - RNA, 19 nt, Artificial Sequence
  Description of Artificial Sequence: Synthetic oligonucleotide
  Antisense strand to SEQ ID NO: 969260
acucagauuaacagagcuc

SEQ ID NO: 969262 - RNA, 19 nt, Artificial Sequence
  Description of Artificial Sequence: Synthetic oligonucleotide
  Sense strand starting at position 255 of SEQ ID NO: 913985
uacugauggcguugaauuc

SEQ ID NO: 969263 - RNA, 19 nt, Artificial Sequence
  Description of Artificial Sequence: Synthetic oligonucleotide
  Antisense strand to SEQ ID NO: 969262
gaauucaacgccaucagua

SEQ ID NO: 969264 - RNA, 19 nt, Artificial Sequence
  Description of Artificial Sequence: Synthetic oligonucleotide
  Sense strand starting at position 1810 of SEQ ID NO: 913985
gaggcugaguccucccagu

SEQ ID NO: 969265 - RNA, 19 nt, Artificial Sequence
  Description of Artificial Sequence: Synthetic oligonucleotide
  Antisense strand to SEQ ID NO: 969264
acugggaggacucagccuc

SEQ ID NO: 969266 - RNA, 19 nt, Artificial Sequence
  Description of Artificial Sequence: Synthetic oligonucleotide
  Sense strand starting at position 2047 of SEQ ID NO: 913985
uuggacuccuuagaggaaa

SEQ ID NO: 969267 - RNA, 19 nt, Artificial Sequence
  Description of Artificial Sequence: Synthetic oligonucleotide
  Antisense strand to SEQ ID NO: 969266
uuuccucuaaggaguccaa

SEQ ID NO: 969268 - RNA, 19 nt, Artificial Sequence
  Description of Artificial Sequence: Synthetic oligonucleotide
  Sense strand starting at position 3034 of SEQ ID NO: 913985
guguguaauuuagauacac

SEQ ID NO: 969269 - RNA, 19 nt, Artificial Sequence
  Description of Artificial Sequence: Synthetic oligonucleotide
  Antisense strand to SEQ ID NO: 969268
guguaucuaaauuacacac

SEQ ID NO: 969270 - RNA, 19 nt, Artificial Sequence
  Description of Artificial Sequence: Synthetic oligonucleotide
  Sense strand starting at position 3876 of SEQ ID NO: 913985
uuacguguaucaguaauua

SEQ ID NO: 969271 - RNA, 19 nt, Artificial Sequence
  Description of Artificial Sequence: Synthetic oligonucleotide
  Antisense strand to SEQ ID NO: 969270
uaauuacugauacacguaa

SEQ ID NO: 969272 - RNA, 19 nt, Artificial Sequence
  Description of Artificial Sequence: Synthetic oligonucleotide
  Sense strand starting at position 2396 of SEQ ID NO: 913985
cuuguugcucaguggaacu

SEQ ID NO: 969273 - RNA, 19 nt, Artificial Sequence
  Description of Artificial Sequence: Synthetic oligonucleotide
  Antisense strand to SEQ ID NO: 969272
aguuccacugagcaacaag

SEQ ID NO: 969274 - RNA, 19 nt, Artificial Sequence
  Description of Artificial Sequence: Synthetic oligonucleotide
  Sense strand starting at position 3871 of SEQ ID NO: 913985
cauuguuacguguaucagu

SEQ ID NO: 969275 - RNA, 19 nt, Artificial Sequence
  Description of Artificial Sequence: Synthetic oligonucleotide
  Antisense strand to SEQ ID NO: 969274
acugauacacguaacaaug

SEQ ID NO: 969276 - RNA, 19 nt, Artificial Sequence
  Description of Artificial Sequence: Synthetic oligonucleotide
  Sense strand starting at position 3616 of SEQ ID NO: 913985
cuuguaguaagcugugauc

SEQ ID NO: 969277 - RNA, 19 nt, Artificial Sequence
  Description of Artificial Sequence: Synthetic oligonucleotide
  Antisense strand to SEQ ID NO: 969276
gaucacagcuuacuacaag

SEQ ID NO: 969278 - RNA, 19 nt, Artificial Sequence
  Description of Artificial Sequence: Synthetic oligonucleotide
  Sense strand starting at position 450 of SEQ ID NO: 913986
guaaauaagagcgaacauu

SEQ ID NO: 969279 - RNA, 19 nt, Artificial Sequence
  Description of Artificial Sequence: Synthetic oligonucleotide
  Antisense strand to SEQ ID NO: 969278
aauguucgcucuuauuuac

SEQ ID NO: 969280 - RNA, 19 nt, Artificial Sequence
  Description of Artificial Sequence: Synthetic oligonucleotide
  Sense strand starting at position 1418 of SEQ ID NO: 913986
augagucagcuacagaauu

SEQ ID NO: 969281 - RNA, 19 nt, Artificial Sequence
  Description of Artificial Sequence: Synthetic oligonucleotide
  Antisense strand to SEQ ID NO: 969280
aauucuguagcugacucau

SEQ ID NO: 969282 - RNA, 19 nt, Artificial Sequence
  Description of Artificial Sequence: Synthetic oligonucleotide
  Sense strand starting at position 3805 of SEQ ID NO: 913986
aggaguuaacaauagcuuu

SEQ ID NO: 969283 - RNA, 19 nt, Artificial Sequence
  Description of Artificial Sequence: Synthetic oligonucleotide
  Antisense strand to SEQ ID NO: 969282
aaagcuauuguuaacuccu

SEQ ID NO: 969284 - RNA, 19 nt, Artificial Sequence
  Description of Artificial Sequence: Synthetic oligonucleotide
  Sense strand starting at position 766 of SEQ ID NO: 913986
cugcuuguggcaucauguu

SEQ ID NO: 969285 - RNA, 19 nt, Artificial Sequence
  Description of Artificial Sequence: Synthetic oligonucleotide
  Antisense strand to SEQ ID NO: 969284
aacaugaugccacaagcag

SEQ ID NO: 969286 - RNA, 19 nt, Artificial Sequence
  Description of Artificial Sequence: Synthetic oligonucleotide
  Sense strand starting at position 2094 of SEQ ID NO: 913986
uaugauuggcaauggaaac

SEQ ID NO: 969287 - RNA, 19 nt, Artificial Sequence
  Description of Artificial Sequence: Synthetic oligonucleotide
  Antisense strand to SEQ ID NO: 969286
guuuccauugccaaucaua

SEQ ID NO: 969288 - RNA, 19 nt, Artificial Sequence
  Description of Artificial Sequence: Synthetic oligonucleotide
  Sense strand starting at position 3229 of SEQ ID NO: 913986
ccuguaagauaaguaugaa

SEQ ID NO: 969289 - RNA, 19 nt, Artificial Sequence
  Description of Artificial Sequence: Synthetic oligonucleotide
  Antisense strand to SEQ ID NO: 969288
uucauacuuaucuuacagg

SEQ ID NO: 969290 - RNA, 19 nt, Artificial Sequence
  Description of Artificial Sequence: Synthetic oligonucleotide
  Sense strand starting at position 2573 of SEQ ID NO: 913986
ugaauagcaccuggacaua

SEQ ID NO: 969291 - RNA, 19 nt, Artificial Sequence
  Description of Artificial Sequence: Synthetic oligonucleotide
  Antisense strand to SEQ ID NO: 969290
uauguccaggugcuauuca

SEQ ID NO: 969292 - RNA, 19 nt, Artificial Sequence
  Description of Artificial Sequence: Synthetic oligonucleotide
  Sense strand starting at position 367 of SEQ ID NO: 913986
gaaagucaagauuggccaa

SEQ ID NO: 969293 - RNA, 19 nt, Artificial Sequence
  Description of Artificial Sequence: Synthetic oligonucleotide
  Antisense strand to SEQ ID NO: 969292
uuggccaaucuugacuuuc

SEQ ID NO: 969294 - RNA, 19 nt, Artificial Sequence
  Description of Artificial Sequence: Synthetic oligonucleotide
  Sense strand starting at position 2164 of SEQ ID NO: 913986
ugagucacucuugaaaguu

SEQ ID NO: 969295 - RNA, 19 nt, Artificial Sequence
  Description of Artificial Sequence: Synthetic oligonucleotide
  Antisense strand to SEQ ID NO: 969294
aacuuucaagagugacuca

SEQ ID NO: 969296 - RNA, 19 nt, Artificial Sequence
  Description of Artificial Sequence: Synthetic oligonucleotide
  Sense strand starting at position 2172 of SEQ ID NO: 913986
ucuugaaaguuacuuuaag

SEQ ID NO: 969297 - RNA, 19 nt, Artificial Sequence
  Description of Artificial Sequence: Synthetic oligonucleotide
  Antisense strand to SEQ ID NO: 969296
cuuaaaguaacuuucaaga

SEQ ID NO: 969298 - RNA, 19 nt, Artificial Sequence
  Description of Artificial Sequence: Synthetic oligonucleotide
  Sense strand starting at position 3730 of SEQ ID NO: 913986
augagugucagauacuagu

SEQ ID NO: 969299 - RNA, 19 nt, Artificial Sequence
  Description of Artificial Sequence: Synthetic oligonucleotide
  Antisense strand to SEQ ID NO: 969298
acuaguaucugacacucau

SEQ ID NO: 969300 - RNA, 19 nt, Artificial Sequence
  Description of Artificial Sequence: Synthetic oligonucleotide
  Sense strand starting at position 1244 of SEQ ID NO: 913986
gucuaaggaguccauagua

SEQ ID NO: 969301 - RNA, 19 nt, Artificial Sequence
  Description of Artificial Sequence: Synthetic oligonucleotide
  Antisense strand to SEQ ID NO: 969300
uacuauggacuccuuagac

SEQ ID NO: 969302 - RNA, 19 nt, Artificial Sequence
  Description of Artificial Sequence: Synthetic oligonucleotide
  Sense strand starting at position 1586 of SEQ ID NO: 913986
ggaaauagaugcuucuuua

SEQ ID NO: 969303 - RNA, 19 nt, Artificial Sequence
  Description of Artificial Sequence: Synthetic oligonucleotide
  Antisense strand to SEQ ID NO: 969302
uaaagaagcaucuauuucc

SEQ ID NO: 969304 - RNA, 19 nt, Artificial Sequence
  Description of Artificial Sequence: Synthetic oligonucleotide
  Sense strand starting at position 2394 of SEQ ID NO: 913986
gggaguuaucauuauuguu

SEQ ID NO: 969305 - RNA, 19 nt, Artificial Sequence
  Description of Artificial Sequence: Synthetic oligonucleotide
  Antisense strand to SEQ ID NO: 969304
aacaauaaugauaacuccc

SEQ ID NO: 969306 - RNA, 19 nt, Artificial Sequence
  Description of Artificial Sequence: Synthetic oligonucleotide
  Sense strand starting at position 1021 of SEQ ID NO: 913986
gguugaacugaauguuaga

SEQ ID NO: 969307 - RNA, 19 nt, Artificial Sequence
  Description of Artificial Sequence: Synthetic oligonucleotide
  Antisense strand to SEQ ID NO: 969306
ucuaacauucaguucaacc

SEQ ID NO: 969308 - RNA, 19 nt, Artificial Sequence
  Description of Artificial Sequence: Synthetic oligonucleotide
  Sense strand starting at position 1288 of SEQ ID NO: 913986
cugaguuaauguuuaagaa

SEQ ID NO: 969309 - RNA, 19 nt, Artificial Sequence
  Description of Artificial Sequence: Synthetic oligonucleotide
  Antisense strand to SEQ ID NO: 969308
uucuuaaacauuaacucag

SEQ ID NO: 969310 - RNA, 19 nt, Artificial Sequence
  Description of Artificial Sequence: Synthetic oligonucleotide
  Sense strand starting at position 1508 of SEQ ID NO: 913986
ugucuaagcccauaagacu

SEQ ID NO: 969311 - RNA, 19 nt, Artificial Sequence
  Description of Artificial Sequence: Synthetic oligonucleotide
  Antisense strand to SEQ ID NO: 969310
agucuuaugggcuuagaca

SEQ ID NO: 969312 - RNA, 19 nt, Artificial Sequence
  Description of Artificial Sequence: Synthetic oligonucleotide
  Sense strand starting at position 3593 of SEQ ID NO: 913986
caggcacuuggucaauauu

SEQ ID NO: 969313 - RNA, 19 nt, Artificial Sequence
  Description of Artificial Sequence: Synthetic oligonucleotide
  Antisense strand to SEQ ID NO: 969312
aauauugaccaagugccug

SEQ ID NO: 969314 - RNA, 19 nt, Artificial Sequence
  Description of Artificial Sequence: Synthetic oligonucleotide
  Sense strand starting at position 1018 of SEQ ID NO: 913986
ggugguugaacugaauguu

SEQ ID NO: 969315 - RNA, 19 nt, Artificial Sequence
  Description of Artificial Sequence: Synthetic oligonucleotide
  Antisense strand to SEQ ID NO: 969314
aacauucaguucaaccacc

SEQ ID NO: 969316 - RNA, 19 nt, Artificial Sequence
  Description of Artificial Sequence: Synthetic oligonucleotide
  Sense strand starting at position 3333 of SEQ ID NO: 913986
gggacuuaguagguacuua

SEQ ID NO: 969317 - RNA, 19 nt, Artificial Sequence
  Description of Artificial Sequence: Synthetic oligonucleotide
  Antisense strand to SEQ ID NO: 969316
uaaguaccuacuaaguccc

SEQ ID NO: 969318 - RNA, 19 nt, Artificial Sequence
  Description of Artificial Sequence: Synthetic oligonucleotide
  Sense strand starting at position 2690 of SEQ ID NO: 913986
accuuacaugauuguacau

SEQ ID NO: 969319 - RNA, 19 nt, Artificial Sequence
  Description of Artificial Sequence: Synthetic oligonucleotide
  Antisense strand to SEQ ID NO: 969318
auguacaaucauguaaggu

SEQ ID NO: 969320 - RNA, 19 nt, Artificial Sequence
  Description of Artificial Sequence: Synthetic oligonucleotide
  Sense strand starting at position 2088 of SEQ ID NO: 913986
acaucuuaugauuggcaau

SEQ ID NO: 969321 - RNA, 19 nt, Artificial Sequence
  Description of Artificial Sequence: Synthetic oligonucleotide
  Antisense strand to SEQ ID NO: 969320
auugccaaucauaagaugu

SEQ ID NO: 969322 - RNA, 19 nt, Artificial Sequence
  Description of Artificial Sequence: Synthetic oligonucleotide
  Sense strand starting at position 1175 of SEQ ID NO: 913986
ugcuuauaggcacaauauu

SEQ ID NO: 969323 - RNA, 19 nt, Artificial Sequence
  Description of Artificial Sequence: Synthetic oligonucleotide
  Antisense strand to SEQ ID NO: 969322
aauauugugccuauaagca

SEQ ID NO: 969324 - RNA, 19 nt, Artificial Sequence
  Description of Artificial Sequence: Synthetic oligonucleotide
  Sense strand starting at position 379 of SEQ ID NO: 913986
uggccaauuccacaagcua

SEQ ID NO: 969325 - RNA, 19 nt, Artificial Sequence
  Description of Artificial Sequence: Synthetic oligonucleotide
  Antisense strand to SEQ ID NO: 969324
uagcuuguggaauuggcca

SEQ ID NO: 969326 - RNA, 19 nt, Artificial Sequence
  Description of Artificial Sequence: Synthetic oligonucleotide
  Sense strand starting at position 916 of SEQ ID NO: 913986
ucaaucaucugggcuuaga

SEQ ID NO: 969327 - RNA, 19 nt, Artificial Sequence
  Description of Artificial Sequence: Synthetic oligonucleotide
  Antisense strand to SEQ ID NO: 969326
ucuaagcccagaugauuga

SEQ ID NO: 969328 - RNA, 19 nt, Artificial Sequence
  Description of Artificial Sequence: Synthetic oligonucleotide
  Sense strand starting at position 63 of SEQ ID NO: 913986
ggaaguguccuaggacuca

SEQ ID NO: 969329 - RNA, 19 nt, Artificial Sequence
  Description of Artificial Sequence: Synthetic oligonucleotide
  Antisense strand to SEQ ID NO: 969328
ugaguccuaggacacuucc

SEQ ID NO: 969330 - RNA, 19 nt, Artificial Sequence
  Description of Artificial Sequence: Synthetic oligonucleotide
  Sense strand starting at position 832 of SEQ ID NO: 913986
uuggauucgagauggucaa

SEQ ID NO: 969331 - RNA, 19 nt, Artificial Sequence
  Description of Artificial Sequence: Synthetic oligonucleotide
  Antisense strand to SEQ ID NO: 969330
uugaccaucucgaauccaa

SEQ ID NO: 969332 - RNA, 19 nt, Artificial Sequence
  Description of Artificial Sequence: Synthetic oligonucleotide
  Sense strand starting at position 449 of SEQ ID NO: 913986
uguaaauaagagcgaacau

SEQ ID NO: 969333 - RNA, 19 nt, Artificial Sequence
  Description of Artificial Sequence: Synthetic oligonucleotide
  Antisense strand to SEQ ID NO: 969332
auguucgcucuuauuuaca

SEQ ID NO: 969334 - RNA, 19 nt, Artificial Sequence
  Description of Artificial Sequence: Synthetic oligonucleotide
  Sense strand starting at position 1407 of SEQ ID NO: 913986
gaguaucuacuaugaguca

SEQ ID NO: 969335 - RNA, 19 nt, Artificial Sequence
  Description of Artificial Sequence: Synthetic oligonucleotide
  Antisense strand to SEQ ID NO: 969334
ugacucauaguagauacuc

SEQ ID NO: 969336 - RNA, 19 nt, Artificial Sequence
  Description of Artificial Sequence: Synthetic oligonucleotide
  Sense strand starting at position 2965 of SEQ ID NO: 913986
agaagagauuaugaacaag

SEQ ID NO: 969337 - RNA, 19 nt, Artificial Sequence
  Description of Artificial Sequence: Synthetic oligonucleotide
  Antisense strand to SEQ ID NO: 969336
cuuguucauaaucucuucu

SEQ ID NO: 969338 - RNA, 19 nt, Artificial Sequence
  Description of Artificial Sequence: Synthetic oligonucleotide
  Sense strand starting at position 521 of SEQ ID NO: 913986
ugaauugcagauugaguau

SEQ ID NO: 969339 - RNA, 19 nt, Artificial Sequence
  Description of Artificial Sequence: Synthetic oligonucleotide
  Antisense strand to SEQ ID NO: 969338
auacucaaucugcaauuca

SEQ ID NO: 969340 - RNA, 19 nt, Artificial Sequence
  Description of Artificial Sequence: Synthetic oligonucleotide
  Sense strand starting at position 2938 of SEQ ID NO: 913986
uuguuacauuaugcaagaa

SEQ ID NO: 969341 - RNA, 19 nt, Artificial Sequence
  Description of Artificial Sequence: Synthetic oligonucleotide
  Antisense strand to SEQ ID NO: 969340
uucuugcauaauguaacaa

SEQ ID NO: 969342 - RNA, 19 nt, Artificial Sequence
  Description of Artificial Sequence: Synthetic oligonucleotide
  Sense strand starting at position 2989 of SEQ ID NO: 913986
uuccaaguccuggauguuu

SEQ ID NO: 969343 - RNA, 19 nt, Artificial Sequence
  Description of Artificial Sequence: Synthetic oligonucleotide
  Antisense strand to SEQ ID NO: 969342
aaacauccaggacuuggaa

SEQ ID NO: 969344 - RNA, 19 nt, Artificial Sequence
  Description of Artificial Sequence: Synthetic oligonucleotide
  Sense strand starting at position 3015 of SEQ ID NO: 913986
uugaaaccuuuccugguau

SEQ ID NO: 969345 - RNA, 19 nt, Artificial Sequence
  Description of Artificial Sequence: Synthetic oligonucleotide
  Antisense strand to SEQ ID NO: 969344
auaccaggaaagguuucaa

SEQ ID NO: 969346 - RNA, 19 nt, Artificial Sequence
  Description of Artificial Sequence: Synthetic oligonucleotide
  Sense strand starting at position 3592 of SEQ ID NO: 913986
acaggcacuuggucaauau

SEQ ID NO: 969347 - RNA, 19 nt, Artificial Sequence
  Description of Artificial Sequence: Synthetic oligonucleotide
  Antisense strand to SEQ ID NO: 969346
auauugaccaagugccugu

SEQ ID NO: 969348 - RNA, 19 nt, Artificial Sequence
  Description of Artificial Sequence: Synthetic oligonucleotide
  Sense strand starting at position 1030 of SEQ ID NO: 913986
gaauguuagaugugacgac

SEQ ID NO: 969349 - RNA, 19 nt, Artificial Sequence
  Description of Artificial Sequence: Synthetic oligonucleotide
  Antisense strand to SEQ ID NO: 969348
gucgucacaucuaacauuc

SEQ ID NO: 969350 - RNA, 19 nt, Artificial Sequence
  Description of Artificial Sequence: Synthetic oligonucleotide
  Sense strand starting at position 2381 of SEQ ID NO: 913986
ggcaguauaauaugggagu

SEQ ID NO: 969351 - RNA, 19 nt, Artificial Sequence
  Description of Artificial Sequence: Synthetic oligonucleotide
  Antisense strand to SEQ ID NO: 969350
acucccauauuauacugcc

SEQ ID NO: 969352 - RNA, 19 nt, Artificial Sequence
  Description of Artificial Sequence: Synthetic oligonucleotide
  Sense strand starting at position 3057 of SEQ ID NO: 913986
caugcagaccugcaguaau

SEQ ID NO: 969353 - RNA, 19 nt, Artificial Sequence
  Description of Artificial Sequence: Synthetic oligonucleotide
  Antisense strand to SEQ ID NO: 969352
auuacugcaggucugcaug

SEQ ID NO: 969354 - RNA, 19 nt, Artificial Sequence
  Description of Artificial Sequence: Synthetic oligonucleotide
  Sense strand starting at position 2596 of SEQ ID NO: 913986
guacuauauuaccuguuaa

SEQ ID NO: 969355 - RNA, 19 nt, Artificial Sequence
  Description of Artificial Sequence: Synthetic oligonucleotide
  Antisense strand to SEQ ID NO: 969354
uuaacagguaauauaguac

SEQ ID NO: 969356 - RNA, 19 nt, Artificial Sequence
  Description of Artificial Sequence: Synthetic oligonucleotide
  Sense strand starting at position 2595 of SEQ ID NO: 913986
aguacuauauuaccuguua

SEQ ID NO: 969357 - RNA, 19 nt, Artificial Sequence
  Description of Artificial Sequence: Synthetic oligonucleotide
  Antisense strand to SEQ ID NO: 969356
uaacagguaauauaguacu

SEQ ID NO: 969358 - RNA, 19 nt, Artificial Sequence
  Description of Artificial Sequence: Synthetic oligonucleotide
  Sense strand starting at position 2355 of SEQ ID NO: 913987
ugauuucuguugcuaauau

SEQ ID NO: 969359 - RNA, 19 nt, Artificial Sequence
  Description of Artificial Sequence: Synthetic oligonucleotide
  Antisense strand to SEQ ID NO: 969358
auauuagcaacagaaauca

SEQ ID NO: 969360 - RNA, 19 nt, Artificial Sequence
  Description of Artificial Sequence: Synthetic oligonucleotide
  Sense strand starting at position 2819 of SEQ ID NO: 913987
cuggguagccaggaugaau

SEQ ID NO: 969361 - RNA, 19 nt, Artificial Sequence
  Description of Artificial Sequence: Synthetic oligonucleotide
  Antisense strand to SEQ ID NO: 969360
auucauccuggcuacccag

SEQ ID NO: 969362 - RNA, 19 nt, Artificial Sequence
  Description of Artificial Sequence: Synthetic oligonucleotide
  Sense strand starting at position 880 of SEQ ID NO: 913987
uccaauaucugauucugga

SEQ ID NO: 969363 - RNA, 19 nt, Artificial Sequence
  Description of Artificial Sequence: Synthetic oligonucleotide
  Antisense strand to SEQ ID NO: 969362
uccagaaucagauauugga

SEQ ID NO: 969364 - RNA, 19 nt, Artificial Sequence
  Description of Artificial Sequence: Synthetic oligonucleotide
  Sense strand starting at position 2940 of SEQ ID NO: 913987
uuacucguucgugcaacau

SEQ ID NO: 969365 - RNA, 19 nt, Artificial Sequence
  Description of Artificial Sequence: Synthetic oligonucleotide
  Antisense strand to SEQ ID NO: 969364
auguugcacgaacgaguaa

SEQ ID NO: 969366 - RNA, 19 nt, Artificial Sequence
  Description of Artificial Sequence: Synthetic oligonucleotide
  Sense strand starting at position 572 of SEQ ID NO: 913987
cguuucuugcccuuacagu

SEQ ID NO: 969367 - RNA, 19 nt, Artificial Sequence
  Description of Artificial Sequence: Synthetic oligonucleotide
  Antisense strand to SEQ ID NO: 969366
acuguaagggcaagaaacg

SEQ ID NO: 969368 - RNA, 19 nt, Artificial Sequence
  Description of Artificial Sequence: Synthetic oligonucleotide
  Sense strand starting at position 146 of SEQ ID NO: 913987
guaaguaaccuguaaauau

SEQ ID NO: 969369 - RNA, 19 nt, Artificial Sequence
  Description of Artificial Sequence: Synthetic oligonucleotide
  Antisense strand to SEQ ID NO: 969368
auauuuacagguuacuuac

SEQ ID NO: 969370 - RNA, 19 nt, Artificial Sequence
  Description of Artificial Sequence: Synthetic oligonucleotide
  Sense strand starting at position 1321 of SEQ ID NO: 913987
uggaguauuacgggaaaug

SEQ ID NO: 969371 - RNA, 19 nt, Artificial Sequence
  Description of Artificial Sequence: Synthetic oligonucleotide
  Antisense strand to SEQ ID NO: 969370
cauuucccguaauacucca

SEQ ID NO: 969372 - RNA, 19 nt, Artificial Sequence
  Description of Artificial Sequence: Synthetic oligonucleotide
  Sense strand starting at position 1444 of SEQ ID NO: 913987
uucgaagggcuuuaccaaa

SEQ ID NO: 969373 - RNA, 19 nt, Artificial Sequence
  Description of Artificial Sequence: Synthetic oligonucleotide
  Antisense strand to SEQ ID NO: 969372
uuugguaaagcccuucgaa

SEQ ID NO: 969374 - RNA, 19 nt, Artificial Sequence
  Description of Artificial Sequence: Synthetic oligonucleotide
  Sense strand starting at position 635 of SEQ ID NO: 913987
uugccaauuuggcugcaaa

SEQ ID NO: 969375 - RNA, 19 nt, Artificial Sequence
  Description of Artificial Sequence: Synthetic oligonucleotide
  Antisense strand to SEQ ID NO: 969374
uuugcagccaaauuggcaa

SEQ ID NO: 969376 - RNA, 19 nt, Artificial Sequence
  Description of Artificial Sequence: Synthetic oligonucleotide
  Sense strand starting at position 3820 of SEQ ID NO: 913987
aggcguuugcugagugaag

SEQ ID NO: 969377 - RNA, 19 nt, Artificial Sequence
  Description of Artificial Sequence: Synthetic oligonucleotide
  Antisense strand to SEQ ID NO: 969376
cuucacucagcaaacgccu

SEQ ID NO: 969378 - RNA, 19 nt, Artificial Sequence
  Description of Artificial Sequence: Synthetic oligonucleotide
  Sense strand starting at position 3009 of SEQ ID NO: 913987
aagauauguugucccagga

SEQ ID NO: 969379 - RNA, 19 nt, Artificial Sequence
  Description of Artificial Sequence: Synthetic oligonucleotide
  Antisense strand to SEQ ID NO: 969378
uccugggacaacauaucuu

SEQ ID NO: 969380 - RNA, 19 nt, Artificial Sequence
  Description of Artificial Sequence: Synthetic oligonucleotide
  Sense strand starting at position 1026 of SEQ ID NO: 913987
gaugaugcaucagcaugaa

SEQ ID NO: 969381 - RNA, 19 nt, Artificial Sequence
  Description of Artificial Sequence: Synthetic oligonucleotide
  Antisense strand to SEQ ID NO: 969380
uucaugcugaugcaucauc

SEQ ID NO: 969382 - RNA, 19 nt, Artificial Sequence
  Description of Artificial Sequence: Synthetic oligonucleotide
  Sense strand starting at position 2301 of SEQ ID NO: 913987
gaacacaugucuccggaca

SEQ ID NO: 969383 - RNA, 19 nt, Artificial Sequence
  Description of Artificial Sequence: Synthetic oligonucleotide
  Antisense strand to SEQ ID NO: 969382
uguccggagacauguguuc

SEQ ID NO: 969384 - RNA, 19 nt, Artificial Sequence
  Description of Artificial Sequence: Synthetic oligonucleotide
  Sense strand starting at position 115 of SEQ ID NO: 913987
cuuggugcaaucuagaagu

SEQ ID NO: 969385 - RNA, 19 nt, Artificial Sequence
  Description of Artificial Sequence: Synthetic oligonucleotide
  Antisense strand to SEQ ID NO: 969384
acuucuagauugcaccaag

SEQ ID NO: 969386 - RNA, 19 nt, Artificial Sequence
  Description of Artificial Sequence: Synthetic oligonucleotide
  Sense strand starting at position 2842 of SEQ ID NO: 913987
ucugaaguuccugaggcuu

SEQ ID NO: 969387 - RNA, 19 nt, Artificial Sequence
  Description of Artificial Sequence: Synthetic oligonucleotide
  Antisense strand to SEQ ID NO: 969386
aagccucaggaacuucaga

SEQ ID NO: 969388 - RNA, 19 nt, Artificial Sequence
  Description of Artificial Sequence: Synthetic oligonucleotide
  Sense strand starting at position 1002 of SEQ ID NO: 913987
cuaggaaucuuugcaagua

SEQ ID NO: 969389 - RNA, 19 nt, Artificial Sequence
  Description of Artificial Sequence: Synthetic oligonucleotide
  Antisense strand to SEQ ID NO: 969388
uacuugcaaagauuccuag

SEQ ID NO: 969390 - RNA, 19 nt, Artificial Sequence
  Description of Artificial Sequence: Synthetic oligonucleotide
  Sense strand starting at position 1185 of SEQ ID NO: 913987
gagguagggucuuuccuga

SEQ ID NO: 969391 - RNA, 19 nt, Artificial Sequence
  Description of Artificial Sequence: Synthetic oligonucleotide
  Antisense strand to SEQ ID NO: 969390
ucaggaaagacccuaccuc

SEQ ID NO: 969392 - RNA, 19 nt, Artificial Sequence
  Description of Artificial Sequence: Synthetic oligonucleotide
  Sense strand starting at position 758 of SEQ ID NO: 913987
ggauagaggucuucgggua

SEQ ID NO: 969393 - RNA, 19 nt, Artificial Sequence
  Description of Artificial Sequence: Synthetic oligonucleotide
  Antisense strand to SEQ ID NO: 969392
uacccgaagaccucuaucc

SEQ ID NO: 969394 - RNA, 19 nt, Artificial Sequence
  Description of Artificial Sequence: Synthetic oligonucleotide
  Sense strand starting at position 2609 of SEQ ID NO: 913987
cuaccauuguuaucucuga

SEQ ID NO: 969395 - RNA, 19 nt, Artificial Sequence
  Description of Artificial Sequence: Synthetic oligonucleotide
  Antisense strand to SEQ ID NO: 969394
ucagagauaacaaugguag

SEQ ID NO: 969396 - RNA, 19 nt, Artificial Sequence
  Description of Artificial Sequence: Synthetic oligonucleotide
  Sense strand starting at position 759 of SEQ ID NO: 913987
gauagaggucuucggguag

SEQ ID NO: 969397 - RNA, 19 nt, Artificial Sequence
  Description of Artificial Sequence: Synthetic oligonucleotide
  Antisense strand to SEQ ID NO: 969396
cuacccgaagaccucuauc

SEQ ID NO: 969398 - RNA, 19 nt, Artificial Sequence
  Description of Artificial Sequence: Synthetic oligonucleotide
  Sense strand starting at position 3318 of SEQ ID NO: 913987
cggaaauuauggccggaug

SEQ ID NO: 969399 - RNA, 19 nt, Artificial Sequence
  Description of Artificial Sequence: Synthetic oligonucleotide
  Antisense strand to SEQ ID NO: 969398
cauccggccauaauuuccg

SEQ ID NO: 969400 - RNA, 19 nt, Artificial Sequence
  Description of Artificial Sequence: Synthetic oligonucleotide
  Sense strand starting at position 3948 of SEQ ID NO: 913987
agcagucacucagucagaa

SEQ ID NO: 969401 - RNA, 19 nt, Artificial Sequence
  Description of Artificial Sequence: Synthetic oligonucleotide
  Antisense strand to SEQ ID NO: 969400
uucugacugagugacugcu

SEQ ID NO: 969402 - RNA, 19 nt, Artificial Sequence
  Description of Artificial Sequence: Synthetic oligonucleotide
  Sense strand starting at position 2977 of SEQ ID NO: 913987
ugugccaagcucuaaacua

SEQ ID NO: 969403 - RNA, 19 nt, Artificial Sequence
  Description of Artificial Sequence: Synthetic oligonucleotide
  Antisense strand to SEQ ID NO: 969402
uaguuuagagcuuggcaca

SEQ ID NO: 969404 - RNA, 19 nt, Artificial Sequence
  Description of Artificial Sequence: Synthetic oligonucleotide
  Sense strand starting at position 117 of SEQ ID NO: 913987
uggugcaaucuagaagugu

SEQ ID NO: 969405 - RNA, 19 nt, Artificial Sequence
  Description of Artificial Sequence: Synthetic oligonucleotide
  Antisense strand to SEQ ID NO: 969404
acacuucuagauugcacca

SEQ ID NO: 969406 - RNA, 19 nt, Artificial Sequence
  Description of Artificial Sequence: Synthetic oligonucleotide
  Sense strand starting at position 3319 of SEQ ID NO: 913987
ggaaauuauggccggaugu

SEQ ID NO: 969407 - RNA, 19 nt, Artificial Sequence
  Description of Artificial Sequence: Synthetic oligonucleotide
  Antisense strand to SEQ ID NO: 969406
acauccggccauaauuucc

SEQ ID NO: 969408 - RNA, 19 nt, Artificial Sequence
  Description of Artificial Sequence: Synthetic oligonucleotide
  Sense strand starting at position 3320 of SEQ ID NO: 913987
gaaauuauggccggaugug

SEQ ID NO: 969409 - RNA, 19 nt, Artificial Sequence
  Description of Artificial Sequence: Synthetic oligonucleotide
  Antisense strand to SEQ ID NO: 969408
cacauccggccauaauuuc

SEQ ID NO: 969410 - RNA, 19 nt, Artificial Sequence
  Description of Artificial Sequence: Synthetic oligonucleotide
  Sense strand starting at position 580 of SEQ ID NO: 913987
gcccuuacagucugacaga

SEQ ID NO: 969411 - RNA, 19 nt, Artificial Sequence
  Description of Artificial Sequence: Synthetic oligonucleotide
  Antisense strand to SEQ ID NO: 969410
ucugucagacuguaagggc

SEQ ID NO: 969412 - RNA, 19 nt, Artificial Sequence
  Description of Artificial Sequence: Synthetic oligonucleotide
  Sense strand starting at position 3013 of SEQ ID NO: 913987
uauguugucccaggacuca

SEQ ID NO: 969413 - RNA, 19 nt, Artificial Sequence
  Description of Artificial Sequence: Synthetic oligonucleotide
  Antisense strand to SEQ ID NO: 969412
ugaguccugggacaacaua

SEQ ID NO: 969414 - RNA, 19 nt, Artificial Sequence
  Description of Artificial Sequence: Synthetic oligonucleotide
  Sense strand starting at position 3161 of SEQ ID NO: 913987
ugauguuucuggguccuaa

SEQ ID NO: 969415 - RNA, 19 nt, Artificial Sequence
  Description of Artificial Sequence: Synthetic oligonucleotide
  Antisense strand to SEQ ID NO: 969414
uuaggacccagaaacauca

SEQ ID NO: 969416 - RNA, 19 nt, Artificial Sequence
  Description of Artificial Sequence: Synthetic oligonucleotide
  Sense strand starting at position 2937 of SEQ ID NO: 913987
cauuuacucguucgugcaa

SEQ ID NO: 969417 - RNA, 19 nt, Artificial Sequence
  Description of Artificial Sequence: Synthetic oligonucleotide
  Antisense strand to SEQ ID NO: 969416
uugcacgaacgaguaaaug

SEQ ID NO: 969418 - RNA, 19 nt, Artificial Sequence
  Description of Artificial Sequence: Synthetic oligonucleotide
  Sense strand starting at position 2613 of SEQ ID NO: 913987
cauuguuaucucugagguc

SEQ ID NO: 969419 - RNA, 19 nt, Artificial Sequence
  Description of Artificial Sequence: Synthetic oligonucleotide
  Antisense strand to SEQ ID NO: 969418
gaccucagagauaacaaug

SEQ ID NO: 969420 - RNA, 19 nt, Artificial Sequence
  Description of Artificial Sequence: Synthetic oligonucleotide
  Sense strand starting at position 110 of SEQ ID NO: 913987
uguuccuuggugcaaucua

SEQ ID NO: 969421 - RNA, 19 nt, Artificial Sequence
  Description of Artificial Sequence: Synthetic oligonucleotide
  Antisense strand to SEQ ID NO: 969420
uagauugcaccaaggaaca

SEQ ID NO: 969422 - RNA, 19 nt, Artificial Sequence
  Description of Artificial Sequence: Synthetic oligonucleotide
  Sense strand starting at position 125 of SEQ ID NO: 913987
ucuagaagugucuggcaca

SEQ ID NO: 969423 - RNA, 19 nt, Artificial Sequence
  Description of Artificial Sequence: Synthetic oligonucleotide
  Antisense strand to SEQ ID NO: 969422
ugugccagacacuucuaga

SEQ ID NO: 969424 - RNA, 19 nt, Artificial Sequence
  Description of Artificial Sequence: Synthetic oligonucleotide
  Sense strand starting at position 3898 of SEQ ID NO: 913987
agguacgugccugauuacu

SEQ ID NO: 969425 - RNA, 19 nt, Artificial Sequence
  Description of Artificial Sequence: Synthetic oligonucleotide
  Antisense strand to SEQ ID NO: 969424
aguaaucaggcacguaccu

SEQ ID NO: 969426 - RNA, 19 nt, Artificial Sequence
  Description of Artificial Sequence: Synthetic oligonucleotide
  Sense strand starting at position 3896 of SEQ ID NO: 913987
gaagguacgugccugauua

SEQ ID NO: 969427 - RNA, 19 nt, Artificial Sequence
  Description of Artificial Sequence: Synthetic oligonucleotide
  Antisense strand to SEQ ID NO: 969426
uaaucaggcacguaccuuc

SEQ ID NO: 969428 - RNA, 19 nt, Artificial Sequence
  Description of Artificial Sequence: Synthetic oligonucleotide
  Sense strand starting at position 3628 of SEQ ID NO: 913987
auaaauaagccgugcauca

SEQ ID NO: 969429 - RNA, 19 nt, Artificial Sequence
  Description of Artificial Sequence: Synthetic oligonucleotide
  Antisense strand to SEQ ID NO: 969428
ugaugcacggcuuauuuau

SEQ ID NO: 969430 - RNA, 19 nt, Artificial Sequence
  Description of Artificial Sequence: Synthetic oligonucleotide
  Sense strand starting at position 2832 of SEQ ID NO: 913987
augaauugcgucugaaguu

SEQ ID NO: 969431 - RNA, 19 nt, Artificial Sequence
  Description of Artificial Sequence: Synthetic oligonucleotide
  Antisense strand to SEQ ID NO: 969430
aacuucagacgcaauucau

SEQ ID NO: 969432 - RNA, 19 nt, Artificial Sequence
  Description of Artificial Sequence: Synthetic oligonucleotide
  Sense strand starting at position 3069 of SEQ ID NO: 913987
gcguuaaauagagguugua

SEQ ID NO: 969433 - RNA, 19 nt, Artificial Sequence
  Description of Artificial Sequence: Synthetic oligonucleotide
  Antisense strand to SEQ ID NO: 969432
uacaaccucuauuuaacgc

SEQ ID NO: 969434 - RNA, 19 nt, Artificial Sequence
  Description of Artificial Sequence: Synthetic oligonucleotide
  Sense strand starting at position 1309 of SEQ ID NO: 913987
gccuuucgaaguuggagua

SEQ ID NO: 969435 - RNA, 19 nt, Artificial Sequence
  Description of Artificial Sequence: Synthetic oligonucleotide
  Antisense strand to SEQ ID NO: 969434
uacuccaacuucgaaaggc

SEQ ID NO: 969436 - RNA, 19 nt, Artificial Sequence
  Description of Artificial Sequence: Synthetic oligonucleotide
  Sense strand starting at position 2711 of SEQ ID NO: 913987
ggcugugccuggaagaagu

SEQ ID NO: 969437 - RNA, 19 nt, Artificial Sequence
  Description of Artificial Sequence: Synthetic oligonucleotide
  Antisense strand to SEQ ID NO: 969436
acuucuuccaggcacagcc

SEQ ID NO: 969438 - RNA, 19 nt, Artificial Sequence
  Description of Artificial Sequence: Synthetic oligonucleotide
  Sense strand starting at position 3303 of SEQ ID NO: 913988
gugacuuaucuagagguua

SEQ ID NO: 969439 - RNA, 19 nt, Artificial Sequence
  Description of Artificial Sequence: Synthetic oligonucleotide
  Antisense strand to SEQ ID NO: 969438
uaaccucuagauaagucac

SEQ ID NO: 969440 - RNA, 19 nt, Artificial Sequence
  Description of Artificial Sequence: Synthetic oligonucleotide
  Sense strand starting at position 434 of SEQ ID NO: 913988
gggccagugucgauguaga

SEQ ID NO: 969441 - RNA, 19 nt, Artificial Sequence
  Description of Artificial Sequence: Synthetic oligonucleotide
  Antisense strand to SEQ ID NO: 969440
ucuacaucgacacuggccc

SEQ ID NO: 969442 - RNA, 19 nt, Artificial Sequence
  Description of Artificial Sequence: Synthetic oligonucleotide
  Sense strand starting at position 2171 of SEQ ID NO: 913988
uggucaauuucuccacgua

SEQ ID NO: 969443 - RNA, 19 nt, Artificial Sequence
  Description of Artificial Sequence: Synthetic oligonucleotide
  Antisense strand to SEQ ID NO: 969442
uacguggagaaauugacca

SEQ ID NO: 969444 - RNA, 19 nt, Artificial Sequence
  Description of Artificial Sequence: Synthetic oligonucleotide
  Sense strand starting at position 869 of SEQ ID NO: 913988
caacuagauuaggcaguaa

SEQ ID NO: 969445 - RNA, 19 nt, Artificial Sequence
  Description of Artificial Sequence: Synthetic oligonucleotide
  Antisense strand to SEQ ID NO: 969444
uuacugccuaaucuaguug

SEQ ID NO: 969446 - RNA, 19 nt, Artificial Sequence
  Description of Artificial Sequence: Synthetic oligonucleotide
  Sense strand starting at position 2583 of SEQ ID NO: 913988
ugaaauaaguugucuacag

SEQ ID NO: 969447 - RNA, 19 nt, Artificial Sequence
  Description of Artificial Sequence: Synthetic oligonucleotide
  Antisense strand to SEQ ID NO: 969446
cuguagacaacuuauuuca

SEQ ID NO: 969448 - RNA, 19 nt, Artificial Sequence
  Description of Artificial Sequence: Synthetic oligonucleotide
  Sense strand starting at position 1270 of SEQ ID NO: 913988
cuuucuuaccgagaacucu

SEQ ID NO: 969449 - RNA, 19 nt, Artificial Sequence
  Description of Artificial Sequence: Synthetic oligonucleotide
  Antisense strand to SEQ ID NO: 969448
agaguucucgguaagaaag

SEQ ID NO: 969450 - RNA, 19 nt, Artificial Sequence
  Description of Artificial Sequence: Synthetic oligonucleotide
  Sense strand starting at position 914 of SEQ ID NO: 913988
cguccaacacugggaauaa

SEQ ID NO: 969451 - RNA, 19 nt, Artificial Sequence
  Description of Artificial Sequence: Synthetic oligonucleotide
  Antisense strand to SEQ ID NO: 969450
uuauucccaguguuggacg

SEQ ID NO: 969452 - RNA, 19 nt, Artificial Sequence
  Description of Artificial Sequence: Synthetic oligonucleotide
  Sense strand starting at position 913 of SEQ ID NO: 913988
acguccaacacugggaaua

SEQ ID NO: 969453 - RNA, 19 nt, Artificial Sequence
  Description of Artificial Sequence: Synthetic oligonucleotide
  Antisense strand to SEQ ID NO: 969452
uauucccaguguuggacgu

SEQ ID NO: 969454 - RNA, 19 nt, Artificial Sequence
  Description of Artificial Sequence: Synthetic oligonucleotide
  Sense strand starting at position 1691 of SEQ ID NO: 913988
uggucacaccuauggacua

SEQ ID NO: 969455 - RNA, 19 nt, Artificial Sequence
  Description of Artificial Sequence: Synthetic oligonucleotide
  Antisense strand to SEQ ID NO: 969454
uaguccauaggugugacca

SEQ ID NO: 969456 - RNA, 19 nt, Artificial Sequence
  Description of Artificial Sequence: Synthetic oligonucleotide
  Sense strand starting at position 3258 of SEQ ID NO: 913988
ggcucugauguuuacaaua

SEQ ID NO: 969457 - RNA, 19 nt, Artificial Sequence
  Description of Artificial Sequence: Synthetic oligonucleotide
  Antisense strand to SEQ ID NO: 969456
uauuguaaacaucagagcc

SEQ ID NO: 969458 - RNA, 19 nt, Artificial Sequence
  Description of Artificial Sequence: Synthetic oligonucleotide
  Sense strand starting at position 2870 of SEQ ID NO: 913988
ucgguacuccaucacuuaa

SEQ ID NO: 969459 - RNA, 19 nt, Artificial Sequence
  Description of Artificial Sequence: Synthetic oligonucleotide
  Antisense strand to SEQ ID NO: 969458
uuaagugauggaguaccga

SEQ ID NO: 969460 - RNA, 19 nt, Artificial Sequence
  Description of Artificial Sequence: Synthetic oligonucleotide
  Sense strand starting at position 3301 of SEQ ID NO: 913988
gugugacuuaucuagaggu

SEQ ID NO: 969461 - RNA, 19 nt, Artificial Sequence
  Description of Artificial Sequence: Synthetic oligonucleotide
  Antisense strand to SEQ ID NO: 969460
accucuagauaagucacac

SEQ ID NO: 969462 - RNA, 19 nt, Artificial Sequence
  Description of Artificial Sequence: Synthetic oligonucleotide
  Sense strand starting at position 2371 of SEQ ID NO: 913988
gggcacuaucuguggagga

SEQ ID NO: 969463 - RNA, 19 nt, Artificial Sequence
  Description of Artificial Sequence: Synthetic oligonucleotide
  Antisense strand to SEQ ID NO: 969462
uccuccacagauagugccc

SEQ ID NO: 969464 - RNA, 19 nt, Artificial Sequence
  Description of Artificial Sequence: Synthetic oligonucleotide
  Sense strand starting at position 2627 of SEQ ID NO: 913988
ccuagugugauauauuagu

SEQ ID NO: 969465 - RNA, 19 nt, Artificial Sequence
  Description of Artificial Sequence: Synthetic oligonucleotide
  Antisense strand to SEQ ID NO: 969464
acuaauauaucacacuagg

SEQ ID NO: 969466 - RNA, 19 nt, Artificial Sequence
  Description of Artificial Sequence: Synthetic oligonucleotide
  Sense strand starting at position 3334 of SEQ ID NO: 913988
augaaaucacagugccauc

SEQ ID NO: 969467 - RNA, 19 nt, Artificial Sequence
  Description of Artificial Sequence: Synthetic oligonucleotide
  Antisense strand to SEQ ID NO: 969466
gauggcacugugauuucau

SEQ ID NO: 969468 - RNA, 19 nt, Artificial Sequence
  Description of Artificial Sequence: Synthetic oligonucleotide
  Sense strand starting at position 312 of SEQ ID NO: 913988
uggccucugcuagaggauu

SEQ ID NO: 969469 - RNA, 19 nt, Artificial Sequence
  Description of Artificial Sequence: Synthetic oligonucleotide
  Antisense strand to SEQ ID NO: 969468
aauccucuagcagaggcca

SEQ ID NO: 969470 - RNA, 19 nt, Artificial Sequence
  Description of Artificial Sequence: Synthetic oligonucleotide
  Sense strand starting at position 2584 of SEQ ID NO: 913988
gaaauaaguugucuacagu

SEQ ID NO: 969471 - RNA, 19 nt, Artificial Sequence
  Description of Artificial Sequence: Synthetic oligonucleotide
  Antisense strand to SEQ ID NO: 969470
acuguagacaacuuauuuc

SEQ ID NO: 969472 - RNA, 19 nt, Artificial Sequence
  Description of Artificial Sequence: Synthetic oligonucleotide
  Sense strand starting at position 1502 of SEQ ID NO: 913988
gggauaguucgcugaagaa

SEQ ID NO: 969473 - RNA, 19 nt, Artificial Sequence
  Description of Artificial Sequence: Synthetic oligonucleotide
  Antisense strand to SEQ ID NO: 969472
uucuucagcgaacuauccc

SEQ ID NO: 969474 - RNA, 19 nt, Artificial Sequence
  Description of Artificial Sequence: Synthetic oligonucleotide
  Sense strand starting at position 2709 of SEQ ID NO: 913988
cucauuauuugugagaaac

SEQ ID NO: 969475 - RNA, 19 nt, Artificial Sequence
  Description of Artificial Sequence: Synthetic oligonucleotide
  Antisense strand to SEQ ID NO: 969474
guuucucacaaauaaugag

SEQ ID NO: 969476 - RNA, 19 nt, Artificial Sequence
  Description of Artificial Sequence: Synthetic oligonucleotide
  Sense strand starting at position 812 of SEQ ID NO: 913988
uggaccuacccuugucauu

SEQ ID NO: 969477 - RNA, 19 nt, Artificial Sequence
  Description of Artificial Sequence: Synthetic oligonucleotide
  Antisense strand to SEQ ID NO: 969476
aaugacaaggguaggucca

SEQ ID NO: 969478 - RNA, 19 nt, Artificial Sequence
  Description of Artificial Sequence: Synthetic oligonucleotide
  Sense strand starting at position 2593 of SEQ ID NO: 913988
ugucuacagucugugagaa

SEQ ID NO: 969479 - RNA, 19 nt, Artificial Sequence
  Description of Artificial Sequence: Synthetic oligonucleotide
  Antisense strand to SEQ ID NO: 969478
uucucacagacuguagaca

SEQ ID NO: 969480 - RNA, 19 nt, Artificial Sequence
  Description of Artificial Sequence: Synthetic oligonucleotide
  Sense strand starting at position 2622 of SEQ ID NO: 913988
gugauccuagugugauaua

SEQ ID NO: 969481 - RNA, 19 nt, Artificial Sequence
  Description of Artificial Sequence: Synthetic oligonucleotide
  Antisense strand to SEQ ID NO: 969480
uauaucacacuaggaucac

SEQ ID NO: 969482 - RNA, 19 nt, Artificial Sequence
  Description of Artificial Sequence: Synthetic oligonucleotide
  Sense strand starting at position 2594 of SEQ ID NO: 913988
gucuacagucugugagaac

SEQ ID NO: 969483 - RNA, 19 nt, Artificial Sequence
  Description of Artificial Sequence: Synthetic oligonucleotide
  Antisense strand to SEQ ID NO: 969482
guucucacagacuguagac

SEQ ID NO: 969484 - RNA, 19 nt, Artificial Sequence
  Description of Artificial Sequence: Synthetic oligonucleotide
  Sense strand starting at position 3299 of SEQ ID NO: 913988
gugugugacuuaucuagag

SEQ ID NO: 969485 - RNA, 19 nt, Artificial Sequence
  Description of Artificial Sequence: Synthetic oligonucleotide
  Antisense strand to SEQ ID NO: 969484
cucuagauaagucacacac

SEQ ID NO: 969486 - RNA, 19 nt, Artificial Sequence
  Description of Artificial Sequence: Synthetic oligonucleotide
  Sense strand starting at position 856 of SEQ ID NO: 913988
uguguaccuucuccaacua

SEQ ID NO: 969487 - RNA, 19 nt, Artificial Sequence
  Description of Artificial Sequence: Synthetic oligonucleotide
  Antisense strand to SEQ ID NO: 969486
uaguuggagaagguacaca

SEQ ID NO: 969488 - RNA, 19 nt, Artificial Sequence
  Description of Artificial Sequence: Synthetic oligonucleotide
  Sense strand starting at position 2592 of SEQ ID NO: 913988
uugucuacagucugugaga

SEQ ID NO: 969489 - RNA, 19 nt, Artificial Sequence
  Description of Artificial Sequence: Synthetic oligonucleotide
  Antisense strand to SEQ ID NO: 969488
ucucacagacuguagacaa

SEQ ID NO: 969490 - RNA, 19 nt, Artificial Sequence
  Description of Artificial Sequence: Synthetic oligonucleotide
  Sense strand starting at position 3297 of SEQ ID NO: 913988
ucgugugugacuuaucuag

SEQ ID NO: 969491 - RNA, 19 nt, Artificial Sequence
  Description of Artificial Sequence: Synthetic oligonucleotide
  Antisense strand to SEQ ID NO: 969490
cuagauaagucacacacga

SEQ ID NO: 969492 - RNA, 19 nt, Artificial Sequence
  Description of Artificial Sequence: Synthetic oligonucleotide
  Sense strand starting at position 2708 of SEQ ID NO: 913988
ccucauuauuugugagaaa

SEQ ID NO: 969493 - RNA, 19 nt, Artificial Sequence
  Description of Artificial Sequence: Synthetic oligonucleotide
  Antisense strand to SEQ ID NO: 969492
uuucucacaaauaaugagg

SEQ ID NO: 969494 - RNA, 19 nt, Artificial Sequence
  Description of Artificial Sequence: Synthetic oligonucleotide
  Sense strand starting at position 855 of SEQ ID NO: 913988
uuguguaccuucuccaacu

SEQ ID NO: 969495 - RNA, 19 nt, Artificial Sequence
  Description of Artificial Sequence: Synthetic oligonucleotide
  Antisense strand to SEQ ID NO: 969494
aguuggagaagguacacaa

SEQ ID NO: 969496 - RNA, 19 nt, Artificial Sequence
  Description of Artificial Sequence: Synthetic oligonucleotide
  Sense strand starting at position 2679 of SEQ ID NO: 913988
gggcuuagcgcuuagaauu

SEQ ID NO: 969497 - RNA, 19 nt, Artificial Sequence
  Description of Artificial Sequence: Synthetic oligonucleotide
  Antisense strand to SEQ ID NO: 969496
aauucuaagcgcuaagccc

SEQ ID NO: 969498 - RNA, 19 nt, Artificial Sequence
  Description of Artificial Sequence: Synthetic oligonucleotide
  Sense strand starting at position 3257 of SEQ ID NO: 913988
cggcucugauguuuacaau

SEQ ID NO: 969499 - RNA, 19 nt, Artificial Sequence
  Description of Artificial Sequence: Synthetic oligonucleotide
  Antisense strand to SEQ ID NO: 969498
auuguaaacaucagagccg

SEQ ID NO: 969500 - RNA, 19 nt, Artificial Sequence
  Description of Artificial Sequence: Synthetic oligonucleotide
  Sense strand starting at position 1309 of SEQ ID NO: 913988
uaacguauuucugaaggca

SEQ ID NO: 969501 - RNA, 19 nt, Artificial Sequence
  Description of Artificial Sequence: Synthetic oligonucleotide
  Antisense strand to SEQ ID NO: 969500
ugccuucagaaauacguua

SEQ ID NO: 969502 - RNA, 19 nt, Artificial Sequence
  Description of Artificial Sequence: Synthetic oligonucleotide
  Sense strand starting at position 542 of SEQ ID NO: 913988
uucuguauauccgucucaa

SEQ ID NO: 969503 - RNA, 19 nt, Artificial Sequence
  Description of Artificial Sequence: Synthetic oligonucleotide
  Antisense strand to SEQ ID NO: 969502
uugagacggauauacagaa

SEQ ID NO: 969504 - RNA, 19 nt, Artificial Sequence
  Description of Artificial Sequence: Synthetic oligonucleotide
  Sense strand starting at position 3292 of SEQ ID NO: 913988
uuggaucgugugugacuua

SEQ ID NO: 969505 - RNA, 19 nt, Artificial Sequence
  Description of Artificial Sequence: Synthetic oligonucleotide
  Antisense strand to SEQ ID NO: 969504
uaagucacacacgauccaa

SEQ ID NO: 969506 - RNA, 19 nt, Artificial Sequence
  Description of Artificial Sequence: Synthetic oligonucleotide
  Sense strand starting at position 386 of SEQ ID NO: 913988
gagaauguauuauaucuga

SEQ ID NO: 969507 - RNA, 19 nt, Artificial Sequence
  Description of Artificial Sequence: Synthetic oligonucleotide
  Antisense strand to SEQ ID NO: 969506
ucagauauaauacauucuc

SEQ ID NO: 969508 - RNA, 19 nt, Artificial Sequence
  Description of Artificial Sequence: Synthetic oligonucleotide
  Sense strand starting at position 3295 of SEQ ID NO: 913988
gaucgugugugacuuaucu

SEQ ID NO: 969509 - RNA, 19 nt, Artificial Sequence
  Description of Artificial Sequence: Synthetic oligonucleotide
  Antisense strand to SEQ ID NO: 969508
agauaagucacacacgauc

SEQ ID NO: 969510 - RNA, 19 nt, Artificial Sequence
  Description of Artificial Sequence: Synthetic oligonucleotide
  Sense strand starting at position 2607 of SEQ ID NO: 913988
gagaacuugugggagguga

SEQ ID NO: 969511 - RNA, 19 nt, Artificial Sequence
  Description of Artificial Sequence: Synthetic oligonucleotide
  Antisense strand to SEQ ID NO: 969510
ucaccucccacaaguucuc

SEQ ID NO: 969512 - RNA, 19 nt, Artificial Sequence
  Description of Artificial Sequence: Synthetic oligonucleotide
  Sense strand starting at position 1521 of SEQ ID NO: 913988
cagggaucauuguaugacu

SEQ ID NO: 969513 - RNA, 19 nt, Artificial Sequence
  Description of Artificial Sequence: Synthetic oligonucleotide
  Antisense strand to SEQ ID NO: 969512
agucauacaaugaucccug

SEQ ID NO: 969514 - RNA, 19 nt, Artificial Sequence
  Description of Artificial Sequence: Synthetic oligonucleotide
  Sense strand starting at position 3290 of SEQ ID NO: 913988
gguuggaucgugugugacu

SEQ ID NO: 969515 - RNA, 19 nt, Artificial Sequence
  Description of Artificial Sequence: Synthetic oligonucleotide
  Antisense strand to SEQ ID NO: 969514
agucacacacgauccaacc

SEQ ID NO: 969516 - RNA, 19 nt, Artificial Sequence
  Description of Artificial Sequence: Synthetic oligonucleotide
  Sense strand starting at position 1809 of SEQ ID NO: 913988
cuuacuccgucuuacauuu

SEQ ID NO: 969517 - RNA, 19 nt, Artificial Sequence
  Description of Artificial Sequence: Synthetic oligonucleotide
  Antisense strand to SEQ ID NO: 969516
aaauguaagacggaguaag

SEQ ID NO: 969518 - RNA, 19 nt, Artificial Sequence
  Description of Artificial Sequence: Synthetic oligonucleotide
  Sense strand starting at position 2376 of SEQ ID NO: 913989
cucugcuugcggucuuaaa

SEQ ID NO: 969519 - RNA, 19 nt, Artificial Sequence
  Description of Artificial Sequence: Synthetic oligonucleotide
  Antisense strand to SEQ ID NO: 969518
uuuaagaccgcaagcagag

SEQ ID NO: 969520 - RNA, 19 nt, Artificial Sequence
  Description of Artificial Sequence: Synthetic oligonucleotide
  Sense strand starting at position 1461 of SEQ ID NO: 913989
auccucuuacgggaauuau

SEQ ID NO: 969521 - RNA, 19 nt, Artificial Sequence
  Description of Artificial Sequence: Synthetic oligonucleotide
  Antisense strand to SEQ ID NO: 969520
auaauucccguaagaggau

SEQ ID NO: 969522 - RNA, 19 nt, Artificial Sequence
  Description of Artificial Sequence: Synthetic oligonucleotide
  Sense strand starting at position 3149 of SEQ ID NO: 913989
uaguaagaucuccaguuag

SEQ ID NO: 969523 - RNA, 19 nt, Artificial Sequence
  Description of Artificial Sequence: Synthetic oligonucleotide
  Antisense strand to SEQ ID NO: 969522
cuaacuggagaucuuacua

SEQ ID NO: 969524 - RNA, 19 nt, Artificial Sequence
  Description of Artificial Sequence: Synthetic oligonucleotide
  Sense strand starting at position 3106 of SEQ ID NO: 913989
ccaaacaaugucuauugua

SEQ ID NO: 969525 - RNA, 19 nt, Artificial Sequence
  Description of Artificial Sequence: Synthetic oligonucleotide
  Antisense strand to SEQ ID NO: 969524
uacaauagacauuguuugg

SEQ ID NO: 969526 - RNA, 19 nt, Artificial Sequence
  Description of Artificial Sequence: Synthetic oligonucleotide
  Sense strand starting at position 899 of SEQ ID NO: 913989
uuacgaacgccuccguuau

SEQ ID NO: 969527 - RNA, 19 nt, Artificial Sequence
  Description of Artificial Sequence: Synthetic oligonucleotide
  Antisense strand to SEQ ID NO: 969526
auaacggaggcguucguaa

SEQ ID NO: 969528 - RNA, 19 nt, Artificial Sequence
  Description of Artificial Sequence: Synthetic oligonucleotide
  Sense strand starting at position 2544 of SEQ ID NO: 913989
ucaugaguuacugggauga

SEQ ID NO: 969529 - RNA, 19 nt, Artificial Sequence
  Description of Artificial Sequence: Synthetic oligonucleotide
  Antisense strand to SEQ ID NO: 969528
ucaucccaguaacucauga

SEQ ID NO: 969530 - RNA, 19 nt, Artificial Sequence
  Description of Artificial Sequence: Synthetic oligonucleotide
  Sense strand starting at position 2548 of SEQ ID NO: 913989
gaguuacugggaugauuac

SEQ ID NO: 969531 - RNA, 19 nt, Artificial Sequence
  Description of Artificial Sequence: Synthetic oligonucleotide
  Antisense strand to SEQ ID NO: 969530
guaaucaucccaguaacuc

SEQ ID NO: 969532 - RNA, 19 nt, Artificial Sequence
  Description of Artificial Sequence: Synthetic oligonucleotide
  Sense strand starting at position 2780 of SEQ ID NO: 913989
gaaggaguguucucaggga

SEQ ID NO: 969533 - RNA, 19 nt, Artificial Sequence
  Description of Artificial Sequence: Synthetic oligonucleotide
  Antisense strand to SEQ ID NO: 969532
ucccugagaacacuccuuc

SEQ ID NO: 969534 - RNA, 19 nt, Artificial Sequence
  Description of Artificial Sequence: Synthetic oligonucleotide
  Sense strand starting at position 3317 of SEQ ID NO: 913989
gaagcaauaguuuagucaa

SEQ ID NO: 969535 - RNA, 19 nt, Artificial Sequence
  Description of Artificial Sequence: Synthetic oligonucleotide
  Antisense strand to SEQ ID NO: 969534
uugacuaaacuauugcuuc

SEQ ID NO: 969536 - RNA, 19 nt, Artificial Sequence
  Description of Artificial Sequence: Synthetic oligonucleotide
  Sense strand starting at position 3065 of SEQ ID NO: 913989
gauaaugugccuuaaugac

SEQ ID NO: 969537 - RNA, 19 nt, Artificial Sequence
  Description of Artificial Sequence: Synthetic oligonucleotide
  Antisense strand to SEQ ID NO: 969536
gucauuaaggcacauuauc

SEQ ID NO: 969538 - RNA, 19 nt, Artificial Sequence
  Description of Artificial Sequence: Synthetic oligonucleotide
  Sense strand starting at position 1164 of SEQ ID NO: 913989
gacgucaucuguuugauuu

SEQ ID NO: 969539 - RNA, 19 nt, Artificial Sequence
  Description of Artificial Sequence: Synthetic oligonucleotide
  Antisense strand to SEQ ID NO: 969538
aaaucaaacagaugacguc

SEQ ID NO: 969540 - RNA, 19 nt, Artificial Sequence
  Description of Artificial Sequence: Synthetic oligonucleotide
  Sense strand starting at position 324 of SEQ ID NO: 913989
ucuuaaguuccagagaguu

SEQ ID NO: 969541 - RNA, 19 nt, Artificial Sequence
  Description of Artificial Sequence: Synthetic oligonucleotide
  Antisense strand to SEQ ID NO: 969540
aacucucuggaacuuaaga

SEQ ID NO: 969542 - RNA, 19 nt, Artificial Sequence
  Description of Artificial Sequence: Synthetic oligonucleotide
  Sense strand starting at position 1465 of SEQ ID NO: 913989
ucuuacgggaauuauguua

SEQ ID NO: 969543 - RNA, 19 nt, Artificial Sequence
  Description of Artificial Sequence: Synthetic oligonucleotide
  Antisense strand to SEQ ID NO: 969542
uaacauaauucccguaaga

SEQ ID NO: 969544 - RNA, 19 nt, Artificial Sequence
  Description of Artificial Sequence: Synthetic oligonucleotide
  Sense strand starting at position 1472 of SEQ ID NO: 913989
ggaauuauguuacuuccaa

SEQ ID NO: 969545 - RNA, 19 nt, Artificial Sequence
  Description of Artificial Sequence: Synthetic oligonucleotide
  Antisense strand to SEQ ID NO: 969544
uuggaaguaacauaauucc

SEQ ID NO: 969546 - RNA, 19 nt, Artificial Sequence
  Description of Artificial Sequence: Synthetic oligonucleotide
  Sense strand starting at position 1165 of SEQ ID NO: 913989
acgucaucuguuugauuug

SEQ ID NO: 969547 - RNA, 19 nt, Artificial Sequence
  Description of Artificial Sequence: Synthetic oligonucleotide
  Antisense strand to SEQ ID NO: 969546
caaaucaaacagaugacgu

SEQ ID NO: 969548 - RNA, 19 nt, Artificial Sequence
  Description of Artificial Sequence: Synthetic oligonucleotide
  Sense strand starting at position 3706 of SEQ ID NO: 913989
ugccuuugagcagauggaa

SEQ ID NO: 969549 - RNA, 19 nt, Artificial Sequence
  Description of Artificial Sequence: Synthetic oligonucleotide
  Antisense strand to SEQ ID NO: 969548
uuccaucugcucaaaggca

SEQ ID NO: 969550 - RNA, 19 nt, Artificial Sequence
  Description of Artificial Sequence: Synthetic oligonucleotide
  Sense strand starting at position 2285 of SEQ ID NO: 913989
ggaacucaccuuugauucu

SEQ ID NO: 969551 - RNA, 19 nt, Artificial Sequence
  Description of Artificial Sequence: Synthetic oligonucleotide
  Antisense strand to SEQ ID NO: 969550
agaaucaaaggugaguucc

SEQ ID NO: 969552 - RNA, 19 nt, Artificial Sequence
  Description of Artificial Sequence: Synthetic oligonucleotide
  Sense strand starting at position 2784 of SEQ ID NO: 913989
gaguguucucagggacagg

SEQ ID NO: 969553 - RNA, 19 nt, Artificial Sequence
  Description of Artificial Sequence: Synthetic oligonucleotide
  Antisense strand to SEQ ID NO: 969552
ccugucccugagaacacuc

SEQ ID NO: 969554 - RNA, 19 nt, Artificial Sequence
  Description of Artificial Sequence: Synthetic oligonucleotide
  Sense strand starting at position 1839 of SEQ ID NO: 913989
cucgguacuccagggagaa

SEQ ID NO: 969555 - RNA, 19 nt, Artificial Sequence
  Description of Artificial Sequence: Synthetic oligonucleotide
  Antisense strand to SEQ ID NO: 969554
uucucccuggaguaccgag

SEQ ID NO: 969556 - RNA, 19 nt, Artificial Sequence
  Description of Artificial Sequence: Synthetic oligonucleotide
  Sense strand starting at position 2386 of SEQ ID NO: 913989
ggucuuaaaggugagcauu

SEQ ID NO: 969557 - RNA, 19 nt, Artificial Sequence
  Description of Artificial Sequence: Synthetic oligonucleotide
  Antisense strand to SEQ ID NO: 969556
aaugcucaccuuuaagacc

SEQ ID NO: 969558 - RNA, 19 nt, Artificial Sequence
  Description of Artificial Sequence: Synthetic oligonucleotide
  Sense strand starting at position 3826 of SEQ ID NO: 913989
gccagcucagagcaagaua

SEQ ID NO: 969559 - RNA, 19 nt, Artificial Sequence
  Description of Artificial Sequence: Synthetic oligonucleotide
  Antisense strand to SEQ ID NO: 969558
uaucuugcucugagcuggc

SEQ ID NO: 969560 - RNA, 19 nt, Artificial Sequence
  Description of Artificial Sequence: Synthetic oligonucleotide
  Sense strand starting at position 3914 of SEQ ID NO: 913989
cauuaucaggucugguaaa

SEQ ID NO: 969561 - RNA, 19 nt, Artificial Sequence
  Description of Artificial Sequence: Synthetic oligonucleotide
  Antisense strand to SEQ ID NO: 969560
uuuaccagaccugauaaug

SEQ ID NO: 969562 - RNA, 19 nt, Artificial Sequence
  Description of Artificial Sequence: Synthetic oligonucleotide
  Sense strand starting at position 3747 of SEQ ID NO: 913989
gacucucaucugugacuga

SEQ ID NO: 969563 - RNA, 19 nt, Artificial Sequence
  Description of Artificial Sequence: Synthetic oligonucleotide
  Antisense strand to SEQ ID NO: 969562
ucagucacagaugagaguc

SEQ ID NO: 969564 - RNA, 19 nt, Artificial Sequence
  Description of Artificial Sequence: Synthetic oligonucleotide
  Sense strand starting at position 373 of SEQ ID NO: 913989
ugccaaauucuaggaguag

SEQ ID NO: 969565 - RNA, 19 nt, Artificial Sequence
  Description of Artificial Sequence: Synthetic oligonucleotide
  Antisense strand to SEQ ID NO: 969564
cuacuccuagaauuuggca

SEQ ID NO: 969566 - RNA, 19 nt, Artificial Sequence
  Description of Artificial Sequence: Synthetic oligonucleotide
  Sense strand starting at position 2795 of SEQ ID NO: 913989
gggacaggcucuucugauc

SEQ ID NO: 969567 - RNA, 19 nt, Artificial Sequence
  Description of Artificial Sequence: Synthetic oligonucleotide
  Antisense strand to SEQ ID NO: 969566
gaucagaagagccuguccc

SEQ ID NO: 969568 - RNA, 19 nt, Artificial Sequence
  Description of Artificial Sequence: Synthetic oligonucleotide
  Sense strand starting at position 2555 of SEQ ID NO: 913989
ugggaugauuacccgaguu

SEQ ID NO: 969569 - RNA, 19 nt, Artificial Sequence
  Description of Artificial Sequence: Synthetic oligonucleotide
  Antisense strand to SEQ ID NO: 969568
aacucggguaaucauccca

SEQ ID NO: 969570 - RNA, 19 nt, Artificial Sequence
  Description of Artificial Sequence: Synthetic oligonucleotide
  Sense strand starting at position 2554 of SEQ ID NO: 913989
cugggaugauuacccgagu

SEQ ID NO: 969571 - RNA, 19 nt, Artificial Sequence
  Description of Artificial Sequence: Synthetic oligonucleotide
  Antisense strand to SEQ ID NO: 969570
acucggguaaucaucccag

SEQ ID NO: 969572 - RNA, 19 nt, Artificial Sequence
  Description of Artificial Sequence: Synthetic oligonucleotide
  Sense strand starting at position 3148 of SEQ ID NO: 913989
cuaguaagaucuccaguua

SEQ ID NO: 969573 - RNA, 19 nt, Artificial Sequence
  Description of Artificial Sequence: Synthetic oligonucleotide
  Antisense strand to SEQ ID NO: 969572
uaacuggagaucuuacuag

SEQ ID NO: 969574 - RNA, 19 nt, Artificial Sequence
  Description of Artificial Sequence: Synthetic oligonucleotide
  Sense strand starting at position 3743 of SEQ ID NO: 913989
cccagacucucaucuguga

SEQ ID NO: 969575 - RNA, 19 nt, Artificial Sequence
  Description of Artificial Sequence: Synthetic oligonucleotide
  Antisense strand to SEQ ID NO: 969574
ucacagaugagagucuggg

SEQ ID NO: 969576 - RNA, 19 nt, Artificial Sequence
  Description of Artificial Sequence: Synthetic oligonucleotide
  Sense strand starting at position 302 of SEQ ID NO: 913989
guggguucuaauuauuagu

SEQ ID NO: 969577 - RNA, 19 nt, Artificial Sequence
  Description of Artificial Sequence: Synthetic oligonucleotide
  Antisense strand to SEQ ID NO: 969576
acuaauaauuagaacccac

SEQ ID NO: 969578 - RNA, 19 nt, Artificial Sequence
  Description of Artificial Sequence: Synthetic oligonucleotide
  Sense strand starting at position 466 of SEQ ID NO: 913989
gcauauauagcuugaagau

SEQ ID NO: 969579 - RNA, 19 nt, Artificial Sequence
  Description of Artificial Sequence: Synthetic oligonucleotide
  Antisense strand to SEQ ID NO: 969578
aucuucaagcuauauaugc

SEQ ID NO: 969580 - RNA, 19 nt, Artificial Sequence
  Description of Artificial Sequence: Synthetic oligonucleotide
  Sense strand starting at position 304 of SEQ ID NO: 913989
ggguucuaauuauuaguau

SEQ ID NO: 969581 - RNA, 19 nt, Artificial Sequence
  Description of Artificial Sequence: Synthetic oligonucleotide
  Antisense strand to SEQ ID NO: 969580
auacuaauaauuagaaccc

SEQ ID NO: 969582 - RNA, 19 nt, Artificial Sequence
  Description of Artificial Sequence: Synthetic oligonucleotide
  Sense strand starting at position 3751 of SEQ ID NO: 913989
cucaucugugacugacuua

SEQ ID NO: 969583 - RNA, 19 nt, Artificial Sequence
  Description of Artificial Sequence: Synthetic oligonucleotide
  Antisense strand to SEQ ID NO: 969582
uaagucagucacagaugag

SEQ ID NO: 969584 - RNA, 19 nt, Artificial Sequence
  Description of Artificial Sequence: Synthetic oligonucleotide
  Sense strand starting at position 1171 of SEQ ID NO: 913989
ucuguuugauuugagggaa

SEQ ID NO: 969585 - RNA, 19 nt, Artificial Sequence
  Description of Artificial Sequence: Synthetic oligonucleotide
  Antisense strand to SEQ ID NO: 969584
uucccucaaaucaaacaga

SEQ ID NO: 969586 - RNA, 19 nt, Artificial Sequence
  Description of Artificial Sequence: Synthetic oligonucleotide
  Sense strand starting at position 3319 of SEQ ID NO: 913989
agcaauaguuuagucaaua

SEQ ID NO: 969587 - RNA, 19 nt, Artificial Sequence
  Description of Artificial Sequence: Synthetic oligonucleotide
  Antisense strand to SEQ ID NO: 969586
uauugacuaaacuauugcu

SEQ ID NO: 969588 - RNA, 19 nt, Artificial Sequence
  Description of Artificial Sequence: Synthetic oligonucleotide
  Sense strand starting at position 684 of SEQ ID NO: 913989
aguuaaccuuuggcuagau

SEQ ID NO: 969589 - RNA, 19 nt, Artificial Sequence
  Description of Artificial Sequence: Synthetic oligonucleotide
  Antisense strand to SEQ ID NO: 969588
aucuagccaaagguuaacu

SEQ ID NO: 969590 - RNA, 19 nt, Artificial Sequence
  Description of Artificial Sequence: Synthetic oligonucleotide
  Sense strand starting at position 2800 of SEQ ID NO: 913989
aggcucuucugaucuugau

SEQ ID NO: 969591 - RNA, 19 nt, Artificial Sequence
  Description of Artificial Sequence: Synthetic oligonucleotide
  Antisense strand to SEQ ID NO: 969590
aucaagaucagaagagccu

SEQ ID NO: 969592 - RNA, 19 nt, Artificial Sequence
  Description of Artificial Sequence: Synthetic oligonucleotide
  Sense strand starting at position 3945 of SEQ ID NO: 913989
ggugaauuguaacuuuccu

SEQ ID NO: 969593 - RNA, 19 nt, Artificial Sequence
  Description of Artificial Sequence: Synthetic oligonucleotide
  Antisense strand to SEQ ID NO: 969592
aggaaaguuacaauucacc

SEQ ID NO: 969594 - RNA, 19 nt, Artificial Sequence
  Description of Artificial Sequence: Synthetic oligonucleotide
  Sense strand starting at position 2235 of SEQ ID NO: 913989
aggcucuaagcuuggacua

SEQ ID NO: 969595 - RNA, 19 nt, Artificial Sequence
  Description of Artificial Sequence: Synthetic oligonucleotide
  Antisense strand to SEQ ID NO: 969594
uaguccaagcuuagagccu

SEQ ID NO: 969596 - RNA, 19 nt, Artificial Sequence
  Description of Artificial Sequence: Synthetic oligonucleotide
  Sense strand starting at position 457 of SEQ ID NO: 913989
guuuguucugcauauauag

SEQ ID NO: 969597 - RNA, 19 nt, Artificial Sequence
  Description of Artificial Sequence: Synthetic oligonucleotide
  Antisense strand to SEQ ID NO: 969596
cuauauaugcagaacaaac

SEQ ID NO: 969598 - RNA, 19 nt, Artificial Sequence
  Description of Artificial Sequence: Synthetic oligonucleotide
  Sense strand starting at position 363 of SEQ ID NO: 913990
gugaauaaauacucuggau

SEQ ID NO: 969599 - RNA, 19 nt, Artificial Sequence
  Description of Artificial Sequence: Synthetic oligonucleotide
  Antisense strand to SEQ ID NO: 969598
auccagaguauuuauucac

SEQ ID NO: 969600 - RNA, 19 nt, Artificial Sequence
  Description of Artificial Sequence: Synthetic oligonucleotide
  Sense strand starting at position 459 of SEQ ID NO: 913990
agaagucaucuuugacaca

SEQ ID NO: 969601 - RNA, 19 nt, Artificial Sequence
  Description of Artificial Sequence: Synthetic oligonucleotide
  Antisense strand to SEQ ID NO: 969600
ugugucaaagaugacuucu

SEQ ID NO: 969602 - RNA, 19 nt, Artificial Sequence
  Description of Artificial Sequence: Synthetic oligonucleotide
  Sense strand starting at position 3811 of SEQ ID NO: 913990
acaucaucagucugagaua

SEQ ID NO: 969603 - RNA, 19 nt, Artificial Sequence
  Description of Artificial Sequence: Synthetic oligonucleotide
  Antisense strand to SEQ ID NO: 969602
uaucucagacugaugaugu

SEQ ID NO: 969604 - RNA, 19 nt, Artificial Sequence
  Description of Artificial Sequence: Synthetic oligonucleotide
  Sense strand starting at position 2723 of SEQ ID NO: 913990
ucccaaaccggucagaauu

SEQ ID NO: 969605 - RNA, 19 nt, Artificial Sequence
  Description of Artificial Sequence: Synthetic oligonucleotide
  Antisense strand to SEQ ID NO: 969604
aauucugaccgguuuggga

SEQ ID NO: 969606 - RNA, 19 nt, Artificial Sequence
  Description of Artificial Sequence: Synthetic oligonucleotide
  Sense strand starting at position 3512 of SEQ ID NO: 913990
ccuagugaacacugaugau

SEQ ID NO: 969607 - RNA, 19 nt, Artificial Sequence
  Description of Artificial Sequence: Synthetic oligonucleotide
  Antisense strand to SEQ ID NO: 969606
aucaucaguguucacuagg

SEQ ID NO: 969608 - RNA, 19 nt, Artificial Sequence
  Description of Artificial Sequence: Synthetic oligonucleotide
  Sense strand starting at position 279 of SEQ ID NO: 913990
agugaauaacaccaguguu

SEQ ID NO: 969609 - RNA, 19 nt, Artificial Sequence
  Description of Artificial Sequence: Synthetic oligonucleotide
  Antisense strand to SEQ ID NO: 969608
aacacugguguuauucacu

SEQ ID NO: 969610 - RNA, 19 nt, Artificial Sequence
  Description of Artificial Sequence: Synthetic oligonucleotide
  Sense strand starting at position 3071 of SEQ ID NO: 913990
cagauaucucagggucuag

SEQ ID NO: 969611 - RNA, 19 nt, Artificial Sequence
  Description of Artificial Sequence: Synthetic oligonucleotide
  Antisense strand to SEQ ID NO: 969610
cuagacccugagauaucug

SEQ ID NO: 969612 - RNA, 19 nt, Artificial Sequence
  Description of Artificial Sequence: Synthetic oligonucleotide
  Sense strand starting at position 3446 of SEQ ID NO: 913990
agcaacuaccuuggacaua

SEQ ID NO: 969613 - RNA, 19 nt, Artificial Sequence
  Description of Artificial Sequence: Synthetic oligonucleotide
  Antisense strand to SEQ ID NO: 969612
uauguccaagguaguugcu

SEQ ID NO: 969614 - RNA, 19 nt, Artificial Sequence
  Description of Artificial Sequence: Synthetic oligonucleotide
  Sense strand starting at position 623 of SEQ ID NO: 913990
auacuuagaauguggcaga

SEQ ID NO: 969615 - RNA, 19 nt, Artificial Sequence
  Description of Artificial Sequence: Synthetic oligonucleotide
  Antisense strand to SEQ ID NO: 969614
ucugccacauucuaaguau

SEQ ID NO: 969616 - RNA, 19 nt, Artificial Sequence
  Description of Artificial Sequence: Synthetic oligonucleotide
  Sense strand starting at position 1215 of SEQ ID NO: 913990
caacgugggccucaaagau

SEQ ID NO: 969617 - RNA, 19 nt, Artificial Sequence
  Description of Artificial Sequence: Synthetic oligonucleotide
  Antisense strand to SEQ ID NO: 969616
aucuuugaggcccacguug

SEQ ID NO: 969618 - RNA, 19 nt, Artificial Sequence
  Description of Artificial Sequence: Synthetic oligonucleotide
  Sense strand starting at position 3224 of SEQ ID NO: 913990
cugguugguacuuaguaaa

SEQ ID NO: 969619 - RNA, 19 nt, Artificial Sequence
  Description of Artificial Sequence: Synthetic oligonucleotide
  Antisense strand to SEQ ID NO: 969618
uuuacuaaguaccaaccag

SEQ ID NO: 969620 - RNA, 19 nt, Artificial Sequence
  Description of Artificial Sequence: Synthetic oligonucleotide
  Sense strand starting at position 764 of SEQ ID NO: 913990
ugggcucaggucugaaaga

SEQ ID NO: 969621 - RNA, 19 nt, Artificial Sequence
  Description of Artificial Sequence: Synthetic oligonucleotide
  Antisense strand to SEQ ID NO: 969620
ucuuucagaccugagccca

SEQ ID NO: 969622 - RNA, 19 nt, Artificial Sequence
  Description of Artificial Sequence: Synthetic oligonucleotide
  Sense strand starting at position 3481 of SEQ ID NO: 913990
ggcaaagugcuguaggaga

SEQ ID NO: 969623 - RNA, 19 nt, Artificial Sequence
  Description of Artificial Sequence: Synthetic oligonucleotide
  Antisense strand to SEQ ID NO: 969622
ucuccuacagcacuuugcc

SEQ ID NO: 969624 - RNA, 19 nt, Artificial Sequence
  Description of Artificial Sequence: Synthetic oligonucleotide
  Sense strand starting at position 2627 of SEQ ID NO: 913990
gagccucauccucagguua

SEQ ID NO: 969625 - RNA, 19 nt, Artificial Sequence
  Description of Artificial Sequence: Synthetic oligonucleotide
  Antisense strand to SEQ ID NO: 969624
uaaccugaggaugaggcuc

SEQ ID NO: 969626 - RNA, 19 nt, Artificial Sequence
  Description of Artificial Sequence: Synthetic oligonucleotide
  Sense strand starting at position 2946 of SEQ ID NO: 913990
uggcucaguccuggauaaa

SEQ ID NO: 969627 - RNA, 19 nt, Artificial Sequence
  Description of Artificial Sequence: Synthetic oligonucleotide
  Antisense strand to SEQ ID NO: 969626
uuuauccaggacugagcca

SEQ ID NO: 969628 - RNA, 19 nt, Artificial Sequence
  Description of Artificial Sequence: Synthetic oligonucleotide
  Sense strand starting at position 3522 of SEQ ID NO: 913990
acugaugaucucggucuga

SEQ ID NO: 969629 - RNA, 19 nt, Artificial Sequence
  Description of Artificial Sequence: Synthetic oligonucleotide
  Antisense strand to SEQ ID NO: 969628
ucagaccgagaucaucagu

SEQ ID NO: 969630 - RNA, 19 nt, Artificial Sequence
  Description of Artificial Sequence: Synthetic oligonucleotide
  Sense strand starting at position 3526 of SEQ ID NO: 913990
augaucucggucugagauu

SEQ ID NO: 969631 - RNA, 19 nt, Artificial Sequence
  Description of Artificial Sequence: Synthetic oligonucleotide
  Antisense strand to SEQ ID NO: 969630
aaucucagaccgagaucau

SEQ ID NO: 969632 - RNA, 19 nt, Artificial Sequence
  Description of Artificial Sequence: Synthetic oligonucleotide
  Sense strand starting at position 3347 of SEQ ID NO: 913990
acguauauaucaucaggca

SEQ ID NO: 969633 - RNA, 19 nt, Artificial Sequence
  Description of Artificial Sequence: Synthetic oligonucleotide
  Antisense strand to SEQ ID NO: 969632
ugccugaugauauauacgu

SEQ ID NO: 969634 - RNA, 19 nt, Artificial Sequence
  Description of Artificial Sequence: Synthetic oligonucleotide
  Sense strand starting at position 1272 of SEQ ID NO: 913990
gugcgcgucccuguuuaga

SEQ ID NO: 969635 - RNA, 19 nt, Artificial Sequence
  Description of Artificial Sequence: Synthetic oligonucleotide
  Antisense strand to SEQ ID NO: 969634
ucuaaacagggacgcgcac

SEQ ID NO: 969636 - RNA, 19 nt, Artificial Sequence
  Description of Artificial Sequence: Synthetic oligonucleotide
  Sense strand starting at position 2275 of SEQ ID NO: 913990
accguucgaaccugaaauu

SEQ ID NO: 969637 - RNA, 19 nt, Artificial Sequence
  Description of Artificial Sequence: Synthetic oligonucleotide
  Antisense strand to SEQ ID NO: 969636
aauuucagguucgaacggu

SEQ ID NO: 969638 - RNA, 19 nt, Artificial Sequence
  Description of Artificial Sequence: Synthetic oligonucleotide
  Sense strand starting at position 3539 of SEQ ID NO: 913990
gagauugucagguggccau

SEQ ID NO: 969639 - RNA, 19 nt, Artificial Sequence
  Description of Artificial Sequence: Synthetic oligonucleotide
  Antisense strand to SEQ ID NO: 969638
auggccaccugacaaucuc

SEQ ID NO: 969640 - RNA, 19 nt, Artificial Sequence
  Description of Artificial Sequence: Synthetic oligonucleotide
  Sense strand starting at position 3223 of SEQ ID NO: 913990
ccugguugguacuuaguaa

SEQ ID NO: 969641 - RNA, 19 nt, Artificial Sequence
  Description of Artificial Sequence: Synthetic oligonucleotide
  Antisense strand to SEQ ID NO: 969640
uuacuaaguaccaaccagg

SEQ ID NO: 969642 - RNA, 19 nt, Artificial Sequence
  Description of Artificial Sequence: Synthetic oligonucleotide
  Sense strand starting at position 3647 of SEQ ID NO: 913990
aguugugugcugggugaga

SEQ ID NO: 969643 - RNA, 19 nt, Artificial Sequence
  Description of Artificial Sequence: Synthetic oligonucleotide
  Antisense strand to SEQ ID NO: 969642
ucucacccagcacacaacu

SEQ ID NO: 969644 - RNA, 19 nt, Artificial Sequence
  Description of Artificial Sequence: Synthetic oligonucleotide
  Sense strand starting at position 857 of SEQ ID NO: 913990
ucaggcaucucugaaagaa

SEQ ID NO: 969645 - RNA, 19 nt, Artificial Sequence
  Description of Artificial Sequence: Synthetic oligonucleotide
  Antisense strand to SEQ ID NO: 969644
uucuuucagagaugccuga

SEQ ID NO: 969646 - RNA, 19 nt, Artificial Sequence
  Description of Artificial Sequence: Synthetic oligonucleotide
  Sense strand starting at position 3812 of SEQ ID NO: 913990
caucaucagucugagauag

SEQ ID NO: 969647 - RNA, 19 nt, Artificial Sequence
  Description of Artificial Sequence: Synthetic oligonucleotide
  Antisense strand to SEQ ID NO: 969646
cuaucucagacugaugaug

SEQ ID NO: 969648 - RNA, 19 nt, Artificial Sequence
  Description of Artificial Sequence: Synthetic oligonucleotide
  Sense strand starting at position 460 of SEQ ID NO: 913990
gaagucaucuuugacacag

SEQ ID NO: 969649 - RNA, 19 nt, Artificial Sequence
  Description of Artificial Sequence: Synthetic oligonucleotide
  Antisense strand to SEQ ID NO: 969648
cugugucaaagaugacuuc

SEQ ID NO: 969650 - RNA, 19 nt, Artificial Sequence
  Description of Artificial Sequence: Synthetic oligonucleotide
  Sense strand starting at position 3447 of SEQ ID NO: 913990
gcaacuaccuuggacauaa

SEQ ID NO: 969651 - RNA, 19 nt, Artificial Sequence
  Description of Artificial Sequence: Synthetic oligonucleotide
  Antisense strand to SEQ ID NO: 969650
uuauguccaagguaguugc

SEQ ID NO: 969652 - RNA, 19 nt, Artificial Sequence
  Description of Artificial Sequence: Synthetic oligonucleotide
  Sense strand starting at position 618 of SEQ ID NO: 913990
cuuuaauacuuagaaugug

SEQ ID NO: 969653 - RNA, 19 nt, Artificial Sequence
  Description of Artificial Sequence: Synthetic oligonucleotide
  Antisense strand to SEQ ID NO: 969652
cacauucuaaguauuaaag

SEQ ID NO: 969654 - RNA, 19 nt, Artificial Sequence
  Description of Artificial Sequence: Synthetic oligonucleotide
  Sense strand starting at position 353 of SEQ ID NO: 913990
uucugauggugugaauaaa

SEQ ID NO: 969655 - RNA, 19 nt, Artificial Sequence
  Description of Artificial Sequence: Synthetic oligonucleotide
  Antisense strand to SEQ ID NO: 969654
uuuauucacaccaucagaa

SEQ ID NO: 969656 - RNA, 19 nt, Artificial Sequence
  Description of Artificial Sequence: Synthetic oligonucleotide
  Sense strand starting at position 2921 of SEQ ID NO: 913990
ggugguuccugggacuaag

SEQ ID NO: 969657 - RNA, 19 nt, Artificial Sequence
  Description of Artificial Sequence: Synthetic oligonucleotide
  Antisense strand to SEQ ID NO: 969656
cuuagucccaggaaccacc

SEQ ID NO: 969658 - RNA, 19 nt, Artificial Sequence
  Description of Artificial Sequence: Synthetic oligonucleotide
  Sense strand starting at position 419 of SEQ ID NO: 913990
ggcauuucuuuccaugugu

SEQ ID NO: 969659 - RNA, 19 nt, Artificial Sequence
  Description of Artificial Sequence: Synthetic oligonucleotide
  Antisense strand to SEQ ID NO: 969658
acacauggaaagaaaugcc

SEQ ID NO: 969660 - RNA, 19 nt, Artificial Sequence
  Description of Artificial Sequence: Synthetic oligonucleotide
  Sense strand starting at position 902 of SEQ ID NO: 913990
cgggaucgcuguucucagu

SEQ ID NO: 969661 - RNA, 19 nt, Artificial Sequence
  Description of Artificial Sequence: Synthetic oligonucleotide
  Antisense strand to SEQ ID NO: 969660
acugagaacagcgaucccg

SEQ ID NO: 969662 - RNA, 19 nt, Artificial Sequence
  Description of Artificial Sequence: Synthetic oligonucleotide
  Sense strand starting at position 3227 of SEQ ID NO: 913990
guugguacuuaguaaauga

SEQ ID NO: 969663 - RNA, 19 nt, Artificial Sequence
  Description of Artificial Sequence: Synthetic oligonucleotide
  Antisense strand to SEQ ID NO: 969662
ucauuuacuaaguaccaac

SEQ ID NO: 969664 - RNA, 19 nt, Artificial Sequence
  Description of Artificial Sequence: Synthetic oligonucleotide
  Sense strand starting at position 3070 of SEQ ID NO: 913990
ccagauaucucagggucua

SEQ ID NO: 969665 - RNA, 19 nt, Artificial Sequence
  Description of Artificial Sequence: Synthetic oligonucleotide
  Antisense strand to SEQ ID NO: 969664
uagacccugagauaucugg

SEQ ID NO: 969666 - RNA, 19 nt, Artificial Sequence
  Description of Artificial Sequence: Synthetic oligonucleotide
  Sense strand starting at position 2918 of SEQ ID NO: 913990
gaaggugguuccugggacu

SEQ ID NO: 969667 - RNA, 19 nt, Artificial Sequence
  Description of Artificial Sequence: Synthetic oligonucleotide
  Antisense strand to SEQ ID NO: 969666
agucccaggaaccaccuuc

SEQ ID NO: 969668 - RNA, 19 nt, Artificial Sequence
  Description of Artificial Sequence: Synthetic oligonucleotide
  Sense strand starting at position 266 of SEQ ID NO: 913990
guuccuucuucccagugaa

SEQ ID NO: 969669 - RNA, 19 nt, Artificial Sequence
  Description of Artificial Sequence: Synthetic oligonucleotide
  Antisense strand to SEQ ID NO: 969668
uucacugggaagaaggaac

SEQ ID NO: 969670 - RNA, 19 nt, Artificial Sequence
  Description of Artificial Sequence: Synthetic oligonucleotide
  Sense strand starting at position 2945 of SEQ ID NO: 913990
auggcucaguccuggauaa

SEQ ID NO: 969671 - RNA, 19 nt, Artificial Sequence
  Description of Artificial Sequence: Synthetic oligonucleotide
  Antisense strand to SEQ ID NO: 969670
uuauccaggacugagccau

SEQ ID NO: 969672 - RNA, 19 nt, Artificial Sequence
  Description of Artificial Sequence: Synthetic oligonucleotide
  Sense strand starting at position 2629 of SEQ ID NO: 913990
gccucauccucagguuaag

SEQ ID NO: 969673 - RNA, 19 nt, Artificial Sequence
  Description of Artificial Sequence: Synthetic oligonucleotide
  Antisense strand to SEQ ID NO: 969672
cuuaaccugaggaugaggc

SEQ ID NO: 969674 - RNA, 19 nt, Artificial Sequence
  Description of Artificial Sequence: Synthetic oligonucleotide
  Sense strand starting at position 2337 of SEQ ID NO: 913990
ucgcuuugcucucaggaga

SEQ ID NO: 969675 - RNA, 19 nt, Artificial Sequence
  Description of Artificial Sequence: Synthetic oligonucleotide
  Antisense strand to SEQ ID NO: 969674
ucuccugagagcaaagcga

SEQ ID NO: 969676 - RNA, 19 nt, Artificial Sequence
  Description of Artificial Sequence: Synthetic oligonucleotide
  Sense strand starting at position 54 of SEQ ID NO: 913990
guuaaauucuacugugcac

SEQ ID NO: 969677 - RNA, 19 nt, Artificial Sequence
  Description of Artificial Sequence: Synthetic oligonucleotide
  Antisense strand to SEQ ID NO: 969676
gugcacaguagaauuuaac

SEQ ID NO: 969678 - RNA, 19 nt, Artificial Sequence
  Description of Artificial Sequence: Synthetic oligonucleotide
  Sense strand starting at position 684 of SEQ ID NO: 913991
ggcccaaagcaucagaaau

SEQ ID NO: 969679 - RNA, 19 nt, Artificial Sequence
  Description of Artificial Sequence: Synthetic oligonucleotide
  Antisense strand to SEQ ID NO: 969678
auuucugaugcuuugggcc

SEQ ID NO: 969680 - RNA, 19 nt, Artificial Sequence
  Description of Artificial Sequence: Synthetic oligonucleotide
  Sense strand starting at position 2802 of SEQ ID NO: 913991
gugggaggucugcaauaaa

SEQ ID NO: 969681 - RNA, 19 nt, Artificial Sequence
  Description of Artificial Sequence: Synthetic oligonucleotide
  Antisense strand to SEQ ID NO: 969680
uuuauugcagaccucccac

SEQ ID NO: 969682 - RNA, 19 nt, Artificial Sequence
  Description of Artificial Sequence: Synthetic oligonucleotide
  Sense strand starting at position 2919 of SEQ ID NO: 913991
uagggagcccuggaguauu

SEQ ID NO: 969683 - RNA, 19 nt, Artificial Sequence
  Description of Artificial Sequence: Synthetic oligonucleotide
  Antisense strand to SEQ ID NO: 969682
aauacuccagggcucccua

SEQ ID NO: 969684 - RNA, 19 nt, Artificial Sequence
  Description of Artificial Sequence: Synthetic oligonucleotide
  Sense strand starting at position 3610 of SEQ ID NO: 913991
cagugcauccuguggauuu

SEQ ID NO: 969685 - RNA, 19 nt, Artificial Sequence
  Description of Artificial Sequence: Synthetic oligonucleotide
  Antisense strand to SEQ ID NO: 969684
aaauccacaggaugcacug

SEQ ID NO: 969686 - RNA, 19 nt, Artificial Sequence
  Description of Artificial Sequence: Synthetic oligonucleotide
  Sense strand starting at position 3644 of SEQ ID NO: 913991
acgccaugugccuugucau

SEQ ID NO: 969687 - RNA, 19 nt, Artificial Sequence
  Description of Artificial Sequence: Synthetic oligonucleotide
  Antisense strand to SEQ ID NO: 969686
augacaaggcacauggcgu

SEQ ID NO: 969688 - RNA, 19 nt, Artificial Sequence
  Description of Artificial Sequence: Synthetic oligonucleotide
  Sense strand starting at position 2548 of SEQ ID NO: 913991
ugcuucuagcaagacugaa

SEQ ID NO: 969689 - RNA, 19 nt, Artificial Sequence
  Description of Artificial Sequence: Synthetic oligonucleotide
  Antisense strand to SEQ ID NO: 969688
uucagucuugcuagaagca

SEQ ID NO: 969690 - RNA, 19 nt, Artificial Sequence
  Description of Artificial Sequence: Synthetic oligonucleotide
  Sense strand starting at position 898 of SEQ ID NO: 913991
agaagaaacugagaaugaa

SEQ ID NO: 969691 - RNA, 19 nt, Artificial Sequence
  Description of Artificial Sequence: Synthetic oligonucleotide
  Antisense strand to SEQ ID NO: 969690
uucauucucaguuucuucu

SEQ ID NO: 969692 - RNA, 19 nt, Artificial Sequence
  Description of Artificial Sequence: Synthetic oligonucleotide
  Sense strand starting at position 3101 of SEQ ID NO: 913991
ggcaucugugauggacaga

SEQ ID NO: 969693 - RNA, 19 nt, Artificial Sequence
  Description of Artificial Sequence: Synthetic oligonucleotide
  Antisense strand to SEQ ID NO: 969692
ucuguccaucacagaugcc

SEQ ID NO: 969694 - RNA, 19 nt, Artificial Sequence
  Description of Artificial Sequence: Synthetic oligonucleotide
  Sense strand starting at position 875 of SEQ ID NO: 913991
caggaagggugucccuauu

SEQ ID NO: 969695 - RNA, 19 nt, Artificial Sequence
  Description of Artificial Sequence: Synthetic oligonucleotide
  Antisense strand to SEQ ID NO: 969694
aauagggacacccuuccug

SEQ ID NO: 969696 - RNA, 19 nt, Artificial Sequence
  Description of Artificial Sequence: Synthetic oligonucleotide
  Sense strand starting at position 3888 of SEQ ID NO: 913991
gugaacucugccugagaga

SEQ ID NO: 969697 - RNA, 19 nt, Artificial Sequence
  Description of Artificial Sequence: Synthetic oligonucleotide
  Antisense strand to SEQ ID NO: 969696
ucucucaggcagaguucac

SEQ ID NO: 969698 - RNA, 19 nt, Artificial Sequence
  Description of Artificial Sequence: Synthetic oligonucleotide
  Sense strand starting at position 2429 of SEQ ID NO: 913991
cgggauuagugagcuagag

SEQ ID NO: 969699 - RNA, 19 nt, Artificial Sequence
  Description of Artificial Sequence: Synthetic oligonucleotide
  Antisense strand to SEQ ID NO: 969698
cucuagcucacuaaucccg

SEQ ID NO: 969700 - RNA, 19 nt, Artificial Sequence
  Description of Artificial Sequence: Synthetic oligonucleotide
  Sense strand starting at position 2392 of SEQ ID NO: 913991
gcagucugagaggguuaga

SEQ ID NO: 969701 - RNA, 19 nt, Artificial Sequence
  Description of Artificial Sequence: Synthetic oligonucleotide
  Antisense strand to SEQ ID NO: 969700
ucuaacccucucagacugc

SEQ ID NO: 969702 - RNA, 19 nt, Artificial Sequence
  Description of Artificial Sequence: Synthetic oligonucleotide
  Sense strand starting at position 1477 of SEQ ID NO: 913991
cgaucugaccuugagcuuu

SEQ ID NO: 969703 - RNA, 19 nt, Artificial Sequence
  Description of Artificial Sequence: Synthetic oligonucleotide
  Antisense strand to SEQ ID NO: 969702
aaagcucaaggucagaucg

SEQ ID NO: 969704 - RNA, 19 nt, Artificial Sequence
  Description of Artificial Sequence: Synthetic oligonucleotide
  Sense strand starting at position 604 of SEQ ID NO: 913991
guuuccuaaucugucagaa

SEQ ID NO: 969705 - RNA, 19 nt, Artificial Sequence
  Description of Artificial Sequence: Synthetic oligonucleotide
  Antisense strand to SEQ ID NO: 969704
uucugacagauuaggaaac

SEQ ID NO: 969706 - RNA, 19 nt, Artificial Sequence
  Description of Artificial Sequence: Synthetic oligonucleotide
  Sense strand starting at position 711 of SEQ ID NO: 913991
aagagagugugucuaaggu

SEQ ID NO: 969707 - RNA, 19 nt, Artificial Sequence
  Description of Artificial Sequence: Synthetic oligonucleotide
  Antisense strand to SEQ ID NO: 969706
accuuagacacacucucuu

SEQ ID NO: 969708 - RNA, 19 nt, Artificial Sequence
  Description of Artificial Sequence: Synthetic oligonucleotide
  Sense strand starting at position 1007 of SEQ ID NO: 913991
gggcuuucccucuaaagcu

SEQ ID NO: 969709 - RNA, 19 nt, Artificial Sequence
  Description of Artificial Sequence: Synthetic oligonucleotide
  Antisense strand to SEQ ID NO: 969708
agcuuuagagggaaagccc

SEQ ID NO: 969710 - RNA, 19 nt, Artificial Sequence
  Description of Artificial Sequence: Synthetic oligonucleotide
  Sense strand starting at position 2208 of SEQ ID NO: 913991
cugguuccauguuuauuaa

SEQ ID NO: 969711 - RNA, 19 nt, Artificial Sequence
  Description of Artificial Sequence: Synthetic oligonucleotide
  Antisense strand to SEQ ID NO: 969710
uuaauaaacauggaaccag

SEQ ID NO: 969712 - RNA, 19 nt, Artificial Sequence
  Description of Artificial Sequence: Synthetic oligonucleotide
  Sense strand starting at position 641 of SEQ ID NO: 913991
uggccuacuucuguggaca

SEQ ID NO: 969713 - RNA, 19 nt, Artificial Sequence
  Description of Artificial Sequence: Synthetic oligonucleotide
  Antisense strand to SEQ ID NO: 969712
uguccacagaaguaggcca

SEQ ID NO: 969714 - RNA, 19 nt, Artificial Sequence
  Description of Artificial Sequence: Synthetic oligonucleotide
  Sense strand starting at position 2993 of SEQ ID NO: 913991
aggguaagggugcgaucau

SEQ ID NO: 969715 - RNA, 19 nt, Artificial Sequence
  Description of Artificial Sequence: Synthetic oligonucleotide
  Antisense strand to SEQ ID NO: 969714
augaucgcacccuuacccu

SEQ ID NO: 969716 - RNA, 19 nt, Artificial Sequence
  Description of Artificial Sequence: Synthetic oligonucleotide
  Sense strand starting at position 2211 of SEQ ID NO: 913991
guuccauguuuauuaaggu

SEQ ID NO: 969717 - RNA, 19 nt, Artificial Sequence
  Description of Artificial Sequence: Synthetic oligonucleotide
  Antisense strand to SEQ ID NO: 969716
accuuaauaaacauggaac

SEQ ID NO: 969718 - RNA, 19 nt, Artificial Sequence
  Description of Artificial Sequence: Synthetic oligonucleotide
  Sense strand starting at position 3531 of SEQ ID NO: 913991
augauugugcccugaggug

SEQ ID NO: 969719 - RNA, 19 nt, Artificial Sequence
  Description of Artificial Sequence: Synthetic oligonucleotide
  Antisense strand to SEQ ID NO: 969718
caccucagggcacaaucau

SEQ ID NO: 969720 - RNA, 19 nt, Artificial Sequence
  Description of Artificial Sequence: Synthetic oligonucleotide
  Sense strand starting at position 1030 of SEQ ID NO: 913991
uggugacuguuucuuacuu

SEQ ID NO: 969721 - RNA, 19 nt, Artificial Sequence
  Description of Artificial Sequence: Synthetic oligonucleotide
  Antisense strand to SEQ ID NO: 969720
aaguaagaaacagucacca

SEQ ID NO: 969722 - RNA, 19 nt, Artificial Sequence
  Description of Artificial Sequence: Synthetic oligonucleotide
  Sense strand starting at position 1031 of SEQ ID NO: 913991
ggugacuguuucuuacuuu

SEQ ID NO: 969723 - RNA, 19 nt, Artificial Sequence
  Description of Artificial Sequence: Synthetic oligonucleotide
  Antisense strand to SEQ ID NO: 969722
aaaguaagaaacagucacc

SEQ ID NO: 969724 - RNA, 19 nt, Artificial Sequence
  Description of Artificial Sequence: Synthetic oligonucleotide
  Sense strand starting at position 2137 of SEQ ID NO: 913991
cgugaagugcuuugaaaca

SEQ ID NO: 969725 - RNA, 19 nt, Artificial Sequence
  Description of Artificial Sequence: Synthetic oligonucleotide
  Antisense strand to SEQ ID NO: 969724
uguuucaaagcacuucacg

SEQ ID NO: 969726 - RNA, 19 nt, Artificial Sequence
  Description of Artificial Sequence: Synthetic oligonucleotide
  Sense strand starting at position 3647 of SEQ ID NO: 913991
ccaugugccuugucaugaa

SEQ ID NO: 969727 - RNA, 19 nt, Artificial Sequence
  Description of Artificial Sequence: Synthetic oligonucleotide
  Antisense strand to SEQ ID NO: 969726
uucaugacaaggcacaugg

SEQ ID NO: 969728 - RNA, 19 nt, Artificial Sequence
  Description of Artificial Sequence: Synthetic oligonucleotide
  Sense strand starting at position 3368 of SEQ ID NO: 913991
cuggaaguuuggcuagcuu

SEQ ID NO: 969729 - RNA, 19 nt, Artificial Sequence
  Description of Artificial Sequence: Synthetic oligonucleotide
  Antisense strand to SEQ ID NO: 969728
aagcuagccaaacuuccag

SEQ ID NO: 969730 - RNA, 19 nt, Artificial Sequence
  Description of Artificial Sequence: Synthetic oligonucleotide
  Sense strand starting at position 3651 of SEQ ID NO: 913991
gugccuugucaugaagcuu

SEQ ID NO: 969731 - RNA, 19 nt, Artificial Sequence
  Description of Artificial Sequence: Synthetic oligonucleotide
  Antisense strand to SEQ ID NO: 969730
aagcuucaugacaaggcac

SEQ ID NO: 969732 - RNA, 19 nt, Artificial Sequence
  Description of Artificial Sequence: Synthetic oligonucleotide
  Sense strand starting at position 2288 of SEQ ID NO: 913991
gagcaucuauacguugcaa

SEQ ID NO: 969733 - RNA, 19 nt, Artificial Sequence
  Description of Artificial Sequence: Synthetic oligonucleotide
  Antisense strand to SEQ ID NO: 969732
uugcaacguauagaugcuc

SEQ ID NO: 969734 - RNA, 19 nt, Artificial Sequence
  Description of Artificial Sequence: Synthetic oligonucleotide
  Sense strand starting at position 608 of SEQ ID NO: 913991
ccuaaucugucagaagaga

SEQ ID NO: 969735 - RNA, 19 nt, Artificial Sequence
  Description of Artificial Sequence: Synthetic oligonucleotide
  Antisense strand to SEQ ID NO: 969734
ucucuucugacagauuagg

SEQ ID NO: 969736 - RNA, 19 nt, Artificial Sequence
  Description of Artificial Sequence: Synthetic oligonucleotide
  Sense strand starting at position 1476 of SEQ ID NO: 913991
gcgaucugaccuugagcuu

SEQ ID NO: 969737 - RNA, 19 nt, Artificial Sequence
  Description of Artificial Sequence: Synthetic oligonucleotide
  Antisense strand to SEQ ID NO: 969736
aagcucaaggucagaucgc

SEQ ID NO: 969738 - RNA, 19 nt, Artificial Sequence
  Description of Artificial Sequence: Synthetic oligonucleotide
  Sense strand starting at position 3033 of SEQ ID NO: 913991
ucgugucuguucuuaggau

SEQ ID NO: 969739 - RNA, 19 nt, Artificial Sequence
  Description of Artificial Sequence: Synthetic oligonucleotide
  Antisense strand to SEQ ID NO: 969738
auccuaagaacagacacga

SEQ ID NO: 969740 - RNA, 19 nt, Artificial Sequence
  Description of Artificial Sequence: Synthetic oligonucleotide
  Sense strand starting at position 2290 of SEQ ID NO: 913991
gcaucuauacguugcaauu

SEQ ID NO: 969741 - RNA, 19 nt, Artificial Sequence
  Description of Artificial Sequence: Synthetic oligonucleotide
  Antisense strand to SEQ ID NO: 969740
aauugcaacguauagaugc

SEQ ID NO: 969742 - RNA, 19 nt, Artificial Sequence
  Description of Artificial Sequence: Synthetic oligonucleotide
  Sense strand starting at position 606 of SEQ ID NO: 913991
uuccuaaucugucagaaga

SEQ ID NO: 969743 - RNA, 19 nt, Artificial Sequence
  Description of Artificial Sequence: Synthetic oligonucleotide
  Antisense strand to SEQ ID NO: 969742
ucuucugacagauuaggaa

SEQ ID NO: 969744 - RNA, 19 nt, Artificial Sequence
  Description of Artificial Sequence: Synthetic oligonucleotide
  Sense strand starting at position 3002 of SEQ ID NO: 913991
gugcgaucaugcuccucau

SEQ ID NO: 969745 - RNA, 19 nt, Artificial Sequence
  Description of Artificial Sequence: Synthetic oligonucleotide
  Antisense strand to SEQ ID NO: 969744
augaggagcaugaucgcac

SEQ ID NO: 969746 - RNA, 19 nt, Artificial Sequence
  Description of Artificial Sequence: Synthetic oligonucleotide
  Sense strand starting at position 2212 of SEQ ID NO: 913991
uuccauguuuauuaaggua

SEQ ID NO: 969747 - RNA, 19 nt, Artificial Sequence
  Description of Artificial Sequence: Synthetic oligonucleotide
  Antisense strand to SEQ ID NO: 969746
uaccuuaauaaacauggaa

SEQ ID NO: 969748 - RNA, 19 nt, Artificial Sequence
  Description of Artificial Sequence: Synthetic oligonucleotide
  Sense strand starting at position 3645 of SEQ ID NO: 913991
cgccaugugccuugucaug

SEQ ID NO: 969749 - RNA, 19 nt, Artificial Sequence
  Description of Artificial Sequence: Synthetic oligonucleotide
  Antisense strand to SEQ ID NO: 969748
caugacaaggcacauggcg

SEQ ID NO: 969750 - RNA, 19 nt, Artificial Sequence
  Description of Artificial Sequence: Synthetic oligonucleotide
  Sense strand starting at position 142 of SEQ ID NO: 913991
gcucccagcuacuaugaga

SEQ ID NO: 969751 - RNA, 19 nt, Artificial Sequence
  Description of Artificial Sequence: Synthetic oligonucleotide
  Antisense strand to SEQ ID NO: 969750
ucucauaguagcugggagc

SEQ ID NO: 969752 - RNA, 19 nt, Artificial Sequence
  Description of Artificial Sequence: Synthetic oligonucleotide
  Sense strand starting at position 2545 of SEQ ID NO: 913991
accugcuucuagcaagacu

SEQ ID NO: 969753 - RNA, 19 nt, Artificial Sequence
  Description of Artificial Sequence: Synthetic oligonucleotide
  Antisense strand to SEQ ID NO: 969752
agucuugcuagaagcaggu

SEQ ID NO: 969754 - RNA, 19 nt, Artificial Sequence
  Description of Artificial Sequence: Synthetic oligonucleotide
  Sense strand starting at position 2389 of SEQ ID NO: 913991
ccugcagucugagaggguu

SEQ ID NO: 969755 - RNA, 19 nt, Artificial Sequence
  Description of Artificial Sequence: Synthetic oligonucleotide
  Antisense strand to SEQ ID NO: 969754
aacccucucagacugcagg

SEQ ID NO: 969756 - RNA, 19 nt, Artificial Sequence
  Description of Artificial Sequence: Synthetic oligonucleotide
  Sense strand starting at position 715 of SEQ ID NO: 913991
gagugugucuaagguagaa

SEQ ID NO: 969757 - RNA, 19 nt, Artificial Sequence
  Description of Artificial Sequence: Synthetic oligonucleotide
  Antisense strand to SEQ ID NO: 969756
uucuaccuuagacacacuc

SEQ ID NO: 969758 - RNA, 19 nt, Artificial Sequence
  Description of Artificial Sequence: Synthetic oligonucleotide
  Sense strand starting at position 111 of SEQ ID NO: 913992
ggucacuaugucuagggaa

SEQ ID NO: 969759 - RNA, 19 nt, Artificial Sequence
  Description of Artificial Sequence: Synthetic oligonucleotide
  Antisense strand to SEQ ID NO: 969758
uucccuagacauagugacc

SEQ ID NO: 969760 - RNA, 19 nt, Artificial Sequence
  Description of Artificial Sequence: Synthetic oligonucleotide
  Sense strand starting at position 1108 of SEQ ID NO: 913992
agaauuuacuguguuagcu

SEQ ID NO: 969761 - RNA, 19 nt, Artificial Sequence
  Description of Artificial Sequence: Synthetic oligonucleotide
  Antisense strand to SEQ ID NO: 969760
agcuaacacaguaaauucu

SEQ ID NO: 969762 - RNA, 19 nt, Artificial Sequence
  Description of Artificial Sequence: Synthetic oligonucleotide
  Sense strand starting at position 3894 of SEQ ID NO: 913992
gcaccauauugucuuauuu

SEQ ID NO: 969763 - RNA, 19 nt, Artificial Sequence
  Description of Artificial Sequence: Synthetic oligonucleotide
  Antisense strand to SEQ ID NO: 969762
aaauaagacaauauggugc

SEQ ID NO: 969764 - RNA, 19 nt, Artificial Sequence
  Description of Artificial Sequence: Synthetic oligonucleotide
  Sense strand starting at position 3918 of SEQ ID NO: 913992
acccaucaaugguuagaau

SEQ ID NO: 969765 - RNA, 19 nt, Artificial Sequence
  Description of Artificial Sequence: Synthetic oligonucleotide
  Antisense strand to SEQ ID NO: 969764
auucuaaccauugaugggu

SEQ ID NO: 969766 - RNA, 19 nt, Artificial Sequence
  Description of Artificial Sequence: Synthetic oligonucleotide
  Sense strand starting at position 3267 of SEQ ID NO: 913992
cguucugaagaugaaguaa

SEQ ID NO: 969767 - RNA, 19 nt, Artificial Sequence
  Description of Artificial Sequence: Synthetic oligonucleotide
  Antisense strand to SEQ ID NO: 969766
uuacuucaucuucagaacg

SEQ ID NO: 969768 - RNA, 19 nt, Artificial Sequence
  Description of Artificial Sequence: Synthetic oligonucleotide
  Sense strand starting at position 1180 of SEQ ID NO: 913992
gcuauauuugugggucuaa

SEQ ID NO: 969769 - RNA, 19 nt, Artificial Sequence
  Description of Artificial Sequence: Synthetic oligonucleotide
  Antisense strand to SEQ ID NO: 969768
uuagacccacaaauauagc

SEQ ID NO: 969770 - RNA, 19 nt, Artificial Sequence
  Description of Artificial Sequence: Synthetic oligonucleotide
  Sense strand starting at position 3183 of SEQ ID NO: 913992
ggucuuuggauugacacuu

SEQ ID NO: 969771 - RNA, 19 nt, Artificial Sequence
  Description of Artificial Sequence: Synthetic oligonucleotide
  Antisense strand to SEQ ID NO: 969770
aagugucaauccaaagacc

SEQ ID NO: 969772 - RNA, 19 nt, Artificial Sequence
  Description of Artificial Sequence: Synthetic oligonucleotide
  Sense strand starting at position 2547 of SEQ ID NO: 913992
uaacaaauguuguuaggaa

SEQ ID NO: 969773 - RNA, 19 nt, Artificial Sequence
  Description of Artificial Sequence: Synthetic oligonucleotide
  Antisense strand to SEQ ID NO: 969772
uuccuaacaacauuuguua

SEQ ID NO: 969774 - RNA, 19 nt, Artificial Sequence
  Description of Artificial Sequence: Synthetic oligonucleotide
  Sense strand starting at position 41 of SEQ ID NO: 913992
uuugauuaucuccaaggca

SEQ ID NO: 969775 - RNA, 19 nt, Artificial Sequence
  Description of Artificial Sequence: Synthetic oligonucleotide
  Antisense strand to SEQ ID NO: 969774
ugccuuggagauaaucaaa

SEQ ID NO: 969776 - RNA, 19 nt, Artificial Sequence
  Description of Artificial Sequence: Synthetic oligonucleotide
  Sense strand starting at position 1633 of SEQ ID NO: 913992
cuuuaagaugcugauuacu

SEQ ID NO: 969777 - RNA, 19 nt, Artificial Sequence
  Description of Artificial Sequence: Synthetic oligonucleotide
  Antisense strand to SEQ ID NO: 969776
aguaaucagcaucuuaaag

SEQ ID NO: 969778 - RNA, 19 nt, Artificial Sequence
  Description of Artificial Sequence: Synthetic oligonucleotide
  Sense strand starting at position 1455 of SEQ ID NO: 913992
gcaaacgucguccuguaau

SEQ ID NO: 969779 - RNA, 19 nt, Artificial Sequence
  Description of Artificial Sequence: Synthetic oligonucleotide
  Antisense strand to SEQ ID NO: 969778
auuacaggacgacguuugc

SEQ ID NO: 969780 - RNA, 19 nt, Artificial Sequence
  Description of Artificial Sequence: Synthetic oligonucleotide
  Sense strand starting at position 1454 of SEQ ID NO: 913992
ugcaaacgucguccuguaa

SEQ ID NO: 969781 - RNA, 19 nt, Artificial Sequence
  Description of Artificial Sequence: Synthetic oligonucleotide
  Antisense strand to SEQ ID NO: 969780
uuacaggacgacguuugca

SEQ ID NO: 969782 - RNA, 19 nt, Artificial Sequence
  Description of Artificial Sequence: Synthetic oligonucleotide
  Sense strand starting at position 1655 of SEQ ID NO: 913992
auaggcucugcuuaagaaa

SEQ ID NO: 969783 - RNA, 19 nt, Artificial Sequence
  Description of Artificial Sequence: Synthetic oligonucleotide
  Antisense strand to SEQ ID NO: 969782
uuucuuaagcagagccuau

SEQ ID NO: 969784 - RNA, 19 nt, Artificial Sequence
  Description of Artificial Sequence: Synthetic oligonucleotide
  Sense strand starting at position 3503 of SEQ ID NO: 913992
augugauauguccaauuau

SEQ ID NO: 969785 - RNA, 19 nt, Artificial Sequence
  Description of Artificial Sequence: Synthetic oligonucleotide
  Antisense strand to SEQ ID NO: 969784
auaauuggacauaucacau

SEQ ID NO: 969786 - RNA, 19 nt, Artificial Sequence
  Description of Artificial Sequence: Synthetic oligonucleotide
  Sense strand starting at position 1363 of SEQ ID NO: 913992
acuuuaaguccuggacaag

SEQ ID NO: 969787 - RNA, 19 nt, Artificial Sequence
  Description of Artificial Sequence: Synthetic oligonucleotide
  Antisense strand to SEQ ID NO: 969786
cuuguccaggacuuaaagu

SEQ ID NO: 969788 - RNA, 19 nt, Artificial Sequence
  Description of Artificial Sequence: Synthetic oligonucleotide
  Sense strand starting at position 2617 of SEQ ID NO: 913992
cguauuucugucuauucuu

SEQ ID NO: 969789 - RNA, 19 nt, Artificial Sequence
  Description of Artificial Sequence: Synthetic oligonucleotide
  Antisense strand to SEQ ID NO: 969788
aagaauagacagaaauacg

SEQ ID NO: 969790 - RNA, 19 nt, Artificial Sequence
  Description of Artificial Sequence: Synthetic oligonucleotide
  Sense strand starting at position 1635 of SEQ ID NO: 913992
uuaagaugcugauuacuaa

SEQ ID NO: 969791 - RNA, 19 nt, Artificial Sequence
  Description of Artificial Sequence: Synthetic oligonucleotide
  Antisense strand to SEQ ID NO: 969790
uuaguaaucagcaucuuaa

SEQ ID NO: 969792 - RNA, 19 nt, Artificial Sequence
  Description of Artificial Sequence: Synthetic oligonucleotide
  Sense strand starting at position 2385 of SEQ ID NO: 913992
guguaucgcauuugaaaug

SEQ ID NO: 969793 - RNA, 19 nt, Artificial Sequence
  Description of Artificial Sequence: Synthetic oligonucleotide
  Antisense strand to SEQ ID NO: 969792
cauuucaaaugcgauacac

SEQ ID NO: 969794 - RNA, 19 nt, Artificial Sequence
  Description of Artificial Sequence: Synthetic oligonucleotide
  Sense strand starting at position 2967 of SEQ ID NO: 913992
ugagcuauccauuagucaa

SEQ ID NO: 969795 - RNA, 19 nt, Artificial Sequence
  Description of Artificial Sequence: Synthetic oligonucleotide
  Antisense strand to SEQ ID NO: 969794
uugacuaauggauagcuca

SEQ ID NO: 969796 - RNA, 19 nt, Artificial Sequence
  Description of Artificial Sequence: Synthetic oligonucleotide
  Sense strand starting at position 222 of SEQ ID NO: 913992
uuccaauuccugggacuca

SEQ ID NO: 969797 - RNA, 19 nt, Artificial Sequence
  Description of Artificial Sequence: Synthetic oligonucleotide
  Antisense strand to SEQ ID NO: 969796
ugagucccaggaauuggaa

SEQ ID NO: 969798 - RNA, 19 nt, Artificial Sequence
  Description of Artificial Sequence: Synthetic oligonucleotide
  Sense strand starting at position 3021 of SEQ ID NO: 913992
acugucaaacaguggaauu

SEQ ID NO: 969799 - RNA, 19 nt, Artificial Sequence
  Description of Artificial Sequence: Synthetic oligonucleotide
  Antisense strand to SEQ ID NO: 969798
aauuccacuguuugacagu

SEQ ID NO: 969800 - RNA, 19 nt, Artificial Sequence
  Description of Artificial Sequence: Synthetic oligonucleotide
  Sense strand starting at position 113 of SEQ ID NO: 913992
ucacuaugucuagggaauu

SEQ ID NO: 969801 - RNA, 19 nt, Artificial Sequence
  Description of Artificial Sequence: Synthetic oligonucleotide
  Antisense strand to SEQ ID NO: 969800
aauucccuagacauaguga

SEQ ID NO: 969802 - RNA, 19 nt, Artificial Sequence
  Description of Artificial Sequence: Synthetic oligonucleotide
  Sense strand starting at position 3182 of SEQ ID NO: 913992
aggucuuuggauugacacu

SEQ ID NO: 969803 - RNA, 19 nt, Artificial Sequence
  Description of Artificial Sequence: Synthetic oligonucleotide
  Antisense strand to SEQ ID NO: 969802
agugucaauccaaagaccu

SEQ ID NO: 969804 - RNA, 19 nt, Artificial Sequence
  Description of Artificial Sequence: Synthetic oligonucleotide
  Sense strand starting at position 2315 of SEQ ID NO: 913992
guuacuugggaauagcuuu

SEQ ID NO: 969805 - RNA, 19 nt, Artificial Sequence
  Description of Artificial Sequence: Synthetic oligonucleotide
  Antisense strand to SEQ ID NO: 969804
aaagcuauucccaaguaac

SEQ ID NO: 969806 - RNA, 19 nt, Artificial Sequence
  Description of Artificial Sequence: Synthetic oligonucleotide
  Sense strand starting at position 395 of SEQ ID NO: 913992
auugacacuucucugguaa

SEQ ID NO: 969807 - RNA, 19 nt, Artificial Sequence
  Description of Artificial Sequence: Synthetic oligonucleotide
  Antisense strand to SEQ ID NO: 969806
uuaccagagaagugucaau

SEQ ID NO: 969808 - RNA, 19 nt, Artificial Sequence
  Description of Artificial Sequence: Synthetic oligonucleotide
  Sense strand starting at position 385 of SEQ ID NO: 913992
ugcuaaauugauugacacu

SEQ ID NO: 969809 - RNA, 19 nt, Artificial Sequence
  Description of Artificial Sequence: Synthetic oligonucleotide
  Antisense strand to SEQ ID NO: 969808
agugucaaucaauuuagca

SEQ ID NO: 969810 - RNA, 19 nt, Artificial Sequence
  Description of Artificial Sequence: Synthetic oligonucleotide
  Sense strand starting at position 276 of SEQ ID NO: 913992
agggauggguauguucuua

SEQ ID NO: 969811 - RNA, 19 nt, Artificial Sequence
  Description of Artificial Sequence: Synthetic oligonucleotide
  Antisense strand to SEQ ID NO: 969810
uaagaacauacccaucccu

SEQ ID NO: 969812 - RNA, 19 nt, Artificial Sequence
  Description of Artificial Sequence: Synthetic oligonucleotide
  Sense strand starting at position 394 of SEQ ID NO: 913992
gauugacacuucucuggua

SEQ ID NO: 969813 - RNA, 19 nt, Artificial Sequence
  Description of Artificial Sequence: Synthetic oligonucleotide
  Antisense strand to SEQ ID NO: 969812
uaccagagaagugucaauc

SEQ ID NO: 969814 - RNA, 19 nt, Artificial Sequence
  Description of Artificial Sequence: Synthetic oligonucleotide
  Sense strand starting at position 275 of SEQ ID NO: 913992
aagggauggguauguucuu

SEQ ID NO: 969815 - RNA, 19 nt, Artificial Sequence
  Description of Artificial Sequence: Synthetic oligonucleotide
  Antisense strand to SEQ ID NO: 969814
aagaacauacccaucccuu

SEQ ID NO: 969816 - RNA, 19 nt, Artificial Sequence
  Description of Artificial Sequence: Synthetic oligonucleotide
  Sense strand starting at position 1068 of SEQ ID NO: 913992
gcaaguggucauuaucaca

SEQ ID NO: 969817 - RNA, 19 nt, Artificial Sequence
  Description of Artificial Sequence: Synthetic oligonucleotide
  Antisense strand to SEQ ID NO: 969816
ugugauaaugaccacuugc

SEQ ID NO: 969818 - RNA, 19 nt, Artificial Sequence
  Description of Artificial Sequence: Synthetic oligonucleotide
  Sense strand starting at position 396 of SEQ ID NO: 913992
uugacacuucucugguaag

SEQ ID NO: 969819 - RNA, 19 nt, Artificial Sequence
  Description of Artificial Sequence: Synthetic oligonucleotide
  Antisense strand to SEQ ID NO: 969818
cuuaccagagaagugucaa

SEQ ID NO: 969820 - RNA, 19 nt, Artificial Sequence
  Description of Artificial Sequence: Synthetic oligonucleotide
  Sense strand starting at position 1237 of SEQ ID NO: 913992
cuaagcuaugucuggagaa

SEQ ID NO: 969821 - RNA, 19 nt, Artificial Sequence
  Description of Artificial Sequence: Synthetic oligonucleotide
  Antisense strand to SEQ ID NO: 969820
uucuccagacauagcuuag

SEQ ID NO: 969822 - RNA, 19 nt, Artificial Sequence
  Description of Artificial Sequence: Synthetic oligonucleotide
  Sense strand starting at position 2753 of SEQ ID NO: 913992
ggcagugguguggaaauca

SEQ ID NO: 969823 - RNA, 19 nt, Artificial Sequence
  Description of Artificial Sequence: Synthetic oligonucleotide
  Antisense strand to SEQ ID NO: 969822
ugauuuccacaccacugcc

SEQ ID NO: 969824 - RNA, 19 nt, Artificial Sequence
  Description of Artificial Sequence: Synthetic oligonucleotide
  Sense strand starting at position 3266 of SEQ ID NO: 913992
acguucugaagaugaagua

SEQ ID NO: 969825 - RNA, 19 nt, Artificial Sequence
  Description of Artificial Sequence: Synthetic oligonucleotide
  Antisense strand to SEQ ID NO: 969824
uacuucaucuucagaacgu

SEQ ID NO: 969826 - RNA, 19 nt, Artificial Sequence
  Description of Artificial Sequence: Synthetic oligonucleotide
  Sense strand starting at position 2614 of SEQ ID NO: 913992
cuucguauuucugucuauu

SEQ ID NO: 969827 - RNA, 19 nt, Artificial Sequence
  Description of Artificial Sequence: Synthetic oligonucleotide
  Antisense strand to SEQ ID NO: 969826
aauagacagaaauacgaag

SEQ ID NO: 969828 - RNA, 19 nt, Artificial Sequence
  Description of Artificial Sequence: Synthetic oligonucleotide
  Sense strand starting at position 2616 of SEQ ID NO: 913992
ucguauuucugucuauucu

SEQ ID NO: 969829 - RNA, 19 nt, Artificial Sequence
  Description of Artificial Sequence: Synthetic oligonucleotide
  Antisense strand to SEQ ID NO: 969828
agaauagacagaaauacga

SEQ ID NO: 969830 - RNA, 19 nt, Artificial Sequence
  Description of Artificial Sequence: Synthetic oligonucleotide
  Sense strand starting at position 3359 of SEQ ID NO: 913992
cuugaucucucagcuagag

SEQ ID NO: 969831 - RNA, 19 nt, Artificial Sequence
  Description of Artificial Sequence: Synthetic oligonucleotide
  Antisense strand to SEQ ID NO: 969830
cucuagcugagagaucaag

SEQ ID NO: 969832 - RNA, 19 nt, Artificial Sequence
  Description of Artificial Sequence: Synthetic oligonucleotide
  Sense strand starting at position 858 of SEQ ID NO: 913992
acaugacuaugcucagcaa

SEQ ID NO: 969833 - RNA, 19 nt, Artificial Sequence
  Description of Artificial Sequence: Synthetic oligonucleotide
  Antisense strand to SEQ ID NO: 969832
uugcugagcauagucaugu

SEQ ID NO: 969834 - RNA, 19 nt, Artificial Sequence
  Description of Artificial Sequence: Synthetic oligonucleotide
  Sense strand starting at position 2902 of SEQ ID NO: 913992
uuaaaugucuaagucaagu

SEQ ID NO: 969835 - RNA, 19 nt, Artificial Sequence
  Description of Artificial Sequence: Synthetic oligonucleotide
  Antisense strand to SEQ ID NO: 969834
acuugacuuagacauuuaa

SEQ ID NO: 969836 - RNA, 19 nt, Artificial Sequence
  Description of Artificial Sequence: Synthetic oligonucleotide
  Sense strand starting at position 3209 of SEQ ID NO: 913992
acacgaaucuaggcaaguu

SEQ ID NO: 969837 - RNA, 19 nt, Artificial Sequence
  Description of Artificial Sequence: Synthetic oligonucleotide
  Antisense strand to SEQ ID NO: 969836
aacuugccuagauucgugu

SEQ ID NO: 969838 - RNA, 19 nt, Artificial Sequence
  Description of Artificial Sequence: Synthetic oligonucleotide
  Sense strand starting at position 2673 of SEQ ID NO: 913993
gauugauguccggaaucag

SEQ ID NO: 969839 - RNA, 19 nt, Artificial Sequence
  Description of Artificial Sequence: Synthetic oligonucleotide
  Antisense strand to SEQ ID NO: 969838
cugauuccggacaucaauc

SEQ ID NO: 969840 - RNA, 19 nt, Artificial Sequence
  Description of Artificial Sequence: Synthetic oligonucleotide
  Sense strand starting at position 408 of SEQ ID NO: 913993
caguaagauguaugaacaa

SEQ ID NO: 969841 - RNA, 19 nt, Artificial Sequence
  Description of Artificial Sequence: Synthetic oligonucleotide
  Antisense strand to SEQ ID NO: 969840
uuguucauacaucuuacug

SEQ ID NO: 969842 - RNA, 19 nt, Artificial Sequence
  Description of Artificial Sequence: Synthetic oligonucleotide
  Sense strand starting at position 2724 of SEQ ID NO: 913993
augguauugcaccacuaaa

SEQ ID NO: 969843 - RNA, 19 nt, Artificial Sequence
  Description of Artificial Sequence: Synthetic oligonucleotide
  Antisense strand to SEQ ID NO: 969842
uuuaguggugcaauaccau

SEQ ID NO: 969844 - RNA, 19 nt, Artificial Sequence
  Description of Artificial Sequence: Synthetic oligonucleotide
  Sense strand starting at position 2751 of SEQ ID NO: 913993
gcugcaaaucaggaacauu

SEQ ID NO: 969845 - RNA, 19 nt, Artificial Sequence
  Description of Artificial Sequence: Synthetic oligonucleotide
  Antisense strand to SEQ ID NO: 969844
aauguuccugauuugcagc

SEQ ID NO: 969846 - RNA, 19 nt, Artificial Sequence
  Description of Artificial Sequence: Synthetic oligonucleotide
  Sense strand starting at position 3031 of SEQ ID NO: 913993
caugcagacgucuaggaaa

SEQ ID NO: 969847 - RNA, 19 nt, Artificial Sequence
  Description of Artificial Sequence: Synthetic oligonucleotide
  Antisense strand to SEQ ID NO: 969846
uuuccuagacgucugcaug

SEQ ID NO: 969848 - RNA, 19 nt, Artificial Sequence
  Description of Artificial Sequence: Synthetic oligonucleotide
  Sense strand starting at position 3291 of SEQ ID NO: 913993
ggaugcucugcugagaaua

SEQ ID NO: 969849 - RNA, 19 nt, Artificial Sequence
  Description of Artificial Sequence: Synthetic oligonucleotide
  Antisense strand to SEQ ID NO: 969848
uauucucagcagagcaucc

SEQ ID NO: 969850 - RNA, 19 nt, Artificial Sequence
  Description of Artificial Sequence: Synthetic oligonucleotide
  Sense strand starting at position 2188 of SEQ ID NO: 913993
gcgcgaucucgacucccua

SEQ ID NO: 969851 - RNA, 19 nt, Artificial Sequence
  Description of Artificial Sequence: Synthetic oligonucleotide
  Antisense strand to SEQ ID NO: 969850
uagggagucgagaucgcgc

SEQ ID NO: 969852 - RNA, 19 nt, Artificial Sequence
  Description of Artificial Sequence: Synthetic oligonucleotide
  Sense strand starting at position 2762 of SEQ ID NO: 913993
ggaacauucguccacucca

SEQ ID NO: 969853 - RNA, 19 nt, Artificial Sequence
  Description of Artificial Sequence: Synthetic oligonucleotide
  Antisense strand to SEQ ID NO: 969852
uggaguggacgaauguucc

SEQ ID NO: 969854 - RNA, 19 nt, Artificial Sequence
  Description of Artificial Sequence: Synthetic oligonucleotide
  Sense strand starting at position 3881 of SEQ ID NO: 913993
augcuaugugaugaguaua

SEQ ID NO: 969855 - RNA, 19 nt, Artificial Sequence
  Description of Artificial Sequence: Synthetic oligonucleotide
  Antisense strand to SEQ ID NO: 969854
uauacucaucacauagcau

SEQ ID NO: 969856 - RNA, 19 nt, Artificial Sequence
  Description of Artificial Sequence: Synthetic oligonucleotide
  Sense strand starting at position 2670 of SEQ ID NO: 913993
ugggauugauguccggaau

SEQ ID NO: 969857 - RNA, 19 nt, Artificial Sequence
  Description of Artificial Sequence: Synthetic oligonucleotide
  Antisense strand to SEQ ID NO: 969856
auuccggacaucaauccca

SEQ ID NO: 969858 - RNA, 19 nt, Artificial Sequence
  Description of Artificial Sequence: Synthetic oligonucleotide
  Sense strand starting at position 1067 of SEQ ID NO: 913993
ugaccuuggugacuuacau

SEQ ID NO: 969859 - RNA, 19 nt, Artificial Sequence
  Description of Artificial Sequence: Synthetic oligonucleotide
  Antisense strand to SEQ ID NO: 969858
auguaagucaccaagguca

SEQ ID NO: 969860 - RNA, 19 nt, Artificial Sequence
  Description of Artificial Sequence: Synthetic oligonucleotide
  Sense strand starting at position 2671 of SEQ ID NO: 913993
gggauugauguccggaauc

SEQ ID NO: 969861 - RNA, 19 nt, Artificial Sequence
  Description of Artificial Sequence: Synthetic oligonucleotide
  Antisense strand to SEQ ID NO: 969860
gauuccggacaucaauccc

SEQ ID NO: 969862 - RNA, 19 nt, Artificial Sequence
  Description of Artificial Sequence: Synthetic oligonucleotide
  Sense strand starting at position 2513 of SEQ ID NO: 913993
ggcauacugagcgaucaug

SEQ ID NO: 969863 - RNA, 19 nt, Artificial Sequence
  Description of Artificial Sequence: Synthetic oligonucleotide
  Antisense strand to SEQ ID NO: 969862
caugaucgcucaguaugcc

SEQ ID NO: 969864 - RNA, 19 nt, Artificial Sequence
  Description of Artificial Sequence: Synthetic oligonucleotide
  Sense strand starting at position 2859 of SEQ ID NO: 913993
aaaucucagcccugguaga

SEQ ID NO: 969865 - RNA, 19 nt, Artificial Sequence
  Description of Artificial Sequence: Synthetic oligonucleotide
  Antisense strand to SEQ ID NO: 969864
ucuaccagggcugagauuu

SEQ ID NO: 969866 - RNA, 19 nt, Artificial Sequence
  Description of Artificial Sequence: Synthetic oligonucleotide
  Sense strand starting at position 3480 of SEQ ID NO: 913993
aaagaugcggugugagaga

SEQ ID NO: 969867 - RNA, 19 nt, Artificial Sequence
  Description of Artificial Sequence: Synthetic oligonucleotide
  Antisense strand to SEQ ID NO: 969866
ucucucacaccgcaucuuu

SEQ ID NO: 969868 - RNA, 19 nt, Artificial Sequence
  Description of Artificial Sequence: Synthetic oligonucleotide
  Sense strand starting at position 731 of SEQ ID NO: 913993
guagcaguaccucacagua

SEQ ID NO: 969869 - RNA, 19 nt, Artificial Sequence
  Description of Artificial Sequence: Synthetic oligonucleotide
  Antisense strand to SEQ ID NO: 969868
uacugugagguacugcuac

SEQ ID NO: 969870 - RNA, 19 nt, Artificial Sequence
  Description of Artificial Sequence: Synthetic oligonucleotide
  Sense strand starting at position 620 of SEQ ID NO: 913993
gggccaauuugagaguaug

SEQ ID NO: 969871 - RNA, 19 nt, Artificial Sequence
  Description of Artificial Sequence: Synthetic oligonucleotide
  Antisense strand to SEQ ID NO: 969870
cauacucucaaauuggccc

SEQ ID NO: 969872 - RNA, 19 nt, Artificial Sequence
  Description of Artificial Sequence: Synthetic oligonucleotide
  Sense strand starting at position 3288 of SEQ ID NO: 913993
uuuggaugcucugcugaga

SEQ ID NO: 969873 - RNA, 19 nt, Artificial Sequence
  Description of Artificial Sequence: Synthetic oligonucleotide
  Antisense strand to SEQ ID NO: 969872
ucucagcagagcauccaaa

SEQ ID NO: 969874 - RNA, 19 nt, Artificial Sequence
  Description of Artificial Sequence: Synthetic oligonucleotide
  Sense strand starting at position 3876 of SEQ ID NO: 913993
cugugaugcuaugugauga

SEQ ID NO: 969875 - RNA, 19 nt, Artificial Sequence
  Description of Artificial Sequence: Synthetic oligonucleotide
  Antisense strand to SEQ ID NO: 969874
ucaucacauagcaucacag

SEQ ID NO: 969876 - RNA, 19 nt, Artificial Sequence
  Description of Artificial Sequence: Synthetic oligonucleotide
  Sense strand starting at position 2488 of SEQ ID NO: 913993
guuucauuugcgggugguu

SEQ ID NO: 969877 - RNA, 19 nt, Artificial Sequence
  Description of Artificial Sequence: Synthetic oligonucleotide
  Antisense strand to SEQ ID NO: 969876
aaccacccgcaaaugaaac

SEQ ID NO: 969878 - RNA, 19 nt, Artificial Sequence
  Description of Artificial Sequence: Synthetic oligonucleotide
  Sense strand starting at position 2741 of SEQ ID NO: 913993
aaagacagucgcugcaaau

SEQ ID NO: 969879 - RNA, 19 nt, Artificial Sequence
  Description of Artificial Sequence: Synthetic oligonucleotide
  Antisense strand to SEQ ID NO: 969878
auuugcagcgacugucuuu

SEQ ID NO: 969880 - RNA, 19 nt, Artificial Sequence
  Description of Artificial Sequence: Synthetic oligonucleotide
  Sense strand starting at position 2512 of SEQ ID NO: 913993
uggcauacugagcgaucau

SEQ ID NO: 969881 - RNA, 19 nt, Artificial Sequence
  Description of Artificial Sequence: Synthetic oligonucleotide
  Antisense strand to SEQ ID NO: 969880
augaucgcucaguaugcca

SEQ ID NO: 969882 - RNA, 19 nt, Artificial Sequence
  Description of Artificial Sequence: Synthetic oligonucleotide
  Sense strand starting at position 2607 of SEQ ID NO: 913993
caaucuacccgucguaaag

SEQ ID NO: 969883 - RNA, 19 nt, Artificial Sequence
  Description of Artificial Sequence: Synthetic oligonucleotide
  Antisense strand to SEQ ID NO: 969882
cuuuacgacggguagauug

SEQ ID NO: 969884 - RNA, 19 nt, Artificial Sequence
  Description of Artificial Sequence: Synthetic oligonucleotide
  Sense strand starting at position 3600 of SEQ ID NO: 913993
accagagguucgcugucaa

SEQ ID NO: 969885 - RNA, 19 nt, Artificial Sequence
  Description of Artificial Sequence: Synthetic oligonucleotide
  Antisense strand to SEQ ID NO: 969884
uugacagcgaaccucuggu

SEQ ID NO: 969886 - RNA, 19 nt, Artificial Sequence
  Description of Artificial Sequence: Synthetic oligonucleotide
  Sense strand starting at position 2529 of SEQ ID NO: 913993
augggugcuccucgacuua

SEQ ID NO: 969887 - RNA, 19 nt, Artificial Sequence
  Description of Artificial Sequence: Synthetic oligonucleotide
  Antisense strand to SEQ ID NO: 969886
uaagucgaggagcacccau

SEQ ID NO: 969888 - RNA, 19 nt, Artificial Sequence
  Description of Artificial Sequence: Synthetic oligonucleotide
  Sense strand starting at position 3863 of SEQ ID NO: 913993
gggaguggcugcucuguga

SEQ ID NO: 969889 - RNA, 19 nt, Artificial Sequence
  Description of Artificial Sequence: Synthetic oligonucleotide
  Antisense strand to SEQ ID NO: 969888
ucacagagcagccacuccc

SEQ ID NO: 969890 - RNA, 19 nt, Artificial Sequence
  Description of Artificial Sequence: Synthetic oligonucleotide
  Sense strand starting at position 3970 of SEQ ID NO: 913993
ggacucagaucacaaguuu

SEQ ID NO: 969891 - RNA, 19 nt, Artificial Sequence
  Description of Artificial Sequence: Synthetic oligonucleotide
  Antisense strand to SEQ ID NO: 969890
aaacuugugaucugagucc

SEQ ID NO: 969892 - RNA, 19 nt, Artificial Sequence
  Description of Artificial Sequence: Synthetic oligonucleotide
  Sense strand starting at position 2029 of SEQ ID NO: 913993
acguggguucuccguggaa

SEQ ID NO: 969893 - RNA, 19 nt, Artificial Sequence
  Description of Artificial Sequence: Synthetic oligonucleotide
  Antisense strand to SEQ ID NO: 969892
uuccacggagaacccacgu

SEQ ID NO: 969894 - RNA, 19 nt, Artificial Sequence
  Description of Artificial Sequence: Synthetic oligonucleotide
  Sense strand starting at position 534 of SEQ ID NO: 913993
acuuuaaggugacagguaa

SEQ ID NO: 969895 - RNA, 19 nt, Artificial Sequence
  Description of Artificial Sequence: Synthetic oligonucleotide
  Antisense strand to SEQ ID NO: 969894
uuaccugucaccuuaaagu

SEQ ID NO: 969896 - RNA, 19 nt, Artificial Sequence
  Description of Artificial Sequence: Synthetic oligonucleotide
  Sense strand starting at position 3903 of SEQ ID NO: 913993
gagugaccauuugguugua

SEQ ID NO: 969897 - RNA, 19 nt, Artificial Sequence
  Description of Artificial Sequence: Synthetic oligonucleotide
  Antisense strand to SEQ ID NO: 969896
uacaaccaaauggucacuc

SEQ ID NO: 969898 - RNA, 19 nt, Artificial Sequence
  Description of Artificial Sequence: Synthetic oligonucleotide
  Sense strand starting at position 3384 of SEQ ID NO: 913993
aggauagaguggugaacau

SEQ ID NO: 969899 - RNA, 19 nt, Artificial Sequence
  Description of Artificial Sequence: Synthetic oligonucleotide
  Antisense strand to SEQ ID NO: 969898
auguucaccacucuauccu

SEQ ID NO: 969900 - RNA, 19 nt, Artificial Sequence
  Description of Artificial Sequence: Synthetic oligonucleotide
  Sense strand starting at position 347 of SEQ ID NO: 913993
gaagguguauuuggugcaa

SEQ ID NO: 969901 - RNA, 19 nt, Artificial Sequence
  Description of Artificial Sequence: Synthetic oligonucleotide
  Antisense strand to SEQ ID NO: 969900
uugcaccaaauacaccuuc

SEQ ID NO: 969902 - RNA, 19 nt, Artificial Sequence
  Description of Artificial Sequence: Synthetic oligonucleotide
  Sense strand starting at position 349 of SEQ ID NO: 913993
agguguauuuggugcaaac

SEQ ID NO: 969903 - RNA, 19 nt, Artificial Sequence
  Description of Artificial Sequence: Synthetic oligonucleotide
  Antisense strand to SEQ ID NO: 969902
guuugcaccaaauacaccu

SEQ ID NO: 969904 - RNA, 19 nt, Artificial Sequence
  Description of Artificial Sequence: Synthetic oligonucleotide
  Sense strand starting at position 1071 of SEQ ID NO: 913993
cuuggugacuuacauaagu

SEQ ID NO: 969905 - RNA, 19 nt, Artificial Sequence
  Description of Artificial Sequence: Synthetic oligonucleotide
  Antisense strand to SEQ ID NO: 969904
acuuauguaagucaccaag

SEQ ID NO: 969906 - RNA, 19 nt, Artificial Sequence
  Description of Artificial Sequence: Synthetic oligonucleotide
  Sense strand starting at position 733 of SEQ ID NO: 913993
agcaguaccucacaguaaa

SEQ ID NO: 969907 - RNA, 19 nt, Artificial Sequence
  Description of Artificial Sequence: Synthetic oligonucleotide
  Antisense strand to SEQ ID NO: 969906
uuuacugugagguacugcu

SEQ ID NO: 969908 - RNA, 19 nt, Artificial Sequence
  Description of Artificial Sequence: Synthetic oligonucleotide
  Sense strand starting at position 547 of SEQ ID NO: 913993
agguaagcuucaugggaag

SEQ ID NO: 969909 - RNA, 19 nt, Artificial Sequence
  Description of Artificial Sequence: Synthetic oligonucleotide
  Antisense strand to SEQ ID NO: 969908
cuucccaugaagcuuaccu

SEQ ID NO: 969910 - RNA, 19 nt, Artificial Sequence
  Description of Artificial Sequence: Synthetic oligonucleotide
  Sense strand starting at position 389 of SEQ ID NO: 913993
guuaaagguuuacaauguu

SEQ ID NO: 969911 - RNA, 19 nt, Artificial Sequence
  Description of Artificial Sequence: Synthetic oligonucleotide
  Antisense strand to SEQ ID NO: 969910
aacauuguaaaccuuuaac

SEQ ID NO: 969912 - RNA, 19 nt, Artificial Sequence
  Description of Artificial Sequence: Synthetic oligonucleotide
  Sense strand starting at position 3674 of SEQ ID NO: 913993
gcaucaaggugagagcauu

SEQ ID NO: 969913 - RNA, 19 nt, Artificial Sequence
  Description of Artificial Sequence: Synthetic oligonucleotide
  Antisense strand to SEQ ID NO: 969912
aaugcucucaccuugaugc

SEQ ID NO: 969914 - RNA, 19 nt, Artificial Sequence
  Description of Artificial Sequence: Synthetic oligonucleotide
  Sense strand starting at position 2459 of SEQ ID NO: 913993
agugcagucuuagggaaac

SEQ ID NO: 969915 - RNA, 19 nt, Artificial Sequence
  Description of Artificial Sequence: Synthetic oligonucleotide
  Antisense strand to SEQ ID NO: 969914
guuucccuaagacugcacu

SEQ ID NO: 969916 - RNA, 19 nt, Artificial Sequence
  Description of Artificial Sequence: Synthetic oligonucleotide
  Sense strand starting at position 3264 of SEQ ID NO: 913993
agacgaucgugauggacuu

SEQ ID NO: 969917 - RNA, 19 nt, Artificial Sequence
  Description of Artificial Sequence: Synthetic oligonucleotide
  Antisense strand to SEQ ID NO: 969916
aaguccaucacgaucgucu

SEQ ID NO: 969918 - RNA, 19 nt, Artificial Sequence
  Description of Artificial Sequence: Synthetic oligonucleotide
  Sense strand starting at position 2430 of SEQ ID NO: 913994
caauuuaggcgccauaguu

SEQ ID NO: 969919 - RNA, 19 nt, Artificial Sequence
  Description of Artificial Sequence: Synthetic oligonucleotide
  Antisense strand to SEQ ID NO: 969918
aacuauggcgccuaaauug

SEQ ID NO: 969920 - RNA, 19 nt, Artificial Sequence
  Description of Artificial Sequence: Synthetic oligonucleotide
  Sense strand starting at position 1357 of SEQ ID NO: 913994
gugauuucugacugcucac

SEQ ID NO: 969921 - RNA, 19 nt, Artificial Sequence
  Description of Artificial Sequence: Synthetic oligonucleotide
  Antisense strand to SEQ ID NO: 969920
gugagcagucagaaaucac

SEQ ID NO: 969922 - RNA, 19 nt, Artificial Sequence
  Description of Artificial Sequence: Synthetic oligonucleotide
  Sense strand starting at position 724 of SEQ ID NO: 913994
gugccaguguauuugagaa

SEQ ID NO: 969923 - RNA, 19 nt, Artificial Sequence
  Description of Artificial Sequence: Synthetic oligonucleotide
  Antisense strand to SEQ ID NO: 969922
uucucaaauacacuggcac

SEQ ID NO: 969924 - RNA, 19 nt, Artificial Sequence
  Description of Artificial Sequence: Synthetic oligonucleotide
  Sense strand starting at position 103 of SEQ ID NO: 913994
aggauuucuugauagaaug

SEQ ID NO: 969925 - RNA, 19 nt, Artificial Sequence
  Description of Artificial Sequence: Synthetic oligonucleotide
  Antisense strand to SEQ ID NO: 969924
cauucuaucaagaaauccu

SEQ ID NO: 969926 - RNA, 19 nt, Artificial Sequence
  Description of Artificial Sequence: Synthetic oligonucleotide
  Sense strand starting at position 2310 of SEQ ID NO: 913994
uagguucuagaguggagaa

SEQ ID NO: 969927 - RNA, 19 nt, Artificial Sequence
  Description of Artificial Sequence: Synthetic oligonucleotide
  Antisense strand to SEQ ID NO: 969926
uucuccacucuagaaccua

SEQ ID NO: 969928 - RNA, 19 nt, Artificial Sequence
  Description of Artificial Sequence: Synthetic oligonucleotide
  Sense strand starting at position 3206 of SEQ ID NO: 913994
aggagugagucuguaagaa

SEQ ID NO: 969929 - RNA, 19 nt, Artificial Sequence
  Description of Artificial Sequence: Synthetic oligonucleotide
  Antisense strand to SEQ ID NO: 969928
uucuuacagacucacuccu

SEQ ID NO: 969930 - RNA, 19 nt, Artificial Sequence
  Description of Artificial Sequence: Synthetic oligonucleotide
  Sense strand starting at position 1084 of SEQ ID NO: 913994
gaccaaaguguugaugguu

SEQ ID NO: 969931 - RNA, 19 nt, Artificial Sequence
  Description of Artificial Sequence: Synthetic oligonucleotide
  Antisense strand to SEQ ID NO: 969930
aaccaucaacacuuugguc

SEQ ID NO: 969932 - RNA, 19 nt, Artificial Sequence
  Description of Artificial Sequence: Synthetic oligonucleotide
  Sense strand starting at position 2176 of SEQ ID NO: 913994
uggcauucccaguaaacug

SEQ ID NO: 969933 - RNA, 19 nt, Artificial Sequence
  Description of Artificial Sequence: Synthetic oligonucleotide
  Antisense strand to SEQ ID NO: 969932
caguuuacugggaaugcca

SEQ ID NO: 969934 - RNA, 19 nt, Artificial Sequence
  Description of Artificial Sequence: Synthetic oligonucleotide
  Sense strand starting at position 3272 of SEQ ID NO: 913994
guauaauguacugaguacu

SEQ ID NO: 969935 - RNA, 19 nt, Artificial Sequence
  Description of Artificial Sequence: Synthetic oligonucleotide
  Antisense strand to SEQ ID NO: 969934
aguacucaguacauuauac

SEQ ID NO: 969936 - RNA, 19 nt, Artificial Sequence
  Description of Artificial Sequence: Synthetic oligonucleotide
  Sense strand starting at position 973 of SEQ ID NO: 913994
accuguuguggguaaacau

SEQ ID NO: 969937 - RNA, 19 nt, Artificial Sequence
  Description of Artificial Sequence: Synthetic oligonucleotide
  Antisense strand to SEQ ID NO: 969936
auguuuacccacaacaggu

SEQ ID NO: 969938 - RNA, 19 nt, Artificial Sequence
  Description of Artificial Sequence: Synthetic oligonucleotide
  Sense strand starting at position 3599 of SEQ ID NO: 913994
gaggguuuacauugacgac

SEQ ID NO: 969939 - RNA, 19 nt, Artificial Sequence
  Description of Artificial Sequence: Synthetic oligonucleotide
  Antisense strand to SEQ ID NO: 969938
gucgucaauguaaacccuc

SEQ ID NO: 969940 - RNA, 19 nt, Artificial Sequence
  Description of Artificial Sequence: Synthetic oligonucleotide
  Sense strand starting at position 3606 of SEQ ID NO: 913994
uacauugacgacugagcaa

SEQ ID NO: 969941 - RNA, 19 nt, Artificial Sequence
  Description of Artificial Sequence: Synthetic oligonucleotide
  Antisense strand to SEQ ID NO: 969940
uugcucagucgucaaugua

SEQ ID NO: 969942 - RNA, 19 nt, Artificial Sequence
  Description of Artificial Sequence: Synthetic oligonucleotide
  Sense strand starting at position 3636 of SEQ ID NO: 913994
ggcuguguuauugaggaca

SEQ ID NO: 969943 - RNA, 19 nt, Artificial Sequence
  Description of Artificial Sequence: Synthetic oligonucleotide
  Antisense strand to SEQ ID NO: 969942
uguccucaauaacacagcc

SEQ ID NO: 969944 - RNA, 19 nt, Artificial Sequence
  Description of Artificial Sequence: Synthetic oligonucleotide
  Sense strand starting at position 117 of SEQ ID NO: 913994
gaaugaaugucugcauuac

SEQ ID NO: 969945 - RNA, 19 nt, Artificial Sequence
  Description of Artificial Sequence: Synthetic oligonucleotide
  Antisense strand to SEQ ID NO: 969944
guaaugcagacauucauuc

SEQ ID NO: 969946 - RNA, 19 nt, Artificial Sequence
  Description of Artificial Sequence: Synthetic oligonucleotide
  Sense strand starting at position 115 of SEQ ID NO: 913994
uagaaugaaugucugcauu

SEQ ID NO: 969947 - RNA, 19 nt, Artificial Sequence
  Description of Artificial Sequence: Synthetic oligonucleotide
  Antisense strand to SEQ ID NO: 969946
aaugcagacauucauucua

SEQ ID NO: 969948 - RNA, 19 nt, Artificial Sequence
  Description of Artificial Sequence: Synthetic oligonucleotide
  Sense strand starting at position 3649 of SEQ ID NO: 913994
aggacagaaggcuguguua

SEQ ID NO: 969949 - RNA, 19 nt, Artificial Sequence
  Description of Artificial Sequence: Synthetic oligonucleotide
  Antisense strand to SEQ ID NO: 969948
uaacacagccuucuguccu

SEQ ID NO: 969950 - RNA, 19 nt, Artificial Sequence
  Description of Artificial Sequence: Synthetic oligonucleotide
  Sense strand starting at position 3288 of SEQ ID NO: 913994
acugaaugcucugucagga

SEQ ID NO: 969951 - RNA, 19 nt, Artificial Sequence
  Description of Artificial Sequence: Synthetic oligonucleotide
  Antisense strand to SEQ ID NO: 969950
uccugacagagcauucagu

SEQ ID NO: 969952 - RNA, 19 nt, Artificial Sequence
  Description of Artificial Sequence: Synthetic oligonucleotide
  Sense strand starting at position 3520 of SEQ ID NO: 913994
agaacugucuuauagauuu

SEQ ID NO: 969953 - RNA, 19 nt, Artificial Sequence
  Description of Artificial Sequence: Synthetic oligonucleotide
  Antisense strand to SEQ ID NO: 969952
aaaucuauaagacaguucu

SEQ ID NO: 969954 - RNA, 19 nt, Artificial Sequence
  Description of Artificial Sequence: Synthetic oligonucleotide
  Sense strand starting at position 3373 of SEQ ID NO: 913994
uucccaccuugauuguaua

SEQ ID NO: 969955 - RNA, 19 nt, Artificial Sequence
  Description of Artificial Sequence: Synthetic oligonucleotide
  Antisense strand to SEQ ID NO: 969954
uauacaaucaaggugggaa

SEQ ID NO: 969956 - RNA, 19 nt, Artificial Sequence
  Description of Artificial Sequence: Synthetic oligonucleotide
  Sense strand starting at position 2354 of SEQ ID NO: 913994
agagaauucuggccuuugu

SEQ ID NO: 969957 - RNA, 19 nt, Artificial Sequence
  Description of Artificial Sequence: Synthetic oligonucleotide
  Antisense strand to SEQ ID NO: 969956
acaaaggccagaauucucu

SEQ ID NO: 969958 - RNA, 19 nt, Artificial Sequence
  Description of Artificial Sequence: Synthetic oligonucleotide
  Sense strand starting at position 151 of SEQ ID NO: 913994
auuucucuguauuaaggau

SEQ ID NO: 969959 - RNA, 19 nt, Artificial Sequence
  Description of Artificial Sequence: Synthetic oligonucleotide
  Antisense strand to SEQ ID NO: 969958
auccuuaauacagagaaau

SEQ ID NO: 969960 - RNA, 19 nt, Artificial Sequence
  Description of Artificial Sequence: Synthetic oligonucleotide
  Sense strand starting at position 3719 of SEQ ID NO: 913994
gcauucuaggccuaagguu

SEQ ID NO: 969961 - RNA, 19 nt, Artificial Sequence
  Description of Artificial Sequence: Synthetic oligonucleotide
  Antisense strand to SEQ ID NO: 969960
aaccuuaggccuagaaugc

SEQ ID NO: 969962 - RNA, 19 nt, Artificial Sequence
  Description of Artificial Sequence: Synthetic oligonucleotide
  Sense strand starting at position 2300 of SEQ ID NO: 913994
ggaagcauuguagguucua

SEQ ID NO: 969963 - RNA, 19 nt, Artificial Sequence
  Description of Artificial Sequence: Synthetic oligonucleotide
  Antisense strand to SEQ ID NO: 969962
uagaaccuacaaugcuucc

SEQ ID NO: 969964 - RNA, 19 nt, Artificial Sequence
  Description of Artificial Sequence: Synthetic oligonucleotide
  Sense strand starting at position 3634 of SEQ ID NO: 913994
auggcuguguuauugagga

SEQ ID NO: 969965 - RNA, 19 nt, Artificial Sequence
  Description of Artificial Sequence: Synthetic oligonucleotide
  Antisense strand to SEQ ID NO: 969964
uccucaauaacacagccau

SEQ ID NO: 969966 - RNA, 19 nt, Artificial Sequence
  Description of Artificial Sequence: Synthetic oligonucleotide
  Sense strand starting at position 971 of SEQ ID NO: 913994
ugaccuguuguggguaaac

SEQ ID NO: 969967 - RNA, 19 nt, Artificial Sequence
  Description of Artificial Sequence: Synthetic oligonucleotide
  Antisense strand to SEQ ID NO: 969966
guuuacccacaacagguca

SEQ ID NO: 969968 - RNA, 19 nt, Artificial Sequence
  Description of Artificial Sequence: Synthetic oligonucleotide
  Sense strand starting at position 2371 of SEQ ID NO: 913994
guguuuagagucuggaauu

SEQ ID NO: 969969 - RNA, 19 nt, Artificial Sequence
  Description of Artificial Sequence: Synthetic oligonucleotide
  Antisense strand to SEQ ID NO: 969968
aauuccagacucuaaacac

SEQ ID NO: 969970 - RNA, 19 nt, Artificial Sequence
  Description of Artificial Sequence: Synthetic oligonucleotide
  Sense strand starting at position 2880 of SEQ ID NO: 913994
gugguaaguaaguaguagu

SEQ ID NO: 969971 - RNA, 19 nt, Artificial Sequence
  Description of Artificial Sequence: Synthetic oligonucleotide
  Antisense strand to SEQ ID NO: 969970
acuacuacuuacuuaccac

SEQ ID NO: 969972 - RNA, 19 nt, Artificial Sequence
  Description of Artificial Sequence: Synthetic oligonucleotide
  Sense strand starting at position 3651 of SEQ ID NO: 913994
gacagaaggcuguguuagu

SEQ ID NO: 969973 - RNA, 19 nt, Artificial Sequence
  Description of Artificial Sequence: Synthetic oligonucleotide
  Antisense strand to SEQ ID NO: 969972
acuaacacagccuucuguc

SEQ ID NO: 969974 - RNA, 19 nt, Artificial Sequence
  Description of Artificial Sequence: Synthetic oligonucleotide
  Sense strand starting at position 703 of SEQ ID NO: 913994
ggcuaacgguguuuaaaua

SEQ ID NO: 969975 - RNA, 19 nt, Artificial Sequence
  Description of Artificial Sequence: Synthetic oligonucleotide
  Antisense strand to SEQ ID NO: 969974
uauuuaaacaccguuagcc

SEQ ID NO: 969976 - RNA, 19 nt, Artificial Sequence
  Description of Artificial Sequence: Synthetic oligonucleotide
  Sense strand starting at position 3629 of SEQ ID NO: 913994
caauaauggcuguguuauu

SEQ ID NO: 969977 - RNA, 19 nt, Artificial Sequence
  Description of Artificial Sequence: Synthetic oligonucleotide
  Antisense strand to SEQ ID NO: 969976
aauaacacagccauuauug

SEQ ID NO: 969978 - RNA, 19 nt, Artificial Sequence
  Description of Artificial Sequence: Synthetic oligonucleotide
  Sense strand starting at position 3695 of SEQ ID NO: 913994
ggugaauguuauguuggca

SEQ ID NO: 969979 - RNA, 19 nt, Artificial Sequence
  Description of Artificial Sequence: Synthetic oligonucleotide
  Antisense strand to SEQ ID NO: 969978
ugccaacauaacauucacc

SEQ ID NO: 969980 - RNA, 19 nt, Artificial Sequence
  Description of Artificial Sequence: Synthetic oligonucleotide
  Sense strand starting at position 1344 of SEQ ID NO: 913994
ggccaaagccgaggugauu

SEQ ID NO: 969981 - RNA, 19 nt, Artificial Sequence
  Description of Artificial Sequence: Synthetic oligonucleotide
  Antisense strand to SEQ ID NO: 969980
aaucaccucggcuuuggcc

SEQ ID NO: 969982 - RNA, 19 nt, Artificial Sequence
  Description of Artificial Sequence: Synthetic oligonucleotide
  Sense strand starting at position 2215 of SEQ ID NO: 913994
aggaucuccuacuaauaga

SEQ ID NO: 969983 - RNA, 19 nt, Artificial Sequence
  Description of Artificial Sequence: Synthetic oligonucleotide
  Antisense strand to SEQ ID NO: 969982
ucuauuaguaggagauccu

SEQ ID NO: 969984 - RNA, 19 nt, Artificial Sequence
  Description of Artificial Sequence: Synthetic oligonucleotide
  Sense strand starting at position 2494 of SEQ ID NO: 913994
ugcaaagaaucugaagaau

SEQ ID NO: 969985 - RNA, 19 nt, Artificial Sequence
  Description of Artificial Sequence: Synthetic oligonucleotide
  Antisense strand to SEQ ID NO: 969984
auucuucagauucuuugca

SEQ ID NO: 969986 - RNA, 19 nt, Artificial Sequence
  Description of Artificial Sequence: Synthetic oligonucleotide
  Sense strand starting at position 728 of SEQ ID NO: 913994
caguguauuugagaagcug

SEQ ID NO: 969987 - RNA, 19 nt, Artificial Sequence
  Description of Artificial Sequence: Synthetic oligonucleotide
  Antisense strand to SEQ ID NO: 969986
cagcuucucaaauacacug

SEQ ID NO: 969988 - RNA, 19 nt, Artificial Sequence
  Description of Artificial Sequence: Synthetic oligonucleotide
  Sense strand starting at position 2364 of SEQ ID NO: 913994
ggccuuuguguuuagaguc

SEQ ID NO: 969989 - RNA, 19 nt, Artificial Sequence
  Description of Artificial Sequence: Synthetic oligonucleotide
  Antisense strand to SEQ ID NO: 969988
gacucuaaacacaaaggcc

SEQ ID NO: 969990 - RNA, 19 nt, Artificial Sequence
  Description of Artificial Sequence: Synthetic oligonucleotide
  Sense strand starting at position 2245 of SEQ ID NO: 913994
cgauuuagcuaccagaucu

SEQ ID NO: 969991 - RNA, 19 nt, Artificial Sequence
  Description of Artificial Sequence: Synthetic oligonucleotide
  Antisense strand to SEQ ID NO: 969990
agaucugguagcuaaaucg

SEQ ID NO: 969992 - RNA, 19 nt, Artificial Sequence
  Description of Artificial Sequence: Synthetic oligonucleotide
  Sense strand starting at position 2925 of SEQ ID NO: 913994
ccucuucuuugugucaauu

SEQ ID NO: 969993 - RNA, 19 nt, Artificial Sequence
  Description of Artificial Sequence: Synthetic oligonucleotide
  Antisense strand to SEQ ID NO: 969992
aauugacacaaagaagagg

SEQ ID NO: 969994 - RNA, 19 nt, Artificial Sequence
  Description of Artificial Sequence: Synthetic oligonucleotide
  Sense strand starting at position 3627 of SEQ ID NO: 913994
ggcaauaauggcuguguua

SEQ ID NO: 969995 - RNA, 19 nt, Artificial Sequence
  Description of Artificial Sequence: Synthetic oligonucleotide
  Antisense strand to SEQ ID NO: 969994
uaacacagccauuauugcc

SEQ ID NO: 969996 - RNA, 19 nt, Artificial Sequence
  Description of Artificial Sequence: Synthetic oligonucleotide
  Sense strand starting at position 1285 of SEQ ID NO: 913994
gcgguugucgccagcuaga

SEQ ID NO: 969997 - RNA, 19 nt, Artificial Sequence
  Description of Artificial Sequence: Synthetic oligonucleotide
  Antisense strand to SEQ ID NO: 969996
ucuagcuggcgacaaccgc

SEQ ID NO: 969998 - RNA, 19 nt, Artificial Sequence
  Description of Artificial Sequence: Synthetic oligonucleotide
  Sense strand starting at position 493 of SEQ ID NO: 913995
guuuaagagagguaacagu

SEQ ID NO: 969999 - RNA, 19 nt, Artificial Sequence
  Description of Artificial Sequence: Synthetic oligonucleotide
  Antisense strand to SEQ ID NO: 969998
acuguuaccucucuuaaac

SEQ ID NO: 970000 - RNA, 19 nt, Artificial Sequence
  Description of Artificial Sequence: Synthetic oligonucleotide
  Sense strand starting at position 484 of SEQ ID NO: 913995
agcuuaauuguuuaagaga

SEQ ID NO: 970001 - RNA, 19 nt, Artificial Sequence
  Description of Artificial Sequence: Synthetic oligonucleotide
  Antisense strand to SEQ ID NO: 970000
ucucuuaaacaauuaagcu

SEQ ID NO: 970002 - RNA, 19 nt, Artificial Sequence
  Description of Artificial Sequence: Synthetic oligonucleotide
  Sense strand starting at position 737 of SEQ ID NO: 913995
caguuucugcgugucagau

SEQ ID NO: 970003 - RNA, 19 nt, Artificial Sequence
  Description of Artificial Sequence: Synthetic oligonucleotide
  Antisense strand to SEQ ID NO: 970002
aucugacacgcagaaacug

SEQ ID NO: 970004 - RNA, 19 nt, Artificial Sequence
  Description of Artificial Sequence: Synthetic oligonucleotide
  Sense strand starting at position 738 of SEQ ID NO: 913995
aguuucugcgugucagauu

SEQ ID NO: 970005 - RNA, 19 nt, Artificial Sequence
  Description of Artificial Sequence: Synthetic oligonucleotide
  Antisense strand to SEQ ID NO: 970004
aaucugacacgcagaaacu

SEQ ID NO: 970006 - RNA, 19 nt, Artificial Sequence
  Description of Artificial Sequence: Synthetic oligonucleotide
  Sense strand starting at position 3091 of SEQ ID NO: 913995
gggugaaucacuugaacua

SEQ ID NO: 970007 - RNA, 19 nt, Artificial Sequence
  Description of Artificial Sequence: Synthetic oligonucleotide
  Antisense strand to SEQ ID NO: 970006
uaguucaagugauucaccc

SEQ ID NO: 970008 - RNA, 19 nt, Artificial Sequence
  Description of Artificial Sequence: Synthetic oligonucleotide
  Sense strand starting at position 217 of SEQ ID NO: 913995
ggugaagaugaaugguuca

SEQ ID NO: 970009 - RNA, 19 nt, Artificial Sequence
  Description of Artificial Sequence: Synthetic oligonucleotide
  Antisense strand to SEQ ID NO: 970008
ugaaccauucaucuucacc

SEQ ID NO: 970010 - RNA, 19 nt, Artificial Sequence
  Description of Artificial Sequence: Synthetic oligonucleotide
  Sense strand starting at position 491 of SEQ ID NO: 913995
uuguuuaagagagguaaca

SEQ ID NO: 970011 - RNA, 19 nt, Artificial Sequence
  Description of Artificial Sequence: Synthetic oligonucleotide
  Antisense strand to SEQ ID NO: 970010
uguuaccucucuuaaacaa

SEQ ID NO: 970012 - RNA, 19 nt, Artificial Sequence
  Description of Artificial Sequence: Synthetic oligonucleotide
  Sense strand starting at position 2219 of SEQ ID NO: 913995
aaguuaacauuugcguauu

SEQ ID NO: 970013 - RNA, 19 nt, Artificial Sequence
  Description of Artificial Sequence: Synthetic oligonucleotide
  Antisense strand to SEQ ID NO: 970012
aauacgcaaauguuaacuu

SEQ ID NO: 970014 - RNA, 19 nt, Artificial Sequence
  Description of Artificial Sequence: Synthetic oligonucleotide
  Sense strand starting at position 3433 of SEQ ID NO: 913995
guggaauaguuuccaugaa

SEQ ID NO: 970015 - RNA, 19 nt, Artificial Sequence
  Description of Artificial Sequence: Synthetic oligonucleotide
  Antisense strand to SEQ ID NO: 970014
uucauggaaacuauuccac

SEQ ID NO: 970016 - RNA, 19 nt, Artificial Sequence
  Description of Artificial Sequence: Synthetic oligonucleotide
  Sense strand starting at position 2419 of SEQ ID NO: 913995
cugcaaacuuaaucggaaa

SEQ ID NO: 970017 - RNA, 19 nt, Artificial Sequence
  Description of Artificial Sequence: Synthetic oligonucleotide
  Antisense strand to SEQ ID NO: 970016
uuuccgauuaaguuugcag

SEQ ID NO: 970018 - RNA, 19 nt, Artificial Sequence
  Description of Artificial Sequence: Synthetic oligonucleotide
  Sense strand starting at position 1112 of SEQ ID NO: 913995
ccuccaaggcucugaacaa

SEQ ID NO: 970019 - RNA, 19 nt, Artificial Sequence
  Description of Artificial Sequence: Synthetic oligonucleotide
  Antisense strand to SEQ ID NO: 970018
uuguucagagccuuggagg

SEQ ID NO: 970020 - RNA, 19 nt, Artificial Sequence
  Description of Artificial Sequence: Synthetic oligonucleotide
  Sense strand starting at position 2006 of SEQ ID NO: 913995
cccgaaugacacugcaaga

SEQ ID NO: 970021 - RNA, 19 nt, Artificial Sequence
  Description of Artificial Sequence: Synthetic oligonucleotide
  Antisense strand to SEQ ID NO: 970020
ucuugcagugucauucggg

SEQ ID NO: 970022 - RNA, 19 nt, Artificial Sequence
  Description of Artificial Sequence: Synthetic oligonucleotide
  Sense strand starting at position 255 of SEQ ID NO: 913995
uugagauucuggccuagac

SEQ ID NO: 970023 - RNA, 19 nt, Artificial Sequence
  Description of Artificial Sequence: Synthetic oligonucleotide
  Antisense strand to SEQ ID NO: 970022
gucuaggccagaaucucaa

SEQ ID NO: 970024 - RNA, 19 nt, Artificial Sequence
  Description of Artificial Sequence: Synthetic oligonucleotide
  Sense strand starting at position 483 of SEQ ID NO: 913995
cagcuuaauuguuuaagag

SEQ ID NO: 970025 - RNA, 19 nt, Artificial Sequence
  Description of Artificial Sequence: Synthetic oligonucleotide
  Antisense strand to SEQ ID NO: 970024
cucuuaaacaauuaagcug

SEQ ID NO: 970026 - RNA, 19 nt, Artificial Sequence
  Description of Artificial Sequence: Synthetic oligonucleotide
  Sense strand starting at position 245 of SEQ ID NO: 913995
gggcauugccuugagauuc

SEQ ID NO: 970027 - RNA, 19 nt, Artificial Sequence
  Description of Artificial Sequence: Synthetic oligonucleotide
  Antisense strand to SEQ ID NO: 970026
gaaucucaaggcaaugccc

SEQ ID NO: 970028 - RNA, 19 nt, Artificial Sequence
  Description of Artificial Sequence: Synthetic oligonucleotide
  Sense strand starting at position 106 of SEQ ID NO: 913995
acuauuauagcuggaucuu

SEQ ID NO: 970029 - RNA, 19 nt, Artificial Sequence
  Description of Artificial Sequence: Synthetic oligonucleotide
  Antisense strand to SEQ ID NO: 970028
aagauccagcuauaauagu

SEQ ID NO: 970030 - RNA, 19 nt, Artificial Sequence
  Description of Artificial Sequence: Synthetic oligonucleotide
  Sense strand starting at position 2524 of SEQ ID NO: 913995
cuugcuguucccuaaagac

SEQ ID NO: 970031 - RNA, 19 nt, Artificial Sequence
  Description of Artificial Sequence: Synthetic oligonucleotide
  Antisense strand to SEQ ID NO: 970030
gucuuuagggaacagcaag

SEQ ID NO: 970032 - RNA, 19 nt, Artificial Sequence
  Description of Artificial Sequence: Synthetic oligonucleotide
  Sense strand starting at position 482 of SEQ ID NO: 913995
ucagcuuaauuguuuaaga

SEQ ID NO: 970033 - RNA, 19 nt, Artificial Sequence
  Description of Artificial Sequence: Synthetic oligonucleotide
  Antisense strand to SEQ ID NO: 970032
ucuuaaacaauuaagcuga

SEQ ID NO: 970034 - RNA, 19 nt, Artificial Sequence
  Description of Artificial Sequence: Synthetic oligonucleotide
  Sense strand starting at position 3422 of SEQ ID NO: 913995
gcaaucuuucuguggaaua

SEQ ID NO: 970035 - RNA, 19 nt, Artificial Sequence
  Description of Artificial Sequence: Synthetic oligonucleotide
  Antisense strand to SEQ ID NO: 970034
uauuccacagaaagauugc

SEQ ID NO: 970036 - RNA, 19 nt, Artificial Sequence
  Description of Artificial Sequence: Synthetic oligonucleotide
  Sense strand starting at position 2798 of SEQ ID NO: 913995
guaguaggccugcaaauua

SEQ ID NO: 970037 - RNA, 19 nt, Artificial Sequence
  Description of Artificial Sequence: Synthetic oligonucleotide
  Antisense strand to SEQ ID NO: 970036
uaauuugcaggccuacuac

SEQ ID NO: 970038 - RNA, 19 nt, Artificial Sequence
  Description of Artificial Sequence: Synthetic oligonucleotide
  Sense strand starting at position 2382 of SEQ ID NO: 913995
agcgcuaauccucaccuaa

SEQ ID NO: 970039 - RNA, 19 nt, Artificial Sequence
  Description of Artificial Sequence: Synthetic oligonucleotide
  Antisense strand to SEQ ID NO: 970038
uuaggugaggauuagcgcu

SEQ ID NO: 970040 - RNA, 19 nt, Artificial Sequence
  Description of Artificial Sequence: Synthetic oligonucleotide
  Sense strand starting at position 3421 of SEQ ID NO: 913995
ugcaaucuuucuguggaau

SEQ ID NO: 970041 - RNA, 19 nt, Artificial Sequence
  Description of Artificial Sequence: Synthetic oligonucleotide
  Antisense strand to SEQ ID NO: 970040
auuccacagaaagauugca

SEQ ID NO: 970042 - RNA, 19 nt, Artificial Sequence
  Description of Artificial Sequence: Synthetic oligonucleotide
  Sense strand starting at position 3387 of SEQ ID NO: 913995
gcauaugucauguacaugu

SEQ ID NO: 970043 - RNA, 19 nt, Artificial Sequence
  Description of Artificial Sequence: Synthetic oligonucleotide
  Antisense strand to SEQ ID NO: 970042
acauguacaugacauaugc

SEQ ID NO: 970044 - RNA, 19 nt, Artificial Sequence
  Description of Artificial Sequence: Synthetic oligonucleotide
  Sense strand starting at position 3342 of SEQ ID NO: 913995
guuuacaguuucucacuau

SEQ ID NO: 970045 - RNA, 19 nt, Artificial Sequence
  Description of Artificial Sequence: Synthetic oligonucleotide
  Antisense strand to SEQ ID NO: 970044
auagugagaaacuguaaac

SEQ ID NO: 970046 - RNA, 19 nt, Artificial Sequence
  Description of Artificial Sequence: Synthetic oligonucleotide
  Sense strand starting at position 3341 of SEQ ID NO: 913995
uguuuacaguuucucacua

SEQ ID NO: 970047 - RNA, 19 nt, Artificial Sequence
  Description of Artificial Sequence: Synthetic oligonucleotide
  Antisense strand to SEQ ID NO: 970046
uagugagaaacuguaaaca

SEQ ID NO: 970048 - RNA, 19 nt, Artificial Sequence
  Description of Artificial Sequence: Synthetic oligonucleotide
  Sense strand starting at position 244 of SEQ ID NO: 913995
ugggcauugccuugagauu

SEQ ID NO: 970049 - RNA, 19 nt, Artificial Sequence
  Description of Artificial Sequence: Synthetic oligonucleotide
  Antisense strand to SEQ ID NO: 970048
aaucucaaggcaaugccca

SEQ ID NO: 970050 - RNA, 19 nt, Artificial Sequence
  Description of Artificial Sequence: Synthetic oligonucleotide
  Sense strand starting at position 189 of SEQ ID NO: 913995
gugugucucugacuggaca

SEQ ID NO: 970051 - RNA, 19 nt, Artificial Sequence
  Description of Artificial Sequence: Synthetic oligonucleotide
  Antisense strand to SEQ ID NO: 970050
uguccagucagagacacac

SEQ ID NO: 970052 - RNA, 19 nt, Artificial Sequence
  Description of Artificial Sequence: Synthetic oligonucleotide
  Sense strand starting at position 2480 of SEQ ID NO: 913995
cguugccuucucuaucaaa

SEQ ID NO: 970053 - RNA, 19 nt, Artificial Sequence
  Description of Artificial Sequence: Synthetic oligonucleotide
  Antisense strand to SEQ ID NO: 970052
uuugauagagaaggcaacg

SEQ ID NO: 970054 - RNA, 19 nt, Artificial Sequence
  Description of Artificial Sequence: Synthetic oligonucleotide
  Sense strand starting at position 3462 of SEQ ID NO: 913995
cgaguuaaacaaugcaugu

SEQ ID NO: 970055 - RNA, 19 nt, Artificial Sequence
  Description of Artificial Sequence: Synthetic oligonucleotide
  Antisense strand to SEQ ID NO: 970054
acaugcauuguuuaacucg

SEQ ID NO: 970056 - RNA, 19 nt, Artificial Sequence
  Description of Artificial Sequence: Synthetic oligonucleotide
  Sense strand starting at position 2245 of SEQ ID NO: 913995
cguuaacuuguccaacugu

SEQ ID NO: 970057 - RNA, 19 nt, Artificial Sequence
  Description of Artificial Sequence: Synthetic oligonucleotide
  Antisense strand to SEQ ID NO: 970056
acaguuggacaaguuaacg

SEQ ID NO: 970058 - RNA, 19 nt, Artificial Sequence
  Description of Artificial Sequence: Synthetic oligonucleotide
  Sense strand starting at position 826 of SEQ ID NO: 913995
aaccuugucccagguguau

SEQ ID NO: 970059 - RNA, 19 nt, Artificial Sequence
  Description of Artificial Sequence: Synthetic oligonucleotide
  Antisense strand to SEQ ID NO: 970058
auacaccugggacaagguu

SEQ ID NO: 970060 - RNA, 19 nt, Artificial Sequence
  Description of Artificial Sequence: Synthetic oligonucleotide
  Sense strand starting at position 2090 of SEQ ID NO: 913995
gcgaagguuccugggagua

SEQ ID NO: 970061 - RNA, 19 nt, Artificial Sequence
  Description of Artificial Sequence: Synthetic oligonucleotide
  Antisense strand to SEQ ID NO: 970060
uacucccaggaaccuucgc

SEQ ID NO: 970062 - RNA, 19 nt, Artificial Sequence
  Description of Artificial Sequence: Synthetic oligonucleotide
  Sense strand starting at position 2262 of SEQ ID NO: 913995
guuggaacguccucuuuga

SEQ ID NO: 970063 - RNA, 19 nt, Artificial Sequence
  Description of Artificial Sequence: Synthetic oligonucleotide
  Antisense strand to SEQ ID NO: 970062
ucaaagaggacguuccaac

SEQ ID NO: 970064 - RNA, 19 nt, Artificial Sequence
  Description of Artificial Sequence: Synthetic oligonucleotide
  Sense strand starting at position 2775 of SEQ ID NO: 913995
caagacuguuuagaggaaa

SEQ ID NO: 970065 - RNA, 19 nt, Artificial Sequence
  Description of Artificial Sequence: Synthetic oligonucleotide
  Antisense strand to SEQ ID NO: 970064
uuuccucuaaacagucuug

SEQ ID NO: 970066 - RNA, 19 nt, Artificial Sequence
  Description of Artificial Sequence: Synthetic oligonucleotide
  Sense strand starting at position 3684 of SEQ ID NO: 913995
uagcauagcucacugugau

SEQ ID NO: 970067 - RNA, 19 nt, Artificial Sequence
  Description of Artificial Sequence: Synthetic oligonucleotide
  Antisense strand to SEQ ID NO: 970066
aucacagugagcuaugcua

SEQ ID NO: 970068 - RNA, 19 nt, Artificial Sequence
  Description of Artificial Sequence: Synthetic oligonucleotide
  Sense strand starting at position 224 of SEQ ID NO: 913995
augaaugguucauagagag

SEQ ID NO: 970069 - RNA, 19 nt, Artificial Sequence
  Description of Artificial Sequence: Synthetic oligonucleotide
  Antisense strand to SEQ ID NO: 970068
cucucuaugaaccauucau

SEQ ID NO: 970070 - RNA, 19 nt, Artificial Sequence
  Description of Artificial Sequence: Synthetic oligonucleotide
  Sense strand starting at position 3685 of SEQ ID NO: 913995
agcauagcucacugugauc

SEQ ID NO: 970071 - RNA, 19 nt, Artificial Sequence
  Description of Artificial Sequence: Synthetic oligonucleotide
  Antisense strand to SEQ ID NO: 970070
gaucacagugagcuaugcu

SEQ ID NO: 970072 - RNA, 19 nt, Artificial Sequence
  Description of Artificial Sequence: Synthetic oligonucleotide
  Sense strand starting at position 395 of SEQ ID NO: 913995
ccuggauuggucugccgga

SEQ ID NO: 970073 - RNA, 19 nt, Artificial Sequence
  Description of Artificial Sequence: Synthetic oligonucleotide
  Antisense strand to SEQ ID NO: 970072
uccggcagaccaauccagg

SEQ ID NO: 970074 - RNA, 19 nt, Artificial Sequence
  Description of Artificial Sequence: Synthetic oligonucleotide
  Sense strand starting at position 3419 of SEQ ID NO: 913995
ugugcaaucuuucugugga

SEQ ID NO: 970075 - RNA, 19 nt, Artificial Sequence
  Description of Artificial Sequence: Synthetic oligonucleotide
  Antisense strand to SEQ ID NO: 970074
uccacagaaagauugcaca

SEQ ID NO: 970076 - RNA, 19 nt, Artificial Sequence
  Description of Artificial Sequence: Synthetic oligonucleotide
  Sense strand starting at position 2220 of SEQ ID NO: 913995
aguuaacauuugcguauuu

SEQ ID NO: 970077 - RNA, 19 nt, Artificial Sequence
  Description of Artificial Sequence: Synthetic oligonucleotide
  Antisense strand to SEQ ID NO: 970076
aaauacgcaaauguuaacu

SEQ ID NO: 970078 - RNA, 19 nt, Artificial Sequence
  Description of Artificial Sequence: Synthetic oligonucleotide
  Sense strand starting at position 286 of SEQ ID NO: 913996
gggaggcuugcgucuguca

SEQ ID NO: 970079 - RNA, 19 nt, Artificial Sequence
  Description of Artificial Sequence: Synthetic oligonucleotide
  Antisense strand to SEQ ID NO: 970078
ugacagacgcaagccuccc

SEQ ID NO: 970080 - RNA, 19 nt, Artificial Sequence
  Description of Artificial Sequence: Synthetic oligonucleotide
  Sense strand starting at position 1513 of SEQ ID NO: 913996
cccugagcuccagaucaca

SEQ ID NO: 970081 - RNA, 19 nt, Artificial Sequence
  Description of Artificial Sequence: Synthetic oligonucleotide
  Antisense strand to SEQ ID NO: 970080
ugugaucuggagcucaggg

SEQ ID NO: 970082 - RNA, 19 nt, Artificial Sequence
  Description of Artificial Sequence: Synthetic oligonucleotide
  Sense strand starting at position 890 of SEQ ID NO: 913996
agaaucagugucugggaca

SEQ ID NO: 970083 - RNA, 19 nt, Artificial Sequence
  Description of Artificial Sequence: Synthetic oligonucleotide
  Antisense strand to SEQ ID NO: 970082
ugucccagacacugauucu

SEQ ID NO: 970084 - RNA, 19 nt, Artificial Sequence
  Description of Artificial Sequence: Synthetic oligonucleotide
  Sense strand starting at position 19 of SEQ ID NO: 913996
auguuauguguguuugugu

SEQ ID NO: 970085 - RNA, 19 nt, Artificial Sequence
  Description of Artificial Sequence: Synthetic oligonucleotide
  Antisense strand to SEQ ID NO: 970084
acacaaacacacauaacau

SEQ ID NO: 970086 - RNA, 19 nt, Artificial Sequence
  Description of Artificial Sequence: Synthetic oligonucleotide
  Sense strand starting at position 3349 of SEQ ID NO: 913996
ucagacaggccucauugua

SEQ ID NO: 970087 - RNA, 19 nt, Artificial Sequence
  Description of Artificial Sequence: Synthetic oligonucleotide
  Antisense strand to SEQ ID NO: 970086
uacaaugaggccugucuga

SEQ ID NO: 970088 - RNA, 19 nt, Artificial Sequence
  Description of Artificial Sequence: Synthetic oligonucleotide
  Sense strand starting at position 3722 of SEQ ID NO: 913996
ccacacauguucucaggau

SEQ ID NO: 970089 - RNA, 19 nt, Artificial Sequence
  Description of Artificial Sequence: Synthetic oligonucleotide
  Antisense strand to SEQ ID NO: 970088
auccugagaacaugugugg

SEQ ID NO: 970090 - RNA, 19 nt, Artificial Sequence
  Description of Artificial Sequence: Synthetic oligonucleotide
  Sense strand starting at position 960 of SEQ ID NO: 913996
ugacucagccauggugaga

SEQ ID NO: 970091 - RNA, 19 nt, Artificial Sequence
  Description of Artificial Sequence: Synthetic oligonucleotide
  Antisense strand to SEQ ID NO: 970090
ucucaccauggcugaguca

SEQ ID NO: 970092 - RNA, 19 nt, Artificial Sequence
  Description of Artificial Sequence: Synthetic oligonucleotide
  Sense strand starting at position 2642 of SEQ ID NO: 913996
ucaggugggcgugacaaau

SEQ ID NO: 970093 - RNA, 19 nt, Artificial Sequence
  Description of Artificial Sequence: Synthetic oligonucleotide
  Antisense strand to SEQ ID NO: 970092
auuugucacgcccaccuga

SEQ ID NO: 970094 - RNA, 19 nt, Artificial Sequence
  Description of Artificial Sequence: Synthetic oligonucleotide
  Sense strand starting at position 3882 of SEQ ID NO: 913996
aggguaugguucucccgaa

SEQ ID NO: 970095 - RNA, 19 nt, Artificial Sequence
  Description of Artificial Sequence: Synthetic oligonucleotide
  Antisense strand to SEQ ID NO: 970094
uucgggagaaccauacccu

SEQ ID NO: 970096 - RNA, 19 nt, Artificial Sequence
  Description of Artificial Sequence: Synthetic oligonucleotide
  Sense strand starting at position 3883 of SEQ ID NO: 913996
ggguaugguucucccgaag

SEQ ID NO: 970097 - RNA, 19 nt, Artificial Sequence
  Description of Artificial Sequence: Synthetic oligonucleotide
  Antisense strand to SEQ ID NO: 970096
cuucgggagaaccauaccc

SEQ ID NO: 970098 - RNA, 19 nt, Artificial Sequence
  Description of Artificial Sequence: Synthetic oligonucleotide
  Sense strand starting at position 3622 of SEQ ID NO: 913996
gccgccuuucuggaccaaa

SEQ ID NO: 970099 - RNA, 19 nt, Artificial Sequence
  Description of Artificial Sequence: Synthetic oligonucleotide
  Antisense strand to SEQ ID NO: 970098
uuugguccagaaaggcggc

SEQ ID NO: 970100 - RNA, 19 nt, Artificial Sequence
  Description of Artificial Sequence: Synthetic oligonucleotide
  Sense strand starting at position 247 of SEQ ID NO: 913996
ugugauguggugcagacuu

SEQ ID NO: 970101 - RNA, 19 nt, Artificial Sequence
  Description of Artificial Sequence: Synthetic oligonucleotide
  Antisense strand to SEQ ID NO: 970100
aagucugcaccacaucaca

SEQ ID NO: 970102 - RNA, 19 nt, Artificial Sequence
  Description of Artificial Sequence: Synthetic oligonucleotide
  Sense strand starting at position 3293 of SEQ ID NO: 913996
cagggcauuccacgguuaa

SEQ ID NO: 970103 - RNA, 19 nt, Artificial Sequence
  Description of Artificial Sequence: Synthetic oligonucleotide
  Antisense strand to SEQ ID NO: 970102
uuaaccguggaaugcccug

SEQ ID NO: 970104 - RNA, 19 nt, Artificial Sequence
  Description of Artificial Sequence: Synthetic oligonucleotide
  Sense strand starting at position 3294 of SEQ ID NO: 913996
agggcauuccacgguuaac

SEQ ID NO: 970105 - RNA, 19 nt, Artificial Sequence
  Description of Artificial Sequence: Synthetic oligonucleotide
  Antisense strand to SEQ ID NO: 970104
guuaaccguggaaugcccu

SEQ ID NO: 970106 - RNA, 19 nt, Artificial Sequence
  Description of Artificial Sequence: Synthetic oligonucleotide
  Sense strand starting at position 2548 of SEQ ID NO: 913996
gcuugucaugaaggcugaa

SEQ ID NO: 970107 - RNA, 19 nt, Artificial Sequence
  Description of Artificial Sequence: Synthetic oligonucleotide
  Antisense strand to SEQ ID NO: 970106
uucagccuucaugacaagc

SEQ ID NO: 970108 - RNA, 19 nt, Artificial Sequence
  Description of Artificial Sequence: Synthetic oligonucleotide
  Sense strand starting at position 3674 of SEQ ID NO: 913996
ucgugucccgaacauguau

SEQ ID NO: 970109 - RNA, 19 nt, Artificial Sequence
  Description of Artificial Sequence: Synthetic oligonucleotide
  Antisense strand to SEQ ID NO: 970108
auacauguucgggacacga

SEQ ID NO: 970110 - RNA, 19 nt, Artificial Sequence
  Description of Artificial Sequence: Synthetic oligonucleotide
  Sense strand starting at position 948 of SEQ ID NO: 913996
ccguucucugggugacuca

SEQ ID NO: 970111 - RNA, 19 nt, Artificial Sequence
  Description of Artificial Sequence: Synthetic oligonucleotide
  Antisense strand to SEQ ID NO: 970110
ugagucacccagagaacgg

SEQ ID NO: 970112 - RNA, 19 nt, Artificial Sequence
  Description of Artificial Sequence: Synthetic oligonucleotide
  Sense strand starting at position 3760 of SEQ ID NO: 913996
ggccuuccgucacucauau

SEQ ID NO: 970113 - RNA, 19 nt, Artificial Sequence
  Description of Artificial Sequence: Synthetic oligonucleotide
  Antisense strand to SEQ ID NO: 970112
auaugagugacggaaggcc

SEQ ID NO: 970114 - RNA, 19 nt, Artificial Sequence
  Description of Artificial Sequence: Synthetic oligonucleotide
  Sense strand starting at position 119 of SEQ ID NO: 913996
guuggauguguauguaugu

SEQ ID NO: 970115 - RNA, 19 nt, Artificial Sequence
  Description of Artificial Sequence: Synthetic oligonucleotide
  Antisense strand to SEQ ID NO: 970114
acauacauacacauccaac

SEQ ID NO: 970116 - RNA, 19 nt, Artificial Sequence
  Description of Artificial Sequence: Synthetic oligonucleotide
  Sense strand starting at position 115 of SEQ ID NO: 913996
auguguuggauguguaugu

SEQ ID NO: 970117 - RNA, 19 nt, Artificial Sequence
  Description of Artificial Sequence: Synthetic oligonucleotide
  Antisense strand to SEQ ID NO: 970116
acauacacauccaacacau

SEQ ID NO: 970118 - RNA, 19 nt, Artificial Sequence
  Description of Artificial Sequence: Synthetic oligonucleotide
  Sense strand starting at position 113 of SEQ ID NO: 913996
guauguguuggauguguau

SEQ ID NO: 970119 - RNA, 19 nt, Artificial Sequence
  Description of Artificial Sequence: Synthetic oligonucleotide
  Antisense strand to SEQ ID NO: 970118
auacacauccaacacauac

SEQ ID NO: 970120 - RNA, 19 nt, Artificial Sequence
  Description of Artificial Sequence: Synthetic oligonucleotide
  Sense strand starting at position 946 of SEQ ID NO: 913996
gcccguucucugggugacu

SEQ ID NO: 970121 - RNA, 19 nt, Artificial Sequence
  Description of Artificial Sequence: Synthetic oligonucleotide
  Antisense strand to SEQ ID NO: 970120
agucacccagagaacgggc

SEQ ID NO: 970122 - RNA, 19 nt, Artificial Sequence
  Description of Artificial Sequence: Synthetic oligonucleotide
  Sense strand starting at position 17 of SEQ ID NO: 913996
guauguuauguguguuugu

SEQ ID NO: 970123 - RNA, 19 nt, Artificial Sequence
  Description of Artificial Sequence: Synthetic oligonucleotide
  Antisense strand to SEQ ID NO: 970122
acaaacacacauaacauac

SEQ ID NO: 970124 - RNA, 19 nt, Artificial Sequence
  Description of Artificial Sequence: Synthetic oligonucleotide
  Sense strand starting at position 15 of SEQ ID NO: 913996
guguauguuauguguguuu

SEQ ID NO: 970125 - RNA, 19 nt, Artificial Sequence
  Description of Artificial Sequence: Synthetic oligonucleotide
  Antisense strand to SEQ ID NO: 970124
aaacacacauaacauacac

SEQ ID NO: 970126 - RNA, 19 nt, Artificial Sequence
  Description of Artificial Sequence: Synthetic oligonucleotide
  Sense strand starting at position 171 of SEQ ID NO: 913996
gggugugugcugugugcau

SEQ ID NO: 970127 - RNA, 19 nt, Artificial Sequence
  Description of Artificial Sequence: Synthetic oligonucleotide
  Antisense strand to SEQ ID NO: 970126
augcacacagcacacaccc

SEQ ID NO: 970128 - RNA, 19 nt, Artificial Sequence
  Description of Artificial Sequence: Synthetic oligonucleotide
  Sense strand starting at position 109 of SEQ ID NO: 913996
gcauguauguguuggaugu

SEQ ID NO: 970129 - RNA, 19 nt, Artificial Sequence
  Description of Artificial Sequence: Synthetic oligonucleotide
  Antisense strand to SEQ ID NO: 970128
acauccaacacauacaugc

SEQ ID NO: 970130 - RNA, 19 nt, Artificial Sequence
  Description of Artificial Sequence: Synthetic oligonucleotide
  Sense strand starting at position 3670 of SEQ ID NO: 913996
ugucucgugucccgaacau

SEQ ID NO: 970131 - RNA, 19 nt, Artificial Sequence
  Description of Artificial Sequence: Synthetic oligonucleotide
  Antisense strand to SEQ ID NO: 970130
auguucgggacacgagaca

SEQ ID NO: 970132 - RNA, 19 nt, Artificial Sequence
  Description of Artificial Sequence: Synthetic oligonucleotide
  Sense strand starting at position 2062 of SEQ ID NO: 913997
agaaauucccuuuaaggcu

SEQ ID NO: 970133 - RNA, 19 nt, Artificial Sequence
  Description of Artificial Sequence: Synthetic oligonucleotide
  Antisense strand to SEQ ID NO: 970132
agccuuaaagggaauuucu

SEQ ID NO: 970134 - RNA, 19 nt, Artificial Sequence
  Description of Artificial Sequence: Synthetic oligonucleotide
  Sense strand starting at position 1554 of SEQ ID NO: 913997
aaguacacagucugagaaa

SEQ ID NO: 970135 - RNA, 19 nt, Artificial Sequence
  Description of Artificial Sequence: Synthetic oligonucleotide
  Antisense strand to SEQ ID NO: 970134
uuucucagacuguguacuu

SEQ ID NO: 970136 - RNA, 19 nt, Artificial Sequence
  Description of Artificial Sequence: Synthetic oligonucleotide
  Sense strand starting at position 3482 of SEQ ID NO: 913997
uguuuagcagaugauugaa

SEQ ID NO: 970137 - RNA, 19 nt, Artificial Sequence
  Description of Artificial Sequence: Synthetic oligonucleotide
  Antisense strand to SEQ ID NO: 970136
uucaaucaucugcuaaaca

SEQ ID NO: 970138 - RNA, 19 nt, Artificial Sequence
  Description of Artificial Sequence: Synthetic oligonucleotide
  Sense strand starting at position 1757 of SEQ ID NO: 913997
gguccguuacccgcggaaa

SEQ ID NO: 970139 - RNA, 19 nt, Artificial Sequence
  Description of Artificial Sequence: Synthetic oligonucleotide
  Antisense strand to SEQ ID NO: 970138
uuuccgcggguaacggacc

SEQ ID NO: 970140 - RNA, 19 nt, Artificial Sequence
  Description of Artificial Sequence: Synthetic oligonucleotide
  Sense strand starting at position 2552 of SEQ ID NO: 913997
agucuuggagcugguauuu

SEQ ID NO: 970141 - RNA, 19 nt, Artificial Sequence
  Description of Artificial Sequence: Synthetic oligonucleotide
  Antisense strand to SEQ ID NO: 970140
aaauaccagcuccaagacu

SEQ ID NO: 970142 - RNA, 19 nt, Artificial Sequence
  Description of Artificial Sequence: Synthetic oligonucleotide
  Sense strand starting at position 999 of SEQ ID NO: 913997
gggacauguuuacucaacu

SEQ ID NO: 970143 - RNA, 19 nt, Artificial Sequence
  Description of Artificial Sequence: Synthetic oligonucleotide
  Antisense strand to SEQ ID NO: 970142
aguugaguaaacauguccc

SEQ ID NO: 970144 - RNA, 19 nt, Artificial Sequence
  Description of Artificial Sequence: Synthetic oligonucleotide
  Sense strand starting at position 2475 of SEQ ID NO: 913997
agcauaguacuugaagcaa

SEQ ID NO: 970145 - RNA, 19 nt, Artificial Sequence
  Description of Artificial Sequence: Synthetic oligonucleotide
  Antisense strand to SEQ ID NO: 970144
uugcuucaaguacuaugcu

SEQ ID NO: 970146 - RNA, 19 nt, Artificial Sequence
  Description of Artificial Sequence: Synthetic oligonucleotide
  Sense strand starting at position 151 of SEQ ID NO: 913997
cuuacuggugcugaauaau

SEQ ID NO: 970147 - RNA, 19 nt, Artificial Sequence
  Description of Artificial Sequence: Synthetic oligonucleotide
  Antisense strand to SEQ ID NO: 970146
auuauucagcaccaguaag

SEQ ID NO: 970148 - RNA, 19 nt, Artificial Sequence
  Description of Artificial Sequence: Synthetic oligonucleotide
  Sense strand starting at position 1364 of SEQ ID NO: 913997
gagaaagccguguaccaaa

SEQ ID NO: 970149 - RNA, 19 nt, Artificial Sequence
  Description of Artificial Sequence: Synthetic oligonucleotide
  Antisense strand to SEQ ID NO: 970148
uuugguacacggcuuucuc

SEQ ID NO: 970150 - RNA, 19 nt, Artificial Sequence
  Description of Artificial Sequence: Synthetic oligonucleotide
  Sense strand starting at position 1000 of SEQ ID NO: 913997
ggacauguuuacucaacuu

SEQ ID NO: 970151 - RNA, 19 nt, Artificial Sequence
  Description of Artificial Sequence: Synthetic oligonucleotide
  Antisense strand to SEQ ID NO: 970150
aaguugaguaaacaugucc

SEQ ID NO: 970152 - RNA, 19 nt, Artificial Sequence
  Description of Artificial Sequence: Synthetic oligonucleotide
  Sense strand starting at position 1527 of SEQ ID NO: 913997
ugauguaggcaucauucuu

SEQ ID NO: 970153 - RNA, 19 nt, Artificial Sequence
  Description of Artificial Sequence: Synthetic oligonucleotide
  Antisense strand to SEQ ID NO: 970152
aagaaugaugccuacauca

SEQ ID NO: 970154 - RNA, 19 nt, Artificial Sequence
  Description of Artificial Sequence: Synthetic oligonucleotide
  Sense strand starting at position 93 of SEQ ID NO: 913997
uccagagacgaugguucau

SEQ ID NO: 970155 - RNA, 19 nt, Artificial Sequence
  Description of Artificial Sequence: Synthetic oligonucleotide
  Antisense strand to SEQ ID NO: 970154
augaaccaucgucucugga

SEQ ID NO: 970156 - RNA, 19 nt, Artificial Sequence
  Description of Artificial Sequence: Synthetic oligonucleotide
  Sense strand starting at position 2356 of SEQ ID NO: 913997
ugaaauccgcuggaauugu

SEQ ID NO: 970157 - RNA, 19 nt, Artificial Sequence
  Description of Artificial Sequence: Synthetic oligonucleotide
  Antisense strand to SEQ ID NO: 970156
acaauuccagcggauuuca

SEQ ID NO: 970158 - RNA, 19 nt, Artificial Sequence
  Description of Artificial Sequence: Synthetic oligonucleotide
  Sense strand starting at position 2223 of SEQ ID NO: 913997
gugacaggaucccuuucuu

SEQ ID NO: 970159 - RNA, 19 nt, Artificial Sequence
  Description of Artificial Sequence: Synthetic oligonucleotide
  Antisense strand to SEQ ID NO: 970158
aagaaagggauccugucac

SEQ ID NO: 970160 - RNA, 19 nt, Artificial Sequence
  Description of Artificial Sequence: Synthetic oligonucleotide
  Sense strand starting at position 993 of SEQ ID NO: 913997
gcucaagggacauguuuac

SEQ ID NO: 970161 - RNA, 19 nt, Artificial Sequence
  Description of Artificial Sequence: Synthetic oligonucleotide
  Antisense strand to SEQ ID NO: 970160
guaaacaugucccuugagc

SEQ ID NO: 970162 - RNA, 19 nt, Artificial Sequence
  Description of Artificial Sequence: Synthetic oligonucleotide
  Sense strand starting at position 2355 of SEQ ID NO: 913997
cugaaauccgcuggaauug

SEQ ID NO: 970163 - RNA, 19 nt, Artificial Sequence
  Description of Artificial Sequence: Synthetic oligonucleotide
  Antisense strand to SEQ ID NO: 970162
caauuccagcggauuucag

SEQ ID NO: 970164 - RNA, 19 nt, Artificial Sequence
  Description of Artificial Sequence: Synthetic oligonucleotide
  Sense strand starting at position 2201 of SEQ ID NO: 913997
gauuacugugucuaguauu

SEQ ID NO: 970165 - RNA, 19 nt, Artificial Sequence
  Description of Artificial Sequence: Synthetic oligonucleotide
  Antisense strand to SEQ ID NO: 970164
aauacuagacacaguaauc

SEQ ID NO: 970166 - RNA, 19 nt, Artificial Sequence
  Description of Artificial Sequence: Synthetic oligonucleotide
  Sense strand starting at position 3479 of SEQ ID NO: 913997
cuguguuuagcagaugauu

SEQ ID NO: 970167 - RNA, 19 nt, Artificial Sequence
  Description of Artificial Sequence: Synthetic oligonucleotide
  Antisense strand to SEQ ID NO: 970166
aaucaucugcuaaacacag

SEQ ID NO: 970168 - RNA, 19 nt, Artificial Sequence
  Description of Artificial Sequence: Synthetic oligonucleotide
  Sense strand starting at position 2465 of SEQ ID NO: 913997
uucaguggugagcauagua

SEQ ID NO: 970169 - RNA, 19 nt, Artificial Sequence
  Description of Artificial Sequence: Synthetic oligonucleotide
  Antisense strand to SEQ ID NO: 970168
uacuaugcucaccacugaa

SEQ ID NO: 970170 - RNA, 19 nt, Artificial Sequence
  Description of Artificial Sequence: Synthetic oligonucleotide
  Sense strand starting at position 1450 of SEQ ID NO: 913997
agggaaagccuuugugagu

SEQ ID NO: 970171 - RNA, 19 nt, Artificial Sequence
  Description of Artificial Sequence: Synthetic oligonucleotide
  Antisense strand to SEQ ID NO: 970170
acucacaaaggcuuucccu

SEQ ID NO: 970172 - RNA, 19 nt, Artificial Sequence
  Description of Artificial Sequence: Synthetic oligonucleotide
  Sense strand starting at position 2354 of SEQ ID NO: 913997
ccugaaauccgcuggaauu

SEQ ID NO: 970173 - RNA, 19 nt, Artificial Sequence
  Description of Artificial Sequence: Synthetic oligonucleotide
  Antisense strand to SEQ ID NO: 970172
aauuccagcggauuucagg

SEQ ID NO: 970174 - RNA, 19 nt, Artificial Sequence
  Description of Artificial Sequence: Synthetic oligonucleotide
  Sense strand starting at position 873 of SEQ ID NO: 913997
gcacuaucugcugaguaug

SEQ ID NO: 970175 - RNA, 19 nt, Artificial Sequence
  Description of Artificial Sequence: Synthetic oligonucleotide
  Antisense strand to SEQ ID NO: 970174
cauacucagcagauagugc

SEQ ID NO: 970176 - RNA, 19 nt, Artificial Sequence
  Description of Artificial Sequence: Synthetic oligonucleotide
  Sense strand starting at position 3481 of SEQ ID NO: 913997
guguuuagcagaugauuga

SEQ ID NO: 970177 - RNA, 19 nt, Artificial Sequence
  Description of Artificial Sequence: Synthetic oligonucleotide
  Antisense strand to SEQ ID NO: 970176
ucaaucaucugcuaaacac

SEQ ID NO: 970178 - RNA, 19 nt, Artificial Sequence
  Description of Artificial Sequence: Synthetic oligonucleotide
  Sense strand starting at position 2213 of SEQ ID NO: 913997
uaguauuucugugacagga

SEQ ID NO: 970179 - RNA, 19 nt, Artificial Sequence
  Description of Artificial Sequence: Synthetic oligonucleotide
  Antisense strand to SEQ ID NO: 970178
uccugucacagaaauacua

SEQ ID NO: 970180 - RNA, 19 nt, Artificial Sequence
  Description of Artificial Sequence: Synthetic oligonucleotide
  Sense strand starting at position 428 of SEQ ID NO: 913997
ggaucugcauguucuuaac

SEQ ID NO: 970181 - RNA, 19 nt, Artificial Sequence
  Description of Artificial Sequence: Synthetic oligonucleotide
  Antisense strand to SEQ ID NO: 970180
guuaagaacaugcagaucc

SEQ ID NO: 970182 - RNA, 19 nt, Artificial Sequence
  Description of Artificial Sequence: Synthetic oligonucleotide
  Sense strand starting at position 2200 of SEQ ID NO: 913997
ggauuacugugucuaguau

SEQ ID NO: 970183 - RNA, 19 nt, Artificial Sequence
  Description of Artificial Sequence: Synthetic oligonucleotide
  Antisense strand to SEQ ID NO: 970182
auacuagacacaguaaucc

SEQ ID NO: 970184 - RNA, 19 nt, Artificial Sequence
  Description of Artificial Sequence: Synthetic oligonucleotide
  Sense strand starting at position 1362 of SEQ ID NO: 913997
cagagaaagccguguacca

SEQ ID NO: 970185 - RNA, 19 nt, Artificial Sequence
  Description of Artificial Sequence: Synthetic oligonucleotide
  Antisense strand to SEQ ID NO: 970184
ugguacacggcuuucucug

SEQ ID NO: 970186 - RNA, 19 nt, Artificial Sequence
  Description of Artificial Sequence: Synthetic oligonucleotide
  Sense strand starting at position 2187 of SEQ ID NO: 913997
guuaaccuuguguggauua

SEQ ID NO: 970187 - RNA, 19 nt, Artificial Sequence
  Description of Artificial Sequence: Synthetic oligonucleotide
  Antisense strand to SEQ ID NO: 970186
uaauccacacaagguuaac

SEQ ID NO: 970188 - RNA, 19 nt, Artificial Sequence
  Description of Artificial Sequence: Synthetic oligonucleotide
  Sense strand starting at position 3474 of SEQ ID NO: 913997
uaugucuguguuuagcaga

SEQ ID NO: 970189 - RNA, 19 nt, Artificial Sequence
  Description of Artificial Sequence: Synthetic oligonucleotide
  Antisense strand to SEQ ID NO: 970188
ucugcuaaacacagacaua

SEQ ID NO: 970190 - RNA, 19 nt, Artificial Sequence
  Description of Artificial Sequence: Synthetic oligonucleotide
  Sense strand starting at position 1391 of SEQ ID NO: 913997
acgcauugcccacaguuaa

SEQ ID NO: 970191 - RNA, 19 nt, Artificial Sequence
  Description of Artificial Sequence: Synthetic oligonucleotide
  Antisense strand to SEQ ID NO: 970190
uuaacugugggcaaugcgu

SEQ ID NO: 970192 - RNA, 19 nt, Artificial Sequence
  Description of Artificial Sequence: Synthetic oligonucleotide
  Sense strand starting at position 2215 of SEQ ID NO: 913997
guauuucugugacaggauc

SEQ ID NO: 970193 - RNA, 19 nt, Artificial Sequence
  Description of Artificial Sequence: Synthetic oligonucleotide
  Antisense strand to SEQ ID NO: 970192
gauccugucacagaaauac

SEQ ID NO: 970194 - RNA, 19 nt, Artificial Sequence
  Description of Artificial Sequence: Synthetic oligonucleotide
  Sense strand starting at position 2197 of SEQ ID NO: 913997
uguggauuacugugucuag

SEQ ID NO: 970195 - RNA, 19 nt, Artificial Sequence
  Description of Artificial Sequence: Synthetic oligonucleotide
  Antisense strand to SEQ ID NO: 970194
cuagacacaguaauccaca

SEQ ID NO: 970196 - RNA, 19 nt, Artificial Sequence
  Description of Artificial Sequence: Synthetic oligonucleotide
  Sense strand starting at position 425 of SEQ ID NO: 913997
auuggaucugcauguucuu

SEQ ID NO: 970197 - RNA, 19 nt, Artificial Sequence
  Description of Artificial Sequence: Synthetic oligonucleotide
  Antisense strand to SEQ ID NO: 970196
aagaacaugcagauccaau

SEQ ID NO: 970198 - RNA, 19 nt, Artificial Sequence
  Description of Artificial Sequence: Synthetic oligonucleotide
  Sense strand starting at position 2462 of SEQ ID NO: 913997
guguucaguggugagcaua

SEQ ID NO: 970199 - RNA, 19 nt, Artificial Sequence
  Description of Artificial Sequence: Synthetic oligonucleotide
  Antisense strand to SEQ ID NO: 970198
uaugcucaccacugaacac

SEQ ID NO: 970200 - RNA, 19 nt, Artificial Sequence
  Description of Artificial Sequence: Synthetic oligonucleotide
  Sense strand starting at position 3470 of SEQ ID NO: 913997
uaauuaugucuguguuuag

SEQ ID NO: 970201 - RNA, 19 nt, Artificial Sequence
  Description of Artificial Sequence: Synthetic oligonucleotide
  Antisense strand to SEQ ID NO: 970200
cuaaacacagacauaauua

SEQ ID NO: 970202 - RNA, 19 nt, Artificial Sequence
  Description of Artificial Sequence: Synthetic oligonucleotide
  Sense strand starting at position 2186 of SEQ ID NO: 913997
uguuaaccuuguguggauu

SEQ ID NO: 970203 - RNA, 19 nt, Artificial Sequence
  Description of Artificial Sequence: Synthetic oligonucleotide
  Antisense strand to SEQ ID NO: 970202
aauccacacaagguuaaca

SEQ ID NO: 970204 - RNA, 19 nt, Artificial Sequence
  Description of Artificial Sequence: Synthetic oligonucleotide
  Sense strand starting at position 2265 of SEQ ID NO: 913997
ccggcuucuguaugaaaug

SEQ ID NO: 970205 - RNA, 19 nt, Artificial Sequence
  Description of Artificial Sequence: Synthetic oligonucleotide
  Antisense strand to SEQ ID NO: 970204
cauuucauacagaagccgg

SEQ ID NO: 970206 - RNA, 19 nt, Artificial Sequence
  Description of Artificial Sequence: Synthetic oligonucleotide
  Sense strand starting at position 881 of SEQ ID NO: 913997
ugcugaguauguucuacca

SEQ ID NO: 970207 - RNA, 19 nt, Artificial Sequence
  Description of Artificial Sequence: Synthetic oligonucleotide
  Antisense strand to SEQ ID NO: 970206
ugguagaacauacucagca

SEQ ID NO: 970208 - RNA, 19 nt, Artificial Sequence
  Description of Artificial Sequence: Synthetic oligonucleotide
  Sense strand starting at position 1580 of SEQ ID NO: 913997
gcgcuugcccaagaucaca

SEQ ID NO: 970209 - RNA, 19 nt, Artificial Sequence
  Description of Artificial Sequence: Synthetic oligonucleotide
  Antisense strand to SEQ ID NO: 970208
ugugaucuugggcaagcgc

SEQ ID NO: 970210 - RNA, 19 nt, Artificial Sequence
  Description of Artificial Sequence: Synthetic oligonucleotide
  Sense strand starting at position 31 of SEQ ID NO: 913997
agugcuguguuccugaaag

SEQ ID NO: 970211 - RNA, 19 nt, Artificial Sequence
  Description of Artificial Sequence: Synthetic oligonucleotide
  Antisense strand to SEQ ID NO: 970210
cuuucaggaacacagcacu

SEQ ID NO: 970212 - RNA, 19 nt, Artificial Sequence
  Description of Artificial Sequence: Synthetic oligonucleotide
  Sense strand starting at position 741 of SEQ ID NO: 913998
gcccgaauucuagaauaaa

SEQ ID NO: 970213 - RNA, 19 nt, Artificial Sequence
  Description of Artificial Sequence: Synthetic oligonucleotide
  Antisense strand to SEQ ID NO: 970212
uuuauucuagaauucgggc

SEQ ID NO: 970214 - RNA, 19 nt, Artificial Sequence
  Description of Artificial Sequence: Synthetic oligonucleotide
  Sense strand starting at position 1228 of SEQ ID NO: 913998
aaugauugucuggaagguu

SEQ ID NO: 970215 - RNA, 19 nt, Artificial Sequence
  Description of Artificial Sequence: Synthetic oligonucleotide
  Antisense strand to SEQ ID NO: 970214
aaccuuccagacaaucauu

SEQ ID NO: 970216 - RNA, 19 nt, Artificial Sequence
  Description of Artificial Sequence: Synthetic oligonucleotide
  Sense strand starting at position 2906 of SEQ ID NO: 913998
guguauaugaugggaagaa

SEQ ID NO: 970217 - RNA, 19 nt, Artificial Sequence
  Description of Artificial Sequence: Synthetic oligonucleotide
  Antisense strand to SEQ ID NO: 970216
uucuucccaucauauacac

SEQ ID NO: 970218 - RNA, 19 nt, Artificial Sequence
  Description of Artificial Sequence: Synthetic oligonucleotide
  Sense strand starting at position 1449 of SEQ ID NO: 913998
ugacuugaaggguggaauu

SEQ ID NO: 970219 - RNA, 19 nt, Artificial Sequence
  Description of Artificial Sequence: Synthetic oligonucleotide
  Antisense strand to SEQ ID NO: 970218
aauuccacccuucaaguca

SEQ ID NO: 970220 - RNA, 19 nt, Artificial Sequence
  Description of Artificial Sequence: Synthetic oligonucleotide
  Sense strand starting at position 3321 of SEQ ID NO: 913998
ccuuucugagcguuaguuu

SEQ ID NO: 970221 - RNA, 19 nt, Artificial Sequence
  Description of Artificial Sequence: Synthetic oligonucleotide
  Antisense strand to SEQ ID NO: 970220
aaacuaacgcucagaaagg

SEQ ID NO: 970222 - RNA, 19 nt, Artificial Sequence
  Description of Artificial Sequence: Synthetic oligonucleotide
  Sense strand starting at position 3320 of SEQ ID NO: 913998
cccuuucugagcguuaguu

SEQ ID NO: 970223 - RNA, 19 nt, Artificial Sequence
  Description of Artificial Sequence: Synthetic oligonucleotide
  Antisense strand to SEQ ID NO: 970222
aacuaacgcucagaaaggg

SEQ ID NO: 970224 - RNA, 19 nt, Artificial Sequence
  Description of Artificial Sequence: Synthetic oligonucleotide
  Sense strand starting at position 1869 of SEQ ID NO: 913998
ccuggaaucccguauagag

SEQ ID NO: 970225 - RNA, 19 nt, Artificial Sequence
  Description of Artificial Sequence: Synthetic oligonucleotide
  Antisense strand to SEQ ID NO: 970224
cucuauacgggauuccagg

SEQ ID NO: 970226 - RNA, 19 nt, Artificial Sequence
  Description of Artificial Sequence: Synthetic oligonucleotide
  Sense strand starting at position 2980 of SEQ ID NO: 913998
ggcucaucccuugcguuua

SEQ ID NO: 970227 - RNA, 19 nt, Artificial Sequence
  Description of Artificial Sequence: Synthetic oligonucleotide
  Antisense strand to SEQ ID NO: 970226
uaaacgcaagggaugagcc

SEQ ID NO: 970228 - RNA, 19 nt, Artificial Sequence
  Description of Artificial Sequence: Synthetic oligonucleotide
  Sense strand starting at position 212 of SEQ ID NO: 913998
acagauuaucagggcacau

SEQ ID NO: 970229 - RNA, 19 nt, Artificial Sequence
  Description of Artificial Sequence: Synthetic oligonucleotide
  Antisense strand to SEQ ID NO: 970228
augugcccugauaaucugu

SEQ ID NO: 970230 - RNA, 19 nt, Artificial Sequence
  Description of Artificial Sequence: Synthetic oligonucleotide
  Sense strand starting at position 2905 of SEQ ID NO: 913998
uguguauaugaugggaaga

SEQ ID NO: 970231 - RNA, 19 nt, Artificial Sequence
  Description of Artificial Sequence: Synthetic oligonucleotide
  Antisense strand to SEQ ID NO: 970230
ucuucccaucauauacaca

SEQ ID NO: 970232 - RNA, 19 nt, Artificial Sequence
  Description of Artificial Sequence: Synthetic oligonucleotide
  Sense strand starting at position 2897 of SEQ ID NO: 913998
cucauaacuguguauauga

SEQ ID NO: 970233 - RNA, 19 nt, Artificial Sequence
  Description of Artificial Sequence: Synthetic oligonucleotide
  Antisense strand to SEQ ID NO: 970232
ucauauacacaguuaugag

SEQ ID NO: 970234 - RNA, 19 nt, Artificial Sequence
  Description of Artificial Sequence: Synthetic oligonucleotide
  Sense strand starting at position 3210 of SEQ ID NO: 913998
auagaaguccugcaaagua

SEQ ID NO: 970235 - RNA, 19 nt, Artificial Sequence
  Description of Artificial Sequence: Synthetic oligonucleotide
  Antisense strand to SEQ ID NO: 970234
uacuuugcaggacuucuau

SEQ ID NO: 970236 - RNA, 19 nt, Artificial Sequence
  Description of Artificial Sequence: Synthetic oligonucleotide
  Sense strand starting at position 714 of SEQ ID NO: 913998
cccucugagcuuuauggaa

SEQ ID NO: 970237 - RNA, 19 nt, Artificial Sequence
  Description of Artificial Sequence: Synthetic oligonucleotide
  Antisense strand to SEQ ID NO: 970236
uuccauaaagcucagaggg

SEQ ID NO: 970238 - RNA, 19 nt, Artificial Sequence
  Description of Artificial Sequence: Synthetic oligonucleotide
  Sense strand starting at position 2436 of SEQ ID NO: 913998
gggauuguaggucauguag

SEQ ID NO: 970239 - RNA, 19 nt, Artificial Sequence
  Description of Artificial Sequence: Synthetic oligonucleotide
  Antisense strand to SEQ ID NO: 970238
cuacaugaccuacaauccc

SEQ ID NO: 970240 - RNA, 19 nt, Artificial Sequence
  Description of Artificial Sequence: Synthetic oligonucleotide
  Sense strand starting at position 3488 of SEQ ID NO: 913998
ccgaaaugacauugagggu

SEQ ID NO: 970241 - RNA, 19 nt, Artificial Sequence
  Description of Artificial Sequence: Synthetic oligonucleotide
  Antisense strand to SEQ ID NO: 970240
acccucaaugucauuucgg

SEQ ID NO: 970242 - RNA, 19 nt, Artificial Sequence
  Description of Artificial Sequence: Synthetic oligonucleotide
  Sense strand starting at position 3437 of SEQ ID NO: 913998
guggcuaaugcccaagaga

SEQ ID NO: 970243 - RNA, 19 nt, Artificial Sequence
  Description of Artificial Sequence: Synthetic oligonucleotide
  Antisense strand to SEQ ID NO: 970242
ucucuugggcauuagccac

SEQ ID NO: 970244 - RNA, 19 nt, Artificial Sequence
  Description of Artificial Sequence: Synthetic oligonucleotide
  Sense strand starting at position 1106 of SEQ ID NO: 913998
gggagaggccucgaugguu

SEQ ID NO: 970245 - RNA, 19 nt, Artificial Sequence
  Description of Artificial Sequence: Synthetic oligonucleotide
  Antisense strand to SEQ ID NO: 970244
aaccaucgaggccucuccc

SEQ ID NO: 970246 - RNA, 19 nt, Artificial Sequence
  Description of Artificial Sequence: Synthetic oligonucleotide
  Sense strand starting at position 1236 of SEQ ID NO: 913998
ucuggaagguucuuccuaa

SEQ ID NO: 970247 - RNA, 19 nt, Artificial Sequence
  Description of Artificial Sequence: Synthetic oligonucleotide
  Antisense strand to SEQ ID NO: 970246
uuaggaagaaccuuccaga

SEQ ID NO: 970248 - RNA, 19 nt, Artificial Sequence
  Description of Artificial Sequence: Synthetic oligonucleotide
  Sense strand starting at position 1237 of SEQ ID NO: 913998
cuggaagguucuuccuaau

SEQ ID NO: 970249 - RNA, 19 nt, Artificial Sequence
  Description of Artificial Sequence: Synthetic oligonucleotide
  Antisense strand to SEQ ID NO: 970248
auuaggaagaaccuuccag

SEQ ID NO: 970250 - RNA, 19 nt, Artificial Sequence
  Description of Artificial Sequence: Synthetic oligonucleotide
  Sense strand starting at position 3163 of SEQ ID NO: 913998
ugaggaguuucuuuccuga

SEQ ID NO: 970251 - RNA, 19 nt, Artificial Sequence
  Description of Artificial Sequence: Synthetic oligonucleotide
  Antisense strand to SEQ ID NO: 970250
ucaggaaagaaacuccuca

SEQ ID NO: 970252 - RNA, 19 nt, Artificial Sequence
  Description of Artificial Sequence: Synthetic oligonucleotide
  Sense strand starting at position 1891 of SEQ ID NO: 913998
cggcuacacagauggauau

SEQ ID NO: 970253 - RNA, 19 nt, Artificial Sequence
  Description of Artificial Sequence: Synthetic oligonucleotide
  Antisense strand to SEQ ID NO: 970252
auauccaucuguguagccg

SEQ ID NO: 970254 - RNA, 19 nt, Artificial Sequence
  Description of Artificial Sequence: Synthetic oligonucleotide
  Sense strand starting at position 3559 of SEQ ID NO: 913998
acacuugaaugugcauuaa

SEQ ID NO: 970255 - RNA, 19 nt, Artificial Sequence
  Description of Artificial Sequence: Synthetic oligonucleotide
  Antisense strand to SEQ ID NO: 970254
uuaaugcacauucaagugu

SEQ ID NO: 970256 - RNA, 19 nt, Artificial Sequence
  Description of Artificial Sequence: Synthetic oligonucleotide
  Sense strand starting at position 2789 of SEQ ID NO: 913998
ugagguuuccaugggugga

SEQ ID NO: 970257 - RNA, 19 nt, Artificial Sequence
  Description of Artificial Sequence: Synthetic oligonucleotide
  Antisense strand to SEQ ID NO: 970256
uccacccauggaaaccuca

SEQ ID NO: 970258 - RNA, 19 nt, Artificial Sequence
  Description of Artificial Sequence: Synthetic oligonucleotide
  Sense strand starting at position 3821 of SEQ ID NO: 913998
guggucauuucucauuucu

SEQ ID NO: 970259 - RNA, 19 nt, Artificial Sequence
  Description of Artificial Sequence: Synthetic oligonucleotide
  Antisense strand to SEQ ID NO: 970258
agaaaugagaaaugaccac

SEQ ID NO: 970260 - RNA, 19 nt, Artificial Sequence
  Description of Artificial Sequence: Synthetic oligonucleotide
  Sense strand starting at position 3519 of SEQ ID NO: 913998
ugacucguuuaacugauga

SEQ ID NO: 970261 - RNA, 19 nt, Artificial Sequence
  Description of Artificial Sequence: Synthetic oligonucleotide
  Antisense strand to SEQ ID NO: 970260
ucaucaguuaaacgaguca

SEQ ID NO: 970262 - RNA, 19 nt, Artificial Sequence
  Description of Artificial Sequence: Synthetic oligonucleotide
  Sense strand starting at position 3166 of SEQ ID NO: 913998
ggaguuucuuuccugacca

SEQ ID NO: 970263 - RNA, 19 nt, Artificial Sequence
  Description of Artificial Sequence: Synthetic oligonucleotide
  Antisense strand to SEQ ID NO: 970262
uggucaggaaagaaacucc

SEQ ID NO: 970264 - RNA, 19 nt, Artificial Sequence
  Description of Artificial Sequence: Synthetic oligonucleotide
  Sense strand starting at position 2548 of SEQ ID NO: 913998
gagagauguugcucuaauc

SEQ ID NO: 970265 - RNA, 19 nt, Artificial Sequence
  Description of Artificial Sequence: Synthetic oligonucleotide
  Antisense strand to SEQ ID NO: 970264
gauuagagcaacaucucuc

SEQ ID NO: 970266 - RNA, 19 nt, Artificial Sequence
  Description of Artificial Sequence: Synthetic oligonucleotide
  Sense strand starting at position 1781 of SEQ ID NO: 913998
ugucuuauaggucacagca

SEQ ID NO: 970267 - RNA, 19 nt, Artificial Sequence
  Description of Artificial Sequence: Synthetic oligonucleotide
  Antisense strand to SEQ ID NO: 970266
ugcugugaccuauaagaca

SEQ ID NO: 970268 - RNA, 19 nt, Artificial Sequence
  Description of Artificial Sequence: Synthetic oligonucleotide
  Sense strand starting at position 645 of SEQ ID NO: 913998
uuaacagaauuggaagaga

SEQ ID NO: 970269 - RNA, 19 nt, Artificial Sequence
  Description of Artificial Sequence: Synthetic oligonucleotide
  Antisense strand to SEQ ID NO: 970268
ucucuuccaauucuguuaa

SEQ ID NO: 970270 - RNA, 19 nt, Artificial Sequence
  Description of Artificial Sequence: Synthetic oligonucleotide
  Sense strand starting at position 1625 of SEQ ID NO: 913998
uuuccagcuuucuuagaag

SEQ ID NO: 970271 - RNA, 19 nt, Artificial Sequence
  Description of Artificial Sequence: Synthetic oligonucleotide
  Antisense strand to SEQ ID NO: 970270
cuucuaagaaagcuggaaa

SEQ ID NO: 970272 - RNA, 19 nt, Artificial Sequence
  Description of Artificial Sequence: Synthetic oligonucleotide
  Sense strand starting at position 2896 of SEQ ID NO: 913998
ucucauaacuguguauaug

SEQ ID NO: 970273 - RNA, 19 nt, Artificial Sequence
  Description of Artificial Sequence: Synthetic oligonucleotide
  Antisense strand to SEQ ID NO: 970272
cauauacacaguuaugaga

SEQ ID NO: 970274 - RNA, 19 nt, Artificial Sequence
  Description of Artificial Sequence: Synthetic oligonucleotide
  Sense strand starting at position 2199 of SEQ ID NO: 913998
cgcugaggacuuugagacu

SEQ ID NO: 970275 - RNA, 19 nt, Artificial Sequence
  Description of Artificial Sequence: Synthetic oligonucleotide
  Antisense strand to SEQ ID NO: 970274
agucucaaaguccucagcg

SEQ ID NO: 970276 - RNA, 19 nt, Artificial Sequence
  Description of Artificial Sequence: Synthetic oligonucleotide
  Sense strand starting at position 273 of SEQ ID NO: 913998
gaaugucagagcugguaug

SEQ ID NO: 970277 - RNA, 19 nt, Artificial Sequence
  Description of Artificial Sequence: Synthetic oligonucleotide
  Antisense strand to SEQ ID NO: 970276
cauaccagcucugacauuc

SEQ ID NO: 970278 - RNA, 19 nt, Artificial Sequence
  Description of Artificial Sequence: Synthetic oligonucleotide
  Sense strand starting at position 1284 of SEQ ID NO: 913998
gccuguuuaugaucuggaa

SEQ ID NO: 970279 - RNA, 19 nt, Artificial Sequence
  Description of Artificial Sequence: Synthetic oligonucleotide
  Antisense strand to SEQ ID NO: 970278
uuccagaucauaaacaggc

SEQ ID NO: 970280 - RNA, 19 nt, Artificial Sequence
  Description of Artificial Sequence: Synthetic oligonucleotide
  Sense strand starting at position 2895 of SEQ ID NO: 913998
uucucauaacuguguauau

SEQ ID NO: 970281 - RNA, 19 nt, Artificial Sequence
  Description of Artificial Sequence: Synthetic oligonucleotide
  Antisense strand to SEQ ID NO: 970280
auauacacaguuaugagaa

SEQ ID NO: 970282 - RNA, 19 nt, Artificial Sequence
  Description of Artificial Sequence: Synthetic oligonucleotide
  Sense strand starting at position 2623 of SEQ ID NO: 913998
aagcauguuccucgaacag

SEQ ID NO: 970283 - RNA, 19 nt, Artificial Sequence
  Description of Artificial Sequence: Synthetic oligonucleotide
  Antisense strand to SEQ ID NO: 970282
cuguucgaggaacaugcuu

SEQ ID NO: 970284 - RNA, 19 nt, Artificial Sequence
  Description of Artificial Sequence: Synthetic oligonucleotide
  Sense strand starting at position 2279 of SEQ ID NO: 913998
gcaugugugggauguaaga

SEQ ID NO: 970285 - RNA, 19 nt, Artificial Sequence
  Description of Artificial Sequence: Synthetic oligonucleotide
  Antisense strand to SEQ ID NO: 970284
ucuuacaucccacacaugc

SEQ ID NO: 970286 - RNA, 19 nt, Artificial Sequence
  Description of Artificial Sequence: Synthetic oligonucleotide
  Sense strand starting at position 3417 of SEQ ID NO: 913998
gguuucaaguggcuuauga

SEQ ID NO: 970287 - RNA, 19 nt, Artificial Sequence
  Description of Artificial Sequence: Synthetic oligonucleotide
  Antisense strand to SEQ ID NO: 970286
ucauaagccacuugaaacc

SEQ ID NO: 970288 - RNA, 19 nt, Artificial Sequence
  Description of Artificial Sequence: Synthetic oligonucleotide
  Sense strand starting at position 3296 of SEQ ID NO: 913998
gccucacggcgauagauau

SEQ ID NO: 970289 - RNA, 19 nt, Artificial Sequence
  Description of Artificial Sequence: Synthetic oligonucleotide
  Antisense strand to SEQ ID NO: 970288
auaucuaucgccgugaggc

SEQ ID NO: 970290 - RNA, 19 nt, Artificial Sequence
  Description of Artificial Sequence: Synthetic oligonucleotide
  Sense strand starting at position 3294 of SEQ ID NO: 913998
augccucacggcgauagau

SEQ ID NO: 970291 - RNA, 19 nt, Artificial Sequence
  Description of Artificial Sequence: Synthetic oligonucleotide
  Antisense strand to SEQ ID NO: 970290
aucuaucgccgugaggcau

SEQ ID NO: 970292 - RNA, 19 nt, Artificial Sequence
  Description of Artificial Sequence: Synthetic oligonucleotide
  Sense strand starting at position 2831 of SEQ ID NO: 913999
aacguacuugauuaagacu

SEQ ID NO: 970293 - RNA, 19 nt, Artificial Sequence
  Description of Artificial Sequence: Synthetic oligonucleotide
  Antisense strand to SEQ ID NO: 970292
agucuuaaucaaguacguu

SEQ ID NO: 970294 - RNA, 19 nt, Artificial Sequence
  Description of Artificial Sequence: Synthetic oligonucleotide
  Sense strand starting at position 1399 of SEQ ID NO: 913999
ggcccuugaccagaaacuu

SEQ ID NO: 970295 - RNA, 19 nt, Artificial Sequence
  Description of Artificial Sequence: Synthetic oligonucleotide
  Antisense strand to SEQ ID NO: 970294
aaguuucuggucaagggcc

SEQ ID NO: 970296 - RNA, 19 nt, Artificial Sequence
  Description of Artificial Sequence: Synthetic oligonucleotide
  Sense strand starting at position 358 of SEQ ID NO: 913999
gagccuucugcgguaagca

SEQ ID NO: 970297 - RNA, 19 nt, Artificial Sequence
  Description of Artificial Sequence: Synthetic oligonucleotide
  Antisense strand to SEQ ID NO: 970296
ugcuuaccgcagaaggcuc

SEQ ID NO: 970298 - RNA, 19 nt, Artificial Sequence
  Description of Artificial Sequence: Synthetic oligonucleotide
  Sense strand starting at position 3293 of SEQ ID NO: 913999
ccuucugaucaugggaaug

SEQ ID NO: 970299 - RNA, 19 nt, Artificial Sequence
  Description of Artificial Sequence: Synthetic oligonucleotide
  Antisense strand to SEQ ID NO: 970298
cauucccaugaucagaagg

SEQ ID NO: 970300 - RNA, 19 nt, Artificial Sequence
  Description of Artificial Sequence: Synthetic oligonucleotide
  Sense strand starting at position 3290 of SEQ ID NO: 913999
cagccuucugaucauggga

SEQ ID NO: 970301 - RNA, 19 nt, Artificial Sequence
  Description of Artificial Sequence: Synthetic oligonucleotide
  Antisense strand to SEQ ID NO: 970300
ucccaugaucagaaggcug

SEQ ID NO: 970302 - RNA, 19 nt, Artificial Sequence
  Description of Artificial Sequence: Synthetic oligonucleotide
  Sense strand starting at position 680 of SEQ ID NO: 913999
auggcuucuagggagcaaa

SEQ ID NO: 970303 - RNA, 19 nt, Artificial Sequence
  Description of Artificial Sequence: Synthetic oligonucleotide
  Antisense strand to SEQ ID NO: 970302
uuugcucccuagaagccau

SEQ ID NO: 970304 - RNA, 19 nt, Artificial Sequence
  Description of Artificial Sequence: Synthetic oligonucleotide
  Sense strand starting at position 3305 of SEQ ID NO: 913999
gggaauguaggaugucaac

SEQ ID NO: 970305 - RNA, 19 nt, Artificial Sequence
  Description of Artificial Sequence: Synthetic oligonucleotide
  Antisense strand to SEQ ID NO: 970304
guugacauccuacauuccc

SEQ ID NO: 970306 - RNA, 19 nt, Artificial Sequence
  Description of Artificial Sequence: Synthetic oligonucleotide
  Sense strand starting at position 3412 of SEQ ID NO: 913999
uaggaagcgaguuaugaug

SEQ ID NO: 970307 - RNA, 19 nt, Artificial Sequence
  Description of Artificial Sequence: Synthetic oligonucleotide
  Antisense strand to SEQ ID NO: 970306
caucauaacucgcuuccua

SEQ ID NO: 970308 - RNA, 19 nt, Artificial Sequence
  Description of Artificial Sequence: Synthetic oligonucleotide
  Sense strand starting at position 763 of SEQ ID NO: 913999
aucccagugguuuagaauu

SEQ ID NO: 970309 - RNA, 19 nt, Artificial Sequence
  Description of Artificial Sequence: Synthetic oligonucleotide
  Antisense strand to SEQ ID NO: 970308
aauucuaaaccacugggau

SEQ ID NO: 970310 - RNA, 19 nt, Artificial Sequence
  Description of Artificial Sequence: Synthetic oligonucleotide
  Sense strand starting at position 2830 of SEQ ID NO: 913999
aaacguacuugauuaagac

SEQ ID NO: 970311 - RNA, 19 nt, Artificial Sequence
  Description of Artificial Sequence: Synthetic oligonucleotide
  Antisense strand to SEQ ID NO: 970310
gucuuaaucaaguacguuu

SEQ ID NO: 970312 - RNA, 19 nt, Artificial Sequence
  Description of Artificial Sequence: Synthetic oligonucleotide
  Sense strand starting at position 3387 of SEQ ID NO: 913999
uugauuaaaucacucaggu

SEQ ID NO: 970313 - RNA, 19 nt, Artificial Sequence
  Description of Artificial Sequence: Synthetic oligonucleotide
  Antisense strand to SEQ ID NO: 970312
accugagugauuuaaucaa

SEQ ID NO: 970314 - RNA, 19 nt, Artificial Sequence
  Description of Artificial Sequence: Synthetic oligonucleotide
  Sense strand starting at position 761 of SEQ ID NO: 913999
gaaucccagugguuuagaa

SEQ ID NO: 970315 - RNA, 19 nt, Artificial Sequence
  Description of Artificial Sequence: Synthetic oligonucleotide
  Antisense strand to SEQ ID NO: 970314
uucuaaaccacugggauuc

SEQ ID NO: 970316 - RNA, 19 nt, Artificial Sequence
  Description of Artificial Sequence: Synthetic oligonucleotide
  Sense strand starting at position 3923 of SEQ ID NO: 913999
cuggguuucucauugacaa

SEQ ID NO: 970317 - RNA, 19 nt, Artificial Sequence
  Description of Artificial Sequence: Synthetic oligonucleotide
  Antisense strand to SEQ ID NO: 970316
uugucaaugagaaacccag

SEQ ID NO: 970318 - RNA, 19 nt, Artificial Sequence
  Description of Artificial Sequence: Synthetic oligonucleotide
  Sense strand starting at position 1106 of SEQ ID NO: 913999
gcucuccuugcagaaauga

SEQ ID NO: 970319 - RNA, 19 nt, Artificial Sequence
  Description of Artificial Sequence: Synthetic oligonucleotide
  Antisense strand to SEQ ID NO: 970318
ucauuucugcaaggagagc

SEQ ID NO: 970320 - RNA, 19 nt, Artificial Sequence
  Description of Artificial Sequence: Synthetic oligonucleotide
  Sense strand starting at position 3924 of SEQ ID NO: 913999
uggguuucucauugacaau

SEQ ID NO: 970321 - RNA, 19 nt, Artificial Sequence
  Description of Artificial Sequence: Synthetic oligonucleotide
  Antisense strand to SEQ ID NO: 970320
auugucaaugagaaaccca

SEQ ID NO: 970322 - RNA, 19 nt, Artificial Sequence
  Description of Artificial Sequence: Synthetic oligonucleotide
  Sense strand starting at position 625 of SEQ ID NO: 913999
aggaauagggcuugucuau

SEQ ID NO: 970323 - RNA, 19 nt, Artificial Sequence
  Description of Artificial Sequence: Synthetic oligonucleotide
  Antisense strand to SEQ ID NO: 970322
auagacaagcccuauuccu

SEQ ID NO: 970324 - RNA, 19 nt, Artificial Sequence
  Description of Artificial Sequence: Synthetic oligonucleotide
  Sense strand starting at position 1412 of SEQ ID NO: 913999
aaacuuggcuuguuuagaa

SEQ ID NO: 970325 - RNA, 19 nt, Artificial Sequence
  Description of Artificial Sequence: Synthetic oligonucleotide
  Antisense strand to SEQ ID NO: 970324
uucuaaacaagccaaguuu

SEQ ID NO: 970326 - RNA, 19 nt, Artificial Sequence
  Description of Artificial Sequence: Synthetic oligonucleotide
  Sense strand starting at position 1020 of SEQ ID NO: 913999
ugugccacuccugaaucau

SEQ ID NO: 970327 - RNA, 19 nt, Artificial Sequence
  Description of Artificial Sequence: Synthetic oligonucleotide
  Antisense strand to SEQ ID NO: 970326
augauucaggaguggcaca

SEQ ID NO: 970328 - RNA, 19 nt, Artificial Sequence
  Description of Artificial Sequence: Synthetic oligonucleotide
  Sense strand starting at position 84 of SEQ ID NO: 913999
acaagagucuugccuggau

SEQ ID NO: 970329 - RNA, 19 nt, Artificial Sequence
  Description of Artificial Sequence: Synthetic oligonucleotide
  Antisense strand to SEQ ID NO: 970328
auccaggcaagacucuugu

SEQ ID NO: 970330 - RNA, 19 nt, Artificial Sequence
  Description of Artificial Sequence: Synthetic oligonucleotide
  Sense strand starting at position 1325 of SEQ ID NO: 913999
caggaaugagcacgcagau

SEQ ID NO: 970331 - RNA, 19 nt, Artificial Sequence
  Description of Artificial Sequence: Synthetic oligonucleotide
  Antisense strand to SEQ ID NO: 970330
aucugcgugcucauuccug

SEQ ID NO: 970332 - RNA, 19 nt, Artificial Sequence
  Description of Artificial Sequence: Synthetic oligonucleotide
  Sense strand starting at position 1115 of SEQ ID NO: 913999
gcagaaaugaccggagucu

SEQ ID NO: 970333 - RNA, 19 nt, Artificial Sequence
  Description of Artificial Sequence: Synthetic oligonucleotide
  Antisense strand to SEQ ID NO: 970332
agacuccggucauuucugc

SEQ ID NO: 970334 - RNA, 19 nt, Artificial Sequence
  Description of Artificial Sequence: Synthetic oligonucleotide
  Sense strand starting at position 3408 of SEQ ID NO: 913999
gcacuaggaagcgaguuau

SEQ ID NO: 970335 - RNA, 19 nt, Artificial Sequence
  Description of Artificial Sequence: Synthetic oligonucleotide
  Antisense strand to SEQ ID NO: 970334
auaacucgcuuccuagugc

SEQ ID NO: 970336 - RNA, 19 nt, Artificial Sequence
  Description of Artificial Sequence: Synthetic oligonucleotide
  Sense strand starting at position 2765 of SEQ ID NO: 913999
uuauaugucugguuacuaa

SEQ ID NO: 970337 - RNA, 19 nt, Artificial Sequence
  Description of Artificial Sequence: Synthetic oligonucleotide
  Antisense strand to SEQ ID NO: 970336
uuaguaaccagacauauaa

SEQ ID NO: 970338 - RNA, 19 nt, Artificial Sequence
  Description of Artificial Sequence: Synthetic oligonucleotide
  Sense strand starting at position 1266 of SEQ ID NO: 913999
acaaacuuugcuugguuaa

SEQ ID NO: 970339 - RNA, 19 nt, Artificial Sequence
  Description of Artificial Sequence: Synthetic oligonucleotide
  Antisense strand to SEQ ID NO: 970338
uuaaccaagcaaaguuugu

SEQ ID NO: 970340 - RNA, 19 nt, Artificial Sequence
  Description of Artificial Sequence: Synthetic oligonucleotide
  Sense strand starting at position 163 of SEQ ID NO: 913999
ccagcagguuacucuugaa

SEQ ID NO: 970341 - RNA, 19 nt, Artificial Sequence
  Description of Artificial Sequence: Synthetic oligonucleotide
  Antisense strand to SEQ ID NO: 970340
uucaagaguaaccugcugg

SEQ ID NO: 970342 - RNA, 19 nt, Artificial Sequence
  Description of Artificial Sequence: Synthetic oligonucleotide
  Sense strand starting at position 2792 of SEQ ID NO: 913999
cugaaugguuuccuugcaa

SEQ ID NO: 970343 - RNA, 19 nt, Artificial Sequence
  Description of Artificial Sequence: Synthetic oligonucleotide
  Antisense strand to SEQ ID NO: 970342
uugcaaggaaaccauucag

SEQ ID NO: 970344 - RNA, 19 nt, Artificial Sequence
  Description of Artificial Sequence: Synthetic oligonucleotide
  Sense strand starting at position 1408 of SEQ ID NO: 913999
ccagaaacuuggcuuguuu

SEQ ID NO: 970345 - RNA, 19 nt, Artificial Sequence
  Description of Artificial Sequence: Synthetic oligonucleotide
  Antisense strand to SEQ ID NO: 970344
aaacaagccaaguuucugg

SEQ ID NO: 970346 - RNA, 19 nt, Artificial Sequence
  Description of Artificial Sequence: Synthetic oligonucleotide
  Sense strand starting at position 237 of SEQ ID NO: 913999
uagaguggaucgcuaacuu

SEQ ID NO: 970347 - RNA, 19 nt, Artificial Sequence
  Description of Artificial Sequence: Synthetic oligonucleotide
  Antisense strand to SEQ ID NO: 970346
aaguuagcgauccacucua

SEQ ID NO: 970348 - RNA, 19 nt, Artificial Sequence
  Description of Artificial Sequence: Synthetic oligonucleotide
  Sense strand starting at position 1422 of SEQ ID NO: 913999
uguuuagaagccugagcaa

SEQ ID NO: 970349 - RNA, 19 nt, Artificial Sequence
  Description of Artificial Sequence: Synthetic oligonucleotide
  Antisense strand to SEQ ID NO: 970348
uugcucaggcuucuaaaca

SEQ ID NO: 970350 - RNA, 19 nt, Artificial Sequence
  Description of Artificial Sequence: Synthetic oligonucleotide
  Sense strand starting at position 758 of SEQ ID NO: 913999
cacgaaucccagugguuua

SEQ ID NO: 970351 - RNA, 19 nt, Artificial Sequence
  Description of Artificial Sequence: Synthetic oligonucleotide
  Antisense strand to SEQ ID NO: 970350
uaaaccacugggauucgug

SEQ ID NO: 970352 - RNA, 19 nt, Artificial Sequence
  Description of Artificial Sequence: Synthetic oligonucleotide
  Sense strand starting at position 3751 of SEQ ID NO: 913999
ugcagauucuuucugcaaa

SEQ ID NO: 970353 - RNA, 19 nt, Artificial Sequence
  Description of Artificial Sequence: Synthetic oligonucleotide
  Antisense strand to SEQ ID NO: 970352
uuugcagaaagaaucugca

SEQ ID NO: 970354 - RNA, 19 nt, Artificial Sequence
  Description of Artificial Sequence: Synthetic oligonucleotide
  Sense strand starting at position 412 of SEQ ID NO: 913999
uuuaaacagcugugcauaa

SEQ ID NO: 970355 - RNA, 19 nt, Artificial Sequence
  Description of Artificial Sequence: Synthetic oligonucleotide
  Antisense strand to SEQ ID NO: 970354
uuaugcacagcuguuuaaa

SEQ ID NO: 970356 - RNA, 19 nt, Artificial Sequence
  Description of Artificial Sequence: Synthetic oligonucleotide
  Sense strand starting at position 303 of SEQ ID NO: 913999
acgccacgucuuuaaauau

SEQ ID NO: 970357 - RNA, 19 nt, Artificial Sequence
  Description of Artificial Sequence: Synthetic oligonucleotide
  Antisense strand to SEQ ID NO: 970356
auauuuaaagacguggcgu

SEQ ID NO: 970358 - RNA, 19 nt, Artificial Sequence
  Description of Artificial Sequence: Synthetic oligonucleotide
  Sense strand starting at position 3669 of SEQ ID NO: 913999
uuggguauuugcuauggaa

SEQ ID NO: 970359 - RNA, 19 nt, Artificial Sequence
  Description of Artificial Sequence: Synthetic oligonucleotide
  Antisense strand to SEQ ID NO: 970358
uuccauagcaaauacccaa

SEQ ID NO: 970360 - RNA, 19 nt, Artificial Sequence
  Description of Artificial Sequence: Synthetic oligonucleotide
  Sense strand starting at position 2875 of SEQ ID NO: 913999
agauuaaucugagaaguaa

SEQ ID NO: 970361 - RNA, 19 nt, Artificial Sequence
  Description of Artificial Sequence: Synthetic oligonucleotide
  Antisense strand to SEQ ID NO: 970360
uuacuucucagauuaaucu

SEQ ID NO: 970362 - RNA, 19 nt, Artificial Sequence
  Description of Artificial Sequence: Synthetic oligonucleotide
  Sense strand starting at position 847 of SEQ ID NO: 913999
ucuuguaggugguucuuaa

SEQ ID NO: 970363 - RNA, 19 nt, Artificial Sequence
  Description of Artificial Sequence: Synthetic oligonucleotide
  Antisense strand to SEQ ID NO: 970362
uuaagaaccaccuacaaga

SEQ ID NO: 970364 - RNA, 19 nt, Artificial Sequence
  Description of Artificial Sequence: Synthetic oligonucleotide
  Sense strand starting at position 2665 of SEQ ID NO: 913999
augccuugcggguaauacu

SEQ ID NO: 970365 - RNA, 19 nt, Artificial Sequence
  Description of Artificial Sequence: Synthetic oligonucleotide
  Antisense strand to SEQ ID NO: 970364
aguauuacccgcaaggcau

SEQ ID NO: 970366 - RNA, 19 nt, Artificial Sequence
  Description of Artificial Sequence: Synthetic oligonucleotide
  Sense strand starting at position 3562 of SEQ ID NO: 913999
gcuguagcucuuggaagau

SEQ ID NO: 970367 - RNA, 19 nt, Artificial Sequence
  Description of Artificial Sequence: Synthetic oligonucleotide
  Antisense strand to SEQ ID NO: 970366
aucuuccaagagcuacagc

SEQ ID NO: 970368 - RNA, 19 nt, Artificial Sequence
  Description of Artificial Sequence: Synthetic oligonucleotide
  Sense strand starting at position 504 of SEQ ID NO: 913999
gauuaagcauccgcaguaa

SEQ ID NO: 970369 - RNA, 19 nt, Artificial Sequence
  Description of Artificial Sequence: Synthetic oligonucleotide
  Antisense strand to SEQ ID NO: 970368
uuacugcggaugcuuaauc

SEQ ID NO: 970370 - RNA, 19 nt, Artificial Sequence
  Description of Artificial Sequence: Synthetic oligonucleotide
  Sense strand starting at position 3898 of SEQ ID NO: 913999
augguagauuccucacgcu

SEQ ID NO: 970371 - RNA, 19 nt, Artificial Sequence
  Description of Artificial Sequence: Synthetic oligonucleotide
  Antisense strand to SEQ ID NO: 970370
agcgugaggaaucuaccau

SEQ ID NO: 970372 - RNA, 19 nt, Artificial Sequence
  Description of Artificial Sequence: Synthetic oligonucleotide
  Sense strand starting at position 2391 of SEQ ID NO: 914000
gugugacauuucguaaaua

SEQ ID NO: 970373 - RNA, 19 nt, Artificial Sequence
  Description of Artificial Sequence: Synthetic oligonucleotide
  Antisense strand to SEQ ID NO: 970372
uauuuacgaaaugucacac

SEQ ID NO: 970374 - RNA, 19 nt, Artificial Sequence
  Description of Artificial Sequence: Synthetic oligonucleotide
  Sense strand starting at position 2575 of SEQ ID NO: 914000
guaagaaugacagggcaau

SEQ ID NO: 970375 - RNA, 19 nt, Artificial Sequence
  Description of Artificial Sequence: Synthetic oligonucleotide
  Antisense strand to SEQ ID NO: 970374
auugcccugucauucuuac

SEQ ID NO: 970376 - RNA, 19 nt, Artificial Sequence
  Description of Artificial Sequence: Synthetic oligonucleotide
  Sense strand starting at position 3147 of SEQ ID NO: 914000
ggagauucuuuccuaaauu

SEQ ID NO: 970377 - RNA, 19 nt, Artificial Sequence
  Description of Artificial Sequence: Synthetic oligonucleotide
  Antisense strand to SEQ ID NO: 970376
aauuuaggaaagaaucucc

SEQ ID NO: 970378 - RNA, 19 nt, Artificial Sequence
  Description of Artificial Sequence: Synthetic oligonucleotide
  Sense strand starting at position 3144 of SEQ ID NO: 914000
ccaggagauucuuuccuaa

SEQ ID NO: 970379 - RNA, 19 nt, Artificial Sequence
  Description of Artificial Sequence: Synthetic oligonucleotide
  Antisense strand to SEQ ID NO: 970378
uuaggaaagaaucuccugg

SEQ ID NO: 970380 - RNA, 19 nt, Artificial Sequence
  Description of Artificial Sequence: Synthetic oligonucleotide
  Sense strand starting at position 2050 of SEQ ID NO: 914000
ggaguaggugauuaucuuu

SEQ ID NO: 970381 - RNA, 19 nt, Artificial Sequence
  Description of Artificial Sequence: Synthetic oligonucleotide
  Antisense strand to SEQ ID NO: 970380
aaagauaaucaccuacucc

SEQ ID NO: 970382 - RNA, 19 nt, Artificial Sequence
  Description of Artificial Sequence: Synthetic oligonucleotide
  Sense strand starting at position 3390 of SEQ ID NO: 914000
ucuacugauguuugagaaa

SEQ ID NO: 970383 - RNA, 19 nt, Artificial Sequence
  Description of Artificial Sequence: Synthetic oligonucleotide
  Antisense strand to SEQ ID NO: 970382
uuucucaaacaucaguaga

SEQ ID NO: 970384 - RNA, 19 nt, Artificial Sequence
  Description of Artificial Sequence: Synthetic oligonucleotide
  Sense strand starting at position 2944 of SEQ ID NO: 914000
aggauuauucugcacagua

SEQ ID NO: 970385 - RNA, 19 nt, Artificial Sequence
  Description of Artificial Sequence: Synthetic oligonucleotide
  Antisense strand to SEQ ID NO: 970384
uacugugcagaauaauccu

SEQ ID NO: 970386 - RNA, 19 nt, Artificial Sequence
  Description of Artificial Sequence: Synthetic oligonucleotide
  Sense strand starting at position 2946 of SEQ ID NO: 914000
gauuauucugcacaguaga

SEQ ID NO: 970387 - RNA, 19 nt, Artificial Sequence
  Description of Artificial Sequence: Synthetic oligonucleotide
  Antisense strand to SEQ ID NO: 970386
ucuacugugcagaauaauc

SEQ ID NO: 970388 - RNA, 19 nt, Artificial Sequence
  Description of Artificial Sequence: Synthetic oligonucleotide
  Sense strand starting at position 3808 of SEQ ID NO: 914000
uguccauuggcuuaagaag

SEQ ID NO: 970389 - RNA, 19 nt, Artificial Sequence
  Description of Artificial Sequence: Synthetic oligonucleotide
  Antisense strand to SEQ ID NO: 970388
cuucuuaagccaauggaca

SEQ ID NO: 970390 - RNA, 19 nt, Artificial Sequence
  Description of Artificial Sequence: Synthetic oligonucleotide
  Sense strand starting at position 2807 of SEQ ID NO: 914000
uccucaauggcucagaagu

SEQ ID NO: 970391 - RNA, 19 nt, Artificial Sequence
  Description of Artificial Sequence: Synthetic oligonucleotide
  Antisense strand to SEQ ID NO: 970390
acuucugagccauugagga

SEQ ID NO: 970392 - RNA, 19 nt, Artificial Sequence
  Description of Artificial Sequence: Synthetic oligonucleotide
  Sense strand starting at position 2132 of SEQ ID NO: 914000
uagucacuccgugagaaua

SEQ ID NO: 970393 - RNA, 19 nt, Artificial Sequence
  Description of Artificial Sequence: Synthetic oligonucleotide
  Antisense strand to SEQ ID NO: 970392
uauucucacggagugacua

SEQ ID NO: 970394 - RNA, 19 nt, Artificial Sequence
  Description of Artificial Sequence: Synthetic oligonucleotide
  Sense strand starting at position 3358 of SEQ ID NO: 914000
uuaauugcaccagaugcua

SEQ ID NO: 970395 - RNA, 19 nt, Artificial Sequence
  Description of Artificial Sequence: Synthetic oligonucleotide
  Antisense strand to SEQ ID NO: 970394
uagcaucuggugcaauuaa

SEQ ID NO: 970396 - RNA, 19 nt, Artificial Sequence
  Description of Artificial Sequence: Synthetic oligonucleotide
  Sense strand starting at position 2049 of SEQ ID NO: 914000
gggaguaggugauuaucuu

SEQ ID NO: 970397 - RNA, 19 nt, Artificial Sequence
  Description of Artificial Sequence: Synthetic oligonucleotide
  Antisense strand to SEQ ID NO: 970396
aagauaaucaccuacuccc

SEQ ID NO: 970398 - RNA, 19 nt, Artificial Sequence
  Description of Artificial Sequence: Synthetic oligonucleotide
  Sense strand starting at position 3053 of SEQ ID NO: 914000
uugauuugauagggaauga

SEQ ID NO: 970399 - RNA, 19 nt, Artificial Sequence
  Description of Artificial Sequence: Synthetic oligonucleotide
  Antisense strand to SEQ ID NO: 970398
ucauucccuaucaaaucaa

SEQ ID NO: 970400 - RNA, 19 nt, Artificial Sequence
  Description of Artificial Sequence: Synthetic oligonucleotide
  Sense strand starting at position 2713 of SEQ ID NO: 914000
auguguuaacuguaaacuu

SEQ ID NO: 970401 - RNA, 19 nt, Artificial Sequence
  Description of Artificial Sequence: Synthetic oligonucleotide
  Antisense strand to SEQ ID NO: 970400
aaguuuacaguuaacacau

SEQ ID NO: 970402 - RNA, 19 nt, Artificial Sequence
  Description of Artificial Sequence: Synthetic oligonucleotide
  Sense strand starting at position 3389 of SEQ ID NO: 914000
gucuacugauguuugagaa

SEQ ID NO: 970403 - RNA, 19 nt, Artificial Sequence
  Description of Artificial Sequence: Synthetic oligonucleotide
  Antisense strand to SEQ ID NO: 970402
uucucaaacaucaguagac

SEQ ID NO: 970404 - RNA, 19 nt, Artificial Sequence
  Description of Artificial Sequence: Synthetic oligonucleotide
  Sense strand starting at position 3308 of SEQ ID NO: 914000
cuuaucugauuauuguaca

SEQ ID NO: 970405 - RNA, 19 nt, Artificial Sequence
  Description of Artificial Sequence: Synthetic oligonucleotide
  Antisense strand to SEQ ID NO: 970404
uguacaauaaucagauaag

SEQ ID NO: 970406 - RNA, 19 nt, Artificial Sequence
  Description of Artificial Sequence: Synthetic oligonucleotide
  Sense strand starting at position 2293 of SEQ ID NO: 914000
gccacuugauccuugaaau

SEQ ID NO: 970407 - RNA, 19 nt, Artificial Sequence
  Description of Artificial Sequence: Synthetic oligonucleotide
  Antisense strand to SEQ ID NO: 970406
auuucaaggaucaaguggc

SEQ ID NO: 970408 - RNA, 19 nt, Artificial Sequence
  Description of Artificial Sequence: Synthetic oligonucleotide
  Sense strand starting at position 2702 of SEQ ID NO: 914000
agagaaaggccauguguua

SEQ ID NO: 970409 - RNA, 19 nt, Artificial Sequence
  Description of Artificial Sequence: Synthetic oligonucleotide
  Antisense strand to SEQ ID NO: 970408
uaacacauggccuuucucu

SEQ ID NO: 970410 - RNA, 19 nt, Artificial Sequence
  Description of Artificial Sequence: Synthetic oligonucleotide
  Sense strand starting at position 2943 of SEQ ID NO: 914000
aaggauuauucugcacagu

SEQ ID NO: 970411 - RNA, 19 nt, Artificial Sequence
  Description of Artificial Sequence: Synthetic oligonucleotide
  Antisense strand to SEQ ID NO: 970410
acugugcagaauaauccuu

SEQ ID NO: 970412 - RNA, 19 nt, Artificial Sequence
  Description of Artificial Sequence: Synthetic oligonucleotide
  Sense strand starting at position 2360 of SEQ ID NO: 914000
gauccuaaagagugugagu

SEQ ID NO: 970413 - RNA, 19 nt, Artificial Sequence
  Description of Artificial Sequence: Synthetic oligonucleotide
  Antisense strand to SEQ ID NO: 970412
acucacacucuuuaggauc

SEQ ID NO: 970414 - RNA, 19 nt, Artificial Sequence
  Description of Artificial Sequence: Synthetic oligonucleotide
  Sense strand starting at position 3403 of SEQ ID NO: 914000
gagaaaggguucuuagugu

SEQ ID NO: 970415 - RNA, 19 nt, Artificial Sequence
  Description of Artificial Sequence: Synthetic oligonucleotide
  Antisense strand to SEQ ID NO: 970414
acacuaagaacccuuucuc

SEQ ID NO: 970416 - RNA, 19 nt, Artificial Sequence
  Description of Artificial Sequence: Synthetic oligonucleotide
  Sense strand starting at position 1322 of SEQ ID NO: 914000
gcacgugaugggcagaaau

SEQ ID NO: 970417 - RNA, 19 nt, Artificial Sequence
  Description of Artificial Sequence: Synthetic oligonucleotide
  Antisense strand to SEQ ID NO: 970416
auuucugcccaucacgugc

SEQ ID NO: 970418 - RNA, 19 nt, Artificial Sequence
  Description of Artificial Sequence: Synthetic oligonucleotide
  Sense strand starting at position 3380 of SEQ ID NO: 914000
ucuggcuaugucuacugau

SEQ ID NO: 970419 - RNA, 19 nt, Artificial Sequence
  Description of Artificial Sequence: Synthetic oligonucleotide
  Antisense strand to SEQ ID NO: 970418
aucaguagacauagccaga

SEQ ID NO: 970420 - RNA, 19 nt, Artificial Sequence
  Description of Artificial Sequence: Synthetic oligonucleotide
  Sense strand starting at position 3305 of SEQ ID NO: 914000
cuacuuaucugauuauugu

SEQ ID NO: 970421 - RNA, 19 nt, Artificial Sequence
  Description of Artificial Sequence: Synthetic oligonucleotide
  Antisense strand to SEQ ID NO: 970420
acaauaaucagauaaguag

SEQ ID NO: 970422 - RNA, 19 nt, Artificial Sequence
  Description of Artificial Sequence: Synthetic oligonucleotide
  Sense strand starting at position 2283 of SEQ ID NO: 914000
ggagauuuaugccacuuga

SEQ ID NO: 970423 - RNA, 19 nt, Artificial Sequence
  Description of Artificial Sequence: Synthetic oligonucleotide
  Antisense strand to SEQ ID NO: 970422
ucaaguggcauaaaucucc

SEQ ID NO: 970424 - RNA, 19 nt, Artificial Sequence
  Description of Artificial Sequence: Synthetic oligonucleotide
  Sense strand starting at position 2889 of SEQ ID NO: 914000
uuaauuaucuguguuuagg

SEQ ID NO: 970425 - RNA, 19 nt, Artificial Sequence
  Description of Artificial Sequence: Synthetic oligonucleotide
  Antisense strand to SEQ ID NO: 970424
ccuaaacacagauaauuaa

SEQ ID NO: 970426 - RNA, 19 nt, Artificial Sequence
  Description of Artificial Sequence: Synthetic oligonucleotide
  Sense strand starting at position 2613 of SEQ ID NO: 914000
agcguaaagccuuacugga

SEQ ID NO: 970427 - RNA, 19 nt, Artificial Sequence
  Description of Artificial Sequence: Synthetic oligonucleotide
  Antisense strand to SEQ ID NO: 970426
uccaguaaggcuuuacgcu

SEQ ID NO: 970428 - RNA, 19 nt, Artificial Sequence
  Description of Artificial Sequence: Synthetic oligonucleotide
  Sense strand starting at position 3035 of SEQ ID NO: 914000
aagucacuauuugagaguu

SEQ ID NO: 970429 - RNA, 19 nt, Artificial Sequence
  Description of Artificial Sequence: Synthetic oligonucleotide
  Antisense strand to SEQ ID NO: 970428
aacucucaaauagugacuu

SEQ ID NO: 970430 - RNA, 19 nt, Artificial Sequence
  Description of Artificial Sequence: Synthetic oligonucleotide
  Sense strand starting at position 3978 of SEQ ID NO: 914000
auuagaucuugagagggaa

SEQ ID NO: 970431 - RNA, 19 nt, Artificial Sequence
  Description of Artificial Sequence: Synthetic oligonucleotide
  Antisense strand to SEQ ID NO: 970430
uucccucucaagaucuaau

SEQ ID NO: 970432 - RNA, 19 nt, Artificial Sequence
  Description of Artificial Sequence: Synthetic oligonucleotide
  Sense strand starting at position 2443 of SEQ ID NO: 914000
ucaucuuggucuuugacuu

SEQ ID NO: 970433 - RNA, 19 nt, Artificial Sequence
  Description of Artificial Sequence: Synthetic oligonucleotide
  Antisense strand to SEQ ID NO: 970432
aagucaaagaccaagauga

SEQ ID NO: 970434 - RNA, 19 nt, Artificial Sequence
  Description of Artificial Sequence: Synthetic oligonucleotide
  Sense strand starting at position 2130 of SEQ ID NO: 914000
ccuagucacuccgugagaa

SEQ ID NO: 970435 - RNA, 19 nt, Artificial Sequence
  Description of Artificial Sequence: Synthetic oligonucleotide
  Antisense strand to SEQ ID NO: 970434
uucucacggagugacuagg

SEQ ID NO: 970436 - RNA, 19 nt, Artificial Sequence
  Description of Artificial Sequence: Synthetic oligonucleotide
  Sense strand starting at position 3777 of SEQ ID NO: 914000
aauaauguugauugcuagu

SEQ ID NO: 970437 - RNA, 19 nt, Artificial Sequence
  Description of Artificial Sequence: Synthetic oligonucleotide
  Antisense strand to SEQ ID NO: 970436
acuagcaaucaacauuauu

SEQ ID NO: 970438 - RNA, 19 nt, Artificial Sequence
  Description of Artificial Sequence: Synthetic oligonucleotide
  Sense strand starting at position 3779 of SEQ ID NO: 914000
uaauguugauugcuaguga

SEQ ID NO: 970439 - RNA, 19 nt, Artificial Sequence
  Description of Artificial Sequence: Synthetic oligonucleotide
  Antisense strand to SEQ ID NO: 970438
ucacuagcaaucaacauua

SEQ ID NO: 970440 - RNA, 19 nt, Artificial Sequence
  Description of Artificial Sequence: Synthetic oligonucleotide
  Sense strand starting at position 2131 of SEQ ID NO: 914000
cuagucacuccgugagaau

SEQ ID NO: 970441 - RNA, 19 nt, Artificial Sequence
  Description of Artificial Sequence: Synthetic oligonucleotide
  Antisense strand to SEQ ID NO: 970440
auucucacggagugacuag

SEQ ID NO: 970442 - RNA, 19 nt, Artificial Sequence
  Description of Artificial Sequence: Synthetic oligonucleotide
  Sense strand starting at position 3441 of SEQ ID NO: 914000
guugcuucugucuaugaac

SEQ ID NO: 970443 - RNA, 19 nt, Artificial Sequence
  Description of Artificial Sequence: Synthetic oligonucleotide
  Antisense strand to SEQ ID NO: 970442
guucauagacagaagcaac

SEQ ID NO: 970444 - RNA, 19 nt, Artificial Sequence
  Description of Artificial Sequence: Synthetic oligonucleotide
  Sense strand starting at position 3784 of SEQ ID NO: 914000
uugauugcuagugacguua

SEQ ID NO: 970445 - RNA, 19 nt, Artificial Sequence
  Description of Artificial Sequence: Synthetic oligonucleotide
  Antisense strand to SEQ ID NO: 970444
uaacgucacuagcaaucaa

SEQ ID NO: 970446 - RNA, 19 nt, Artificial Sequence
  Description of Artificial Sequence: Synthetic oligonucleotide
  Sense strand starting at position 344 of SEQ ID NO: 914000
caguaauggcuuuggaguc

SEQ ID NO: 970447 - RNA, 19 nt, Artificial Sequence
  Description of Artificial Sequence: Synthetic oligonucleotide
  Antisense strand to SEQ ID NO: 970446
gacuccaaagccauuacug

SEQ ID NO: 970448 - RNA, 19 nt, Artificial Sequence
  Description of Artificial Sequence: Synthetic oligonucleotide
  Sense strand starting at position 3414 of SEQ ID NO: 914000
cuuaguguuguugacaguu

SEQ ID NO: 970449 - RNA, 19 nt, Artificial Sequence
  Description of Artificial Sequence: Synthetic oligonucleotide
  Antisense strand to SEQ ID NO: 970448
aacugucaacaacacuaag

SEQ ID NO: 970450 - RNA, 19 nt, Artificial Sequence
  Description of Artificial Sequence: Synthetic oligonucleotide
  Sense strand starting at position 531 of SEQ ID NO: 914000
ggauuugucucuuaaagug

SEQ ID NO: 970451 - RNA, 19 nt, Artificial Sequence
  Description of Artificial Sequence: Synthetic oligonucleotide
  Antisense strand to SEQ ID NO: 970450
cacuuuaagagacaaaucc

SEQ ID NO: 970452 - RNA, 19 nt, Artificial Sequence
  Description of Artificial Sequence: Synthetic oligonucleotide
  Sense strand starting at position 3446 of SEQ ID NO: 914001
uugggcacucaauauuaua

SEQ ID NO: 970453 - RNA, 19 nt, Artificial Sequence
  Description of Artificial Sequence: Synthetic oligonucleotide
  Antisense strand to SEQ ID NO: 970452
uauaauauugagugcccaa

SEQ ID NO: 970454 - RNA, 19 nt, Artificial Sequence
  Description of Artificial Sequence: Synthetic oligonucleotide
  Sense strand starting at position 101 of SEQ ID NO: 914001
accagagaaaguugaaguu

SEQ ID NO: 970455 - RNA, 19 nt, Artificial Sequence
  Description of Artificial Sequence: Synthetic oligonucleotide
  Antisense strand to SEQ ID NO: 970454
aacuucaacuuucucuggu

SEQ ID NO: 970456 - RNA, 19 nt, Artificial Sequence
  Description of Artificial Sequence: Synthetic oligonucleotide
  Sense strand starting at position 1135 of SEQ ID NO: 914001
uagaaaguaugggugauca

SEQ ID NO: 970457 - RNA, 19 nt, Artificial Sequence
  Description of Artificial Sequence: Synthetic oligonucleotide
  Antisense strand to SEQ ID NO: 970456
ugaucacccauacuuucua

SEQ ID NO: 970458 - RNA, 19 nt, Artificial Sequence
  Description of Artificial Sequence: Synthetic oligonucleotide
  Sense strand starting at position 1447 of SEQ ID NO: 914001
ugaaacauuucugaggaug

SEQ ID NO: 970459 - RNA, 19 nt, Artificial Sequence
  Description of Artificial Sequence: Synthetic oligonucleotide
  Antisense strand to SEQ ID NO: 970458
cauccucagaaauguuuca

SEQ ID NO: 970460 - RNA, 19 nt, Artificial Sequence
  Description of Artificial Sequence: Synthetic oligonucleotide
  Sense strand starting at position 3379 of SEQ ID NO: 914001
ugcuuaagacauuacgaac

SEQ ID NO: 970461 - RNA, 19 nt, Artificial Sequence
  Description of Artificial Sequence: Synthetic oligonucleotide
  Antisense strand to SEQ ID NO: 970460
guucguaaugucuuaagca

SEQ ID NO: 970462 - RNA, 19 nt, Artificial Sequence
  Description of Artificial Sequence: Synthetic oligonucleotide
  Sense strand starting at position 3439 of SEQ ID NO: 914001
acuauucuugggcacucaa

SEQ ID NO: 970463 - RNA, 19 nt, Artificial Sequence
  Description of Artificial Sequence: Synthetic oligonucleotide
  Antisense strand to SEQ ID NO: 970462
uugagugcccaagaauagu

SEQ ID NO: 970464 - RNA, 19 nt, Artificial Sequence
  Description of Artificial Sequence: Synthetic oligonucleotide
  Sense strand starting at position 490 of SEQ ID NO: 914001
augugauuucguuaguagu

SEQ ID NO: 970465 - RNA, 19 nt, Artificial Sequence
  Description of Artificial Sequence: Synthetic oligonucleotide
  Antisense strand to SEQ ID NO: 970464
acuacuaacgaaaucacau

SEQ ID NO: 970466 - RNA, 19 nt, Artificial Sequence
  Description of Artificial Sequence: Synthetic oligonucleotide
  Sense strand starting at position 820 of SEQ ID NO: 914001
guaucugacccuggaaaca

SEQ ID NO: 970467 - RNA, 19 nt, Artificial Sequence
  Description of Artificial Sequence: Synthetic oligonucleotide
  Antisense strand to SEQ ID NO: 970466
uguuuccagggucagauac

SEQ ID NO: 970468 - RNA, 19 nt, Artificial Sequence
  Description of Artificial Sequence: Synthetic oligonucleotide
  Sense strand starting at position 136 of SEQ ID NO: 914001
guuucuaaggcagaucuaa

SEQ ID NO: 970469 - RNA, 19 nt, Artificial Sequence
  Description of Artificial Sequence: Synthetic oligonucleotide
  Antisense strand to SEQ ID NO: 970468
uuagaucugccuuagaaac

SEQ ID NO: 970470 - RNA, 19 nt, Artificial Sequence
  Description of Artificial Sequence: Synthetic oligonucleotide
  Sense strand starting at position 488 of SEQ ID NO: 914001
caaugugauuucguuagua

SEQ ID NO: 970471 - RNA, 19 nt, Artificial Sequence
  Description of Artificial Sequence: Synthetic oligonucleotide
  Antisense strand to SEQ ID NO: 970470
uacuaacgaaaucacauug

SEQ ID NO: 970472 - RNA, 19 nt, Artificial Sequence
  Description of Artificial Sequence: Synthetic oligonucleotide
  Sense strand starting at position 644 of SEQ ID NO: 914001
uugaguguuguauaacaag

SEQ ID NO: 970473 - RNA, 19 nt, Artificial Sequence
  Description of Artificial Sequence: Synthetic oligonucleotide
  Antisense strand to SEQ ID NO: 970472
cuuguuauacaacacucaa

SEQ ID NO: 970474 - RNA, 19 nt, Artificial Sequence
  Description of Artificial Sequence: Synthetic oligonucleotide
  Sense strand starting at position 1058 of SEQ ID NO: 914001
ugacaagaacgucagguuu

SEQ ID NO: 970475 - RNA, 19 nt, Artificial Sequence
  Description of Artificial Sequence: Synthetic oligonucleotide
  Antisense strand to SEQ ID NO: 970474
aaaccugacguucuuguca

SEQ ID NO: 970476 - RNA, 19 nt, Artificial Sequence
  Description of Artificial Sequence: Synthetic oligonucleotide
  Sense strand starting at position 3652 of SEQ ID NO: 914001
aggucaagguaucuuaaca

SEQ ID NO: 970477 - RNA, 19 nt, Artificial Sequence
  Description of Artificial Sequence: Synthetic oligonucleotide
  Antisense strand to SEQ ID NO: 970476
uguuaagauaccuugaccu

SEQ ID NO: 970478 - RNA, 19 nt, Artificial Sequence
  Description of Artificial Sequence: Synthetic oligonucleotide
  Sense strand starting at position 2521 of SEQ ID NO: 914001
cucugaguucuggagguau

SEQ ID NO: 970479 - RNA, 19 nt, Artificial Sequence
  Description of Artificial Sequence: Synthetic oligonucleotide
  Antisense strand to SEQ ID NO: 970478
auaccuccagaacucagag

SEQ ID NO: 970480 - RNA, 19 nt, Artificial Sequence
  Description of Artificial Sequence: Synthetic oligonucleotide
  Sense strand starting at position 3981 of SEQ ID NO: 914001
ugugacuuuguauaacuca

SEQ ID NO: 970481 - RNA, 19 nt, Artificial Sequence
  Description of Artificial Sequence: Synthetic oligonucleotide
  Antisense strand to SEQ ID NO: 970480
ugaguuauacaaagucaca

SEQ ID NO: 970482 - RNA, 19 nt, Artificial Sequence
  Description of Artificial Sequence: Synthetic oligonucleotide
  Sense strand starting at position 628 of SEQ ID NO: 914001
ccauaugaacucugaguug

SEQ ID NO: 970483 - RNA, 19 nt, Artificial Sequence
  Description of Artificial Sequence: Synthetic oligonucleotide
  Antisense strand to SEQ ID NO: 970482
caacucagaguucauaugg

SEQ ID NO: 970484 - RNA, 19 nt, Artificial Sequence
  Description of Artificial Sequence: Synthetic oligonucleotide
  Sense strand starting at position 1026 of SEQ ID NO: 914001
ugccuauuugcuuauguuu

SEQ ID NO: 970485 - RNA, 19 nt, Artificial Sequence
  Description of Artificial Sequence: Synthetic oligonucleotide
  Antisense strand to SEQ ID NO: 970484
aaacauaagcaaauaggca

SEQ ID NO: 970486 - RNA, 19 nt, Artificial Sequence
  Description of Artificial Sequence: Synthetic oligonucleotide
  Sense strand starting at position 1449 of SEQ ID NO: 914001
aaacauuucugaggaugag

SEQ ID NO: 970487 - RNA, 19 nt, Artificial Sequence
  Description of Artificial Sequence: Synthetic oligonucleotide
  Antisense strand to SEQ ID NO: 970486
cucauccucagaaauguuu

SEQ ID NO: 970488 - RNA, 19 nt, Artificial Sequence
  Description of Artificial Sequence: Synthetic oligonucleotide
  Sense strand starting at position 1171 of SEQ ID NO: 914001
gucugaugagccugcauuu

SEQ ID NO: 970489 - RNA, 19 nt, Artificial Sequence
  Description of Artificial Sequence: Synthetic oligonucleotide
  Antisense strand to SEQ ID NO: 970488
aaaugcaggcucaucagac

SEQ ID NO: 970490 - RNA, 19 nt, Artificial Sequence
  Description of Artificial Sequence: Synthetic oligonucleotide
  Sense strand starting at position 3085 of SEQ ID NO: 914001
aggaauguaucuuuccacu

SEQ ID NO: 970491 - RNA, 19 nt, Artificial Sequence
  Description of Artificial Sequence: Synthetic oligonucleotide
  Antisense strand to SEQ ID NO: 970490
aguggaaagauacauuccu

SEQ ID NO: 970492 - RNA, 19 nt, Artificial Sequence
  Description of Artificial Sequence: Synthetic oligonucleotide
  Sense strand starting at position 3083 of SEQ ID NO: 914001
uuaggaauguaucuuucca

SEQ ID NO: 970493 - RNA, 19 nt, Artificial Sequence
  Description of Artificial Sequence: Synthetic oligonucleotide
  Antisense strand to SEQ ID NO: 970492
uggaaagauacauuccuaa

SEQ ID NO: 970494 - RNA, 19 nt, Artificial Sequence
  Description of Artificial Sequence: Synthetic oligonucleotide
  Sense strand starting at position 2932 of SEQ ID NO: 914001
ugggaauaguucucggaug

SEQ ID NO: 970495 - RNA, 19 nt, Artificial Sequence
  Description of Artificial Sequence: Synthetic oligonucleotide
  Antisense strand to SEQ ID NO: 970494
cauccgagaacuauuccca

SEQ ID NO: 970496 - RNA, 19 nt, Artificial Sequence
  Description of Artificial Sequence: Synthetic oligonucleotide
  Sense strand starting at position 492 of SEQ ID NO: 914001
gugauuucguuaguaguag

SEQ ID NO: 970497 - RNA, 19 nt, Artificial Sequence
  Description of Artificial Sequence: Synthetic oligonucleotide
  Antisense strand to SEQ ID NO: 970496
cuacuacuaacgaaaucac

SEQ ID NO: 970498 - RNA, 19 nt, Artificial Sequence
  Description of Artificial Sequence: Synthetic oligonucleotide
  Sense strand starting at position 3748 of SEQ ID NO: 914001
uguagauuaugaucuagua

SEQ ID NO: 970499 - RNA, 19 nt, Artificial Sequence
  Description of Artificial Sequence: Synthetic oligonucleotide
  Antisense strand to SEQ ID NO: 970498
uacuagaucauaaucuaca

SEQ ID NO: 970500 - RNA, 19 nt, Artificial Sequence
  Description of Artificial Sequence: Synthetic oligonucleotide
  Sense strand starting at position 2713 of SEQ ID NO: 914001
gccuacuaccuuugggaaa

SEQ ID NO: 970501 - RNA, 19 nt, Artificial Sequence
  Description of Artificial Sequence: Synthetic oligonucleotide
  Antisense strand to SEQ ID NO: 970500
uuucccaaagguaguaggc

SEQ ID NO: 970502 - RNA, 19 nt, Artificial Sequence
  Description of Artificial Sequence: Synthetic oligonucleotide
  Sense strand starting at position 484 of SEQ ID NO: 914001
cagccaaugugauuucguu

SEQ ID NO: 970503 - RNA, 19 nt, Artificial Sequence
  Description of Artificial Sequence: Synthetic oligonucleotide
  Antisense strand to SEQ ID NO: 970502
aacgaaaucacauuggcug

SEQ ID NO: 970504 - RNA, 19 nt, Artificial Sequence
  Description of Artificial Sequence: Synthetic oligonucleotide
  Sense strand starting at position 631 of SEQ ID NO: 914001
uaugaacucugaguugagu

SEQ ID NO: 970505 - RNA, 19 nt, Artificial Sequence
  Description of Artificial Sequence: Synthetic oligonucleotide
  Antisense strand to SEQ ID NO: 970504
acucaacucagaguucaua

SEQ ID NO: 970506 - RNA, 19 nt, Artificial Sequence
  Description of Artificial Sequence: Synthetic oligonucleotide
  Sense strand starting at position 1446 of SEQ ID NO: 914001
augaaacauuucugaggau

SEQ ID NO: 970507 - RNA, 19 nt, Artificial Sequence
  Description of Artificial Sequence: Synthetic oligonucleotide
  Antisense strand to SEQ ID NO: 970506
auccucagaaauguuucau

SEQ ID NO: 970508 - RNA, 19 nt, Artificial Sequence
  Description of Artificial Sequence: Synthetic oligonucleotide
  Sense strand starting at position 276 of SEQ ID NO: 914001
gcaaauguuccaugggaau

SEQ ID NO: 970509 - RNA, 19 nt, Artificial Sequence
  Description of Artificial Sequence: Synthetic oligonucleotide
  Antisense strand to SEQ ID NO: 970508
auucccauggaacauuugc

SEQ ID NO: 970510 - RNA, 19 nt, Artificial Sequence
  Description of Artificial Sequence: Synthetic oligonucleotide
  Sense strand starting at position 2459 of SEQ ID NO: 914001
ggagaauguugagcuacga

SEQ ID NO: 970511 - RNA, 19 nt, Artificial Sequence
  Description of Artificial Sequence: Synthetic oligonucleotide
  Antisense strand to SEQ ID NO: 970510
ucguagcucaacauucucc

SEQ ID NO: 970512 - RNA, 19 nt, Artificial Sequence
  Description of Artificial Sequence: Synthetic oligonucleotide
  Sense strand starting at position 1395 of SEQ ID NO: 914001
ugagucuggcucugagaaa

SEQ ID NO: 970513 - RNA, 19 nt, Artificial Sequence
  Description of Artificial Sequence: Synthetic oligonucleotide
  Antisense strand to SEQ ID NO: 970512
uuucucagagccagacuca

SEQ ID NO: 970514 - RNA, 19 nt, Artificial Sequence
  Description of Artificial Sequence: Synthetic oligonucleotide
  Sense strand starting at position 73 of SEQ ID NO: 914001
caggcaugucaggauugca

SEQ ID NO: 970515 - RNA, 19 nt, Artificial Sequence
  Description of Artificial Sequence: Synthetic oligonucleotide
  Antisense strand to SEQ ID NO: 970514
ugcaauccugacaugccug

SEQ ID NO: 970516 - RNA, 19 nt, Artificial Sequence
  Description of Artificial Sequence: Synthetic oligonucleotide
  Sense strand starting at position 1025 of SEQ ID NO: 914001
augccuauuugcuuauguu

SEQ ID NO: 970517 - RNA, 19 nt, Artificial Sequence
  Description of Artificial Sequence: Synthetic oligonucleotide
  Antisense strand to SEQ ID NO: 970516
aacauaagcaaauaggcau

SEQ ID NO: 970518 - RNA, 19 nt, Artificial Sequence
  Description of Artificial Sequence: Synthetic oligonucleotide
  Sense strand starting at position 147 of SEQ ID NO: 914001
agaucuaagucugcugaac

SEQ ID NO: 970519 - RNA, 19 nt, Artificial Sequence
  Description of Artificial Sequence: Synthetic oligonucleotide
  Antisense strand to SEQ ID NO: 970518
guucagcagacuuagaucu

SEQ ID NO: 970520 - RNA, 19 nt, Artificial Sequence
  Description of Artificial Sequence: Synthetic oligonucleotide
  Sense strand starting at position 2951 of SEQ ID NO: 914001
ggccuugcuucuuccauuu

SEQ ID NO: 970521 - RNA, 19 nt, Artificial Sequence
  Description of Artificial Sequence: Synthetic oligonucleotide
  Antisense strand to SEQ ID NO: 970520
aaauggaagaagcaaggcc

SEQ ID NO: 970522 - RNA, 19 nt, Artificial Sequence
  Description of Artificial Sequence: Synthetic oligonucleotide
  Sense strand starting at position 146 of SEQ ID NO: 914001
cagaucuaagucugcugaa

SEQ ID NO: 970523 - RNA, 19 nt, Artificial Sequence
  Description of Artificial Sequence: Synthetic oligonucleotide
  Antisense strand to SEQ ID NO: 970522
uucagcagacuuagaucug

SEQ ID NO: 970524 - RNA, 19 nt, Artificial Sequence
  Description of Artificial Sequence: Synthetic oligonucleotide
  Sense strand starting at position 978 of SEQ ID NO: 914001
uuguaaaugucauccaauu

SEQ ID NO: 970525 - RNA, 19 nt, Artificial Sequence
  Description of Artificial Sequence: Synthetic oligonucleotide
  Antisense strand to SEQ ID NO: 970524
aauuggaugacauuuacaa

SEQ ID NO: 970526 - RNA, 19 nt, Artificial Sequence
  Description of Artificial Sequence: Synthetic oligonucleotide
  Sense strand starting at position 2798 of SEQ ID NO: 914001
ccagauaguuacuuuccuu

SEQ ID NO: 970527 - RNA, 19 nt, Artificial Sequence
  Description of Artificial Sequence: Synthetic oligonucleotide
  Antisense strand to SEQ ID NO: 970526
aaggaaaguaacuaucugg

SEQ ID NO: 970528 - RNA, 19 nt, Artificial Sequence
  Description of Artificial Sequence: Synthetic oligonucleotide
  Sense strand starting at position 2650 of SEQ ID NO: 914001
cgaagaaacuugccucuca

SEQ ID NO: 970529 - RNA, 19 nt, Artificial Sequence
  Description of Artificial Sequence: Synthetic oligonucleotide
  Antisense strand to SEQ ID NO: 970528
ugagaggcaaguuucuucg

SEQ ID NO: 970530 - RNA, 19 nt, Artificial Sequence
  Description of Artificial Sequence: Synthetic oligonucleotide
  Sense strand starting at position 3524 of SEQ ID NO: 914001
auugaauugcaaugcaauu

SEQ ID NO: 970531 - RNA, 19 nt, Artificial Sequence
  Description of Artificial Sequence: Synthetic oligonucleotide
  Antisense strand to SEQ ID NO: 970530
aauugcauugcaauucaau

SEQ ID NO: 970532 - RNA, 19 nt, Artificial Sequence
  Description of Artificial Sequence: Synthetic oligonucleotide
  Sense strand starting at position 2926 of SEQ ID NO: 914002
gcagcucuccugccaguua

SEQ ID NO: 970533 - RNA, 19 nt, Artificial Sequence
  Description of Artificial Sequence: Synthetic oligonucleotide
  Antisense strand to SEQ ID NO: 970532
uaacuggcaggagagcugc

SEQ ID NO: 970534 - RNA, 19 nt, Artificial Sequence
  Description of Artificial Sequence: Synthetic oligonucleotide
  Sense strand starting at position 3227 of SEQ ID NO: 914002
guauuaaguccucauugaa

SEQ ID NO: 970535 - RNA, 19 nt, Artificial Sequence
  Description of Artificial Sequence: Synthetic oligonucleotide
  Antisense strand to SEQ ID NO: 970534
uucaaugaggacuuaauac

SEQ ID NO: 970536 - RNA, 19 nt, Artificial Sequence
  Description of Artificial Sequence: Synthetic oligonucleotide
  Sense strand starting at position 3230 of SEQ ID NO: 914002
uuaaguccucauugaaaug

SEQ ID NO: 970537 - RNA, 19 nt, Artificial Sequence
  Description of Artificial Sequence: Synthetic oligonucleotide
  Antisense strand to SEQ ID NO: 970536
cauuucaaugaggacuuaa

SEQ ID NO: 970538 - RNA, 19 nt, Artificial Sequence
  Description of Artificial Sequence: Synthetic oligonucleotide
  Sense strand starting at position 1689 of SEQ ID NO: 914002
gaguccucccuugggaaua

SEQ ID NO: 970539 - RNA, 19 nt, Artificial Sequence
  Description of Artificial Sequence: Synthetic oligonucleotide
  Antisense strand to SEQ ID NO: 970538
uauucccaagggaggacuc

SEQ ID NO: 970540 - RNA, 19 nt, Artificial Sequence
  Description of Artificial Sequence: Synthetic oligonucleotide
  Sense strand starting at position 3057 of SEQ ID NO: 914002
agaguaguuccuggacuga

SEQ ID NO: 970541 - RNA, 19 nt, Artificial Sequence
  Description of Artificial Sequence: Synthetic oligonucleotide
  Antisense strand to SEQ ID NO: 970540
ucaguccaggaacuacucu

SEQ ID NO: 970542 - RNA, 19 nt, Artificial Sequence
  Description of Artificial Sequence: Synthetic oligonucleotide
  Sense strand starting at position 3184 of SEQ ID NO: 914002
acaaacauuugagaagcuu

SEQ ID NO: 970543 - RNA, 19 nt, Artificial Sequence
  Description of Artificial Sequence: Synthetic oligonucleotide
  Antisense strand to SEQ ID NO: 970542
aagcuucucaaauguuugu

SEQ ID NO: 970544 - RNA, 19 nt, Artificial Sequence
  Description of Artificial Sequence: Synthetic oligonucleotide
  Sense strand starting at position 410 of SEQ ID NO: 914002
cagauugaccucgaguggu

SEQ ID NO: 970545 - RNA, 19 nt, Artificial Sequence
  Description of Artificial Sequence: Synthetic oligonucleotide
  Antisense strand to SEQ ID NO: 970544
accacucgaggucaaucug

SEQ ID NO: 970546 - RNA, 19 nt, Artificial Sequence
  Description of Artificial Sequence: Synthetic oligonucleotide
  Sense strand starting at position 1688 of SEQ ID NO: 914002
ugaguccucccuugggaau

SEQ ID NO: 970547 - RNA, 19 nt, Artificial Sequence
  Description of Artificial Sequence: Synthetic oligonucleotide
  Antisense strand to SEQ ID NO: 970546
auucccaagggaggacuca

SEQ ID NO: 970548 - RNA, 19 nt, Artificial Sequence
  Description of Artificial Sequence: Synthetic oligonucleotide
  Sense strand starting at position 3226 of SEQ ID NO: 914002
aguauuaaguccucauuga

SEQ ID NO: 970549 - RNA, 19 nt, Artificial Sequence
  Description of Artificial Sequence: Synthetic oligonucleotide
  Antisense strand to SEQ ID NO: 970548
ucaaugaggacuuaauacu

SEQ ID NO: 970550 - RNA, 19 nt, Artificial Sequence
  Description of Artificial Sequence: Synthetic oligonucleotide
  Sense strand starting at position 386 of SEQ ID NO: 914002
agcucuggugcugagaaua

SEQ ID NO: 970551 - RNA, 19 nt, Artificial Sequence
  Description of Artificial Sequence: Synthetic oligonucleotide
  Antisense strand to SEQ ID NO: 970550
uauucucagcaccagagcu

SEQ ID NO: 970552 - RNA, 19 nt, Artificial Sequence
  Description of Artificial Sequence: Synthetic oligonucleotide
  Sense strand starting at position 448 of SEQ ID NO: 914002
aguggagcuccuugaccaa

SEQ ID NO: 970553 - RNA, 19 nt, Artificial Sequence
  Description of Artificial Sequence: Synthetic oligonucleotide
  Antisense strand to SEQ ID NO: 970552
uuggucaaggagcuccacu

SEQ ID NO: 970554 - RNA, 19 nt, Artificial Sequence
  Description of Artificial Sequence: Synthetic oligonucleotide
  Sense strand starting at position 3548 of SEQ ID NO: 914002
cggucccugaguuauaauc

SEQ ID NO: 970555 - RNA, 19 nt, Artificial Sequence
  Description of Artificial Sequence: Synthetic oligonucleotide
  Antisense strand to SEQ ID NO: 970554
gauuauaacucagggaccg

SEQ ID NO: 970556 - RNA, 19 nt, Artificial Sequence
  Description of Artificial Sequence: Synthetic oligonucleotide
  Sense strand starting at position 1290 of SEQ ID NO: 914002
ccagguugccgaugaggaa

SEQ ID NO: 970557 - RNA, 19 nt, Artificial Sequence
  Description of Artificial Sequence: Synthetic oligonucleotide
  Antisense strand to SEQ ID NO: 970556
uuccucaucggcaaccugg

SEQ ID NO: 970558 - RNA, 19 nt, Artificial Sequence
  Description of Artificial Sequence: Synthetic oligonucleotide
  Sense strand starting at position 3369 of SEQ ID NO: 914002
uugucuccucucugauaag

SEQ ID NO: 970559 - RNA, 19 nt, Artificial Sequence
  Description of Artificial Sequence: Synthetic oligonucleotide
  Antisense strand to SEQ ID NO: 970558
cuuaucagagaggagacaa

SEQ ID NO: 970560 - RNA, 19 nt, Artificial Sequence
  Description of Artificial Sequence: Synthetic oligonucleotide
  Sense strand starting at position 356 of SEQ ID NO: 914002
cuggaaauguugcccuaug

SEQ ID NO: 970561 - RNA, 19 nt, Artificial Sequence
  Description of Artificial Sequence: Synthetic oligonucleotide
  Antisense strand to SEQ ID NO: 970560
cauagggcaacauuuccag

SEQ ID NO: 970562 - RNA, 19 nt, Artificial Sequence
  Description of Artificial Sequence: Synthetic oligonucleotide
  Sense strand starting at position 1893 of SEQ ID NO: 914002
aaagcacucgcgggaagaa

SEQ ID NO: 970563 - RNA, 19 nt, Artificial Sequence
  Description of Artificial Sequence: Synthetic oligonucleotide
  Antisense strand to SEQ ID NO: 970562
uucuucccgcgagugcuuu

SEQ ID NO: 970564 - RNA, 19 nt, Artificial Sequence
  Description of Artificial Sequence: Synthetic oligonucleotide
  Sense strand starting at position 2356 of SEQ ID NO: 914002
gaaguagcggugggagauu

SEQ ID NO: 970565 - RNA, 19 nt, Artificial Sequence
  Description of Artificial Sequence: Synthetic oligonucleotide
  Antisense strand to SEQ ID NO: 970564
aaucucccaccgcuacuuc

SEQ ID NO: 970566 - RNA, 19 nt, Artificial Sequence
  Description of Artificial Sequence: Synthetic oligonucleotide
  Sense strand starting at position 2111 of SEQ ID NO: 914002
augcucggugcuuagagaa

SEQ ID NO: 970567 - RNA, 19 nt, Artificial Sequence
  Description of Artificial Sequence: Synthetic oligonucleotide
  Antisense strand to SEQ ID NO: 970566
uucucuaagcaccgagcau

SEQ ID NO: 970568 - RNA, 19 nt, Artificial Sequence
  Description of Artificial Sequence: Synthetic oligonucleotide
  Sense strand starting at position 3379 of SEQ ID NO: 914002
ucugauaaguccuuguacu

SEQ ID NO: 970569 - RNA, 19 nt, Artificial Sequence
  Description of Artificial Sequence: Synthetic oligonucleotide
  Antisense strand to SEQ ID NO: 970568
aguacaaggacuuaucaga

SEQ ID NO: 970570 - RNA, 19 nt, Artificial Sequence
  Description of Artificial Sequence: Synthetic oligonucleotide
  Sense strand starting at position 3546 of SEQ ID NO: 914002
cacggucccugaguuauaa

SEQ ID NO: 970571 - RNA, 19 nt, Artificial Sequence
  Description of Artificial Sequence: Synthetic oligonucleotide
  Antisense strand to SEQ ID NO: 970570
uuauaacucagggaccgug

SEQ ID NO: 970572 - RNA, 19 nt, Artificial Sequence
  Description of Artificial Sequence: Synthetic oligonucleotide
  Sense strand starting at position 3400 of SEQ ID NO: 914002
guccucuggcugcagauau

SEQ ID NO: 970573 - RNA, 19 nt, Artificial Sequence
  Description of Artificial Sequence: Synthetic oligonucleotide
  Antisense strand to SEQ ID NO: 970572
auaucugcagccagaggac

SEQ ID NO: 970574 - RNA, 19 nt, Artificial Sequence
  Description of Artificial Sequence: Synthetic oligonucleotide
  Sense strand starting at position 2367 of SEQ ID NO: 914002
gggagauugcaaugcagcu

SEQ ID NO: 970575 - RNA, 19 nt, Artificial Sequence
  Description of Artificial Sequence: Synthetic oligonucleotide
  Antisense strand to SEQ ID NO: 970574
agcugcauugcaaucuccc

SEQ ID NO: 970576 - RNA, 19 nt, Artificial Sequence
  Description of Artificial Sequence: Synthetic oligonucleotide
  Sense strand starting at position 357 of SEQ ID NO: 914002
uggaaauguugcccuaugu

SEQ ID NO: 970577 - RNA, 19 nt, Artificial Sequence
  Description of Artificial Sequence: Synthetic oligonucleotide
  Antisense strand to SEQ ID NO: 970576
acauagggcaacauuucca

SEQ ID NO: 970578 - RNA, 19 nt, Artificial Sequence
  Description of Artificial Sequence: Synthetic oligonucleotide
  Sense strand starting at position 157 of SEQ ID NO: 914002
aggcaaucgugguucugaa

SEQ ID NO: 970579 - RNA, 19 nt, Artificial Sequence
  Description of Artificial Sequence: Synthetic oligonucleotide
  Antisense strand to SEQ ID NO: 970578
uucagaaccacgauugccu

SEQ ID NO: 970580 - RNA, 19 nt, Artificial Sequence
  Description of Artificial Sequence: Synthetic oligonucleotide
  Sense strand starting at position 1998 of SEQ ID NO: 914002
aauguuucccagugggcua

SEQ ID NO: 970581 - RNA, 19 nt, Artificial Sequence
  Description of Artificial Sequence: Synthetic oligonucleotide
  Antisense strand to SEQ ID NO: 970580
uagcccacugggaaacauu

SEQ ID NO: 970582 - RNA, 19 nt, Artificial Sequence
  Description of Artificial Sequence: Synthetic oligonucleotide
  Sense strand starting at position 2110 of SEQ ID NO: 914002
caugcucggugcuuagaga

SEQ ID NO: 970583 - RNA, 19 nt, Artificial Sequence
  Description of Artificial Sequence: Synthetic oligonucleotide
  Antisense strand to SEQ ID NO: 970582
ucucuaagcaccgagcaug

SEQ ID NO: 970584 - RNA, 19 nt, Artificial Sequence
  Description of Artificial Sequence: Synthetic oligonucleotide
  Sense strand starting at position 1302 of SEQ ID NO: 914002
ugaggaaguucgucacguu

SEQ ID NO: 970585 - RNA, 19 nt, Artificial Sequence
  Description of Artificial Sequence: Synthetic oligonucleotide
  Antisense strand to SEQ ID NO: 970584
aacgugacgaacuuccuca

SEQ ID NO: 970586 - RNA, 19 nt, Artificial Sequence
  Description of Artificial Sequence: Synthetic oligonucleotide
  Sense strand starting at position 984 of SEQ ID NO: 914002
gcuugagcuccacgugaua

SEQ ID NO: 970587 - RNA, 19 nt, Artificial Sequence
  Description of Artificial Sequence: Synthetic oligonucleotide
  Antisense strand to SEQ ID NO: 970586
uaucacguggagcucaagc

SEQ ID NO: 970588 - RNA, 19 nt, Artificial Sequence
  Description of Artificial Sequence: Synthetic oligonucleotide
  Sense strand starting at position 2294 of SEQ ID NO: 914002
gcgcgaagcgucaggcuau

SEQ ID NO: 970589 - RNA, 19 nt, Artificial Sequence
  Description of Artificial Sequence: Synthetic oligonucleotide
  Antisense strand to SEQ ID NO: 970588
auagccugacgcuucgcgc

SEQ ID NO: 970590 - RNA, 19 nt, Artificial Sequence
  Description of Artificial Sequence: Synthetic oligonucleotide
  Sense strand starting at position 3602 of SEQ ID NO: 914002
uguauauguuaggacaaga

SEQ ID NO: 970591 - RNA, 19 nt, Artificial Sequence
  Description of Artificial Sequence: Synthetic oligonucleotide
  Antisense strand to SEQ ID NO: 970590
ucuuguccuaacauauaca

SEQ ID NO: 970592 - RNA, 19 nt, Artificial Sequence
  Description of Artificial Sequence: Synthetic oligonucleotide
  Sense strand starting at position 3543 of SEQ ID NO: 914002
gcucacggucccugaguua

SEQ ID NO: 970593 - RNA, 19 nt, Artificial Sequence
  Description of Artificial Sequence: Synthetic oligonucleotide
  Antisense strand to SEQ ID NO: 970592
uaacucagggaccgugagc

SEQ ID NO: 970594 - RNA, 19 nt, Artificial Sequence
  Description of Artificial Sequence: Synthetic oligonucleotide
  Sense strand starting at position 1625 of SEQ ID NO: 914002
cgucacuucccuugccaua

SEQ ID NO: 970595 - RNA, 19 nt, Artificial Sequence
  Description of Artificial Sequence: Synthetic oligonucleotide
  Antisense strand to SEQ ID NO: 970594
uauggcaagggaagugacg

SEQ ID NO: 970596 - RNA, 19 nt, Artificial Sequence
  Description of Artificial Sequence: Synthetic oligonucleotide
  Sense strand starting at position 3599 of SEQ ID NO: 914002
acauguauauguuaggaca

SEQ ID NO: 970597 - RNA, 19 nt, Artificial Sequence
  Description of Artificial Sequence: Synthetic oligonucleotide
  Antisense strand to SEQ ID NO: 970596
uguccuaacauauacaugu

SEQ ID NO: 970598 - RNA, 19 nt, Artificial Sequence
  Description of Artificial Sequence: Synthetic oligonucleotide
  Sense strand starting at position 3550 of SEQ ID NO: 914002
gucccugaguuauaaucaa

SEQ ID NO: 970599 - RNA, 19 nt, Artificial Sequence
  Description of Artificial Sequence: Synthetic oligonucleotide
  Antisense strand to SEQ ID NO: 970598
uugauuauaacucagggac

SEQ ID NO: 970600 - RNA, 19 nt, Artificial Sequence
  Description of Artificial Sequence: Synthetic oligonucleotide
  Sense strand starting at position 1690 of SEQ ID NO: 914002
aguccucccuugggaauaa

SEQ ID NO: 970601 - RNA, 19 nt, Artificial Sequence
  Description of Artificial Sequence: Synthetic oligonucleotide
  Antisense strand to SEQ ID NO: 970600
uuauucccaagggaggacu

SEQ ID NO: 970602 - RNA, 19 nt, Artificial Sequence
  Description of Artificial Sequence: Synthetic oligonucleotide
  Sense strand starting at position 161 of SEQ ID NO: 914002
aaucgugguucugaaauac

SEQ ID NO: 970603 - RNA, 19 nt, Artificial Sequence
  Description of Artificial Sequence: Synthetic oligonucleotide
  Antisense strand to SEQ ID NO: 970602
guauuucagaaccacgauu

SEQ ID NO: 970604 - RNA, 19 nt, Artificial Sequence
  Description of Artificial Sequence: Synthetic oligonucleotide
  Sense strand starting at position 3056 of SEQ ID NO: 914002
cagaguaguuccuggacug

SEQ ID NO: 970605 - RNA, 19 nt, Artificial Sequence
  Description of Artificial Sequence: Synthetic oligonucleotide
  Antisense strand to SEQ ID NO: 970604
caguccaggaacuacucug

SEQ ID NO: 970606 - RNA, 19 nt, Artificial Sequence
  Description of Artificial Sequence: Synthetic oligonucleotide
  Sense strand starting at position 3370 of SEQ ID NO: 914002
ugucuccucucugauaagu

SEQ ID NO: 970607 - RNA, 19 nt, Artificial Sequence
  Description of Artificial Sequence: Synthetic oligonucleotide
  Antisense strand to SEQ ID NO: 970606
acuuaucagagaggagaca

SEQ ID NO: 970608 - RNA, 19 nt, Artificial Sequence
  Description of Artificial Sequence: Synthetic oligonucleotide
  Sense strand starting at position 2836 of SEQ ID NO: 914002
gucggagacucaugacuuu

SEQ ID NO: 970609 - RNA, 19 nt, Artificial Sequence
  Description of Artificial Sequence: Synthetic oligonucleotide
  Antisense strand to SEQ ID NO: 970608
aaagucaugagucuccgac

SEQ ID NO: 970610 - RNA, 19 nt, Artificial Sequence
  Description of Artificial Sequence: Synthetic oligonucleotide
  Sense strand starting at position 1781 of SEQ ID NO: 914002
guuagaacauacgguuuau

SEQ ID NO: 970611 - RNA, 19 nt, Artificial Sequence
  Description of Artificial Sequence: Synthetic oligonucleotide
  Antisense strand to SEQ ID NO: 970610
auaaaccguauguucuaac

SEQ ID NO: 970612 - RNA, 19 nt, Artificial Sequence
  Description of Artificial Sequence: Synthetic oligonucleotide
  Sense strand starting at position 375 of SEQ ID NO: 914003
ggcuguuaucuagaaauga

SEQ ID NO: 970613 - RNA, 19 nt, Artificial Sequence
  Description of Artificial Sequence: Synthetic oligonucleotide
  Antisense strand to SEQ ID NO: 970612
ucauuucuagauaacagcc

SEQ ID NO: 970614 - RNA, 19 nt, Artificial Sequence
  Description of Artificial Sequence: Synthetic oligonucleotide
  Sense strand starting at position 2304 of SEQ ID NO: 914003
uugcaagagaugggacauu

SEQ ID NO: 970615 - RNA, 19 nt, Artificial Sequence
  Description of Artificial Sequence: Synthetic oligonucleotide
  Antisense strand to SEQ ID NO: 970614
aaugucccaucucuugcaa

SEQ ID NO: 970616 - RNA, 19 nt, Artificial Sequence
  Description of Artificial Sequence: Synthetic oligonucleotide
  Sense strand starting at position 816 of SEQ ID NO: 914003
uuguuuguauuuccacauu

SEQ ID NO: 970617 - RNA, 19 nt, Artificial Sequence
  Description of Artificial Sequence: Synthetic oligonucleotide
  Antisense strand to SEQ ID NO: 970616
aauguggaaauacaaacaa

SEQ ID NO: 970618 - RNA, 19 nt, Artificial Sequence
  Description of Artificial Sequence: Synthetic oligonucleotide
  Sense strand starting at position 3097 of SEQ ID NO: 914003
guuuguguugcuucccauu

SEQ ID NO: 970619 - RNA, 19 nt, Artificial Sequence
  Description of Artificial Sequence: Synthetic oligonucleotide
  Antisense strand to SEQ ID NO: 970618
aaugggaagcaacacaaac

SEQ ID NO: 970620 - RNA, 19 nt, Artificial Sequence
  Description of Artificial Sequence: Synthetic oligonucleotide
  Sense strand starting at position 3342 of SEQ ID NO: 914003
acuuaauugggucaguauu

SEQ ID NO: 970621 - RNA, 19 nt, Artificial Sequence
  Description of Artificial Sequence: Synthetic oligonucleotide
  Antisense strand to SEQ ID NO: 970620
aauacugacccaauuaagu

SEQ ID NO: 970622 - RNA, 19 nt, Artificial Sequence
  Description of Artificial Sequence: Synthetic oligonucleotide
  Sense strand starting at position 808 of SEQ ID NO: 914003
uagggcauuuguuuguauu

SEQ ID NO: 970623 - RNA, 19 nt, Artificial Sequence
  Description of Artificial Sequence: Synthetic oligonucleotide
  Antisense strand to SEQ ID NO: 970622
aauacaaacaaaugcccua

SEQ ID NO: 970624 - RNA, 19 nt, Artificial Sequence
  Description of Artificial Sequence: Synthetic oligonucleotide
  Sense strand starting at position 2752 of SEQ ID NO: 914003
gugcauacaccacauacau

SEQ ID NO: 970625 - RNA, 19 nt, Artificial Sequence
  Description of Artificial Sequence: Synthetic oligonucleotide
  Antisense strand to SEQ ID NO: 970624
auguaugugguguaugcac

SEQ ID NO: 970626 - RNA, 19 nt, Artificial Sequence
  Description of Artificial Sequence: Synthetic oligonucleotide
  Sense strand starting at position 2695 of SEQ ID NO: 914003
cuuaauaaugcugaugcaa

SEQ ID NO: 970627 - RNA, 19 nt, Artificial Sequence
  Description of Artificial Sequence: Synthetic oligonucleotide
  Antisense strand to SEQ ID NO: 970626
uugcaucagcauuauuaag

SEQ ID NO: 970628 - RNA, 19 nt, Artificial Sequence
  Description of Artificial Sequence: Synthetic oligonucleotide
  Sense strand starting at position 224 of SEQ ID NO: 914003
ccuggaguuaucugagaug

SEQ ID NO: 970629 - RNA, 19 nt, Artificial Sequence
  Description of Artificial Sequence: Synthetic oligonucleotide
  Antisense strand to SEQ ID NO: 970628
caucucagauaacuccagg

SEQ ID NO: 970630 - RNA, 19 nt, Artificial Sequence
  Description of Artificial Sequence: Synthetic oligonucleotide
  Sense strand starting at position 699 of SEQ ID NO: 914003
cuauuacuagucuggacaa

SEQ ID NO: 970631 - RNA, 19 nt, Artificial Sequence
  Description of Artificial Sequence: Synthetic oligonucleotide
  Antisense strand to SEQ ID NO: 970630
uuguccagacuaguaauag

SEQ ID NO: 970632 - RNA, 19 nt, Artificial Sequence
  Description of Artificial Sequence: Synthetic oligonucleotide
  Sense strand starting at position 1203 of SEQ ID NO: 914003
uagguucugguagaguuaa

SEQ ID NO: 970633 - RNA, 19 nt, Artificial Sequence
  Description of Artificial Sequence: Synthetic oligonucleotide
  Antisense strand to SEQ ID NO: 970632
uuaacucuaccagaaccua

SEQ ID NO: 970634 - RNA, 19 nt, Artificial Sequence
  Description of Artificial Sequence: Synthetic oligonucleotide
  Sense strand starting at position 1237 of SEQ ID NO: 914003
aguuccugugguuaaggaa

SEQ ID NO: 970635 - RNA, 19 nt, Artificial Sequence
  Description of Artificial Sequence: Synthetic oligonucleotide
  Antisense strand to SEQ ID NO: 970634
uuccuuaaccacaggaacu

SEQ ID NO: 970636 - RNA, 19 nt, Artificial Sequence
  Description of Artificial Sequence: Synthetic oligonucleotide
  Sense strand starting at position 434 of SEQ ID NO: 914003
guggucagucuacaaauau

SEQ ID NO: 970637 - RNA, 19 nt, Artificial Sequence
  Description of Artificial Sequence: Synthetic oligonucleotide
  Antisense strand to SEQ ID NO: 970636
auauuuguagacugaccac

SEQ ID NO: 970638 - RNA, 19 nt, Artificial Sequence
  Description of Artificial Sequence: Synthetic oligonucleotide
  Sense strand starting at position 2917 of SEQ ID NO: 914003
uggaaauaucuccgaaggu

SEQ ID NO: 970639 - RNA, 19 nt, Artificial Sequence
  Description of Artificial Sequence: Synthetic oligonucleotide
  Antisense strand to SEQ ID NO: 970638
accuucggagauauuucca

SEQ ID NO: 970640 - RNA, 19 nt, Artificial Sequence
  Description of Artificial Sequence: Synthetic oligonucleotide
  Sense strand starting at position 3061 of SEQ ID NO: 914003
aaugacaaacguuguaaca

SEQ ID NO: 970641 - RNA, 19 nt, Artificial Sequence
  Description of Artificial Sequence: Synthetic oligonucleotide
  Antisense strand to SEQ ID NO: 970640
uguuacaacguuugucauu

SEQ ID NO: 970642 - RNA, 19 nt, Artificial Sequence
  Description of Artificial Sequence: Synthetic oligonucleotide
  Sense strand starting at position 2907 of SEQ ID NO: 914003
gcuaucaccguggaaauau

SEQ ID NO: 970643 - RNA, 19 nt, Artificial Sequence
  Description of Artificial Sequence: Synthetic oligonucleotide
  Antisense strand to SEQ ID NO: 970642
auauuuccacggugauagc

SEQ ID NO: 970644 - RNA, 19 nt, Artificial Sequence
  Description of Artificial Sequence: Synthetic oligonucleotide
  Sense strand starting at position 373 of SEQ ID NO: 914003
guggcuguuaucuagaaau

SEQ ID NO: 970645 - RNA, 19 nt, Artificial Sequence
  Description of Artificial Sequence: Synthetic oligonucleotide
  Antisense strand to SEQ ID NO: 970644
auuucuagauaacagccac

SEQ ID NO: 970646 - RNA, 19 nt, Artificial Sequence
  Description of Artificial Sequence: Synthetic oligonucleotide
  Sense strand starting at position 13 of SEQ ID NO: 914003
ggccuucaccgucaaagga

SEQ ID NO: 970647 - RNA, 19 nt, Artificial Sequence
  Description of Artificial Sequence: Synthetic oligonucleotide
  Antisense strand to SEQ ID NO: 970646
uccuuugacggugaaggcc

SEQ ID NO: 970648 - RNA, 19 nt, Artificial Sequence
  Description of Artificial Sequence: Synthetic oligonucleotide
  Sense strand starting at position 745 of SEQ ID NO: 914003
cugucaacuuuggcaagaa

SEQ ID NO: 970649 - RNA, 19 nt, Artificial Sequence
  Description of Artificial Sequence: Synthetic oligonucleotide
  Antisense strand to SEQ ID NO: 970648
uucuugccaaaguugacag

SEQ ID NO: 970650 - RNA, 19 nt, Artificial Sequence
  Description of Artificial Sequence: Synthetic oligonucleotide
  Sense strand starting at position 3340 of SEQ ID NO: 914003
cuacuuaauugggucagua

SEQ ID NO: 970651 - RNA, 19 nt, Artificial Sequence
  Description of Artificial Sequence: Synthetic oligonucleotide
  Antisense strand to SEQ ID NO: 970650
uacugacccaauuaaguag

SEQ ID NO: 970652 - RNA, 19 nt, Artificial Sequence
  Description of Artificial Sequence: Synthetic oligonucleotide
  Sense strand starting at position 2977 of SEQ ID NO: 914003
uaauguuacuggguuuaac

SEQ ID NO: 970653 - RNA, 19 nt, Artificial Sequence
  Description of Artificial Sequence: Synthetic oligonucleotide
  Antisense strand to SEQ ID NO: 970652
guuaaacccaguaacauua

SEQ ID NO: 970654 - RNA, 19 nt, Artificial Sequence
  Description of Artificial Sequence: Synthetic oligonucleotide
  Sense strand starting at position 659 of SEQ ID NO: 914003
ugcuguuaccaaggaauau

SEQ ID NO: 970655 - RNA, 19 nt, Artificial Sequence
  Description of Artificial Sequence: Synthetic oligonucleotide
  Antisense strand to SEQ ID NO: 970654
auauuccuugguaacagca

SEQ ID NO: 970656 - RNA, 19 nt, Artificial Sequence
  Description of Artificial Sequence: Synthetic oligonucleotide
  Sense strand starting at position 3658 of SEQ ID NO: 914003
gaaauuguagcuuacugca

SEQ ID NO: 970657 - RNA, 19 nt, Artificial Sequence
  Description of Artificial Sequence: Synthetic oligonucleotide
  Antisense strand to SEQ ID NO: 970656
ugcaguaagcuacaauuuc

SEQ ID NO: 970658 - RNA, 19 nt, Artificial Sequence
  Description of Artificial Sequence: Synthetic oligonucleotide
  Sense strand starting at position 216 of SEQ ID NO: 914003
gcuccacuccuggaguuau

SEQ ID NO: 970659 - RNA, 19 nt, Artificial Sequence
  Description of Artificial Sequence: Synthetic oligonucleotide
  Antisense strand to SEQ ID NO: 970658
auaacuccaggaguggagc

SEQ ID NO: 970660 - RNA, 19 nt, Artificial Sequence
  Description of Artificial Sequence: Synthetic oligonucleotide
  Sense strand starting at position 580 of SEQ ID NO: 914003
ucugauuucuaguaaugga

SEQ ID NO: 970661 - RNA, 19 nt, Artificial Sequence
  Description of Artificial Sequence: Synthetic oligonucleotide
  Antisense strand to SEQ ID NO: 970660
uccauuacuagaaaucaga

SEQ ID NO: 970662 - RNA, 19 nt, Artificial Sequence
  Description of Artificial Sequence: Synthetic oligonucleotide
  Sense strand starting at position 583 of SEQ ID NO: 914003
gauuucuaguaauggagaa

SEQ ID NO: 970663 - RNA, 19 nt, Artificial Sequence
  Description of Artificial Sequence: Synthetic oligonucleotide
  Antisense strand to SEQ ID NO: 970662
uucuccauuacuagaaauc

SEQ ID NO: 970664 - RNA, 19 nt, Artificial Sequence
  Description of Artificial Sequence: Synthetic oligonucleotide
  Sense strand starting at position 647 of SEQ ID NO: 914003
gcucauuugaagugcuguu

SEQ ID NO: 970665 - RNA, 19 nt, Artificial Sequence
  Description of Artificial Sequence: Synthetic oligonucleotide
  Antisense strand to SEQ ID NO: 970664
aacagcacuucaaaugagc

SEQ ID NO: 970666 - RNA, 19 nt, Artificial Sequence
  Description of Artificial Sequence: Synthetic oligonucleotide
  Sense strand starting at position 3027 of SEQ ID NO: 914003
gguuguauuaauuguagga

SEQ ID NO: 970667 - RNA, 19 nt, Artificial Sequence
  Description of Artificial Sequence: Synthetic oligonucleotide
  Antisense strand to SEQ ID NO: 970666
uccuacaauuaauacaacc

SEQ ID NO: 970668 - RNA, 19 nt, Artificial Sequence
  Description of Artificial Sequence: Synthetic oligonucleotide
  Sense strand starting at position 697 of SEQ ID NO: 914003
ggcuauuacuagucuggac

SEQ ID NO: 970669 - RNA, 19 nt, Artificial Sequence
  Description of Artificial Sequence: Synthetic oligonucleotide
  Antisense strand to SEQ ID NO: 970668
guccagacuaguaauagcc

SEQ ID NO: 970670 - RNA, 19 nt, Artificial Sequence
  Description of Artificial Sequence: Synthetic oligonucleotide
  Sense strand starting at position 331 of SEQ ID NO: 914003
gaugaaggcuugcuugauc

SEQ ID NO: 970671 - RNA, 19 nt, Artificial Sequence
  Description of Artificial Sequence: Synthetic oligonucleotide
  Antisense strand to SEQ ID NO: 970670
gaucaagcaagccuucauc

SEQ ID NO: 970672 - RNA, 19 nt, Artificial Sequence
  Description of Artificial Sequence: Synthetic oligonucleotide
  Sense strand starting at position 1028 of SEQ ID NO: 914003
uuggucuuucgauaccuuu

SEQ ID NO: 970673 - RNA, 19 nt, Artificial Sequence
  Description of Artificial Sequence: Synthetic oligonucleotide
  Antisense strand to SEQ ID NO: 970672
aaagguaucgaaagaccaa

SEQ ID NO: 970674 - RNA, 19 nt, Artificial Sequence
  Description of Artificial Sequence: Synthetic oligonucleotide
  Sense strand starting at position 3502 of SEQ ID NO: 914003
gaacgcauuuaucaugaag

SEQ ID NO: 970675 - RNA, 19 nt, Artificial Sequence
  Description of Artificial Sequence: Synthetic oligonucleotide
  Antisense strand to SEQ ID NO: 970674
cuucaugauaaaugcguuc

SEQ ID NO: 970676 - RNA, 19 nt, Artificial Sequence
  Description of Artificial Sequence: Synthetic oligonucleotide
  Sense strand starting at position 2706 of SEQ ID NO: 914003
ugaugcaacuuauugcaua

SEQ ID NO: 970677 - RNA, 19 nt, Artificial Sequence
  Description of Artificial Sequence: Synthetic oligonucleotide
  Antisense strand to SEQ ID NO: 970676
uaugcaauaaguugcauca

SEQ ID NO: 970678 - RNA, 19 nt, Artificial Sequence
  Description of Artificial Sequence: Synthetic oligonucleotide
  Sense strand starting at position 2905 of SEQ ID NO: 914003
aggcuaucaccguggaaau

SEQ ID NO: 970679 - RNA, 19 nt, Artificial Sequence
  Description of Artificial Sequence: Synthetic oligonucleotide
  Antisense strand to SEQ ID NO: 970678
auuuccacggugauagccu

SEQ ID NO: 970680 - RNA, 19 nt, Artificial Sequence
  Description of Artificial Sequence: Synthetic oligonucleotide
  Sense strand starting at position 2906 of SEQ ID NO: 914003
ggcuaucaccguggaaaua

SEQ ID NO: 970681 - RNA, 19 nt, Artificial Sequence
  Description of Artificial Sequence: Synthetic oligonucleotide
  Antisense strand to SEQ ID NO: 970680
uauuuccacggugauagcc

SEQ ID NO: 970682 - RNA, 19 nt, Artificial Sequence
  Description of Artificial Sequence: Synthetic oligonucleotide
  Sense strand starting at position 2987 of SEQ ID NO: 914003
ggguuuaacucaguaggca

SEQ ID NO: 970683 - RNA, 19 nt, Artificial Sequence
  Description of Artificial Sequence: Synthetic oligonucleotide
  Antisense strand to SEQ ID NO: 970682
ugccuacugaguuaaaccc

SEQ ID NO: 970684 - RNA, 19 nt, Artificial Sequence
  Description of Artificial Sequence: Synthetic oligonucleotide
  Sense strand starting at position 2853 of SEQ ID NO: 914003
agaaacucaugggagaauu

SEQ ID NO: 970685 - RNA, 19 nt, Artificial Sequence
  Description of Artificial Sequence: Synthetic oligonucleotide
  Antisense strand to SEQ ID NO: 970684
aauucucccaugaguuucu

SEQ ID NO: 970686 - RNA, 19 nt, Artificial Sequence
  Description of Artificial Sequence: Synthetic oligonucleotide
  Sense strand starting at position 3189 of SEQ ID NO: 914003
ugccuuaguccugagguca

SEQ ID NO: 970687 - RNA, 19 nt, Artificial Sequence
  Description of Artificial Sequence: Synthetic oligonucleotide
  Antisense strand to SEQ ID NO: 970686
ugaccucaggacuaaggca

SEQ ID NO: 970688 - RNA, 19 nt, Artificial Sequence
  Description of Artificial Sequence: Synthetic oligonucleotide
  Sense strand starting at position 2662 of SEQ ID NO: 914003
uuauuauggucagcuuuga

SEQ ID NO: 970689 - RNA, 19 nt, Artificial Sequence
  Description of Artificial Sequence: Synthetic oligonucleotide
  Antisense strand to SEQ ID NO: 970688
ucaaagcugaccauaauaa

SEQ ID NO: 970690 - RNA, 19 nt, Artificial Sequence
  Description of Artificial Sequence: Synthetic oligonucleotide
  Sense strand starting at position 2278 of SEQ ID NO: 914003
aagcaauagggaugugugu

SEQ ID NO: 970691 - RNA, 19 nt, Artificial Sequence
  Description of Artificial Sequence: Synthetic oligonucleotide
  Antisense strand to SEQ ID NO: 970690
acacacaucccuauugcuu

SEQ ID NO: 970692 - RNA, 19 nt, Artificial Sequence
  Description of Artificial Sequence: Synthetic oligonucleotide
  Sense strand starting at position 1494 of SEQ ID NO: 914004
gcguuaauuggccucaggu

SEQ ID NO: 970693 - RNA, 19 nt, Artificial Sequence
  Description of Artificial Sequence: Synthetic oligonucleotide
  Antisense strand to SEQ ID NO: 970692
accugaggccaauuaacgc

SEQ ID NO: 970694 - RNA, 19 nt, Artificial Sequence
  Description of Artificial Sequence: Synthetic oligonucleotide
  Sense strand starting at position 3385 of SEQ ID NO: 914004
gguuaagacagaugacagu

SEQ ID NO: 970695 - RNA, 19 nt, Artificial Sequence
  Description of Artificial Sequence: Synthetic oligonucleotide
  Antisense strand to SEQ ID NO: 970694
acugucaucugucuuaacc

SEQ ID NO: 970696 - RNA, 19 nt, Artificial Sequence
  Description of Artificial Sequence: Synthetic oligonucleotide
  Sense strand starting at position 3289 of SEQ ID NO: 914004
auggguuucccucacuaau

SEQ ID NO: 970697 - RNA, 19 nt, Artificial Sequence
  Description of Artificial Sequence: Synthetic oligonucleotide
  Antisense strand to SEQ ID NO: 970696
auuagugagggaaacccau

SEQ ID NO: 970698 - RNA, 19 nt, Artificial Sequence
  Description of Artificial Sequence: Synthetic oligonucleotide
  Sense strand starting at position 750 of SEQ ID NO: 914004
aggugaucugcccaccaaa

SEQ ID NO: 970699 - RNA, 19 nt, Artificial Sequence
  Description of Artificial Sequence: Synthetic oligonucleotide
  Antisense strand to SEQ ID NO: 970698
uuuggugggcagaucaccu

SEQ ID NO: 970700 - RNA, 19 nt, Artificial Sequence
  Description of Artificial Sequence: Synthetic oligonucleotide
  Sense strand starting at position 2459 of SEQ ID NO: 914004
uuaccaaucuuggugauaa

SEQ ID NO: 970701 - RNA, 19 nt, Artificial Sequence
  Description of Artificial Sequence: Synthetic oligonucleotide
  Antisense strand to SEQ ID NO: 970700
uuaucaccaagauugguaa

SEQ ID NO: 970702 - RNA, 19 nt, Artificial Sequence
  Description of Artificial Sequence: Synthetic oligonucleotide
  Sense strand starting at position 2794 of SEQ ID NO: 914004
ucagcugauaauggguaaa

SEQ ID NO: 970703 - RNA, 19 nt, Artificial Sequence
  Description of Artificial Sequence: Synthetic oligonucleotide
  Antisense strand to SEQ ID NO: 970702
uuuacccauuaucagcuga

SEQ ID NO: 970704 - RNA, 19 nt, Artificial Sequence
  Description of Artificial Sequence: Synthetic oligonucleotide
  Sense strand starting at position 3557 of SEQ ID NO: 914004
cugauuaaggccugagauc

SEQ ID NO: 970705 - RNA, 19 nt, Artificial Sequence
  Description of Artificial Sequence: Synthetic oligonucleotide
  Antisense strand to SEQ ID NO: 970704
gaucucaggccuuaaucag

SEQ ID NO: 970706 - RNA, 19 nt, Artificial Sequence
  Description of Artificial Sequence: Synthetic oligonucleotide
  Sense strand starting at position 3447 of SEQ ID NO: 914004
gggaaacugucaguguaaa

SEQ ID NO: 970707 - RNA, 19 nt, Artificial Sequence
  Description of Artificial Sequence: Synthetic oligonucleotide
  Antisense strand to SEQ ID NO: 970706
uuuacacugacaguuuccc

SEQ ID NO: 970708 - RNA, 19 nt, Artificial Sequence
  Description of Artificial Sequence: Synthetic oligonucleotide
  Sense strand starting at position 2458 of SEQ ID NO: 914004
cuuaccaaucuuggugaua

SEQ ID NO: 970709 - RNA, 19 nt, Artificial Sequence
  Description of Artificial Sequence: Synthetic oligonucleotide
  Antisense strand to SEQ ID NO: 970708
uaucaccaagauugguaag

SEQ ID NO: 970710 - RNA, 19 nt, Artificial Sequence
  Description of Artificial Sequence: Synthetic oligonucleotide
  Sense strand starting at position 2255 of SEQ ID NO: 914004
acauuaggguuucugaagu

SEQ ID NO: 970711 - RNA, 19 nt, Artificial Sequence
  Description of Artificial Sequence: Synthetic oligonucleotide
  Antisense strand to SEQ ID NO: 970710
acuucagaaacccuaaugu

SEQ ID NO: 970712 - RNA, 19 nt, Artificial Sequence
  Description of Artificial Sequence: Synthetic oligonucleotide
  Sense strand starting at position 1143 of SEQ ID NO: 914004
gacuuaugaacgcgagaaa

SEQ ID NO: 970713 - RNA, 19 nt, Artificial Sequence
  Description of Artificial Sequence: Synthetic oligonucleotide
  Antisense strand to SEQ ID NO: 970712
uuucucgcguucauaaguc

SEQ ID NO: 970714 - RNA, 19 nt, Artificial Sequence
  Description of Artificial Sequence: Synthetic oligonucleotide
  Sense strand starting at position 3448 of SEQ ID NO: 914004
ggaaacugucaguguaaac

SEQ ID NO: 970715 - RNA, 19 nt, Artificial Sequence
  Description of Artificial Sequence: Synthetic oligonucleotide
  Antisense strand to SEQ ID NO: 970714
guuuacacugacaguuucc

SEQ ID NO: 970716 - RNA, 19 nt, Artificial Sequence
  Description of Artificial Sequence: Synthetic oligonucleotide
  Sense strand starting at position 3291 of SEQ ID NO: 914004
ggguuucccucacuaauca

SEQ ID NO: 970717 - RNA, 19 nt, Artificial Sequence
  Description of Artificial Sequence: Synthetic oligonucleotide
  Antisense strand to SEQ ID NO: 970716
ugauuagugagggaaaccc

SEQ ID NO: 970718 - RNA, 19 nt, Artificial Sequence
  Description of Artificial Sequence: Synthetic oligonucleotide
  Sense strand starting at position 231 of SEQ ID NO: 914004
gcauucccaucagugaaga

SEQ ID NO: 970719 - RNA, 19 nt, Artificial Sequence
  Description of Artificial Sequence: Synthetic oligonucleotide
  Antisense strand to SEQ ID NO: 970718
ucuucacugaugggaaugc

SEQ ID NO: 970720 - RNA, 19 nt, Artificial Sequence
  Description of Artificial Sequence: Synthetic oligonucleotide
  Sense strand starting at position 1556 of SEQ ID NO: 914004
ggaagucagcacgaauugu

SEQ ID NO: 970721 - RNA, 19 nt, Artificial Sequence
  Description of Artificial Sequence: Synthetic oligonucleotide
  Antisense strand to SEQ ID NO: 970720
acaauucgugcugacuucc

SEQ ID NO: 970722 - RNA, 19 nt, Artificial Sequence
  Description of Artificial Sequence: Synthetic oligonucleotide
  Sense strand starting at position 1141 of SEQ ID NO: 914004
gggacuuaugaacgcgaga

SEQ ID NO: 970723 - RNA, 19 nt, Artificial Sequence
  Description of Artificial Sequence: Synthetic oligonucleotide
  Antisense strand to SEQ ID NO: 970722
ucucgcguucauaaguccc

SEQ ID NO: 970724 - RNA, 19 nt, Artificial Sequence
  Description of Artificial Sequence: Synthetic oligonucleotide
  Sense strand starting at position 116 of SEQ ID NO: 914004
gaaccagcggucuaaguua

SEQ ID NO: 970725 - RNA, 19 nt, Artificial Sequence
  Description of Artificial Sequence: Synthetic oligonucleotide
  Antisense strand to SEQ ID NO: 970724
uaacuuagaccgcugguuc

SEQ ID NO: 970726 - RNA, 19 nt, Artificial Sequence
  Description of Artificial Sequence: Synthetic oligonucleotide
  Sense strand starting at position 3470 of SEQ ID NO: 914004
agaaguuacuagcuacagu

SEQ ID NO: 970727 - RNA, 19 nt, Artificial Sequence
  Description of Artificial Sequence: Synthetic oligonucleotide
  Antisense strand to SEQ ID NO: 970726
acuguagcuaguaacuucu

SEQ ID NO: 970728 - RNA, 19 nt, Artificial Sequence
  Description of Artificial Sequence: Synthetic oligonucleotide
  Sense strand starting at position 112 of SEQ ID NO: 914004
uugagaaccagcggucuaa

SEQ ID NO: 970729 - RNA, 19 nt, Artificial Sequence
  Description of Artificial Sequence: Synthetic oligonucleotide
  Antisense strand to SEQ ID NO: 970728
uuagaccgcugguucucaa

SEQ ID NO: 970730 - RNA, 19 nt, Artificial Sequence
  Description of Artificial Sequence: Synthetic oligonucleotide
  Sense strand starting at position 1565 of SEQ ID NO: 914004
cacgaauuguacucaaguu

SEQ ID NO: 970731 - RNA, 19 nt, Artificial Sequence
  Description of Artificial Sequence: Synthetic oligonucleotide
  Antisense strand to SEQ ID NO: 970730
aacuugaguacaauucgug

SEQ ID NO: 970732 - RNA, 19 nt, Artificial Sequence
  Description of Artificial Sequence: Synthetic oligonucleotide
  Sense strand starting at position 2139 of SEQ ID NO: 914004
gacggaaacccgggucuuu

SEQ ID NO: 970733 - RNA, 19 nt, Artificial Sequence
  Description of Artificial Sequence: Synthetic oligonucleotide
  Antisense strand to SEQ ID NO: 970732
aaagacccggguuuccguc

SEQ ID NO: 970734 - RNA, 19 nt, Artificial Sequence
  Description of Artificial Sequence: Synthetic oligonucleotide
  Sense strand starting at position 3410 of SEQ ID NO: 914004
aauggaaguuuacagagaa

SEQ ID NO: 970735 - RNA, 19 nt, Artificial Sequence
  Description of Artificial Sequence: Synthetic oligonucleotide
  Antisense strand to SEQ ID NO: 970734
uucucuguaaacuuccauu

SEQ ID NO: 970736 - RNA, 19 nt, Artificial Sequence
  Description of Artificial Sequence: Synthetic oligonucleotide
  Sense strand starting at position 2787 of SEQ ID NO: 914004
uguugagucagcugauaau

SEQ ID NO: 970737 - RNA, 19 nt, Artificial Sequence
  Description of Artificial Sequence: Synthetic oligonucleotide
  Antisense strand to SEQ ID NO: 970736
auuaucagcugacucaaca

SEQ ID NO: 970738 - RNA, 19 nt, Artificial Sequence
  Description of Artificial Sequence: Synthetic oligonucleotide
  Sense strand starting at position 3336 of SEQ ID NO: 914004
uuuccugauuuagggauua

SEQ ID NO: 970739 - RNA, 19 nt, Artificial Sequence
  Description of Artificial Sequence: Synthetic oligonucleotide
  Antisense strand to SEQ ID NO: 970738
uaaucccuaaaucaggaaa

SEQ ID NO: 970740 - RNA, 19 nt, Artificial Sequence
  Description of Artificial Sequence: Synthetic oligonucleotide
  Sense strand starting at position 2269 of SEQ ID NO: 914004
gaaguuacuugcuugcaaa

SEQ ID NO: 970741 - RNA, 19 nt, Artificial Sequence
  Description of Artificial Sequence: Synthetic oligonucleotide
  Antisense strand to SEQ ID NO: 970740
uuugcaagcaaguaacuuc

SEQ ID NO: 970742 - RNA, 19 nt, Artificial Sequence
  Description of Artificial Sequence: Synthetic oligonucleotide
  Sense strand starting at position 2785 of SEQ ID NO: 914004
uuuguugagucagcugaua

SEQ ID NO: 970743 - RNA, 19 nt, Artificial Sequence
  Description of Artificial Sequence: Synthetic oligonucleotide
  Antisense strand to SEQ ID NO: 970742
uaucagcugacucaacaaa

SEQ ID NO: 970744 - RNA, 19 nt, Artificial Sequence
  Description of Artificial Sequence: Synthetic oligonucleotide
  Sense strand starting at position 1032 of SEQ ID NO: 914004
gaaagaaggccgugagugu

SEQ ID NO: 970745 - RNA, 19 nt, Artificial Sequence
  Description of Artificial Sequence: Synthetic oligonucleotide
  Antisense strand to SEQ ID NO: 970744
acacucacggccuucuuuc

SEQ ID NO: 970746 - RNA, 19 nt, Artificial Sequence
  Description of Artificial Sequence: Synthetic oligonucleotide
  Sense strand starting at position 2340 of SEQ ID NO: 914004
gagugaaagggcugucugu

SEQ ID NO: 970747 - RNA, 19 nt, Artificial Sequence
  Description of Artificial Sequence: Synthetic oligonucleotide
  Antisense strand to SEQ ID NO: 970746
acagacagcccuuucacuc

SEQ ID NO: 970748 - RNA, 19 nt, Artificial Sequence
  Description of Artificial Sequence: Synthetic oligonucleotide
  Sense strand starting at position 2268 of SEQ ID NO: 914004
ugaaguuacuugcuugcaa

SEQ ID NO: 970749 - RNA, 19 nt, Artificial Sequence
  Description of Artificial Sequence: Synthetic oligonucleotide
  Antisense strand to SEQ ID NO: 970748
uugcaagcaaguaacuuca

SEQ ID NO: 970750 - RNA, 19 nt, Artificial Sequence
  Description of Artificial Sequence: Synthetic oligonucleotide
  Sense strand starting at position 2173 of SEQ ID NO: 914004
ccugcuaguugaguuccaa

SEQ ID NO: 970751 - RNA, 19 nt, Artificial Sequence
  Description of Artificial Sequence: Synthetic oligonucleotide
  Antisense strand to SEQ ID NO: 970750
uuggaacucaacuagcagg

SEQ ID NO: 970752 - RNA, 19 nt, Artificial Sequence
  Description of Artificial Sequence: Synthetic oligonucleotide
  Sense strand starting at position 2688 of SEQ ID NO: 914004
gucauugaagcacguuuaa

SEQ ID NO: 970753 - RNA, 19 nt, Artificial Sequence
  Description of Artificial Sequence: Synthetic oligonucleotide
  Antisense strand to SEQ ID NO: 970752
uuaaacgugcuucaaugac

SEQ ID NO: 970754 - RNA, 19 nt, Artificial Sequence
  Description of Artificial Sequence: Synthetic oligonucleotide
  Sense strand starting at position 3353 of SEQ ID NO: 914004
uagggauuguuagacacaa

SEQ ID NO: 970755 - RNA, 19 nt, Artificial Sequence
  Description of Artificial Sequence: Synthetic oligonucleotide
  Antisense strand to SEQ ID NO: 970754
uugugucuaacaaucccua

SEQ ID NO: 970756 - RNA, 19 nt, Artificial Sequence
  Description of Artificial Sequence: Synthetic oligonucleotide
  Sense strand starting at position 1282 of SEQ ID NO: 914004
uucggucuguggcuaaaga

SEQ ID NO: 970757 - RNA, 19 nt, Artificial Sequence
  Description of Artificial Sequence: Synthetic oligonucleotide
  Antisense strand to SEQ ID NO: 970756
ucuuuagccacagaccgaa

SEQ ID NO: 970758 - RNA, 19 nt, Artificial Sequence
  Description of Artificial Sequence: Synthetic oligonucleotide
  Sense strand starting at position 166 of SEQ ID NO: 914004
ucaggaaguuccuaaauca

SEQ ID NO: 970759 - RNA, 19 nt, Artificial Sequence
  Description of Artificial Sequence: Synthetic oligonucleotide
  Antisense strand to SEQ ID NO: 970758
ugauuuaggaacuuccuga

SEQ ID NO: 970760 - RNA, 19 nt, Artificial Sequence
  Description of Artificial Sequence: Synthetic oligonucleotide
  Sense strand starting at position 2371 of SEQ ID NO: 914004
uguuaaauuuccugugaac

SEQ ID NO: 970761 - RNA, 19 nt, Artificial Sequence
  Description of Artificial Sequence: Synthetic oligonucleotide
  Antisense strand to SEQ ID NO: 970760
guucacaggaaauuuaaca

SEQ ID NO: 970762 - RNA, 19 nt, Artificial Sequence
  Description of Artificial Sequence: Synthetic oligonucleotide
  Sense strand starting at position 2463 of SEQ ID NO: 914004
caaucuuggugauaauuga

SEQ ID NO: 970763 - RNA, 19 nt, Artificial Sequence
  Description of Artificial Sequence: Synthetic oligonucleotide
  Antisense strand to SEQ ID NO: 970762
ucaauuaucaccaagauug

SEQ ID NO: 970764 - RNA, 19 nt, Artificial Sequence
  Description of Artificial Sequence: Synthetic oligonucleotide
  Sense strand starting at position 1425 of SEQ ID NO: 914004
gccugaagccuuugcuacu

SEQ ID NO: 970765 - RNA, 19 nt, Artificial Sequence
  Description of Artificial Sequence: Synthetic oligonucleotide
  Antisense strand to SEQ ID NO: 970764
aguagcaaaggcuucaggc

SEQ ID NO: 970766 - RNA, 19 nt, Artificial Sequence
  Description of Artificial Sequence: Synthetic oligonucleotide
  Sense strand starting at position 2892 of SEQ ID NO: 914004
aaagauaucugaggccaga

SEQ ID NO: 970767 - RNA, 19 nt, Artificial Sequence
  Description of Artificial Sequence: Synthetic oligonucleotide
  Antisense strand to SEQ ID NO: 970766
ucuggccucagauaucuuu

SEQ ID NO: 970768 - RNA, 19 nt, Artificial Sequence
  Description of Artificial Sequence: Synthetic oligonucleotide
  Sense strand starting at position 2543 of SEQ ID NO: 914004
gugacaugauuggagaugu

SEQ ID NO: 970769 - RNA, 19 nt, Artificial Sequence
  Description of Artificial Sequence: Synthetic oligonucleotide
  Antisense strand to SEQ ID NO: 970768
acaucuccaaucaugucac

SEQ ID NO: 970770 - RNA, 19 nt, Artificial Sequence
  Description of Artificial Sequence: Synthetic oligonucleotide
  Sense strand starting at position 17 of SEQ ID NO: 914004
uaugguaaauacggauaga

SEQ ID NO: 970771 - RNA, 19 nt, Artificial Sequence
  Description of Artificial Sequence: Synthetic oligonucleotide
  Antisense strand to SEQ ID NO: 970770
ucuauccguauuuaccaua

SEQ ID NO: 970772 - RNA, 19 nt, Artificial Sequence
  Description of Artificial Sequence: Synthetic oligonucleotide
  Sense strand starting at position 2796 of SEQ ID NO: 914005
aagaacaucuggucagauu

SEQ ID NO: 970773 - RNA, 19 nt, Artificial Sequence
  Description of Artificial Sequence: Synthetic oligonucleotide
  Antisense strand to SEQ ID NO: 970772
aaucugaccagauguucuu

SEQ ID NO: 970774 - RNA, 19 nt, Artificial Sequence
  Description of Artificial Sequence: Synthetic oligonucleotide
  Sense strand starting at position 933 of SEQ ID NO: 914005
aacagauuaucugugaaug

SEQ ID NO: 970775 - RNA, 19 nt, Artificial Sequence
  Description of Artificial Sequence: Synthetic oligonucleotide
  Antisense strand to SEQ ID NO: 970774
cauucacagauaaucuguu

SEQ ID NO: 970776 - RNA, 19 nt, Artificial Sequence
  Description of Artificial Sequence: Synthetic oligonucleotide
  Sense strand starting at position 3283 of SEQ ID NO: 914005
uccagagaucccugaaauc

SEQ ID NO: 970777 - RNA, 19 nt, Artificial Sequence
  Description of Artificial Sequence: Synthetic oligonucleotide
  Antisense strand to SEQ ID NO: 970776
gauuucagggaucucugga

SEQ ID NO: 970778 - RNA, 19 nt, Artificial Sequence
  Description of Artificial Sequence: Synthetic oligonucleotide
  Sense strand starting at position 934 of SEQ ID NO: 914005
acagauuaucugugaauga

SEQ ID NO: 970779 - RNA, 19 nt, Artificial Sequence
  Description of Artificial Sequence: Synthetic oligonucleotide
  Antisense strand to SEQ ID NO: 970778
ucauucacagauaaucugu

SEQ ID NO: 970780 - RNA, 19 nt, Artificial Sequence
  Description of Artificial Sequence: Synthetic oligonucleotide
  Sense strand starting at position 938 of SEQ ID NO: 914005
auuaucugugaaugacaag

SEQ ID NO: 970781 - RNA, 19 nt, Artificial Sequence
  Description of Artificial Sequence: Synthetic oligonucleotide
  Antisense strand to SEQ ID NO: 970780
cuugucauucacagauaau

SEQ ID NO: 970782 - RNA, 19 nt, Artificial Sequence
  Description of Artificial Sequence: Synthetic oligonucleotide
  Sense strand starting at position 3531 of SEQ ID NO: 914005
aagugcuaucauuaggaug

SEQ ID NO: 970783 - RNA, 19 nt, Artificial Sequence
  Description of Artificial Sequence: Synthetic oligonucleotide
  Antisense strand to SEQ ID NO: 970782
cauccuaaugauagcacuu

SEQ ID NO: 970784 - RNA, 19 nt, Artificial Sequence
  Description of Artificial Sequence: Synthetic oligonucleotide
  Sense strand starting at position 952 of SEQ ID NO: 914005
acaagcugaucccuggaaa

SEQ ID NO: 970785 - RNA, 19 nt, Artificial Sequence
  Description of Artificial Sequence: Synthetic oligonucleotide
  Antisense strand to SEQ ID NO: 970784
uuuccagggaucagcuugu

SEQ ID NO: 970786 - RNA, 19 nt, Artificial Sequence
  Description of Artificial Sequence: Synthetic oligonucleotide
  Sense strand starting at position 3156 of SEQ ID NO: 914005
uuaucaaucgguuaaugac

SEQ ID NO: 970787 - RNA, 19 nt, Artificial Sequence
  Description of Artificial Sequence: Synthetic oligonucleotide
  Antisense strand to SEQ ID NO: 970786
gucauuaaccgauugauaa

SEQ ID NO: 970788 - RNA, 19 nt, Artificial Sequence
  Description of Artificial Sequence: Synthetic oligonucleotide
  Sense strand starting at position 3147 of SEQ ID NO: 914005
gggaaauaguuaucaaucg

SEQ ID NO: 970789 - RNA, 19 nt, Artificial Sequence
  Description of Artificial Sequence: Synthetic oligonucleotide
  Antisense strand to SEQ ID NO: 970788
cgauugauaacuauuuccc

SEQ ID NO: 970790 - RNA, 19 nt, Artificial Sequence
  Description of Artificial Sequence: Synthetic oligonucleotide
  Sense strand starting at position 953 of SEQ ID NO: 914005
caagcugaucccuggaaag

SEQ ID NO: 970791 - RNA, 19 nt, Artificial Sequence
  Description of Artificial Sequence: Synthetic oligonucleotide
  Antisense strand to SEQ ID NO: 970790
cuuuccagggaucagcuug

SEQ ID NO: 970792 - RNA, 19 nt, Artificial Sequence
  Description of Artificial Sequence: Synthetic oligonucleotide
  Sense strand starting at position 770 of SEQ ID NO: 914005
aaacguguggaaugaauaa

SEQ ID NO: 970793 - RNA, 19 nt, Artificial Sequence
  Description of Artificial Sequence: Synthetic oligonucleotide
  Antisense strand to SEQ ID NO: 970792
uuauucauuccacacguuu

SEQ ID NO: 970794 - RNA, 19 nt, Artificial Sequence
  Description of Artificial Sequence: Synthetic oligonucleotide
  Sense strand starting at position 1158 of SEQ ID NO: 914005
caggauucucaggguuaau

SEQ ID NO: 970795 - RNA, 19 nt, Artificial Sequence
  Description of Artificial Sequence: Synthetic oligonucleotide
  Antisense strand to SEQ ID NO: 970794
auuaacccugagaauccug

SEQ ID NO: 970796 - RNA, 19 nt, Artificial Sequence
  Description of Artificial Sequence: Synthetic oligonucleotide
  Sense strand starting at position 516 of SEQ ID NO: 914005
cagaucuuggcucaaaggu

SEQ ID NO: 970797 - RNA, 19 nt, Artificial Sequence
  Description of Artificial Sequence: Synthetic oligonucleotide
  Antisense strand to SEQ ID NO: 970796
accuuugagccaagaucug

SEQ ID NO: 970798 - RNA, 19 nt, Artificial Sequence
  Description of Artificial Sequence: Synthetic oligonucleotide
  Sense strand starting at position 763 of SEQ ID NO: 914005
ggacaauaaacguguggaa

SEQ ID NO: 970799 - RNA, 19 nt, Artificial Sequence
  Description of Artificial Sequence: Synthetic oligonucleotide
  Antisense strand to SEQ ID NO: 970798
uuccacacguuuauugucc

SEQ ID NO: 970800 - RNA, 19 nt, Artificial Sequence
  Description of Artificial Sequence: Synthetic oligonucleotide
  Sense strand starting at position 2695 of SEQ ID NO: 914005
agaucugggcuuugaggau

SEQ ID NO: 970801 - RNA, 19 nt, Artificial Sequence
  Description of Artificial Sequence: Synthetic oligonucleotide
  Antisense strand to SEQ ID NO: 970800
auccucaaagcccagaucu

SEQ ID NO: 970802 - RNA, 19 nt, Artificial Sequence
  Description of Artificial Sequence: Synthetic oligonucleotide
  Sense strand starting at position 3313 of SEQ ID NO: 914005
uggcaacugccuuacagaa

SEQ ID NO: 970803 - RNA, 19 nt, Artificial Sequence
  Description of Artificial Sequence: Synthetic oligonucleotide
  Antisense strand to SEQ ID NO: 970802
uucuguaaggcaguugcca

SEQ ID NO: 970804 - RNA, 19 nt, Artificial Sequence
  Description of Artificial Sequence: Synthetic oligonucleotide
  Sense strand starting at position 765 of SEQ ID NO: 914005
acaauaaacguguggaaug

SEQ ID NO: 970805 - RNA, 19 nt, Artificial Sequence
  Description of Artificial Sequence: Synthetic oligonucleotide
  Antisense strand to SEQ ID NO: 970804
cauuccacacguuuauugu

SEQ ID NO: 970806 - RNA, 19 nt, Artificial Sequence
  Description of Artificial Sequence: Synthetic oligonucleotide
  Sense strand starting at position 2679 of SEQ ID NO: 914005
cggaucugcagugaucaga

SEQ ID NO: 970807 - RNA, 19 nt, Artificial Sequence
  Description of Artificial Sequence: Synthetic oligonucleotide
  Antisense strand to SEQ ID NO: 970806
ucugaucacugcagauccg

SEQ ID NO: 970808 - RNA, 19 nt, Artificial Sequence
  Description of Artificial Sequence: Synthetic oligonucleotide
  Sense strand starting at position 176 of SEQ ID NO: 914005
cugagcacucccgaacauu

SEQ ID NO: 970809 - RNA, 19 nt, Artificial Sequence
  Description of Artificial Sequence: Synthetic oligonucleotide
  Antisense strand to SEQ ID NO: 970808
aauguucgggagugcucag

SEQ ID NO: 970810 - RNA, 19 nt, Artificial Sequence
  Description of Artificial Sequence: Synthetic oligonucleotide
  Sense strand starting at position 3960 of SEQ ID NO: 914005
auguaacuugcuugaaaga

SEQ ID NO: 970811 - RNA, 19 nt, Artificial Sequence
  Description of Artificial Sequence: Synthetic oligonucleotide
  Antisense strand to SEQ ID NO: 970810
ucuuucaagcaaguuacau

SEQ ID NO: 970812 - RNA, 19 nt, Artificial Sequence
  Description of Artificial Sequence: Synthetic oligonucleotide
  Sense strand starting at position 2403 of SEQ ID NO: 914005
agauuucaugcacgcgauu

SEQ ID NO: 970813 - RNA, 19 nt, Artificial Sequence
  Description of Artificial Sequence: Synthetic oligonucleotide
  Antisense strand to SEQ ID NO: 970812
aaucgcgugcaugaaaucu

SEQ ID NO: 970814 - RNA, 19 nt, Artificial Sequence
  Description of Artificial Sequence: Synthetic oligonucleotide
  Sense strand starting at position 1146 of SEQ ID NO: 914005
ggcugacaccgucaggauu

SEQ ID NO: 970815 - RNA, 19 nt, Artificial Sequence
  Description of Artificial Sequence: Synthetic oligonucleotide
  Antisense strand to SEQ ID NO: 970814
aauccugacggugucagcc

SEQ ID NO: 970816 - RNA, 19 nt, Artificial Sequence
  Description of Artificial Sequence: Synthetic oligonucleotide
  Sense strand starting at position 131 of SEQ ID NO: 914005
ggcuuccauccuuaacagu

SEQ ID NO: 970817 - RNA, 19 nt, Artificial Sequence
  Description of Artificial Sequence: Synthetic oligonucleotide
  Antisense strand to SEQ ID NO: 970816
acuguuaaggauggaagcc

SEQ ID NO: 970818 - RNA, 19 nt, Artificial Sequence
  Description of Artificial Sequence: Synthetic oligonucleotide
  Sense strand starting at position 2426 of SEQ ID NO: 914005
caagcagaagcgugaaaga

SEQ ID NO: 970819 - RNA, 19 nt, Artificial Sequence
  Description of Artificial Sequence: Synthetic oligonucleotide
  Antisense strand to SEQ ID NO: 970818
ucuuucacgcuucugcuug

SEQ ID NO: 970820 - RNA, 19 nt, Artificial Sequence
  Description of Artificial Sequence: Synthetic oligonucleotide
  Sense strand starting at position 3815 of SEQ ID NO: 914005
guaguugccauacagaagu

SEQ ID NO: 970821 - RNA, 19 nt, Artificial Sequence
  Description of Artificial Sequence: Synthetic oligonucleotide
  Antisense strand to SEQ ID NO: 970820
acuucuguauggcaacuac

SEQ ID NO: 970822 - RNA, 19 nt, Artificial Sequence
  Description of Artificial Sequence: Synthetic oligonucleotide
  Sense strand starting at position 3717 of SEQ ID NO: 914005
ccaucuuacugcuuggaua

SEQ ID NO: 970823 - RNA, 19 nt, Artificial Sequence
  Description of Artificial Sequence: Synthetic oligonucleotide
  Antisense strand to SEQ ID NO: 970822
uauccaagcaguaagaugg

SEQ ID NO: 970824 - RNA, 19 nt, Artificial Sequence
  Description of Artificial Sequence: Synthetic oligonucleotide
  Sense strand starting at position 2475 of SEQ ID NO: 914005
ggaaguguccuggaugugu

SEQ ID NO: 970825 - RNA, 19 nt, Artificial Sequence
  Description of Artificial Sequence: Synthetic oligonucleotide
  Antisense strand to SEQ ID NO: 970824
acacauccaggacacuucc

SEQ ID NO: 970826 - RNA, 19 nt, Artificial Sequence
  Description of Artificial Sequence: Synthetic oligonucleotide
  Sense strand starting at position 2474 of SEQ ID NO: 914005
gggaaguguccuggaugug

SEQ ID NO: 970827 - RNA, 19 nt, Artificial Sequence
  Description of Artificial Sequence: Synthetic oligonucleotide
  Antisense strand to SEQ ID NO: 970826
cacauccaggacacuuccc

SEQ ID NO: 970828 - RNA, 19 nt, Artificial Sequence
  Description of Artificial Sequence: Synthetic oligonucleotide
  Sense strand starting at position 3719 of SEQ ID NO: 914005
aucuuacugcuuggauauc

SEQ ID NO: 970829 - RNA, 19 nt, Artificial Sequence
  Description of Artificial Sequence: Synthetic oligonucleotide
  Antisense strand to SEQ ID NO: 970828
gauauccaagcaguaagau

SEQ ID NO: 970830 - RNA, 19 nt, Artificial Sequence
  Description of Artificial Sequence: Synthetic oligonucleotide
  Sense strand starting at position 3154 of SEQ ID NO: 914005
aguuaucaaucgguuaaug

SEQ ID NO: 970831 - RNA, 19 nt, Artificial Sequence
  Description of Artificial Sequence: Synthetic oligonucleotide
  Antisense strand to SEQ ID NO: 970830
cauuaaccgauugauaacu

SEQ ID NO: 970832 - RNA, 19 nt, Artificial Sequence
  Description of Artificial Sequence: Synthetic oligonucleotide
  Sense strand starting at position 678 of SEQ ID NO: 914005
augucuucucuagaacgca

SEQ ID NO: 970833 - RNA, 19 nt, Artificial Sequence
  Description of Artificial Sequence: Synthetic oligonucleotide
  Antisense strand to SEQ ID NO: 970832
ugcguucuagagaagacau

SEQ ID NO: 970834 - RNA, 19 nt, Artificial Sequence
  Description of Artificial Sequence: Synthetic oligonucleotide
  Sense strand starting at position 3915 of SEQ ID NO: 914005
aggcuauuaguuuaaacgu

SEQ ID NO: 970835 - RNA, 19 nt, Artificial Sequence
  Description of Artificial Sequence: Synthetic oligonucleotide
  Antisense strand to SEQ ID NO: 970834
acguuuaaacuaauagccu

SEQ ID NO: 970836 - RNA, 19 nt, Artificial Sequence
  Description of Artificial Sequence: Synthetic oligonucleotide
  Sense strand starting at position 2387 of SEQ ID NO: 914005
uugacuccucccugccaga

SEQ ID NO: 970837 - RNA, 19 nt, Artificial Sequence
  Description of Artificial Sequence: Synthetic oligonucleotide
  Antisense strand to SEQ ID NO: 970836
ucuggcagggaggagucaa

SEQ ID NO: 970838 - RNA, 19 nt, Artificial Sequence
  Description of Artificial Sequence: Synthetic oligonucleotide
  Sense strand starting at position 706 of SEQ ID NO: 914005
agacaaggccuuugucuuu

SEQ ID NO: 970839 - RNA, 19 nt, Artificial Sequence
  Description of Artificial Sequence: Synthetic oligonucleotide
  Antisense strand to SEQ ID NO: 970838
aaagacaaaggccuugucu

SEQ ID NO: 970840 - RNA, 19 nt, Artificial Sequence
  Description of Artificial Sequence: Synthetic oligonucleotide
  Sense strand starting at position 2811 of SEQ ID NO: 914005
gauuguaauuguuccaggu

SEQ ID NO: 970841 - RNA, 19 nt, Artificial Sequence
  Description of Artificial Sequence: Synthetic oligonucleotide
  Antisense strand to SEQ ID NO: 970840
accuggaacaauuacaauc

SEQ ID NO: 970842 - RNA, 19 nt, Artificial Sequence
  Description of Artificial Sequence: Synthetic oligonucleotide
  Sense strand starting at position 674 of SEQ ID NO: 914005
gccuaugucuucucuagaa

SEQ ID NO: 970843 - RNA, 19 nt, Artificial Sequence
  Description of Artificial Sequence: Synthetic oligonucleotide
  Antisense strand to SEQ ID NO: 970842
uucuagagaagacauaggc

SEQ ID NO: 970844 - RNA, 19 nt, Artificial Sequence
  Description of Artificial Sequence: Synthetic oligonucleotide
  Sense strand starting at position 1692 of SEQ ID NO: 914005
cucagaguuucgucagauu

SEQ ID NO: 970845 - RNA, 19 nt, Artificial Sequence
  Description of Artificial Sequence: Synthetic oligonucleotide
  Antisense strand to SEQ ID NO: 970844
aaucugacgaaacucugag

SEQ ID NO: 970846 - RNA, 19 nt, Artificial Sequence
  Description of Artificial Sequence: Synthetic oligonucleotide
  Sense strand starting at position 3683 of SEQ ID NO: 914005
gcucaugacccaugcuuua

SEQ ID NO: 970847 - RNA, 19 nt, Artificial Sequence
  Description of Artificial Sequence: Synthetic oligonucleotide
  Antisense strand to SEQ ID NO: 970846
uaaagcaugggucaugagc

SEQ ID NO: 970848 - RNA, 19 nt, Artificial Sequence
  Description of Artificial Sequence: Synthetic oligonucleotide
  Sense strand starting at position 109 of SEQ ID NO: 914005
cucuuauauuugggacuuu

SEQ ID NO: 970849 - RNA, 19 nt, Artificial Sequence
  Description of Artificial Sequence: Synthetic oligonucleotide
  Antisense strand to SEQ ID NO: 970848
aaagucccaaauauaagag

SEQ ID NO: 970850 - RNA, 19 nt, Artificial Sequence
  Description of Artificial Sequence: Synthetic oligonucleotide
  Sense strand starting at position 108 of SEQ ID NO: 914005
ccucuuauauuugggacuu

SEQ ID NO: 970851 - RNA, 19 nt, Artificial Sequence
  Description of Artificial Sequence: Synthetic oligonucleotide
  Antisense strand to SEQ ID NO: 970850
aagucccaaauauaagagg

SEQ ID NO: 970852 - RNA, 19 nt, Artificial Sequence
  Description of Artificial Sequence: Synthetic oligonucleotide
  Sense strand starting at position 1120 of SEQ ID NO: 914006
guuguuucgcccuucugaa

SEQ ID NO: 970853 - RNA, 19 nt, Artificial Sequence
  Description of Artificial Sequence: Synthetic oligonucleotide
  Antisense strand to SEQ ID NO: 970852
uucagaagggcgaaacaac

SEQ ID NO: 970854 - RNA, 19 nt, Artificial Sequence
  Description of Artificial Sequence: Synthetic oligonucleotide
  Sense strand starting at position 1119 of SEQ ID NO: 914006
aguuguuucgcccuucuga

SEQ ID NO: 970855 - RNA, 19 nt, Artificial Sequence
  Description of Artificial Sequence: Synthetic oligonucleotide
  Antisense strand to SEQ ID NO: 970854
ucagaagggcgaaacaacu

SEQ ID NO: 970856 - RNA, 19 nt, Artificial Sequence
  Description of Artificial Sequence: Synthetic oligonucleotide
  Sense strand starting at position 1360 of SEQ ID NO: 914006
auaugcaaacgucaauaua

SEQ ID NO: 970857 - RNA, 19 nt, Artificial Sequence
  Description of Artificial Sequence: Synthetic oligonucleotide
  Antisense strand to SEQ ID NO: 970856
uauauugacguuugcauau

SEQ ID NO: 970858 - RNA, 19 nt, Artificial Sequence
  Description of Artificial Sequence: Synthetic oligonucleotide
  Sense strand starting at position 1363 of SEQ ID NO: 914006
ugcaaacgucaauauagau

SEQ ID NO: 970859 - RNA, 19 nt, Artificial Sequence
  Description of Artificial Sequence: Synthetic oligonucleotide
  Antisense strand to SEQ ID NO: 970858
aucuauauugacguuugca

SEQ ID NO: 970860 - RNA, 19 nt, Artificial Sequence
  Description of Artificial Sequence: Synthetic oligonucleotide
  Sense strand starting at position 3159 of SEQ ID NO: 914006
gggcaagacguuuauccaa

SEQ ID NO: 970861 - RNA, 19 nt, Artificial Sequence
  Description of Artificial Sequence: Synthetic oligonucleotide
  Antisense strand to SEQ ID NO: 970860
uuggauaaacgucuugccc

SEQ ID NO: 970862 - RNA, 19 nt, Artificial Sequence
  Description of Artificial Sequence: Synthetic oligonucleotide
  Sense strand starting at position 2829 of SEQ ID NO: 914006
gguaccguuaaagauguaa

SEQ ID NO: 970863 - RNA, 19 nt, Artificial Sequence
  Description of Artificial Sequence: Synthetic oligonucleotide
  Antisense strand to SEQ ID NO: 970862
uuacaucuuuaacgguacc

SEQ ID NO: 970864 - RNA, 19 nt, Artificial Sequence
  Description of Artificial Sequence: Synthetic oligonucleotide
  Sense strand starting at position 930 of SEQ ID NO: 914006
caacgugcucgcucucuua

SEQ ID NO: 970865 - RNA, 19 nt, Artificial Sequence
  Description of Artificial Sequence: Synthetic oligonucleotide
  Antisense strand to SEQ ID NO: 970864
uaagagagcgagcacguug

SEQ ID NO: 970866 - RNA, 19 nt, Artificial Sequence
  Description of Artificial Sequence: Synthetic oligonucleotide
  Sense strand starting at position 674 of SEQ ID NO: 914006
cccauauaucgugacuuac

SEQ ID NO: 970867 - RNA, 19 nt, Artificial Sequence
  Description of Artificial Sequence: Synthetic oligonucleotide
  Antisense strand to SEQ ID NO: 970866
guaagucacgauauauggg

SEQ ID NO: 970868 - RNA, 19 nt, Artificial Sequence
  Description of Artificial Sequence: Synthetic oligonucleotide
  Sense strand starting at position 2897 of SEQ ID NO: 914006
ccuguaacgagacagcuua

SEQ ID NO: 970869 - RNA, 19 nt, Artificial Sequence
  Description of Artificial Sequence: Synthetic oligonucleotide
  Antisense strand to SEQ ID NO: 970868
uaagcugucucguuacagg

SEQ ID NO: 970870 - RNA, 19 nt, Artificial Sequence
  Description of Artificial Sequence: Synthetic oligonucleotide
  Sense strand starting at position 76 of SEQ ID NO: 914006
gcagccagcccuuaaacua

SEQ ID NO: 970871 - RNA, 19 nt, Artificial Sequence
  Description of Artificial Sequence: Synthetic oligonucleotide
  Antisense strand to SEQ ID NO: 970870
uaguuuaagggcuggcugc

SEQ ID NO: 970872 - RNA, 19 nt, Artificial Sequence
  Description of Artificial Sequence: Synthetic oligonucleotide
  Sense strand starting at position 3166 of SEQ ID NO: 914006
acguuuauccaaggucaca

SEQ ID NO: 970873 - RNA, 19 nt, Artificial Sequence
  Description of Artificial Sequence: Synthetic oligonucleotide
  Antisense strand to SEQ ID NO: 970872
ugugaccuuggauaaacgu

SEQ ID NO: 970874 - RNA, 19 nt, Artificial Sequence
  Description of Artificial Sequence: Synthetic oligonucleotide
  Sense strand starting at position 2412 of SEQ ID NO: 914006
agaauaaguagucguguaa

SEQ ID NO: 970875 - RNA, 19 nt, Artificial Sequence
  Description of Artificial Sequence: Synthetic oligonucleotide
  Antisense strand to SEQ ID NO: 970874
uuacacgacuacuuauucu

SEQ ID NO: 970876 - RNA, 19 nt, Artificial Sequence
  Description of Artificial Sequence: Synthetic oligonucleotide
  Sense strand starting at position 2411 of SEQ ID NO: 914006
uagaauaaguagucgugua

SEQ ID NO: 970877 - RNA, 19 nt, Artificial Sequence
  Description of Artificial Sequence: Synthetic oligonucleotide
  Antisense strand to SEQ ID NO: 970876
uacacgacuacuuauucua

SEQ ID NO: 970878 - RNA, 19 nt, Artificial Sequence
  Description of Artificial Sequence: Synthetic oligonucleotide
  Sense strand starting at position 3977 of SEQ ID NO: 914006
gcuccaugcagagguuaca

SEQ ID NO: 970879 - RNA, 19 nt, Artificial Sequence
  Description of Artificial Sequence: Synthetic oligonucleotide
  Antisense strand to SEQ ID NO: 970878
uguaaccucugcauggagc

SEQ ID NO: 970880 - RNA, 19 nt, Artificial Sequence
  Description of Artificial Sequence: Synthetic oligonucleotide
  Sense strand starting at position 3271 of SEQ ID NO: 914006
ugcaauccgcucuggagaa

SEQ ID NO: 970881 - RNA, 19 nt, Artificial Sequence
  Description of Artificial Sequence: Synthetic oligonucleotide
  Antisense strand to SEQ ID NO: 970880
uucuccagagcggauugca

SEQ ID NO: 970882 - RNA, 19 nt, Artificial Sequence
  Description of Artificial Sequence: Synthetic oligonucleotide
  Sense strand starting at position 324 of SEQ ID NO: 914006
gccaauagcgugcaagacu

SEQ ID NO: 970883 - RNA, 19 nt, Artificial Sequence
  Description of Artificial Sequence: Synthetic oligonucleotide
  Antisense strand to SEQ ID NO: 970882
agucuugcacgcuauuggc

SEQ ID NO: 970884 - RNA, 19 nt, Artificial Sequence
  Description of Artificial Sequence: Synthetic oligonucleotide
  Sense strand starting at position 2182 of SEQ ID NO: 914006
uugaauaggucagagauua

SEQ ID NO: 970885 - RNA, 19 nt, Artificial Sequence
  Description of Artificial Sequence: Synthetic oligonucleotide
  Antisense strand to SEQ ID NO: 970884
uaaucucugaccuauucaa

SEQ ID NO: 970886 - RNA, 19 nt, Artificial Sequence
  Description of Artificial Sequence: Synthetic oligonucleotide
  Sense strand starting at position 2827 of SEQ ID NO: 914006
gugguaccguuaaagaugu

SEQ ID NO: 970887 - RNA, 19 nt, Artificial Sequence
  Description of Artificial Sequence: Synthetic oligonucleotide
  Antisense strand to SEQ ID NO: 970886
acaucuuuaacgguaccac

SEQ ID NO: 970888 - RNA, 19 nt, Artificial Sequence
  Description of Artificial Sequence: Synthetic oligonucleotide
  Sense strand starting at position 1117 of SEQ ID NO: 914006
ugaguuguuucgcccuucu

SEQ ID NO: 970889 - RNA, 19 nt, Artificial Sequence
  Description of Artificial Sequence: Synthetic oligonucleotide
  Antisense strand to SEQ ID NO: 970888
agaagggcgaaacaacuca

SEQ ID NO: 970890 - RNA, 19 nt, Artificial Sequence
  Description of Artificial Sequence: Synthetic oligonucleotide
  Sense strand starting at position 3450 of SEQ ID NO: 914006
gggacaagauguggucuca

SEQ ID NO: 970891 - RNA, 19 nt, Artificial Sequence
  Description of Artificial Sequence: Synthetic oligonucleotide
  Antisense strand to SEQ ID NO: 970890
ugagaccacaucuuguccc

SEQ ID NO: 970892 - RNA, 19 nt, Artificial Sequence
  Description of Artificial Sequence: Synthetic oligonucleotide
  Sense strand starting at position 1441 of SEQ ID NO: 914006
gccaaaguguccugcggga

SEQ ID NO: 970893 - RNA, 19 nt, Artificial Sequence
  Description of Artificial Sequence: Synthetic oligonucleotide
  Antisense strand to SEQ ID NO: 970892
ucccgcaggacacuuuggc

SEQ ID NO: 970894 - RNA, 19 nt, Artificial Sequence
  Description of Artificial Sequence: Synthetic oligonucleotide
  Sense strand starting at position 1637 of SEQ ID NO: 914007
gauggugaccucggaagga

SEQ ID NO: 970895 - RNA, 19 nt, Artificial Sequence
  Description of Artificial Sequence: Synthetic oligonucleotide
  Antisense strand to SEQ ID NO: 970894
uccuuccgaggucaccauc

SEQ ID NO: 970896 - RNA, 19 nt, Artificial Sequence
  Description of Artificial Sequence: Synthetic oligonucleotide
  Sense strand starting at position 293 of SEQ ID NO: 914007
caaguauguguguaaugaa

SEQ ID NO: 970897 - RNA, 19 nt, Artificial Sequence
  Description of Artificial Sequence: Synthetic oligonucleotide
  Antisense strand to SEQ ID NO: 970896
uucauuacacacauacuug

SEQ ID NO: 970898 - RNA, 19 nt, Artificial Sequence
  Description of Artificial Sequence: Synthetic oligonucleotide
  Sense strand starting at position 285 of SEQ ID NO: 914007
agucauaacaaguaugugu

SEQ ID NO: 970899 - RNA, 19 nt, Artificial Sequence
  Description of Artificial Sequence: Synthetic oligonucleotide
  Antisense strand to SEQ ID NO: 970898
acacauacuuguuaugacu

SEQ ID NO: 970900 - RNA, 19 nt, Artificial Sequence
  Description of Artificial Sequence: Synthetic oligonucleotide
  Sense strand starting at position 437 of SEQ ID NO: 914007
gagaccuacugcucacagu

SEQ ID NO: 970901 - RNA, 19 nt, Artificial Sequence
  Description of Artificial Sequence: Synthetic oligonucleotide
  Antisense strand to SEQ ID NO: 970900
acugugagcaguaggucuc

SEQ ID NO: 970902 - RNA, 19 nt, Artificial Sequence
  Description of Artificial Sequence: Synthetic oligonucleotide
  Sense strand starting at position 406 of SEQ ID NO: 914007
cacagagguccagguguau

SEQ ID NO: 970903 - RNA, 19 nt, Artificial Sequence
  Description of Artificial Sequence: Synthetic oligonucleotide
  Antisense strand to SEQ ID NO: 970902
auacaccuggaccucugug

SEQ ID NO: 970904 - RNA, 19 nt, Artificial Sequence
  Description of Artificial Sequence: Synthetic oligonucleotide
  Sense strand starting at position 289 of SEQ ID NO: 914007
auaacaaguauguguguaa

SEQ ID NO: 970905 - RNA, 19 nt, Artificial Sequence
  Description of Artificial Sequence: Synthetic oligonucleotide
  Antisense strand to SEQ ID NO: 970904
uuacacacauacuuguuau

SEQ ID NO: 970906 - RNA, 19 nt, Artificial Sequence
  Description of Artificial Sequence: Synthetic oligonucleotide
  Sense strand starting at position 292 of SEQ ID NO: 914007
acaaguauguguguaauga

SEQ ID NO: 970907 - RNA, 19 nt, Artificial Sequence
  Description of Artificial Sequence: Synthetic oligonucleotide
  Antisense strand to SEQ ID NO: 970906
ucauuacacacauacuugu

SEQ ID NO: 970908 - RNA, 19 nt, Artificial Sequence
  Description of Artificial Sequence: Synthetic oligonucleotide
  Sense strand starting at position 290 of SEQ ID NO: 914007
uaacaaguauguguguaau

SEQ ID NO: 970909 - RNA, 19 nt, Artificial Sequence
  Description of Artificial Sequence: Synthetic oligonucleotide
  Antisense strand to SEQ ID NO: 970908
auuacacacauacuuguua

SEQ ID NO: 970910 - RNA, 19 nt, Artificial Sequence
  Description of Artificial Sequence: Synthetic oligonucleotide
  Sense strand starting at position 1579 of SEQ ID NO: 914007
gaaagagccgcuggaguua

SEQ ID NO: 970911 - RNA, 19 nt, Artificial Sequence
  Description of Artificial Sequence: Synthetic oligonucleotide
  Antisense strand to SEQ ID NO: 970910
uaacuccagcggcucuuuc

SEQ ID NO: 970912 - RNA, 19 nt, Artificial Sequence
  Description of Artificial Sequence: Synthetic oligonucleotide
  Sense strand starting at position 3362 of SEQ ID NO: 914007
cggacucgcagguaauagu

SEQ ID NO: 970913 - RNA, 19 nt, Artificial Sequence
  Description of Artificial Sequence: Synthetic oligonucleotide
  Antisense strand to SEQ ID NO: 970912
acuauuaccugcgaguccg

SEQ ID NO: 970914 - RNA, 19 nt, Artificial Sequence
  Description of Artificial Sequence: Synthetic oligonucleotide
  Sense strand starting at position 1767 of SEQ ID NO: 914007
gcgccagauuugucgcacu

SEQ ID NO: 970915 - RNA, 19 nt, Artificial Sequence
  Description of Artificial Sequence: Synthetic oligonucleotide
  Antisense strand to SEQ ID NO: 970914
agugcgacaaaucuggcgc

SEQ ID NO: 970916 - RNA, 19 nt, Artificial Sequence
  Description of Artificial Sequence: Synthetic oligonucleotide
  Sense strand starting at position 3707 of SEQ ID NO: 914007
ggcaaauacucgguagcga

SEQ ID NO: 970917 - RNA, 19 nt, Artificial Sequence
  Description of Artificial Sequence: Synthetic oligonucleotide
  Antisense strand to SEQ ID NO: 970916
ucgcuaccgaguauuugcc

SEQ ID NO: 970918 - RNA, 19 nt, Artificial Sequence
  Description of Artificial Sequence: Synthetic oligonucleotide
  Sense strand starting at position 3360 of SEQ ID NO: 914007
ggcggacucgcagguaaua

SEQ ID NO: 970919 - RNA, 19 nt, Artificial Sequence
  Description of Artificial Sequence: Synthetic oligonucleotide
  Antisense strand to SEQ ID NO: 970918
uauuaccugcgaguccgcc

SEQ ID NO: 970920 - RNA, 19 nt, Artificial Sequence
  Description of Artificial Sequence: Synthetic oligonucleotide
  Sense strand starting at position 173 of SEQ ID NO: 914007
ggacaaauaugucaguaca

SEQ ID NO: 970921 - RNA, 19 nt, Artificial Sequence
  Description of Artificial Sequence: Synthetic oligonucleotide
  Antisense strand to SEQ ID NO: 970920
uguacugacauauuugucc

SEQ ID NO: 970922 - RNA, 19 nt, Artificial Sequence
  Description of Artificial Sequence: Synthetic oligonucleotide
  Sense strand starting at position 1439 of SEQ ID NO: 914007
uuccuugcugccugaguua

SEQ ID NO: 970923 - RNA, 19 nt, Artificial Sequence
  Description of Artificial Sequence: Synthetic oligonucleotide
  Antisense strand to SEQ ID NO: 970922
uaacucaggcagcaaggaa

SEQ ID NO: 970924 - RNA, 19 nt, Artificial Sequence
  Description of Artificial Sequence: Synthetic oligonucleotide
  Sense strand starting at position 1590 of SEQ ID NO: 914007
uggaguuacuauggcaacu

SEQ ID NO: 970925 - RNA, 19 nt, Artificial Sequence
  Description of Artificial Sequence: Synthetic oligonucleotide
  Antisense strand to SEQ ID NO: 970924
aguugccauaguaacucca

SEQ ID NO: 970926 - RNA, 19 nt, Artificial Sequence
  Description of Artificial Sequence: Synthetic oligonucleotide
  Sense strand starting at position 1844 of SEQ ID NO: 914008
gauggugaccucggaagga

SEQ ID NO: 970927 - RNA, 19 nt, Artificial Sequence
  Description of Artificial Sequence: Synthetic oligonucleotide
  Antisense strand to SEQ ID NO: 970926
uccuuccgaggucaccauc

SEQ ID NO: 970928 - RNA, 19 nt, Artificial Sequence
  Description of Artificial Sequence: Synthetic oligonucleotide
  Sense strand starting at position 500 of SEQ ID NO: 914008
caaguauguguguaaugaa

SEQ ID NO: 970929 - RNA, 19 nt, Artificial Sequence
  Description of Artificial Sequence: Synthetic oligonucleotide
  Antisense strand to SEQ ID NO: 970928
uucauuacacacauacuug

SEQ ID NO: 970930 - RNA, 19 nt, Artificial Sequence
  Description of Artificial Sequence: Synthetic oligonucleotide
  Sense strand starting at position 492 of SEQ ID NO: 914008
agucauaacaaguaugugu

SEQ ID NO: 970931 - RNA, 19 nt, Artificial Sequence
  Description of Artificial Sequence: Synthetic oligonucleotide
  Antisense strand to SEQ ID NO: 970930
acacauacuuguuaugacu

SEQ ID NO: 970932 - RNA, 19 nt, Artificial Sequence
  Description of Artificial Sequence: Synthetic oligonucleotide
  Sense strand starting at position 644 of SEQ ID NO: 914008
gagaccuacugcucacagu

SEQ ID NO: 970933 - RNA, 19 nt, Artificial Sequence
  Description of Artificial Sequence: Synthetic oligonucleotide
  Antisense strand to SEQ ID NO: 970932
acugugagcaguaggucuc

SEQ ID NO: 970934 - RNA, 19 nt, Artificial Sequence
  Description of Artificial Sequence: Synthetic oligonucleotide
  Sense strand starting at position 613 of SEQ ID NO: 914008
cacagagguccagguguau

SEQ ID NO: 970935 - RNA, 19 nt, Artificial Sequence
  Description of Artificial Sequence: Synthetic oligonucleotide
  Antisense strand to SEQ ID NO: 970934
auacaccuggaccucugug

SEQ ID NO: 970936 - RNA, 19 nt, Artificial Sequence
  Description of Artificial Sequence: Synthetic oligonucleotide
  Sense strand starting at position 496 of SEQ ID NO: 914008
auaacaaguauguguguaa

SEQ ID NO: 970937 - RNA, 19 nt, Artificial Sequence
  Description of Artificial Sequence: Synthetic oligonucleotide
  Antisense strand to SEQ ID NO: 970936
uuacacacauacuuguuau

SEQ ID NO: 970938 - RNA, 19 nt, Artificial Sequence
  Description of Artificial Sequence: Synthetic oligonucleotide
  Sense strand starting at position 499 of SEQ ID NO: 914008
acaaguauguguguaauga

SEQ ID NO: 970939 - RNA, 19 nt, Artificial Sequence
  Description of Artificial Sequence: Synthetic oligonucleotide
  Antisense strand to SEQ ID NO: 970938
ucauuacacacauacuugu

SEQ ID NO: 970940 - RNA, 19 nt, Artificial Sequence
  Description of Artificial Sequence: Synthetic oligonucleotide
  Sense strand starting at position 497 of SEQ ID NO: 914008
uaacaaguauguguguaau

SEQ ID NO: 970941 - RNA, 19 nt, Artificial Sequence
  Description of Artificial Sequence: Synthetic oligonucleotide
  Antisense strand to SEQ ID NO: 970940
auuacacacauacuuguua

SEQ ID NO: 970942 - RNA, 19 nt, Artificial Sequence
  Description of Artificial Sequence: Synthetic oligonucleotide
  Sense strand starting at position 1786 of SEQ ID NO: 914008
gaaagagccgcuggaguua

SEQ ID NO: 970943 - RNA, 19 nt, Artificial Sequence
  Description of Artificial Sequence: Synthetic oligonucleotide
  Antisense strand to SEQ ID NO: 970942
uaacuccagcggcucuuuc

SEQ ID NO: 970944 - RNA, 19 nt, Artificial Sequence
  Description of Artificial Sequence: Synthetic oligonucleotide
  Sense strand starting at position 3569 of SEQ ID NO: 914008
cggacucgcagguaauagu

SEQ ID NO: 970945 - RNA, 19 nt, Artificial Sequence
  Description of Artificial Sequence: Synthetic oligonucleotide
  Antisense strand to SEQ ID NO: 970944
acuauuaccugcgaguccg

SEQ ID NO: 970946 - RNA, 19 nt, Artificial Sequence
  Description of Artificial Sequence: Synthetic oligonucleotide
  Sense strand starting at position 1974 of SEQ ID NO: 914008
gcgccagauuugucgcacu

SEQ ID NO: 970947 - RNA, 19 nt, Artificial Sequence
  Description of Artificial Sequence: Synthetic oligonucleotide
  Antisense strand to SEQ ID NO: 970946
agugcgacaaaucuggcgc

SEQ ID NO: 970948 - RNA, 19 nt, Artificial Sequence
  Description of Artificial Sequence: Synthetic oligonucleotide
  Sense strand starting at position 3914 of SEQ ID NO: 914008
ggcaaauacucgguagcga

SEQ ID NO: 970949 - RNA, 19 nt, Artificial Sequence
  Description of Artificial Sequence: Synthetic oligonucleotide
  Antisense strand to SEQ ID NO: 970948
ucgcuaccgaguauuugcc

SEQ ID NO: 970950 - RNA, 19 nt, Artificial Sequence
  Description of Artificial Sequence: Synthetic oligonucleotide
  Sense strand starting at position 3567 of SEQ ID NO: 914008
ggcggacucgcagguaaua

SEQ ID NO: 970951 - RNA, 19 nt, Artificial Sequence
  Description of Artificial Sequence: Synthetic oligonucleotide
  Antisense strand to SEQ ID NO: 970950
uauuaccugcgaguccgcc

SEQ ID NO: 970952 - RNA, 19 nt, Artificial Sequence
  Description of Artificial Sequence: Synthetic oligonucleotide
  Sense strand starting at position 380 of SEQ ID NO: 914008
ggacaaauaugucaguaca

SEQ ID NO: 970953 - RNA, 19 nt, Artificial Sequence
  Description of Artificial Sequence: Synthetic oligonucleotide
  Antisense strand to SEQ ID NO: 970952
uguacugacauauuugucc

SEQ ID NO: 970954 - RNA, 19 nt, Artificial Sequence
  Description of Artificial Sequence: Synthetic oligonucleotide
  Sense strand starting at position 1646 of SEQ ID NO: 914008
uuccuugcugccugaguua

SEQ ID NO: 970955 - RNA, 19 nt, Artificial Sequence
  Description of Artificial Sequence: Synthetic oligonucleotide
  Antisense strand to SEQ ID NO: 970954
uaacucaggcagcaaggaa

SEQ ID NO: 970956 - RNA, 19 nt, Artificial Sequence
  Description of Artificial Sequence: Synthetic oligonucleotide
  Sense strand starting at position 1797 of SEQ ID NO: 914008
uggaguuacuauggcaacu

SEQ ID NO: 970957 - RNA, 19 nt, Artificial Sequence
  Description of Artificial Sequence: Synthetic oligonucleotide
  Antisense strand to SEQ ID NO: 970956
aguugccauaguaacucca

SEQ ID NO: 970958 - RNA, 19 nt, Artificial Sequence
  Description of Artificial Sequence: Synthetic oligonucleotide
  Sense strand starting at position 2427 of SEQ ID NO: 914009
gauggugaccucggaagga

SEQ ID NO: 970959 - RNA, 19 nt, Artificial Sequence
  Description of Artificial Sequence: Synthetic oligonucleotide
  Antisense strand to SEQ ID NO: 970958
uccuuccgaggucaccauc

SEQ ID NO: 970960 - RNA, 19 nt, Artificial Sequence
  Description of Artificial Sequence: Synthetic oligonucleotide
  Sense strand starting at position 94 of SEQ ID NO: 914009
ccugguaauaugggaucau

SEQ ID NO: 970961 - RNA, 19 nt, Artificial Sequence
  Description of Artificial Sequence: Synthetic oligonucleotide
  Antisense strand to SEQ ID NO: 970960
augaucccauauuaccagg

SEQ ID NO: 970962 - RNA, 19 nt, Artificial Sequence
  Description of Artificial Sequence: Synthetic oligonucleotide
  Sense strand starting at position 450 of SEQ ID NO: 914009
guuauauagggaugcugaa

SEQ ID NO: 970963 - RNA, 19 nt, Artificial Sequence
  Description of Artificial Sequence: Synthetic oligonucleotide
  Antisense strand to SEQ ID NO: 970962
uucagcaucccuauauaac

SEQ ID NO: 970964 - RNA, 19 nt, Artificial Sequence
  Description of Artificial Sequence: Synthetic oligonucleotide
  Sense strand starting at position 1083 of SEQ ID NO: 914009
caaguauguguguaaugaa

SEQ ID NO: 970965 - RNA, 19 nt, Artificial Sequence
  Description of Artificial Sequence: Synthetic oligonucleotide
  Antisense strand to SEQ ID NO: 970964
uucauuacacacauacuug

SEQ ID NO: 970966 - RNA, 19 nt, Artificial Sequence
  Description of Artificial Sequence: Synthetic oligonucleotide
  Sense strand starting at position 1075 of SEQ ID NO: 914009
agucauaacaaguaugugu

SEQ ID NO: 970967 - RNA, 19 nt, Artificial Sequence
  Description of Artificial Sequence: Synthetic oligonucleotide
  Antisense strand to SEQ ID NO: 970966
acacauacuuguuaugacu

SEQ ID NO: 970968 - RNA, 19 nt, Artificial Sequence
  Description of Artificial Sequence: Synthetic oligonucleotide
  Sense strand starting at position 4 of SEQ ID NO: 914009
gugaacugccaaggaguua

SEQ ID NO: 970969 - RNA, 19 nt, Artificial Sequence
  Description of Artificial Sequence: Synthetic oligonucleotide
  Antisense strand to SEQ ID NO: 970968
uaacuccuuggcaguucac

SEQ ID NO: 970970 - RNA, 19 nt, Artificial Sequence
  Description of Artificial Sequence: Synthetic oligonucleotide
  Sense strand starting at position 85 of SEQ ID NO: 914009
cuagcacacccugguaaua

SEQ ID NO: 970971 - RNA, 19 nt, Artificial Sequence
  Description of Artificial Sequence: Synthetic oligonucleotide
  Antisense strand to SEQ ID NO: 970970
uauuaccagggugugcuag

SEQ ID NO: 970972 - RNA, 19 nt, Artificial Sequence
  Description of Artificial Sequence: Synthetic oligonucleotide
  Sense strand starting at position 1227 of SEQ ID NO: 914009
gagaccuacugcucacagu

SEQ ID NO: 970973 - RNA, 19 nt, Artificial Sequence
  Description of Artificial Sequence: Synthetic oligonucleotide
  Antisense strand to SEQ ID NO: 970972
acugugagcaguaggucuc

SEQ ID NO: 970974 - RNA, 19 nt, Artificial Sequence
  Description of Artificial Sequence: Synthetic oligonucleotide
  Sense strand starting at position 1196 of SEQ ID NO: 914009
cacagagguccagguguau

SEQ ID NO: 970975 - RNA, 19 nt, Artificial Sequence
  Description of Artificial Sequence: Synthetic oligonucleotide
  Antisense strand to SEQ ID NO: 970974
auacaccuggaccucugug

SEQ ID NO: 970976 - RNA, 19 nt, Artificial Sequence
  Description of Artificial Sequence: Synthetic oligonucleotide
  Sense strand starting at position 1079 of SEQ ID NO: 914009
auaacaaguauguguguaa

SEQ ID NO: 970977 - RNA, 19 nt, Artificial Sequence
  Description of Artificial Sequence: Synthetic oligonucleotide
  Antisense strand to SEQ ID NO: 970976
uuacacacauacuuguuau

SEQ ID NO: 970978 - RNA, 19 nt, Artificial Sequence
  Description of Artificial Sequence: Synthetic oligonucleotide
  Sense strand starting at position 1082 of SEQ ID NO: 914009
acaaguauguguguaauga

SEQ ID NO: 970979 - RNA, 19 nt, Artificial Sequence
  Description of Artificial Sequence: Synthetic oligonucleotide
  Antisense strand to SEQ ID NO: 970978
ucauuacacacauacuugu

SEQ ID NO: 970980 - RNA, 19 nt, Artificial Sequence
  Description of Artificial Sequence: Synthetic oligonucleotide
  Sense strand starting at position 337 of SEQ ID NO: 914009
gccagcugucaccaucaua

SEQ ID NO: 970981 - RNA, 19 nt, Artificial Sequence
  Description of Artificial Sequence: Synthetic oligonucleotide
  Antisense strand to SEQ ID NO: 970980
uaugauggugacagcuggc

SEQ ID NO: 970982 - RNA, 19 nt, Artificial Sequence
  Description of Artificial Sequence: Synthetic oligonucleotide
  Sense strand starting at position 1080 of SEQ ID NO: 914009
uaacaaguauguguguaau

SEQ ID NO: 970983 - RNA, 19 nt, Artificial Sequence
  Description of Artificial Sequence: Synthetic oligonucleotide
  Antisense strand to SEQ ID NO: 970982
auuacacacauacuuguua

SEQ ID NO: 970984 - RNA, 19 nt, Artificial Sequence
  Description of Artificial Sequence: Synthetic oligonucleotide
  Sense strand starting at position 2369 of SEQ ID NO: 914009
gaaagagccgcuggaguua

SEQ ID NO: 970985 - RNA, 19 nt, Artificial Sequence
  Description of Artificial Sequence: Synthetic oligonucleotide
  Antisense strand to SEQ ID NO: 970984
uaacuccagcggcucuuuc

SEQ ID NO: 970986 - RNA, 19 nt, Artificial Sequence
  Description of Artificial Sequence: Synthetic oligonucleotide
  Sense strand starting at position 2557 of SEQ ID NO: 914009
gcgccagauuugucgcacu

SEQ ID NO: 970987 - RNA, 19 nt, Artificial Sequence
  Description of Artificial Sequence: Synthetic oligonucleotide
  Antisense strand to SEQ ID NO: 970986
agugcgacaaaucuggcgc

SEQ ID NO: 970988 - RNA, 19 nt, Artificial Sequence
  Description of Artificial Sequence: Synthetic oligonucleotide
  Sense strand starting at position 963 of SEQ ID NO: 914009
ggacaaauaugucaguaca

SEQ ID NO: 970989 - RNA, 19 nt, Artificial Sequence
  Description of Artificial Sequence: Synthetic oligonucleotide
  Antisense strand to SEQ ID NO: 970988
uguacugacauauuugucc

SEQ ID NO: 970990 - RNA, 19 nt, Artificial Sequence
  Description of Artificial Sequence: Synthetic oligonucleotide
  Sense strand starting at position 95 of SEQ ID NO: 914009
cugguaauaugggaucauu

SEQ ID NO: 970991 - RNA, 19 nt, Artificial Sequence
  Description of Artificial Sequence: Synthetic oligonucleotide
  Antisense strand to SEQ ID NO: 970990
aaugaucccauauuaccag

SEQ ID NO: 970992 - RNA, 19 nt, Artificial Sequence
  Description of Artificial Sequence: Synthetic oligonucleotide
  Sense strand starting at position 279 of SEQ ID NO: 914009
uggagcuacuucuagaaua

SEQ ID NO: 970993 - RNA, 19 nt, Artificial Sequence
  Description of Artificial Sequence: Synthetic oligonucleotide
  Antisense strand to SEQ ID NO: 970992
uauucuagaaguagcucca

SEQ ID NO: 970994 - RNA, 19 nt, Artificial Sequence
  Description of Artificial Sequence: Synthetic oligonucleotide
  Sense strand starting at position 2229 of SEQ ID NO: 914009
uuccuugcugccugaguua

SEQ ID NO: 970995 - RNA, 19 nt, Artificial Sequence
  Description of Artificial Sequence: Synthetic oligonucleotide
  Antisense strand to SEQ ID NO: 970994
uaacucaggcagcaaggaa

SEQ ID NO: 970996 - RNA, 19 nt, Artificial Sequence
  Description of Artificial Sequence: Synthetic oligonucleotide
  Sense strand starting at position 2380 of SEQ ID NO: 914009
uggaguuacuauggcaacu

SEQ ID NO: 970997 - RNA, 19 nt, Artificial Sequence
  Description of Artificial Sequence: Synthetic oligonucleotide
  Antisense strand to SEQ ID NO: 970996
aguugccauaguaacucca

SEQ ID NO: 970998 - RNA, 19 nt, Artificial Sequence
  Description of Artificial Sequence: Synthetic oligonucleotide
  Sense strand starting at position 447 of SEQ ID NO: 914009
gguguuauauagggaugcu

SEQ ID NO: 970999 - RNA, 19 nt, Artificial Sequence
  Description of Artificial Sequence: Synthetic oligonucleotide
  Antisense strand to SEQ ID NO: 970998
agcaucccuauauaacacc

SEQ ID NO: 971000 - RNA, 19 nt, Artificial Sequence
  Description of Artificial Sequence: Synthetic oligonucleotide
  Sense strand starting at position 260 of SEQ ID NO: 914009
cggaguucuuauggcacuu

SEQ ID NO: 971001 - RNA, 19 nt, Artificial Sequence
  Description of Artificial Sequence: Synthetic oligonucleotide
  Antisense strand to SEQ ID NO: 971000
aagugccauaagaacuccg

SEQ ID NO: 971002 - RNA, 19 nt, Artificial Sequence
  Description of Artificial Sequence: Synthetic oligonucleotide
  Sense strand starting at position 552 of SEQ ID NO: 914010
gagaaacacgaauguaauc

SEQ ID NO: 971003 - RNA, 19 nt, Artificial Sequence
  Description of Artificial Sequence: Synthetic oligonucleotide
  Antisense strand to SEQ ID NO: 971002
gauuacauucguguuucuc

SEQ ID NO: 971004 - RNA, 19 nt, Artificial Sequence
  Description of Artificial Sequence: Synthetic oligonucleotide
  Sense strand starting at position 3686 of SEQ ID NO: 914010
acauauccaucaguacaga

SEQ ID NO: 971005 - RNA, 19 nt, Artificial Sequence
  Description of Artificial Sequence: Synthetic oligonucleotide
  Antisense strand to SEQ ID NO: 971004
ucuguacugauggauaugu

SEQ ID NO: 971006 - RNA, 19 nt, Artificial Sequence
  Description of Artificial Sequence: Synthetic oligonucleotide
  Sense strand starting at position 178 of SEQ ID NO: 914010
agucuuuguccauaggaaa

SEQ ID NO: 971007 - RNA, 19 nt, Artificial Sequence
  Description of Artificial Sequence: Synthetic oligonucleotide
  Antisense strand to SEQ ID NO: 971006
uuuccuauggacaaagacu

SEQ ID NO: 971008 - RNA, 19 nt, Artificial Sequence
  Description of Artificial Sequence: Synthetic oligonucleotide
  Sense strand starting at position 3832 of SEQ ID NO: 914010
ccuuguccggaauaacaua

SEQ ID NO: 971009 - RNA, 19 nt, Artificial Sequence
  Description of Artificial Sequence: Synthetic oligonucleotide
  Antisense strand to SEQ ID NO: 971008
uauguuauuccggacaagg

SEQ ID NO: 971010 - RNA, 19 nt, Artificial Sequence
  Description of Artificial Sequence: Synthetic oligonucleotide
  Sense strand starting at position 3188 of SEQ ID NO: 914010
ggaaccauagcucauugua

SEQ ID NO: 971011 - RNA, 19 nt, Artificial Sequence
  Description of Artificial Sequence: Synthetic oligonucleotide
  Antisense strand to SEQ ID NO: 971010
uacaaugagcuaugguucc

SEQ ID NO: 971012 - RNA, 19 nt, Artificial Sequence
  Description of Artificial Sequence: Synthetic oligonucleotide
  Sense strand starting at position 176 of SEQ ID NO: 914010
acagucuuuguccauagga

SEQ ID NO: 971013 - RNA, 19 nt, Artificial Sequence
  Description of Artificial Sequence: Synthetic oligonucleotide
  Antisense strand to SEQ ID NO: 971012
uccuauggacaaagacugu

SEQ ID NO: 971014 - RNA, 19 nt, Artificial Sequence
  Description of Artificial Sequence: Synthetic oligonucleotide
  Sense strand starting at position 165 of SEQ ID NO: 914010
agaugagucccacagucuu

SEQ ID NO: 971015 - RNA, 19 nt, Artificial Sequence
  Description of Artificial Sequence: Synthetic oligonucleotide
  Antisense strand to SEQ ID NO: 971014
aagacugugggacucaucu

SEQ ID NO: 971016 - RNA, 19 nt, Artificial Sequence
  Description of Artificial Sequence: Synthetic oligonucleotide
  Sense strand starting at position 760 of SEQ ID NO: 914010
cagauuuacuuugagauga

SEQ ID NO: 971017 - RNA, 19 nt, Artificial Sequence
  Description of Artificial Sequence: Synthetic oligonucleotide
  Antisense strand to SEQ ID NO: 971016
ucaucucaaaguaaaucug

SEQ ID NO: 971018 - RNA, 19 nt, Artificial Sequence
  Description of Artificial Sequence: Synthetic oligonucleotide
  Sense strand starting at position 2986 of SEQ ID NO: 914010
ccugcuaaagcugauauaa

SEQ ID NO: 971019 - RNA, 19 nt, Artificial Sequence
  Description of Artificial Sequence: Synthetic oligonucleotide
  Antisense strand to SEQ ID NO: 971018
uuauaucagcuuuagcagg

SEQ ID NO: 971020 - RNA, 19 nt, Artificial Sequence
  Description of Artificial Sequence: Synthetic oligonucleotide
  Sense strand starting at position 3094 of SEQ ID NO: 914010
ucauuauugguccaguaua

SEQ ID NO: 971021 - RNA, 19 nt, Artificial Sequence
  Description of Artificial Sequence: Synthetic oligonucleotide
  Antisense strand to SEQ ID NO: 971020
uauacuggaccaauaauga

SEQ ID NO: 971022 - RNA, 19 nt, Artificial Sequence
  Description of Artificial Sequence: Synthetic oligonucleotide
  Sense strand starting at position 3051 of SEQ ID NO: 914010
agugaagagcaaugaguua

SEQ ID NO: 971023 - RNA, 19 nt, Artificial Sequence
  Description of Artificial Sequence: Synthetic oligonucleotide
  Antisense strand to SEQ ID NO: 971022
uaacucauugcucuucacu

SEQ ID NO: 971024 - RNA, 19 nt, Artificial Sequence
  Description of Artificial Sequence: Synthetic oligonucleotide
  Sense strand starting at position 3035 of SEQ ID NO: 914010
uuuccuuuggacugaaagu

SEQ ID NO: 971025 - RNA, 19 nt, Artificial Sequence
  Description of Artificial Sequence: Synthetic oligonucleotide
  Antisense strand to SEQ ID NO: 971024
acuuucaguccaaaggaaa

SEQ ID NO: 971026 - RNA, 19 nt, Artificial Sequence
  Description of Artificial Sequence: Synthetic oligonucleotide
  Sense strand starting at position 2151 of SEQ ID NO: 914010
gagaacaauagguguuugu

SEQ ID NO: 971027 - RNA, 19 nt, Artificial Sequence
  Description of Artificial Sequence: Synthetic oligonucleotide
  Antisense strand to SEQ ID NO: 971026
acaaacaccuauuguucuc

SEQ ID NO: 971028 - RNA, 19 nt, Artificial Sequence
  Description of Artificial Sequence: Synthetic oligonucleotide
  Sense strand starting at position 448 of SEQ ID NO: 914010
gcauuugauuucuguaaau

SEQ ID NO: 971029 - RNA, 19 nt, Artificial Sequence
  Description of Artificial Sequence: Synthetic oligonucleotide
  Antisense strand to SEQ ID NO: 971028
auuuacagaaaucaaaugc

SEQ ID NO: 971030 - RNA, 19 nt, Artificial Sequence
  Description of Artificial Sequence: Synthetic oligonucleotide
  Sense strand starting at position 658 of SEQ ID NO: 914010
agagauguauuuggaacau

SEQ ID NO: 971031 - RNA, 19 nt, Artificial Sequence
  Description of Artificial Sequence: Synthetic oligonucleotide
  Antisense strand to SEQ ID NO: 971030
auguuccaaauacaucucu

SEQ ID NO: 971032 - RNA, 19 nt, Artificial Sequence
  Description of Artificial Sequence: Synthetic oligonucleotide
  Sense strand starting at position 2043 of SEQ ID NO: 914010
aaguaaacauucguuauug

SEQ ID NO: 971033 - RNA, 19 nt, Artificial Sequence
  Description of Artificial Sequence: Synthetic oligonucleotide
  Antisense strand to SEQ ID NO: 971032
caauaacgaauguuuacuu

SEQ ID NO: 971034 - RNA, 19 nt, Artificial Sequence
  Description of Artificial Sequence: Synthetic oligonucleotide
  Sense strand starting at position 2081 of SEQ ID NO: 914010
ggcagcaagcgugaagaaa

SEQ ID NO: 971035 - RNA, 19 nt, Artificial Sequence
  Description of Artificial Sequence: Synthetic oligonucleotide
  Antisense strand to SEQ ID NO: 971034
uuucuucacgcuugcugcc

SEQ ID NO: 971036 - RNA, 19 nt, Artificial Sequence
  Description of Artificial Sequence: Synthetic oligonucleotide
  Sense strand starting at position 2779 of SEQ ID NO: 914010
ucuugaacugaccgcaaau

SEQ ID NO: 971037 - RNA, 19 nt, Artificial Sequence
  Description of Artificial Sequence: Synthetic oligonucleotide
  Antisense strand to SEQ ID NO: 971036
auuugcggucaguucaaga

SEQ ID NO: 971038 - RNA, 19 nt, Artificial Sequence
  Description of Artificial Sequence: Synthetic oligonucleotide
  Sense strand starting at position 3598 of SEQ ID NO: 914010
aguuuacuauugguguaaa

SEQ ID NO: 971039 - RNA, 19 nt, Artificial Sequence
  Description of Artificial Sequence: Synthetic oligonucleotide
  Antisense strand to SEQ ID NO: 971038
uuuacaccaauaguaaacu

SEQ ID NO: 971040 - RNA, 19 nt, Artificial Sequence
  Description of Artificial Sequence: Synthetic oligonucleotide
  Sense strand starting at position 2976 of SEQ ID NO: 914010
ugacgaguaaccugcuaaa

SEQ ID NO: 971041 - RNA, 19 nt, Artificial Sequence
  Description of Artificial Sequence: Synthetic oligonucleotide
  Antisense strand to SEQ ID NO: 971040
uuuagcagguuacucguca

SEQ ID NO: 971042 - RNA, 19 nt, Artificial Sequence
  Description of Artificial Sequence: Synthetic oligonucleotide
  Sense strand starting at position 3829 of SEQ ID NO: 914010
uugccuuguccggaauaac

SEQ ID NO: 971043 - RNA, 19 nt, Artificial Sequence
  Description of Artificial Sequence: Synthetic oligonucleotide
  Antisense strand to SEQ ID NO: 971042
guuauuccggacaaggcaa

SEQ ID NO: 971044 - RNA, 19 nt, Artificial Sequence
  Description of Artificial Sequence: Synthetic oligonucleotide
  Sense strand starting at position 2045 of SEQ ID NO: 914010
guaaacauucguuauugug

SEQ ID NO: 971045 - RNA, 19 nt, Artificial Sequence
  Description of Artificial Sequence: Synthetic oligonucleotide
  Antisense strand to SEQ ID NO: 971044
cacaauaacgaauguuuac

SEQ ID NO: 971046 - RNA, 19 nt, Artificial Sequence
  Description of Artificial Sequence: Synthetic oligonucleotide
  Sense strand starting at position 3091 of SEQ ID NO: 914010
uuaucauuauugguccagu

SEQ ID NO: 971047 - RNA, 19 nt, Artificial Sequence
  Description of Artificial Sequence: Synthetic oligonucleotide
  Antisense strand to SEQ ID NO: 971046
acuggaccaauaaugauaa

SEQ ID NO: 971048 - RNA, 19 nt, Artificial Sequence
  Description of Artificial Sequence: Synthetic oligonucleotide
  Sense strand starting at position 966 of SEQ ID NO: 914010
ggagaaacuuccuaaggga

SEQ ID NO: 971049 - RNA, 19 nt, Artificial Sequence
  Description of Artificial Sequence: Synthetic oligonucleotide
  Antisense strand to SEQ ID NO: 971048
ucccuuaggaaguuucucc

SEQ ID NO: 971050 - RNA, 19 nt, Artificial Sequence
  Description of Artificial Sequence: Synthetic oligonucleotide
  Sense strand starting at position 990 of SEQ ID NO: 914010
gacagugcauuugacuaua

SEQ ID NO: 971051 - RNA, 19 nt, Artificial Sequence
  Description of Artificial Sequence: Synthetic oligonucleotide
  Antisense strand to SEQ ID NO: 971050
uauagucaaaugcacuguc

SEQ ID NO: 971052 - RNA, 19 nt, Artificial Sequence
  Description of Artificial Sequence: Synthetic oligonucleotide
  Sense strand starting at position 173 of SEQ ID NO: 914010
cccacagucuuuguccaua

SEQ ID NO: 971053 - RNA, 19 nt, Artificial Sequence
  Description of Artificial Sequence: Synthetic oligonucleotide
  Antisense strand to SEQ ID NO: 971052
uauggacaaagacuguggg

SEQ ID NO: 971054 - RNA, 19 nt, Artificial Sequence
  Description of Artificial Sequence: Synthetic oligonucleotide
  Sense strand starting at position 2954 of SEQ ID NO: 914010
caguguauacugugucaaa

SEQ ID NO: 971055 - RNA, 19 nt, Artificial Sequence
  Description of Artificial Sequence: Synthetic oligonucleotide
  Antisense strand to SEQ ID NO: 971054
uuugacacaguauacacug

SEQ ID NO: 971056 - RNA, 19 nt, Artificial Sequence
  Description of Artificial Sequence: Synthetic oligonucleotide
  Sense strand starting at position 271 of SEQ ID NO: 914010
cuuucuccgaaguguugaa

SEQ ID NO: 971057 - RNA, 19 nt, Artificial Sequence
  Description of Artificial Sequence: Synthetic oligonucleotide
  Antisense strand to SEQ ID NO: 971056
uucaacacuucggagaaag

SEQ ID NO: 971058 - RNA, 19 nt, Artificial Sequence
  Description of Artificial Sequence: Synthetic oligonucleotide
  Sense strand starting at position 2155 of SEQ ID NO: 914010
acaauagguguuuguguua

SEQ ID NO: 971059 - RNA, 19 nt, Artificial Sequence
  Description of Artificial Sequence: Synthetic oligonucleotide
  Antisense strand to SEQ ID NO: 971058
uaacacaaacaccuauugu

SEQ ID NO: 971060 - RNA, 19 nt, Artificial Sequence
  Description of Artificial Sequence: Synthetic oligonucleotide
  Sense strand starting at position 2044 of SEQ ID NO: 914010
aguaaacauucguuauugu

SEQ ID NO: 971061 - RNA, 19 nt, Artificial Sequence
  Description of Artificial Sequence: Synthetic oligonucleotide
  Antisense strand to SEQ ID NO: 971060
acaauaacgaauguuuacu

SEQ ID NO: 971062 - RNA, 19 nt, Artificial Sequence
  Description of Artificial Sequence: Synthetic oligonucleotide
  Sense strand starting at position 625 of SEQ ID NO: 914010
cacugugcugagugugaga

SEQ ID NO: 971063 - RNA, 19 nt, Artificial Sequence
  Description of Artificial Sequence: Synthetic oligonucleotide
  Antisense strand to SEQ ID NO: 971062
ucucacacucagcacagug

SEQ ID NO: 971064 - RNA, 19 nt, Artificial Sequence
  Description of Artificial Sequence: Synthetic oligonucleotide
  Sense strand starting at position 2012 of SEQ ID NO: 914010
gcgguucccagaugugaag

SEQ ID NO: 971065 - RNA, 19 nt, Artificial Sequence
  Description of Artificial Sequence: Synthetic oligonucleotide
  Antisense strand to SEQ ID NO: 971064
cuucacaucugggaaccgc

SEQ ID NO: 971066 - RNA, 19 nt, Artificial Sequence
  Description of Artificial Sequence: Synthetic oligonucleotide
  Sense strand starting at position 615 of SEQ ID NO: 914010
ggauguaucucacugugcu

SEQ ID NO: 971067 - RNA, 19 nt, Artificial Sequence
  Description of Artificial Sequence: Synthetic oligonucleotide
  Antisense strand to SEQ ID NO: 971066
agcacagugagauacaucc

SEQ ID NO: 971068 - RNA, 19 nt, Artificial Sequence
  Description of Artificial Sequence: Synthetic oligonucleotide
  Sense strand starting at position 1 of SEQ ID NO: 914010
ugacauaguuaagaaaucu

SEQ ID NO: 971069 - RNA, 19 nt, Artificial Sequence
  Description of Artificial Sequence: Synthetic oligonucleotide
  Antisense strand to SEQ ID NO: 971068
agauuucuuaacuauguca

SEQ ID NO: 971070 - RNA, 19 nt, Artificial Sequence
  Description of Artificial Sequence: Synthetic oligonucleotide
  Sense strand starting at position 796 of SEQ ID NO: 914010
uaggucugauaaugcauuu

SEQ ID NO: 971071 - RNA, 19 nt, Artificial Sequence
  Description of Artificial Sequence: Synthetic oligonucleotide
  Antisense strand to SEQ ID NO: 971070
aaaugcauuaucagaccua

SEQ ID NO: 971072 - RNA, 19 nt, Artificial Sequence
  Description of Artificial Sequence: Synthetic oligonucleotide
  Sense strand starting at position 303 of SEQ ID NO: 914010
aggucaauccugcgcuauc

SEQ ID NO: 971073 - RNA, 19 nt, Artificial Sequence
  Description of Artificial Sequence: Synthetic oligonucleotide
  Antisense strand to SEQ ID NO: 971072
gauagcgcaggauugaccu

SEQ ID NO: 971074 - RNA, 19 nt, Artificial Sequence
  Description of Artificial Sequence: Synthetic oligonucleotide
  Sense strand starting at position 2053 of SEQ ID NO: 914010
ucguuauugugcccucaca

SEQ ID NO: 971075 - RNA, 19 nt, Artificial Sequence
  Description of Artificial Sequence: Synthetic oligonucleotide
  Antisense strand to SEQ ID NO: 971074
ugugagggcacaauaacga

SEQ ID NO: 971076 - RNA, 19 nt, Artificial Sequence
  Description of Artificial Sequence: Synthetic oligonucleotide
  Sense strand starting at position 954 of SEQ ID NO: 914010
ucccucuccuaaggagaaa

SEQ ID NO: 971077 - RNA, 19 nt, Artificial Sequence
  Description of Artificial Sequence: Synthetic oligonucleotide
  Antisense strand to SEQ ID NO: 971076
uuucuccuuaggagaggga

SEQ ID NO: 971078 - RNA, 19 nt, Artificial Sequence
  Description of Artificial Sequence: Synthetic oligonucleotide
  Sense strand starting at position 3670 of SEQ ID NO: 914010
ggcuauguauaaugacaca

SEQ ID NO: 971079 - RNA, 19 nt, Artificial Sequence
  Description of Artificial Sequence: Synthetic oligonucleotide
  Antisense strand to SEQ ID NO: 971078
ugugucauuauacauagcc

SEQ ID NO: 971080 - RNA, 19 nt, Artificial Sequence
  Description of Artificial Sequence: Synthetic oligonucleotide
  Sense strand starting at position 3593 of SEQ ID NO: 914010
gccauaguuuacuauuggu

SEQ ID NO: 971081 - RNA, 19 nt, Artificial Sequence
  Description of Artificial Sequence: Synthetic oligonucleotide
  Antisense strand to SEQ ID NO: 971080
accaauaguaaacuauggc

SEQ ID NO: 971082 - RNA, 19 nt, Artificial Sequence
  Description of Artificial Sequence: Synthetic oligonucleotide
  Sense strand starting at position 2811 of SEQ ID NO: 914011
agagauaauucuuuagagu

SEQ ID NO: 971083 - RNA, 19 nt, Artificial Sequence
  Description of Artificial Sequence: Synthetic oligonucleotide
  Antisense strand to SEQ ID NO: 971082
acucuaaagaauuaucucu

SEQ ID NO: 971084 - RNA, 19 nt, Artificial Sequence
  Description of Artificial Sequence: Synthetic oligonucleotide
  Sense strand starting at position 2797 of SEQ ID NO: 914011
caaccauaucugugagaga

SEQ ID NO: 971085 - RNA, 19 nt, Artificial Sequence
  Description of Artificial Sequence: Synthetic oligonucleotide
  Antisense strand to SEQ ID NO: 971084
ucucucacagauaugguug

SEQ ID NO: 971086 - RNA, 19 nt, Artificial Sequence
  Description of Artificial Sequence: Synthetic oligonucleotide
  Sense strand starting at position 3618 of SEQ ID NO: 914011
guuuguaaacaggaucuua

SEQ ID NO: 971087 - RNA, 19 nt, Artificial Sequence
  Description of Artificial Sequence: Synthetic oligonucleotide
  Antisense strand to SEQ ID NO: 971086
uaagauccuguuuacaaac

SEQ ID NO: 971088 - RNA, 19 nt, Artificial Sequence
  Description of Artificial Sequence: Synthetic oligonucleotide
  Sense strand starting at position 528 of SEQ ID NO: 914011
gaucaaugucuguacugaa

SEQ ID NO: 971089 - RNA, 19 nt, Artificial Sequence
  Description of Artificial Sequence: Synthetic oligonucleotide
  Antisense strand to SEQ ID NO: 971088
uucaguacagacauugauc

SEQ ID NO: 971090 - RNA, 19 nt, Artificial Sequence
  Description of Artificial Sequence: Synthetic oligonucleotide
  Sense strand starting at position 830 of SEQ ID NO: 914011
gguaaauugaucgagcaaa

SEQ ID NO: 971091 - RNA, 19 nt, Artificial Sequence
  Description of Artificial Sequence: Synthetic oligonucleotide
  Antisense strand to SEQ ID NO: 971090
uuugcucgaucaauuuacc

SEQ ID NO: 971092 - RNA, 19 nt, Artificial Sequence
  Description of Artificial Sequence: Synthetic oligonucleotide
  Sense strand starting at position 2601 of SEQ ID NO: 914011
ucuacaguggcagaagauu

SEQ ID NO: 971093 - RNA, 19 nt, Artificial Sequence
  Description of Artificial Sequence: Synthetic oligonucleotide
  Antisense strand to SEQ ID NO: 971092
aaucuucugccacuguaga

SEQ ID NO: 971094 - RNA, 19 nt, Artificial Sequence
  Description of Artificial Sequence: Synthetic oligonucleotide
  Sense strand starting at position 3288 of SEQ ID NO: 914011
auugcugcgauuugaauga

SEQ ID NO: 971095 - RNA, 19 nt, Artificial Sequence
  Description of Artificial Sequence: Synthetic oligonucleotide
  Antisense strand to SEQ ID NO: 971094
ucauucaaaucgcagcaau

SEQ ID NO: 971096 - RNA, 19 nt, Artificial Sequence
  Description of Artificial Sequence: Synthetic oligonucleotide
  Sense strand starting at position 615 of SEQ ID NO: 914011
gcauccgucgguguuaaga

SEQ ID NO: 971097 - RNA, 19 nt, Artificial Sequence
  Description of Artificial Sequence: Synthetic oligonucleotide
  Antisense strand to SEQ ID NO: 971096
ucuuaacaccgacggaugc

SEQ ID NO: 971098 - RNA, 19 nt, Artificial Sequence
  Description of Artificial Sequence: Synthetic oligonucleotide
  Sense strand starting at position 2750 of SEQ ID NO: 914011
auaaacagugcucaguaaa

SEQ ID NO: 971099 - RNA, 19 nt, Artificial Sequence
  Description of Artificial Sequence: Synthetic oligonucleotide
  Antisense strand to SEQ ID NO: 971098
uuuacugagcacuguuuau

SEQ ID NO: 971100 - RNA, 19 nt, Artificial Sequence
  Description of Artificial Sequence: Synthetic oligonucleotide
  Sense strand starting at position 3880 of SEQ ID NO: 914011
ccuugugaccaguaaucag

SEQ ID NO: 971101 - RNA, 19 nt, Artificial Sequence
  Description of Artificial Sequence: Synthetic oligonucleotide
  Antisense strand to SEQ ID NO: 971100
cugauuacuggucacaagg

SEQ ID NO: 971102 - RNA, 19 nt, Artificial Sequence
  Description of Artificial Sequence: Synthetic oligonucleotide
  Sense strand starting at position 3386 of SEQ ID NO: 914011
gaccucuuaugagugggau

SEQ ID NO: 971103 - RNA, 19 nt, Artificial Sequence
  Description of Artificial Sequence: Synthetic oligonucleotide
  Antisense strand to SEQ ID NO: 971102
aucccacucauaagagguc

SEQ ID NO: 971104 - RNA, 19 nt, Artificial Sequence
  Description of Artificial Sequence: Synthetic oligonucleotide
  Sense strand starting at position 1992 of SEQ ID NO: 914011
cgguuuccuggagaaauuc

SEQ ID NO: 971105 - RNA, 19 nt, Artificial Sequence
  Description of Artificial Sequence: Synthetic oligonucleotide
  Antisense strand to SEQ ID NO: 971104
gaauuucuccaggaaaccg

SEQ ID NO: 971106 - RNA, 19 nt, Artificial Sequence
  Description of Artificial Sequence: Synthetic oligonucleotide
  Sense strand starting at position 2367 of SEQ ID NO: 914011
guguaacauguacauacau

SEQ ID NO: 971107 - RNA, 19 nt, Artificial Sequence
  Description of Artificial Sequence: Synthetic oligonucleotide
  Antisense strand to SEQ ID NO: 971106
auguauguacauguuacac

SEQ ID NO: 971108 - RNA, 19 nt, Artificial Sequence
  Description of Artificial Sequence: Synthetic oligonucleotide
  Sense strand starting at position 488 of SEQ ID NO: 914011
guaauuugauuagaaacca

SEQ ID NO: 971109 - RNA, 19 nt, Artificial Sequence
  Description of Artificial Sequence: Synthetic oligonucleotide
  Antisense strand to SEQ ID NO: 971108
ugguuucuaaucaaauuac

SEQ ID NO: 971110 - RNA, 19 nt, Artificial Sequence
  Description of Artificial Sequence: Synthetic oligonucleotide
  Sense strand starting at position 967 of SEQ ID NO: 914011
agauguauccuccgaagaa

SEQ ID NO: 971111 - RNA, 19 nt, Artificial Sequence
  Description of Artificial Sequence: Synthetic oligonucleotide
  Antisense strand to SEQ ID NO: 971110
uucuucggaggauacaucu

SEQ ID NO: 971112 - RNA, 19 nt, Artificial Sequence
  Description of Artificial Sequence: Synthetic oligonucleotide
  Sense strand starting at position 3283 of SEQ ID NO: 914011
uuauaauugcugcgauuug

SEQ ID NO: 971113 - RNA, 19 nt, Artificial Sequence
  Description of Artificial Sequence: Synthetic oligonucleotide
  Antisense strand to SEQ ID NO: 971112
caaaucgcagcaauuauaa

SEQ ID NO: 971114 - RNA, 19 nt, Artificial Sequence
  Description of Artificial Sequence: Synthetic oligonucleotide
  Sense strand starting at position 2328 of SEQ ID NO: 914011
acacuugacuuaguuauua

SEQ ID NO: 971115 - RNA, 19 nt, Artificial Sequence
  Description of Artificial Sequence: Synthetic oligonucleotide
  Antisense strand to SEQ ID NO: 971114
uaauaacuaagucaagugu

SEQ ID NO: 971116 - RNA, 19 nt, Artificial Sequence
  Description of Artificial Sequence: Synthetic oligonucleotide
  Sense strand starting at position 3925 of SEQ ID NO: 914011
guguuucuuccagaccaag

SEQ ID NO: 971117 - RNA, 19 nt, Artificial Sequence
  Description of Artificial Sequence: Synthetic oligonucleotide
  Antisense strand to SEQ ID NO: 971116
cuuggucuggaagaaacac

SEQ ID NO: 971118 - RNA, 19 nt, Artificial Sequence
  Description of Artificial Sequence: Synthetic oligonucleotide
  Sense strand starting at position 3387 of SEQ ID NO: 914011
accucuuaugagugggauu

SEQ ID NO: 971119 - RNA, 19 nt, Artificial Sequence
  Description of Artificial Sequence: Synthetic oligonucleotide
  Antisense strand to SEQ ID NO: 971118
aaucccacucauaagaggu

SEQ ID NO: 971120 - RNA, 19 nt, Artificial Sequence
  Description of Artificial Sequence: Synthetic oligonucleotide
  Sense strand starting at position 3388 of SEQ ID NO: 914011
ccucuuaugagugggauua

SEQ ID NO: 971121 - RNA, 19 nt, Artificial Sequence
  Description of Artificial Sequence: Synthetic oligonucleotide
  Antisense strand to SEQ ID NO: 971120
uaaucccacucauaagagg

SEQ ID NO: 971122 - RNA, 19 nt, Artificial Sequence
  Description of Artificial Sequence: Synthetic oligonucleotide
  Sense strand starting at position 573 of SEQ ID NO: 914011
uguguuaucgacuagaaug

SEQ ID NO: 971123 - RNA, 19 nt, Artificial Sequence
  Description of Artificial Sequence: Synthetic oligonucleotide
  Antisense strand to SEQ ID NO: 971122
cauucuagucgauaacaca

SEQ ID NO: 971124 - RNA, 19 nt, Artificial Sequence
  Description of Artificial Sequence: Synthetic oligonucleotide
  Sense strand starting at position 2723 of SEQ ID NO: 914011
ccauacauuguuuagucau

SEQ ID NO: 971125 - RNA, 19 nt, Artificial Sequence
  Description of Artificial Sequence: Synthetic oligonucleotide
  Antisense strand to SEQ ID NO: 971124
augacuaaacaauguaugg

SEQ ID NO: 971126 - RNA, 19 nt, Artificial Sequence
  Description of Artificial Sequence: Synthetic oligonucleotide
  Sense strand starting at position 2190 of SEQ ID NO: 914011
gcaauuuauugggagaaug

SEQ ID NO: 971127 - RNA, 19 nt, Artificial Sequence
  Description of Artificial Sequence: Synthetic oligonucleotide
  Antisense strand to SEQ ID NO: 971126
cauucucccaauaaauugc

SEQ ID NO: 971128 - RNA, 19 nt, Artificial Sequence
  Description of Artificial Sequence: Synthetic oligonucleotide
  Sense strand starting at position 965 of SEQ ID NO: 914011
caagauguauccuccgaag

SEQ ID NO: 971129 - RNA, 19 nt, Artificial Sequence
  Description of Artificial Sequence: Synthetic oligonucleotide
  Antisense strand to SEQ ID NO: 971128
cuucggaggauacaucuug

SEQ ID NO: 971130 - RNA, 19 nt, Artificial Sequence
  Description of Artificial Sequence: Synthetic oligonucleotide
  Sense strand starting at position 522 of SEQ ID NO: 914011
caugaagaucaaugucugu

SEQ ID NO: 971131 - RNA, 19 nt, Artificial Sequence
  Description of Artificial Sequence: Synthetic oligonucleotide
  Antisense strand to SEQ ID NO: 971130
acagacauugaucuucaug

SEQ ID NO: 971132 - RNA, 19 nt, Artificial Sequence
  Description of Artificial Sequence: Synthetic oligonucleotide
  Sense strand starting at position 1246 of SEQ ID NO: 914011
ccagaagcgagacgaaauu

SEQ ID NO: 971133 - RNA, 19 nt, Artificial Sequence
  Description of Artificial Sequence: Synthetic oligonucleotide
  Antisense strand to SEQ ID NO: 971132
aauuucgucucgcuucugg

SEQ ID NO: 971134 - RNA, 19 nt, Artificial Sequence
  Description of Artificial Sequence: Synthetic oligonucleotide
  Sense strand starting at position 2624 of SEQ ID NO: 914011
caugucagugcauauggau

SEQ ID NO: 971135 - RNA, 19 nt, Artificial Sequence
  Description of Artificial Sequence: Synthetic oligonucleotide
  Antisense strand to SEQ ID NO: 971134
auccauaugcacugacaug

SEQ ID NO: 971136 - RNA, 19 nt, Artificial Sequence
  Description of Artificial Sequence: Synthetic oligonucleotide
  Sense strand starting at position 808 of SEQ ID NO: 914011
aggccaagauguucuuaau

SEQ ID NO: 971137 - RNA, 19 nt, Artificial Sequence
  Description of Artificial Sequence: Synthetic oligonucleotide
  Antisense strand to SEQ ID NO: 971136
auuaagaacaucuuggccu

SEQ ID NO: 971138 - RNA, 19 nt, Artificial Sequence
  Description of Artificial Sequence: Synthetic oligonucleotide
  Sense strand starting at position 3819 of SEQ ID NO: 914011
uugaaauauggcuguccaa

SEQ ID NO: 971139 - RNA, 19 nt, Artificial Sequence
  Description of Artificial Sequence: Synthetic oligonucleotide
  Antisense strand to SEQ ID NO: 971138
uuggacagccauauuucaa

SEQ ID NO: 971140 - RNA, 19 nt, Artificial Sequence
  Description of Artificial Sequence: Synthetic oligonucleotide
  Sense strand starting at position 2079 of SEQ ID NO: 914011
ucgcccaacuaaucugaaa

SEQ ID NO: 971141 - RNA, 19 nt, Artificial Sequence
  Description of Artificial Sequence: Synthetic oligonucleotide
  Antisense strand to SEQ ID NO: 971140
uuucagauuaguugggcga

SEQ ID NO: 971142 - RNA, 19 nt, Artificial Sequence
  Description of Artificial Sequence: Synthetic oligonucleotide
  Sense strand starting at position 3007 of SEQ ID NO: 914011
gaauguacugcuuaguauc

SEQ ID NO: 971143 - RNA, 19 nt, Artificial Sequence
  Description of Artificial Sequence: Synthetic oligonucleotide
  Antisense strand to SEQ ID NO: 971142
gauacuaagcaguacauuc

SEQ ID NO: 971144 - RNA, 19 nt, Artificial Sequence
  Description of Artificial Sequence: Synthetic oligonucleotide
  Sense strand starting at position 829 of SEQ ID NO: 914011
ugguaaauugaucgagcaa

SEQ ID NO: 971145 - RNA, 19 nt, Artificial Sequence
  Description of Artificial Sequence: Synthetic oligonucleotide
  Antisense strand to SEQ ID NO: 971144
uugcucgaucaauuuacca

SEQ ID NO: 971146 - RNA, 19 nt, Artificial Sequence
  Description of Artificial Sequence: Synthetic oligonucleotide
  Sense strand starting at position 3727 of SEQ ID NO: 914011
guuuaauguaggcaguuaa

SEQ ID NO: 971147 - RNA, 19 nt, Artificial Sequence
  Description of Artificial Sequence: Synthetic oligonucleotide
  Antisense strand to SEQ ID NO: 971146
uuaacugccuacauuaaac

SEQ ID NO: 971148 - RNA, 19 nt, Artificial Sequence
  Description of Artificial Sequence: Synthetic oligonucleotide
  Sense strand starting at position 3877 of SEQ ID NO: 914011
uggccuugugaccaguaau

SEQ ID NO: 971149 - RNA, 19 nt, Artificial Sequence
  Description of Artificial Sequence: Synthetic oligonucleotide
  Antisense strand to SEQ ID NO: 971148
auuacuggucacaaggcca

SEQ ID NO: 971150 - RNA, 19 nt, Artificial Sequence
  Description of Artificial Sequence: Synthetic oligonucleotide
  Sense strand starting at position 2484 of SEQ ID NO: 914011
gggucuacauccuugcaaa

SEQ ID NO: 971151 - RNA, 19 nt, Artificial Sequence
  Description of Artificial Sequence: Synthetic oligonucleotide
  Antisense strand to SEQ ID NO: 971150
uuugcaaggauguagaccc

SEQ ID NO: 971152 - RNA, 19 nt, Artificial Sequence
  Description of Artificial Sequence: Synthetic oligonucleotide
  Sense strand starting at position 828 of SEQ ID NO: 914011
uugguaaauugaucgagca

SEQ ID NO: 971153 - RNA, 19 nt, Artificial Sequence
  Description of Artificial Sequence: Synthetic oligonucleotide
  Antisense strand to SEQ ID NO: 971152
ugcucgaucaauuuaccaa

SEQ ID NO: 971154 - RNA, 19 nt, Artificial Sequence
  Description of Artificial Sequence: Synthetic oligonucleotide
  Sense strand starting at position 2250 of SEQ ID NO: 914011
cguguccugagugacagau

SEQ ID NO: 971155 - RNA, 19 nt, Artificial Sequence
  Description of Artificial Sequence: Synthetic oligonucleotide
  Antisense strand to SEQ ID NO: 971154
aucugucacucaggacacg

SEQ ID NO: 971156 - RNA, 19 nt, Artificial Sequence
  Description of Artificial Sequence: Synthetic oligonucleotide
  Sense strand starting at position 688 of SEQ ID NO: 914011
cccguaaaguagucaggaa

SEQ ID NO: 971157 - RNA, 19 nt, Artificial Sequence
  Description of Artificial Sequence: Synthetic oligonucleotide
  Antisense strand to SEQ ID NO: 971156
uuccugacuacuuuacggg

SEQ ID NO: 971158 - RNA, 19 nt, Artificial Sequence
  Description of Artificial Sequence: Synthetic oligonucleotide
  Sense strand starting at position 101 of SEQ ID NO: 914011
ucucauuaauagcugcaga

SEQ ID NO: 971159 - RNA, 19 nt, Artificial Sequence
  Description of Artificial Sequence: Synthetic oligonucleotide
  Antisense strand to SEQ ID NO: 971158
ucugcagcuauuaaugaga

SEQ ID NO: 971160 - RNA, 19 nt, Artificial Sequence
  Description of Artificial Sequence: Synthetic oligonucleotide
  Sense strand starting at position 3921 of SEQ ID NO: 914011
auggguguuucuuccagac

SEQ ID NO: 971161 - RNA, 19 nt, Artificial Sequence
  Description of Artificial Sequence: Synthetic oligonucleotide
  Antisense strand to SEQ ID NO: 971160
gucuggaagaaacacccau

SEQ ID NO: 971162 - RNA, 19 nt, Artificial Sequence
  Description of Artificial Sequence: Synthetic oligonucleotide
  Sense strand starting at position 100 of SEQ ID NO: 914012
ugacaagagcacugaacau

SEQ ID NO: 971163 - RNA, 19 nt, Artificial Sequence
  Description of Artificial Sequence: Synthetic oligonucleotide
  Antisense strand to SEQ ID NO: 971162
auguucagugcucuuguca

SEQ ID NO: 971164 - RNA, 19 nt, Artificial Sequence
  Description of Artificial Sequence: Synthetic oligonucleotide
  Sense strand starting at position 2716 of SEQ ID NO: 914012
acacauagccguugaauuu

SEQ ID NO: 971165 - RNA, 19 nt, Artificial Sequence
  Description of Artificial Sequence: Synthetic oligonucleotide
  Antisense strand to SEQ ID NO: 971164
aaauucaacggcuaugugu

SEQ ID NO: 971166 - RNA, 19 nt, Artificial Sequence
  Description of Artificial Sequence: Synthetic oligonucleotide
  Sense strand starting at position 771 of SEQ ID NO: 914012
caaccugaccaggguuaaa

SEQ ID NO: 971167 - RNA, 19 nt, Artificial Sequence
  Description of Artificial Sequence: Synthetic oligonucleotide
  Antisense strand to SEQ ID NO: 971166
uuuaacccuggucagguug

SEQ ID NO: 971168 - RNA, 19 nt, Artificial Sequence
  Description of Artificial Sequence: Synthetic oligonucleotide
  Sense strand starting at position 699 of SEQ ID NO: 914012
gcaagaguuccgucuagcc

SEQ ID NO: 971169 - RNA, 19 nt, Artificial Sequence
  Description of Artificial Sequence: Synthetic oligonucleotide
  Antisense strand to SEQ ID NO: 971168
ggcuagacggaacucuugc

SEQ ID NO: 971170 - RNA, 19 nt, Artificial Sequence
  Description of Artificial Sequence: Synthetic oligonucleotide
  Sense strand starting at position 574 of SEQ ID NO: 914012
cggauuaccgagcucgcua

SEQ ID NO: 971171 - RNA, 19 nt, Artificial Sequence
  Description of Artificial Sequence: Synthetic oligonucleotide
  Antisense strand to SEQ ID NO: 971170
uagcgagcucgguaauccg

SEQ ID NO: 971172 - RNA, 19 nt, Artificial Sequence
  Description of Artificial Sequence: Synthetic oligonucleotide
  Sense strand starting at position 649 of SEQ ID NO: 914012
ccauauagauagccuaaga

SEQ ID NO: 971173 - RNA, 19 nt, Artificial Sequence
  Description of Artificial Sequence: Synthetic oligonucleotide
  Antisense strand to SEQ ID NO: 971172
ucuuaggcuaucuauaugg

SEQ ID NO: 971174 - RNA, 19 nt, Artificial Sequence
  Description of Artificial Sequence: Synthetic oligonucleotide
  Sense strand starting at position 839 of SEQ ID NO: 914012
guucuaagagagugacaga

SEQ ID NO: 971175 - RNA, 19 nt, Artificial Sequence
  Description of Artificial Sequence: Synthetic oligonucleotide
  Antisense strand to SEQ ID NO: 971174
ucugucacucucuuagaac

SEQ ID NO: 971176 - RNA, 19 nt, Artificial Sequence
  Description of Artificial Sequence: Synthetic oligonucleotide
  Sense strand starting at position 86 of SEQ ID NO: 914012
ccauucuauguuuaugaca

SEQ ID NO: 971177 - RNA, 19 nt, Artificial Sequence
  Description of Artificial Sequence: Synthetic oligonucleotide
  Antisense strand to SEQ ID NO: 971176
ugucauaaacauagaaugg

SEQ ID NO: 971178 - RNA, 19 nt, Artificial Sequence
  Description of Artificial Sequence: Synthetic oligonucleotide
  Sense strand starting at position 94 of SEQ ID NO: 914012
uguuuaugacaagagcacu

SEQ ID NO: 971179 - RNA, 19 nt, Artificial Sequence
  Description of Artificial Sequence: Synthetic oligonucleotide
  Antisense strand to SEQ ID NO: 971178
agugcucuugucauaaaca

SEQ ID NO: 971180 - RNA, 19 nt, Artificial Sequence
  Description of Artificial Sequence: Synthetic oligonucleotide
  Sense strand starting at position 202 of SEQ ID NO: 914012
guaagaacgccuuauaagg

SEQ ID NO: 971181 - RNA, 19 nt, Artificial Sequence
  Description of Artificial Sequence: Synthetic oligonucleotide
  Antisense strand to SEQ ID NO: 971180
ccuuauaaggcguucuuac

SEQ ID NO: 971182 - RNA, 19 nt, Artificial Sequence
  Description of Artificial Sequence: Synthetic oligonucleotide
  Sense strand starting at position 3929 of SEQ ID NO: 914012
gcuuaaagagaaugagcau

SEQ ID NO: 971183 - RNA, 19 nt, Artificial Sequence
  Description of Artificial Sequence: Synthetic oligonucleotide
  Antisense strand to SEQ ID NO: 971182
augcucauucucuuuaagc

SEQ ID NO: 971184 - RNA, 19 nt, Artificial Sequence
  Description of Artificial Sequence: Synthetic oligonucleotide
  Sense strand starting at position 3745 of SEQ ID NO: 914012
acuuaucuggucugagaac

SEQ ID NO: 971185 - RNA, 19 nt, Artificial Sequence
  Description of Artificial Sequence: Synthetic oligonucleotide
  Antisense strand to SEQ ID NO: 971184
guucucagaccagauaagu

SEQ ID NO: 971186 - RNA, 19 nt, Artificial Sequence
  Description of Artificial Sequence: Synthetic oligonucleotide
  Sense strand starting at position 3743 of SEQ ID NO: 914012
ugacuuaucuggucugaga

SEQ ID NO: 971187 - RNA, 19 nt, Artificial Sequence
  Description of Artificial Sequence: Synthetic oligonucleotide
  Antisense strand to SEQ ID NO: 971186
ucucagaccagauaaguca

SEQ ID NO: 971188 - RNA, 19 nt, Artificial Sequence
  Description of Artificial Sequence: Synthetic oligonucleotide
  Sense strand starting at position 2833 of SEQ ID NO: 914012
aagagagucgagcaucuuu

SEQ ID NO: 971189 - RNA, 19 nt, Artificial Sequence
  Description of Artificial Sequence: Synthetic oligonucleotide
  Antisense strand to SEQ ID NO: 971188
aaagaugcucgacucucuu

SEQ ID NO: 971190 - RNA, 19 nt, Artificial Sequence
  Description of Artificial Sequence: Synthetic oligonucleotide
  Sense strand starting at position 3011 of SEQ ID NO: 914012
ccggguugaguggaaagua

SEQ ID NO: 971191 - RNA, 19 nt, Artificial Sequence
  Description of Artificial Sequence: Synthetic oligonucleotide
  Antisense strand to SEQ ID NO: 971190
uacuuuccacucaacccgg

SEQ ID NO: 971192 - RNA, 19 nt, Artificial Sequence
  Description of Artificial Sequence: Synthetic oligonucleotide
  Sense strand starting at position 521 of SEQ ID NO: 914012
ucgaaauaugcucaaccuc

SEQ ID NO: 971193 - RNA, 19 nt, Artificial Sequence
  Description of Artificial Sequence: Synthetic oligonucleotide
  Antisense strand to SEQ ID NO: 971192
gagguugagcauauuucga

SEQ ID NO: 971194 - RNA, 19 nt, Artificial Sequence
  Description of Artificial Sequence: Synthetic oligonucleotide
  Sense strand starting at position 3850 of SEQ ID NO: 914012
uucggaaaugcugagaguu

SEQ ID NO: 971195 - RNA, 19 nt, Artificial Sequence
  Description of Artificial Sequence: Synthetic oligonucleotide
  Antisense strand to SEQ ID NO: 971194
aacucucagcauuuccgaa

SEQ ID NO: 971196 - RNA, 19 nt, Artificial Sequence
  Description of Artificial Sequence: Synthetic oligonucleotide
  Sense strand starting at position 595 of SEQ ID NO: 914012
ccacuaacaguguacugua

SEQ ID NO: 971197 - RNA, 19 nt, Artificial Sequence
  Description of Artificial Sequence: Synthetic oligonucleotide
  Antisense strand to SEQ ID NO: 971196
uacaguacacuguuagugg

SEQ ID NO: 971198 - RNA, 19 nt, Artificial Sequence
  Description of Artificial Sequence: Synthetic oligonucleotide
  Sense strand starting at position 2513 of SEQ ID NO: 914012
acagccuuugccuagagau

SEQ ID NO: 971199 - RNA, 19 nt, Artificial Sequence
  Description of Artificial Sequence: Synthetic oligonucleotide
  Antisense strand to SEQ ID NO: 971198
aucucuaggcaaaggcugu

SEQ ID NO: 971200 - RNA, 19 nt, Artificial Sequence
  Description of Artificial Sequence: Synthetic oligonucleotide
  Sense strand starting at position 789 of SEQ ID NO: 914012
auguuauagucacccaaac

SEQ ID NO: 971201 - RNA, 19 nt, Artificial Sequence
  Description of Artificial Sequence: Synthetic oligonucleotide
  Antisense strand to SEQ ID NO: 971200
guuugggugacuauaacau

SEQ ID NO: 971202 - RNA, 19 nt, Artificial Sequence
  Description of Artificial Sequence: Synthetic oligonucleotide
  Sense strand starting at position 3950 of SEQ ID NO: 914012
acaccagucugggaauuua

SEQ ID NO: 971203 - RNA, 19 nt, Artificial Sequence
  Description of Artificial Sequence: Synthetic oligonucleotide
  Antisense strand to SEQ ID NO: 971202
uaaauucccagacuggugu

SEQ ID NO: 971204 - RNA, 19 nt, Artificial Sequence
  Description of Artificial Sequence: Synthetic oligonucleotide
  Sense strand starting at position 520 of SEQ ID NO: 914012
aucgaaauaugcucaaccu

SEQ ID NO: 971205 - RNA, 19 nt, Artificial Sequence
  Description of Artificial Sequence: Synthetic oligonucleotide
  Antisense strand to SEQ ID NO: 971204
agguugagcauauuucgau

SEQ ID NO: 971206 - RNA, 19 nt, Artificial Sequence
  Description of Artificial Sequence: Synthetic oligonucleotide
  Sense strand starting at position 2515 of SEQ ID NO: 914012
agccuuugccuagagauuc

SEQ ID NO: 971207 - RNA, 19 nt, Artificial Sequence
  Description of Artificial Sequence: Synthetic oligonucleotide
  Antisense strand to SEQ ID NO: 971206
gaaucucuaggcaaaggcu

SEQ ID NO: 971208 - RNA, 19 nt, Artificial Sequence
  Description of Artificial Sequence: Synthetic oligonucleotide
  Sense strand starting at position 587 of SEQ ID NO: 914012
ucgcuaauccacuaacagu

SEQ ID NO: 971209 - RNA, 19 nt, Artificial Sequence
  Description of Artificial Sequence: Synthetic oligonucleotide
  Antisense strand to SEQ ID NO: 971208
acuguuaguggauuagcga

SEQ ID NO: 971210 - RNA, 19 nt, Artificial Sequence
  Description of Artificial Sequence: Synthetic oligonucleotide
  Sense strand starting at position 3190 of SEQ ID NO: 914012
gugauagcuccggaggcaa

SEQ ID NO: 971211 - RNA, 19 nt, Artificial Sequence
  Description of Artificial Sequence: Synthetic oligonucleotide
  Antisense strand to SEQ ID NO: 971210
uugccuccggagcuaucac

SEQ ID NO: 971212 - RNA, 19 nt, Artificial Sequence
  Description of Artificial Sequence: Synthetic oligonucleotide
  Sense strand starting at position 701 of SEQ ID NO: 914012
aagaguuccgucuagccaa

SEQ ID NO: 971213 - RNA, 19 nt, Artificial Sequence
  Description of Artificial Sequence: Synthetic oligonucleotide
  Antisense strand to SEQ ID NO: 971212
uuggcuagacggaacucuu

SEQ ID NO: 971214 - RNA, 19 nt, Artificial Sequence
  Description of Artificial Sequence: Synthetic oligonucleotide
  Sense strand starting at position 2888 of SEQ ID NO: 914012
caagcucgguucucagaga

SEQ ID NO: 971215 - RNA, 19 nt, Artificial Sequence
  Description of Artificial Sequence: Synthetic oligonucleotide
  Antisense strand to SEQ ID NO: 971214
ucucugagaaccgagcuug

SEQ ID NO: 971216 - RNA, 19 nt, Artificial Sequence
  Description of Artificial Sequence: Synthetic oligonucleotide
  Sense strand starting at position 3619 of SEQ ID NO: 914012
gguucugugcuugagggua

SEQ ID NO: 971217 - RNA, 19 nt, Artificial Sequence
  Description of Artificial Sequence: Synthetic oligonucleotide
  Antisense strand to SEQ ID NO: 971216
uacccucaagcacagaacc

SEQ ID NO: 971218 - RNA, 19 nt, Artificial Sequence
  Description of Artificial Sequence: Synthetic oligonucleotide
  Sense strand starting at position 3824 of SEQ ID NO: 914012
cugaccugucaccgugaga

SEQ ID NO: 971219 - RNA, 19 nt, Artificial Sequence
  Description of Artificial Sequence: Synthetic oligonucleotide
  Antisense strand to SEQ ID NO: 971218
ucucacggugacaggucag

SEQ ID NO: 971220 - RNA, 19 nt, Artificial Sequence
  Description of Artificial Sequence: Synthetic oligonucleotide
  Sense strand starting at position 2545 of SEQ ID NO: 914012
aaaucuguguccucauggu

SEQ ID NO: 971221 - RNA, 19 nt, Artificial Sequence
  Description of Artificial Sequence: Synthetic oligonucleotide
  Antisense strand to SEQ ID NO: 971220
accaugaggacacagauuu

SEQ ID NO: 971222 - RNA, 19 nt, Artificial Sequence
  Description of Artificial Sequence: Synthetic oligonucleotide
  Sense strand starting at position 3793 of SEQ ID NO: 914012
ccugucaagucuguuuaca

SEQ ID NO: 971223 - RNA, 19 nt, Artificial Sequence
  Description of Artificial Sequence: Synthetic oligonucleotide
  Antisense strand to SEQ ID NO: 971222
uguaaacagacuugacagg

SEQ ID NO: 971224 - RNA, 19 nt, Artificial Sequence
  Description of Artificial Sequence: Synthetic oligonucleotide
  Sense strand starting at position 2562 of SEQ ID NO: 914012
gugucagucuuagcacaaa

SEQ ID NO: 971225 - RNA, 19 nt, Artificial Sequence
  Description of Artificial Sequence: Synthetic oligonucleotide
  Antisense strand to SEQ ID NO: 971224
uuugugcuaagacugacac

SEQ ID NO: 971226 - RNA, 19 nt, Artificial Sequence
  Description of Artificial Sequence: Synthetic oligonucleotide
  Sense strand starting at position 2484 of SEQ ID NO: 914012
ucacaaucguucgcagaga

SEQ ID NO: 971227 - RNA, 19 nt, Artificial Sequence
  Description of Artificial Sequence: Synthetic oligonucleotide
  Antisense strand to SEQ ID NO: 971226
ucucugcgaacgauuguga

SEQ ID NO: 971228 - RNA, 19 nt, Artificial Sequence
  Description of Artificial Sequence: Synthetic oligonucleotide
  Sense strand starting at position 3977 of SEQ ID NO: 914012
ucauuucccuuaggaagua

SEQ ID NO: 971229 - RNA, 19 nt, Artificial Sequence
  Description of Artificial Sequence: Synthetic oligonucleotide
  Antisense strand to SEQ ID NO: 971228
uacuuccuaagggaaauga

SEQ ID NO: 971230 - RNA, 19 nt, Artificial Sequence
  Description of Artificial Sequence: Synthetic oligonucleotide
  Sense strand starting at position 54 of SEQ ID NO: 914012
auuaccaucugggaucaga

SEQ ID NO: 971231 - RNA, 19 nt, Artificial Sequence
  Description of Artificial Sequence: Synthetic oligonucleotide
  Antisense strand to SEQ ID NO: 971230
ucugaucccagaugguaau

SEQ ID NO: 971232 - RNA, 19 nt, Artificial Sequence
  Description of Artificial Sequence: Synthetic oligonucleotide
  Sense strand starting at position 603 of SEQ ID NO: 914012
aguguacuguauucuguau

SEQ ID NO: 971233 - RNA, 19 nt, Artificial Sequence
  Description of Artificial Sequence: Synthetic oligonucleotide
  Antisense strand to SEQ ID NO: 971232
auacagaauacaguacacu

SEQ ID NO: 971234 - RNA, 19 nt, Artificial Sequence
  Description of Artificial Sequence: Synthetic oligonucleotide
  Sense strand starting at position 2884 of SEQ ID NO: 914012
gagucaagcucgguucuca

SEQ ID NO: 971235 - RNA, 19 nt, Artificial Sequence
  Description of Artificial Sequence: Synthetic oligonucleotide
  Antisense strand to SEQ ID NO: 971234
ugagaaccgagcuugacuc

SEQ ID NO: 971236 - RNA, 19 nt, Artificial Sequence
  Description of Artificial Sequence: Synthetic oligonucleotide
  Sense strand starting at position 3201 of SEQ ID NO: 914012
ggaggcaagucgucuucuu

SEQ ID NO: 971237 - RNA, 19 nt, Artificial Sequence
  Description of Artificial Sequence: Synthetic oligonucleotide
  Antisense strand to SEQ ID NO: 971236
aagaagacgacuugccucc

SEQ ID NO: 971238 - RNA, 19 nt, Artificial Sequence
  Description of Artificial Sequence: Synthetic oligonucleotide
  Sense strand starting at position 3124 of SEQ ID NO: 914012
gaacuacuuuccgaaggag

SEQ ID NO: 971239 - RNA, 19 nt, Artificial Sequence
  Description of Artificial Sequence: Synthetic oligonucleotide
  Antisense strand to SEQ ID NO: 971238
cuccuucggaaaguaguuc

SEQ ID NO: 971240 - RNA, 19 nt, Artificial Sequence
  Description of Artificial Sequence: Synthetic oligonucleotide
  Sense strand starting at position 89 of SEQ ID NO: 914012
uucuauguuuaugacaaga

SEQ ID NO: 971241 - RNA, 19 nt, Artificial Sequence
  Description of Artificial Sequence: Synthetic oligonucleotide
  Antisense strand to SEQ ID NO: 971240
ucuugucauaaacauagaa

SEQ ID NO: 971242 - RNA, 19 nt, Artificial Sequence
  Description of Artificial Sequence: Synthetic oligonucleotide
  Sense strand starting at position 2289 of SEQ ID NO: 914013
gagcauuccguagcucuuu

SEQ ID NO: 971243 - RNA, 19 nt, Artificial Sequence
  Description of Artificial Sequence: Synthetic oligonucleotide
  Antisense strand to SEQ ID NO: 971242
aaagagcuacggaaugcuc

SEQ ID NO: 971244 - RNA, 19 nt, Artificial Sequence
  Description of Artificial Sequence: Synthetic oligonucleotide
  Sense strand starting at position 3866 of SEQ ID NO: 914013
ggacccagauuaguugaua

SEQ ID NO: 971245 - RNA, 19 nt, Artificial Sequence
  Description of Artificial Sequence: Synthetic oligonucleotide
  Antisense strand to SEQ ID NO: 971244
uaucaacuaaucugggucc

SEQ ID NO: 971246 - RNA, 19 nt, Artificial Sequence
  Description of Artificial Sequence: Synthetic oligonucleotide
  Sense strand starting at position 975 of SEQ ID NO: 914013
agaauagggcucuacucuu

SEQ ID NO: 971247 - RNA, 19 nt, Artificial Sequence
  Description of Artificial Sequence: Synthetic oligonucleotide
  Antisense strand to SEQ ID NO: 971246
aagaguagagcccuauucu

SEQ ID NO: 971248 - RNA, 19 nt, Artificial Sequence
  Description of Artificial Sequence: Synthetic oligonucleotide
  Sense strand starting at position 3630 of SEQ ID NO: 914013
agagaauagguaugcagau

SEQ ID NO: 971249 - RNA, 19 nt, Artificial Sequence
  Description of Artificial Sequence: Synthetic oligonucleotide
  Antisense strand to SEQ ID NO: 971248
aucugcauaccuauucucu

SEQ ID NO: 971250 - RNA, 19 nt, Artificial Sequence
  Description of Artificial Sequence: Synthetic oligonucleotide
  Sense strand starting at position 2906 of SEQ ID NO: 914013
agcuaaugccaauagacua

SEQ ID NO: 971251 - RNA, 19 nt, Artificial Sequence
  Description of Artificial Sequence: Synthetic oligonucleotide
  Antisense strand to SEQ ID NO: 971250
uagucuauuggcauuagcu

SEQ ID NO: 971252 - RNA, 19 nt, Artificial Sequence
  Description of Artificial Sequence: Synthetic oligonucleotide
  Sense strand starting at position 3867 of SEQ ID NO: 914013
gacccagauuaguugauau

SEQ ID NO: 971253 - RNA, 19 nt, Artificial Sequence
  Description of Artificial Sequence: Synthetic oligonucleotide
  Antisense strand to SEQ ID NO: 971252
auaucaacuaaucuggguc

SEQ ID NO: 971254 - RNA, 19 nt, Artificial Sequence
  Description of Artificial Sequence: Synthetic oligonucleotide
  Sense strand starting at position 597 of SEQ ID NO: 914013
uccagcuuuggugaaauaa

SEQ ID NO: 971255 - RNA, 19 nt, Artificial Sequence
  Description of Artificial Sequence: Synthetic oligonucleotide
  Antisense strand to SEQ ID NO: 971254
uuauuucaccaaagcugga

SEQ ID NO: 971256 - RNA, 19 nt, Artificial Sequence
  Description of Artificial Sequence: Synthetic oligonucleotide
  Sense strand starting at position 2579 of SEQ ID NO: 914013
gagucauaccuuuagguau

SEQ ID NO: 971257 - RNA, 19 nt, Artificial Sequence
  Description of Artificial Sequence: Synthetic oligonucleotide
  Antisense strand to SEQ ID NO: 971256
auaccuaaagguaugacuc

SEQ ID NO: 971258 - RNA, 19 nt, Artificial Sequence
  Description of Artificial Sequence: Synthetic oligonucleotide
  Sense strand starting at position 1237 of SEQ ID NO: 914013
ugcagaguggauuaagcaa

SEQ ID NO: 971259 - RNA, 19 nt, Artificial Sequence
  Description of Artificial Sequence: Synthetic oligonucleotide
  Antisense strand to SEQ ID NO: 971258
uugcuuaauccacucugca

SEQ ID NO: 971260 - RNA, 19 nt, Artificial Sequence
  Description of Artificial Sequence: Synthetic oligonucleotide
  Sense strand starting at position 1244 of SEQ ID NO: 914013
uggauuaagcaagagugca

SEQ ID NO: 971261 - RNA, 19 nt, Artificial Sequence
  Description of Artificial Sequence: Synthetic oligonucleotide
  Antisense strand to SEQ ID NO: 971260
ugcacucuugcuuaaucca

SEQ ID NO: 971262 - RNA, 19 nt, Artificial Sequence
  Description of Artificial Sequence: Synthetic oligonucleotide
  Sense strand starting at position 3177 of SEQ ID NO: 914013
ggauuccaguuucuagaau

SEQ ID NO: 971263 - RNA, 19 nt, Artificial Sequence
  Description of Artificial Sequence: Synthetic oligonucleotide
  Antisense strand to SEQ ID NO: 971262
auucuagaaacuggaaucc

SEQ ID NO: 971264 - RNA, 19 nt, Artificial Sequence
  Description of Artificial Sequence: Synthetic oligonucleotide
  Sense strand starting at position 2183 of SEQ ID NO: 914013
gguaguuuggcugaaugaa

SEQ ID NO: 971265 - RNA, 19 nt, Artificial Sequence
  Description of Artificial Sequence: Synthetic oligonucleotide
  Antisense strand to SEQ ID NO: 971264
uucauucagccaaacuacc

SEQ ID NO: 971266 - RNA, 19 nt, Artificial Sequence
  Description of Artificial Sequence: Synthetic oligonucleotide
  Sense strand starting at position 2876 of SEQ ID NO: 914013
gagauacuacgauggcaua

SEQ ID NO: 971267 - RNA, 19 nt, Artificial Sequence
  Description of Artificial Sequence: Synthetic oligonucleotide
  Antisense strand to SEQ ID NO: 971266
uaugccaucguaguaucuc

SEQ ID NO: 971268 - RNA, 19 nt, Artificial Sequence
  Description of Artificial Sequence: Synthetic oligonucleotide
  Sense strand starting at position 3880 of SEQ ID NO: 914013
ugauaucagucacuacacu

SEQ ID NO: 971269 - RNA, 19 nt, Artificial Sequence
  Description of Artificial Sequence: Synthetic oligonucleotide
  Antisense strand to SEQ ID NO: 971268
aguguagugacugauauca

SEQ ID NO: 971270 - RNA, 19 nt, Artificial Sequence
  Description of Artificial Sequence: Synthetic oligonucleotide
  Sense strand starting at position 2321 of SEQ ID NO: 914013
gaauaaaucggagguggug

SEQ ID NO: 971271 - RNA, 19 nt, Artificial Sequence
  Description of Artificial Sequence: Synthetic oligonucleotide
  Antisense strand to SEQ ID NO: 971270
caccaccuccgauuuauuc

SEQ ID NO: 971272 - RNA, 19 nt, Artificial Sequence
  Description of Artificial Sequence: Synthetic oligonucleotide
  Sense strand starting at position 310 of SEQ ID NO: 914013
accuuaaugugucuagaaa

SEQ ID NO: 971273 - RNA, 19 nt, Artificial Sequence
  Description of Artificial Sequence: Synthetic oligonucleotide
  Antisense strand to SEQ ID NO: 971272
uuucuagacacauuaaggu

SEQ ID NO: 971274 - RNA, 19 nt, Artificial Sequence
  Description of Artificial Sequence: Synthetic oligonucleotide
  Sense strand starting at position 2440 of SEQ ID NO: 914013
ccgcguuuccuucucuuua

SEQ ID NO: 971275 - RNA, 19 nt, Artificial Sequence
  Description of Artificial Sequence: Synthetic oligonucleotide
  Antisense strand to SEQ ID NO: 971274
uaaagagaaggaaacgcgg

SEQ ID NO: 971276 - RNA, 19 nt, Artificial Sequence
  Description of Artificial Sequence: Synthetic oligonucleotide
  Sense strand starting at position 1063 of SEQ ID NO: 914013
guugacuugggauguacaa

SEQ ID NO: 971277 - RNA, 19 nt, Artificial Sequence
  Description of Artificial Sequence: Synthetic oligonucleotide
  Antisense strand to SEQ ID NO: 971276
uuguacaucccaagucaac

SEQ ID NO: 971278 - RNA, 19 nt, Artificial Sequence
  Description of Artificial Sequence: Synthetic oligonucleotide
  Sense strand starting at position 1209 of SEQ ID NO: 914013
ucguuaucacuagaauccu

SEQ ID NO: 971279 - RNA, 19 nt, Artificial Sequence
  Description of Artificial Sequence: Synthetic oligonucleotide
  Antisense strand to SEQ ID NO: 971278
aggauucuagugauaacga

SEQ ID NO: 971280 - RNA, 19 nt, Artificial Sequence
  Description of Artificial Sequence: Synthetic oligonucleotide
  Sense strand starting at position 2707 of SEQ ID NO: 914013
aacuuuaugugauccggga

SEQ ID NO: 971281 - RNA, 19 nt, Artificial Sequence
  Description of Artificial Sequence: Synthetic oligonucleotide
  Antisense strand to SEQ ID NO: 971280
ucccggaucacauaaaguu

SEQ ID NO: 971282 - RNA, 19 nt, Artificial Sequence
  Description of Artificial Sequence: Synthetic oligonucleotide
  Sense strand starting at position 1401 of SEQ ID NO: 914013
gcgagacacucucuacaaa

SEQ ID NO: 971283 - RNA, 19 nt, Artificial Sequence
  Description of Artificial Sequence: Synthetic oligonucleotide
  Antisense strand to SEQ ID NO: 971282
uuuguagagagugucucgc

SEQ ID NO: 971284 - RNA, 19 nt, Artificial Sequence
  Description of Artificial Sequence: Synthetic oligonucleotide
  Sense strand starting at position 3558 of SEQ ID NO: 914013
guguuaggacuacaugcau

SEQ ID NO: 971285 - RNA, 19 nt, Artificial Sequence
  Description of Artificial Sequence: Synthetic oligonucleotide
  Antisense strand to SEQ ID NO: 971284
augcauguaguccuaacac

SEQ ID NO: 971286 - RNA, 19 nt, Artificial Sequence
  Description of Artificial Sequence: Synthetic oligonucleotide
  Sense strand starting at position 998 of SEQ ID NO: 914013
gguccaaaguucuuuaaau

SEQ ID NO: 971287 - RNA, 19 nt, Artificial Sequence
  Description of Artificial Sequence: Synthetic oligonucleotide
  Antisense strand to SEQ ID NO: 971286
auuuaaagaacuuuggacc

SEQ ID NO: 971288 - RNA, 19 nt, Artificial Sequence
  Description of Artificial Sequence: Synthetic oligonucleotide
  Sense strand starting at position 2697 of SEQ ID NO: 914013
acuagaucguaacuuuaug

SEQ ID NO: 971289 - RNA, 19 nt, Artificial Sequence
  Description of Artificial Sequence: Synthetic oligonucleotide
  Antisense strand to SEQ ID NO: 971288
cauaaaguuacgaucuagu

SEQ ID NO: 971290 - RNA, 19 nt, Artificial Sequence
  Description of Artificial Sequence: Synthetic oligonucleotide
  Sense strand starting at position 2500 of SEQ ID NO: 914013
acuugcugugacugaaaua

SEQ ID NO: 971291 - RNA, 19 nt, Artificial Sequence
  Description of Artificial Sequence: Synthetic oligonucleotide
  Antisense strand to SEQ ID NO: 971290
uauuucagucacagcaagu

SEQ ID NO: 971292 - RNA, 19 nt, Artificial Sequence
  Description of Artificial Sequence: Synthetic oligonucleotide
  Sense strand starting at position 1207 of SEQ ID NO: 914013
ugucguuaucacuagaauc

SEQ ID NO: 971293 - RNA, 19 nt, Artificial Sequence
  Description of Artificial Sequence: Synthetic oligonucleotide
  Antisense strand to SEQ ID NO: 971292
gauucuagugauaacgaca

SEQ ID NO: 971294 - RNA, 19 nt, Artificial Sequence
  Description of Artificial Sequence: Synthetic oligonucleotide
  Sense strand starting at position 2516 of SEQ ID NO: 914013
auaaacuuaguauguguga

SEQ ID NO: 971295 - RNA, 19 nt, Artificial Sequence
  Description of Artificial Sequence: Synthetic oligonucleotide
  Antisense strand to SEQ ID NO: 971294
ucacacauacuaaguuuau

SEQ ID NO: 971296 - RNA, 19 nt, Artificial Sequence
  Description of Artificial Sequence: Synthetic oligonucleotide
  Sense strand starting at position 999 of SEQ ID NO: 914013
guccaaaguucuuuaaauc

SEQ ID NO: 971297 - RNA, 19 nt, Artificial Sequence
  Description of Artificial Sequence: Synthetic oligonucleotide
  Antisense strand to SEQ ID NO: 971296
gauuuaaagaacuuuggac

SEQ ID NO: 971298 - RNA, 19 nt, Artificial Sequence
  Description of Artificial Sequence: Synthetic oligonucleotide
  Sense strand starting at position 2380 of SEQ ID NO: 914013
gcugcauacggagaacuuu

SEQ ID NO: 971299 - RNA, 19 nt, Artificial Sequence
  Description of Artificial Sequence: Synthetic oligonucleotide
  Antisense strand to SEQ ID NO: 971298
aaaguucuccguaugcagc

SEQ ID NO: 971300 - RNA, 19 nt, Artificial Sequence
  Description of Artificial Sequence: Synthetic oligonucleotide
  Sense strand starting at position 308 of SEQ ID NO: 914013
ucaccuuaaugugucuaga

SEQ ID NO: 971301 - RNA, 19 nt, Artificial Sequence
  Description of Artificial Sequence: Synthetic oligonucleotide
  Antisense strand to SEQ ID NO: 971300
ucuagacacauuaagguga

SEQ ID NO: 971302 - RNA, 19 nt, Artificial Sequence
  Description of Artificial Sequence: Synthetic oligonucleotide
  Sense strand starting at position 595 of SEQ ID NO: 914013
acuccagcuuuggugaaau

SEQ ID NO: 971303 - RNA, 19 nt, Artificial Sequence
  Description of Artificial Sequence: Synthetic oligonucleotide
  Antisense strand to SEQ ID NO: 971302
auuucaccaaagcuggagu

SEQ ID NO: 971304 - RNA, 19 nt, Artificial Sequence
  Description of Artificial Sequence: Synthetic oligonucleotide
  Sense strand starting at position 986 of SEQ ID NO: 914013
cuacucuuucuggguccaa

SEQ ID NO: 971305 - RNA, 19 nt, Artificial Sequence
  Description of Artificial Sequence: Synthetic oligonucleotide
  Antisense strand to SEQ ID NO: 971304
uuggacccagaaagaguag

SEQ ID NO: 971306 - RNA, 19 nt, Artificial Sequence
  Description of Artificial Sequence: Synthetic oligonucleotide
  Sense strand starting at position 3741 of SEQ ID NO: 914013
uuguaauggguguauguua

SEQ ID NO: 971307 - RNA, 19 nt, Artificial Sequence
  Description of Artificial Sequence: Synthetic oligonucleotide
  Antisense strand to SEQ ID NO: 971306
uaacauacacccauuacaa

SEQ ID NO: 971308 - RNA, 19 nt, Artificial Sequence
  Description of Artificial Sequence: Synthetic oligonucleotide
  Sense strand starting at position 3897 of SEQ ID NO: 914013
cuugccuucuuaguaaaga

SEQ ID NO: 971309 - RNA, 19 nt, Artificial Sequence
  Description of Artificial Sequence: Synthetic oligonucleotide
  Antisense strand to SEQ ID NO: 971308
ucuuuacuaagaaggcaag

SEQ ID NO: 971310 - RNA, 19 nt, Artificial Sequence
  Description of Artificial Sequence: Synthetic oligonucleotide
  Sense strand starting at position 1273 of SEQ ID NO: 914013
acauaugaccgcugguaau

SEQ ID NO: 971311 - RNA, 19 nt, Artificial Sequence
  Description of Artificial Sequence: Synthetic oligonucleotide
  Antisense strand to SEQ ID NO: 971310
auuaccagcggucauaugu

SEQ ID NO: 971312 - RNA, 19 nt, Artificial Sequence
  Description of Artificial Sequence: Synthetic oligonucleotide
  Sense strand starting at position 2620 of SEQ ID NO: 914013
ucuccuucguccucugaaa

SEQ ID NO: 971313 - RNA, 19 nt, Artificial Sequence
  Description of Artificial Sequence: Synthetic oligonucleotide
  Antisense strand to SEQ ID NO: 971312
uuucagaggacgaaggaga

SEQ ID NO: 971314 - RNA, 19 nt, Artificial Sequence
  Description of Artificial Sequence: Synthetic oligonucleotide
  Sense strand starting at position 2496 of SEQ ID NO: 914013
ugguacuugcugugacuga

SEQ ID NO: 971315 - RNA, 19 nt, Artificial Sequence
  Description of Artificial Sequence: Synthetic oligonucleotide
  Antisense strand to SEQ ID NO: 971314
ucagucacagcaaguacca

SEQ ID NO: 971316 - RNA, 19 nt, Artificial Sequence
  Description of Artificial Sequence: Synthetic oligonucleotide
  Sense strand starting at position 2711 of SEQ ID NO: 914013
uuaugugauccgggagccu

SEQ ID NO: 971317 - RNA, 19 nt, Artificial Sequence
  Description of Artificial Sequence: Synthetic oligonucleotide
  Antisense strand to SEQ ID NO: 971316
aggcucccggaucacauaa

SEQ ID NO: 971318 - RNA, 19 nt, Artificial Sequence
  Description of Artificial Sequence: Synthetic oligonucleotide
  Sense strand starting at position 2287 of SEQ ID NO: 914013
gggagcauuccguagcucu

SEQ ID NO: 971319 - RNA, 19 nt, Artificial Sequence
  Description of Artificial Sequence: Synthetic oligonucleotide
  Antisense strand to SEQ ID NO: 971318
agagcuacggaaugcuccc

SEQ ID NO: 971320 - RNA, 19 nt, Artificial Sequence
  Description of Artificial Sequence: Synthetic oligonucleotide
  Sense strand starting at position 2229 of SEQ ID NO: 914013
gaaagaaacuguugcauuu

SEQ ID NO: 971321 - RNA, 19 nt, Artificial Sequence
  Description of Artificial Sequence: Synthetic oligonucleotide
  Antisense strand to SEQ ID NO: 971320
aaaugcaacaguuucuuuc

SEQ ID NO: 971322 - RNA, 19 nt, Artificial Sequence
  Description of Artificial Sequence: Synthetic oligonucleotide
  Sense strand starting at position 3089 of SEQ ID NO: 914014
uagggauucugagcaauaa

SEQ ID NO: 971323 - RNA, 19 nt, Artificial Sequence
  Description of Artificial Sequence: Synthetic oligonucleotide
  Antisense strand to SEQ ID NO: 971322
uuauugcucagaaucccua

SEQ ID NO: 971324 - RNA, 19 nt, Artificial Sequence
  Description of Artificial Sequence: Synthetic oligonucleotide
  Sense strand starting at position 3968 of SEQ ID NO: 914014
guaucaaggccagagaucu

SEQ ID NO: 971325 - RNA, 19 nt, Artificial Sequence
  Description of Artificial Sequence: Synthetic oligonucleotide
  Antisense strand to SEQ ID NO: 971324
agaucucuggccuugauac

SEQ ID NO: 971326 - RNA, 19 nt, Artificial Sequence
  Description of Artificial Sequence: Synthetic oligonucleotide
  Sense strand starting at position 3156 of SEQ ID NO: 914014
gagggaaggcauugaaguu

SEQ ID NO: 971327 - RNA, 19 nt, Artificial Sequence
  Description of Artificial Sequence: Synthetic oligonucleotide
  Antisense strand to SEQ ID NO: 971326
aacuucaaugccuucccuc

SEQ ID NO: 971328 - RNA, 19 nt, Artificial Sequence
  Description of Artificial Sequence: Synthetic oligonucleotide
  Sense strand starting at position 3700 of SEQ ID NO: 914014
cagagauugccuuaccuug

SEQ ID NO: 971329 - RNA, 19 nt, Artificial Sequence
  Description of Artificial Sequence: Synthetic oligonucleotide
  Antisense strand to SEQ ID NO: 971328
caagguaaggcaaucucug

SEQ ID NO: 971330 - RNA, 19 nt, Artificial Sequence
  Description of Artificial Sequence: Synthetic oligonucleotide
  Sense strand starting at position 3966 of SEQ ID NO: 914014
guguaucaaggccagagau

SEQ ID NO: 971331 - RNA, 19 nt, Artificial Sequence
  Description of Artificial Sequence: Synthetic oligonucleotide
  Antisense strand to SEQ ID NO: 971330
aucucuggccuugauacac

SEQ ID NO: 971332 - RNA, 19 nt, Artificial Sequence
  Description of Artificial Sequence: Synthetic oligonucleotide
  Sense strand starting at position 1077 of SEQ ID NO: 914014
gcgagcucgcauucaaguu

SEQ ID NO: 971333 - RNA, 19 nt, Artificial Sequence
  Description of Artificial Sequence: Synthetic oligonucleotide
  Antisense strand to SEQ ID NO: 971332
aacuugaaugcgagcucgc

SEQ ID NO: 971334 - RNA, 19 nt, Artificial Sequence
  Description of Artificial Sequence: Synthetic oligonucleotide
  Sense strand starting at position 3878 of SEQ ID NO: 914014
ugugauucucugcaauuag

SEQ ID NO: 971335 - RNA, 19 nt, Artificial Sequence
  Description of Artificial Sequence: Synthetic oligonucleotide
  Antisense strand to SEQ ID NO: 971334
cuaauugcagagaaucaca

SEQ ID NO: 971336 - RNA, 19 nt, Artificial Sequence
  Description of Artificial Sequence: Synthetic oligonucleotide
  Sense strand starting at position 158 of SEQ ID NO: 914014
uuaggcuaagucugaaaug

SEQ ID NO: 971337 - RNA, 19 nt, Artificial Sequence
  Description of Artificial Sequence: Synthetic oligonucleotide
  Antisense strand to SEQ ID NO: 971336
cauuucagacuuagccuaa

SEQ ID NO: 971338 - RNA, 19 nt, Artificial Sequence
  Description of Artificial Sequence: Synthetic oligonucleotide
  Sense strand starting at position 2840 of SEQ ID NO: 914014
gggugucauuggaagguga

SEQ ID NO: 971339 - RNA, 19 nt, Artificial Sequence
  Description of Artificial Sequence: Synthetic oligonucleotide
  Antisense strand to SEQ ID NO: 971338
ucaccuuccaaugacaccc

SEQ ID NO: 971340 - RNA, 19 nt, Artificial Sequence
  Description of Artificial Sequence: Synthetic oligonucleotide
  Sense strand starting at position 111 of SEQ ID NO: 914014
agugcugucauagaaaguu

SEQ ID NO: 971341 - RNA, 19 nt, Artificial Sequence
  Description of Artificial Sequence: Synthetic oligonucleotide
  Antisense strand to SEQ ID NO: 971340
aacuuucuaugacagcacu

SEQ ID NO: 971342 - RNA, 19 nt, Artificial Sequence
  Description of Artificial Sequence: Synthetic oligonucleotide
  Sense strand starting at position 168 of SEQ ID NO: 914014
ucugaaauguaguuucuua

SEQ ID NO: 971343 - RNA, 19 nt, Artificial Sequence
  Description of Artificial Sequence: Synthetic oligonucleotide
  Antisense strand to SEQ ID NO: 971342
uaagaaacuacauuucaga

SEQ ID NO: 971344 - RNA, 19 nt, Artificial Sequence
  Description of Artificial Sequence: Synthetic oligonucleotide
  Sense strand starting at position 2842 of SEQ ID NO: 914014
gugucauuggaaggugauc

SEQ ID NO: 971345 - RNA, 19 nt, Artificial Sequence
  Description of Artificial Sequence: Synthetic oligonucleotide
  Antisense strand to SEQ ID NO: 971344
gaucaccuuccaaugacac

SEQ ID NO: 971346 - RNA, 19 nt, Artificial Sequence
  Description of Artificial Sequence: Synthetic oligonucleotide
  Sense strand starting at position 3470 of SEQ ID NO: 914014
gcguauucucucuacagag

SEQ ID NO: 971347 - RNA, 19 nt, Artificial Sequence
  Description of Artificial Sequence: Synthetic oligonucleotide
  Antisense strand to SEQ ID NO: 971346
cucuguagagagaauacgc

SEQ ID NO: 971348 - RNA, 19 nt, Artificial Sequence
  Description of Artificial Sequence: Synthetic oligonucleotide
  Sense strand starting at position 3851 of SEQ ID NO: 914014
acaguuucccggugauaga

SEQ ID NO: 971349 - RNA, 19 nt, Artificial Sequence
  Description of Artificial Sequence: Synthetic oligonucleotide
  Antisense strand to SEQ ID NO: 971348
ucuaucaccgggaaacugu

SEQ ID NO: 971350 - RNA, 19 nt, Artificial Sequence
  Description of Artificial Sequence: Synthetic oligonucleotide
  Sense strand starting at position 2235 of SEQ ID NO: 914014
acgcgaggauucuuauaac

SEQ ID NO: 971351 - RNA, 19 nt, Artificial Sequence
  Description of Artificial Sequence: Synthetic oligonucleotide
  Antisense strand to SEQ ID NO: 971350
guuauaagaauccucgcgu

SEQ ID NO: 971352 - RNA, 19 nt, Artificial Sequence
  Description of Artificial Sequence: Synthetic oligonucleotide
  Sense strand starting at position 3698 of SEQ ID NO: 914014
gccagagauugccuuaccu

SEQ ID NO: 971353 - RNA, 19 nt, Artificial Sequence
  Description of Artificial Sequence: Synthetic oligonucleotide
  Antisense strand to SEQ ID NO: 971352
agguaaggcaaucucuggc

SEQ ID NO: 971354 - RNA, 19 nt, Artificial Sequence
  Description of Artificial Sequence: Synthetic oligonucleotide
  Sense strand starting at position 204 of SEQ ID NO: 914014
gagucucugguuugguuaa

SEQ ID NO: 971355 - RNA, 19 nt, Artificial Sequence
  Description of Artificial Sequence: Synthetic oligonucleotide
  Antisense strand to SEQ ID NO: 971354
uuaaccaaaccagagacuc

SEQ ID NO: 971356 - RNA, 19 nt, Artificial Sequence
  Description of Artificial Sequence: Synthetic oligonucleotide
  Sense strand starting at position 2047 of SEQ ID NO: 914014
aguucuuggugaguuucua

SEQ ID NO: 971357 - RNA, 19 nt, Artificial Sequence
  Description of Artificial Sequence: Synthetic oligonucleotide
  Antisense strand to SEQ ID NO: 971356
uagaaacucaccaagaacu

SEQ ID NO: 971358 - RNA, 19 nt, Artificial Sequence
  Description of Artificial Sequence: Synthetic oligonucleotide
  Sense strand starting at position 2038 of SEQ ID NO: 914014
gcgcguguuaguucuuggu

SEQ ID NO: 971359 - RNA, 19 nt, Artificial Sequence
  Description of Artificial Sequence: Synthetic oligonucleotide
  Antisense strand to SEQ ID NO: 971358
accaagaacuaacacgcgc

SEQ ID NO: 971360 - RNA, 19 nt, Artificial Sequence
  Description of Artificial Sequence: Synthetic oligonucleotide
  Sense strand starting at position 915 of SEQ ID NO: 914014
gugcucuccgguuauacua

SEQ ID NO: 971361 - RNA, 19 nt, Artificial Sequence
  Description of Artificial Sequence: Synthetic oligonucleotide
  Antisense strand to SEQ ID NO: 971360
uaguauaaccggagagcac

SEQ ID NO: 971362 - RNA, 19 nt, Artificial Sequence
  Description of Artificial Sequence: Synthetic oligonucleotide
  Sense strand starting at position 206 of SEQ ID NO: 914014
gucucugguuugguuaauu

SEQ ID NO: 971363 - RNA, 19 nt, Artificial Sequence
  Description of Artificial Sequence: Synthetic oligonucleotide
  Antisense strand to SEQ ID NO: 971362
aauuaaccaaaccagagac

SEQ ID NO: 971364 - RNA, 19 nt, Artificial Sequence
  Description of Artificial Sequence: Synthetic oligonucleotide
  Sense strand starting at position 3547 of SEQ ID NO: 914014
ggcuucuguuggguauuca

SEQ ID NO: 971365 - RNA, 19 nt, Artificial Sequence
  Description of Artificial Sequence: Synthetic oligonucleotide
  Antisense strand to SEQ ID NO: 971364
ugaauacccaacagaagcc

SEQ ID NO: 971366 - RNA, 19 nt, Artificial Sequence
  Description of Artificial Sequence: Synthetic oligonucleotide
  Sense strand starting at position 3469 of SEQ ID NO: 914014
ugcguauucucucuacaga

SEQ ID NO: 971367 - RNA, 19 nt, Artificial Sequence
  Description of Artificial Sequence: Synthetic oligonucleotide
  Antisense strand to SEQ ID NO: 971366
ucuguagagagaauacgca

SEQ ID NO: 971368 - RNA, 19 nt, Artificial Sequence
  Description of Artificial Sequence: Synthetic oligonucleotide
  Sense strand starting at position 3868 of SEQ ID NO: 914014
gagccugagcugugauucu

SEQ ID NO: 971369 - RNA, 19 nt, Artificial Sequence
  Description of Artificial Sequence: Synthetic oligonucleotide
  Antisense strand to SEQ ID NO: 971368
agaaucacagcucaggcuc

SEQ ID NO: 971370 - RNA, 19 nt, Artificial Sequence
  Description of Artificial Sequence: Synthetic oligonucleotide
  Sense strand starting at position 3875 of SEQ ID NO: 914014
agcugugauucucugcaau

SEQ ID NO: 971371 - RNA, 19 nt, Artificial Sequence
  Description of Artificial Sequence: Synthetic oligonucleotide
  Antisense strand to SEQ ID NO: 971370
auugcagagaaucacagcu

SEQ ID NO: 971372 - RNA, 19 nt, Artificial Sequence
  Description of Artificial Sequence: Synthetic oligonucleotide
  Sense strand starting at position 202 of SEQ ID NO: 914014
uugagucucugguuugguu

SEQ ID NO: 971373 - RNA, 19 nt, Artificial Sequence
  Description of Artificial Sequence: Synthetic oligonucleotide
  Antisense strand to SEQ ID NO: 971372
aaccaaaccagagacucaa

SEQ ID NO: 971374 - RNA, 19 nt, Artificial Sequence
  Description of Artificial Sequence: Synthetic oligonucleotide
  Sense strand starting at position 2829 of SEQ ID NO: 914014
agaguauaugcggguguca

SEQ ID NO: 971375 - RNA, 19 nt, Artificial Sequence
  Description of Artificial Sequence: Synthetic oligonucleotide
  Antisense strand to SEQ ID NO: 971374
ugacacccgcauauacucu

SEQ ID NO: 971376 - RNA, 19 nt, Artificial Sequence
  Description of Artificial Sequence: Synthetic oligonucleotide
  Sense strand starting at position 2838 of SEQ ID NO: 914014
gcgggugucauuggaaggu

SEQ ID NO: 971377 - RNA, 19 nt, Artificial Sequence
  Description of Artificial Sequence: Synthetic oligonucleotide
  Antisense strand to SEQ ID NO: 971376
accuuccaaugacacccgc

SEQ ID NO: 971378 - RNA, 19 nt, Artificial Sequence
  Description of Artificial Sequence: Synthetic oligonucleotide
  Sense strand starting at position 2238 of SEQ ID NO: 914014
cgaggauucuuauaacaac

SEQ ID NO: 971379 - RNA, 19 nt, Artificial Sequence
  Description of Artificial Sequence: Synthetic oligonucleotide
  Antisense strand to SEQ ID NO: 971378
guuguuauaagaauccucg

SEQ ID NO: 971380 - RNA, 19 nt, Artificial Sequence
  Description of Artificial Sequence: Synthetic oligonucleotide
  Sense strand starting at position 2831 of SEQ ID NO: 914014
aguauaugcgggugucauu

SEQ ID NO: 971381 - RNA, 19 nt, Artificial Sequence
  Description of Artificial Sequence: Synthetic oligonucleotide
  Antisense strand to SEQ ID NO: 971380
aaugacacccgcauauacu

SEQ ID NO: 971382 - RNA, 19 nt, Artificial Sequence
  Description of Artificial Sequence: Synthetic oligonucleotide
  Sense strand starting at position 2042 of SEQ ID NO: 914014
guguuaguucuuggugagu

SEQ ID NO: 971383 - RNA, 19 nt, Artificial Sequence
  Description of Artificial Sequence: Synthetic oligonucleotide
  Antisense strand to SEQ ID NO: 971382
acucaccaagaacuaacac

SEQ ID NO: 971384 - RNA, 19 nt, Artificial Sequence
  Description of Artificial Sequence: Synthetic oligonucleotide
  Sense strand starting at position 911 of SEQ ID NO: 914014
cugggugcucuccgguuau

SEQ ID NO: 971385 - RNA, 19 nt, Artificial Sequence
  Description of Artificial Sequence: Synthetic oligonucleotide
  Antisense strand to SEQ ID NO: 971384
auaaccggagagcacccag

SEQ ID NO: 971386 - RNA, 19 nt, Artificial Sequence
  Description of Artificial Sequence: Synthetic oligonucleotide
  Sense strand starting at position 120 of SEQ ID NO: 914014
auagaaaguugaggucuaa

SEQ ID NO: 971387 - RNA, 19 nt, Artificial Sequence
  Description of Artificial Sequence: Synthetic oligonucleotide
  Antisense strand to SEQ ID NO: 971386
uuagaccucaacuuucuau

SEQ ID NO: 971388 - RNA, 19 nt, Artificial Sequence
  Description of Artificial Sequence: Synthetic oligonucleotide
  Sense strand starting at position 3056 of SEQ ID NO: 914014
gggcgcguuucuucugaga

SEQ ID NO: 971389 - RNA, 19 nt, Artificial Sequence
  Description of Artificial Sequence: Synthetic oligonucleotide
  Antisense strand to SEQ ID NO: 971388
ucucagaagaaacgcgccc

SEQ ID NO: 971390 - RNA, 19 nt, Artificial Sequence
  Description of Artificial Sequence: Synthetic oligonucleotide
  Sense strand starting at position 2040 of SEQ ID NO: 914014
gcguguuaguucuugguga

SEQ ID NO: 971391 - RNA, 19 nt, Artificial Sequence
  Description of Artificial Sequence: Synthetic oligonucleotide
  Antisense strand to SEQ ID NO: 971390
ucaccaagaacuaacacgc

SEQ ID NO: 971392 - RNA, 19 nt, Artificial Sequence
  Description of Artificial Sequence: Synthetic oligonucleotide
  Sense strand starting at position 3528 of SEQ ID NO: 914014
aggcacuugucucacuaga

SEQ ID NO: 971393 - RNA, 19 nt, Artificial Sequence
  Description of Artificial Sequence: Synthetic oligonucleotide
  Antisense strand to SEQ ID NO: 971392
ucuagugagacaagugccu

SEQ ID NO: 971394 - RNA, 19 nt, Artificial Sequence
  Description of Artificial Sequence: Synthetic oligonucleotide
  Sense strand starting at position 159 of SEQ ID NO: 914014
uaggcuaagucugaaaugu

SEQ ID NO: 971395 - RNA, 19 nt, Artificial Sequence
  Description of Artificial Sequence: Synthetic oligonucleotide
  Antisense strand to SEQ ID NO: 971394
acauuucagacuuagccua

SEQ ID NO: 971396 - RNA, 19 nt, Artificial Sequence
  Description of Artificial Sequence: Synthetic oligonucleotide
  Sense strand starting at position 3061 of SEQ ID NO: 914014
cguuucuucugagagcaaa

SEQ ID NO: 971397 - RNA, 19 nt, Artificial Sequence
  Description of Artificial Sequence: Synthetic oligonucleotide
  Antisense strand to SEQ ID NO: 971396
uuugcucucagaagaaacg

SEQ ID NO: 971398 - RNA, 19 nt, Artificial Sequence
  Description of Artificial Sequence: Synthetic oligonucleotide
  Sense strand starting at position 3401 of SEQ ID NO: 914014
cugggcaauuccgguuaaa

SEQ ID NO: 971399 - RNA, 19 nt, Artificial Sequence
  Description of Artificial Sequence: Synthetic oligonucleotide
  Antisense strand to SEQ ID NO: 971398
uuuaaccggaauugcccag

SEQ ID NO: 971400 - RNA, 19 nt, Artificial Sequence
  Description of Artificial Sequence: Synthetic oligonucleotide
  Sense strand starting at position 3848 of SEQ ID NO: 914014
uggacaguuucccggugau

SEQ ID NO: 971401 - RNA, 19 nt, Artificial Sequence
  Description of Artificial Sequence: Synthetic oligonucleotide
  Antisense strand to SEQ ID NO: 971400
aucaccgggaaacugucca

SEQ ID NO: 971402 - RNA, 19 nt, Artificial Sequence
  Description of Artificial Sequence: Synthetic oligonucleotide
  Sense strand starting at position 3281 of SEQ ID NO: 914015
guuuccuuaguggaaauaa

SEQ ID NO: 971403 - RNA, 19 nt, Artificial Sequence
  Description of Artificial Sequence: Synthetic oligonucleotide
  Antisense strand to SEQ ID NO: 971402
uuauuuccacuaaggaaac

SEQ ID NO: 971404 - RNA, 19 nt, Artificial Sequence
  Description of Artificial Sequence: Synthetic oligonucleotide
  Sense strand starting at position 3944 of SEQ ID NO: 914015
gugagacguauacacugaa

SEQ ID NO: 971405 - RNA, 19 nt, Artificial Sequence
  Description of Artificial Sequence: Synthetic oligonucleotide
  Antisense strand to SEQ ID NO: 971404
uucaguguauacgucucac

SEQ ID NO: 971406 - RNA, 19 nt, Artificial Sequence
  Description of Artificial Sequence: Synthetic oligonucleotide
  Sense strand starting at position 23 of SEQ ID NO: 914015
guaaguccucaguaaauaa

SEQ ID NO: 971407 - RNA, 19 nt, Artificial Sequence
  Description of Artificial Sequence: Synthetic oligonucleotide
  Antisense strand to SEQ ID NO: 971406
uuauuuacugaggacuuac

SEQ ID NO: 971408 - RNA, 19 nt, Artificial Sequence
  Description of Artificial Sequence: Synthetic oligonucleotide
  Sense strand starting at position 2643 of SEQ ID NO: 914015
cgucccacuugagugauuu

SEQ ID NO: 971409 - RNA, 19 nt, Artificial Sequence
  Description of Artificial Sequence: Synthetic oligonucleotide
  Antisense strand to SEQ ID NO: 971408
aaaucacucaagugggacg

SEQ ID NO: 971410 - RNA, 19 nt, Artificial Sequence
  Description of Artificial Sequence: Synthetic oligonucleotide
  Sense strand starting at position 2457 of SEQ ID NO: 914015
cugcaauuucgugagcuca

SEQ ID NO: 971411 - RNA, 19 nt, Artificial Sequence
  Description of Artificial Sequence: Synthetic oligonucleotide
  Antisense strand to SEQ ID NO: 971410
ugagcucacgaaauugcag

SEQ ID NO: 971412 - RNA, 19 nt, Artificial Sequence
  Description of Artificial Sequence: Synthetic oligonucleotide
  Sense strand starting at position 1000 of SEQ ID NO: 914015
ggcagugcaauugagaaau

SEQ ID NO: 971413 - RNA, 19 nt, Artificial Sequence
  Description of Artificial Sequence: Synthetic oligonucleotide
  Antisense strand to SEQ ID NO: 971412
auuucucaauugcacugcc

SEQ ID NO: 971414 - RNA, 19 nt, Artificial Sequence
  Description of Artificial Sequence: Synthetic oligonucleotide
  Sense strand starting at position 2459 of SEQ ID NO: 914015
gcaauuucgugagcucaag

SEQ ID NO: 971415 - RNA, 19 nt, Artificial Sequence
  Description of Artificial Sequence: Synthetic oligonucleotide
  Antisense strand to SEQ ID NO: 971414
cuugagcucacgaaauugc

SEQ ID NO: 971416 - RNA, 19 nt, Artificial Sequence
  Description of Artificial Sequence: Synthetic oligonucleotide
  Sense strand starting at position 1043 of SEQ ID NO: 914015
uugagaagcaguugacaca

SEQ ID NO: 971417 - RNA, 19 nt, Artificial Sequence
  Description of Artificial Sequence: Synthetic oligonucleotide
  Antisense strand to SEQ ID NO: 971416
ugugucaacugcuucucaa

SEQ ID NO: 971418 - RNA, 19 nt, Artificial Sequence
  Description of Artificial Sequence: Synthetic oligonucleotide
  Sense strand starting at position 2954 of SEQ ID NO: 914015
gccucacuugugugaauuu

SEQ ID NO: 971419 - RNA, 19 nt, Artificial Sequence
  Description of Artificial Sequence: Synthetic oligonucleotide
  Antisense strand to SEQ ID NO: 971418
aaauucacacaagugaggc

SEQ ID NO: 971420 - RNA, 19 nt, Artificial Sequence
  Description of Artificial Sequence: Synthetic oligonucleotide
  Sense strand starting at position 960 of SEQ ID NO: 914015
uaauacuucgagugauaau

SEQ ID NO: 971421 - RNA, 19 nt, Artificial Sequence
  Description of Artificial Sequence: Synthetic oligonucleotide
  Antisense strand to SEQ ID NO: 971420
auuaucacucgaaguauua

SEQ ID NO: 971422 - RNA, 19 nt, Artificial Sequence
  Description of Artificial Sequence: Synthetic oligonucleotide
  Sense strand starting at position 1719 of SEQ ID NO: 914015
uggcgaugucguagaaggu

SEQ ID NO: 971423 - RNA, 19 nt, Artificial Sequence
  Description of Artificial Sequence: Synthetic oligonucleotide
  Antisense strand to SEQ ID NO: 971422
accuucuacgacaucgcca

SEQ ID NO: 971424 - RNA, 19 nt, Artificial Sequence
  Description of Artificial Sequence: Synthetic oligonucleotide
  Sense strand starting at position 3837 of SEQ ID NO: 914015
acauguguacacggaacaa

SEQ ID NO: 971425 - RNA, 19 nt, Artificial Sequence
  Description of Artificial Sequence: Synthetic oligonucleotide
  Antisense strand to SEQ ID NO: 971424
uuguuccguguacacaugu

SEQ ID NO: 971426 - RNA, 19 nt, Artificial Sequence
  Description of Artificial Sequence: Synthetic oligonucleotide
  Sense strand starting at position 3940 of SEQ ID NO: 914015
augugugagacguauacac

SEQ ID NO: 971427 - RNA, 19 nt, Artificial Sequence
  Description of Artificial Sequence: Synthetic oligonucleotide
  Antisense strand to SEQ ID NO: 971426
guguauacgucucacacau

SEQ ID NO: 971428 - RNA, 19 nt, Artificial Sequence
  Description of Artificial Sequence: Synthetic oligonucleotide
  Sense strand starting at position 3278 of SEQ ID NO: 914015
ucaguuuccuuaguggaaa

SEQ ID NO: 971429 - RNA, 19 nt, Artificial Sequence
  Description of Artificial Sequence: Synthetic oligonucleotide
  Antisense strand to SEQ ID NO: 971428
uuuccacuaaggaaacuga

SEQ ID NO: 971430 - RNA, 19 nt, Artificial Sequence
  Description of Artificial Sequence: Synthetic oligonucleotide
  Sense strand starting at position 1092 of SEQ ID NO: 914015
acagucauuguguaaccuu

SEQ ID NO: 971431 - RNA, 19 nt, Artificial Sequence
  Description of Artificial Sequence: Synthetic oligonucleotide
  Antisense strand to SEQ ID NO: 971430
aagguuacacaaugacugu

SEQ ID NO: 971432 - RNA, 19 nt, Artificial Sequence
  Description of Artificial Sequence: Synthetic oligonucleotide
  Sense strand starting at position 956 of SEQ ID NO: 914015
aaguuaauacuucgaguga

SEQ ID NO: 971433 - RNA, 19 nt, Artificial Sequence
  Description of Artificial Sequence: Synthetic oligonucleotide
  Antisense strand to SEQ ID NO: 971432
ucacucgaaguauuaacuu

SEQ ID NO: 971434 - RNA, 19 nt, Artificial Sequence
  Description of Artificial Sequence: Synthetic oligonucleotide
  Sense strand starting at position 3727 of SEQ ID NO: 914015
aaaugagagcaauguguuu

SEQ ID NO: 971435 - RNA, 19 nt, Artificial Sequence
  Description of Artificial Sequence: Synthetic oligonucleotide
  Antisense strand to SEQ ID NO: 971434
aaacacauugcucucauuu

SEQ ID NO: 971436 - RNA, 19 nt, Artificial Sequence
  Description of Artificial Sequence: Synthetic oligonucleotide
  Sense strand starting at position 954 of SEQ ID NO: 914015
auaaguuaauacuucgagu

SEQ ID NO: 971437 - RNA, 19 nt, Artificial Sequence
  Description of Artificial Sequence: Synthetic oligonucleotide
  Antisense strand to SEQ ID NO: 971436
acucgaaguauuaacuuau

SEQ ID NO: 971438 - RNA, 19 nt, Artificial Sequence
  Description of Artificial Sequence: Synthetic oligonucleotide
  Sense strand starting at position 577 of SEQ ID NO: 914015
gaaugagucuccgucuaaa

SEQ ID NO: 971439 - RNA, 19 nt, Artificial Sequence
  Description of Artificial Sequence: Synthetic oligonucleotide
  Antisense strand to SEQ ID NO: 971438
uuuagacggagacucauuc

SEQ ID NO: 971440 - RNA, 19 nt, Artificial Sequence
  Description of Artificial Sequence: Synthetic oligonucleotide
  Sense strand starting at position 2368 of SEQ ID NO: 914015
ggaucuucccgccacucau

SEQ ID NO: 971441 - RNA, 19 nt, Artificial Sequence
  Description of Artificial Sequence: Synthetic oligonucleotide
  Antisense strand to SEQ ID NO: 971440
augaguggcgggaagaucc

SEQ ID NO: 971442 - RNA, 19 nt, Artificial Sequence
  Description of Artificial Sequence: Synthetic oligonucleotide
  Sense strand starting at position 3734 of SEQ ID NO: 914015
agcaauguguuuccuagaa

SEQ ID NO: 971443 - RNA, 19 nt, Artificial Sequence
  Description of Artificial Sequence: Synthetic oligonucleotide
  Antisense strand to SEQ ID NO: 971442
uucuaggaaacacauugcu

SEQ ID NO: 971444 - RNA, 19 nt, Artificial Sequence
  Description of Artificial Sequence: Synthetic oligonucleotide
  Sense strand starting at position 2432 of SEQ ID NO: 914015
agggcagugacgugaacau

SEQ ID NO: 971445 - RNA, 19 nt, Artificial Sequence
  Description of Artificial Sequence: Synthetic oligonucleotide
  Antisense strand to SEQ ID NO: 971444
auguucacgucacugcccu

SEQ ID NO: 971446 - RNA, 19 nt, Artificial Sequence
  Description of Artificial Sequence: Synthetic oligonucleotide
  Sense strand starting at position 1091 of SEQ ID NO: 914015
gacagucauuguguaaccu

SEQ ID NO: 971447 - RNA, 19 nt, Artificial Sequence
  Description of Artificial Sequence: Synthetic oligonucleotide
  Antisense strand to SEQ ID NO: 971446
agguuacacaaugacuguc

SEQ ID NO: 971448 - RNA, 19 nt, Artificial Sequence
  Description of Artificial Sequence: Synthetic oligonucleotide
  Sense strand starting at position 575 of SEQ ID NO: 914015
cagaaugagucuccgucua

SEQ ID NO: 971449 - RNA, 19 nt, Artificial Sequence
  Description of Artificial Sequence: Synthetic oligonucleotide
  Antisense strand to SEQ ID NO: 971448
uagacggagacucauucug

SEQ ID NO: 971450 - RNA, 19 nt, Artificial Sequence
  Description of Artificial Sequence: Synthetic oligonucleotide
  Sense strand starting at position 3732 of SEQ ID NO: 914015
agagcaauguguuuccuag

SEQ ID NO: 971451 - RNA, 19 nt, Artificial Sequence
  Description of Artificial Sequence: Synthetic oligonucleotide
  Antisense strand to SEQ ID NO: 971450
cuaggaaacacauugcucu

SEQ ID NO: 971452 - RNA, 19 nt, Artificial Sequence
  Description of Artificial Sequence: Synthetic oligonucleotide
  Sense strand starting at position 1101 of SEQ ID NO: 914015
guguaaccuuaacuugcaa

SEQ ID NO: 971453 - RNA, 19 nt, Artificial Sequence
  Description of Artificial Sequence: Synthetic oligonucleotide
  Antisense strand to SEQ ID NO: 971452
uugcaaguuaagguuacac

SEQ ID NO: 971454 - RNA, 19 nt, Artificial Sequence
  Description of Artificial Sequence: Synthetic oligonucleotide
  Sense strand starting at position 3938 of SEQ ID NO: 914015
auaugugugagacguauac

SEQ ID NO: 971455 - RNA, 19 nt, Artificial Sequence
  Description of Artificial Sequence: Synthetic oligonucleotide
  Antisense strand to SEQ ID NO: 971454
guauacgucucacacauau

SEQ ID NO: 971456 - RNA, 19 nt, Artificial Sequence
  Description of Artificial Sequence: Synthetic oligonucleotide
  Sense strand starting at position 1095 of SEQ ID NO: 914015
gucauuguguaaccuuaac

SEQ ID NO: 971457 - RNA, 19 nt, Artificial Sequence
  Description of Artificial Sequence: Synthetic oligonucleotide
  Antisense strand to SEQ ID NO: 971456
guuaagguuacacaaugac

SEQ ID NO: 971458 - RNA, 19 nt, Artificial Sequence
  Description of Artificial Sequence: Synthetic oligonucleotide
  Sense strand starting at position 946 of SEQ ID NO: 914015
gcguuuacauaaguuaaua

SEQ ID NO: 971459 - RNA, 19 nt, Artificial Sequence
  Description of Artificial Sequence: Synthetic oligonucleotide
  Antisense strand to SEQ ID NO: 971458
uauuaacuuauguaaacgc

SEQ ID NO: 971460 - RNA, 19 nt, Artificial Sequence
  Description of Artificial Sequence: Synthetic oligonucleotide
  Sense strand starting at position 1069 of SEQ ID NO: 914015
cuuugagagcucugcgaag

SEQ ID NO: 971461 - RNA, 19 nt, Artificial Sequence
  Description of Artificial Sequence: Synthetic oligonucleotide
  Antisense strand to SEQ ID NO: 971460
cuucgcagagcucucaaag

SEQ ID NO: 971462 - RNA, 19 nt, Artificial Sequence
  Description of Artificial Sequence: Synthetic oligonucleotide
  Sense strand starting at position 2953 of SEQ ID NO: 914015
ggccucacuugugugaauu

SEQ ID NO: 971463 - RNA, 19 nt, Artificial Sequence
  Description of Artificial Sequence: Synthetic oligonucleotide
  Antisense strand to SEQ ID NO: 971462
aauucacacaagugaggcc

SEQ ID NO: 971464 - RNA, 19 nt, Artificial Sequence
  Description of Artificial Sequence: Synthetic oligonucleotide
  Sense strand starting at position 939 of SEQ ID NO: 914015
uuuccucgcguuuacauaa

SEQ ID NO: 971465 - RNA, 19 nt, Artificial Sequence
  Description of Artificial Sequence: Synthetic oligonucleotide
  Antisense strand to SEQ ID NO: 971464
uuauguaaacgcgaggaaa

SEQ ID NO: 971466 - RNA, 19 nt, Artificial Sequence
  Description of Artificial Sequence: Synthetic oligonucleotide
  Sense strand starting at position 1088 of SEQ ID NO: 914015
agcgacagucauuguguaa

SEQ ID NO: 971467 - RNA, 19 nt, Artificial Sequence
  Description of Artificial Sequence: Synthetic oligonucleotide
  Antisense strand to SEQ ID NO: 971466
uuacacaaugacugucgcu

SEQ ID NO: 971468 - RNA, 19 nt, Artificial Sequence
  Description of Artificial Sequence: Synthetic oligonucleotide
  Sense strand starting at position 1087 of SEQ ID NO: 914015
gagcgacagucauugugua

SEQ ID NO: 971469 - RNA, 19 nt, Artificial Sequence
  Description of Artificial Sequence: Synthetic oligonucleotide
  Antisense strand to SEQ ID NO: 971468
uacacaaugacugucgcuc

SEQ ID NO: 971470 - RNA, 19 nt, Artificial Sequence
  Description of Artificial Sequence: Synthetic oligonucleotide
  Sense strand starting at position 3030 of SEQ ID NO: 914015
gugucuauuuaccaagugu

SEQ ID NO: 971471 - RNA, 19 nt, Artificial Sequence
  Description of Artificial Sequence: Synthetic oligonucleotide
  Antisense strand to SEQ ID NO: 971470
acacuugguaaauagacac

SEQ ID NO: 971472 - RNA, 19 nt, Artificial Sequence
  Description of Artificial Sequence: Synthetic oligonucleotide
  Sense strand starting at position 3721 of SEQ ID NO: 914015
guuugcaaaugagagcaau

SEQ ID NO: 971473 - RNA, 19 nt, Artificial Sequence
  Description of Artificial Sequence: Synthetic oligonucleotide
  Antisense strand to SEQ ID NO: 971472
auugcucucauuugcaaac

SEQ ID NO: 971474 - RNA, 19 nt, Artificial Sequence
  Description of Artificial Sequence: Synthetic oligonucleotide
  Sense strand starting at position 957 of SEQ ID NO: 914015
aguuaauacuucgagugau

SEQ ID NO: 971475 - RNA, 19 nt, Artificial Sequence
  Description of Artificial Sequence: Synthetic oligonucleotide
  Antisense strand to SEQ ID NO: 971474
aucacucgaaguauuaacu

SEQ ID NO: 971476 - RNA, 19 nt, Artificial Sequence
  Description of Artificial Sequence: Synthetic oligonucleotide
  Sense strand starting at position 3936 of SEQ ID NO: 914015
aaauaugugugagacguau

SEQ ID NO: 971477 - RNA, 19 nt, Artificial Sequence
  Description of Artificial Sequence: Synthetic oligonucleotide
  Antisense strand to SEQ ID NO: 971476
auacgucucacacauauuu

SEQ ID NO: 971478 - RNA, 19 nt, Artificial Sequence
  Description of Artificial Sequence: Synthetic oligonucleotide
  Sense strand starting at position 1713 of SEQ ID NO: 914015
cggucauggcgaugucgua

SEQ ID NO: 971479 - RNA, 19 nt, Artificial Sequence
  Description of Artificial Sequence: Synthetic oligonucleotide
  Antisense strand to SEQ ID NO: 971478
uacgacaucgccaugaccg

SEQ ID NO: 971480 - RNA, 19 nt, Artificial Sequence
  Description of Artificial Sequence: Synthetic oligonucleotide
  Sense strand starting at position 3279 of SEQ ID NO: 914015
caguuuccuuaguggaaau

SEQ ID NO: 971481 - RNA, 19 nt, Artificial Sequence
  Description of Artificial Sequence: Synthetic oligonucleotide
  Antisense strand to SEQ ID NO: 971480
auuuccacuaaggaaacug

SEQ ID NO: 971482 - RNA, 19 nt, Artificial Sequence
  Description of Artificial Sequence: Synthetic oligonucleotide
  Sense strand starting at position 1731 of SEQ ID NO: 914016
ucagaauaugcaggauaau

SEQ ID NO: 971483 - RNA, 19 nt, Artificial Sequence
  Description of Artificial Sequence: Synthetic oligonucleotide
  Antisense strand to SEQ ID NO: 971482
auuauccugcauauucuga

SEQ ID NO: 971484 - RNA, 19 nt, Artificial Sequence
  Description of Artificial Sequence: Synthetic oligonucleotide
  Sense strand starting at position 965 of SEQ ID NO: 914016
auacguucugaagaucuga

SEQ ID NO: 971485 - RNA, 19 nt, Artificial Sequence
  Description of Artificial Sequence: Synthetic oligonucleotide
  Antisense strand to SEQ ID NO: 971484
ucagaucuucagaacguau

SEQ ID NO: 971486 - RNA, 19 nt, Artificial Sequence
  Description of Artificial Sequence: Synthetic oligonucleotide
  Sense strand starting at position 3401 of SEQ ID NO: 914016
auuugugagucacauuuau

SEQ ID NO: 971487 - RNA, 19 nt, Artificial Sequence
  Description of Artificial Sequence: Synthetic oligonucleotide
  Antisense strand to SEQ ID NO: 971486
auaaaugugacucacaaau

SEQ ID NO: 971488 - RNA, 19 nt, Artificial Sequence
  Description of Artificial Sequence: Synthetic oligonucleotide
  Sense strand starting at position 8 of SEQ ID NO: 914016
agucaaauuugucccuguu

SEQ ID NO: 971489 - RNA, 19 nt, Artificial Sequence
  Description of Artificial Sequence: Synthetic oligonucleotide
  Antisense strand to SEQ ID NO: 971488
aacagggacaaauuugacu

SEQ ID NO: 971490 - RNA, 19 nt, Artificial Sequence
  Description of Artificial Sequence: Synthetic oligonucleotide
  Sense strand starting at position 2662 of SEQ ID NO: 914016
uugagauauagguguuaaa

SEQ ID NO: 971491 - RNA, 19 nt, Artificial Sequence
  Description of Artificial Sequence: Synthetic oligonucleotide
  Antisense strand to SEQ ID NO: 971490
uuuaacaccuauaucucaa

SEQ ID NO: 971492 - RNA, 19 nt, Artificial Sequence
  Description of Artificial Sequence: Synthetic oligonucleotide
  Sense strand starting at position 3008 of SEQ ID NO: 914016
agauaaguggaaugucacu

SEQ ID NO: 971493 - RNA, 19 nt, Artificial Sequence
  Description of Artificial Sequence: Synthetic oligonucleotide
  Antisense strand to SEQ ID NO: 971492
agugacauuccacuuaucu

SEQ ID NO: 971494 - RNA, 19 nt, Artificial Sequence
  Description of Artificial Sequence: Synthetic oligonucleotide
  Sense strand starting at position 1380 of SEQ ID NO: 914016
cugggagacagcugacauu

SEQ ID NO: 971495 - RNA, 19 nt, Artificial Sequence
  Description of Artificial Sequence: Synthetic oligonucleotide
  Antisense strand to SEQ ID NO: 971494
aaugucagcugucucccag

SEQ ID NO: 971496 - RNA, 19 nt, Artificial Sequence
  Description of Artificial Sequence: Synthetic oligonucleotide
  Sense strand starting at position 785 of SEQ ID NO: 914016
ggauauuccuaugcagaau

SEQ ID NO: 971497 - RNA, 19 nt, Artificial Sequence
  Description of Artificial Sequence: Synthetic oligonucleotide
  Antisense strand to SEQ ID NO: 971496
auucugcauaggaauaucc

SEQ ID NO: 971498 - RNA, 19 nt, Artificial Sequence
  Description of Artificial Sequence: Synthetic oligonucleotide
  Sense strand starting at position 3074 of SEQ ID NO: 914016
gggaaauuguacuuuauuc

SEQ ID NO: 971499 - RNA, 19 nt, Artificial Sequence
  Description of Artificial Sequence: Synthetic oligonucleotide
  Antisense strand to SEQ ID NO: 971498
gaauaaaguacaauuuccc

SEQ ID NO: 971500 - RNA, 19 nt, Artificial Sequence
  Description of Artificial Sequence: Synthetic oligonucleotide
  Sense strand starting at position 2626 of SEQ ID NO: 914016
aaaguuaaugugugaaaca

SEQ ID NO: 971501 - RNA, 19 nt, Artificial Sequence
  Description of Artificial Sequence: Synthetic oligonucleotide
  Antisense strand to SEQ ID NO: 971500
uguuucacacauuaacuuu

SEQ ID NO: 971502 - RNA, 19 nt, Artificial Sequence
  Description of Artificial Sequence: Synthetic oligonucleotide
  Sense strand starting at position 3216 of SEQ ID NO: 914016
uuuauuucugucuggcauu

SEQ ID NO: 971503 - RNA, 19 nt, Artificial Sequence
  Description of Artificial Sequence: Synthetic oligonucleotide
  Antisense strand to SEQ ID NO: 971502
aaugccagacagaaauaaa

SEQ ID NO: 971504 - RNA, 19 nt, Artificial Sequence
  Description of Artificial Sequence: Synthetic oligonucleotide
  Sense strand starting at position 1383 of SEQ ID NO: 914016
ggagacagcugacauuuaa

SEQ ID NO: 971505 - RNA, 19 nt, Artificial Sequence
  Description of Artificial Sequence: Synthetic oligonucleotide
  Antisense strand to SEQ ID NO: 971504
uuaaaugucagcugucucc

SEQ ID NO: 971506 - RNA, 19 nt, Artificial Sequence
  Description of Artificial Sequence: Synthetic oligonucleotide
  Sense strand starting at position 2625 of SEQ ID NO: 914016
uaaaguuaaugugugaaac

SEQ ID NO: 971507 - RNA, 19 nt, Artificial Sequence
  Description of Artificial Sequence: Synthetic oligonucleotide
  Antisense strand to SEQ ID NO: 971506
guuucacacauuaacuuua

SEQ ID NO: 971508 - RNA, 19 nt, Artificial Sequence
  Description of Artificial Sequence: Synthetic oligonucleotide
  Sense strand starting at position 1409 of SEQ ID NO: 914016
acugcauuaguagauguau

SEQ ID NO: 971509 - RNA, 19 nt, Artificial Sequence
  Description of Artificial Sequence: Synthetic oligonucleotide
  Antisense strand to SEQ ID NO: 971508
auacaucuacuaaugcagu

SEQ ID NO: 971510 - RNA, 19 nt, Artificial Sequence
  Description of Artificial Sequence: Synthetic oligonucleotide
  Sense strand starting at position 1187 of SEQ ID NO: 914016
ugucaauuauacccgauaa

SEQ ID NO: 971511 - RNA, 19 nt, Artificial Sequence
  Description of Artificial Sequence: Synthetic oligonucleotide
  Antisense strand to SEQ ID NO: 971510
uuaucggguauaauugaca

SEQ ID NO: 971512 - RNA, 19 nt, Artificial Sequence
  Description of Artificial Sequence: Synthetic oligonucleotide
  Sense strand starting at position 15 of SEQ ID NO: 914016
uuugucccuguuuagagau

SEQ ID NO: 971513 - RNA, 19 nt, Artificial Sequence
  Description of Artificial Sequence: Synthetic oligonucleotide
  Antisense strand to SEQ ID NO: 971512
aucucuaaacagggacaaa

SEQ ID NO: 971514 - RNA, 19 nt, Artificial Sequence
  Description of Artificial Sequence: Synthetic oligonucleotide
  Sense strand starting at position 1755 of SEQ ID NO: 914016
acagguggucccuaugcaa

SEQ ID NO: 971515 - RNA, 19 nt, Artificial Sequence
  Description of Artificial Sequence: Synthetic oligonucleotide
  Antisense strand to SEQ ID NO: 971514
uugcauagggaccaccugu

SEQ ID NO: 971516 - RNA, 19 nt, Artificial Sequence
  Description of Artificial Sequence: Synthetic oligonucleotide
  Sense strand starting at position 1488 of SEQ ID NO: 914016
agcuuuguggcagauuaca

SEQ ID NO: 971517 - RNA, 19 nt, Artificial Sequence
  Description of Artificial Sequence: Synthetic oligonucleotide
  Antisense strand to SEQ ID NO: 971516
uguaaucugccacaaagcu

SEQ ID NO: 971518 - RNA, 19 nt, Artificial Sequence
  Description of Artificial Sequence: Synthetic oligonucleotide
  Sense strand starting at position 919 of SEQ ID NO: 914016
gggaguuguuggucagaug

SEQ ID NO: 971519 - RNA, 19 nt, Artificial Sequence
  Description of Artificial Sequence: Synthetic oligonucleotide
  Antisense strand to SEQ ID NO: 971518
caucugaccaacaacuccc

SEQ ID NO: 971520 - RNA, 19 nt, Artificial Sequence
  Description of Artificial Sequence: Synthetic oligonucleotide
  Sense strand starting at position 3179 of SEQ ID NO: 914016
uaauuucugucugauaagg

SEQ ID NO: 971521 - RNA, 19 nt, Artificial Sequence
  Description of Artificial Sequence: Synthetic oligonucleotide
  Antisense strand to SEQ ID NO: 971520
ccuuaucagacagaaauua

SEQ ID NO: 971522 - RNA, 19 nt, Artificial Sequence
  Description of Artificial Sequence: Synthetic oligonucleotide
  Sense strand starting at position 385 of SEQ ID NO: 914016
cugagagcucaaugcaauu

SEQ ID NO: 971523 - RNA, 19 nt, Artificial Sequence
  Description of Artificial Sequence: Synthetic oligonucleotide
  Antisense strand to SEQ ID NO: 971522
aauugcauugagcucucag

SEQ ID NO: 971524 - RNA, 19 nt, Artificial Sequence
  Description of Artificial Sequence: Synthetic oligonucleotide
  Sense strand starting at position 1158 of SEQ ID NO: 914016
aguugcacaccuuauguau

SEQ ID NO: 971525 - RNA, 19 nt, Artificial Sequence
  Description of Artificial Sequence: Synthetic oligonucleotide
  Antisense strand to SEQ ID NO: 971524
auacauaaggugugcaacu

SEQ ID NO: 971526 - RNA, 19 nt, Artificial Sequence
  Description of Artificial Sequence: Synthetic oligonucleotide
  Sense strand starting at position 1668 of SEQ ID NO: 914016
cgugauggcuuauuagaaa

SEQ ID NO: 971527 - RNA, 19 nt, Artificial Sequence
  Description of Artificial Sequence: Synthetic oligonucleotide
  Antisense strand to SEQ ID NO: 971526
uuucuaauaagccaucacg

SEQ ID NO: 971528 - RNA, 19 nt, Artificial Sequence
  Description of Artificial Sequence: Synthetic oligonucleotide
  Sense strand starting at position 2265 of SEQ ID NO: 914016
ugacguaucucuuuauaua

SEQ ID NO: 971529 - RNA, 19 nt, Artificial Sequence
  Description of Artificial Sequence: Synthetic oligonucleotide
  Antisense strand to SEQ ID NO: 971528
uauauaaagagauacguca

SEQ ID NO: 971530 - RNA, 19 nt, Artificial Sequence
  Description of Artificial Sequence: Synthetic oligonucleotide
  Sense strand starting at position 885 of SEQ ID NO: 914016
ggugguuuccaggguauag

SEQ ID NO: 971531 - RNA, 19 nt, Artificial Sequence
  Description of Artificial Sequence: Synthetic oligonucleotide
  Antisense strand to SEQ ID NO: 971530
cuauacccuggaaaccacc

SEQ ID NO: 971532 - RNA, 19 nt, Artificial Sequence
  Description of Artificial Sequence: Synthetic oligonucleotide
  Sense strand starting at position 3786 of SEQ ID NO: 914016
aaaggauggcaguguucuu

SEQ ID NO: 971533 - RNA, 19 nt, Artificial Sequence
  Description of Artificial Sequence: Synthetic oligonucleotide
  Antisense strand to SEQ ID NO: 971532
aagaacacugccauccuuu

SEQ ID NO: 971534 - RNA, 19 nt, Artificial Sequence
  Description of Artificial Sequence: Synthetic oligonucleotide
  Sense strand starting at position 1440 of SEQ ID NO: 914016
aaauguauaugcccugagu

SEQ ID NO: 971535 - RNA, 19 nt, Artificial Sequence
  Description of Artificial Sequence: Synthetic oligonucleotide
  Antisense strand to SEQ ID NO: 971534
acucagggcauauacauuu

SEQ ID NO: 971536 - RNA, 19 nt, Artificial Sequence
  Description of Artificial Sequence: Synthetic oligonucleotide
  Sense strand starting at position 1640 of SEQ ID NO: 914016
acuagaguuuaauuguugu

SEQ ID NO: 971537 - RNA, 19 nt, Artificial Sequence
  Description of Artificial Sequence: Synthetic oligonucleotide
  Antisense strand to SEQ ID NO: 971536
acaacaauuaaacucuagu

SEQ ID NO: 971538 - RNA, 19 nt, Artificial Sequence
  Description of Artificial Sequence: Synthetic oligonucleotide
  Sense strand starting at position 1643 of SEQ ID NO: 914016
agaguuuaauuguuguuac

SEQ ID NO: 971539 - RNA, 19 nt, Artificial Sequence
  Description of Artificial Sequence: Synthetic oligonucleotide
  Antisense strand to SEQ ID NO: 971538
guaacaacaauuaaacucu

SEQ ID NO: 971540 - RNA, 19 nt, Artificial Sequence
  Description of Artificial Sequence: Synthetic oligonucleotide
  Sense strand starting at position 1097 of SEQ ID NO: 914016
guggauauguuagcuuaau

SEQ ID NO: 971541 - RNA, 19 nt, Artificial Sequence
  Description of Artificial Sequence: Synthetic oligonucleotide
  Antisense strand to SEQ ID NO: 971540
auuaagcuaacauauccac

SEQ ID NO: 971542 - RNA, 19 nt, Artificial Sequence
  Description of Artificial Sequence: Synthetic oligonucleotide
  Sense strand starting at position 1034 of SEQ ID NO: 914016
gguagaucuuauguuugua

SEQ ID NO: 971543 - RNA, 19 nt, Artificial Sequence
  Description of Artificial Sequence: Synthetic oligonucleotide
  Antisense strand to SEQ ID NO: 971542
uacaaacauaagaucuacc

SEQ ID NO: 971544 - RNA, 19 nt, Artificial Sequence
  Description of Artificial Sequence: Synthetic oligonucleotide
  Sense strand starting at position 3181 of SEQ ID NO: 914016
auuucugucugauaaggua

SEQ ID NO: 971545 - RNA, 19 nt, Artificial Sequence
  Description of Artificial Sequence: Synthetic oligonucleotide
  Antisense strand to SEQ ID NO: 971544
uaccuuaucagacagaaau

SEQ ID NO: 971546 - RNA, 19 nt, Artificial Sequence
  Description of Artificial Sequence: Synthetic oligonucleotide
  Sense strand starting at position 2514 of SEQ ID NO: 914016
ccuguaaggccauguuaca

SEQ ID NO: 971547 - RNA, 19 nt, Artificial Sequence
  Description of Artificial Sequence: Synthetic oligonucleotide
  Antisense strand to SEQ ID NO: 971546
uguaacauggccuuacagg

SEQ ID NO: 971548 - RNA, 19 nt, Artificial Sequence
  Description of Artificial Sequence: Synthetic oligonucleotide
  Sense strand starting at position 3158 of SEQ ID NO: 914016
uuuguccagcagugauaca

SEQ ID NO: 971549 - RNA, 19 nt, Artificial Sequence
  Description of Artificial Sequence: Synthetic oligonucleotide
  Antisense strand to SEQ ID NO: 971548
uguaucacugcuggacaaa

SEQ ID NO: 971550 - RNA, 19 nt, Artificial Sequence
  Description of Artificial Sequence: Synthetic oligonucleotide
  Sense strand starting at position 2525 of SEQ ID NO: 914016
auguuacauugcucccauu

SEQ ID NO: 971551 - RNA, 19 nt, Artificial Sequence
  Description of Artificial Sequence: Synthetic oligonucleotide
  Antisense strand to SEQ ID NO: 971550
aaugggagcaauguaacau

SEQ ID NO: 971552 - RNA, 19 nt, Artificial Sequence
  Description of Artificial Sequence: Synthetic oligonucleotide
  Sense strand starting at position 3189 of SEQ ID NO: 914016
cugauaagguaacacuaaa

SEQ ID NO: 971553 - RNA, 19 nt, Artificial Sequence
  Description of Artificial Sequence: Synthetic oligonucleotide
  Antisense strand to SEQ ID NO: 971552
uuuaguguuaccuuaucag

SEQ ID NO: 971554 - RNA, 19 nt, Artificial Sequence
  Description of Artificial Sequence: Synthetic oligonucleotide
  Sense strand starting at position 1442 of SEQ ID NO: 914016
auguauaugcccugaguuc

SEQ ID NO: 971555 - RNA, 19 nt, Artificial Sequence
  Description of Artificial Sequence: Synthetic oligonucleotide
  Antisense strand to SEQ ID NO: 971554
gaacucagggcauauacau

SEQ ID NO: 971556 - RNA, 19 nt, Artificial Sequence
  Description of Artificial Sequence: Synthetic oligonucleotide
  Sense strand starting at position 1215 of SEQ ID NO: 914016
aaacacuucuagggagaga

SEQ ID NO: 971557 - RNA, 19 nt, Artificial Sequence
  Description of Artificial Sequence: Synthetic oligonucleotide
  Antisense strand to SEQ ID NO: 971556
ucucucccuagaaguguuu

SEQ ID NO: 971558 - RNA, 19 nt, Artificial Sequence
  Description of Artificial Sequence: Synthetic oligonucleotide
  Sense strand starting at position 3219 of SEQ ID NO: 914016
auuucugucuggcauuaac

SEQ ID NO: 971559 - RNA, 19 nt, Artificial Sequence
  Description of Artificial Sequence: Synthetic oligonucleotide
  Antisense strand to SEQ ID NO: 971558
guuaaugccagacagaaau

SEQ ID NO: 971560 - RNA, 19 nt, Artificial Sequence
  Description of Artificial Sequence: Synthetic oligonucleotide
  Sense strand starting at position 1655 of SEQ ID NO: 914016
uuguuacucuaagcgugau

SEQ ID NO: 971561 - RNA, 19 nt, Artificial Sequence
  Description of Artificial Sequence: Synthetic oligonucleotide
  Antisense strand to SEQ ID NO: 971560
aucacgcuuagaguaacaa

SEQ ID NO: 971562 - RNA, 19 nt, Artificial Sequence
  Description of Artificial Sequence: Synthetic oligonucleotide
  Sense strand starting at position 179 of SEQ ID NO: 914017
ucaaguggucagggagaaa

SEQ ID NO: 971563 - RNA, 19 nt, Artificial Sequence
  Description of Artificial Sequence: Synthetic oligonucleotide
  Antisense strand to SEQ ID NO: 971562
uuucucccugaccacuuga

SEQ ID NO: 971564 - RNA, 19 nt, Artificial Sequence
  Description of Artificial Sequence: Synthetic oligonucleotide
  Sense strand starting at position 251 of SEQ ID NO: 914017
guagauuaccaguacauca

SEQ ID NO: 971565 - RNA, 19 nt, Artificial Sequence
  Description of Artificial Sequence: Synthetic oligonucleotide
  Antisense strand to SEQ ID NO: 971564
ugauguacugguaaucuac

SEQ ID NO: 971566 - RNA, 19 nt, Artificial Sequence
  Description of Artificial Sequence: Synthetic oligonucleotide
  Sense strand starting at position 1470 of SEQ ID NO: 914017
cuaccaggugacugauaaa

SEQ ID NO: 971567 - RNA, 19 nt, Artificial Sequence
  Description of Artificial Sequence: Synthetic oligonucleotide
  Antisense strand to SEQ ID NO: 971566
uuuaucagucaccugguag

SEQ ID NO: 971568 - RNA, 19 nt, Artificial Sequence
  Description of Artificial Sequence: Synthetic oligonucleotide
  Sense strand starting at position 3906 of SEQ ID NO: 914017
cuauaucaccaggguaaga

SEQ ID NO: 971569 - RNA, 19 nt, Artificial Sequence
  Description of Artificial Sequence: Synthetic oligonucleotide
  Antisense strand to SEQ ID NO: 971568
ucuuacccuggugauauag

SEQ ID NO: 971570 - RNA, 19 nt, Artificial Sequence
  Description of Artificial Sequence: Synthetic oligonucleotide
  Sense strand starting at position 3905 of SEQ ID NO: 914017
acuauaucaccaggguaag

SEQ ID NO: 971571 - RNA, 19 nt, Artificial Sequence
  Description of Artificial Sequence: Synthetic oligonucleotide
  Antisense strand to SEQ ID NO: 971570
cuuacccuggugauauagu

SEQ ID NO: 971572 - RNA, 19 nt, Artificial Sequence
  Description of Artificial Sequence: Synthetic oligonucleotide
  Sense strand starting at position 1826 of SEQ ID NO: 914017
ugcugaauggauugaugaa

SEQ ID NO: 971573 - RNA, 19 nt, Artificial Sequence
  Description of Artificial Sequence: Synthetic oligonucleotide
  Antisense strand to SEQ ID NO: 971572
uucaucaauccauucagca

SEQ ID NO: 971574 - RNA, 19 nt, Artificial Sequence
  Description of Artificial Sequence: Synthetic oligonucleotide
  Sense strand starting at position 351 of SEQ ID NO: 914017
ccaggacaauggcucuaaa

SEQ ID NO: 971575 - RNA, 19 nt, Artificial Sequence
  Description of Artificial Sequence: Synthetic oligonucleotide
  Antisense strand to SEQ ID NO: 971574
uuuagagccauuguccugg

SEQ ID NO: 971576 - RNA, 19 nt, Artificial Sequence
  Description of Artificial Sequence: Synthetic oligonucleotide
  Sense strand starting at position 3966 of SEQ ID NO: 914017
agugccuaacaucaagauu

SEQ ID NO: 971577 - RNA, 19 nt, Artificial Sequence
  Description of Artificial Sequence: Synthetic oligonucleotide
  Antisense strand to SEQ ID NO: 971576
aaucuugauguuaggcacu

SEQ ID NO: 971578 - RNA, 19 nt, Artificial Sequence
  Description of Artificial Sequence: Synthetic oligonucleotide
  Sense strand starting at position 1755 of SEQ ID NO: 914017
ugccuaucgcguucauaga

SEQ ID NO: 971579 - RNA, 19 nt, Artificial Sequence
  Description of Artificial Sequence: Synthetic oligonucleotide
  Antisense strand to SEQ ID NO: 971578
ucuaugaacgcgauaggca

SEQ ID NO: 971580 - RNA, 19 nt, Artificial Sequence
  Description of Artificial Sequence: Synthetic oligonucleotide
  Sense strand starting at position 2835 of SEQ ID NO: 914017
ggucaauguagagggaauu

SEQ ID NO: 971581 - RNA, 19 nt, Artificial Sequence
  Description of Artificial Sequence: Synthetic oligonucleotide
  Antisense strand to SEQ ID NO: 971580
aauucccucuacauugacc

SEQ ID NO: 971582 - RNA, 19 nt, Artificial Sequence
  Description of Artificial Sequence: Synthetic oligonucleotide
  Sense strand starting at position 1262 of SEQ ID NO: 914017
cuuuguguacacuauuaaa

SEQ ID NO: 971583 - RNA, 19 nt, Artificial Sequence
  Description of Artificial Sequence: Synthetic oligonucleotide
  Antisense strand to SEQ ID NO: 971582
uuuaauaguguacacaaag

SEQ ID NO: 971584 - RNA, 19 nt, Artificial Sequence
  Description of Artificial Sequence: Synthetic oligonucleotide
  Sense strand starting at position 3015 of SEQ ID NO: 914017
cacagagagccauaugcuu

SEQ ID NO: 971585 - RNA, 19 nt, Artificial Sequence
  Description of Artificial Sequence: Synthetic oligonucleotide
  Antisense strand to SEQ ID NO: 971584
aagcauauggcucucugug

SEQ ID NO: 971586 - RNA, 19 nt, Artificial Sequence
  Description of Artificial Sequence: Synthetic oligonucleotide
  Sense strand starting at position 3111 of SEQ ID NO: 914017
gacagugagucucuacaga

SEQ ID NO: 971587 - RNA, 19 nt, Artificial Sequence
  Description of Artificial Sequence: Synthetic oligonucleotide
  Antisense strand to SEQ ID NO: 971586
ucuguagagacucacuguc

SEQ ID NO: 971588 - RNA, 19 nt, Artificial Sequence
  Description of Artificial Sequence: Synthetic oligonucleotide
  Sense strand starting at position 510 of SEQ ID NO: 914017
ucagucacauauguauaaa

SEQ ID NO: 971589 - RNA, 19 nt, Artificial Sequence
  Description of Artificial Sequence: Synthetic oligonucleotide
  Antisense strand to SEQ ID NO: 971588
uuuauacauaugugacuga

SEQ ID NO: 971590 - RNA, 19 nt, Artificial Sequence
  Description of Artificial Sequence: Synthetic oligonucleotide
  Sense strand starting at position 88 of SEQ ID NO: 914017
caagauuaggcaugugaug

SEQ ID NO: 971591 - RNA, 19 nt, Artificial Sequence
  Description of Artificial Sequence: Synthetic oligonucleotide
  Antisense strand to SEQ ID NO: 971590
caucacaugccuaaucuug

SEQ ID NO: 971592 - RNA, 19 nt, Artificial Sequence
  Description of Artificial Sequence: Synthetic oligonucleotide
  Sense strand starting at position 448 of SEQ ID NO: 914017
guucucugugaugggagaa

SEQ ID NO: 971593 - RNA, 19 nt, Artificial Sequence
  Description of Artificial Sequence: Synthetic oligonucleotide
  Antisense strand to SEQ ID NO: 971592
uucucccaucacagagaac

SEQ ID NO: 971594 - RNA, 19 nt, Artificial Sequence
  Description of Artificial Sequence: Synthetic oligonucleotide
  Sense strand starting at position 1711 of SEQ ID NO: 914017
uugagucaaggcuagcaua

SEQ ID NO: 971595 - RNA, 19 nt, Artificial Sequence
  Description of Artificial Sequence: Synthetic oligonucleotide
  Antisense strand to SEQ ID NO: 971594
uaugcuagccuugacucaa

SEQ ID NO: 971596 - RNA, 19 nt, Artificial Sequence
  Description of Artificial Sequence: Synthetic oligonucleotide
  Sense strand starting at position 2771 of SEQ ID NO: 914017
gagccugugccagaauaug

SEQ ID NO: 971597 - RNA, 19 nt, Artificial Sequence
  Description of Artificial Sequence: Synthetic oligonucleotide
  Antisense strand to SEQ ID NO: 971596
cauauucuggcacaggcuc

SEQ ID NO: 971598 - RNA, 19 nt, Artificial Sequence
  Description of Artificial Sequence: Synthetic oligonucleotide
  Sense strand starting at position 1885 of SEQ ID NO: 914017
ccuugagucauugggaagu

SEQ ID NO: 971599 - RNA, 19 nt, Artificial Sequence
  Description of Artificial Sequence: Synthetic oligonucleotide
  Antisense strand to SEQ ID NO: 971598
acuucccaaugacucaagg

SEQ ID NO: 971600 - RNA, 19 nt, Artificial Sequence
  Description of Artificial Sequence: Synthetic oligonucleotide
  Sense strand starting at position 1325 of SEQ ID NO: 914017
guauaugaugccgauucca

SEQ ID NO: 971601 - RNA, 19 nt, Artificial Sequence
  Description of Artificial Sequence: Synthetic oligonucleotide
  Antisense strand to SEQ ID NO: 971600
uggaaucggcaucauauac

SEQ ID NO: 971602 - RNA, 19 nt, Artificial Sequence
  Description of Artificial Sequence: Synthetic oligonucleotide
  Sense strand starting at position 3359 of SEQ ID NO: 914017
agccaaugugugcaagaca

SEQ ID NO: 971603 - RNA, 19 nt, Artificial Sequence
  Description of Artificial Sequence: Synthetic oligonucleotide
  Antisense strand to SEQ ID NO: 971602
ugucuugcacacauuggcu

SEQ ID NO: 971604 - RNA, 19 nt, Artificial Sequence
  Description of Artificial Sequence: Synthetic oligonucleotide
  Sense strand starting at position 1055 of SEQ ID NO: 914017
cuacgaguuuaaucacauu

SEQ ID NO: 971605 - RNA, 19 nt, Artificial Sequence
  Description of Artificial Sequence: Synthetic oligonucleotide
  Antisense strand to SEQ ID NO: 971604
aaugugauuaaacucguag

SEQ ID NO: 971606 - RNA, 19 nt, Artificial Sequence
  Description of Artificial Sequence: Synthetic oligonucleotide
  Sense strand starting at position 2521 of SEQ ID NO: 914017
gcggacgccgcuguaaauu

SEQ ID NO: 971607 - RNA, 19 nt, Artificial Sequence
  Description of Artificial Sequence: Synthetic oligonucleotide
  Antisense strand to SEQ ID NO: 971606
aauuuacagcggcguccgc

SEQ ID NO: 971608 - RNA, 19 nt, Artificial Sequence
  Description of Artificial Sequence: Synthetic oligonucleotide
  Sense strand starting at position 1883 of SEQ ID NO: 914017
gcccuugagucauugggaa

SEQ ID NO: 971609 - RNA, 19 nt, Artificial Sequence
  Description of Artificial Sequence: Synthetic oligonucleotide
  Antisense strand to SEQ ID NO: 971608
uucccaaugacucaagggc

SEQ ID NO: 971610 - RNA, 19 nt, Artificial Sequence
  Description of Artificial Sequence: Synthetic oligonucleotide
  Sense strand starting at position 1727 of SEQ ID NO: 914017
auaugagggccuuggcaua

SEQ ID NO: 971611 - RNA, 19 nt, Artificial Sequence
  Description of Artificial Sequence: Synthetic oligonucleotide
  Antisense strand to SEQ ID NO: 971610
uaugccaaggcccucauau

SEQ ID NO: 971612 - RNA, 19 nt, Artificial Sequence
  Description of Artificial Sequence: Synthetic oligonucleotide
  Sense strand starting at position 1257 of SEQ ID NO: 914017
cucuucuuuguguacacua

SEQ ID NO: 971613 - RNA, 19 nt, Artificial Sequence
  Description of Artificial Sequence: Synthetic oligonucleotide
  Antisense strand to SEQ ID NO: 971612
uaguguacacaaagaagag

SEQ ID NO: 971614 - RNA, 19 nt, Artificial Sequence
  Description of Artificial Sequence: Synthetic oligonucleotide
  Sense strand starting at position 1259 of SEQ ID NO: 914017
cuucuuuguguacacuauu

SEQ ID NO: 971615 - RNA, 19 nt, Artificial Sequence
  Description of Artificial Sequence: Synthetic oligonucleotide
  Antisense strand to SEQ ID NO: 971614
aauaguguacacaaagaag

SEQ ID NO: 971616 - RNA, 19 nt, Artificial Sequence
  Description of Artificial Sequence: Synthetic oligonucleotide
  Sense strand starting at position 90 of SEQ ID NO: 914017
agauuaggcaugugaugug

SEQ ID NO: 971617 - RNA, 19 nt, Artificial Sequence
  Description of Artificial Sequence: Synthetic oligonucleotide
  Antisense strand to SEQ ID NO: 971616
cacaucacaugccuaaucu

SEQ ID NO: 971618 - RNA, 19 nt, Artificial Sequence
  Description of Artificial Sequence: Synthetic oligonucleotide
  Sense strand starting at position 239 of SEQ ID NO: 914017
uuuguagauucuguagauu

SEQ ID NO: 971619 - RNA, 19 nt, Artificial Sequence
  Description of Artificial Sequence: Synthetic oligonucleotide
  Antisense strand to SEQ ID NO: 971618
aaucuacagaaucuacaaa

SEQ ID NO: 971620 - RNA, 19 nt, Artificial Sequence
  Description of Artificial Sequence: Synthetic oligonucleotide
  Sense strand starting at position 3979 of SEQ ID NO: 914017
aagauucugcacuggucau

SEQ ID NO: 971621 - RNA, 19 nt, Artificial Sequence
  Description of Artificial Sequence: Synthetic oligonucleotide
  Antisense strand to SEQ ID NO: 971620
augaccagugcagaaucuu

SEQ ID NO: 971622 - RNA, 19 nt, Artificial Sequence
  Description of Artificial Sequence: Synthetic oligonucleotide
  Sense strand starting at position 389 of SEQ ID NO: 914017
ucaagcuguguacauguaa

SEQ ID NO: 971623 - RNA, 19 nt, Artificial Sequence
  Description of Artificial Sequence: Synthetic oligonucleotide
  Antisense strand to SEQ ID NO: 971622
uuacauguacacagcuuga

SEQ ID NO: 971624 - RNA, 19 nt, Artificial Sequence
  Description of Artificial Sequence: Synthetic oligonucleotide
  Sense strand starting at position 3022 of SEQ ID NO: 914017
agccauaugcuugagcuga

SEQ ID NO: 971625 - RNA, 19 nt, Artificial Sequence
  Description of Artificial Sequence: Synthetic oligonucleotide
  Antisense strand to SEQ ID NO: 971624
ucagcucaagcauauggcu

SEQ ID NO: 971626 - RNA, 19 nt, Artificial Sequence
  Description of Artificial Sequence: Synthetic oligonucleotide
  Sense strand starting at position 575 of SEQ ID NO: 914017
ucauuaaacgccugacacu

SEQ ID NO: 971627 - RNA, 19 nt, Artificial Sequence
  Description of Artificial Sequence: Synthetic oligonucleotide
  Antisense strand to SEQ ID NO: 971626
agugucaggcguuuaauga

SEQ ID NO: 971628 - RNA, 19 nt, Artificial Sequence
  Description of Artificial Sequence: Synthetic oligonucleotide
  Sense strand starting at position 717 of SEQ ID NO: 914017
cugagcacugccugggaau

SEQ ID NO: 971629 - RNA, 19 nt, Artificial Sequence
  Description of Artificial Sequence: Synthetic oligonucleotide
  Antisense strand to SEQ ID NO: 971628
auucccaggcagugcucag

SEQ ID NO: 971630 - RNA, 19 nt, Artificial Sequence
  Description of Artificial Sequence: Synthetic oligonucleotide
  Sense strand starting at position 976 of SEQ ID NO: 914017
agggucuucuccuuucuca

SEQ ID NO: 971631 - RNA, 19 nt, Artificial Sequence
  Description of Artificial Sequence: Synthetic oligonucleotide
  Antisense strand to SEQ ID NO: 971630
ugagaaaggagaagacccu

SEQ ID NO: 971632 - RNA, 19 nt, Artificial Sequence
  Description of Artificial Sequence: Synthetic oligonucleotide
  Sense strand starting at position 1334 of SEQ ID NO: 914017
gccgauuccaaagguuaac

SEQ ID NO: 971633 - RNA, 19 nt, Artificial Sequence
  Description of Artificial Sequence: Synthetic oligonucleotide
  Antisense strand to SEQ ID NO: 971632
guuaaccuuuggaaucggc

SEQ ID NO: 971634 - RNA, 19 nt, Artificial Sequence
  Description of Artificial Sequence: Synthetic oligonucleotide
  Sense strand starting at position 424 of SEQ ID NO: 914017
acuucugaguagcugcaaa

SEQ ID NO: 971635 - RNA, 19 nt, Artificial Sequence
  Description of Artificial Sequence: Synthetic oligonucleotide
  Antisense strand to SEQ ID NO: 971634
uuugcagcuacucagaagu

SEQ ID NO: 971636 - RNA, 19 nt, Artificial Sequence
  Description of Artificial Sequence: Synthetic oligonucleotide
  Sense strand starting at position 2601 of SEQ ID NO: 914017
ucaacagcucucugagcua

SEQ ID NO: 971637 - RNA, 19 nt, Artificial Sequence
  Description of Artificial Sequence: Synthetic oligonucleotide
  Antisense strand to SEQ ID NO: 971636
uagcucagagagcuguuga

SEQ ID NO: 971638 - RNA, 19 nt, Artificial Sequence
  Description of Artificial Sequence: Synthetic oligonucleotide
  Sense strand starting at position 385 of SEQ ID NO: 914017
auuaucaagcuguguacau

SEQ ID NO: 971639 - RNA, 19 nt, Artificial Sequence
  Description of Artificial Sequence: Synthetic oligonucleotide
  Antisense strand to SEQ ID NO: 971638
auguacacagcuugauaau

SEQ ID NO: 971640 - RNA, 19 nt, Artificial Sequence
  Description of Artificial Sequence: Synthetic oligonucleotide
  Sense strand starting at position 1346 of SEQ ID NO: 914017
gguuaacucuagcccgaca

SEQ ID NO: 971641 - RNA, 19 nt, Artificial Sequence
  Description of Artificial Sequence: Synthetic oligonucleotide
  Antisense strand to SEQ ID NO: 971640
ugucgggcuagaguuaacc

SEQ ID NO: 971642 - RNA, 19 nt, Artificial Sequence
  Description of Artificial Sequence: Synthetic oligonucleotide
  Sense strand starting at position 3563 of SEQ ID NO: 914018
cuauaucaccaggguaaga

SEQ ID NO: 971643 - RNA, 19 nt, Artificial Sequence
  Description of Artificial Sequence: Synthetic oligonucleotide
  Antisense strand to SEQ ID NO: 971642
ucuuacccuggugauauag

SEQ ID NO: 971644 - RNA, 19 nt, Artificial Sequence
  Description of Artificial Sequence: Synthetic oligonucleotide
  Sense strand starting at position 3562 of SEQ ID NO: 914018
acuauaucaccaggguaag

SEQ ID NO: 971645 - RNA, 19 nt, Artificial Sequence
  Description of Artificial Sequence: Synthetic oligonucleotide
  Antisense strand to SEQ ID NO: 971644
cuuacccuggugauauagu

SEQ ID NO: 971646 - RNA, 19 nt, Artificial Sequence
  Description of Artificial Sequence: Synthetic oligonucleotide
  Sense strand starting at position 1127 of SEQ ID NO: 914018
cuaccaggugacugauaaa

SEQ ID NO: 971647 - RNA, 19 nt, Artificial Sequence
  Description of Artificial Sequence: Synthetic oligonucleotide
  Antisense strand to SEQ ID NO: 971646
uuuaucagucaccugguag

SEQ ID NO: 971648 - RNA, 19 nt, Artificial Sequence
  Description of Artificial Sequence: Synthetic oligonucleotide
  Sense strand starting at position 1483 of SEQ ID NO: 914018
ugcugaauggauugaugaa

SEQ ID NO: 971649 - RNA, 19 nt, Artificial Sequence
  Description of Artificial Sequence: Synthetic oligonucleotide
  Antisense strand to SEQ ID NO: 971648
uucaucaauccauucagca

SEQ ID NO: 971650 - RNA, 19 nt, Artificial Sequence
  Description of Artificial Sequence: Synthetic oligonucleotide
  Sense strand starting at position 8 of SEQ ID NO: 914018
ccaggacaauggcucuaaa

SEQ ID NO: 971651 - RNA, 19 nt, Artificial Sequence
  Description of Artificial Sequence: Synthetic oligonucleotide
  Antisense strand to SEQ ID NO: 971650
uuuagagccauuguccugg

SEQ ID NO: 971652 - RNA, 19 nt, Artificial Sequence
  Description of Artificial Sequence: Synthetic oligonucleotide
  Sense strand starting at position 3623 of SEQ ID NO: 914018
agugccuaacaucaagauu

SEQ ID NO: 971653 - RNA, 19 nt, Artificial Sequence
  Description of Artificial Sequence: Synthetic oligonucleotide
  Antisense strand to SEQ ID NO: 971652
aaucuugauguuaggcacu

SEQ ID NO: 971654 - RNA, 19 nt, Artificial Sequence
  Description of Artificial Sequence: Synthetic oligonucleotide
  Sense strand starting at position 1412 of SEQ ID NO: 914018
ugccuaucgcguucauaga

SEQ ID NO: 971655 - RNA, 19 nt, Artificial Sequence
  Description of Artificial Sequence: Synthetic oligonucleotide
  Antisense strand to SEQ ID NO: 971654
ucuaugaacgcgauaggca

SEQ ID NO: 971656 - RNA, 19 nt, Artificial Sequence
  Description of Artificial Sequence: Synthetic oligonucleotide
  Sense strand starting at position 2492 of SEQ ID NO: 914018
ggucaauguagagggaauu

SEQ ID NO: 971657 - RNA, 19 nt, Artificial Sequence
  Description of Artificial Sequence: Synthetic oligonucleotide
  Antisense strand to SEQ ID NO: 971656
aauucccucuacauugacc

SEQ ID NO: 971658 - RNA, 19 nt, Artificial Sequence
  Description of Artificial Sequence: Synthetic oligonucleotide
  Sense strand starting at position 3897 of SEQ ID NO: 914018
aaguuuagggcccaucaca

SEQ ID NO: 971659 - RNA, 19 nt, Artificial Sequence
  Description of Artificial Sequence: Synthetic oligonucleotide
  Antisense strand to SEQ ID NO: 971658
ugugaugggcccuaaacuu

SEQ ID NO: 971660 - RNA, 19 nt, Artificial Sequence
  Description of Artificial Sequence: Synthetic oligonucleotide
  Sense strand starting at position 919 of SEQ ID NO: 914018
cuuuguguacacuauuaaa

SEQ ID NO: 971661 - RNA, 19 nt, Artificial Sequence
  Description of Artificial Sequence: Synthetic oligonucleotide
  Antisense strand to SEQ ID NO: 971660
uuuaauaguguacacaaag

SEQ ID NO: 971662 - RNA, 19 nt, Artificial Sequence
  Description of Artificial Sequence: Synthetic oligonucleotide
  Sense strand starting at position 2672 of SEQ ID NO: 914018
cacagagagccauaugcuu

SEQ ID NO: 971663 - RNA, 19 nt, Artificial Sequence
  Description of Artificial Sequence: Synthetic oligonucleotide
  Antisense strand to SEQ ID NO: 971662
aagcauauggcucucugug

SEQ ID NO: 971664 - RNA, 19 nt, Artificial Sequence
  Description of Artificial Sequence: Synthetic oligonucleotide
  Sense strand starting at position 2768 of SEQ ID NO: 914018
gacagugagucucuacaga

SEQ ID NO: 971665 - RNA, 19 nt, Artificial Sequence
  Description of Artificial Sequence: Synthetic oligonucleotide
  Antisense strand to SEQ ID NO: 971664
ucuguagagacucacuguc

SEQ ID NO: 971666 - RNA, 19 nt, Artificial Sequence
  Description of Artificial Sequence: Synthetic oligonucleotide
  Sense strand starting at position 167 of SEQ ID NO: 914018
ucagucacauauguauaaa

SEQ ID NO: 971667 - RNA, 19 nt, Artificial Sequence
  Description of Artificial Sequence: Synthetic oligonucleotide
  Antisense strand to SEQ ID NO: 971666
uuuauacauaugugacuga

SEQ ID NO: 971668 - RNA, 19 nt, Artificial Sequence
  Description of Artificial Sequence: Synthetic oligonucleotide
  Sense strand starting at position 105 of SEQ ID NO: 914018
guucucugugaugggagaa

SEQ ID NO: 971669 - RNA, 19 nt, Artificial Sequence
  Description of Artificial Sequence: Synthetic oligonucleotide
  Antisense strand to SEQ ID NO: 971668
uucucccaucacagagaac

SEQ ID NO: 971670 - RNA, 19 nt, Artificial Sequence
  Description of Artificial Sequence: Synthetic oligonucleotide
  Sense strand starting at position 1368 of SEQ ID NO: 914018
uugagucaaggcuagcaua

SEQ ID NO: 971671 - RNA, 19 nt, Artificial Sequence
  Description of Artificial Sequence: Synthetic oligonucleotide
  Antisense strand to SEQ ID NO: 971670
uaugcuagccuugacucaa

SEQ ID NO: 971672 - RNA, 19 nt, Artificial Sequence
  Description of Artificial Sequence: Synthetic oligonucleotide
  Sense strand starting at position 2428 of SEQ ID NO: 914018
gagccugugccagaauaug

SEQ ID NO: 971673 - RNA, 19 nt, Artificial Sequence
  Description of Artificial Sequence: Synthetic oligonucleotide
  Antisense strand to SEQ ID NO: 971672
cauauucuggcacaggcuc

SEQ ID NO: 971674 - RNA, 19 nt, Artificial Sequence
  Description of Artificial Sequence: Synthetic oligonucleotide
  Sense strand starting at position 1542 of SEQ ID NO: 914018
ccuugagucauugggaagu

SEQ ID NO: 971675 - RNA, 19 nt, Artificial Sequence
  Description of Artificial Sequence: Synthetic oligonucleotide
  Antisense strand to SEQ ID NO: 971674
acuucccaaugacucaagg

SEQ ID NO: 971676 - RNA, 19 nt, Artificial Sequence
  Description of Artificial Sequence: Synthetic oligonucleotide
  Sense strand starting at position 982 of SEQ ID NO: 914018
guauaugaugccgauucca

SEQ ID NO: 971677 - RNA, 19 nt, Artificial Sequence
  Description of Artificial Sequence: Synthetic oligonucleotide
  Antisense strand to SEQ ID NO: 971676
uggaaucggcaucauauac

SEQ ID NO: 971678 - RNA, 19 nt, Artificial Sequence
  Description of Artificial Sequence: Synthetic oligonucleotide
  Sense strand starting at position 3016 of SEQ ID NO: 914018
agccaaugugugcaagaca

SEQ ID NO: 971679 - RNA, 19 nt, Artificial Sequence
  Description of Artificial Sequence: Synthetic oligonucleotide
  Antisense strand to SEQ ID NO: 971678
ugucuugcacacauuggcu

SEQ ID NO: 971680 - RNA, 19 nt, Artificial Sequence
  Description of Artificial Sequence: Synthetic oligonucleotide
  Sense strand starting at position 712 of SEQ ID NO: 914018
cuacgaguuuaaucacauu

SEQ ID NO: 971681 - RNA, 19 nt, Artificial Sequence
  Description of Artificial Sequence: Synthetic oligonucleotide
  Antisense strand to SEQ ID NO: 971680
aaugugauuaaacucguag

SEQ ID NO: 971682 - RNA, 19 nt, Artificial Sequence
  Description of Artificial Sequence: Synthetic oligonucleotide
  Sense strand starting at position 2178 of SEQ ID NO: 914018
gcggacgccgcuguaaauu

SEQ ID NO: 971683 - RNA, 19 nt, Artificial Sequence
  Description of Artificial Sequence: Synthetic oligonucleotide
  Antisense strand to SEQ ID NO: 971682
aauuuacagcggcguccgc

SEQ ID NO: 971684 - RNA, 19 nt, Artificial Sequence
  Description of Artificial Sequence: Synthetic oligonucleotide
  Sense strand starting at position 1540 of SEQ ID NO: 914018
gcccuugagucauugggaa

SEQ ID NO: 971685 - RNA, 19 nt, Artificial Sequence
  Description of Artificial Sequence: Synthetic oligonucleotide
  Antisense strand to SEQ ID NO: 971684
uucccaaugacucaagggc

SEQ ID NO: 971686 - RNA, 19 nt, Artificial Sequence
  Description of Artificial Sequence: Synthetic oligonucleotide
  Sense strand starting at position 1384 of SEQ ID NO: 914018
auaugagggccuuggcaua

SEQ ID NO: 971687 - RNA, 19 nt, Artificial Sequence
  Description of Artificial Sequence: Synthetic oligonucleotide
  Antisense strand to SEQ ID NO: 971686
uaugccaaggcccucauau

SEQ ID NO: 971688 - RNA, 19 nt, Artificial Sequence
  Description of Artificial Sequence: Synthetic oligonucleotide
  Sense strand starting at position 914 of SEQ ID NO: 914018
cucuucuuuguguacacua

SEQ ID NO: 971689 - RNA, 19 nt, Artificial Sequence
  Description of Artificial Sequence: Synthetic oligonucleotide
  Antisense strand to SEQ ID NO: 971688
uaguguacacaaagaagag

SEQ ID NO: 971690 - RNA, 19 nt, Artificial Sequence
  Description of Artificial Sequence: Synthetic oligonucleotide
  Sense strand starting at position 916 of SEQ ID NO: 914018
cuucuuuguguacacuauu

SEQ ID NO: 971691 - RNA, 19 nt, Artificial Sequence
  Description of Artificial Sequence: Synthetic oligonucleotide
  Antisense strand to SEQ ID NO: 971690
aauaguguacacaaagaag

SEQ ID NO: 971692 - RNA, 19 nt, Artificial Sequence
  Description of Artificial Sequence: Synthetic oligonucleotide
  Sense strand starting at position 3636 of SEQ ID NO: 914018
aagauucugcacuggucau

SEQ ID NO: 971693 - RNA, 19 nt, Artificial Sequence
  Description of Artificial Sequence: Synthetic oligonucleotide
  Antisense strand to SEQ ID NO: 971692
augaccagugcagaaucuu

SEQ ID NO: 971694 - RNA, 19 nt, Artificial Sequence
  Description of Artificial Sequence: Synthetic oligonucleotide
  Sense strand starting at position 46 of SEQ ID NO: 914018
ucaagcuguguacauguaa

SEQ ID NO: 971695 - RNA, 19 nt, Artificial Sequence
  Description of Artificial Sequence: Synthetic oligonucleotide
  Antisense strand to SEQ ID NO: 971694
uuacauguacacagcuuga

SEQ ID NO: 971696 - RNA, 19 nt, Artificial Sequence
  Description of Artificial Sequence: Synthetic oligonucleotide
  Sense strand starting at position 2679 of SEQ ID NO: 914018
agccauaugcuugagcuga

SEQ ID NO: 971697 - RNA, 19 nt, Artificial Sequence
  Description of Artificial Sequence: Synthetic oligonucleotide
  Antisense strand to SEQ ID NO: 971696
ucagcucaagcauauggcu

SEQ ID NO: 971698 - RNA, 19 nt, Artificial Sequence
  Description of Artificial Sequence: Synthetic oligonucleotide
  Sense strand starting at position 232 of SEQ ID NO: 914018
ucauuaaacgccugacacu

SEQ ID NO: 971699 - RNA, 19 nt, Artificial Sequence
  Description of Artificial Sequence: Synthetic oligonucleotide
  Antisense strand to SEQ ID NO: 971698
agugucaggcguuuaauga

SEQ ID NO: 971700 - RNA, 19 nt, Artificial Sequence
  Description of Artificial Sequence: Synthetic oligonucleotide
  Sense strand starting at position 374 of SEQ ID NO: 914018
cugagcacugccugggaau

SEQ ID NO: 971701 - RNA, 19 nt, Artificial Sequence
  Description of Artificial Sequence: Synthetic oligonucleotide
  Antisense strand to SEQ ID NO: 971700
auucccaggcagugcucag

SEQ ID NO: 971702 - RNA, 19 nt, Artificial Sequence
  Description of Artificial Sequence: Synthetic oligonucleotide
  Sense strand starting at position 633 of SEQ ID NO: 914018
agggucuucuccuuucuca

SEQ ID NO: 971703 - RNA, 19 nt, Artificial Sequence
  Description of Artificial Sequence: Synthetic oligonucleotide
  Antisense strand to SEQ ID NO: 971702
ugagaaaggagaagacccu

SEQ ID NO: 971704 - RNA, 19 nt, Artificial Sequence
  Description of Artificial Sequence: Synthetic oligonucleotide
  Sense strand starting at position 991 of SEQ ID NO: 914018
gccgauuccaaagguuaac

SEQ ID NO: 971705 - RNA, 19 nt, Artificial Sequence
  Description of Artificial Sequence: Synthetic oligonucleotide
  Antisense strand to SEQ ID NO: 971704
guuaaccuuuggaaucggc

SEQ ID NO: 971706 - RNA, 19 nt, Artificial Sequence
  Description of Artificial Sequence: Synthetic oligonucleotide
  Sense strand starting at position 81 of SEQ ID NO: 914018
acuucugaguagcugcaaa

SEQ ID NO: 971707 - RNA, 19 nt, Artificial Sequence
  Description of Artificial Sequence: Synthetic oligonucleotide
  Antisense strand to SEQ ID NO: 971706
uuugcagcuacucagaagu

SEQ ID NO: 971708 - RNA, 19 nt, Artificial Sequence
  Description of Artificial Sequence: Synthetic oligonucleotide
  Sense strand starting at position 2258 of SEQ ID NO: 914018
ucaacagcucucugagcua

SEQ ID NO: 971709 - RNA, 19 nt, Artificial Sequence
  Description of Artificial Sequence: Synthetic oligonucleotide
  Antisense strand to SEQ ID NO: 971708
uagcucagagagcuguuga

SEQ ID NO: 971710 - RNA, 19 nt, Artificial Sequence
  Description of Artificial Sequence: Synthetic oligonucleotide
  Sense strand starting at position 42 of SEQ ID NO: 914018
auuaucaagcuguguacau

SEQ ID NO: 971711 - RNA, 19 nt, Artificial Sequence
  Description of Artificial Sequence: Synthetic oligonucleotide
  Antisense strand to SEQ ID NO: 971710
auguacacagcuugauaau

SEQ ID NO: 971712 - RNA, 19 nt, Artificial Sequence
  Description of Artificial Sequence: Synthetic oligonucleotide
  Sense strand starting at position 1003 of SEQ ID NO: 914018
gguuaacucuagcccgaca

SEQ ID NO: 971713 - RNA, 19 nt, Artificial Sequence
  Description of Artificial Sequence: Synthetic oligonucleotide
  Antisense strand to SEQ ID NO: 971712
ugucgggcuagaguuaacc

SEQ ID NO: 971714 - RNA, 19 nt, Artificial Sequence
  Description of Artificial Sequence: Synthetic oligonucleotide
  Sense strand starting at position 1577 of SEQ ID NO: 914018
gccugaugauggcuucuua

SEQ ID NO: 971715 - RNA, 19 nt, Artificial Sequence
  Description of Artificial Sequence: Synthetic oligonucleotide
  Antisense strand to SEQ ID NO: 971714
uaagaagccaucaucaggc

SEQ ID NO: 971716 - RNA, 19 nt, Artificial Sequence
  Description of Artificial Sequence: Synthetic oligonucleotide
  Sense strand starting at position 1217 of SEQ ID NO: 914018
uggucagaguccucugcaa

SEQ ID NO: 971717 - RNA, 19 nt, Artificial Sequence
  Description of Artificial Sequence: Synthetic oligonucleotide
  Antisense strand to SEQ ID NO: 971716
uugcagaggacucugacca

SEQ ID NO: 971718 - RNA, 19 nt, Artificial Sequence
  Description of Artificial Sequence: Synthetic oligonucleotide
  Sense strand starting at position 1250 of SEQ ID NO: 914018
augcuuaugucuucuauug

SEQ ID NO: 971719 - RNA, 19 nt, Artificial Sequence
  Description of Artificial Sequence: Synthetic oligonucleotide
  Antisense strand to SEQ ID NO: 971718
caauagaagacauaagcau

SEQ ID NO: 971720 - RNA, 19 nt, Artificial Sequence
  Description of Artificial Sequence: Synthetic oligonucleotide
  Sense strand starting at position 798 of SEQ ID NO: 914018
ccauuaaaguuguucuugu

SEQ ID NO: 971721 - RNA, 19 nt, Artificial Sequence
  Description of Artificial Sequence: Synthetic oligonucleotide
  Antisense strand to SEQ ID NO: 971720
acaagaacaacuuuaaugg

SEQ ID NO: 971722 - RNA, 19 nt, Artificial Sequence
  Description of Artificial Sequence: Synthetic oligonucleotide
  Sense strand starting at position 2778 of SEQ ID NO: 914019
uaggcuuaugaaugaauga

SEQ ID NO: 971723 - RNA, 19 nt, Artificial Sequence
  Description of Artificial Sequence: Synthetic oligonucleotide
  Antisense strand to SEQ ID NO: 971722
ucauucauucauaagccua

SEQ ID NO: 971724 - RNA, 19 nt, Artificial Sequence
  Description of Artificial Sequence: Synthetic oligonucleotide
  Sense strand starting at position 3838 of SEQ ID NO: 914019
ccaggaggugcucagugaa

SEQ ID NO: 971725 - RNA, 19 nt, Artificial Sequence
  Description of Artificial Sequence: Synthetic oligonucleotide
  Antisense strand to SEQ ID NO: 971724
uucacugagcaccuccugg

SEQ ID NO: 971726 - RNA, 19 nt, Artificial Sequence
  Description of Artificial Sequence: Synthetic oligonucleotide
  Sense strand starting at position 868 of SEQ ID NO: 914019
aguuuccuggauugaaacu

SEQ ID NO: 971727 - RNA, 19 nt, Artificial Sequence
  Description of Artificial Sequence: Synthetic oligonucleotide
  Antisense strand to SEQ ID NO: 971726
aguuucaauccaggaaacu

SEQ ID NO: 971728 - RNA, 19 nt, Artificial Sequence
  Description of Artificial Sequence: Synthetic oligonucleotide
  Sense strand starting at position 208 of SEQ ID NO: 914019
agcucuuguccacauggga

SEQ ID NO: 971729 - RNA, 19 nt, Artificial Sequence
  Description of Artificial Sequence: Synthetic oligonucleotide
  Antisense strand to SEQ ID NO: 971728
ucccauguggacaagagcu

SEQ ID NO: 971730 - RNA, 19 nt, Artificial Sequence
  Description of Artificial Sequence: Synthetic oligonucleotide
  Sense strand starting at position 2859 of SEQ ID NO: 914019
cgacucuuagcauacuuaa

SEQ ID NO: 971731 - RNA, 19 nt, Artificial Sequence
  Description of Artificial Sequence: Synthetic oligonucleotide
  Antisense strand to SEQ ID NO: 971730
uuaaguaugcuaagagucg

SEQ ID NO: 971732 - RNA, 19 nt, Artificial Sequence
  Description of Artificial Sequence: Synthetic oligonucleotide
  Sense strand starting at position 3684 of SEQ ID NO: 914019
uccaucacaguuuggaauu

SEQ ID NO: 971733 - RNA, 19 nt, Artificial Sequence
  Description of Artificial Sequence: Synthetic oligonucleotide
  Antisense strand to SEQ ID NO: 971732
aauuccaaacugugaugga

SEQ ID NO: 971734 - RNA, 19 nt, Artificial Sequence
  Description of Artificial Sequence: Synthetic oligonucleotide
  Sense strand starting at position 2772 of SEQ ID NO: 914019
gcucauuaggcuuaugaau

SEQ ID NO: 971735 - RNA, 19 nt, Artificial Sequence
  Description of Artificial Sequence: Synthetic oligonucleotide
  Antisense strand to SEQ ID NO: 971734
auucauaagccuaaugagc

SEQ ID NO: 971736 - RNA, 19 nt, Artificial Sequence
  Description of Artificial Sequence: Synthetic oligonucleotide
  Sense strand starting at position 3089 of SEQ ID NO: 914019
acaccauccguaugggaau

SEQ ID NO: 971737 - RNA, 19 nt, Artificial Sequence
  Description of Artificial Sequence: Synthetic oligonucleotide
  Antisense strand to SEQ ID NO: 971736
auucccauacggauggugu

SEQ ID NO: 971738 - RNA, 19 nt, Artificial Sequence
  Description of Artificial Sequence: Synthetic oligonucleotide
  Sense strand starting at position 2591 of SEQ ID NO: 914019
cgacuucuuccagggaauu

SEQ ID NO: 971739 - RNA, 19 nt, Artificial Sequence
  Description of Artificial Sequence: Synthetic oligonucleotide
  Antisense strand to SEQ ID NO: 971738
aauucccuggaagaagucg

SEQ ID NO: 971740 - RNA, 19 nt, Artificial Sequence
  Description of Artificial Sequence: Synthetic oligonucleotide
  Sense strand starting at position 943 of SEQ ID NO: 914019
ugccuaaucuuucuggaaa

SEQ ID NO: 971741 - RNA, 19 nt, Artificial Sequence
  Description of Artificial Sequence: Synthetic oligonucleotide
  Antisense strand to SEQ ID NO: 971740
uuuccagaaagauuaggca

SEQ ID NO: 971742 - RNA, 19 nt, Artificial Sequence
  Description of Artificial Sequence: Synthetic oligonucleotide
  Sense strand starting at position 2997 of SEQ ID NO: 914019
cugcgaaaccaguggagaa

SEQ ID NO: 971743 - RNA, 19 nt, Artificial Sequence
  Description of Artificial Sequence: Synthetic oligonucleotide
  Antisense strand to SEQ ID NO: 971742
uucuccacugguuucgcag

SEQ ID NO: 971744 - RNA, 19 nt, Artificial Sequence
  Description of Artificial Sequence: Synthetic oligonucleotide
  Sense strand starting at position 2512 of SEQ ID NO: 914019
aaggcaguaucugucaaag

SEQ ID NO: 971745 - RNA, 19 nt, Artificial Sequence
  Description of Artificial Sequence: Synthetic oligonucleotide
  Antisense strand to SEQ ID NO: 971744
cuuugacagauacugccuu

SEQ ID NO: 971746 - RNA, 19 nt, Artificial Sequence
  Description of Artificial Sequence: Synthetic oligonucleotide
  Sense strand starting at position 843 of SEQ ID NO: 914019
agcagagagcuguauucuu

SEQ ID NO: 971747 - RNA, 19 nt, Artificial Sequence
  Description of Artificial Sequence: Synthetic oligonucleotide
  Antisense strand to SEQ ID NO: 971746
aagaauacagcucucugcu

SEQ ID NO: 971748 - RNA, 19 nt, Artificial Sequence
  Description of Artificial Sequence: Synthetic oligonucleotide
  Sense strand starting at position 437 of SEQ ID NO: 914019
aagagccugugcuuggaaa

SEQ ID NO: 971749 - RNA, 19 nt, Artificial Sequence
  Description of Artificial Sequence: Synthetic oligonucleotide
  Antisense strand to SEQ ID NO: 971748
uuuccaagcacaggcucuu

SEQ ID NO: 971750 - RNA, 19 nt, Artificial Sequence
  Description of Artificial Sequence: Synthetic oligonucleotide
  Sense strand starting at position 775 of SEQ ID NO: 914019
guaucacgugaucacucuu

SEQ ID NO: 971751 - RNA, 19 nt, Artificial Sequence
  Description of Artificial Sequence: Synthetic oligonucleotide
  Antisense strand to SEQ ID NO: 971750
aagagugaucacgugauac

SEQ ID NO: 971752 - RNA, 19 nt, Artificial Sequence
  Description of Artificial Sequence: Synthetic oligonucleotide
  Sense strand starting at position 772 of SEQ ID NO: 914019
ucuguaucacgugaucacu

SEQ ID NO: 971753 - RNA, 19 nt, Artificial Sequence
  Description of Artificial Sequence: Synthetic oligonucleotide
  Antisense strand to SEQ ID NO: 971752
agugaucacgugauacaga

SEQ ID NO: 971754 - RNA, 19 nt, Artificial Sequence
  Description of Artificial Sequence: Synthetic oligonucleotide
  Sense strand starting at position 2159 of SEQ ID NO: 914019
ugggcauccguuuacucaa

SEQ ID NO: 971755 - RNA, 19 nt, Artificial Sequence
  Description of Artificial Sequence: Synthetic oligonucleotide
  Antisense strand to SEQ ID NO: 971754
uugaguaaacggaugccca

SEQ ID NO: 971756 - RNA, 19 nt, Artificial Sequence
  Description of Artificial Sequence: Synthetic oligonucleotide
  Sense strand starting at position 3794 of SEQ ID NO: 914019
cuccauggcuucucagacu

SEQ ID NO: 971757 - RNA, 19 nt, Artificial Sequence
  Description of Artificial Sequence: Synthetic oligonucleotide
  Antisense strand to SEQ ID NO: 971756
agucugagaagccauggag

SEQ ID NO: 971758 - RNA, 19 nt, Artificial Sequence
  Description of Artificial Sequence: Synthetic oligonucleotide
  Sense strand starting at position 33 of SEQ ID NO: 914019
cucacuuuguguccacaca

SEQ ID NO: 971759 - RNA, 19 nt, Artificial Sequence
  Description of Artificial Sequence: Synthetic oligonucleotide
  Antisense strand to SEQ ID NO: 971758
uguguggacacaaagugag

SEQ ID NO: 971760 - RNA, 19 nt, Artificial Sequence
  Description of Artificial Sequence: Synthetic oligonucleotide
  Sense strand starting at position 2856 of SEQ ID NO: 914019
cgacgacucuuagcauacu

SEQ ID NO: 971761 - RNA, 19 nt, Artificial Sequence
  Description of Artificial Sequence: Synthetic oligonucleotide
  Antisense strand to SEQ ID NO: 971760
aguaugcuaagagucgucg

SEQ ID NO: 971762 - RNA, 19 nt, Artificial Sequence
  Description of Artificial Sequence: Synthetic oligonucleotide
  Sense strand starting at position 848 of SEQ ID NO: 914019
agagcuguauucuuucuuu

SEQ ID NO: 971763 - RNA, 19 nt, Artificial Sequence
  Description of Artificial Sequence: Synthetic oligonucleotide
  Antisense strand to SEQ ID NO: 971762
aaagaaagaauacagcucu

SEQ ID NO: 971764 - RNA, 19 nt, Artificial Sequence
  Description of Artificial Sequence: Synthetic oligonucleotide
  Sense strand starting at position 853 of SEQ ID NO: 914019
uguauucuuucuuugaguu

SEQ ID NO: 971765 - RNA, 19 nt, Artificial Sequence
  Description of Artificial Sequence: Synthetic oligonucleotide
  Antisense strand to SEQ ID NO: 971764
aacucaaagaaagaauaca

SEQ ID NO: 971766 - RNA, 19 nt, Artificial Sequence
  Description of Artificial Sequence: Synthetic oligonucleotide
  Sense strand starting at position 852 of SEQ ID NO: 914019
cuguauucuuucuuugagu

SEQ ID NO: 971767 - RNA, 19 nt, Artificial Sequence
  Description of Artificial Sequence: Synthetic oligonucleotide
  Antisense strand to SEQ ID NO: 971766
acucaaagaaagaauacag

SEQ ID NO: 971768 - RNA, 19 nt, Artificial Sequence
  Description of Artificial Sequence: Synthetic oligonucleotide
  Sense strand starting at position 644 of SEQ ID NO: 914019
ggacaagagucguuagugu

SEQ ID NO: 971769 - RNA, 19 nt, Artificial Sequence
  Description of Artificial Sequence: Synthetic oligonucleotide
  Antisense strand to SEQ ID NO: 971768
acacuaacgacucuugucc

SEQ ID NO: 971770 - RNA, 19 nt, Artificial Sequence
  Description of Artificial Sequence: Synthetic oligonucleotide
  Sense strand starting at position 3551 of SEQ ID NO: 914019
ccuuucucucagugccaga

SEQ ID NO: 971771 - RNA, 19 nt, Artificial Sequence
  Description of Artificial Sequence: Synthetic oligonucleotide
  Antisense strand to SEQ ID NO: 971770
ucuggcacugagagaaagg

SEQ ID NO: 971772 - RNA, 19 nt, Artificial Sequence
  Description of Artificial Sequence: Synthetic oligonucleotide
  Sense strand starting at position 851 of SEQ ID NO: 914019
gcuguauucuuucuuugag

SEQ ID NO: 971773 - RNA, 19 nt, Artificial Sequence
  Description of Artificial Sequence: Synthetic oligonucleotide
  Antisense strand to SEQ ID NO: 971772
cucaaagaaagaauacagc

SEQ ID NO: 971774 - RNA, 19 nt, Artificial Sequence
  Description of Artificial Sequence: Synthetic oligonucleotide
  Sense strand starting at position 854 of SEQ ID NO: 914019
guauucuuucuuugaguuu

SEQ ID NO: 971775 - RNA, 19 nt, Artificial Sequence
  Description of Artificial Sequence: Synthetic oligonucleotide
  Antisense strand to SEQ ID NO: 971774
aaacucaaagaaagaauac

SEQ ID NO: 971776 - RNA, 19 nt, Artificial Sequence
  Description of Artificial Sequence: Synthetic oligonucleotide
  Sense strand starting at position 2677 of SEQ ID NO: 914019
guggcauguugguucugaa

SEQ ID NO: 971777 - RNA, 19 nt, Artificial Sequence
  Description of Artificial Sequence: Synthetic oligonucleotide
  Antisense strand to SEQ ID NO: 971776
uucagaaccaacaugccac

SEQ ID NO: 971778 - RNA, 19 nt, Artificial Sequence
  Description of Artificial Sequence: Synthetic oligonucleotide
  Sense strand starting at position 439 of SEQ ID NO: 914019
gagccugugcuuggaaagu

SEQ ID NO: 971779 - RNA, 19 nt, Artificial Sequence
  Description of Artificial Sequence: Synthetic oligonucleotide
  Antisense strand to SEQ ID NO: 971778
acuuuccaagcacaggcuc

SEQ ID NO: 971780 - RNA, 19 nt, Artificial Sequence
  Description of Artificial Sequence: Synthetic oligonucleotide
  Sense strand starting at position 679 of SEQ ID NO: 914019
auccaucuuugggacacaa

SEQ ID NO: 971781 - RNA, 19 nt, Artificial Sequence
  Description of Artificial Sequence: Synthetic oligonucleotide
  Antisense strand to SEQ ID NO: 971780
uugugucccaaagauggau

SEQ ID NO: 971782 - RNA, 19 nt, Artificial Sequence
  Description of Artificial Sequence: Synthetic oligonucleotide
  Sense strand starting at position 3697 of SEQ ID NO: 914019
ggaauuauuuguggguuua

SEQ ID NO: 971783 - RNA, 19 nt, Artificial Sequence
  Description of Artificial Sequence: Synthetic oligonucleotide
  Antisense strand to SEQ ID NO: 971782
uaaacccacaaauaauucc

SEQ ID NO: 971784 - RNA, 19 nt, Artificial Sequence
  Description of Artificial Sequence: Synthetic oligonucleotide
  Sense strand starting at position 3696 of SEQ ID NO: 914019
uggaauuauuuguggguuu

SEQ ID NO: 971785 - RNA, 19 nt, Artificial Sequence
  Description of Artificial Sequence: Synthetic oligonucleotide
  Antisense strand to SEQ ID NO: 971784
aaacccacaaauaauucca

SEQ ID NO: 971786 - RNA, 19 nt, Artificial Sequence
  Description of Artificial Sequence: Synthetic oligonucleotide
  Sense strand starting at position 879 of SEQ ID NO: 914019
uugaaacucugauggaaug

SEQ ID NO: 971787 - RNA, 19 nt, Artificial Sequence
  Description of Artificial Sequence: Synthetic oligonucleotide
  Antisense strand to SEQ ID NO: 971786
cauuccaucagaguuucaa

SEQ ID NO: 971788 - RNA, 19 nt, Artificial Sequence
  Description of Artificial Sequence: Synthetic oligonucleotide
  Sense strand starting at position 2615 of SEQ ID NO: 914019
caagcuauuuagggagcuu

SEQ ID NO: 971789 - RNA, 19 nt, Artificial Sequence
  Description of Artificial Sequence: Synthetic oligonucleotide
  Antisense strand to SEQ ID NO: 971788
aagcucccuaaauagcuug

SEQ ID NO: 971790 - RNA, 19 nt, Artificial Sequence
  Description of Artificial Sequence: Synthetic oligonucleotide
  Sense strand starting at position 22 of SEQ ID NO: 914019
uccgcauuguccucacuuu

SEQ ID NO: 971791 - RNA, 19 nt, Artificial Sequence
  Description of Artificial Sequence: Synthetic oligonucleotide
  Antisense strand to SEQ ID NO: 971790
aaagugaggacaaugcgga

SEQ ID NO: 971792 - RNA, 19 nt, Artificial Sequence
  Description of Artificial Sequence: Synthetic oligonucleotide
  Sense strand starting at position 1121 of SEQ ID NO: 914019
ggucgucgacccugcaaau

SEQ ID NO: 971793 - RNA, 19 nt, Artificial Sequence
  Description of Artificial Sequence: Synthetic oligonucleotide
  Antisense strand to SEQ ID NO: 971792
auuugcagggucgacgacc

SEQ ID NO: 971794 - RNA, 19 nt, Artificial Sequence
  Description of Artificial Sequence: Synthetic oligonucleotide
  Sense strand starting at position 2813 of SEQ ID NO: 914019
uggcacuuacgguguguua

SEQ ID NO: 971795 - RNA, 19 nt, Artificial Sequence
  Description of Artificial Sequence: Synthetic oligonucleotide
  Antisense strand to SEQ ID NO: 971794
uaacacaccguaagugcca

SEQ ID NO: 971796 - RNA, 19 nt, Artificial Sequence
  Description of Artificial Sequence: Synthetic oligonucleotide
  Sense strand starting at position 11 of SEQ ID NO: 914019
cugugugacuuuccgcauu

SEQ ID NO: 971797 - RNA, 19 nt, Artificial Sequence
  Description of Artificial Sequence: Synthetic oligonucleotide
  Antisense strand to SEQ ID NO: 971796
aaugcggaaagucacacag

SEQ ID NO: 971798 - RNA, 19 nt, Artificial Sequence
  Description of Artificial Sequence: Synthetic oligonucleotide
  Sense strand starting at position 13 of SEQ ID NO: 914019
gugugacuuuccgcauugu

SEQ ID NO: 971799 - RNA, 19 nt, Artificial Sequence
  Description of Artificial Sequence: Synthetic oligonucleotide
  Antisense strand to SEQ ID NO: 971798
acaaugcggaaagucacac

SEQ ID NO: 971800 - RNA, 19 nt, Artificial Sequence
  Description of Artificial Sequence: Synthetic oligonucleotide
  Sense strand starting at position 3685 of SEQ ID NO: 914019
ccaucacaguuuggaauua

SEQ ID NO: 971801 - RNA, 19 nt, Artificial Sequence
  Description of Artificial Sequence: Synthetic oligonucleotide
  Antisense strand to SEQ ID NO: 971800
uaauuccaaacugugaugg

SEQ ID NO: 971802 - RNA, 19 nt, Artificial Sequence
  Description of Artificial Sequence: Synthetic oligonucleotide
  Sense strand starting at position 663 of SEQ ID NO: 914020
ugauauugacaaggucaac

SEQ ID NO: 971803 - RNA, 19 nt, Artificial Sequence
  Description of Artificial Sequence: Synthetic oligonucleotide
  Antisense strand to SEQ ID NO: 971802
guugaccuugucaauauca

SEQ ID NO: 971804 - RNA, 19 nt, Artificial Sequence
  Description of Artificial Sequence: Synthetic oligonucleotide
  Sense strand starting at position 649 of SEQ ID NO: 914020
ccuggagaaugagcugaua

SEQ ID NO: 971805 - RNA, 19 nt, Artificial Sequence
  Description of Artificial Sequence: Synthetic oligonucleotide
  Antisense strand to SEQ ID NO: 971804
uaucagcucauucuccagg

SEQ ID NO: 971806 - RNA, 19 nt, Artificial Sequence
  Description of Artificial Sequence: Synthetic oligonucleotide
  Sense strand starting at position 651 of SEQ ID NO: 914020
uggagaaugagcugauauu

SEQ ID NO: 971807 - RNA, 19 nt, Artificial Sequence
  Description of Artificial Sequence: Synthetic oligonucleotide
  Antisense strand to SEQ ID NO: 971806
aauaucagcucauucucca

SEQ ID NO: 971808 - RNA, 19 nt, Artificial Sequence
  Description of Artificial Sequence: Synthetic oligonucleotide
  Sense strand starting at position 1402 of SEQ ID NO: 914020
auuguaaggccucacugaa

SEQ ID NO: 971809 - RNA, 19 nt, Artificial Sequence
  Description of Artificial Sequence: Synthetic oligonucleotide
  Antisense strand to SEQ ID NO: 971808
uucagugaggccuuacaau

SEQ ID NO: 971810 - RNA, 19 nt, Artificial Sequence
  Description of Artificial Sequence: Synthetic oligonucleotide
  Sense strand starting at position 1581 of SEQ ID NO: 914020
gguagagugagaugaaagu

SEQ ID NO: 971811 - RNA, 19 nt, Artificial Sequence
  Description of Artificial Sequence: Synthetic oligonucleotide
  Antisense strand to SEQ ID NO: 971810
acuuucaucucacucuacc

SEQ ID NO: 971812 - RNA, 19 nt, Artificial Sequence
  Description of Artificial Sequence: Synthetic oligonucleotide
  Sense strand starting at position 128 of SEQ ID NO: 914020
uggaacaguucucucaaau

SEQ ID NO: 971813 - RNA, 19 nt, Artificial Sequence
  Description of Artificial Sequence: Synthetic oligonucleotide
  Antisense strand to SEQ ID NO: 971812
auuugagagaacuguucca

SEQ ID NO: 971814 - RNA, 19 nt, Artificial Sequence
  Description of Artificial Sequence: Synthetic oligonucleotide
  Sense strand starting at position 127 of SEQ ID NO: 914020
cuggaacaguucucucaaa

SEQ ID NO: 971815 - RNA, 19 nt, Artificial Sequence
  Description of Artificial Sequence: Synthetic oligonucleotide
  Antisense strand to SEQ ID NO: 971814
uuugagagaacuguuccag

SEQ ID NO: 971816 - RNA, 19 nt, Artificial Sequence
  Description of Artificial Sequence: Synthetic oligonucleotide
  Sense strand starting at position 2276 of SEQ ID NO: 914020
guggauccaucauccugaa

SEQ ID NO: 971817 - RNA, 19 nt, Artificial Sequence
  Description of Artificial Sequence: Synthetic oligonucleotide
  Antisense strand to SEQ ID NO: 971816
uucaggaugauggauccac

SEQ ID NO: 971818 - RNA, 19 nt, Artificial Sequence
  Description of Artificial Sequence: Synthetic oligonucleotide
  Sense strand starting at position 1388 of SEQ ID NO: 914020
cuuaucugagaaugauugu

SEQ ID NO: 971819 - RNA, 19 nt, Artificial Sequence
  Description of Artificial Sequence: Synthetic oligonucleotide
  Antisense strand to SEQ ID NO: 971818
acaaucauucucagauaag

SEQ ID NO: 971820 - RNA, 19 nt, Artificial Sequence
  Description of Artificial Sequence: Synthetic oligonucleotide
  Sense strand starting at position 3476 of SEQ ID NO: 914020
gugggugaccauuagaugu

SEQ ID NO: 971821 - RNA, 19 nt, Artificial Sequence
  Description of Artificial Sequence: Synthetic oligonucleotide
  Antisense strand to SEQ ID NO: 971820
acaucuaauggucacccac

SEQ ID NO: 971822 - RNA, 19 nt, Artificial Sequence
  Description of Artificial Sequence: Synthetic oligonucleotide
  Sense strand starting at position 3480 of SEQ ID NO: 914020
gugaccauuagauguugaa

SEQ ID NO: 971823 - RNA, 19 nt, Artificial Sequence
  Description of Artificial Sequence: Synthetic oligonucleotide
  Antisense strand to SEQ ID NO: 971822
uucaacaucuaauggucac

SEQ ID NO: 971824 - RNA, 19 nt, Artificial Sequence
  Description of Artificial Sequence: Synthetic oligonucleotide
  Sense strand starting at position 3147 of SEQ ID NO: 914020
cucuuuaaguucccagaag

SEQ ID NO: 971825 - RNA, 19 nt, Artificial Sequence
  Description of Artificial Sequence: Synthetic oligonucleotide
  Antisense strand to SEQ ID NO: 971824
cuucugggaacuuaaagag

SEQ ID NO: 971826 - RNA, 19 nt, Artificial Sequence
  Description of Artificial Sequence: Synthetic oligonucleotide
  Sense strand starting at position 1430 of SEQ ID NO: 914020
augucaacacccugugaaa

SEQ ID NO: 971827 - RNA, 19 nt, Artificial Sequence
  Description of Artificial Sequence: Synthetic oligonucleotide
  Antisense strand to SEQ ID NO: 971826
uuucacaggguguugacau

SEQ ID NO: 971828 - RNA, 19 nt, Artificial Sequence
  Description of Artificial Sequence: Synthetic oligonucleotide
  Sense strand starting at position 2952 of SEQ ID NO: 914020
cccacuccucgaggacaau

SEQ ID NO: 971829 - RNA, 19 nt, Artificial Sequence
  Description of Artificial Sequence: Synthetic oligonucleotide
  Antisense strand to SEQ ID NO: 971828
auuguccucgaggaguggg

SEQ ID NO: 971830 - RNA, 19 nt, Artificial Sequence
  Description of Artificial Sequence: Synthetic oligonucleotide
  Sense strand starting at position 1507 of SEQ ID NO: 914020
ccaugucacacccgagaga

SEQ ID NO: 971831 - RNA, 19 nt, Artificial Sequence
  Description of Artificial Sequence: Synthetic oligonucleotide
  Antisense strand to SEQ ID NO: 971830
ucucucgggugugacaugg

SEQ ID NO: 971832 - RNA, 19 nt, Artificial Sequence
  Description of Artificial Sequence: Synthetic oligonucleotide
  Sense strand starting at position 1178 of SEQ ID NO: 914020
ucucaucucuauguaugga

SEQ ID NO: 971833 - RNA, 19 nt, Artificial Sequence
  Description of Artificial Sequence: Synthetic oligonucleotide
  Antisense strand to SEQ ID NO: 971832
uccauacauagagaugaga

SEQ ID NO: 971834 - RNA, 19 nt, Artificial Sequence
  Description of Artificial Sequence: Synthetic oligonucleotide
  Sense strand starting at position 1366 of SEQ ID NO: 914020
aauaguuucugagccagac

SEQ ID NO: 971835 - RNA, 19 nt, Artificial Sequence
  Description of Artificial Sequence: Synthetic oligonucleotide
  Antisense strand to SEQ ID NO: 971834
gucuggcucagaaacuauu

SEQ ID NO: 971836 - RNA, 19 nt, Artificial Sequence
  Description of Artificial Sequence: Synthetic oligonucleotide
  Sense strand starting at position 64 of SEQ ID NO: 914020
uggauaggcgacugaguaa

SEQ ID NO: 971837 - RNA, 19 nt, Artificial Sequence
  Description of Artificial Sequence: Synthetic oligonucleotide
  Antisense strand to SEQ ID NO: 971836
uuacucagucgccuaucca

SEQ ID NO: 971838 - RNA, 19 nt, Artificial Sequence
  Description of Artificial Sequence: Synthetic oligonucleotide
  Sense strand starting at position 3508 of SEQ ID NO: 914020
ggaaacagcuggucuguga

SEQ ID NO: 971839 - RNA, 19 nt, Artificial Sequence
  Description of Artificial Sequence: Synthetic oligonucleotide
  Antisense strand to SEQ ID NO: 971838
ucacagaccagcuguuucc

SEQ ID NO: 971840 - RNA, 19 nt, Artificial Sequence
  Description of Artificial Sequence: Synthetic oligonucleotide
  Sense strand starting at position 558 of SEQ ID NO: 914020
agaaguacgcguuauaagg

SEQ ID NO: 971841 - RNA, 19 nt, Artificial Sequence
  Description of Artificial Sequence: Synthetic oligonucleotide
  Antisense strand to SEQ ID NO: 971840
ccuuauaacgcguacuucu

SEQ ID NO: 971842 - RNA, 19 nt, Artificial Sequence
  Description of Artificial Sequence: Synthetic oligonucleotide
  Sense strand starting at position 638 of SEQ ID NO: 914020
gucuuucucuuccuggaga

SEQ ID NO: 971843 - RNA, 19 nt, Artificial Sequence
  Description of Artificial Sequence: Synthetic oligonucleotide
  Antisense strand to SEQ ID NO: 971842
ucuccaggaagagaaagac

SEQ ID NO: 971844 - RNA, 19 nt, Artificial Sequence
  Description of Artificial Sequence: Synthetic oligonucleotide
  Sense strand starting at position 1843 of SEQ ID NO: 914020
agcgcucggcacagugaua

SEQ ID NO: 971845 - RNA, 19 nt, Artificial Sequence
  Description of Artificial Sequence: Synthetic oligonucleotide
  Antisense strand to SEQ ID NO: 971844
uaucacugugccgagcgcu

SEQ ID NO: 971846 - RNA, 19 nt, Artificial Sequence
  Description of Artificial Sequence: Synthetic oligonucleotide
  Sense strand starting at position 385 of SEQ ID NO: 914020
gcuuuccagguuuggaaau

SEQ ID NO: 971847 - RNA, 19 nt, Artificial Sequence
  Description of Artificial Sequence: Synthetic oligonucleotide
  Antisense strand to SEQ ID NO: 971846
auuuccaaaccuggaaagc

SEQ ID NO: 971848 - RNA, 19 nt, Artificial Sequence
  Description of Artificial Sequence: Synthetic oligonucleotide
  Sense strand starting at position 3334 of SEQ ID NO: 914020
cuugcacccuagguuauaa

SEQ ID NO: 971849 - RNA, 19 nt, Artificial Sequence
  Description of Artificial Sequence: Synthetic oligonucleotide
  Antisense strand to SEQ ID NO: 971848
uuauaaccuagggugcaag

SEQ ID NO: 971850 - RNA, 19 nt, Artificial Sequence
  Description of Artificial Sequence: Synthetic oligonucleotide
  Sense strand starting at position 1279 of SEQ ID NO: 914020
ugacucugaugcucuguaa

SEQ ID NO: 971851 - RNA, 19 nt, Artificial Sequence
  Description of Artificial Sequence: Synthetic oligonucleotide
  Antisense strand to SEQ ID NO: 971850
uuacagagcaucagaguca

SEQ ID NO: 971852 - RNA, 19 nt, Artificial Sequence
  Description of Artificial Sequence: Synthetic oligonucleotide
  Sense strand starting at position 1236 of SEQ ID NO: 914020
ucgaaacuguacuucggau

SEQ ID NO: 971853 - RNA, 19 nt, Artificial Sequence
  Description of Artificial Sequence: Synthetic oligonucleotide
  Antisense strand to SEQ ID NO: 971852
auccgaaguacaguuucga

SEQ ID NO: 971854 - RNA, 19 nt, Artificial Sequence
  Description of Artificial Sequence: Synthetic oligonucleotide
  Sense strand starting at position 1496 of SEQ ID NO: 914020
gucucaaacguccauguca

SEQ ID NO: 971855 - RNA, 19 nt, Artificial Sequence
  Description of Artificial Sequence: Synthetic oligonucleotide
  Antisense strand to SEQ ID NO: 971854
ugacauggacguuugagac

SEQ ID NO: 971856 - RNA, 19 nt, Artificial Sequence
  Description of Artificial Sequence: Synthetic oligonucleotide
  Sense strand starting at position 1174 of SEQ ID NO: 914020
gucaucucaucucuaugua

SEQ ID NO: 971857 - RNA, 19 nt, Artificial Sequence
  Description of Artificial Sequence: Synthetic oligonucleotide
  Antisense strand to SEQ ID NO: 971856
uacauagagaugagaugac

SEQ ID NO: 971858 - RNA, 19 nt, Artificial Sequence
  Description of Artificial Sequence: Synthetic oligonucleotide
  Sense strand starting at position 1709 of SEQ ID NO: 914020
guaccuugcuccuccaaga

SEQ ID NO: 971859 - RNA, 19 nt, Artificial Sequence
  Description of Artificial Sequence: Synthetic oligonucleotide
  Antisense strand to SEQ ID NO: 971858
ucuuggaggagcaagguac

SEQ ID NO: 971860 - RNA, 19 nt, Artificial Sequence
  Description of Artificial Sequence: Synthetic oligonucleotide
  Sense strand starting at position 1498 of SEQ ID NO: 914020
cucaaacguccaugucaca

SEQ ID NO: 971861 - RNA, 19 nt, Artificial Sequence
  Description of Artificial Sequence: Synthetic oligonucleotide
  Antisense strand to SEQ ID NO: 971860
ugugacauggacguuugag

SEQ ID NO: 971862 - RNA, 19 nt, Artificial Sequence
  Description of Artificial Sequence: Synthetic oligonucleotide
  Sense strand starting at position 3333 of SEQ ID NO: 914020
ccuugcacccuagguuaua

SEQ ID NO: 971863 - RNA, 19 nt, Artificial Sequence
  Description of Artificial Sequence: Synthetic oligonucleotide
  Antisense strand to SEQ ID NO: 971862
uauaaccuagggugcaagg

SEQ ID NO: 971864 - RNA, 19 nt, Artificial Sequence
  Description of Artificial Sequence: Synthetic oligonucleotide
  Sense strand starting at position 983 of SEQ ID NO: 914020
ggguccuuguuggugauau

SEQ ID NO: 971865 - RNA, 19 nt, Artificial Sequence
  Description of Artificial Sequence: Synthetic oligonucleotide
  Antisense strand to SEQ ID NO: 971864
auaucaccaacaaggaccc

SEQ ID NO: 971866 - RNA, 19 nt, Artificial Sequence
  Description of Artificial Sequence: Synthetic oligonucleotide
  Sense strand starting at position 982 of SEQ ID NO: 914020
uggguccuuguuggugaua

SEQ ID NO: 971867 - RNA, 19 nt, Artificial Sequence
  Description of Artificial Sequence: Synthetic oligonucleotide
  Antisense strand to SEQ ID NO: 971866
uaucaccaacaaggaccca

SEQ ID NO: 971868 - RNA, 19 nt, Artificial Sequence
  Description of Artificial Sequence: Synthetic oligonucleotide
  Sense strand starting at position 3055 of SEQ ID NO: 914020
ucgcucugccaugagugaa

SEQ ID NO: 971869 - RNA, 19 nt, Artificial Sequence
  Description of Artificial Sequence: Synthetic oligonucleotide
  Antisense strand to SEQ ID NO: 971868
uucacucauggcagagcga

SEQ ID NO: 971870 - RNA, 19 nt, Artificial Sequence
  Description of Artificial Sequence: Synthetic oligonucleotide
  Sense strand starting at position 1171 of SEQ ID NO: 914020
ucggucaucucaucucuau

SEQ ID NO: 971871 - RNA, 19 nt, Artificial Sequence
  Description of Artificial Sequence: Synthetic oligonucleotide
  Antisense strand to SEQ ID NO: 971870
auagagaugagaugaccga

SEQ ID NO: 971872 - RNA, 19 nt, Artificial Sequence
  Description of Artificial Sequence: Synthetic oligonucleotide
  Sense strand starting at position 555 of SEQ ID NO: 914020
aggagaaguacgcguuaua

SEQ ID NO: 971873 - RNA, 19 nt, Artificial Sequence
  Description of Artificial Sequence: Synthetic oligonucleotide
  Antisense strand to SEQ ID NO: 971872
uauaacgcguacuucuccu

SEQ ID NO: 971874 - RNA, 19 nt, Artificial Sequence
  Description of Artificial Sequence: Synthetic oligonucleotide
  Sense strand starting at position 1579 of SEQ ID NO: 914020
cagguagagugagaugaaa

SEQ ID NO: 971875 - RNA, 19 nt, Artificial Sequence
  Description of Artificial Sequence: Synthetic oligonucleotide
  Antisense strand to SEQ ID NO: 971874
uuucaucucacucuaccug

SEQ ID NO: 971876 - RNA, 19 nt, Artificial Sequence
  Description of Artificial Sequence: Synthetic oligonucleotide
  Sense strand starting at position 3438 of SEQ ID NO: 914020
gcaccaucguuucucauaa

SEQ ID NO: 971877 - RNA, 19 nt, Artificial Sequence
  Description of Artificial Sequence: Synthetic oligonucleotide
  Antisense strand to SEQ ID NO: 971876
uuaugagaaacgauggugc

SEQ ID NO: 971878 - RNA, 19 nt, Artificial Sequence
  Description of Artificial Sequence: Synthetic oligonucleotide
  Sense strand starting at position 14 of SEQ ID NO: 914020
ugcugcucugugggaucaa

SEQ ID NO: 971879 - RNA, 19 nt, Artificial Sequence
  Description of Artificial Sequence: Synthetic oligonucleotide
  Antisense strand to SEQ ID NO: 971878
uugaucccacagagcagca

SEQ ID NO: 971880 - RNA, 19 nt, Artificial Sequence
  Description of Artificial Sequence: Synthetic oligonucleotide
  Sense strand starting at position 1385 of SEQ ID NO: 914020
agucuuaucugagaaugau

SEQ ID NO: 971881 - RNA, 19 nt, Artificial Sequence
  Description of Artificial Sequence: Synthetic oligonucleotide
  Antisense strand to SEQ ID NO: 971880
aucauucucagauaagacu

SEQ ID NO: 971882 - RNA, 19 nt, Artificial Sequence
  Description of Artificial Sequence: Synthetic oligonucleotide
  Sense strand starting at position 880 of SEQ ID NO: 914021
acgugacuuguggauaaau

SEQ ID NO: 971883 - RNA, 19 nt, Artificial Sequence
  Description of Artificial Sequence: Synthetic oligonucleotide
  Antisense strand to SEQ ID NO: 971882
auuuauccacaagucacgu

SEQ ID NO: 971884 - RNA, 19 nt, Artificial Sequence
  Description of Artificial Sequence: Synthetic oligonucleotide
  Sense strand starting at position 1104 of SEQ ID NO: 914021
ccuaaucauugaucuggca

SEQ ID NO: 971885 - RNA, 19 nt, Artificial Sequence
  Description of Artificial Sequence: Synthetic oligonucleotide
  Antisense strand to SEQ ID NO: 971884
ugccagaucaaugauuagg

SEQ ID NO: 971886 - RNA, 19 nt, Artificial Sequence
  Description of Artificial Sequence: Synthetic oligonucleotide
  Sense strand starting at position 1558 of SEQ ID NO: 914021
uuaauuauggcagaugugu

SEQ ID NO: 971887 - RNA, 19 nt, Artificial Sequence
  Description of Artificial Sequence: Synthetic oligonucleotide
  Antisense strand to SEQ ID NO: 971886
acacaucugccauaauuaa

SEQ ID NO: 971888 - RNA, 19 nt, Artificial Sequence
  Description of Artificial Sequence: Synthetic oligonucleotide
  Sense strand starting at position 3333 of SEQ ID NO: 914021
ccgaaugagccagaguucu

SEQ ID NO: 971889 - RNA, 19 nt, Artificial Sequence
  Description of Artificial Sequence: Synthetic oligonucleotide
  Antisense strand to SEQ ID NO: 971888
agaacucuggcucauucgg

SEQ ID NO: 971890 - RNA, 19 nt, Artificial Sequence
  Description of Artificial Sequence: Synthetic oligonucleotide
  Sense strand starting at position 78 of SEQ ID NO: 914021
agcccugggacucggaaua

SEQ ID NO: 971891 - RNA, 19 nt, Artificial Sequence
  Description of Artificial Sequence: Synthetic oligonucleotide
  Antisense strand to SEQ ID NO: 971890
uauuccgagucccagggcu

SEQ ID NO: 971892 - RNA, 19 nt, Artificial Sequence
  Description of Artificial Sequence: Synthetic oligonucleotide
  Sense strand starting at position 1494 of SEQ ID NO: 914021
cugcuuuaacgacaauucu

SEQ ID NO: 971893 - RNA, 19 nt, Artificial Sequence
  Description of Artificial Sequence: Synthetic oligonucleotide
  Antisense strand to SEQ ID NO: 971892
agaauugucguuaaagcag

SEQ ID NO: 971894 - RNA, 19 nt, Artificial Sequence
  Description of Artificial Sequence: Synthetic oligonucleotide
  Sense strand starting at position 898 of SEQ ID NO: 914021
uggcuucuggcacaucuaa

SEQ ID NO: 971895 - RNA, 19 nt, Artificial Sequence
  Description of Artificial Sequence: Synthetic oligonucleotide
  Antisense strand to SEQ ID NO: 971894
uuagaugugccagaagcca

SEQ ID NO: 971896 - RNA, 19 nt, Artificial Sequence
  Description of Artificial Sequence: Synthetic oligonucleotide
  Sense strand starting at position 859 of SEQ ID NO: 914021
acgggagccauauguuaaa

SEQ ID NO: 971897 - RNA, 19 nt, Artificial Sequence
  Description of Artificial Sequence: Synthetic oligonucleotide
  Antisense strand to SEQ ID NO: 971896
uuuaacauauggcucccgu

SEQ ID NO: 971898 - RNA, 19 nt, Artificial Sequence
  Description of Artificial Sequence: Synthetic oligonucleotide
  Sense strand starting at position 931 of SEQ ID NO: 914021
cugcgaaauaauuguggaa

SEQ ID NO: 971899 - RNA, 19 nt, Artificial Sequence
  Description of Artificial Sequence: Synthetic oligonucleotide
  Antisense strand to SEQ ID NO: 971898
uuccacaauuauuucgcag

SEQ ID NO: 971900 - RNA, 19 nt, Artificial Sequence
  Description of Artificial Sequence: Synthetic oligonucleotide
  Sense strand starting at position 1329 of SEQ ID NO: 914021
gccugaaacuguucuuaaa

SEQ ID NO: 971901 - RNA, 19 nt, Artificial Sequence
  Description of Artificial Sequence: Synthetic oligonucleotide
  Antisense strand to SEQ ID NO: 971900
uuuaagaacaguuucaggc

SEQ ID NO: 971902 - RNA, 19 nt, Artificial Sequence
  Description of Artificial Sequence: Synthetic oligonucleotide
  Sense strand starting at position 3331 of SEQ ID NO: 914021
ggccgaaugagccagaguu

SEQ ID NO: 971903 - RNA, 19 nt, Artificial Sequence
  Description of Artificial Sequence: Synthetic oligonucleotide
  Antisense strand to SEQ ID NO: 971902
aacucuggcucauucggcc

SEQ ID NO: 971904 - RNA, 19 nt, Artificial Sequence
  Description of Artificial Sequence: Synthetic oligonucleotide
  Sense strand starting at position 920 of SEQ ID NO: 914021
agagauaacgucugcgaaa

SEQ ID NO: 971905 - RNA, 19 nt, Artificial Sequence
  Description of Artificial Sequence: Synthetic oligonucleotide
  Antisense strand to SEQ ID NO: 971904
uuucgcagacguuaucucu

SEQ ID NO: 971906 - RNA, 19 nt, Artificial Sequence
  Description of Artificial Sequence: Synthetic oligonucleotide
  Sense strand starting at position 872 of SEQ ID NO: 914021
guuaaaucacgugacuugu

SEQ ID NO: 971907 - RNA, 19 nt, Artificial Sequence
  Description of Artificial Sequence: Synthetic oligonucleotide
  Antisense strand to SEQ ID NO: 971906
acaagucacgugauuuaac

SEQ ID NO: 971908 - RNA, 19 nt, Artificial Sequence
  Description of Artificial Sequence: Synthetic oligonucleotide
  Sense strand starting at position 876 of SEQ ID NO: 914021
aaucacgugacuuguggau

SEQ ID NO: 971909 - RNA, 19 nt, Artificial Sequence
  Description of Artificial Sequence: Synthetic oligonucleotide
  Antisense strand to SEQ ID NO: 971908
auccacaagucacgugauu

SEQ ID NO: 971910 - RNA, 19 nt, Artificial Sequence
  Description of Artificial Sequence: Synthetic oligonucleotide
  Sense strand starting at position 922 of SEQ ID NO: 914021
agauaacgucugcgaaaua

SEQ ID NO: 971911 - RNA, 19 nt, Artificial Sequence
  Description of Artificial Sequence: Synthetic oligonucleotide
  Antisense strand to SEQ ID NO: 971910
uauuucgcagacguuaucu

SEQ ID NO: 971912 - RNA, 19 nt, Artificial Sequence
  Description of Artificial Sequence: Synthetic oligonucleotide
  Sense strand starting at position 921 of SEQ ID NO: 914021
gagauaacgucugcgaaau

SEQ ID NO: 971913 - RNA, 19 nt, Artificial Sequence
  Description of Artificial Sequence: Synthetic oligonucleotide
  Antisense strand to SEQ ID NO: 971912
auuucgcagacguuaucuc

SEQ ID NO: 971914 - RNA, 19 nt, Artificial Sequence
  Description of Artificial Sequence: Synthetic oligonucleotide
  Sense strand starting at position 585 of SEQ ID NO: 914021
cucccuugucccgagucaa

SEQ ID NO: 971915 - RNA, 19 nt, Artificial Sequence
  Description of Artificial Sequence: Synthetic oligonucleotide
  Antisense strand to SEQ ID NO: 971914
uugacucgggacaagggag

SEQ ID NO: 971916 - RNA, 19 nt, Artificial Sequence
  Description of Artificial Sequence: Synthetic oligonucleotide
  Sense strand starting at position 871 of SEQ ID NO: 914021
uguuaaaucacgugacuug

SEQ ID NO: 971917 - RNA, 19 nt, Artificial Sequence
  Description of Artificial Sequence: Synthetic oligonucleotide
  Antisense strand to SEQ ID NO: 971916
caagucacgugauuuaaca

SEQ ID NO: 971918 - RNA, 19 nt, Artificial Sequence
  Description of Artificial Sequence: Synthetic oligonucleotide
  Sense strand starting at position 3911 of SEQ ID NO: 914021
gcaggauccucugcaaggu

SEQ ID NO: 971919 - RNA, 19 nt, Artificial Sequence
  Description of Artificial Sequence: Synthetic oligonucleotide
  Antisense strand to SEQ ID NO: 971918
accuugcagaggauccugc

SEQ ID NO: 971920 - RNA, 19 nt, Artificial Sequence
  Description of Artificial Sequence: Synthetic oligonucleotide
  Sense strand starting at position 511 of SEQ ID NO: 914021
gguguagauuugcaaacca

SEQ ID NO: 971921 - RNA, 19 nt, Artificial Sequence
  Description of Artificial Sequence: Synthetic oligonucleotide
  Antisense strand to SEQ ID NO: 971920
ugguuugcaaaucuacacc

SEQ ID NO: 971922 - RNA, 19 nt, Artificial Sequence
  Description of Artificial Sequence: Synthetic oligonucleotide
  Sense strand starting at position 955 of SEQ ID NO: 914021
acgguccucucugcuaauu

SEQ ID NO: 971923 - RNA, 19 nt, Artificial Sequence
  Description of Artificial Sequence: Synthetic oligonucleotide
  Antisense strand to SEQ ID NO: 971922
aauuagcagagaggaccgu

SEQ ID NO: 971924 - RNA, 19 nt, Artificial Sequence
  Description of Artificial Sequence: Synthetic oligonucleotide
  Sense strand starting at position 954 of SEQ ID NO: 914021
cacgguccucucugcuaau

SEQ ID NO: 971925 - RNA, 19 nt, Artificial Sequence
  Description of Artificial Sequence: Synthetic oligonucleotide
  Antisense strand to SEQ ID NO: 971924
auuagcagagaggaccgug

SEQ ID NO: 971926 - RNA, 19 nt, Artificial Sequence
  Description of Artificial Sequence: Synthetic oligonucleotide
  Sense strand starting at position 934 of SEQ ID NO: 914021
cgaaauaauuguggaagga

SEQ ID NO: 971927 - RNA, 19 nt, Artificial Sequence
  Description of Artificial Sequence: Synthetic oligonucleotide
  Antisense strand to SEQ ID NO: 971926
uccuuccacaauuauuucg

SEQ ID NO: 971928 - RNA, 19 nt, Artificial Sequence
  Description of Artificial Sequence: Synthetic oligonucleotide
  Sense strand starting at position 862 of SEQ ID NO: 914021
ggagccauauguuaaauca

SEQ ID NO: 971929 - RNA, 19 nt, Artificial Sequence
  Description of Artificial Sequence: Synthetic oligonucleotide
  Antisense strand to SEQ ID NO: 971928
ugauuuaacauauggcucc

SEQ ID NO: 971930 - RNA, 19 nt, Artificial Sequence
  Description of Artificial Sequence: Synthetic oligonucleotide
  Sense strand starting at position 1556 of SEQ ID NO: 914021
cauuaauuauggcagaugu

SEQ ID NO: 971931 - RNA, 19 nt, Artificial Sequence
  Description of Artificial Sequence: Synthetic oligonucleotide
  Antisense strand to SEQ ID NO: 971930
acaucugccauaauuaaug

SEQ ID NO: 971932 - RNA, 19 nt, Artificial Sequence
  Description of Artificial Sequence: Synthetic oligonucleotide
  Sense strand starting at position 923 of SEQ ID NO: 914021
gauaacgucugcgaaauaa

SEQ ID NO: 971933 - RNA, 19 nt, Artificial Sequence
  Description of Artificial Sequence: Synthetic oligonucleotide
  Antisense strand to SEQ ID NO: 971932
uuauuucgcagacguuauc

SEQ ID NO: 971934 - RNA, 19 nt, Artificial Sequence
  Description of Artificial Sequence: Synthetic oligonucleotide
  Sense strand starting at position 2778 of SEQ ID NO: 914021
gggcgugucucuucggguu

SEQ ID NO: 971935 - RNA, 19 nt, Artificial Sequence
  Description of Artificial Sequence: Synthetic oligonucleotide
  Antisense strand to SEQ ID NO: 971934
aacccgaagagacacgccc

SEQ ID NO: 971936 - RNA, 19 nt, Artificial Sequence
  Description of Artificial Sequence: Synthetic oligonucleotide
  Sense strand starting at position 1503 of SEQ ID NO: 914021
cgacaauucugccaacagu

SEQ ID NO: 971937 - RNA, 19 nt, Artificial Sequence
  Description of Artificial Sequence: Synthetic oligonucleotide
  Antisense strand to SEQ ID NO: 971936
acuguuggcagaauugucg

SEQ ID NO: 971938 - RNA, 19 nt, Artificial Sequence
  Description of Artificial Sequence: Synthetic oligonucleotide
  Sense strand starting at position 893 of SEQ ID NO: 914021
auaaauggcuucuggcaca

SEQ ID NO: 971939 - RNA, 19 nt, Artificial Sequence
  Description of Artificial Sequence: Synthetic oligonucleotide
  Antisense strand to SEQ ID NO: 971938
ugugccagaagccauuuau

SEQ ID NO: 971940 - RNA, 19 nt, Artificial Sequence
  Description of Artificial Sequence: Synthetic oligonucleotide
  Sense strand starting at position 1554 of SEQ ID NO: 914021
ugcauuaauuauggcagau

SEQ ID NO: 971941 - RNA, 19 nt, Artificial Sequence
  Description of Artificial Sequence: Synthetic oligonucleotide
  Antisense strand to SEQ ID NO: 971940
aucugccauaauuaaugca

SEQ ID NO: 971942 - RNA, 19 nt, Artificial Sequence
  Description of Artificial Sequence: Synthetic oligonucleotide
  Sense strand starting at position 878 of SEQ ID NO: 914021
ucacgugacuuguggauaa

SEQ ID NO: 971943 - RNA, 19 nt, Artificial Sequence
  Description of Artificial Sequence: Synthetic oligonucleotide
  Antisense strand to SEQ ID NO: 971942
uuauccacaagucacguga

SEQ ID NO: 971944 - RNA, 19 nt, Artificial Sequence
  Description of Artificial Sequence: Synthetic oligonucleotide
  Sense strand starting at position 869 of SEQ ID NO: 914021
uauguuaaaucacgugacu

SEQ ID NO: 971945 - RNA, 19 nt, Artificial Sequence
  Description of Artificial Sequence: Synthetic oligonucleotide
  Antisense strand to SEQ ID NO: 971944
agucacgugauuuaacaua

SEQ ID NO: 971946 - RNA, 19 nt, Artificial Sequence
  Description of Artificial Sequence: Synthetic oligonucleotide
  Sense strand starting at position 1553 of SEQ ID NO: 914021
gugcauuaauuauggcaga

SEQ ID NO: 971947 - RNA, 19 nt, Artificial Sequence
  Description of Artificial Sequence: Synthetic oligonucleotide
  Antisense strand to SEQ ID NO: 971946
ucugccauaauuaaugcac

SEQ ID NO: 971948 - RNA, 19 nt, Artificial Sequence
  Description of Artificial Sequence: Synthetic oligonucleotide
  Sense strand starting at position 109 of SEQ ID NO: 914022
cuguuauagcaugaauaaa

SEQ ID NO: 971949 - RNA, 19 nt, Artificial Sequence
  Description of Artificial Sequence: Synthetic oligonucleotide
  Antisense strand to SEQ ID NO: 971948
uuuauucaugcuauaacag

SEQ ID NO: 971950 - RNA, 19 nt, Artificial Sequence
  Description of Artificial Sequence: Synthetic oligonucleotide
  Sense strand starting at position 1292 of SEQ ID NO: 914022
cuaacuggccuuuaugaaa

SEQ ID NO: 971951 - RNA, 19 nt, Artificial Sequence
  Description of Artificial Sequence: Synthetic oligonucleotide
  Antisense strand to SEQ ID NO: 971950
uuucauaaaggccaguuag

SEQ ID NO: 971952 - RNA, 19 nt, Artificial Sequence
  Description of Artificial Sequence: Synthetic oligonucleotide
  Sense strand starting at position 2678 of SEQ ID NO: 914022
aggucacaucuguaaauac

SEQ ID NO: 971953 - RNA, 19 nt, Artificial Sequence
  Description of Artificial Sequence: Synthetic oligonucleotide
  Antisense strand to SEQ ID NO: 971952
guauuuacagaugugaccu

SEQ ID NO: 971954 - RNA, 19 nt, Artificial Sequence
  Description of Artificial Sequence: Synthetic oligonucleotide
  Sense strand starting at position 3843 of SEQ ID NO: 914022
cuggguaauccucacacca

SEQ ID NO: 971955 - RNA, 19 nt, Artificial Sequence
  Description of Artificial Sequence: Synthetic oligonucleotide
  Antisense strand to SEQ ID NO: 971954
uggugugaggauuacccag

SEQ ID NO: 971956 - RNA, 19 nt, Artificial Sequence
  Description of Artificial Sequence: Synthetic oligonucleotide
  Sense strand starting at position 100 of SEQ ID NO: 914022
caguguuagcuguuauagc

SEQ ID NO: 971957 - RNA, 19 nt, Artificial Sequence
  Description of Artificial Sequence: Synthetic oligonucleotide
  Antisense strand to SEQ ID NO: 971956
gcuauaacagcuaacacug

SEQ ID NO: 971958 - RNA, 19 nt, Artificial Sequence
  Description of Artificial Sequence: Synthetic oligonucleotide
  Sense strand starting at position 539 of SEQ ID NO: 914022
aggaguaagguugggacau

SEQ ID NO: 971959 - RNA, 19 nt, Artificial Sequence
  Description of Artificial Sequence: Synthetic oligonucleotide
  Antisense strand to SEQ ID NO: 971958
augucccaaccuuacuccu

SEQ ID NO: 971960 - RNA, 19 nt, Artificial Sequence
  Description of Artificial Sequence: Synthetic oligonucleotide
  Sense strand starting at position 1260 of SEQ ID NO: 914022
guaggaacucugggacuca

SEQ ID NO: 971961 - RNA, 19 nt, Artificial Sequence
  Description of Artificial Sequence: Synthetic oligonucleotide
  Antisense strand to SEQ ID NO: 971960
ugagucccagaguuccuac

SEQ ID NO: 971962 - RNA, 19 nt, Artificial Sequence
  Description of Artificial Sequence: Synthetic oligonucleotide
  Sense strand starting at position 1027 of SEQ ID NO: 914022
ucauuaucucuguauagac

SEQ ID NO: 971963 - RNA, 19 nt, Artificial Sequence
  Description of Artificial Sequence: Synthetic oligonucleotide
  Antisense strand to SEQ ID NO: 971962
gucuauacagagauaauga

SEQ ID NO: 971964 - RNA, 19 nt, Artificial Sequence
  Description of Artificial Sequence: Synthetic oligonucleotide
  Sense strand starting at position 1451 of SEQ ID NO: 914022
ugagaaugugguggaaacu

SEQ ID NO: 971965 - RNA, 19 nt, Artificial Sequence
  Description of Artificial Sequence: Synthetic oligonucleotide
  Antisense strand to SEQ ID NO: 971964
aguuuccaccacauucuca

SEQ ID NO: 971966 - RNA, 19 nt, Artificial Sequence
  Description of Artificial Sequence: Synthetic oligonucleotide
  Sense strand starting at position 1671 of SEQ ID NO: 914022
gguuaugccagaggagaga

SEQ ID NO: 971967 - RNA, 19 nt, Artificial Sequence
  Description of Artificial Sequence: Synthetic oligonucleotide
  Antisense strand to SEQ ID NO: 971966
ucucuccucuggcauaacc

SEQ ID NO: 971968 - RNA, 19 nt, Artificial Sequence
  Description of Artificial Sequence: Synthetic oligonucleotide
  Sense strand starting at position 1472 of SEQ ID NO: 914022
gucacuuugcaagagauau

SEQ ID NO: 971969 - RNA, 19 nt, Artificial Sequence
  Description of Artificial Sequence: Synthetic oligonucleotide
  Antisense strand to SEQ ID NO: 971968
auaucucuugcaaagugac

SEQ ID NO: 971970 - RNA, 19 nt, Artificial Sequence
  Description of Artificial Sequence: Synthetic oligonucleotide
  Sense strand starting at position 688 of SEQ ID NO: 914022
aaagaaagccuuugguaag

SEQ ID NO: 971971 - RNA, 19 nt, Artificial Sequence
  Description of Artificial Sequence: Synthetic oligonucleotide
  Antisense strand to SEQ ID NO: 971970
cuuaccaaaggcuuucuuu

SEQ ID NO: 971972 - RNA, 19 nt, Artificial Sequence
  Description of Artificial Sequence: Synthetic oligonucleotide
  Sense strand starting at position 1352 of SEQ ID NO: 914022
gguaguggugaccagaacu

SEQ ID NO: 971973 - RNA, 19 nt, Artificial Sequence
  Description of Artificial Sequence: Synthetic oligonucleotide
  Antisense strand to SEQ ID NO: 971972
aguucuggucaccacuacc

SEQ ID NO: 971974 - RNA, 19 nt, Artificial Sequence
  Description of Artificial Sequence: Synthetic oligonucleotide
  Sense strand starting at position 703 of SEQ ID NO: 914022
uaagaaucacucggguaga

SEQ ID NO: 971975 - RNA, 19 nt, Artificial Sequence
  Description of Artificial Sequence: Synthetic oligonucleotide
  Antisense strand to SEQ ID NO: 971974
ucuacccgagugauucuua

SEQ ID NO: 971976 - RNA, 19 nt, Artificial Sequence
  Description of Artificial Sequence: Synthetic oligonucleotide
  Sense strand starting at position 2359 of SEQ ID NO: 914022
gcaagugcucgugucagac

SEQ ID NO: 971977 - RNA, 19 nt, Artificial Sequence
  Description of Artificial Sequence: Synthetic oligonucleotide
  Antisense strand to SEQ ID NO: 971976
gucugacacgagcacuugc

SEQ ID NO: 971978 - RNA, 19 nt, Artificial Sequence
  Description of Artificial Sequence: Synthetic oligonucleotide
  Sense strand starting at position 1519 of SEQ ID NO: 914022
ccugucauucuccauggga

SEQ ID NO: 971979 - RNA, 19 nt, Artificial Sequence
  Description of Artificial Sequence: Synthetic oligonucleotide
  Antisense strand to SEQ ID NO: 971978
ucccauggagaaugacagg

SEQ ID NO: 971980 - RNA, 19 nt, Artificial Sequence
  Description of Artificial Sequence: Synthetic oligonucleotide
  Sense strand starting at position 1522 of SEQ ID NO: 914022
gucauucuccaugggaaga

SEQ ID NO: 971981 - RNA, 19 nt, Artificial Sequence
  Description of Artificial Sequence: Synthetic oligonucleotide
  Antisense strand to SEQ ID NO: 971980
ucuucccauggagaaugac

SEQ ID NO: 971982 - RNA, 19 nt, Artificial Sequence
  Description of Artificial Sequence: Synthetic oligonucleotide
  Sense strand starting at position 1339 of SEQ ID NO: 914022
gccucagugguaagguagu

SEQ ID NO: 971983 - RNA, 19 nt, Artificial Sequence
  Description of Artificial Sequence: Synthetic oligonucleotide
  Antisense strand to SEQ ID NO: 971982
acuaccuuaccacugaggc

SEQ ID NO: 971984 - RNA, 19 nt, Artificial Sequence
  Description of Artificial Sequence: Synthetic oligonucleotide
  Sense strand starting at position 44 of SEQ ID NO: 914022
uguggucaggcuuaagaaa

SEQ ID NO: 971985 - RNA, 19 nt, Artificial Sequence
  Description of Artificial Sequence: Synthetic oligonucleotide
  Antisense strand to SEQ ID NO: 971984
uuucuuaagccugaccaca

SEQ ID NO: 971986 - RNA, 19 nt, Artificial Sequence
  Description of Artificial Sequence: Synthetic oligonucleotide
  Sense strand starting at position 2677 of SEQ ID NO: 914022
gaggucacaucuguaaaua

SEQ ID NO: 971987 - RNA, 19 nt, Artificial Sequence
  Description of Artificial Sequence: Synthetic oligonucleotide
  Antisense strand to SEQ ID NO: 971986
uauuuacagaugugaccuc

SEQ ID NO: 971988 - RNA, 19 nt, Artificial Sequence
  Description of Artificial Sequence: Synthetic oligonucleotide
  Sense strand starting at position 1839 of SEQ ID NO: 914022
ccguguuaucucgucucca

SEQ ID NO: 971989 - RNA, 19 nt, Artificial Sequence
  Description of Artificial Sequence: Synthetic oligonucleotide
  Antisense strand to SEQ ID NO: 971988
uggagacgagauaacacgg

SEQ ID NO: 971990 - RNA, 19 nt, Artificial Sequence
  Description of Artificial Sequence: Synthetic oligonucleotide
  Sense strand starting at position 1014 of SEQ ID NO: 914022
gcuuucggucccgucauua

SEQ ID NO: 971991 - RNA, 19 nt, Artificial Sequence
  Description of Artificial Sequence: Synthetic oligonucleotide
  Antisense strand to SEQ ID NO: 971990
uaaugacgggaccgaaagc

SEQ ID NO: 971992 - RNA, 19 nt, Artificial Sequence
  Description of Artificial Sequence: Synthetic oligonucleotide
  Sense strand starting at position 2575 of SEQ ID NO: 914022
gcaaguucgcugucuguaa

SEQ ID NO: 971993 - RNA, 19 nt, Artificial Sequence
  Description of Artificial Sequence: Synthetic oligonucleotide
  Antisense strand to SEQ ID NO: 971992
uuacagacagcgaacuugc

SEQ ID NO: 971994 - RNA, 19 nt, Artificial Sequence
  Description of Artificial Sequence: Synthetic oligonucleotide
  Sense strand starting at position 1948 of SEQ ID NO: 914022
guuugcuagcgauuggcuu

SEQ ID NO: 971995 - RNA, 19 nt, Artificial Sequence
  Description of Artificial Sequence: Synthetic oligonucleotide
  Antisense strand to SEQ ID NO: 971994
aagccaaucgcuagcaaac

SEQ ID NO: 971996 - RNA, 19 nt, Artificial Sequence
  Description of Artificial Sequence: Synthetic oligonucleotide
  Sense strand starting at position 1178 of SEQ ID NO: 914022
caaaguguggcagaucacu

SEQ ID NO: 971997 - RNA, 19 nt, Artificial Sequence
  Description of Artificial Sequence: Synthetic oligonucleotide
  Antisense strand to SEQ ID NO: 971996
agugaucugccacacuuug

SEQ ID NO: 971998 - RNA, 19 nt, Artificial Sequence
  Description of Artificial Sequence: Synthetic oligonucleotide
  Sense strand starting at position 3545 of SEQ ID NO: 914022
aggaacuucucgguuggaa

SEQ ID NO: 971999 - RNA, 19 nt, Artificial Sequence
  Description of Artificial Sequence: Synthetic oligonucleotide
  Antisense strand to SEQ ID NO: 971998
uuccaaccgagaaguuccu

SEQ ID NO: 972000 - RNA, 19 nt, Artificial Sequence
  Description of Artificial Sequence: Synthetic oligonucleotide
  Sense strand starting at position 1521 of SEQ ID NO: 914022
ugucauucuccaugggaag

SEQ ID NO: 972001 - RNA, 19 nt, Artificial Sequence
  Description of Artificial Sequence: Synthetic oligonucleotide
  Antisense strand to SEQ ID NO: 972000
cuucccauggagaaugaca

SEQ ID NO: 972002 - RNA, 19 nt, Artificial Sequence
  Description of Artificial Sequence: Synthetic oligonucleotide
  Sense strand starting at position 3547 of SEQ ID NO: 914022
gaacuucucgguuggaaga

SEQ ID NO: 972003 - RNA, 19 nt, Artificial Sequence
  Description of Artificial Sequence: Synthetic oligonucleotide
  Antisense strand to SEQ ID NO: 972002
ucuuccaaccgagaaguuc

SEQ ID NO: 972004 - RNA, 19 nt, Artificial Sequence
  Description of Artificial Sequence: Synthetic oligonucleotide
  Sense strand starting at position 3325 of SEQ ID NO: 914022
agagaucagucuuugagca

SEQ ID NO: 972005 - RNA, 19 nt, Artificial Sequence
  Description of Artificial Sequence: Synthetic oligonucleotide
  Antisense strand to SEQ ID NO: 972004
ugcucaaagacugaucucu

SEQ ID NO: 972006 - RNA, 19 nt, Artificial Sequence
  Description of Artificial Sequence: Synthetic oligonucleotide
  Sense strand starting at position 1140 of SEQ ID NO: 914022
cacccaguagacugugaua

SEQ ID NO: 972007 - RNA, 19 nt, Artificial Sequence
  Description of Artificial Sequence: Synthetic oligonucleotide
  Antisense strand to SEQ ID NO: 972006
uaucacagucuacugggug

SEQ ID NO: 972008 - RNA, 19 nt, Artificial Sequence
  Description of Artificial Sequence: Synthetic oligonucleotide
  Sense strand starting at position 3326 of SEQ ID NO: 914022
gagaucagucuuugagcaa

SEQ ID NO: 972009 - RNA, 19 nt, Artificial Sequence
  Description of Artificial Sequence: Synthetic oligonucleotide
  Antisense strand to SEQ ID NO: 972008
uugcucaaagacugaucuc

SEQ ID NO: 972010 - RNA, 19 nt, Artificial Sequence
  Description of Artificial Sequence: Synthetic oligonucleotide
  Sense strand starting at position 702 of SEQ ID NO: 914022
guaagaaucacucggguag

SEQ ID NO: 972011 - RNA, 19 nt, Artificial Sequence
  Description of Artificial Sequence: Synthetic oligonucleotide
  Antisense strand to SEQ ID NO: 972010
cuacccgagugauucuuac

SEQ ID NO: 972012 - RNA, 19 nt, Artificial Sequence
  Description of Artificial Sequence: Synthetic oligonucleotide
  Sense strand starting at position 3739 of SEQ ID NO: 914022
gggacuuagcaagggcuua

SEQ ID NO: 972013 - RNA, 19 nt, Artificial Sequence
  Description of Artificial Sequence: Synthetic oligonucleotide
  Antisense strand to SEQ ID NO: 972012
uaagcccuugcuaaguccc

SEQ ID NO: 972014 - RNA, 19 nt, Artificial Sequence
  Description of Artificial Sequence: Synthetic oligonucleotide
  Sense strand starting at position 2105 of SEQ ID NO: 914022
gggaguguugccuauuaac

SEQ ID NO: 972015 - RNA, 19 nt, Artificial Sequence
  Description of Artificial Sequence: Synthetic oligonucleotide
  Antisense strand to SEQ ID NO: 972014
guuaauaggcaacacuccc

SEQ ID NO: 972016 - RNA, 19 nt, Artificial Sequence
  Description of Artificial Sequence: Synthetic oligonucleotide
  Sense strand starting at position 552 of SEQ ID NO: 914022
ggacauaaaucuuuguugu

SEQ ID NO: 972017 - RNA, 19 nt, Artificial Sequence
  Description of Artificial Sequence: Synthetic oligonucleotide
  Antisense strand to SEQ ID NO: 972016
acaacaaagauuuaugucc

SEQ ID NO: 972018 - RNA, 19 nt, Artificial Sequence
  Description of Artificial Sequence: Synthetic oligonucleotide
  Sense strand starting at position 1303 of SEQ ID NO: 914022
uuaugaaaugacugcaguu

SEQ ID NO: 972019 - RNA, 19 nt, Artificial Sequence
  Description of Artificial Sequence: Synthetic oligonucleotide
  Antisense strand to SEQ ID NO: 972018
aacugcagucauuucauaa

SEQ ID NO: 972020 - RNA, 19 nt, Artificial Sequence
  Description of Artificial Sequence: Synthetic oligonucleotide
  Sense strand starting at position 1142 of SEQ ID NO: 914022
cccaguagacugugauacu

SEQ ID NO: 972021 - RNA, 19 nt, Artificial Sequence
  Description of Artificial Sequence: Synthetic oligonucleotide
  Antisense strand to SEQ ID NO: 972020
aguaucacagucuacuggg

SEQ ID NO: 972022 - RNA, 19 nt, Artificial Sequence
  Description of Artificial Sequence: Synthetic oligonucleotide
  Sense strand starting at position 2766 of SEQ ID NO: 914022
cauuacuuagcagaguguu

SEQ ID NO: 972023 - RNA, 19 nt, Artificial Sequence
  Description of Artificial Sequence: Synthetic oligonucleotide
  Antisense strand to SEQ ID NO: 972022
aacacucugcuaaguaaug

SEQ ID NO: 972024 - RNA, 19 nt, Artificial Sequence
  Description of Artificial Sequence: Synthetic oligonucleotide
  Sense strand starting at position 3307 of SEQ ID NO: 914022
agcuguucccugcaaggaa

SEQ ID NO: 972025 - RNA, 19 nt, Artificial Sequence
  Description of Artificial Sequence: Synthetic oligonucleotide
  Antisense strand to SEQ ID NO: 972024
uuccuugcagggaacagcu

SEQ ID NO: 972026 - RNA, 19 nt, Artificial Sequence
  Description of Artificial Sequence: Synthetic oligonucleotide
  Sense strand starting at position 3329 of SEQ ID NO: 914022
aucagucuuugagcaaauu

SEQ ID NO: 972027 - RNA, 19 nt, Artificial Sequence
  Description of Artificial Sequence: Synthetic oligonucleotide
  Antisense strand to SEQ ID NO: 972026
aauuugcucaaagacugau

SEQ ID NO: 972028 - RNA, 19 nt, Artificial Sequence
  Description of Artificial Sequence: Synthetic oligonucleotide
  Sense strand starting at position 3059 of SEQ ID NO: 914023
ucaccaaaucuuggagauu

SEQ ID NO: 972029 - RNA, 19 nt, Artificial Sequence
  Description of Artificial Sequence: Synthetic oligonucleotide
  Antisense strand to SEQ ID NO: 972028
aaucuccaagauuugguga

SEQ ID NO: 972030 - RNA, 19 nt, Artificial Sequence
  Description of Artificial Sequence: Synthetic oligonucleotide
  Sense strand starting at position 780 of SEQ ID NO: 914023
guaguacaaccauaucuga

SEQ ID NO: 972031 - RNA, 19 nt, Artificial Sequence
  Description of Artificial Sequence: Synthetic oligonucleotide
  Antisense strand to SEQ ID NO: 972030
ucagauaugguuguacuac

SEQ ID NO: 972032 - RNA, 19 nt, Artificial Sequence
  Description of Artificial Sequence: Synthetic oligonucleotide
  Sense strand starting at position 1128 of SEQ ID NO: 914023
cgaaacauacuuuagaguu

SEQ ID NO: 972033 - RNA, 19 nt, Artificial Sequence
  Description of Artificial Sequence: Synthetic oligonucleotide
  Antisense strand to SEQ ID NO: 972032
aacucuaaaguauguuucg

SEQ ID NO: 972034 - RNA, 19 nt, Artificial Sequence
  Description of Artificial Sequence: Synthetic oligonucleotide
  Sense strand starting at position 3879 of SEQ ID NO: 914023
aucagaauccaguauugug

SEQ ID NO: 972035 - RNA, 19 nt, Artificial Sequence
  Description of Artificial Sequence: Synthetic oligonucleotide
  Antisense strand to SEQ ID NO: 972034
cacaauacuggauucugau

SEQ ID NO: 972036 - RNA, 19 nt, Artificial Sequence
  Description of Artificial Sequence: Synthetic oligonucleotide
  Sense strand starting at position 788 of SEQ ID NO: 914023
accauaucugaggaacguu

SEQ ID NO: 972037 - RNA, 19 nt, Artificial Sequence
  Description of Artificial Sequence: Synthetic oligonucleotide
  Antisense strand to SEQ ID NO: 972036
aacguuccucagauauggu

SEQ ID NO: 972038 - RNA, 19 nt, Artificial Sequence
  Description of Artificial Sequence: Synthetic oligonucleotide
  Sense strand starting at position 2163 of SEQ ID NO: 914023
ggcuauauacgugcgcaaa

SEQ ID NO: 972039 - RNA, 19 nt, Artificial Sequence
  Description of Artificial Sequence: Synthetic oligonucleotide
  Antisense strand to SEQ ID NO: 972038
uuugcgcacguauauagcc

SEQ ID NO: 972040 - RNA, 19 nt, Artificial Sequence
  Description of Artificial Sequence: Synthetic oligonucleotide
  Sense strand starting at position 3899 of SEQ ID NO: 914023
uugggagguucagugaaag

SEQ ID NO: 972041 - RNA, 19 nt, Artificial Sequence
  Description of Artificial Sequence: Synthetic oligonucleotide
  Antisense strand to SEQ ID NO: 972040
cuuucacugaaccucccaa

SEQ ID NO: 972042 - RNA, 19 nt, Artificial Sequence
  Description of Artificial Sequence: Synthetic oligonucleotide
  Sense strand starting at position 1048 of SEQ ID NO: 914023
uugaucuucguauagacau

SEQ ID NO: 972043 - RNA, 19 nt, Artificial Sequence
  Description of Artificial Sequence: Synthetic oligonucleotide
  Antisense strand to SEQ ID NO: 972042
augucuauacgaagaucaa

SEQ ID NO: 972044 - RNA, 19 nt, Artificial Sequence
  Description of Artificial Sequence: Synthetic oligonucleotide
  Sense strand starting at position 3361 of SEQ ID NO: 914023
augcuaagucaugaguuga

SEQ ID NO: 972045 - RNA, 19 nt, Artificial Sequence
  Description of Artificial Sequence: Synthetic oligonucleotide
  Antisense strand to SEQ ID NO: 972044
ucaacucaugacuuagcau

SEQ ID NO: 972046 - RNA, 19 nt, Artificial Sequence
  Description of Artificial Sequence: Synthetic oligonucleotide
  Sense strand starting at position 572 of SEQ ID NO: 914023
gugaaauccugauucuacc

SEQ ID NO: 972047 - RNA, 19 nt, Artificial Sequence
  Description of Artificial Sequence: Synthetic oligonucleotide
  Antisense strand to SEQ ID NO: 972046
gguagaaucaggauuucac

SEQ ID NO: 972048 - RNA, 19 nt, Artificial Sequence
  Description of Artificial Sequence: Synthetic oligonucleotide
  Sense strand starting at position 2345 of SEQ ID NO: 914023
gccaaacucauuggaggua

SEQ ID NO: 972049 - RNA, 19 nt, Artificial Sequence
  Description of Artificial Sequence: Synthetic oligonucleotide
  Antisense strand to SEQ ID NO: 972048
uaccuccaaugaguuuggc

SEQ ID NO: 972050 - RNA, 19 nt, Artificial Sequence
  Description of Artificial Sequence: Synthetic oligonucleotide
  Sense strand starting at position 1003 of SEQ ID NO: 914023
ucagauucguuuccaaaga

SEQ ID NO: 972051 - RNA, 19 nt, Artificial Sequence
  Description of Artificial Sequence: Synthetic oligonucleotide
  Antisense strand to SEQ ID NO: 972050
ucuuuggaaacgaaucuga

SEQ ID NO: 972052 - RNA, 19 nt, Artificial Sequence
  Description of Artificial Sequence: Synthetic oligonucleotide
  Sense strand starting at position 1149 of SEQ ID NO: 914023
aagcuuucgcaggaauauc

SEQ ID NO: 972053 - RNA, 19 nt, Artificial Sequence
  Description of Artificial Sequence: Synthetic oligonucleotide
  Antisense strand to SEQ ID NO: 972052
gauauuccugcgaaagcuu

SEQ ID NO: 972054 - RNA, 19 nt, Artificial Sequence
  Description of Artificial Sequence: Synthetic oligonucleotide
  Sense strand starting at position 2402 of SEQ ID NO: 914023
gcuauugggcauuaucacu

SEQ ID NO: 972055 - RNA, 19 nt, Artificial Sequence
  Description of Artificial Sequence: Synthetic oligonucleotide
  Antisense strand to SEQ ID NO: 972054
agugauaaugcccaauagc

SEQ ID NO: 972056 - RNA, 19 nt, Artificial Sequence
  Description of Artificial Sequence: Synthetic oligonucleotide
  Sense strand starting at position 3327 of SEQ ID NO: 914023
aguacaauguucuuccaua

SEQ ID NO: 972057 - RNA, 19 nt, Artificial Sequence
  Description of Artificial Sequence: Synthetic oligonucleotide
  Antisense strand to SEQ ID NO: 972056
uauggaagaacauuguacu

SEQ ID NO: 972058 - RNA, 19 nt, Artificial Sequence
  Description of Artificial Sequence: Synthetic oligonucleotide
  Sense strand starting at position 2344 of SEQ ID NO: 914023
ugccaaacucauuggaggu

SEQ ID NO: 972059 - RNA, 19 nt, Artificial Sequence
  Description of Artificial Sequence: Synthetic oligonucleotide
  Antisense strand to SEQ ID NO: 972058
accuccaaugaguuuggca

SEQ ID NO: 972060 - RNA, 19 nt, Artificial Sequence
  Description of Artificial Sequence: Synthetic oligonucleotide
  Sense strand starting at position 3351 of SEQ ID NO: 914023
ccuggaaucuaugcuaagu

SEQ ID NO: 972061 - RNA, 19 nt, Artificial Sequence
  Description of Artificial Sequence: Synthetic oligonucleotide
  Antisense strand to SEQ ID NO: 972060
acuuagcauagauuccagg

SEQ ID NO: 972062 - RNA, 19 nt, Artificial Sequence
  Description of Artificial Sequence: Synthetic oligonucleotide
  Sense strand starting at position 1429 of SEQ ID NO: 914023
ggaaguacaugcuccuuua

SEQ ID NO: 972063 - RNA, 19 nt, Artificial Sequence
  Description of Artificial Sequence: Synthetic oligonucleotide
  Antisense strand to SEQ ID NO: 972062
uaaaggagcauguacuucc

SEQ ID NO: 972064 - RNA, 19 nt, Artificial Sequence
  Description of Artificial Sequence: Synthetic oligonucleotide
  Sense strand starting at position 3887 of SEQ ID NO: 914023
ccaguauugugguugggag

SEQ ID NO: 972065 - RNA, 19 nt, Artificial Sequence
  Description of Artificial Sequence: Synthetic oligonucleotide
  Antisense strand to SEQ ID NO: 972064
cucccaaccacaauacugg

SEQ ID NO: 972066 - RNA, 19 nt, Artificial Sequence
  Description of Artificial Sequence: Synthetic oligonucleotide
  Sense strand starting at position 61 of SEQ ID NO: 914023
cgcgucuggacacaaauua

SEQ ID NO: 972067 - RNA, 19 nt, Artificial Sequence
  Description of Artificial Sequence: Synthetic oligonucleotide
  Antisense strand to SEQ ID NO: 972066
uaauuuguguccagacgcg

SEQ ID NO: 972068 - RNA, 19 nt, Artificial Sequence
  Description of Artificial Sequence: Synthetic oligonucleotide
  Sense strand starting at position 2386 of SEQ ID NO: 914023
gcuuuagucauuugacgcu

SEQ ID NO: 972069 - RNA, 19 nt, Artificial Sequence
  Description of Artificial Sequence: Synthetic oligonucleotide
  Antisense strand to SEQ ID NO: 972068
agcgucaaaugacuaaagc

SEQ ID NO: 972070 - RNA, 19 nt, Artificial Sequence
  Description of Artificial Sequence: Synthetic oligonucleotide
  Sense strand starting at position 3328 of SEQ ID NO: 914023
guacaauguucuuccauac

SEQ ID NO: 972071 - RNA, 19 nt, Artificial Sequence
  Description of Artificial Sequence: Synthetic oligonucleotide
  Antisense strand to SEQ ID NO: 972070
guauggaagaacauuguac

SEQ ID NO: 972072 - RNA, 19 nt, Artificial Sequence
  Description of Artificial Sequence: Synthetic oligonucleotide
  Sense strand starting at position 1432 of SEQ ID NO: 914023
aguacaugcuccuuuauag

SEQ ID NO: 972073 - RNA, 19 nt, Artificial Sequence
  Description of Artificial Sequence: Synthetic oligonucleotide
  Antisense strand to SEQ ID NO: 972072
cuauaaaggagcauguacu

SEQ ID NO: 972074 - RNA, 19 nt, Artificial Sequence
  Description of Artificial Sequence: Synthetic oligonucleotide
  Sense strand starting at position 1148 of SEQ ID NO: 914023
aaagcuuucgcaggaauau

SEQ ID NO: 972075 - RNA, 19 nt, Artificial Sequence
  Description of Artificial Sequence: Synthetic oligonucleotide
  Antisense strand to SEQ ID NO: 972074
auauuccugcgaaagcuuu

SEQ ID NO: 972076 - RNA, 19 nt, Artificial Sequence
  Description of Artificial Sequence: Synthetic oligonucleotide
  Sense strand starting at position 767 of SEQ ID NO: 914023
acagguauuaguuguagua

SEQ ID NO: 972077 - RNA, 19 nt, Artificial Sequence
  Description of Artificial Sequence: Synthetic oligonucleotide
  Antisense strand to SEQ ID NO: 972076
uacuacaacuaauaccugu

SEQ ID NO: 972078 - RNA, 19 nt, Artificial Sequence
  Description of Artificial Sequence: Synthetic oligonucleotide
  Sense strand starting at position 2316 of SEQ ID NO: 914023
aaugccuuguugucauaag

SEQ ID NO: 972079 - RNA, 19 nt, Artificial Sequence
  Description of Artificial Sequence: Synthetic oligonucleotide
  Antisense strand to SEQ ID NO: 972078
cuuaugacaacaaggcauu

SEQ ID NO: 972080 - RNA, 19 nt, Artificial Sequence
  Description of Artificial Sequence: Synthetic oligonucleotide
  Sense strand starting at position 3539 of SEQ ID NO: 914023
gggucucuuucuucucuca

SEQ ID NO: 972081 - RNA, 19 nt, Artificial Sequence
  Description of Artificial Sequence: Synthetic oligonucleotide
  Antisense strand to SEQ ID NO: 972080
ugagagaagaaagagaccc

SEQ ID NO: 972082 - RNA, 19 nt, Artificial Sequence
  Description of Artificial Sequence: Synthetic oligonucleotide
  Sense strand starting at position 1046 of SEQ ID NO: 914023
auuugaucuucguauagac

SEQ ID NO: 972083 - RNA, 19 nt, Artificial Sequence
  Description of Artificial Sequence: Synthetic oligonucleotide
  Antisense strand to SEQ ID NO: 972082
gucuauacgaagaucaaau

SEQ ID NO: 972084 - RNA, 19 nt, Artificial Sequence
  Description of Artificial Sequence: Synthetic oligonucleotide
  Sense strand starting at position 2569 of SEQ ID NO: 914023
uuguuuguauucccaacuu

SEQ ID NO: 972085 - RNA, 19 nt, Artificial Sequence
  Description of Artificial Sequence: Synthetic oligonucleotide
  Antisense strand to SEQ ID NO: 972084
aaguugggaauacaaacaa

SEQ ID NO: 972086 - RNA, 19 nt, Artificial Sequence
  Description of Artificial Sequence: Synthetic oligonucleotide
  Sense strand starting at position 2152 of SEQ ID NO: 914023
ucauuccucucggcuauau

SEQ ID NO: 972087 - RNA, 19 nt, Artificial Sequence
  Description of Artificial Sequence: Synthetic oligonucleotide
  Antisense strand to SEQ ID NO: 972086
auauagccgagaggaauga

SEQ ID NO: 972088 - RNA, 19 nt, Artificial Sequence
  Description of Artificial Sequence: Synthetic oligonucleotide
  Sense strand starting at position 819 of SEQ ID NO: 914023
cuuguaccugugugauacu

SEQ ID NO: 972089 - RNA, 19 nt, Artificial Sequence
  Description of Artificial Sequence: Synthetic oligonucleotide
  Antisense strand to SEQ ID NO: 972088
aguaucacacagguacaag

SEQ ID NO: 972090 - RNA, 19 nt, Artificial Sequence
  Description of Artificial Sequence: Synthetic oligonucleotide
  Sense strand starting at position 656 of SEQ ID NO: 914023
gcaacuugcuuagucucaa

SEQ ID NO: 972091 - RNA, 19 nt, Artificial Sequence
  Description of Artificial Sequence: Synthetic oligonucleotide
  Antisense strand to SEQ ID NO: 972090
uugagacuaagcaaguugc

SEQ ID NO: 972092 - RNA, 19 nt, Artificial Sequence
  Description of Artificial Sequence: Synthetic oligonucleotide
  Sense strand starting at position 2151 of SEQ ID NO: 914023
cucauuccucucggcuaua

SEQ ID NO: 972093 - RNA, 19 nt, Artificial Sequence
  Description of Artificial Sequence: Synthetic oligonucleotide
  Antisense strand to SEQ ID NO: 972092
uauagccgagaggaaugag

SEQ ID NO: 972094 - RNA, 19 nt, Artificial Sequence
  Description of Artificial Sequence: Synthetic oligonucleotide
  Sense strand starting at position 2560 of SEQ ID NO: 914023
cugagcucauuguuuguau

SEQ ID NO: 972095 - RNA, 19 nt, Artificial Sequence
  Description of Artificial Sequence: Synthetic oligonucleotide
  Antisense strand to SEQ ID NO: 972094
auacaaacaaugagcucag

SEQ ID NO: 972096 - RNA, 19 nt, Artificial Sequence
  Description of Artificial Sequence: Synthetic oligonucleotide
  Sense strand starting at position 2561 of SEQ ID NO: 914023
ugagcucauuguuuguauu

SEQ ID NO: 972097 - RNA, 19 nt, Artificial Sequence
  Description of Artificial Sequence: Synthetic oligonucleotide
  Antisense strand to SEQ ID NO: 972096
aauacaaacaaugagcuca

SEQ ID NO: 972098 - RNA, 19 nt, Artificial Sequence
  Description of Artificial Sequence: Synthetic oligonucleotide
  Sense strand starting at position 855 of SEQ ID NO: 914023
gcaagagauaguugugugu

SEQ ID NO: 972099 - RNA, 19 nt, Artificial Sequence
  Description of Artificial Sequence: Synthetic oligonucleotide
  Antisense strand to SEQ ID NO: 972098
acacacaacuaucucuugc

SEQ ID NO: 972100 - RNA, 19 nt, Artificial Sequence
  Description of Artificial Sequence: Synthetic oligonucleotide
  Sense strand starting at position 2357 of SEQ ID NO: 914023
ggagguauuuccggacuca

SEQ ID NO: 972101 - RNA, 19 nt, Artificial Sequence
  Description of Artificial Sequence: Synthetic oligonucleotide
  Antisense strand to SEQ ID NO: 972100
ugaguccggaaauaccucc

SEQ ID NO: 972102 - RNA, 19 nt, Artificial Sequence
  Description of Artificial Sequence: Synthetic oligonucleotide
  Sense strand starting at position 2175 of SEQ ID NO: 914023
gcgcaaaucuccuuacauu

SEQ ID NO: 972103 - RNA, 19 nt, Artificial Sequence
  Description of Artificial Sequence: Synthetic oligonucleotide
  Antisense strand to SEQ ID NO: 972102
aauguaaggagauuugcgc

SEQ ID NO: 972104 - RNA, 19 nt, Artificial Sequence
  Description of Artificial Sequence: Synthetic oligonucleotide
  Sense strand starting at position 2558 of SEQ ID NO: 914023
accugagcucauuguuugu

SEQ ID NO: 972105 - RNA, 19 nt, Artificial Sequence
  Description of Artificial Sequence: Synthetic oligonucleotide
  Antisense strand to SEQ ID NO: 972104
acaaacaaugagcucaggu

SEQ ID NO: 972106 - RNA, 19 nt, Artificial Sequence
  Description of Artificial Sequence: Synthetic oligonucleotide
  Sense strand starting at position 343 of SEQ ID NO: 914023
cugucauccucucuuguuu

SEQ ID NO: 972107 - RNA, 19 nt, Artificial Sequence
  Description of Artificial Sequence: Synthetic oligonucleotide
  Antisense strand to SEQ ID NO: 972106
aaacaagagaggaugacag

SEQ ID NO: 972108 - RNA, 19 nt, Artificial Sequence
  Description of Artificial Sequence: Synthetic oligonucleotide
  Sense strand starting at position 250 of SEQ ID NO: 914024
aauggaaaguccucuuaga

SEQ ID NO: 972109 - RNA, 19 nt, Artificial Sequence
  Description of Artificial Sequence: Synthetic oligonucleotide
  Antisense strand to SEQ ID NO: 972108
ucuaagaggacuuuccauu

SEQ ID NO: 972110 - RNA, 19 nt, Artificial Sequence
  Description of Artificial Sequence: Synthetic oligonucleotide
  Sense strand starting at position 3599 of SEQ ID NO: 914024
ggaacagucaaugguggaa

SEQ ID NO: 972111 - RNA, 19 nt, Artificial Sequence
  Description of Artificial Sequence: Synthetic oligonucleotide
  Antisense strand to SEQ ID NO: 972110
uuccaccauugacuguucc

SEQ ID NO: 972112 - RNA, 19 nt, Artificial Sequence
  Description of Artificial Sequence: Synthetic oligonucleotide
  Sense strand starting at position 1233 of SEQ ID NO: 914024
caaagaugucauugagauu

SEQ ID NO: 972113 - RNA, 19 nt, Artificial Sequence
  Description of Artificial Sequence: Synthetic oligonucleotide
  Antisense strand to SEQ ID NO: 972112
aaucucaaugacaucuuug

SEQ ID NO: 972114 - RNA, 19 nt, Artificial Sequence
  Description of Artificial Sequence: Synthetic oligonucleotide
  Sense strand starting at position 3138 of SEQ ID NO: 914024
auuucucaauuggaagaga

SEQ ID NO: 972115 - RNA, 19 nt, Artificial Sequence
  Description of Artificial Sequence: Synthetic oligonucleotide
  Antisense strand to SEQ ID NO: 972114
ucucuuccaauugagaaau

SEQ ID NO: 972116 - RNA, 19 nt, Artificial Sequence
  Description of Artificial Sequence: Synthetic oligonucleotide
  Sense strand starting at position 801 of SEQ ID NO: 914024
gcgacacaucaacauuaca

SEQ ID NO: 972117 - RNA, 19 nt, Artificial Sequence
  Description of Artificial Sequence: Synthetic oligonucleotide
  Antisense strand to SEQ ID NO: 972116
uguaauguugaugugucgc

SEQ ID NO: 972118 - RNA, 19 nt, Artificial Sequence
  Description of Artificial Sequence: Synthetic oligonucleotide
  Sense strand starting at position 627 of SEQ ID NO: 914024
ugaggaugucuguacauac

SEQ ID NO: 972119 - RNA, 19 nt, Artificial Sequence
  Description of Artificial Sequence: Synthetic oligonucleotide
  Antisense strand to SEQ ID NO: 972118
guauguacagacauccuca

SEQ ID NO: 972120 - RNA, 19 nt, Artificial Sequence
  Description of Artificial Sequence: Synthetic oligonucleotide
  Sense strand starting at position 3875 of SEQ ID NO: 914024
ccaucucuaggguagaagu

SEQ ID NO: 972121 - RNA, 19 nt, Artificial Sequence
  Description of Artificial Sequence: Synthetic oligonucleotide
  Antisense strand to SEQ ID NO: 972120
acuucuacccuagagaugg

SEQ ID NO: 972122 - RNA, 19 nt, Artificial Sequence
  Description of Artificial Sequence: Synthetic oligonucleotide
  Sense strand starting at position 3178 of SEQ ID NO: 914024
cuguuaauucuguucgugu

SEQ ID NO: 972123 - RNA, 19 nt, Artificial Sequence
  Description of Artificial Sequence: Synthetic oligonucleotide
  Antisense strand to SEQ ID NO: 972122
acacgaacagaauuaacag

SEQ ID NO: 972124 - RNA, 19 nt, Artificial Sequence
  Description of Artificial Sequence: Synthetic oligonucleotide
  Sense strand starting at position 749 of SEQ ID NO: 914024
acgaaauacugaguucuaa

SEQ ID NO: 972125 - RNA, 19 nt, Artificial Sequence
  Description of Artificial Sequence: Synthetic oligonucleotide
  Antisense strand to SEQ ID NO: 972124
uuagaacucaguauuucgu

SEQ ID NO: 972126 - RNA, 19 nt, Artificial Sequence
  Description of Artificial Sequence: Synthetic oligonucleotide
  Sense strand starting at position 1290 of SEQ ID NO: 914024
gggaccugugcauaacuau

SEQ ID NO: 972127 - RNA, 19 nt, Artificial Sequence
  Description of Artificial Sequence: Synthetic oligonucleotide
  Antisense strand to SEQ ID NO: 972126
auaguuaugcacagguccc

SEQ ID NO: 972128 - RNA, 19 nt, Artificial Sequence
  Description of Artificial Sequence: Synthetic oligonucleotide
  Sense strand starting at position 85 of SEQ ID NO: 914024
ucaagagaagccugagagu

SEQ ID NO: 972129 - RNA, 19 nt, Artificial Sequence
  Description of Artificial Sequence: Synthetic oligonucleotide
  Antisense strand to SEQ ID NO: 972128
acucucaggcuucucuuga

SEQ ID NO: 972130 - RNA, 19 nt, Artificial Sequence
  Description of Artificial Sequence: Synthetic oligonucleotide
  Sense strand starting at position 3149 of SEQ ID NO: 914024
ggaagagacgcuuauguac

SEQ ID NO: 972131 - RNA, 19 nt, Artificial Sequence
  Description of Artificial Sequence: Synthetic oligonucleotide
  Antisense strand to SEQ ID NO: 972130
guacauaagcgucucuucc

SEQ ID NO: 972132 - RNA, 19 nt, Artificial Sequence
  Description of Artificial Sequence: Synthetic oligonucleotide
  Sense strand starting at position 1328 of SEQ ID NO: 914024
ucuggacuucccugaauua

SEQ ID NO: 972133 - RNA, 19 nt, Artificial Sequence
  Description of Artificial Sequence: Synthetic oligonucleotide
  Antisense strand to SEQ ID NO: 972132
uaauucagggaaguccaga

SEQ ID NO: 972134 - RNA, 19 nt, Artificial Sequence
  Description of Artificial Sequence: Synthetic oligonucleotide
  Sense strand starting at position 1616 of SEQ ID NO: 914024
gggagagccuaauuccuua

SEQ ID NO: 972135 - RNA, 19 nt, Artificial Sequence
  Description of Artificial Sequence: Synthetic oligonucleotide
  Antisense strand to SEQ ID NO: 972134
uaaggaauuaggcucuccc

SEQ ID NO: 972136 - RNA, 19 nt, Artificial Sequence
  Description of Artificial Sequence: Synthetic oligonucleotide
  Sense strand starting at position 1130 of SEQ ID NO: 914024
acggauaauuuccaagaac

SEQ ID NO: 972137 - RNA, 19 nt, Artificial Sequence
  Description of Artificial Sequence: Synthetic oligonucleotide
  Antisense strand to SEQ ID NO: 972136
guucuuggaaauuauccgu

SEQ ID NO: 972138 - RNA, 19 nt, Artificial Sequence
  Description of Artificial Sequence: Synthetic oligonucleotide
  Sense strand starting at position 1755 of SEQ ID NO: 914024
cccuuucgucuggagaaac

SEQ ID NO: 972139 - RNA, 19 nt, Artificial Sequence
  Description of Artificial Sequence: Synthetic oligonucleotide
  Antisense strand to SEQ ID NO: 972138
guuucuccagacgaaaggg

SEQ ID NO: 972140 - RNA, 19 nt, Artificial Sequence
  Description of Artificial Sequence: Synthetic oligonucleotide
  Sense strand starting at position 2790 of SEQ ID NO: 914024
auaguuuccacagggagua

SEQ ID NO: 972141 - RNA, 19 nt, Artificial Sequence
  Description of Artificial Sequence: Synthetic oligonucleotide
  Antisense strand to SEQ ID NO: 972140
uacucccuguggaaacuau

SEQ ID NO: 972142 - RNA, 19 nt, Artificial Sequence
  Description of Artificial Sequence: Synthetic oligonucleotide
  Sense strand starting at position 1221 of SEQ ID NO: 914024
uuuguuuguccucaaagau

SEQ ID NO: 972143 - RNA, 19 nt, Artificial Sequence
  Description of Artificial Sequence: Synthetic oligonucleotide
  Antisense strand to SEQ ID NO: 972142
aucuuugaggacaaacaaa

SEQ ID NO: 972144 - RNA, 19 nt, Artificial Sequence
  Description of Artificial Sequence: Synthetic oligonucleotide
  Sense strand starting at position 333 of SEQ ID NO: 914024
gggugaguauacuuaacuc

SEQ ID NO: 972145 - RNA, 19 nt, Artificial Sequence
  Description of Artificial Sequence: Synthetic oligonucleotide
  Antisense strand to SEQ ID NO: 972144
gaguuaaguauacucaccc

SEQ ID NO: 972146 - RNA, 19 nt, Artificial Sequence
  Description of Artificial Sequence: Synthetic oligonucleotide
  Sense strand starting at position 3702 of SEQ ID NO: 914024
aguuuagaguucuuauaca

SEQ ID NO: 972147 - RNA, 19 nt, Artificial Sequence
  Description of Artificial Sequence: Synthetic oligonucleotide
  Antisense strand to SEQ ID NO: 972146
uguauaagaacucuaaacu

SEQ ID NO: 972148 - RNA, 19 nt, Artificial Sequence
  Description of Artificial Sequence: Synthetic oligonucleotide
  Sense strand starting at position 3194 of SEQ ID NO: 914024
ugucuuaccuucccaagga

SEQ ID NO: 972149 - RNA, 19 nt, Artificial Sequence
  Description of Artificial Sequence: Synthetic oligonucleotide
  Antisense strand to SEQ ID NO: 972148
uccuugggaagguaagaca

SEQ ID NO: 972150 - RNA, 19 nt, Artificial Sequence
  Description of Artificial Sequence: Synthetic oligonucleotide
  Sense strand starting at position 3809 of SEQ ID NO: 914024
ugguaagcuuuauuaauga

SEQ ID NO: 972151 - RNA, 19 nt, Artificial Sequence
  Description of Artificial Sequence: Synthetic oligonucleotide
  Antisense strand to SEQ ID NO: 972150
ucauuaauaaagcuuacca

SEQ ID NO: 972152 - RNA, 19 nt, Artificial Sequence
  Description of Artificial Sequence: Synthetic oligonucleotide
  Sense strand starting at position 734 of SEQ ID NO: 914024
guuuauaacgcugaaacga

SEQ ID NO: 972153 - RNA, 19 nt, Artificial Sequence
  Description of Artificial Sequence: Synthetic oligonucleotide
  Antisense strand to SEQ ID NO: 972152
ucguuucagcguuauaaac

SEQ ID NO: 972154 - RNA, 19 nt, Artificial Sequence
  Description of Artificial Sequence: Synthetic oligonucleotide
  Sense strand starting at position 902 of SEQ ID NO: 914024
uggucaauacugugaucca

SEQ ID NO: 972155 - RNA, 19 nt, Artificial Sequence
  Description of Artificial Sequence: Synthetic oligonucleotide
  Antisense strand to SEQ ID NO: 972154
uggaucacaguauugacca

SEQ ID NO: 972156 - RNA, 19 nt, Artificial Sequence
  Description of Artificial Sequence: Synthetic oligonucleotide
  Sense strand starting at position 3872 of SEQ ID NO: 914024
uagccaucucuaggguaga

SEQ ID NO: 972157 - RNA, 19 nt, Artificial Sequence
  Description of Artificial Sequence: Synthetic oligonucleotide
  Antisense strand to SEQ ID NO: 972156
ucuacccuagagauggcua

SEQ ID NO: 972158 - RNA, 19 nt, Artificial Sequence
  Description of Artificial Sequence: Synthetic oligonucleotide
  Sense strand starting at position 894 of SEQ ID NO: 914024
guucuaguuggucaauacu

SEQ ID NO: 972159 - RNA, 19 nt, Artificial Sequence
  Description of Artificial Sequence: Synthetic oligonucleotide
  Antisense strand to SEQ ID NO: 972158
aguauugaccaacuagaac

SEQ ID NO: 972160 - RNA, 19 nt, Artificial Sequence
  Description of Artificial Sequence: Synthetic oligonucleotide
  Sense strand starting at position 3773 of SEQ ID NO: 914024
uauaauaguggauguguau

SEQ ID NO: 972161 - RNA, 19 nt, Artificial Sequence
  Description of Artificial Sequence: Synthetic oligonucleotide
  Antisense strand to SEQ ID NO: 972160
auacacauccacuauuaua

SEQ ID NO: 972162 - RNA, 19 nt, Artificial Sequence
  Description of Artificial Sequence: Synthetic oligonucleotide
  Sense strand starting at position 624 of SEQ ID NO: 914024
aguugaggaugucuguaca

SEQ ID NO: 972163 - RNA, 19 nt, Artificial Sequence
  Description of Artificial Sequence: Synthetic oligonucleotide
  Antisense strand to SEQ ID NO: 972162
uguacagacauccucaacu

SEQ ID NO: 972164 - RNA, 19 nt, Artificial Sequence
  Description of Artificial Sequence: Synthetic oligonucleotide
  Sense strand starting at position 3029 of SEQ ID NO: 914024
gugcaaaucauguggagac

SEQ ID NO: 972165 - RNA, 19 nt, Artificial Sequence
  Description of Artificial Sequence: Synthetic oligonucleotide
  Antisense strand to SEQ ID NO: 972164
gucuccacaugauuugcac

SEQ ID NO: 972166 - RNA, 19 nt, Artificial Sequence
  Description of Artificial Sequence: Synthetic oligonucleotide
  Sense strand starting at position 1439 of SEQ ID NO: 914024
ugaauuauaguguaugugu

SEQ ID NO: 972167 - RNA, 19 nt, Artificial Sequence
  Description of Artificial Sequence: Synthetic oligonucleotide
  Antisense strand to SEQ ID NO: 972166
acacauacacuauaauuca

SEQ ID NO: 972168 - RNA, 19 nt, Artificial Sequence
  Description of Artificial Sequence: Synthetic oligonucleotide
  Sense strand starting at position 891 of SEQ ID NO: 914024
gaaguucuaguuggucaau

SEQ ID NO: 972169 - RNA, 19 nt, Artificial Sequence
  Description of Artificial Sequence: Synthetic oligonucleotide
  Antisense strand to SEQ ID NO: 972168
auugaccaacuagaacuuc

SEQ ID NO: 972170 - RNA, 19 nt, Artificial Sequence
  Description of Artificial Sequence: Synthetic oligonucleotide
  Sense strand starting at position 890 of SEQ ID NO: 914024
ugaaguucuaguuggucaa

SEQ ID NO: 972171 - RNA, 19 nt, Artificial Sequence
  Description of Artificial Sequence: Synthetic oligonucleotide
  Antisense strand to SEQ ID NO: 972170
uugaccaacuagaacuuca

SEQ ID NO: 972172 - RNA, 19 nt, Artificial Sequence
  Description of Artificial Sequence: Synthetic oligonucleotide
  Sense strand starting at position 1487 of SEQ ID NO: 914024
agaucuuuggcuuggagca

SEQ ID NO: 972173 - RNA, 19 nt, Artificial Sequence
  Description of Artificial Sequence: Synthetic oligonucleotide
  Antisense strand to SEQ ID NO: 972172
ugcuccaagccaaagaucu

SEQ ID NO: 972174 - RNA, 19 nt, Artificial Sequence
  Description of Artificial Sequence: Synthetic oligonucleotide
  Sense strand starting at position 1220 of SEQ ID NO: 914024
cuuuguuuguccucaaaga

SEQ ID NO: 972175 - RNA, 19 nt, Artificial Sequence
  Description of Artificial Sequence: Synthetic oligonucleotide
  Antisense strand to SEQ ID NO: 972174
ucuuugaggacaaacaaag

SEQ ID NO: 972176 - RNA, 19 nt, Artificial Sequence
  Description of Artificial Sequence: Synthetic oligonucleotide
  Sense strand starting at position 913 of SEQ ID NO: 914024
gugauccaguccucauacu

SEQ ID NO: 972177 - RNA, 19 nt, Artificial Sequence
  Description of Artificial Sequence: Synthetic oligonucleotide
  Antisense strand to SEQ ID NO: 972176
aguaugaggacuggaucac

SEQ ID NO: 972178 - RNA, 19 nt, Artificial Sequence
  Description of Artificial Sequence: Synthetic oligonucleotide
  Sense strand starting at position 893 of SEQ ID NO: 914024
aguucuaguuggucaauac

SEQ ID NO: 972179 - RNA, 19 nt, Artificial Sequence
  Description of Artificial Sequence: Synthetic oligonucleotide
  Antisense strand to SEQ ID NO: 972178
guauugaccaacuagaacu

SEQ ID NO: 972180 - RNA, 19 nt, Artificial Sequence
  Description of Artificial Sequence: Synthetic oligonucleotide
  Sense strand starting at position 3226 of SEQ ID NO: 914024
gggacugccuugucuauca

SEQ ID NO: 972181 - RNA, 19 nt, Artificial Sequence
  Description of Artificial Sequence: Synthetic oligonucleotide
  Antisense strand to SEQ ID NO: 972180
ugauagacaaggcaguccc

SEQ ID NO: 972182 - RNA, 19 nt, Artificial Sequence
  Description of Artificial Sequence: Synthetic oligonucleotide
  Sense strand starting at position 3737 of SEQ ID NO: 914024
gucucuauuaaagguugua

SEQ ID NO: 972183 - RNA, 19 nt, Artificial Sequence
  Description of Artificial Sequence: Synthetic oligonucleotide
  Antisense strand to SEQ ID NO: 972182
uacaaccuuuaauagagac

SEQ ID NO: 972184 - RNA, 19 nt, Artificial Sequence
  Description of Artificial Sequence: Synthetic oligonucleotide
  Sense strand starting at position 1119 of SEQ ID NO: 914024
gcccgaaguauacggauaa

SEQ ID NO: 972185 - RNA, 19 nt, Artificial Sequence
  Description of Artificial Sequence: Synthetic oligonucleotide
  Antisense strand to SEQ ID NO: 972184
uuauccguauacuucgggc

SEQ ID NO: 972186 - RNA, 19 nt, Artificial Sequence
  Description of Artificial Sequence: Synthetic oligonucleotide
  Sense strand starting at position 2881 of SEQ ID NO: 914024
gugaccuuggccgagucau

SEQ ID NO: 972187 - RNA, 19 nt, Artificial Sequence
  Description of Artificial Sequence: Synthetic oligonucleotide
  Antisense strand to SEQ ID NO: 972186
augacucggccaaggucac

SEQ ID NO: 972188 - RNA, 19 nt, Artificial Sequence
  Description of Artificial Sequence: Synthetic oligonucleotide
  Sense strand starting at position 2217 of SEQ ID NO: 914025
cuugaagcagauuaucuua

SEQ ID NO: 972189 - RNA, 19 nt, Artificial Sequence
  Description of Artificial Sequence: Synthetic oligonucleotide
  Antisense strand to SEQ ID NO: 972188
uaagauaaucugcuucaag

SEQ ID NO: 972190 - RNA, 19 nt, Artificial Sequence
  Description of Artificial Sequence: Synthetic oligonucleotide
  Sense strand starting at position 3031 of SEQ ID NO: 914025
ucaugaaggcaaggauauu

SEQ ID NO: 972191 - RNA, 19 nt, Artificial Sequence
  Description of Artificial Sequence: Synthetic oligonucleotide
  Antisense strand to SEQ ID NO: 972190
aauauccuugccuucauga

SEQ ID NO: 972192 - RNA, 19 nt, Artificial Sequence
  Description of Artificial Sequence: Synthetic oligonucleotide
  Sense strand starting at position 2219 of SEQ ID NO: 914025
ugaagcagauuaucuuaaa

SEQ ID NO: 972193 - RNA, 19 nt, Artificial Sequence
  Description of Artificial Sequence: Synthetic oligonucleotide
  Antisense strand to SEQ ID NO: 972192
uuuaagauaaucugcuuca

SEQ ID NO: 972194 - RNA, 19 nt, Artificial Sequence
  Description of Artificial Sequence: Synthetic oligonucleotide
  Sense strand starting at position 2626 of SEQ ID NO: 914025
guaaaucuuagugaaggua

SEQ ID NO: 972195 - RNA, 19 nt, Artificial Sequence
  Description of Artificial Sequence: Synthetic oligonucleotide
  Antisense strand to SEQ ID NO: 972194
uaccuucacuaagauuuac

SEQ ID NO: 972196 - RNA, 19 nt, Artificial Sequence
  Description of Artificial Sequence: Synthetic oligonucleotide
  Sense strand starting at position 2743 of SEQ ID NO: 914025
ugucauauacaauggauau

SEQ ID NO: 972197 - RNA, 19 nt, Artificial Sequence
  Description of Artificial Sequence: Synthetic oligonucleotide
  Antisense strand to SEQ ID NO: 972196
auauccauuguauaugaca

SEQ ID NO: 972198 - RNA, 19 nt, Artificial Sequence
  Description of Artificial Sequence: Synthetic oligonucleotide
  Sense strand starting at position 2347 of SEQ ID NO: 914025
uguuaugaagguuaaguga

SEQ ID NO: 972199 - RNA, 19 nt, Artificial Sequence
  Description of Artificial Sequence: Synthetic oligonucleotide
  Antisense strand to SEQ ID NO: 972198
ucacuuaaccuucauaaca

SEQ ID NO: 972200 - RNA, 19 nt, Artificial Sequence
  Description of Artificial Sequence: Synthetic oligonucleotide
  Sense strand starting at position 138 of SEQ ID NO: 914025
auguaugugcaauaauaga

SEQ ID NO: 972201 - RNA, 19 nt, Artificial Sequence
  Description of Artificial Sequence: Synthetic oligonucleotide
  Antisense strand to SEQ ID NO: 972200
ucuauuauugcacauacau

SEQ ID NO: 972202 - RNA, 19 nt, Artificial Sequence
  Description of Artificial Sequence: Synthetic oligonucleotide
  Sense strand starting at position 80 of SEQ ID NO: 914025
agaucacaaggcugugaaa

SEQ ID NO: 972203 - RNA, 19 nt, Artificial Sequence
  Description of Artificial Sequence: Synthetic oligonucleotide
  Antisense strand to SEQ ID NO: 972202
uuucacagccuugugaucu

SEQ ID NO: 972204 - RNA, 19 nt, Artificial Sequence
  Description of Artificial Sequence: Synthetic oligonucleotide
  Sense strand starting at position 3512 of SEQ ID NO: 914025
cuaugauauuaagccagau

SEQ ID NO: 972205 - RNA, 19 nt, Artificial Sequence
  Description of Artificial Sequence: Synthetic oligonucleotide
  Antisense strand to SEQ ID NO: 972204
aucuggcuuaauaucauag

SEQ ID NO: 972206 - RNA, 19 nt, Artificial Sequence
  Description of Artificial Sequence: Synthetic oligonucleotide
  Sense strand starting at position 3856 of SEQ ID NO: 914025
ucaauaaauccagggcuau

SEQ ID NO: 972207 - RNA, 19 nt, Artificial Sequence
  Description of Artificial Sequence: Synthetic oligonucleotide
  Antisense strand to SEQ ID NO: 972206
auagcccuggauuuauuga

SEQ ID NO: 972208 - RNA, 19 nt, Artificial Sequence
  Description of Artificial Sequence: Synthetic oligonucleotide
  Sense strand starting at position 839 of SEQ ID NO: 914025
gcaaaugugguuuaaggau

SEQ ID NO: 972209 - RNA, 19 nt, Artificial Sequence
  Description of Artificial Sequence: Synthetic oligonucleotide
  Antisense strand to SEQ ID NO: 972208
auccuuaaaccacauuugc

SEQ ID NO: 972210 - RNA, 19 nt, Artificial Sequence
  Description of Artificial Sequence: Synthetic oligonucleotide
  Sense strand starting at position 2376 of SEQ ID NO: 914025
gaagacauguuguuaacca

SEQ ID NO: 972211 - RNA, 19 nt, Artificial Sequence
  Description of Artificial Sequence: Synthetic oligonucleotide
  Antisense strand to SEQ ID NO: 972210
ugguuaacaacaugucuuc

SEQ ID NO: 972212 - RNA, 19 nt, Artificial Sequence
  Description of Artificial Sequence: Synthetic oligonucleotide
  Sense strand starting at position 2624 of SEQ ID NO: 914025
uuguaaaucuuagugaagg

SEQ ID NO: 972213 - RNA, 19 nt, Artificial Sequence
  Description of Artificial Sequence: Synthetic oligonucleotide
  Antisense strand to SEQ ID NO: 972212
ccuucacuaagauuuacaa

SEQ ID NO: 972214 - RNA, 19 nt, Artificial Sequence
  Description of Artificial Sequence: Synthetic oligonucleotide
  Sense strand starting at position 2344 of SEQ ID NO: 914025
uauuguuaugaagguuaag

SEQ ID NO: 972215 - RNA, 19 nt, Artificial Sequence
  Description of Artificial Sequence: Synthetic oligonucleotide
  Antisense strand to SEQ ID NO: 972214
cuuaaccuucauaacaaua

SEQ ID NO: 972216 - RNA, 19 nt, Artificial Sequence
  Description of Artificial Sequence: Synthetic oligonucleotide
  Sense strand starting at position 102 of SEQ ID NO: 914025
cuauuaagacaacguuuaa

SEQ ID NO: 972217 - RNA, 19 nt, Artificial Sequence
  Description of Artificial Sequence: Synthetic oligonucleotide
  Antisense strand to SEQ ID NO: 972216
uuaaacguugucuuaauag

SEQ ID NO: 972218 - RNA, 19 nt, Artificial Sequence
  Description of Artificial Sequence: Synthetic oligonucleotide
  Sense strand starting at position 3207 of SEQ ID NO: 914025
ucagauagcccuugaaacu

SEQ ID NO: 972219 - RNA, 19 nt, Artificial Sequence
  Description of Artificial Sequence: Synthetic oligonucleotide
  Antisense strand to SEQ ID NO: 972218
aguuucaagggcuaucuga

SEQ ID NO: 972220 - RNA, 19 nt, Artificial Sequence
  Description of Artificial Sequence: Synthetic oligonucleotide
  Sense strand starting at position 3901 of SEQ ID NO: 914025
guacuuuggcaauaucauu

SEQ ID NO: 972221 - RNA, 19 nt, Artificial Sequence
  Description of Artificial Sequence: Synthetic oligonucleotide
  Antisense strand to SEQ ID NO: 972220
aaugauauugccaaaguac

SEQ ID NO: 972222 - RNA, 19 nt, Artificial Sequence
  Description of Artificial Sequence: Synthetic oligonucleotide
  Sense strand starting at position 3117 of SEQ ID NO: 914025
auguaugcugaaugaauua

SEQ ID NO: 972223 - RNA, 19 nt, Artificial Sequence
  Description of Artificial Sequence: Synthetic oligonucleotide
  Antisense strand to SEQ ID NO: 972222
uaauucauucagcauacau

SEQ ID NO: 972224 - RNA, 19 nt, Artificial Sequence
  Description of Artificial Sequence: Synthetic oligonucleotide
  Sense strand starting at position 82 of SEQ ID NO: 914025
aucacaaggcugugaaauu

SEQ ID NO: 972225 - RNA, 19 nt, Artificial Sequence
  Description of Artificial Sequence: Synthetic oligonucleotide
  Antisense strand to SEQ ID NO: 972224
aauuucacagccuugugau

SEQ ID NO: 972226 - RNA, 19 nt, Artificial Sequence
  Description of Artificial Sequence: Synthetic oligonucleotide
  Sense strand starting at position 1517 of SEQ ID NO: 914025
agaacuugggccuggcaaa

SEQ ID NO: 972227 - RNA, 19 nt, Artificial Sequence
  Description of Artificial Sequence: Synthetic oligonucleotide
  Antisense strand to SEQ ID NO: 972226
uuugccaggcccaaguucu

SEQ ID NO: 972228 - RNA, 19 nt, Artificial Sequence
  Description of Artificial Sequence: Synthetic oligonucleotide
  Sense strand starting at position 1253 of SEQ ID NO: 914025
gaccuaaggcgucacgaaa

SEQ ID NO: 972229 - RNA, 19 nt, Artificial Sequence
  Description of Artificial Sequence: Synthetic oligonucleotide
  Antisense strand to SEQ ID NO: 972228
uuucgugacgccuuagguc

SEQ ID NO: 972230 - RNA, 19 nt, Artificial Sequence
  Description of Artificial Sequence: Synthetic oligonucleotide
  Sense strand starting at position 2364 of SEQ ID NO: 914025
gaguuaauuugugaagaca

SEQ ID NO: 972231 - RNA, 19 nt, Artificial Sequence
  Description of Artificial Sequence: Synthetic oligonucleotide
  Antisense strand to SEQ ID NO: 972230
ugucuucacaaauuaacuc

SEQ ID NO: 972232 - RNA, 19 nt, Artificial Sequence
  Description of Artificial Sequence: Synthetic oligonucleotide
  Sense strand starting at position 3400 of SEQ ID NO: 914025
augcacauucucugaugau

SEQ ID NO: 972233 - RNA, 19 nt, Artificial Sequence
  Description of Artificial Sequence: Synthetic oligonucleotide
  Antisense strand to SEQ ID NO: 972232
aucaucagagaaugugcau

SEQ ID NO: 972234 - RNA, 19 nt, Artificial Sequence
  Description of Artificial Sequence: Synthetic oligonucleotide
  Sense strand starting at position 777 of SEQ ID NO: 914025
uugaaagauacguguauca

SEQ ID NO: 972235 - RNA, 19 nt, Artificial Sequence
  Description of Artificial Sequence: Synthetic oligonucleotide
  Antisense strand to SEQ ID NO: 972234
ugauacacguaucuuucaa

SEQ ID NO: 972236 - RNA, 19 nt, Artificial Sequence
  Description of Artificial Sequence: Synthetic oligonucleotide
  Sense strand starting at position 2214 of SEQ ID NO: 914025
gugcuugaagcagauuauc

SEQ ID NO: 972237 - RNA, 19 nt, Artificial Sequence
  Description of Artificial Sequence: Synthetic oligonucleotide
  Antisense strand to SEQ ID NO: 972236
gauaaucugcuucaagcac

SEQ ID NO: 972238 - RNA, 19 nt, Artificial Sequence
  Description of Artificial Sequence: Synthetic oligonucleotide
  Sense strand starting at position 2380 of SEQ ID NO: 914025
acauguuguuaaccaaagu

SEQ ID NO: 972239 - RNA, 19 nt, Artificial Sequence
  Description of Artificial Sequence: Synthetic oligonucleotide
  Antisense strand to SEQ ID NO: 972238
acuuugguuaacaacaugu

SEQ ID NO: 972240 - RNA, 19 nt, Artificial Sequence
  Description of Artificial Sequence: Synthetic oligonucleotide
  Sense strand starting at position 722 of SEQ ID NO: 914025
ucauucuaguuuguagaau

SEQ ID NO: 972241 - RNA, 19 nt, Artificial Sequence
  Description of Artificial Sequence: Synthetic oligonucleotide
  Antisense strand to SEQ ID NO: 972240
auucuacaaacuagaauga

SEQ ID NO: 972242 - RNA, 19 nt, Artificial Sequence
  Description of Artificial Sequence: Synthetic oligonucleotide
  Sense strand starting at position 132 of SEQ ID NO: 914025
ucaaauauguaugugcaau

SEQ ID NO: 972243 - RNA, 19 nt, Artificial Sequence
  Description of Artificial Sequence: Synthetic oligonucleotide
  Antisense strand to SEQ ID NO: 972242
auugcacauacauauuuga

SEQ ID NO: 972244 - RNA, 19 nt, Artificial Sequence
  Description of Artificial Sequence: Synthetic oligonucleotide
  Sense strand starting at position 787 of SEQ ID NO: 914025
cguguaucagaagguauag

SEQ ID NO: 972245 - RNA, 19 nt, Artificial Sequence
  Description of Artificial Sequence: Synthetic oligonucleotide
  Antisense strand to SEQ ID NO: 972244
cuauaccuucugauacacg

SEQ ID NO: 972246 - RNA, 19 nt, Artificial Sequence
  Description of Artificial Sequence: Synthetic oligonucleotide
  Sense strand starting at position 3171 of SEQ ID NO: 914025
agagaauaaugucaaugaa

SEQ ID NO: 972247 - RNA, 19 nt, Artificial Sequence
  Description of Artificial Sequence: Synthetic oligonucleotide
  Antisense strand to SEQ ID NO: 972246
uucauugacauuauucucu

SEQ ID NO: 972248 - RNA, 19 nt, Artificial Sequence
  Description of Artificial Sequence: Synthetic oligonucleotide
  Sense strand starting at position 837 of SEQ ID NO: 914025
gugcaaaugugguuuaagg

SEQ ID NO: 972249 - RNA, 19 nt, Artificial Sequence
  Description of Artificial Sequence: Synthetic oligonucleotide
  Antisense strand to SEQ ID NO: 972248
ccuuaaaccacauuugcac

SEQ ID NO: 972250 - RNA, 19 nt, Artificial Sequence
  Description of Artificial Sequence: Synthetic oligonucleotide
  Sense strand starting at position 3897 of SEQ ID NO: 914025
ugacguacuuuggcaauau

SEQ ID NO: 972251 - RNA, 19 nt, Artificial Sequence
  Description of Artificial Sequence: Synthetic oligonucleotide
  Antisense strand to SEQ ID NO: 972250
auauugccaaaguacguca

SEQ ID NO: 972252 - RNA, 19 nt, Artificial Sequence
  Description of Artificial Sequence: Synthetic oligonucleotide
  Sense strand starting at position 29 of SEQ ID NO: 914025
gaacuuaaaugagaacgau

SEQ ID NO: 972253 - RNA, 19 nt, Artificial Sequence
  Description of Artificial Sequence: Synthetic oligonucleotide
  Antisense strand to SEQ ID NO: 972252
aucguucucauuuaaguuc

SEQ ID NO: 972254 - RNA, 19 nt, Artificial Sequence
  Description of Artificial Sequence: Synthetic oligonucleotide
  Sense strand starting at position 3266 of SEQ ID NO: 914025
agaucuuauuuaugagguu

SEQ ID NO: 972255 - RNA, 19 nt, Artificial Sequence
  Description of Artificial Sequence: Synthetic oligonucleotide
  Antisense strand to SEQ ID NO: 972254
aaccucauaaauaagaucu

SEQ ID NO: 972256 - RNA, 19 nt, Artificial Sequence
  Description of Artificial Sequence: Synthetic oligonucleotide
  Sense strand starting at position 3228 of SEQ ID NO: 914025
agucaagucuaucuagcuu

SEQ ID NO: 972257 - RNA, 19 nt, Artificial Sequence
  Description of Artificial Sequence: Synthetic oligonucleotide
  Antisense strand to SEQ ID NO: 972256
aagcuagauagacuugacu

SEQ ID NO: 972258 - RNA, 19 nt, Artificial Sequence
  Description of Artificial Sequence: Synthetic oligonucleotide
  Sense strand starting at position 2363 of SEQ ID NO: 914025
ugaguuaauuugugaagac

SEQ ID NO: 972259 - RNA, 19 nt, Artificial Sequence
  Description of Artificial Sequence: Synthetic oligonucleotide
  Antisense strand to SEQ ID NO: 972258
gucuucacaaauuaacuca

SEQ ID NO: 972260 - RNA, 19 nt, Artificial Sequence
  Description of Artificial Sequence: Synthetic oligonucleotide
  Sense strand starting at position 203 of SEQ ID NO: 914025
aaaucaugcugguuugcua

SEQ ID NO: 972261 - RNA, 19 nt, Artificial Sequence
  Description of Artificial Sequence: Synthetic oligonucleotide
  Antisense strand to SEQ ID NO: 972260
uagcaaaccagcaugauuu

SEQ ID NO: 972262 - RNA, 19 nt, Artificial Sequence
  Description of Artificial Sequence: Synthetic oligonucleotide
  Sense strand starting at position 2585 of SEQ ID NO: 914025
gcaggaaguguaugucuac

SEQ ID NO: 972263 - RNA, 19 nt, Artificial Sequence
  Description of Artificial Sequence: Synthetic oligonucleotide
  Antisense strand to SEQ ID NO: 972262
guagacauacacuuccugc

SEQ ID NO: 972264 - RNA, 19 nt, Artificial Sequence
  Description of Artificial Sequence: Synthetic oligonucleotide
  Sense strand starting at position 3802 of SEQ ID NO: 914025
gaaccauugcacugugcua

SEQ ID NO: 972265 - RNA, 19 nt, Artificial Sequence
  Description of Artificial Sequence: Synthetic oligonucleotide
  Antisense strand to SEQ ID NO: 972264
uagcacagugcaaugguuc

SEQ ID NO: 972266 - RNA, 19 nt, Artificial Sequence
  Description of Artificial Sequence: Synthetic oligonucleotide
  Sense strand starting at position 2334 of SEQ ID NO: 914025
aucugcuucuuauuguuau

SEQ ID NO: 972267 - RNA, 19 nt, Artificial Sequence
  Description of Artificial Sequence: Synthetic oligonucleotide
  Antisense strand to SEQ ID NO: 972266
auaacaauaagaagcagau

SEQ ID NO: 972268 - RNA, 19 nt, Artificial Sequence
  Description of Artificial Sequence: Synthetic oligonucleotide
  Sense strand starting at position 2952 of SEQ ID NO: 914026
aaucgugacccugacaaca

SEQ ID NO: 972269 - RNA, 19 nt, Artificial Sequence
  Description of Artificial Sequence: Synthetic oligonucleotide
  Antisense strand to SEQ ID NO: 972268
uguugucagggucacgauu

SEQ ID NO: 972270 - RNA, 19 nt, Artificial Sequence
  Description of Artificial Sequence: Synthetic oligonucleotide
  Sense strand starting at position 2435 of SEQ ID NO: 914026
gcagguguucugccagcau

SEQ ID NO: 972271 - RNA, 19 nt, Artificial Sequence
  Description of Artificial Sequence: Synthetic oligonucleotide
  Antisense strand to SEQ ID NO: 972270
augcuggcagaacaccugc

SEQ ID NO: 972272 - RNA, 19 nt, Artificial Sequence
  Description of Artificial Sequence: Synthetic oligonucleotide
  Sense strand starting at position 3059 of SEQ ID NO: 914026
gcuuguuugccugcucacu

SEQ ID NO: 972273 - RNA, 19 nt, Artificial Sequence
  Description of Artificial Sequence: Synthetic oligonucleotide
  Antisense strand to SEQ ID NO: 972272
agugagcaggcaaacaagc

SEQ ID NO: 972274 - RNA, 19 nt, Artificial Sequence
  Description of Artificial Sequence: Synthetic oligonucleotide
  Sense strand starting at position 2666 of SEQ ID NO: 914026
aggaaucugccaggugaug

SEQ ID NO: 972275 - RNA, 19 nt, Artificial Sequence
  Description of Artificial Sequence: Synthetic oligonucleotide
  Antisense strand to SEQ ID NO: 972274
caucaccuggcagauuccu

SEQ ID NO: 972276 - RNA, 19 nt, Artificial Sequence
  Description of Artificial Sequence: Synthetic oligonucleotide
  Sense strand starting at position 1156 of SEQ ID NO: 914026
agaugaguccugcaucuuu

SEQ ID NO: 972277 - RNA, 19 nt, Artificial Sequence
  Description of Artificial Sequence: Synthetic oligonucleotide
  Antisense strand to SEQ ID NO: 972276
aaagaugcaggacucaucu

SEQ ID NO: 972278 - RNA, 19 nt, Artificial Sequence
  Description of Artificial Sequence: Synthetic oligonucleotide
  Sense strand starting at position 6 of SEQ ID NO: 914026
gugggaaguguugaacugu

SEQ ID NO: 972279 - RNA, 19 nt, Artificial Sequence
  Description of Artificial Sequence: Synthetic oligonucleotide
  Antisense strand to SEQ ID NO: 972278
acaguucaacacuucccac

SEQ ID NO: 972280 - RNA, 19 nt, Artificial Sequence
  Description of Artificial Sequence: Synthetic oligonucleotide
  Sense strand starting at position 2459 of SEQ ID NO: 914026
uugaaugccuucccugaca

SEQ ID NO: 972281 - RNA, 19 nt, Artificial Sequence
  Description of Artificial Sequence: Synthetic oligonucleotide
  Antisense strand to SEQ ID NO: 972280
ugucagggaaggcauucaa

SEQ ID NO: 972282 - RNA, 19 nt, Artificial Sequence
  Description of Artificial Sequence: Synthetic oligonucleotide
  Sense strand starting at position 3121 of SEQ ID NO: 914026
ugucucugucuugggaaag

SEQ ID NO: 972283 - RNA, 19 nt, Artificial Sequence
  Description of Artificial Sequence: Synthetic oligonucleotide
  Antisense strand to SEQ ID NO: 972282
cuuucccaagacagagaca

SEQ ID NO: 972284 - RNA, 19 nt, Artificial Sequence
  Description of Artificial Sequence: Synthetic oligonucleotide
  Sense strand starting at position 2493 of SEQ ID NO: 914026
acagcucuggccugagaca

SEQ ID NO: 972285 - RNA, 19 nt, Artificial Sequence
  Description of Artificial Sequence: Synthetic oligonucleotide
  Antisense strand to SEQ ID NO: 972284
ugucucaggccagagcugu

SEQ ID NO: 972286 - RNA, 19 nt, Artificial Sequence
  Description of Artificial Sequence: Synthetic oligonucleotide
  Sense strand starting at position 1294 of SEQ ID NO: 914026
gggaaaugccagugcucca

SEQ ID NO: 972287 - RNA, 19 nt, Artificial Sequence
  Description of Artificial Sequence: Synthetic oligonucleotide
  Antisense strand to SEQ ID NO: 972286
uggagcacuggcauuuccc

SEQ ID NO: 972288 - RNA, 19 nt, Artificial Sequence
  Description of Artificial Sequence: Synthetic oligonucleotide
  Sense strand starting at position 2397 of SEQ ID NO: 914026
ggccucaccugaucguaga

SEQ ID NO: 972289 - RNA, 19 nt, Artificial Sequence
  Description of Artificial Sequence: Synthetic oligonucleotide
  Antisense strand to SEQ ID NO: 972288
ucuacgaucaggugaggcc

SEQ ID NO: 972290 - RNA, 19 nt, Artificial Sequence
  Description of Artificial Sequence: Synthetic oligonucleotide
  Sense strand starting at position 3118 of SEQ ID NO: 914026
aguugucucugucuuggga

SEQ ID NO: 972291 - RNA, 19 nt, Artificial Sequence
  Description of Artificial Sequence: Synthetic oligonucleotide
  Antisense strand to SEQ ID NO: 972290
ucccaagacagagacaacu

SEQ ID NO: 972292 - RNA, 19 nt, Artificial Sequence
  Description of Artificial Sequence: Synthetic oligonucleotide
  Sense strand starting at position 885 of SEQ ID NO: 914026
gcucuaucgcugcagaaug

SEQ ID NO: 972293 - RNA, 19 nt, Artificial Sequence
  Description of Artificial Sequence: Synthetic oligonucleotide
  Antisense strand to SEQ ID NO: 972292
cauucugcagcgauagagc

SEQ ID NO: 972294 - RNA, 19 nt, Artificial Sequence
  Description of Artificial Sequence: Synthetic oligonucleotide
  Sense strand starting at position 3300 of SEQ ID NO: 914026
auacauuacugcgugguau

SEQ ID NO: 972295 - RNA, 19 nt, Artificial Sequence
  Description of Artificial Sequence: Synthetic oligonucleotide
  Antisense strand to SEQ ID NO: 972294
auaccacgcaguaauguau

SEQ ID NO: 972296 - RNA, 19 nt, Artificial Sequence
  Description of Artificial Sequence: Synthetic oligonucleotide
  Sense strand starting at position 1467 of SEQ ID NO: 914026
ucccaugugccgugaauaa

SEQ ID NO: 972297 - RNA, 19 nt, Artificial Sequence
  Description of Artificial Sequence: Synthetic oligonucleotide
  Antisense strand to SEQ ID NO: 972296
uuauucacggcacauggga

SEQ ID NO: 972298 - RNA, 19 nt, Artificial Sequence
  Description of Artificial Sequence: Synthetic oligonucleotide
  Sense strand starting at position 3299 of SEQ ID NO: 914026
uauacauuacugcguggua

SEQ ID NO: 972299 - RNA, 19 nt, Artificial Sequence
  Description of Artificial Sequence: Synthetic oligonucleotide
  Antisense strand to SEQ ID NO: 972298
uaccacgcaguaauguaua

SEQ ID NO: 972300 - RNA, 19 nt, Artificial Sequence
  Description of Artificial Sequence: Synthetic oligonucleotide
  Sense strand starting at position 3301 of SEQ ID NO: 914026
uacauuacugcgugguaug

SEQ ID NO: 972301 - RNA, 19 nt, Artificial Sequence
  Description of Artificial Sequence: Synthetic oligonucleotide
  Antisense strand to SEQ ID NO: 972300
cauaccacgcaguaaugua

SEQ ID NO: 972302 - RNA, 19 nt, Artificial Sequence
  Description of Artificial Sequence: Synthetic oligonucleotide
  Sense strand starting at position 2901 of SEQ ID NO: 914026
cagagaggcucugacaacu

SEQ ID NO: 972303 - RNA, 19 nt, Artificial Sequence
  Description of Artificial Sequence: Synthetic oligonucleotide
  Antisense strand to SEQ ID NO: 972302
aguugucagagccucucug

SEQ ID NO: 972304 - RNA, 19 nt, Artificial Sequence
  Description of Artificial Sequence: Synthetic oligonucleotide
  Sense strand starting at position 2439 of SEQ ID NO: 914026
guguucugccagcauucga

SEQ ID NO: 972305 - RNA, 19 nt, Artificial Sequence
  Description of Artificial Sequence: Synthetic oligonucleotide
  Antisense strand to SEQ ID NO: 972304
ucgaaugcuggcagaacac

SEQ ID NO: 972306 - RNA, 19 nt, Artificial Sequence
  Description of Artificial Sequence: Synthetic oligonucleotide
  Sense strand starting at position 2664 of SEQ ID NO: 914026
gaaggaaucugccagguga

SEQ ID NO: 972307 - RNA, 19 nt, Artificial Sequence
  Description of Artificial Sequence: Synthetic oligonucleotide
  Antisense strand to SEQ ID NO: 972306
ucaccuggcagauuccuuc

SEQ ID NO: 972308 - RNA, 19 nt, Artificial Sequence
  Description of Artificial Sequence: Synthetic oligonucleotide
  Sense strand starting at position 3061 of SEQ ID NO: 914026
uuguuugccugcucacuua

SEQ ID NO: 972309 - RNA, 19 nt, Artificial Sequence
  Description of Artificial Sequence: Synthetic oligonucleotide
  Antisense strand to SEQ ID NO: 972308
uaagugagcaggcaaacaa

SEQ ID NO: 972310 - RNA, 19 nt, Artificial Sequence
  Description of Artificial Sequence: Synthetic oligonucleotide
  Sense strand starting at position 1070 of SEQ ID NO: 914026
guguuugguucccugcuga

SEQ ID NO: 972311 - RNA, 19 nt, Artificial Sequence
  Description of Artificial Sequence: Synthetic oligonucleotide
  Antisense strand to SEQ ID NO: 972310
ucagcagggaaccaaacac

SEQ ID NO: 972312 - RNA, 19 nt, Artificial Sequence
  Description of Artificial Sequence: Synthetic oligonucleotide
  Sense strand starting at position 883 of SEQ ID NO: 914026
cugcucuaucgcugcagaa

SEQ ID NO: 972313 - RNA, 19 nt, Artificial Sequence
  Description of Artificial Sequence: Synthetic oligonucleotide
  Antisense strand to SEQ ID NO: 972312
uucugcagcgauagagcag

SEQ ID NO: 972314 - RNA, 19 nt, Artificial Sequence
  Description of Artificial Sequence: Synthetic oligonucleotide
  Sense strand starting at position 3738 of SEQ ID NO: 914026
cccugaaugugacacucua

SEQ ID NO: 972315 - RNA, 19 nt, Artificial Sequence
  Description of Artificial Sequence: Synthetic oligonucleotide
  Antisense strand to SEQ ID NO: 972314
uagagugucacauucaggg

SEQ ID NO: 972316 - RNA, 19 nt, Artificial Sequence
  Description of Artificial Sequence: Synthetic oligonucleotide
  Sense strand starting at position 2697 of SEQ ID NO: 914026
ugcgcauuccuguggugga

SEQ ID NO: 972317 - RNA, 19 nt, Artificial Sequence
  Description of Artificial Sequence: Synthetic oligonucleotide
  Antisense strand to SEQ ID NO: 972316
uccaccacaggaaugcgca

SEQ ID NO: 972318 - RNA, 19 nt, Artificial Sequence
  Description of Artificial Sequence: Synthetic oligonucleotide
  Sense strand starting at position 3120 of SEQ ID NO: 914026
uugucucugucuugggaaa

SEQ ID NO: 972319 - RNA, 19 nt, Artificial Sequence
  Description of Artificial Sequence: Synthetic oligonucleotide
  Antisense strand to SEQ ID NO: 972318
uuucccaagacagagacaa

SEQ ID NO: 972320 - RNA, 19 nt, Artificial Sequence
  Description of Artificial Sequence: Synthetic oligonucleotide
  Sense strand starting at position 3554 of SEQ ID NO: 914026
ggugaaaccuggugucuug

SEQ ID NO: 972321 - RNA, 19 nt, Artificial Sequence
  Description of Artificial Sequence: Synthetic oligonucleotide
  Antisense strand to SEQ ID NO: 972320
caagacaccagguuucacc

SEQ ID NO: 972322 - RNA, 19 nt, Artificial Sequence
  Description of Artificial Sequence: Synthetic oligonucleotide
  Sense strand starting at position 3122 of SEQ ID NO: 914026
gucucugucuugggaaagu

SEQ ID NO: 972323 - RNA, 19 nt, Artificial Sequence
  Description of Artificial Sequence: Synthetic oligonucleotide
  Antisense strand to SEQ ID NO: 972322
acuuucccaagacagagac

SEQ ID NO: 972324 - RNA, 19 nt, Artificial Sequence
  Description of Artificial Sequence: Synthetic oligonucleotide
  Sense strand starting at position 3662 of SEQ ID NO: 914026
aguguugucucaggaaguc

SEQ ID NO: 972325 - RNA, 19 nt, Artificial Sequence
  Description of Artificial Sequence: Synthetic oligonucleotide
  Antisense strand to SEQ ID NO: 972324
gacuuccugagacaacacu

SEQ ID NO: 972326 - RNA, 19 nt, Artificial Sequence
  Description of Artificial Sequence: Synthetic oligonucleotide
  Sense strand starting at position 3636 of SEQ ID NO: 914027
ggaaaucuuggcugaaagg

SEQ ID NO: 972327 - RNA, 19 nt, Artificial Sequence
  Description of Artificial Sequence: Synthetic oligonucleotide
  Antisense strand to SEQ ID NO: 972326
ccuuucagccaagauuucc

SEQ ID NO: 972328 - RNA, 19 nt, Artificial Sequence
  Description of Artificial Sequence: Synthetic oligonucleotide
  Sense strand starting at position 710 of SEQ ID NO: 914027
uggaaauguccucagaggu

SEQ ID NO: 972329 - RNA, 19 nt, Artificial Sequence
  Description of Artificial Sequence: Synthetic oligonucleotide
  Antisense strand to SEQ ID NO: 972328
accucugaggacauuucca

SEQ ID NO: 972330 - RNA, 19 nt, Artificial Sequence
  Description of Artificial Sequence: Synthetic oligonucleotide
  Sense strand starting at position 3624 of SEQ ID NO: 914027
uugggugaucagggaaauc

SEQ ID NO: 972331 - RNA, 19 nt, Artificial Sequence
  Description of Artificial Sequence: Synthetic oligonucleotide
  Antisense strand to SEQ ID NO: 972330
gauuucccugaucacccaa

SEQ ID NO: 972332 - RNA, 19 nt, Artificial Sequence
  Description of Artificial Sequence: Synthetic oligonucleotide
  Sense strand starting at position 717 of SEQ ID NO: 914027
guccucagaggucaucaaa

SEQ ID NO: 972333 - RNA, 19 nt, Artificial Sequence
  Description of Artificial Sequence: Synthetic oligonucleotide
  Antisense strand to SEQ ID NO: 972332
uuugaugaccucugaggac

SEQ ID NO: 972334 - RNA, 19 nt, Artificial Sequence
  Description of Artificial Sequence: Synthetic oligonucleotide
  Sense strand starting at position 3633 of SEQ ID NO: 914027
cagggaaaucuuggcugaa

SEQ ID NO: 972335 - RNA, 19 nt, Artificial Sequence
  Description of Artificial Sequence: Synthetic oligonucleotide
  Antisense strand to SEQ ID NO: 972334
uucagccaagauuucccug

SEQ ID NO: 972336 - RNA, 19 nt, Artificial Sequence
  Description of Artificial Sequence: Synthetic oligonucleotide
  Sense strand starting at position 709 of SEQ ID NO: 914027
guggaaauguccucagagg

SEQ ID NO: 972337 - RNA, 19 nt, Artificial Sequence
  Description of Artificial Sequence: Synthetic oligonucleotide
  Antisense strand to SEQ ID NO: 972336
ccucugaggacauuuccac

SEQ ID NO: 972338 - RNA, 19 nt, Artificial Sequence
  Description of Artificial Sequence: Synthetic oligonucleotide
  Sense strand starting at position 3302 of SEQ ID NO: 914027
ggaaguaggcagugaauaa

SEQ ID NO: 972339 - RNA, 19 nt, Artificial Sequence
  Description of Artificial Sequence: Synthetic oligonucleotide
  Antisense strand to SEQ ID NO: 972338
uuauucacugccuacuucc

SEQ ID NO: 972340 - RNA, 19 nt, Artificial Sequence
  Description of Artificial Sequence: Synthetic oligonucleotide
  Sense strand starting at position 3750 of SEQ ID NO: 914027
gguggaggaugccuuagaa

SEQ ID NO: 972341 - RNA, 19 nt, Artificial Sequence
  Description of Artificial Sequence: Synthetic oligonucleotide
  Antisense strand to SEQ ID NO: 972340
uucuaaggcauccuccacc

SEQ ID NO: 972342 - RNA, 19 nt, Artificial Sequence
  Description of Artificial Sequence: Synthetic oligonucleotide
  Sense strand starting at position 2735 of SEQ ID NO: 914027
guggaaucagacggugaaa

SEQ ID NO: 972343 - RNA, 19 nt, Artificial Sequence
  Description of Artificial Sequence: Synthetic oligonucleotide
  Antisense strand to SEQ ID NO: 972342
uuucaccgucugauuccac

SEQ ID NO: 972344 - RNA, 19 nt, Artificial Sequence
  Description of Artificial Sequence: Synthetic oligonucleotide
  Sense strand starting at position 2734 of SEQ ID NO: 914027
aguggaaucagacggugaa

SEQ ID NO: 972345 - RNA, 19 nt, Artificial Sequence
  Description of Artificial Sequence: Synthetic oligonucleotide
  Antisense strand to SEQ ID NO: 972344
uucaccgucugauuccacu

SEQ ID NO: 972346 - RNA, 19 nt, Artificial Sequence
  Description of Artificial Sequence: Synthetic oligonucleotide
  Sense strand starting at position 3691 of SEQ ID NO: 914027
ugcugaauccgaggaauga

SEQ ID NO: 972347 - RNA, 19 nt, Artificial Sequence
  Description of Artificial Sequence: Synthetic oligonucleotide
  Antisense strand to SEQ ID NO: 972346
ucauuccucggauucagca

SEQ ID NO: 972348 - RNA, 19 nt, Artificial Sequence
  Description of Artificial Sequence: Synthetic oligonucleotide
  Sense strand starting at position 3006 of SEQ ID NO: 914027
agggucaccuucucuugaa

SEQ ID NO: 972349 - RNA, 19 nt, Artificial Sequence
  Description of Artificial Sequence: Synthetic oligonucleotide
  Antisense strand to SEQ ID NO: 972348
uucaagagaaggugacccu

SEQ ID NO: 972350 - RNA, 19 nt, Artificial Sequence
  Description of Artificial Sequence: Synthetic oligonucleotide
  Sense strand starting at position 3523 of SEQ ID NO: 914027
ggaacuuccugacucuagu

SEQ ID NO: 972351 - RNA, 19 nt, Artificial Sequence
  Description of Artificial Sequence: Synthetic oligonucleotide
  Antisense strand to SEQ ID NO: 972350
acuagagucaggaaguucc

SEQ ID NO: 972352 - RNA, 19 nt, Artificial Sequence
  Description of Artificial Sequence: Synthetic oligonucleotide
  Sense strand starting at position 3688 of SEQ ID NO: 914027
cuaugcugaauccgaggaa

SEQ ID NO: 972353 - RNA, 19 nt, Artificial Sequence
  Description of Artificial Sequence: Synthetic oligonucleotide
  Antisense strand to SEQ ID NO: 972352
uuccucggauucagcauag

SEQ ID NO: 972354 - RNA, 19 nt, Artificial Sequence
  Description of Artificial Sequence: Synthetic oligonucleotide
  Sense strand starting at position 2890 of SEQ ID NO: 914027
ggucucagagccuauaagu

SEQ ID NO: 972355 - RNA, 19 nt, Artificial Sequence
  Description of Artificial Sequence: Synthetic oligonucleotide
  Antisense strand to SEQ ID NO: 972354
acuuauaggcucugagacc

SEQ ID NO: 972356 - RNA, 19 nt, Artificial Sequence
  Description of Artificial Sequence: Synthetic oligonucleotide
  Sense strand starting at position 685 of SEQ ID NO: 914027
agcaaagugucacuggaca

SEQ ID NO: 972357 - RNA, 19 nt, Artificial Sequence
  Description of Artificial Sequence: Synthetic oligonucleotide
  Antisense strand to SEQ ID NO: 972356
uguccagugacacuuugcu

SEQ ID NO: 972358 - RNA, 19 nt, Artificial Sequence
  Description of Artificial Sequence: Synthetic oligonucleotide
  Sense strand starting at position 188 of SEQ ID NO: 914027
gccacuguccagcacaaau

SEQ ID NO: 972359 - RNA, 19 nt, Artificial Sequence
  Description of Artificial Sequence: Synthetic oligonucleotide
  Antisense strand to SEQ ID NO: 972358
auuugugcuggacaguggc

SEQ ID NO: 972360 - RNA, 19 nt, Artificial Sequence
  Description of Artificial Sequence: Synthetic oligonucleotide
  Sense strand starting at position 1449 of SEQ ID NO: 914027
acagcaagggcgugagaua

SEQ ID NO: 972361 - RNA, 19 nt, Artificial Sequence
  Description of Artificial Sequence: Synthetic oligonucleotide
  Antisense strand to SEQ ID NO: 972360
uaucucacgcccuugcugu

SEQ ID NO: 972362 - RNA, 19 nt, Artificial Sequence
  Description of Artificial Sequence: Synthetic oligonucleotide
  Sense strand starting at position 398 of SEQ ID NO: 914027
gggauaccugcuugguuca

SEQ ID NO: 972363 - RNA, 19 nt, Artificial Sequence
  Description of Artificial Sequence: Synthetic oligonucleotide
  Antisense strand to SEQ ID NO: 972362
ugaaccaagcagguauccc

SEQ ID NO: 972364 - RNA, 19 nt, Artificial Sequence
  Description of Artificial Sequence: Synthetic oligonucleotide
  Sense strand starting at position 2828 of SEQ ID NO: 914027
uggauuuguucccauugga

SEQ ID NO: 972365 - RNA, 19 nt, Artificial Sequence
  Description of Artificial Sequence: Synthetic oligonucleotide
  Antisense strand to SEQ ID NO: 972364
uccaaugggaacaaaucca

SEQ ID NO: 972366 - RNA, 19 nt, Artificial Sequence
  Description of Artificial Sequence: Synthetic oligonucleotide
  Sense strand starting at position 3680 of SEQ ID NO: 914027
gaggcaagcuaugcugaau

SEQ ID NO: 972367 - RNA, 19 nt, Artificial Sequence
  Description of Artificial Sequence: Synthetic oligonucleotide
  Antisense strand to SEQ ID NO: 972366
auucagcauagcuugccuc

SEQ ID NO: 972368 - RNA, 19 nt, Artificial Sequence
  Description of Artificial Sequence: Synthetic oligonucleotide
  Sense strand starting at position 3290 of SEQ ID NO: 914027
ugcauucuugugggaagua

SEQ ID NO: 972369 - RNA, 19 nt, Artificial Sequence
  Description of Artificial Sequence: Synthetic oligonucleotide
  Antisense strand to SEQ ID NO: 972368
uacuucccacaagaaugca

SEQ ID NO: 972370 - RNA, 19 nt, Artificial Sequence
  Description of Artificial Sequence: Synthetic oligonucleotide
  Sense strand starting at position 3251 of SEQ ID NO: 914027
cugggauucggcugugaau

SEQ ID NO: 972371 - RNA, 19 nt, Artificial Sequence
  Description of Artificial Sequence: Synthetic oligonucleotide
  Antisense strand to SEQ ID NO: 972370
auucacagccgaaucccag

SEQ ID NO: 972372 - RNA, 19 nt, Artificial Sequence
  Description of Artificial Sequence: Synthetic oligonucleotide
  Sense strand starting at position 3647 of SEQ ID NO: 914027
cugaaaggaucauaucuga

SEQ ID NO: 972373 - RNA, 19 nt, Artificial Sequence
  Description of Artificial Sequence: Synthetic oligonucleotide
  Antisense strand to SEQ ID NO: 972372
ucagauaugauccuuucag

SEQ ID NO: 972374 - RNA, 19 nt, Artificial Sequence
  Description of Artificial Sequence: Synthetic oligonucleotide
  Sense strand starting at position 3565 of SEQ ID NO: 914027
aguagcuagaacuguaguu

SEQ ID NO: 972375 - RNA, 19 nt, Artificial Sequence
  Description of Artificial Sequence: Synthetic oligonucleotide
  Antisense strand to SEQ ID NO: 972374
aacuacaguucuagcuacu

SEQ ID NO: 972376 - RNA, 19 nt, Artificial Sequence
  Description of Artificial Sequence: Synthetic oligonucleotide
  Sense strand starting at position 3225 of SEQ ID NO: 914027
cuguaugccagguguaaga

SEQ ID NO: 972377 - RNA, 19 nt, Artificial Sequence
  Description of Artificial Sequence: Synthetic oligonucleotide
  Antisense strand to SEQ ID NO: 972376
ucuuacaccuggcauacag

SEQ ID NO: 972378 - RNA, 19 nt, Artificial Sequence
  Description of Artificial Sequence: Synthetic oligonucleotide
  Sense strand starting at position 1151 of SEQ ID NO: 914027
gcggccucucuguaaauau

SEQ ID NO: 972379 - RNA, 19 nt, Artificial Sequence
  Description of Artificial Sequence: Synthetic oligonucleotide
  Antisense strand to SEQ ID NO: 972378
auauuuacagagaggccgc

SEQ ID NO: 972380 - RNA, 19 nt, Artificial Sequence
  Description of Artificial Sequence: Synthetic oligonucleotide
  Sense strand starting at position 274 of SEQ ID NO: 914027
cucugugugaacuguucca

SEQ ID NO: 972381 - RNA, 19 nt, Artificial Sequence
  Description of Artificial Sequence: Synthetic oligonucleotide
  Antisense strand to SEQ ID NO: 972380
uggaacaguucacacagag

SEQ ID NO: 972382 - RNA, 19 nt, Artificial Sequence
  Description of Artificial Sequence: Synthetic oligonucleotide
  Sense strand starting at position 3253 of SEQ ID NO: 914027
gggauucggcugugaaugu

SEQ ID NO: 972383 - RNA, 19 nt, Artificial Sequence
  Description of Artificial Sequence: Synthetic oligonucleotide
  Antisense strand to SEQ ID NO: 972382
acauucacagccgaauccc

SEQ ID NO: 972384 - RNA, 19 nt, Artificial Sequence
  Description of Artificial Sequence: Synthetic oligonucleotide
  Sense strand starting at position 3223 of SEQ ID NO: 914027
accuguaugccagguguaa

SEQ ID NO: 972385 - RNA, 19 nt, Artificial Sequence
  Description of Artificial Sequence: Synthetic oligonucleotide
  Antisense strand to SEQ ID NO: 972384
uuacaccuggcauacaggu

SEQ ID NO: 972386 - RNA, 19 nt, Artificial Sequence
  Description of Artificial Sequence: Synthetic oligonucleotide
  Sense strand starting at position 3498 of SEQ ID NO: 914027
gugcaaucacuaugcucua

SEQ ID NO: 972387 - RNA, 19 nt, Artificial Sequence
  Description of Artificial Sequence: Synthetic oligonucleotide
  Antisense strand to SEQ ID NO: 972386
uagagcauagugauugcac

SEQ ID NO: 972388 - RNA, 19 nt, Artificial Sequence
  Description of Artificial Sequence: Synthetic oligonucleotide
  Sense strand starting at position 2799 of SEQ ID NO: 914027
ccaucuuaaucgcccugua

SEQ ID NO: 972389 - RNA, 19 nt, Artificial Sequence
  Description of Artificial Sequence: Synthetic oligonucleotide
  Antisense strand to SEQ ID NO: 972388
uacagggcgauuaagaugg

SEQ ID NO: 972390 - RNA, 19 nt, Artificial Sequence
  Description of Artificial Sequence: Synthetic oligonucleotide
  Sense strand starting at position 339 of SEQ ID NO: 914027
gaagaugccucccagagaa

SEQ ID NO: 972391 - RNA, 19 nt, Artificial Sequence
  Description of Artificial Sequence: Synthetic oligonucleotide
  Antisense strand to SEQ ID NO: 972390
uucucugggaggcaucuuc

SEQ ID NO: 972392 - RNA, 19 nt, Artificial Sequence
  Description of Artificial Sequence: Synthetic oligonucleotide
  Sense strand starting at position 1150 of SEQ ID NO: 914027
agcggccucucuguaaaua

SEQ ID NO: 972393 - RNA, 19 nt, Artificial Sequence
  Description of Artificial Sequence: Synthetic oligonucleotide
  Antisense strand to SEQ ID NO: 972392
uauuuacagagaggccgcu

SEQ ID NO: 972394 - RNA, 19 nt, Artificial Sequence
  Description of Artificial Sequence: Synthetic oligonucleotide
  Sense strand starting at position 3652 of SEQ ID NO: 914027
aggaucauaucugagcuaa

SEQ ID NO: 972395 - RNA, 19 nt, Artificial Sequence
  Description of Artificial Sequence: Synthetic oligonucleotide
  Antisense strand to SEQ ID NO: 972394
uuagcucagauaugauccu

SEQ ID NO: 972396 - RNA, 19 nt, Artificial Sequence
  Description of Artificial Sequence: Synthetic oligonucleotide
  Sense strand starting at position 3270 of SEQ ID NO: 914027
gucucugucugguuggagu

SEQ ID NO: 972397 - RNA, 19 nt, Artificial Sequence
  Description of Artificial Sequence: Synthetic oligonucleotide
  Antisense strand to SEQ ID NO: 972396
acuccaaccagacagagac

SEQ ID NO: 972398 - RNA, 19 nt, Artificial Sequence
  Description of Artificial Sequence: Synthetic oligonucleotide
  Sense strand starting at position 3199 of SEQ ID NO: 914027
ucacuuaguccuugugucu

SEQ ID NO: 972399 - RNA, 19 nt, Artificial Sequence
  Description of Artificial Sequence: Synthetic oligonucleotide
  Antisense strand to SEQ ID NO: 972398
agacacaaggacuaaguga

SEQ ID NO: 972400 - RNA, 19 nt, Artificial Sequence
  Description of Artificial Sequence: Synthetic oligonucleotide
  Sense strand starting at position 3338 of SEQ ID NO: 914027
ucaugugucagaugcugca

SEQ ID NO: 972401 - RNA, 19 nt, Artificial Sequence
  Description of Artificial Sequence: Synthetic oligonucleotide
  Antisense strand to SEQ ID NO: 972400
ugcagcaucugacacauga

SEQ ID NO: 972402 - RNA, 19 nt, Artificial Sequence
  Description of Artificial Sequence: Synthetic oligonucleotide
  Sense strand starting at position 3689 of SEQ ID NO: 914027
uaugcugaauccgaggaau

SEQ ID NO: 972403 - RNA, 19 nt, Artificial Sequence
  Description of Artificial Sequence: Synthetic oligonucleotide
  Antisense strand to SEQ ID NO: 972402
auuccucggauucagcaua

SEQ ID NO: 972404 - RNA, 19 nt, Artificial Sequence
  Description of Artificial Sequence: Synthetic oligonucleotide
  Sense strand starting at position 244 of SEQ ID NO: 914027
guugcuaaguuacaccaaa

SEQ ID NO: 972405 - RNA, 19 nt, Artificial Sequence
  Description of Artificial Sequence: Synthetic oligonucleotide
  Antisense strand to SEQ ID NO: 972404
uuugguguaacuuagcaac

SEQ ID NO: 972406 - RNA, 19 nt, Artificial Sequence
  Description of Artificial Sequence: Synthetic oligonucleotide
  Sense strand starting at position 781 of SEQ ID NO: 914028
ggcagaaguagcuaaggaa

SEQ ID NO: 972407 - RNA, 19 nt, Artificial Sequence
  Description of Artificial Sequence: Synthetic oligonucleotide
  Antisense strand to SEQ ID NO: 972406
uuccuuagcuacuucugcc

SEQ ID NO: 972408 - RNA, 19 nt, Artificial Sequence
  Description of Artificial Sequence: Synthetic oligonucleotide
  Sense strand starting at position 3290 of SEQ ID NO: 914028
augagauccuaagaauuua

SEQ ID NO: 972409 - RNA, 19 nt, Artificial Sequence
  Description of Artificial Sequence: Synthetic oligonucleotide
  Antisense strand to SEQ ID NO: 972408
uaaauucuuaggaucucau

SEQ ID NO: 972410 - RNA, 19 nt, Artificial Sequence
  Description of Artificial Sequence: Synthetic oligonucleotide
  Sense strand starting at position 3793 of SEQ ID NO: 914028
acccgauauuuagcucuuu

SEQ ID NO: 972411 - RNA, 19 nt, Artificial Sequence
  Description of Artificial Sequence: Synthetic oligonucleotide
  Antisense strand to SEQ ID NO: 972410
aaagagcuaaauaucgggu

SEQ ID NO: 972412 - RNA, 19 nt, Artificial Sequence
  Description of Artificial Sequence: Synthetic oligonucleotide
  Sense strand starting at position 3123 of SEQ ID NO: 914028
uggagaauggcccauccuu

SEQ ID NO: 972413 - RNA, 19 nt, Artificial Sequence
  Description of Artificial Sequence: Synthetic oligonucleotide
  Antisense strand to SEQ ID NO: 972412
aaggaugggccauucucca

SEQ ID NO: 972414 - RNA, 19 nt, Artificial Sequence
  Description of Artificial Sequence: Synthetic oligonucleotide
  Sense strand starting at position 1429 of SEQ ID NO: 914028
ugaggaguaagaggcauau

SEQ ID NO: 972415 - RNA, 19 nt, Artificial Sequence
  Description of Artificial Sequence: Synthetic oligonucleotide
  Antisense strand to SEQ ID NO: 972414
auaugccucuuacuccuca

SEQ ID NO: 972416 - RNA, 19 nt, Artificial Sequence
  Description of Artificial Sequence: Synthetic oligonucleotide
  Sense strand starting at position 33 of SEQ ID NO: 914028
ugggcuccucaucaauuaa

SEQ ID NO: 972417 - RNA, 19 nt, Artificial Sequence
  Description of Artificial Sequence: Synthetic oligonucleotide
  Antisense strand to SEQ ID NO: 972416
uuaauugaugaggagccca

SEQ ID NO: 972418 - RNA, 19 nt, Artificial Sequence
  Description of Artificial Sequence: Synthetic oligonucleotide
  Sense strand starting at position 137 of SEQ ID NO: 914028
agaggcucccauuacuauu

SEQ ID NO: 972419 - RNA, 19 nt, Artificial Sequence
  Description of Artificial Sequence: Synthetic oligonucleotide
  Antisense strand to SEQ ID NO: 972418
aauaguaaugggagccucu

SEQ ID NO: 972420 - RNA, 19 nt, Artificial Sequence
  Description of Artificial Sequence: Synthetic oligonucleotide
  Sense strand starting at position 1341 of SEQ ID NO: 914028
ccgguaaagguggacaauu

SEQ ID NO: 972421 - RNA, 19 nt, Artificial Sequence
  Description of Artificial Sequence: Synthetic oligonucleotide
  Antisense strand to SEQ ID NO: 972420
aauuguccaccuuuaccgg

SEQ ID NO: 972422 - RNA, 19 nt, Artificial Sequence
  Description of Artificial Sequence: Synthetic oligonucleotide
  Sense strand starting at position 1024 of SEQ ID NO: 914028
uuugcugugcgaccuuauu

SEQ ID NO: 972423 - RNA, 19 nt, Artificial Sequence
  Description of Artificial Sequence: Synthetic oligonucleotide
  Antisense strand to SEQ ID NO: 972422
aauaaggucgcacagcaaa

SEQ ID NO: 972424 - RNA, 19 nt, Artificial Sequence
  Description of Artificial Sequence: Synthetic oligonucleotide
  Sense strand starting at position 3001 of SEQ ID NO: 914028
ggcugugcuaaugcuugua

SEQ ID NO: 972425 - RNA, 19 nt, Artificial Sequence
  Description of Artificial Sequence: Synthetic oligonucleotide
  Antisense strand to SEQ ID NO: 972424
uacaagcauuagcacagcc

SEQ ID NO: 972426 - RNA, 19 nt, Artificial Sequence
  Description of Artificial Sequence: Synthetic oligonucleotide
  Sense strand starting at position 3169 of SEQ ID NO: 914028
gugacuugucaugacacau

SEQ ID NO: 972427 - RNA, 19 nt, Artificial Sequence
  Description of Artificial Sequence: Synthetic oligonucleotide
  Antisense strand to SEQ ID NO: 972426
augugucaugacaagucac

SEQ ID NO: 972428 - RNA, 19 nt, Artificial Sequence
  Description of Artificial Sequence: Synthetic oligonucleotide
  Sense strand starting at position 2586 of SEQ ID NO: 914028
agaaauccgaucuggugaa

SEQ ID NO: 972429 - RNA, 19 nt, Artificial Sequence
  Description of Artificial Sequence: Synthetic oligonucleotide
  Antisense strand to SEQ ID NO: 972428
uucaccagaucggauuucu

SEQ ID NO: 972430 - RNA, 19 nt, Artificial Sequence
  Description of Artificial Sequence: Synthetic oligonucleotide
  Sense strand starting at position 1152 of SEQ ID NO: 914028
cgccgugccagguuaauga

SEQ ID NO: 972431 - RNA, 19 nt, Artificial Sequence
  Description of Artificial Sequence: Synthetic oligonucleotide
  Antisense strand to SEQ ID NO: 972430
ucauuaaccuggcacggcg

SEQ ID NO: 972432 - RNA, 19 nt, Artificial Sequence
  Description of Artificial Sequence: Synthetic oligonucleotide
  Sense strand starting at position 249 of SEQ ID NO: 914028
gagagagucugagcugaca

SEQ ID NO: 972433 - RNA, 19 nt, Artificial Sequence
  Description of Artificial Sequence: Synthetic oligonucleotide
  Antisense strand to SEQ ID NO: 972432
ugucagcucagacucucuc

SEQ ID NO: 972434 - RNA, 19 nt, Artificial Sequence
  Description of Artificial Sequence: Synthetic oligonucleotide
  Sense strand starting at position 920 of SEQ ID NO: 914028
gcaguuaaacuacagcaaa

SEQ ID NO: 972435 - RNA, 19 nt, Artificial Sequence
  Description of Artificial Sequence: Synthetic oligonucleotide
  Antisense strand to SEQ ID NO: 972434
uuugcuguaguuuaacugc

SEQ ID NO: 972436 - RNA, 19 nt, Artificial Sequence
  Description of Artificial Sequence: Synthetic oligonucleotide
  Sense strand starting at position 1030 of SEQ ID NO: 914028
gugcgaccuuauuuaauuc

SEQ ID NO: 972437 - RNA, 19 nt, Artificial Sequence
  Description of Artificial Sequence: Synthetic oligonucleotide
  Antisense strand to SEQ ID NO: 972436
gaauuaaauaaggucgcac

SEQ ID NO: 972438 - RNA, 19 nt, Artificial Sequence
  Description of Artificial Sequence: Synthetic oligonucleotide
  Sense strand starting at position 3657 of SEQ ID NO: 914028
gagguuugggauugauccu

SEQ ID NO: 972439 - RNA, 19 nt, Artificial Sequence
  Description of Artificial Sequence: Synthetic oligonucleotide
  Antisense strand to SEQ ID NO: 972438
aggaucaaucccaaaccuc

SEQ ID NO: 972440 - RNA, 19 nt, Artificial Sequence
  Description of Artificial Sequence: Synthetic oligonucleotide
  Sense strand starting at position 3013 of SEQ ID NO: 914028
gcuuguauggcugcuguau

SEQ ID NO: 972441 - RNA, 19 nt, Artificial Sequence
  Description of Artificial Sequence: Synthetic oligonucleotide
  Antisense strand to SEQ ID NO: 972440
auacagcagccauacaagc

SEQ ID NO: 972442 - RNA, 19 nt, Artificial Sequence
  Description of Artificial Sequence: Synthetic oligonucleotide
  Sense strand starting at position 1333 of SEQ ID NO: 914028
caacucauccgguaaaggu

SEQ ID NO: 972443 - RNA, 19 nt, Artificial Sequence
  Description of Artificial Sequence: Synthetic oligonucleotide
  Antisense strand to SEQ ID NO: 972442
accuuuaccggaugaguug

SEQ ID NO: 972444 - RNA, 19 nt, Artificial Sequence
  Description of Artificial Sequence: Synthetic oligonucleotide
  Sense strand starting at position 3492 of SEQ ID NO: 914028
gggcucagacacuaugcua

SEQ ID NO: 972445 - RNA, 19 nt, Artificial Sequence
  Description of Artificial Sequence: Synthetic oligonucleotide
  Antisense strand to SEQ ID NO: 972444
uagcauagugucugagccc

SEQ ID NO: 972446 - RNA, 19 nt, Artificial Sequence
  Description of Artificial Sequence: Synthetic oligonucleotide
  Sense strand starting at position 3774 of SEQ ID NO: 914028
uaucuuuaugucuagguga

SEQ ID NO: 972447 - RNA, 19 nt, Artificial Sequence
  Description of Artificial Sequence: Synthetic oligonucleotide
  Antisense strand to SEQ ID NO: 972446
ucaccuagacauaaagaua

SEQ ID NO: 972448 - RNA, 19 nt, Artificial Sequence
  Description of Artificial Sequence: Synthetic oligonucleotide
  Sense strand starting at position 156 of SEQ ID NO: 914028
cuuauugacacugggaguu

SEQ ID NO: 972449 - RNA, 19 nt, Artificial Sequence
  Description of Artificial Sequence: Synthetic oligonucleotide
  Antisense strand to SEQ ID NO: 972448
aacucccagugucaauaag

SEQ ID NO: 972450 - RNA, 19 nt, Artificial Sequence
  Description of Artificial Sequence: Synthetic oligonucleotide
  Sense strand starting at position 155 of SEQ ID NO: 914028
ucuuauugacacugggagu

SEQ ID NO: 972451 - RNA, 19 nt, Artificial Sequence
  Description of Artificial Sequence: Synthetic oligonucleotide
  Antisense strand to SEQ ID NO: 972450
acucccagugucaauaaga

SEQ ID NO: 972452 - RNA, 19 nt, Artificial Sequence
  Description of Artificial Sequence: Synthetic oligonucleotide
  Sense strand starting at position 2487 of SEQ ID NO: 914028
caguaaagcccagagcauu

SEQ ID NO: 972453 - RNA, 19 nt, Artificial Sequence
  Description of Artificial Sequence: Synthetic oligonucleotide
  Antisense strand to SEQ ID NO: 972452
aaugcucugggcuuuacug

SEQ ID NO: 972454 - RNA, 19 nt, Artificial Sequence
  Description of Artificial Sequence: Synthetic oligonucleotide
  Sense strand starting at position 2702 of SEQ ID NO: 914028
cugggaacaguucaguguu

SEQ ID NO: 972455 - RNA, 19 nt, Artificial Sequence
  Description of Artificial Sequence: Synthetic oligonucleotide
  Antisense strand to SEQ ID NO: 972454
aacacugaacuguucccag

SEQ ID NO: 972456 - RNA, 19 nt, Artificial Sequence
  Description of Artificial Sequence: Synthetic oligonucleotide
  Sense strand starting at position 2581 of SEQ ID NO: 914028
guuuaagaaauccgaucug

SEQ ID NO: 972457 - RNA, 19 nt, Artificial Sequence
  Description of Artificial Sequence: Synthetic oligonucleotide
  Antisense strand to SEQ ID NO: 972456
cagaucggauuucuuaaac

SEQ ID NO: 972458 - RNA, 19 nt, Artificial Sequence
  Description of Artificial Sequence: Synthetic oligonucleotide
  Sense strand starting at position 3373 of SEQ ID NO: 914028
agaacucgagugugaauca

SEQ ID NO: 972459 - RNA, 19 nt, Artificial Sequence
  Description of Artificial Sequence: Synthetic oligonucleotide
  Antisense strand to SEQ ID NO: 972458
ugauucacacucgaguucu

SEQ ID NO: 972460 - RNA, 19 nt, Artificial Sequence
  Description of Artificial Sequence: Synthetic oligonucleotide
  Sense strand starting at position 3651 of SEQ ID NO: 914028
gguacugagguuugggauu

SEQ ID NO: 972461 - RNA, 19 nt, Artificial Sequence
  Description of Artificial Sequence: Synthetic oligonucleotide
  Antisense strand to SEQ ID NO: 972460
aaucccaaaccucaguacc

SEQ ID NO: 972462 - RNA, 19 nt, Artificial Sequence
  Description of Artificial Sequence: Synthetic oligonucleotide
  Sense strand starting at position 66 of SEQ ID NO: 914028
cgaugacuucugugaagac

SEQ ID NO: 972463 - RNA, 19 nt, Artificial Sequence
  Description of Artificial Sequence: Synthetic oligonucleotide
  Antisense strand to SEQ ID NO: 972462
gucuucacagaagucaucg

SEQ ID NO: 972464 - RNA, 19 nt, Artificial Sequence
  Description of Artificial Sequence: Synthetic oligonucleotide
  Sense strand starting at position 1487 of SEQ ID NO: 914028
acagacagcgauugugaga

SEQ ID NO: 972465 - RNA, 19 nt, Artificial Sequence
  Description of Artificial Sequence: Synthetic oligonucleotide
  Antisense strand to SEQ ID NO: 972464
ucucacaaucgcugucugu

SEQ ID NO: 972466 - RNA, 19 nt, Artificial Sequence
  Description of Artificial Sequence: Synthetic oligonucleotide
  Sense strand starting at position 2950 of SEQ ID NO: 914028
aaaucagccugggauuuga

SEQ ID NO: 972467 - RNA, 19 nt, Artificial Sequence
  Description of Artificial Sequence: Synthetic oligonucleotide
  Antisense strand to SEQ ID NO: 972466
ucaaaucccaggcugauuu

SEQ ID NO: 972468 - RNA, 19 nt, Artificial Sequence
  Description of Artificial Sequence: Synthetic oligonucleotide
  Sense strand starting at position 2604 of SEQ ID NO: 914028
auaagaaguuagucuuucu

SEQ ID NO: 972469 - RNA, 19 nt, Artificial Sequence
  Description of Artificial Sequence: Synthetic oligonucleotide
  Antisense strand to SEQ ID NO: 972468
agaaagacuaacuucuuau

SEQ ID NO: 972470 - RNA, 19 nt, Artificial Sequence
  Description of Artificial Sequence: Synthetic oligonucleotide
  Sense strand starting at position 3383 of SEQ ID NO: 914028
ugugaaucauucucucuga

SEQ ID NO: 972471 - RNA, 19 nt, Artificial Sequence
  Description of Artificial Sequence: Synthetic oligonucleotide
  Antisense strand to SEQ ID NO: 972470
ucagagagaaugauucaca

SEQ ID NO: 972472 - RNA, 19 nt, Artificial Sequence
  Description of Artificial Sequence: Synthetic oligonucleotide
  Sense strand starting at position 3384 of SEQ ID NO: 914028
gugaaucauucucucugac

SEQ ID NO: 972473 - RNA, 19 nt, Artificial Sequence
  Description of Artificial Sequence: Synthetic oligonucleotide
  Antisense strand to SEQ ID NO: 972472
gucagagagaaugauucac

SEQ ID NO: 972474 - RNA, 19 nt, Artificial Sequence
  Description of Artificial Sequence: Synthetic oligonucleotide
  Sense strand starting at position 3371 of SEQ ID NO: 914028
ccagaacucgagugugaau

SEQ ID NO: 972475 - RNA, 19 nt, Artificial Sequence
  Description of Artificial Sequence: Synthetic oligonucleotide
  Antisense strand to SEQ ID NO: 972474
auucacacucgaguucugg

SEQ ID NO: 972476 - RNA, 19 nt, Artificial Sequence
  Description of Artificial Sequence: Synthetic oligonucleotide
  Sense strand starting at position 32 of SEQ ID NO: 914028
uugggcuccucaucaauua

SEQ ID NO: 972477 - RNA, 19 nt, Artificial Sequence
  Description of Artificial Sequence: Synthetic oligonucleotide
  Antisense strand to SEQ ID NO: 972476
uaauugaugaggagcccaa

SEQ ID NO: 972478 - RNA, 19 nt, Artificial Sequence
  Description of Artificial Sequence: Synthetic oligonucleotide
  Sense strand starting at position 3813 of SEQ ID NO: 914028
gcuuguaagcgagaacaug

SEQ ID NO: 972479 - RNA, 19 nt, Artificial Sequence
  Description of Artificial Sequence: Synthetic oligonucleotide
  Antisense strand to SEQ ID NO: 972478
cauguucucgcuuacaagc

SEQ ID NO: 972480 - RNA, 19 nt, Artificial Sequence
  Description of Artificial Sequence: Synthetic oligonucleotide
  Sense strand starting at position 3426 of SEQ ID NO: 914028
caugacuggcucugaguga

SEQ ID NO: 972481 - RNA, 19 nt, Artificial Sequence
  Description of Artificial Sequence: Synthetic oligonucleotide
  Antisense strand to SEQ ID NO: 972480
ucacucagagccagucaug

SEQ ID NO: 972482 - RNA, 19 nt, Artificial Sequence
  Description of Artificial Sequence: Synthetic oligonucleotide
  Sense strand starting at position 3380 of SEQ ID NO: 914028
gagugugaaucauucucuc

SEQ ID NO: 972483 - RNA, 19 nt, Artificial Sequence
  Description of Artificial Sequence: Synthetic oligonucleotide
  Antisense strand to SEQ ID NO: 972482
gagagaaugauucacacuc

SEQ ID NO: 972484 - RNA, 19 nt, Artificial Sequence
  Description of Artificial Sequence: Synthetic oligonucleotide
  Sense strand starting at position 3482 of SEQ ID NO: 914028
cacccauugugggcucaga

SEQ ID NO: 972485 - RNA, 19 nt, Artificial Sequence
  Description of Artificial Sequence: Synthetic oligonucleotide
  Antisense strand to SEQ ID NO: 972484
ucugagcccacaaugggug

SEQ ID NO: 972486 - RNA, 19 nt, Artificial Sequence
  Description of Artificial Sequence: Synthetic oligonucleotide
  Sense strand starting at position 1219 of SEQ ID NO: 914029
cugacuacuccuggaaaca

SEQ ID NO: 972487 - RNA, 19 nt, Artificial Sequence
  Description of Artificial Sequence: Synthetic oligonucleotide
  Antisense strand to SEQ ID NO: 972486
uguuuccaggaguagucag

SEQ ID NO: 972488 - RNA, 19 nt, Artificial Sequence
  Description of Artificial Sequence: Synthetic oligonucleotide
  Sense strand starting at position 2822 of SEQ ID NO: 914029
ugggacuucggguaaauau

SEQ ID NO: 972489 - RNA, 19 nt, Artificial Sequence
  Description of Artificial Sequence: Synthetic oligonucleotide
  Antisense strand to SEQ ID NO: 972488
auauuuacccgaaguccca

SEQ ID NO: 972490 - RNA, 19 nt, Artificial Sequence
  Description of Artificial Sequence: Synthetic oligonucleotide
  Sense strand starting at position 3850 of SEQ ID NO: 914029
gaaucauaucgguaauauu

SEQ ID NO: 972491 - RNA, 19 nt, Artificial Sequence
  Description of Artificial Sequence: Synthetic oligonucleotide
  Antisense strand to SEQ ID NO: 972490
aauauuaccgauaugauuc

SEQ ID NO: 972492 - RNA, 19 nt, Artificial Sequence
  Description of Artificial Sequence: Synthetic oligonucleotide
  Sense strand starting at position 3042 of SEQ ID NO: 914029
gaggauuaaggacgucaug

SEQ ID NO: 972493 - RNA, 19 nt, Artificial Sequence
  Description of Artificial Sequence: Synthetic oligonucleotide
  Antisense strand to SEQ ID NO: 972492
caugacguccuuaauccuc

SEQ ID NO: 972494 - RNA, 19 nt, Artificial Sequence
  Description of Artificial Sequence: Synthetic oligonucleotide
  Sense strand starting at position 3849 of SEQ ID NO: 914029
agaaucauaucgguaauau

SEQ ID NO: 972495 - RNA, 19 nt, Artificial Sequence
  Description of Artificial Sequence: Synthetic oligonucleotide
  Antisense strand to SEQ ID NO: 972494
auauuaccgauaugauucu

SEQ ID NO: 972496 - RNA, 19 nt, Artificial Sequence
  Description of Artificial Sequence: Synthetic oligonucleotide
  Sense strand starting at position 2920 of SEQ ID NO: 914029
cuuaguccgaaggaguaua

SEQ ID NO: 972497 - RNA, 19 nt, Artificial Sequence
  Description of Artificial Sequence: Synthetic oligonucleotide
  Antisense strand to SEQ ID NO: 972496
uauacuccuucggacuaag

SEQ ID NO: 972498 - RNA, 19 nt, Artificial Sequence
  Description of Artificial Sequence: Synthetic oligonucleotide
  Sense strand starting at position 2862 of SEQ ID NO: 914029
uugggugucaaauagaguu

SEQ ID NO: 972499 - RNA, 19 nt, Artificial Sequence
  Description of Artificial Sequence: Synthetic oligonucleotide
  Antisense strand to SEQ ID NO: 972498
aacucuauuugacacccaa

SEQ ID NO: 972500 - RNA, 19 nt, Artificial Sequence
  Description of Artificial Sequence: Synthetic oligonucleotide
  Sense strand starting at position 2855 of SEQ ID NO: 914029
uaauuaauugggugucaaa

SEQ ID NO: 972501 - RNA, 19 nt, Artificial Sequence
  Description of Artificial Sequence: Synthetic oligonucleotide
  Antisense strand to SEQ ID NO: 972500
uuugacacccaauuaauua

SEQ ID NO: 972502 - RNA, 19 nt, Artificial Sequence
  Description of Artificial Sequence: Synthetic oligonucleotide
  Sense strand starting at position 666 of SEQ ID NO: 914029
augacuagccugggaucau

SEQ ID NO: 972503 - RNA, 19 nt, Artificial Sequence
  Description of Artificial Sequence: Synthetic oligonucleotide
  Antisense strand to SEQ ID NO: 972502
augaucccaggcuagucau

SEQ ID NO: 972504 - RNA, 19 nt, Artificial Sequence
  Description of Artificial Sequence: Synthetic oligonucleotide
  Sense strand starting at position 3346 of SEQ ID NO: 914029
cucaguguuguauacaaga

SEQ ID NO: 972505 - RNA, 19 nt, Artificial Sequence
  Description of Artificial Sequence: Synthetic oligonucleotide
  Antisense strand to SEQ ID NO: 972504
ucuuguauacaacacugag

SEQ ID NO: 972506 - RNA, 19 nt, Artificial Sequence
  Description of Artificial Sequence: Synthetic oligonucleotide
  Sense strand starting at position 2854 of SEQ ID NO: 914029
guaauuaauugggugucaa

SEQ ID NO: 972507 - RNA, 19 nt, Artificial Sequence
  Description of Artificial Sequence: Synthetic oligonucleotide
  Antisense strand to SEQ ID NO: 972506
uugacacccaauuaauuac

SEQ ID NO: 972508 - RNA, 19 nt, Artificial Sequence
  Description of Artificial Sequence: Synthetic oligonucleotide
  Sense strand starting at position 1082 of SEQ ID NO: 914029
acccaucuauuugaguaua

SEQ ID NO: 972509 - RNA, 19 nt, Artificial Sequence
  Description of Artificial Sequence: Synthetic oligonucleotide
  Antisense strand to SEQ ID NO: 972508
uauacucaaauagaugggu

SEQ ID NO: 972510 - RNA, 19 nt, Artificial Sequence
  Description of Artificial Sequence: Synthetic oligonucleotide
  Sense strand starting at position 936 of SEQ ID NO: 914029
cguuuagcucacuaaacug

SEQ ID NO: 972511 - RNA, 19 nt, Artificial Sequence
  Description of Artificial Sequence: Synthetic oligonucleotide
  Antisense strand to SEQ ID NO: 972510
caguuuagugagcuaaacg

SEQ ID NO: 972512 - RNA, 19 nt, Artificial Sequence
  Description of Artificial Sequence: Synthetic oligonucleotide
  Sense strand starting at position 2928 of SEQ ID NO: 914029
gaaggaguauaccaagaaa

SEQ ID NO: 972513 - RNA, 19 nt, Artificial Sequence
  Description of Artificial Sequence: Synthetic oligonucleotide
  Antisense strand to SEQ ID NO: 972512
uuucuugguauacuccuuc

SEQ ID NO: 972514 - RNA, 19 nt, Artificial Sequence
  Description of Artificial Sequence: Synthetic oligonucleotide
  Sense strand starting at position 933 of SEQ ID NO: 914029
ucucguuuagcucacuaaa

SEQ ID NO: 972515 - RNA, 19 nt, Artificial Sequence
  Description of Artificial Sequence: Synthetic oligonucleotide
  Antisense strand to SEQ ID NO: 972514
uuuagugagcuaaacgaga

SEQ ID NO: 972516 - RNA, 19 nt, Artificial Sequence
  Description of Artificial Sequence: Synthetic oligonucleotide
  Sense strand starting at position 2696 of SEQ ID NO: 914029
cgagguuaagcguaagauu

SEQ ID NO: 972517 - RNA, 19 nt, Artificial Sequence
  Description of Artificial Sequence: Synthetic oligonucleotide
  Antisense strand to SEQ ID NO: 972516
aaucuuacgcuuaaccucg

SEQ ID NO: 972518 - RNA, 19 nt, Artificial Sequence
  Description of Artificial Sequence: Synthetic oligonucleotide
  Sense strand starting at position 3373 of SEQ ID NO: 914029
acguuauucugaguuugaa

SEQ ID NO: 972519 - RNA, 19 nt, Artificial Sequence
  Description of Artificial Sequence: Synthetic oligonucleotide
  Antisense strand to SEQ ID NO: 972518
uucaaacucagaauaacgu

SEQ ID NO: 972520 - RNA, 19 nt, Artificial Sequence
  Description of Artificial Sequence: Synthetic oligonucleotide
  Sense strand starting at position 3861 of SEQ ID NO: 914029
guaauauuaucugcagcaa

SEQ ID NO: 972521 - RNA, 19 nt, Artificial Sequence
  Description of Artificial Sequence: Synthetic oligonucleotide
  Antisense strand to SEQ ID NO: 972520
uugcugcagauaauauuac

SEQ ID NO: 972522 - RNA, 19 nt, Artificial Sequence
  Description of Artificial Sequence: Synthetic oligonucleotide
  Sense strand starting at position 3309 of SEQ ID NO: 914029
acuacaaucucagauagga

SEQ ID NO: 972523 - RNA, 19 nt, Artificial Sequence
  Description of Artificial Sequence: Synthetic oligonucleotide
  Antisense strand to SEQ ID NO: 972522
uccuaucugagauuguagu

SEQ ID NO: 972524 - RNA, 19 nt, Artificial Sequence
  Description of Artificial Sequence: Synthetic oligonucleotide
  Sense strand starting at position 2915 of SEQ ID NO: 914029
gacgucuuaguccgaagga

SEQ ID NO: 972525 - RNA, 19 nt, Artificial Sequence
  Description of Artificial Sequence: Synthetic oligonucleotide
  Antisense strand to SEQ ID NO: 972524
uccuucggacuaagacguc

SEQ ID NO: 972526 - RNA, 19 nt, Artificial Sequence
  Description of Artificial Sequence: Synthetic oligonucleotide
  Sense strand starting at position 2762 of SEQ ID NO: 914029
uauaaagccucggucuuua

SEQ ID NO: 972527 - RNA, 19 nt, Artificial Sequence
  Description of Artificial Sequence: Synthetic oligonucleotide
  Antisense strand to SEQ ID NO: 972526
uaaagaccgaggcuuuaua

SEQ ID NO: 972528 - RNA, 19 nt, Artificial Sequence
  Description of Artificial Sequence: Synthetic oligonucleotide
  Sense strand starting at position 1138 of SEQ ID NO: 914029
auccauaugccuggcucua

SEQ ID NO: 972529 - RNA, 19 nt, Artificial Sequence
  Description of Artificial Sequence: Synthetic oligonucleotide
  Antisense strand to SEQ ID NO: 972528
uagagccaggcauauggau

SEQ ID NO: 972530 - RNA, 19 nt, Artificial Sequence
  Description of Artificial Sequence: Synthetic oligonucleotide
  Sense strand starting at position 649 of SEQ ID NO: 914029
uaugaaagguuugagagau

SEQ ID NO: 972531 - RNA, 19 nt, Artificial Sequence
  Description of Artificial Sequence: Synthetic oligonucleotide
  Antisense strand to SEQ ID NO: 972530
aucucucaaaccuuucaua

SEQ ID NO: 972532 - RNA, 19 nt, Artificial Sequence
  Description of Artificial Sequence: Synthetic oligonucleotide
  Sense strand starting at position 935 of SEQ ID NO: 914029
ucguuuagcucacuaaacu

SEQ ID NO: 972533 - RNA, 19 nt, Artificial Sequence
  Description of Artificial Sequence: Synthetic oligonucleotide
  Antisense strand to SEQ ID NO: 972532
aguuuagugagcuaaacga

SEQ ID NO: 972534 - RNA, 19 nt, Artificial Sequence
  Description of Artificial Sequence: Synthetic oligonucleotide
  Sense strand starting at position 1020 of SEQ ID NO: 914029
guggaaacuuguguugcau

SEQ ID NO: 972535 - RNA, 19 nt, Artificial Sequence
  Description of Artificial Sequence: Synthetic oligonucleotide
  Antisense strand to SEQ ID NO: 972534
augcaacacaaguuuccac

SEQ ID NO: 972536 - RNA, 19 nt, Artificial Sequence
  Description of Artificial Sequence: Synthetic oligonucleotide
  Sense strand starting at position 2446 of SEQ ID NO: 914029
ggcgucuucuuaccaucaa

SEQ ID NO: 972537 - RNA, 19 nt, Artificial Sequence
  Description of Artificial Sequence: Synthetic oligonucleotide
  Antisense strand to SEQ ID NO: 972536
uugaugguaagaagacgcc

SEQ ID NO: 972538 - RNA, 19 nt, Artificial Sequence
  Description of Artificial Sequence: Synthetic oligonucleotide
  Sense strand starting at position 3260 of SEQ ID NO: 914029
ccaaaugucucacaagaag

SEQ ID NO: 972539 - RNA, 19 nt, Artificial Sequence
  Description of Artificial Sequence: Synthetic oligonucleotide
  Antisense strand to SEQ ID NO: 972538
cuucuugugagacauuugg

SEQ ID NO: 972540 - RNA, 19 nt, Artificial Sequence
  Description of Artificial Sequence: Synthetic oligonucleotide
  Sense strand starting at position 2761 of SEQ ID NO: 914029
cuauaaagccucggucuuu

SEQ ID NO: 972541 - RNA, 19 nt, Artificial Sequence
  Description of Artificial Sequence: Synthetic oligonucleotide
  Antisense strand to SEQ ID NO: 972540
aaagaccgaggcuuuauag

SEQ ID NO: 972542 - RNA, 19 nt, Artificial Sequence
  Description of Artificial Sequence: Synthetic oligonucleotide
  Sense strand starting at position 3339 of SEQ ID NO: 914029
caugcaacucaguguugua

SEQ ID NO: 972543 - RNA, 19 nt, Artificial Sequence
  Description of Artificial Sequence: Synthetic oligonucleotide
  Antisense strand to SEQ ID NO: 972542
uacaacacugaguugcaug

SEQ ID NO: 972544 - RNA, 19 nt, Artificial Sequence
  Description of Artificial Sequence: Synthetic oligonucleotide
  Sense strand starting at position 896 of SEQ ID NO: 914029
gcagcaccuugcuuaacua

SEQ ID NO: 972545 - RNA, 19 nt, Artificial Sequence
  Description of Artificial Sequence: Synthetic oligonucleotide
  Antisense strand to SEQ ID NO: 972544
uaguuaagcaaggugcugc

SEQ ID NO: 972546 - RNA, 19 nt, Artificial Sequence
  Description of Artificial Sequence: Synthetic oligonucleotide
  Sense strand starting at position 1100 of SEQ ID NO: 914029
augcgaaucuugcccuuau

SEQ ID NO: 972547 - RNA, 19 nt, Artificial Sequence
  Description of Artificial Sequence: Synthetic oligonucleotide
  Antisense strand to SEQ ID NO: 972546
auaagggcaagauucgcau

SEQ ID NO: 972548 - RNA, 19 nt, Artificial Sequence
  Description of Artificial Sequence: Synthetic oligonucleotide
  Sense strand starting at position 3368 of SEQ ID NO: 914029
ugcuaacguuauucugagu

SEQ ID NO: 972549 - RNA, 19 nt, Artificial Sequence
  Description of Artificial Sequence: Synthetic oligonucleotide
  Antisense strand to SEQ ID NO: 972548
acucagaauaacguuagca

SEQ ID NO: 972550 - RNA, 19 nt, Artificial Sequence
  Description of Artificial Sequence: Synthetic oligonucleotide
  Sense strand starting at position 3489 of SEQ ID NO: 914029
agcauuaaguaagauuaag

SEQ ID NO: 972551 - RNA, 19 nt, Artificial Sequence
  Description of Artificial Sequence: Synthetic oligonucleotide
  Antisense strand to SEQ ID NO: 972550
cuuaaucuuacuuaaugcu

SEQ ID NO: 972552 - RNA, 19 nt, Artificial Sequence
  Description of Artificial Sequence: Synthetic oligonucleotide
  Sense strand starting at position 2912 of SEQ ID NO: 914029
gcagacgucuuaguccgaa

SEQ ID NO: 972553 - RNA, 19 nt, Artificial Sequence
  Description of Artificial Sequence: Synthetic oligonucleotide
  Antisense strand to SEQ ID NO: 972552
uucggacuaagacgucugc

SEQ ID NO: 972554 - RNA, 19 nt, Artificial Sequence
  Description of Artificial Sequence: Synthetic oligonucleotide
  Sense strand starting at position 1101 of SEQ ID NO: 914029
ugcgaaucuugcccuuauc

SEQ ID NO: 972555 - RNA, 19 nt, Artificial Sequence
  Description of Artificial Sequence: Synthetic oligonucleotide
  Antisense strand to SEQ ID NO: 972554
gauaagggcaagauucgca

SEQ ID NO: 972556 - RNA, 19 nt, Artificial Sequence
  Description of Artificial Sequence: Synthetic oligonucleotide
  Sense strand starting at position 508 of SEQ ID NO: 914029
acgcccuugucaguuuaau

SEQ ID NO: 972557 - RNA, 19 nt, Artificial Sequence
  Description of Artificial Sequence: Synthetic oligonucleotide
  Antisense strand to SEQ ID NO: 972556
auuaaacugacaagggcgu

SEQ ID NO: 972558 - RNA, 19 nt, Artificial Sequence
  Description of Artificial Sequence: Synthetic oligonucleotide
  Sense strand starting at position 2760 of SEQ ID NO: 914029
gcuauaaagccucggucuu

SEQ ID NO: 972559 - RNA, 19 nt, Artificial Sequence
  Description of Artificial Sequence: Synthetic oligonucleotide
  Antisense strand to SEQ ID NO: 972558
aagaccgaggcuuuauagc

SEQ ID NO: 972560 - RNA, 19 nt, Artificial Sequence
  Description of Artificial Sequence: Synthetic oligonucleotide
  Sense strand starting at position 603 of SEQ ID NO: 914029
accuguaauuuaggcgaau

SEQ ID NO: 972561 - RNA, 19 nt, Artificial Sequence
  Description of Artificial Sequence: Synthetic oligonucleotide
  Antisense strand to SEQ ID NO: 972560
auucgccuaaauuacaggu

SEQ ID NO: 972562 - RNA, 19 nt, Artificial Sequence
  Description of Artificial Sequence: Synthetic oligonucleotide
  Sense strand starting at position 862 of SEQ ID NO: 914029
cgcacaaccugcucuguua

SEQ ID NO: 972563 - RNA, 19 nt, Artificial Sequence
  Description of Artificial Sequence: Synthetic oligonucleotide
  Antisense strand to SEQ ID NO: 972562
uaacagagcagguugugcg

SEQ ID NO: 972564 - RNA, 19 nt, Artificial Sequence
  Description of Artificial Sequence: Synthetic oligonucleotide
  Sense strand starting at position 2858 of SEQ ID NO: 914029
uuaauugggugucaaauag

SEQ ID NO: 972565 - RNA, 19 nt, Artificial Sequence
  Description of Artificial Sequence: Synthetic oligonucleotide
  Antisense strand to SEQ ID NO: 972564
cuauuugacacccaauuaa

SEQ ID NO: 972566 - RNA, 19 nt, Artificial Sequence
  Description of Artificial Sequence: Synthetic oligonucleotide
  Sense strand starting at position 859 of SEQ ID NO: 914030
cugacuacuccuggaaaca

SEQ ID NO: 972567 - RNA, 19 nt, Artificial Sequence
  Description of Artificial Sequence: Synthetic oligonucleotide
  Antisense strand to SEQ ID NO: 972566
uguuuccaggaguagucag

SEQ ID NO: 972568 - RNA, 19 nt, Artificial Sequence
  Description of Artificial Sequence: Synthetic oligonucleotide
  Sense strand starting at position 2462 of SEQ ID NO: 914030
ugggacuucggguaaauau

SEQ ID NO: 972569 - RNA, 19 nt, Artificial Sequence
  Description of Artificial Sequence: Synthetic oligonucleotide
  Antisense strand to SEQ ID NO: 972568
auauuuacccgaaguccca

SEQ ID NO: 972570 - RNA, 19 nt, Artificial Sequence
  Description of Artificial Sequence: Synthetic oligonucleotide
  Sense strand starting at position 3490 of SEQ ID NO: 914030
gaaucauaucgguaauauu

SEQ ID NO: 972571 - RNA, 19 nt, Artificial Sequence
  Description of Artificial Sequence: Synthetic oligonucleotide
  Antisense strand to SEQ ID NO: 972570
aauauuaccgauaugauuc

SEQ ID NO: 972572 - RNA, 19 nt, Artificial Sequence
  Description of Artificial Sequence: Synthetic oligonucleotide
  Sense strand starting at position 2682 of SEQ ID NO: 914030
gaggauuaaggacgucaug

SEQ ID NO: 972573 - RNA, 19 nt, Artificial Sequence
  Description of Artificial Sequence: Synthetic oligonucleotide
  Antisense strand to SEQ ID NO: 972572
caugacguccuuaauccuc

SEQ ID NO: 972574 - RNA, 19 nt, Artificial Sequence
  Description of Artificial Sequence: Synthetic oligonucleotide
  Sense strand starting at position 3765 of SEQ ID NO: 914030
ugugcaagaaacuggaaau

SEQ ID NO: 972575 - RNA, 19 nt, Artificial Sequence
  Description of Artificial Sequence: Synthetic oligonucleotide
  Antisense strand to SEQ ID NO: 972574
auuuccaguuucuugcaca

SEQ ID NO: 972576 - RNA, 19 nt, Artificial Sequence
  Description of Artificial Sequence: Synthetic oligonucleotide
  Sense strand starting at position 3809 of SEQ ID NO: 914030
gacguacuuggucaauaaa

SEQ ID NO: 972577 - RNA, 19 nt, Artificial Sequence
  Description of Artificial Sequence: Synthetic oligonucleotide
  Antisense strand to SEQ ID NO: 972576
uuuauugaccaaguacguc

SEQ ID NO: 972578 - RNA, 19 nt, Artificial Sequence
  Description of Artificial Sequence: Synthetic oligonucleotide
  Sense strand starting at position 3876 of SEQ ID NO: 914030
gauagaaggugucuagacu

SEQ ID NO: 972579 - RNA, 19 nt, Artificial Sequence
  Description of Artificial Sequence: Synthetic oligonucleotide
  Antisense strand to SEQ ID NO: 972578
agucuagacaccuucuauc

SEQ ID NO: 972580 - RNA, 19 nt, Artificial Sequence
  Description of Artificial Sequence: Synthetic oligonucleotide
  Sense strand starting at position 3489 of SEQ ID NO: 914030
agaaucauaucgguaauau

SEQ ID NO: 972581 - RNA, 19 nt, Artificial Sequence
  Description of Artificial Sequence: Synthetic oligonucleotide
  Antisense strand to SEQ ID NO: 972580
auauuaccgauaugauucu

SEQ ID NO: 972582 - RNA, 19 nt, Artificial Sequence
  Description of Artificial Sequence: Synthetic oligonucleotide
  Sense strand starting at position 2560 of SEQ ID NO: 914030
cuuaguccgaaggaguaua

SEQ ID NO: 972583 - RNA, 19 nt, Artificial Sequence
  Description of Artificial Sequence: Synthetic oligonucleotide
  Antisense strand to SEQ ID NO: 972582
uauacuccuucggacuaag

SEQ ID NO: 972584 - RNA, 19 nt, Artificial Sequence
  Description of Artificial Sequence: Synthetic oligonucleotide
  Sense strand starting at position 2502 of SEQ ID NO: 914030
uugggugucaaauagaguu

SEQ ID NO: 972585 - RNA, 19 nt, Artificial Sequence
  Description of Artificial Sequence: Synthetic oligonucleotide
  Antisense strand to SEQ ID NO: 972584
aacucuauuugacacccaa

SEQ ID NO: 972586 - RNA, 19 nt, Artificial Sequence
  Description of Artificial Sequence: Synthetic oligonucleotide
  Sense strand starting at position 2495 of SEQ ID NO: 914030
uaauuaauugggugucaaa

SEQ ID NO: 972587 - RNA, 19 nt, Artificial Sequence
  Description of Artificial Sequence: Synthetic oligonucleotide
  Antisense strand to SEQ ID NO: 972586
uuugacacccaauuaauua

SEQ ID NO: 972588 - RNA, 19 nt, Artificial Sequence
  Description of Artificial Sequence: Synthetic oligonucleotide
  Sense strand starting at position 306 of SEQ ID NO: 914030
augacuagccugggaucau

SEQ ID NO: 972589 - RNA, 19 nt, Artificial Sequence
  Description of Artificial Sequence: Synthetic oligonucleotide
  Antisense strand to SEQ ID NO: 972588
augaucccaggcuagucau

SEQ ID NO: 972590 - RNA, 19 nt, Artificial Sequence
  Description of Artificial Sequence: Synthetic oligonucleotide
  Sense strand starting at position 2986 of SEQ ID NO: 914030
cucaguguuguauacaaga

SEQ ID NO: 972591 - RNA, 19 nt, Artificial Sequence
  Description of Artificial Sequence: Synthetic oligonucleotide
  Antisense strand to SEQ ID NO: 972590
ucuuguauacaacacugag

SEQ ID NO: 972592 - RNA, 19 nt, Artificial Sequence
  Description of Artificial Sequence: Synthetic oligonucleotide
  Sense strand starting at position 3968 of SEQ ID NO: 914030
ggacuuccuccagguugaa

SEQ ID NO: 972593 - RNA, 19 nt, Artificial Sequence
  Description of Artificial Sequence: Synthetic oligonucleotide
  Antisense strand to SEQ ID NO: 972592
uucaaccuggaggaagucc

SEQ ID NO: 972594 - RNA, 19 nt, Artificial Sequence
  Description of Artificial Sequence: Synthetic oligonucleotide
  Sense strand starting at position 3760 of SEQ ID NO: 914030
gcacuugugcaagaaacug

SEQ ID NO: 972595 - RNA, 19 nt, Artificial Sequence
  Description of Artificial Sequence: Synthetic oligonucleotide
  Antisense strand to SEQ ID NO: 972594
caguuucuugcacaagugc

SEQ ID NO: 972596 - RNA, 19 nt, Artificial Sequence
  Description of Artificial Sequence: Synthetic oligonucleotide
  Sense strand starting at position 2494 of SEQ ID NO: 914030
guaauuaauugggugucaa

SEQ ID NO: 972597 - RNA, 19 nt, Artificial Sequence
  Description of Artificial Sequence: Synthetic oligonucleotide
  Antisense strand to SEQ ID NO: 972596
uugacacccaauuaauuac

SEQ ID NO: 972598 - RNA, 19 nt, Artificial Sequence
  Description of Artificial Sequence: Synthetic oligonucleotide
  Sense strand starting at position 3808 of SEQ ID NO: 914030
ggacguacuuggucaauaa

SEQ ID NO: 972599 - RNA, 19 nt, Artificial Sequence
  Description of Artificial Sequence: Synthetic oligonucleotide
  Antisense strand to SEQ ID NO: 972598
uuauugaccaaguacgucc

SEQ ID NO: 972600 - RNA, 19 nt, Artificial Sequence
  Description of Artificial Sequence: Synthetic oligonucleotide
  Sense strand starting at position 3838 of SEQ ID NO: 914030
aguaauagcguguaaacag

SEQ ID NO: 972601 - RNA, 19 nt, Artificial Sequence
  Description of Artificial Sequence: Synthetic oligonucleotide
  Antisense strand to SEQ ID NO: 972600
cuguuuacacgcuauuacu

SEQ ID NO: 972602 - RNA, 19 nt, Artificial Sequence
  Description of Artificial Sequence: Synthetic oligonucleotide
  Sense strand starting at position 722 of SEQ ID NO: 914030
acccaucuauuugaguaua

SEQ ID NO: 972603 - RNA, 19 nt, Artificial Sequence
  Description of Artificial Sequence: Synthetic oligonucleotide
  Antisense strand to SEQ ID NO: 972602
uauacucaaauagaugggu

SEQ ID NO: 972604 - RNA, 19 nt, Artificial Sequence
  Description of Artificial Sequence: Synthetic oligonucleotide
  Sense strand starting at position 3672 of SEQ ID NO: 914030
ggauuuagcucagagagua

SEQ ID NO: 972605 - RNA, 19 nt, Artificial Sequence
  Description of Artificial Sequence: Synthetic oligonucleotide
  Antisense strand to SEQ ID NO: 972604
uacucucugagcuaaaucc

SEQ ID NO: 972606 - RNA, 19 nt, Artificial Sequence
  Description of Artificial Sequence: Synthetic oligonucleotide
  Sense strand starting at position 576 of SEQ ID NO: 914030
cguuuagcucacuaaacug

SEQ ID NO: 972607 - RNA, 19 nt, Artificial Sequence
  Description of Artificial Sequence: Synthetic oligonucleotide
  Antisense strand to SEQ ID NO: 972606
caguuuagugagcuaaacg

SEQ ID NO: 972608 - RNA, 19 nt, Artificial Sequence
  Description of Artificial Sequence: Synthetic oligonucleotide
  Sense strand starting at position 2568 of SEQ ID NO: 914030
gaaggaguauaccaagaaa

SEQ ID NO: 972609 - RNA, 19 nt, Artificial Sequence
  Description of Artificial Sequence: Synthetic oligonucleotide
  Antisense strand to SEQ ID NO: 972608
uuucuugguauacuccuuc

SEQ ID NO: 972610 - RNA, 19 nt, Artificial Sequence
  Description of Artificial Sequence: Synthetic oligonucleotide
  Sense strand starting at position 3756 of SEQ ID NO: 914030
uuaagcacuugugcaagaa

SEQ ID NO: 972611 - RNA, 19 nt, Artificial Sequence
  Description of Artificial Sequence: Synthetic oligonucleotide
  Antisense strand to SEQ ID NO: 972610
uucuugcacaagugcuuaa

SEQ ID NO: 972612 - RNA, 19 nt, Artificial Sequence
  Description of Artificial Sequence: Synthetic oligonucleotide
  Sense strand starting at position 573 of SEQ ID NO: 914030
ucucguuuagcucacuaaa

SEQ ID NO: 972613 - RNA, 19 nt, Artificial Sequence
  Description of Artificial Sequence: Synthetic oligonucleotide
  Antisense strand to SEQ ID NO: 972612
uuuagugagcuaaacgaga

SEQ ID NO: 972614 - RNA, 19 nt, Artificial Sequence
  Description of Artificial Sequence: Synthetic oligonucleotide
  Sense strand starting at position 2336 of SEQ ID NO: 914030
cgagguuaagcguaagauu

SEQ ID NO: 972615 - RNA, 19 nt, Artificial Sequence
  Description of Artificial Sequence: Synthetic oligonucleotide
  Antisense strand to SEQ ID NO: 972614
aaucuuacgcuuaaccucg

SEQ ID NO: 972616 - RNA, 19 nt, Artificial Sequence
  Description of Artificial Sequence: Synthetic oligonucleotide
  Sense strand starting at position 3013 of SEQ ID NO: 914030
acguuauucugaguuugaa

SEQ ID NO: 972617 - RNA, 19 nt, Artificial Sequence
  Description of Artificial Sequence: Synthetic oligonucleotide
  Antisense strand to SEQ ID NO: 972616
uucaaacucagaauaacgu

SEQ ID NO: 972618 - RNA, 19 nt, Artificial Sequence
  Description of Artificial Sequence: Synthetic oligonucleotide
  Sense strand starting at position 3501 of SEQ ID NO: 914030
guaauauuaucugcagcaa

SEQ ID NO: 972619 - RNA, 19 nt, Artificial Sequence
  Description of Artificial Sequence: Synthetic oligonucleotide
  Antisense strand to SEQ ID NO: 972618
uugcugcagauaauauuac

SEQ ID NO: 972620 - RNA, 19 nt, Artificial Sequence
  Description of Artificial Sequence: Synthetic oligonucleotide
  Sense strand starting at position 2949 of SEQ ID NO: 914030
acuacaaucucagauagga

SEQ ID NO: 972621 - RNA, 19 nt, Artificial Sequence
  Description of Artificial Sequence: Synthetic oligonucleotide
  Antisense strand to SEQ ID NO: 972620
uccuaucugagauuguagu

SEQ ID NO: 972622 - RNA, 19 nt, Artificial Sequence
  Description of Artificial Sequence: Synthetic oligonucleotide
  Sense strand starting at position 2555 of SEQ ID NO: 914030
gacgucuuaguccgaagga

SEQ ID NO: 972623 - RNA, 19 nt, Artificial Sequence
  Description of Artificial Sequence: Synthetic oligonucleotide
  Antisense strand to SEQ ID NO: 972622
uccuucggacuaagacguc

SEQ ID NO: 972624 - RNA, 19 nt, Artificial Sequence
  Description of Artificial Sequence: Synthetic oligonucleotide
  Sense strand starting at position 3836 of SEQ ID NO: 914030
aaaguaauagcguguaaac

SEQ ID NO: 972625 - RNA, 19 nt, Artificial Sequence
  Description of Artificial Sequence: Synthetic oligonucleotide
  Antisense strand to SEQ ID NO: 972624
guuuacacgcuauuacuuu

SEQ ID NO: 972626 - RNA, 19 nt, Artificial Sequence
  Description of Artificial Sequence: Synthetic oligonucleotide
  Sense strand starting at position 2402 of SEQ ID NO: 914030
uauaaagccucggucuuua

SEQ ID NO: 972627 - RNA, 19 nt, Artificial Sequence
  Description of Artificial Sequence: Synthetic oligonucleotide
  Antisense strand to SEQ ID NO: 972626
uaaagaccgaggcuuuaua

SEQ ID NO: 972628 - RNA, 19 nt, Artificial Sequence
  Description of Artificial Sequence: Synthetic oligonucleotide
  Sense strand starting at position 778 of SEQ ID NO: 914030
auccauaugccuggcucua

SEQ ID NO: 972629 - RNA, 19 nt, Artificial Sequence
  Description of Artificial Sequence: Synthetic oligonucleotide
  Antisense strand to SEQ ID NO: 972628
uagagccaggcauauggau

SEQ ID NO: 972630 - RNA, 19 nt, Artificial Sequence
  Description of Artificial Sequence: Synthetic oligonucleotide
  Sense strand starting at position 289 of SEQ ID NO: 914030
uaugaaagguuugagagau

SEQ ID NO: 972631 - RNA, 19 nt, Artificial Sequence
  Description of Artificial Sequence: Synthetic oligonucleotide
  Antisense strand to SEQ ID NO: 972630
aucucucaaaccuuucaua

SEQ ID NO: 972632 - RNA, 19 nt, Artificial Sequence
  Description of Artificial Sequence: Synthetic oligonucleotide
  Sense strand starting at position 575 of SEQ ID NO: 914030
ucguuuagcucacuaaacu

SEQ ID NO: 972633 - RNA, 19 nt, Artificial Sequence
  Description of Artificial Sequence: Synthetic oligonucleotide
  Antisense strand to SEQ ID NO: 972632
aguuuagugagcuaaacga

SEQ ID NO: 972634 - RNA, 19 nt, Artificial Sequence
  Description of Artificial Sequence: Synthetic oligonucleotide
  Sense strand starting at position 660 of SEQ ID NO: 914030
guggaaacuuguguugcau

SEQ ID NO: 972635 - RNA, 19 nt, Artificial Sequence
  Description of Artificial Sequence: Synthetic oligonucleotide
  Antisense strand to SEQ ID NO: 972634
augcaacacaaguuuccac

SEQ ID NO: 972636 - RNA, 19 nt, Artificial Sequence
  Description of Artificial Sequence: Synthetic oligonucleotide
  Sense strand starting at position 2086 of SEQ ID NO: 914030
ggcgucuucuuaccaucaa

SEQ ID NO: 972637 - RNA, 19 nt, Artificial Sequence
  Description of Artificial Sequence: Synthetic oligonucleotide
  Antisense strand to SEQ ID NO: 972636
uugaugguaagaagacgcc

SEQ ID NO: 972638 - RNA, 19 nt, Artificial Sequence
  Description of Artificial Sequence: Synthetic oligonucleotide
  Sense strand starting at position 2900 of SEQ ID NO: 914030
ccaaaugucucacaagaag

SEQ ID NO: 972639 - RNA, 19 nt, Artificial Sequence
  Description of Artificial Sequence: Synthetic oligonucleotide
  Antisense strand to SEQ ID NO: 972638
cuucuugugagacauuugg

SEQ ID NO: 972640 - RNA, 19 nt, Artificial Sequence
  Description of Artificial Sequence: Synthetic oligonucleotide
  Sense strand starting at position 2401 of SEQ ID NO: 914030
cuauaaagccucggucuuu

SEQ ID NO: 972641 - RNA, 19 nt, Artificial Sequence
  Description of Artificial Sequence: Synthetic oligonucleotide
  Antisense strand to SEQ ID NO: 972640
aaagaccgaggcuuuauag

SEQ ID NO: 972642 - RNA, 19 nt, Artificial Sequence
  Description of Artificial Sequence: Synthetic oligonucleotide
  Sense strand starting at position 2979 of SEQ ID NO: 914030
caugcaacucaguguugua

SEQ ID NO: 972643 - RNA, 19 nt, Artificial Sequence
  Description of Artificial Sequence: Synthetic oligonucleotide
  Antisense strand to SEQ ID NO: 972642
uacaacacugaguugcaug

SEQ ID NO: 972644 - RNA, 19 nt, Artificial Sequence
  Description of Artificial Sequence: Synthetic oligonucleotide
  Sense strand starting at position 536 of SEQ ID NO: 914030
gcagcaccuugcuuaacua

SEQ ID NO: 972645 - RNA, 19 nt, Artificial Sequence
  Description of Artificial Sequence: Synthetic oligonucleotide
  Antisense strand to SEQ ID NO: 972644
uaguuaagcaaggugcugc

SEQ ID NO: 972646 - RNA, 19 nt, Artificial Sequence
  Description of Artificial Sequence: Synthetic oligonucleotide
  Sense strand starting at position 3929 of SEQ ID NO: 914031
cccagacuuccuuagugaa

SEQ ID NO: 972647 - RNA, 19 nt, Artificial Sequence
  Description of Artificial Sequence: Synthetic oligonucleotide
  Antisense strand to SEQ ID NO: 972646
uucacuaaggaagucuggg

SEQ ID NO: 972648 - RNA, 19 nt, Artificial Sequence
  Description of Artificial Sequence: Synthetic oligonucleotide
  Sense strand starting at position 3643 of SEQ ID NO: 914031
uagauuguuccguucguua

SEQ ID NO: 972649 - RNA, 19 nt, Artificial Sequence
  Description of Artificial Sequence: Synthetic oligonucleotide
  Antisense strand to SEQ ID NO: 972648
uaacgaacggaacaaucua

SEQ ID NO: 972650 - RNA, 19 nt, Artificial Sequence
  Description of Artificial Sequence: Synthetic oligonucleotide
  Sense strand starting at position 858 of SEQ ID NO: 914031
gcguguauuuauuuagugu

SEQ ID NO: 972651 - RNA, 19 nt, Artificial Sequence
  Description of Artificial Sequence: Synthetic oligonucleotide
  Antisense strand to SEQ ID NO: 972650
acacuaaauaaauacacgc

SEQ ID NO: 972652 - RNA, 19 nt, Artificial Sequence
  Description of Artificial Sequence: Synthetic oligonucleotide
  Sense strand starting at position 3931 of SEQ ID NO: 914031
cagacuuccuuagugaaag

SEQ ID NO: 972653 - RNA, 19 nt, Artificial Sequence
  Description of Artificial Sequence: Synthetic oligonucleotide
  Antisense strand to SEQ ID NO: 972652
cuuucacuaaggaagucug

SEQ ID NO: 972654 - RNA, 19 nt, Artificial Sequence
  Description of Artificial Sequence: Synthetic oligonucleotide
  Sense strand starting at position 3379 of SEQ ID NO: 914031
aguuucuagccucaggaaa

SEQ ID NO: 972655 - RNA, 19 nt, Artificial Sequence
  Description of Artificial Sequence: Synthetic oligonucleotide
  Antisense strand to SEQ ID NO: 972654
uuuccugaggcuagaaacu

SEQ ID NO: 972656 - RNA, 19 nt, Artificial Sequence
  Description of Artificial Sequence: Synthetic oligonucleotide
  Sense strand starting at position 450 of SEQ ID NO: 914031
uuaguauuggcugaauaau

SEQ ID NO: 972657 - RNA, 19 nt, Artificial Sequence
  Description of Artificial Sequence: Synthetic oligonucleotide
  Antisense strand to SEQ ID NO: 972656
auuauucagccaauacuaa

SEQ ID NO: 972658 - RNA, 19 nt, Artificial Sequence
  Description of Artificial Sequence: Synthetic oligonucleotide
  Sense strand starting at position 3631 of SEQ ID NO: 914031
uaguuagcucaauagauug

SEQ ID NO: 972659 - RNA, 19 nt, Artificial Sequence
  Description of Artificial Sequence: Synthetic oligonucleotide
  Antisense strand to SEQ ID NO: 972658
caaucuauugagcuaacua

SEQ ID NO: 972660 - RNA, 19 nt, Artificial Sequence
  Description of Artificial Sequence: Synthetic oligonucleotide
  Sense strand starting at position 1496 of SEQ ID NO: 914031
cuaguaccauuccugaaga

SEQ ID NO: 972661 - RNA, 19 nt, Artificial Sequence
  Description of Artificial Sequence: Synthetic oligonucleotide
  Antisense strand to SEQ ID NO: 972660
ucuucaggaaugguacuag

SEQ ID NO: 972662 - RNA, 19 nt, Artificial Sequence
  Description of Artificial Sequence: Synthetic oligonucleotide
  Sense strand starting at position 590 of SEQ ID NO: 914031
ucaguauuccaccagucaa

SEQ ID NO: 972663 - RNA, 19 nt, Artificial Sequence
  Description of Artificial Sequence: Synthetic oligonucleotide
  Antisense strand to SEQ ID NO: 972662
uugacugguggaauacuga

SEQ ID NO: 972664 - RNA, 19 nt, Artificial Sequence
  Description of Artificial Sequence: Synthetic oligonucleotide
  Sense strand starting at position 3736 of SEQ ID NO: 914031
uaaagagguguugauuguu

SEQ ID NO: 972665 - RNA, 19 nt, Artificial Sequence
  Description of Artificial Sequence: Synthetic oligonucleotide
  Antisense strand to SEQ ID NO: 972664
aacaaucaacaccucuuua

SEQ ID NO: 972666 - RNA, 19 nt, Artificial Sequence
  Description of Artificial Sequence: Synthetic oligonucleotide
  Sense strand starting at position 428 of SEQ ID NO: 914031
guacauaaauugucaauca

SEQ ID NO: 972667 - RNA, 19 nt, Artificial Sequence
  Description of Artificial Sequence: Synthetic oligonucleotide
  Antisense strand to SEQ ID NO: 972666
ugauugacaauuuauguac

SEQ ID NO: 972668 - RNA, 19 nt, Artificial Sequence
  Description of Artificial Sequence: Synthetic oligonucleotide
  Sense strand starting at position 3765 of SEQ ID NO: 914031
cacaaauguggaggcauua

SEQ ID NO: 972669 - RNA, 19 nt, Artificial Sequence
  Description of Artificial Sequence: Synthetic oligonucleotide
  Antisense strand to SEQ ID NO: 972668
uaaugccuccacauuugug

SEQ ID NO: 972670 - RNA, 19 nt, Artificial Sequence
  Description of Artificial Sequence: Synthetic oligonucleotide
  Sense strand starting at position 871 of SEQ ID NO: 914031
uaguguugucaguuucgca

SEQ ID NO: 972671 - RNA, 19 nt, Artificial Sequence
  Description of Artificial Sequence: Synthetic oligonucleotide
  Antisense strand to SEQ ID NO: 972670
ugcgaaacugacaacacua

SEQ ID NO: 972672 - RNA, 19 nt, Artificial Sequence
  Description of Artificial Sequence: Synthetic oligonucleotide
  Sense strand starting at position 2834 of SEQ ID NO: 914031
caaaucuccguggaaaugu

SEQ ID NO: 972673 - RNA, 19 nt, Artificial Sequence
  Description of Artificial Sequence: Synthetic oligonucleotide
  Antisense strand to SEQ ID NO: 972672
acauuuccacggagauuug

SEQ ID NO: 972674 - RNA, 19 nt, Artificial Sequence
  Description of Artificial Sequence: Synthetic oligonucleotide
  Sense strand starting at position 1334 of SEQ ID NO: 914031
caugaagggugguuuaauu

SEQ ID NO: 972675 - RNA, 19 nt, Artificial Sequence
  Description of Artificial Sequence: Synthetic oligonucleotide
  Antisense strand to SEQ ID NO: 972674
aauuaaaccacccuucaug

SEQ ID NO: 972676 - RNA, 19 nt, Artificial Sequence
  Description of Artificial Sequence: Synthetic oligonucleotide
  Sense strand starting at position 3786 of SEQ ID NO: 914031
gugaucugucgggaggauc

SEQ ID NO: 972677 - RNA, 19 nt, Artificial Sequence
  Description of Artificial Sequence: Synthetic oligonucleotide
  Antisense strand to SEQ ID NO: 972676
gauccucccgacagaucac

SEQ ID NO: 972678 - RNA, 19 nt, Artificial Sequence
  Description of Artificial Sequence: Synthetic oligonucleotide
  Sense strand starting at position 867 of SEQ ID NO: 914031
uauuuaguguugucaguuu

SEQ ID NO: 972679 - RNA, 19 nt, Artificial Sequence
  Description of Artificial Sequence: Synthetic oligonucleotide
  Antisense strand to SEQ ID NO: 972678
aaacugacaacacuaaaua

SEQ ID NO: 972680 - RNA, 19 nt, Artificial Sequence
  Description of Artificial Sequence: Synthetic oligonucleotide
  Sense strand starting at position 3810 of SEQ ID NO: 914031
cuaguaagaggcuguaaga

SEQ ID NO: 972681 - RNA, 19 nt, Artificial Sequence
  Description of Artificial Sequence: Synthetic oligonucleotide
  Antisense strand to SEQ ID NO: 972680
ucuuacagccucuuacuag

SEQ ID NO: 972682 - RNA, 19 nt, Artificial Sequence
  Description of Artificial Sequence: Synthetic oligonucleotide
  Sense strand starting at position 851 of SEQ ID NO: 914031
uguacuugcguguauuuau

SEQ ID NO: 972683 - RNA, 19 nt, Artificial Sequence
  Description of Artificial Sequence: Synthetic oligonucleotide
  Antisense strand to SEQ ID NO: 972682
auaaauacacgcaaguaca

SEQ ID NO: 972684 - RNA, 19 nt, Artificial Sequence
  Description of Artificial Sequence: Synthetic oligonucleotide
  Sense strand starting at position 208 of SEQ ID NO: 914031
agugcaggguaauuacaau

SEQ ID NO: 972685 - RNA, 19 nt, Artificial Sequence
  Description of Artificial Sequence: Synthetic oligonucleotide
  Antisense strand to SEQ ID NO: 972684
auuguaauuacccugcacu

SEQ ID NO: 972686 - RNA, 19 nt, Artificial Sequence
  Description of Artificial Sequence: Synthetic oligonucleotide
  Sense strand starting at position 449 of SEQ ID NO: 914031
uuuaguauuggcugaauaa

SEQ ID NO: 972687 - RNA, 19 nt, Artificial Sequence
  Description of Artificial Sequence: Synthetic oligonucleotide
  Antisense strand to SEQ ID NO: 972686
uuauucagccaauacuaaa

SEQ ID NO: 972688 - RNA, 19 nt, Artificial Sequence
  Description of Artificial Sequence: Synthetic oligonucleotide
  Sense strand starting at position 3784 of SEQ ID NO: 914031
gggugaucugucgggagga

SEQ ID NO: 972689 - RNA, 19 nt, Artificial Sequence
  Description of Artificial Sequence: Synthetic oligonucleotide
  Antisense strand to SEQ ID NO: 972688
uccucccgacagaucaccc

SEQ ID NO: 972690 - RNA, 19 nt, Artificial Sequence
  Description of Artificial Sequence: Synthetic oligonucleotide
  Sense strand starting at position 3732 of SEQ ID NO: 914031
cugguaaagagguguugau

SEQ ID NO: 972691 - RNA, 19 nt, Artificial Sequence
  Description of Artificial Sequence: Synthetic oligonucleotide
  Antisense strand to SEQ ID NO: 972690
aucaacaccucuuuaccag

SEQ ID NO: 972692 - RNA, 19 nt, Artificial Sequence
  Description of Artificial Sequence: Synthetic oligonucleotide
  Sense strand starting at position 524 of SEQ ID NO: 914031
aacuguuuguaguugaaag

SEQ ID NO: 972693 - RNA, 19 nt, Artificial Sequence
  Description of Artificial Sequence: Synthetic oligonucleotide
  Antisense strand to SEQ ID NO: 972692
cuuucaacuacaaacaguu

SEQ ID NO: 972694 - RNA, 19 nt, Artificial Sequence
  Description of Artificial Sequence: Synthetic oligonucleotide
  Sense strand starting at position 3071 of SEQ ID NO: 914031
cagaaaugucuacggagca

SEQ ID NO: 972695 - RNA, 19 nt, Artificial Sequence
  Description of Artificial Sequence: Synthetic oligonucleotide
  Antisense strand to SEQ ID NO: 972694
ugcuccguagacauuucug

SEQ ID NO: 972696 - RNA, 19 nt, Artificial Sequence
  Description of Artificial Sequence: Synthetic oligonucleotide
  Sense strand starting at position 827 of SEQ ID NO: 914031
guguuccauaaggguaaau

SEQ ID NO: 972697 - RNA, 19 nt, Artificial Sequence
  Description of Artificial Sequence: Synthetic oligonucleotide
  Antisense strand to SEQ ID NO: 972696
auuuacccuuauggaacac

SEQ ID NO: 972698 - RNA, 19 nt, Artificial Sequence
  Description of Artificial Sequence: Synthetic oligonucleotide
  Sense strand starting at position 3149 of SEQ ID NO: 914031
guucuaaguccugaggcca

SEQ ID NO: 972699 - RNA, 19 nt, Artificial Sequence
  Description of Artificial Sequence: Synthetic oligonucleotide
  Antisense strand to SEQ ID NO: 972698
uggccucaggacuuagaac

SEQ ID NO: 972700 - RNA, 19 nt, Artificial Sequence
  Description of Artificial Sequence: Synthetic oligonucleotide
  Sense strand starting at position 3242 of SEQ ID NO: 914031
agaggaguuugcucagggu

SEQ ID NO: 972701 - RNA, 19 nt, Artificial Sequence
  Description of Artificial Sequence: Synthetic oligonucleotide
  Antisense strand to SEQ ID NO: 972700
acccugagcaaacuccucu

SEQ ID NO: 972702 - RNA, 19 nt, Artificial Sequence
  Description of Artificial Sequence: Synthetic oligonucleotide
  Sense strand starting at position 2831 of SEQ ID NO: 914031
ggccaaaucuccguggaaa

SEQ ID NO: 972703 - RNA, 19 nt, Artificial Sequence
  Description of Artificial Sequence: Synthetic oligonucleotide
  Antisense strand to SEQ ID NO: 972702
uuuccacggagauuuggcc

SEQ ID NO: 972704 - RNA, 19 nt, Artificial Sequence
  Description of Artificial Sequence: Synthetic oligonucleotide
  Sense strand starting at position 3652 of SEQ ID NO: 914031
ccguucguuacacauagaa

SEQ ID NO: 972705 - RNA, 19 nt, Artificial Sequence
  Description of Artificial Sequence: Synthetic oligonucleotide
  Antisense strand to SEQ ID NO: 972704
uucuauguguaacgaacgg

SEQ ID NO: 972706 - RNA, 19 nt, Artificial Sequence
  Description of Artificial Sequence: Synthetic oligonucleotide
  Sense strand starting at position 1062 of SEQ ID NO: 914031
acuuguauguuccucaaac

SEQ ID NO: 972707 - RNA, 19 nt, Artificial Sequence
  Description of Artificial Sequence: Synthetic oligonucleotide
  Antisense strand to SEQ ID NO: 972706
guuugaggaacauacaagu

SEQ ID NO: 972708 - RNA, 19 nt, Artificial Sequence
  Description of Artificial Sequence: Synthetic oligonucleotide
  Sense strand starting at position 526 of SEQ ID NO: 914031
cuguuuguaguugaaaguu

SEQ ID NO: 972709 - RNA, 19 nt, Artificial Sequence
  Description of Artificial Sequence: Synthetic oligonucleotide
  Antisense strand to SEQ ID NO: 972708
aacuuucaacuacaaacag

SEQ ID NO: 972710 - RNA, 19 nt, Artificial Sequence
  Description of Artificial Sequence: Synthetic oligonucleotide
  Sense strand starting at position 2615 of SEQ ID NO: 914031
cgaggucagacuuguauug

SEQ ID NO: 972711 - RNA, 19 nt, Artificial Sequence
  Description of Artificial Sequence: Synthetic oligonucleotide
  Antisense strand to SEQ ID NO: 972710
caauacaagucugaccucg

SEQ ID NO: 972712 - RNA, 19 nt, Artificial Sequence
  Description of Artificial Sequence: Synthetic oligonucleotide
  Sense strand starting at position 2832 of SEQ ID NO: 914031
gccaaaucuccguggaaau

SEQ ID NO: 972713 - RNA, 19 nt, Artificial Sequence
  Description of Artificial Sequence: Synthetic oligonucleotide
  Antisense strand to SEQ ID NO: 972712
auuuccacggagauuuggc

SEQ ID NO: 972714 - RNA, 19 nt, Artificial Sequence
  Description of Artificial Sequence: Synthetic oligonucleotide
  Sense strand starting at position 2863 of SEQ ID NO: 914031
aagagaguucgccgacaac

SEQ ID NO: 972715 - RNA, 19 nt, Artificial Sequence
  Description of Artificial Sequence: Synthetic oligonucleotide
  Antisense strand to SEQ ID NO: 972714
guugucggcgaacucucuu

SEQ ID NO: 972716 - RNA, 19 nt, Artificial Sequence
  Description of Artificial Sequence: Synthetic oligonucleotide
  Sense strand starting at position 42 of SEQ ID NO: 914031
uauuuauuaugugaggcaa

SEQ ID NO: 972717 - RNA, 19 nt, Artificial Sequence
  Description of Artificial Sequence: Synthetic oligonucleotide
  Antisense strand to SEQ ID NO: 972716
uugccucacauaauaaaua

SEQ ID NO: 972718 - RNA, 19 nt, Artificial Sequence
  Description of Artificial Sequence: Synthetic oligonucleotide
  Sense strand starting at position 2830 of SEQ ID NO: 914031
uggccaaaucuccguggaa

SEQ ID NO: 972719 - RNA, 19 nt, Artificial Sequence
  Description of Artificial Sequence: Synthetic oligonucleotide
  Antisense strand to SEQ ID NO: 972718
uuccacggagauuuggcca

SEQ ID NO: 972720 - RNA, 19 nt, Artificial Sequence
  Description of Artificial Sequence: Synthetic oligonucleotide
  Sense strand starting at position 1060 of SEQ ID NO: 914031
uuacuuguauguuccucaa

SEQ ID NO: 972721 - RNA, 19 nt, Artificial Sequence
  Description of Artificial Sequence: Synthetic oligonucleotide
  Antisense strand to SEQ ID NO: 972720
uugaggaacauacaaguaa

SEQ ID NO: 972722 - RNA, 19 nt, Artificial Sequence
  Description of Artificial Sequence: Synthetic oligonucleotide
  Sense strand starting at position 3839 of SEQ ID NO: 914031
uucucugaaucguuaucau

SEQ ID NO: 972723 - RNA, 19 nt, Artificial Sequence
  Description of Artificial Sequence: Synthetic oligonucleotide
  Antisense strand to SEQ ID NO: 972722
augauaacgauucagagaa

SEQ ID NO: 972724 - RNA, 19 nt, Artificial Sequence
  Description of Artificial Sequence: Synthetic oligonucleotide
  Sense strand starting at position 3842 of SEQ ID NO: 914031
ucugaaucguuaucaucuu

SEQ ID NO: 972725 - RNA, 19 nt, Artificial Sequence
  Description of Artificial Sequence: Synthetic oligonucleotide
  Antisense strand to SEQ ID NO: 972724
aagaugauaacgauucaga

SEQ ID NO: 972726 - RNA, 19 nt, Artificial Sequence
  Description of Artificial Sequence: Synthetic oligonucleotide
  Sense strand starting at position 2115 of SEQ ID NO: 914032
ugguuugacccagaaggua

SEQ ID NO: 972727 - RNA, 19 nt, Artificial Sequence
  Description of Artificial Sequence: Synthetic oligonucleotide
  Antisense strand to SEQ ID NO: 972726
uaccuucugggucaaacca

SEQ ID NO: 972728 - RNA, 19 nt, Artificial Sequence
  Description of Artificial Sequence: Synthetic oligonucleotide
  Sense strand starting at position 3814 of SEQ ID NO: 914032
guaguuucaggauaggauu

SEQ ID NO: 972729 - RNA, 19 nt, Artificial Sequence
  Description of Artificial Sequence: Synthetic oligonucleotide
  Antisense strand to SEQ ID NO: 972728
aauccuauccugaaacuac

SEQ ID NO: 972730 - RNA, 19 nt, Artificial Sequence
  Description of Artificial Sequence: Synthetic oligonucleotide
  Sense strand starting at position 2687 of SEQ ID NO: 914032
cuuuaaugccuccagggaa

SEQ ID NO: 972731 - RNA, 19 nt, Artificial Sequence
  Description of Artificial Sequence: Synthetic oligonucleotide
  Antisense strand to SEQ ID NO: 972730
uucccuggaggcauuaaag

SEQ ID NO: 972732 - RNA, 19 nt, Artificial Sequence
  Description of Artificial Sequence: Synthetic oligonucleotide
  Sense strand starting at position 3489 of SEQ ID NO: 914032
gugacauauggucacauca

SEQ ID NO: 972733 - RNA, 19 nt, Artificial Sequence
  Description of Artificial Sequence: Synthetic oligonucleotide
  Antisense strand to SEQ ID NO: 972732
ugaugugaccauaugucac

SEQ ID NO: 972734 - RNA, 19 nt, Artificial Sequence
  Description of Artificial Sequence: Synthetic oligonucleotide
  Sense strand starting at position 3387 of SEQ ID NO: 914032
ucauuaucugaggauguuu

SEQ ID NO: 972735 - RNA, 19 nt, Artificial Sequence
  Description of Artificial Sequence: Synthetic oligonucleotide
  Antisense strand to SEQ ID NO: 972734
aaacauccucagauaauga

SEQ ID NO: 972736 - RNA, 19 nt, Artificial Sequence
  Description of Artificial Sequence: Synthetic oligonucleotide
  Sense strand starting at position 3075 of SEQ ID NO: 914032
acugacuggcuguagaaau

SEQ ID NO: 972737 - RNA, 19 nt, Artificial Sequence
  Description of Artificial Sequence: Synthetic oligonucleotide
  Antisense strand to SEQ ID NO: 972736
auuucuacagccagucagu

SEQ ID NO: 972738 - RNA, 19 nt, Artificial Sequence
  Description of Artificial Sequence: Synthetic oligonucleotide
  Sense strand starting at position 3836 of SEQ ID NO: 914032
uggaccuaucacugggauu

SEQ ID NO: 972739 - RNA, 19 nt, Artificial Sequence
  Description of Artificial Sequence: Synthetic oligonucleotide
  Antisense strand to SEQ ID NO: 972738
aaucccagugauaggucca

SEQ ID NO: 972740 - RNA, 19 nt, Artificial Sequence
  Description of Artificial Sequence: Synthetic oligonucleotide
  Sense strand starting at position 3392 of SEQ ID NO: 914032
aucugaggauguuuaccaa

SEQ ID NO: 972741 - RNA, 19 nt, Artificial Sequence
  Description of Artificial Sequence: Synthetic oligonucleotide
  Antisense strand to SEQ ID NO: 972740
uugguaaacauccucagau

SEQ ID NO: 972742 - RNA, 19 nt, Artificial Sequence
  Description of Artificial Sequence: Synthetic oligonucleotide
  Sense strand starting at position 3786 of SEQ ID NO: 914032
aaaggauucccuggagucu

SEQ ID NO: 972743 - RNA, 19 nt, Artificial Sequence
  Description of Artificial Sequence: Synthetic oligonucleotide
  Antisense strand to SEQ ID NO: 972742
agacuccagggaauccuuu

SEQ ID NO: 972744 - RNA, 19 nt, Artificial Sequence
  Description of Artificial Sequence: Synthetic oligonucleotide
  Sense strand starting at position 3129 of SEQ ID NO: 914032
cccugcuuugccgcugaau

SEQ ID NO: 972745 - RNA, 19 nt, Artificial Sequence
  Description of Artificial Sequence: Synthetic oligonucleotide
  Antisense strand to SEQ ID NO: 972744
auucagcggcaaagcaggg

SEQ ID NO: 972746 - RNA, 19 nt, Artificial Sequence
  Description of Artificial Sequence: Synthetic oligonucleotide
  Sense strand starting at position 2531 of SEQ ID NO: 914032
agaguucuguaacuaauag

SEQ ID NO: 972747 - RNA, 19 nt, Artificial Sequence
  Description of Artificial Sequence: Synthetic oligonucleotide
  Antisense strand to SEQ ID NO: 972746
cuauuaguuacagaacucu

SEQ ID NO: 972748 - RNA, 19 nt, Artificial Sequence
  Description of Artificial Sequence: Synthetic oligonucleotide
  Sense strand starting at position 3795 of SEQ ID NO: 914032
ccuggagucuuacuaagau

SEQ ID NO: 972749 - RNA, 19 nt, Artificial Sequence
  Description of Artificial Sequence: Synthetic oligonucleotide
  Antisense strand to SEQ ID NO: 972748
aucuuaguaagacuccagg

SEQ ID NO: 972750 - RNA, 19 nt, Artificial Sequence
  Description of Artificial Sequence: Synthetic oligonucleotide
  Sense strand starting at position 3160 of SEQ ID NO: 914032
gggcacuuuccucacuuaa

SEQ ID NO: 972751 - RNA, 19 nt, Artificial Sequence
  Description of Artificial Sequence: Synthetic oligonucleotide
  Antisense strand to SEQ ID NO: 972750
uuaagugaggaaagugccc

SEQ ID NO: 972752 - RNA, 19 nt, Artificial Sequence
  Description of Artificial Sequence: Synthetic oligonucleotide
  Sense strand starting at position 2737 of SEQ ID NO: 914032
ugggaaugaugugucugga

SEQ ID NO: 972753 - RNA, 19 nt, Artificial Sequence
  Description of Artificial Sequence: Synthetic oligonucleotide
  Antisense strand to SEQ ID NO: 972752
uccagacacaucauuccca

SEQ ID NO: 972754 - RNA, 19 nt, Artificial Sequence
  Description of Artificial Sequence: Synthetic oligonucleotide
  Sense strand starting at position 2727 of SEQ ID NO: 914032
uuucuaaugcugggaauga

SEQ ID NO: 972755 - RNA, 19 nt, Artificial Sequence
  Description of Artificial Sequence: Synthetic oligonucleotide
  Antisense strand to SEQ ID NO: 972754
ucauucccagcauuagaaa

SEQ ID NO: 972756 - RNA, 19 nt, Artificial Sequence
  Description of Artificial Sequence: Synthetic oligonucleotide
  Sense strand starting at position 2431 of SEQ ID NO: 914032
guaaguuaucuguauuaga

SEQ ID NO: 972757 - RNA, 19 nt, Artificial Sequence
  Description of Artificial Sequence: Synthetic oligonucleotide
  Antisense strand to SEQ ID NO: 972756
ucuaauacagauaacuuac

SEQ ID NO: 972758 - RNA, 19 nt, Artificial Sequence
  Description of Artificial Sequence: Synthetic oligonucleotide
  Sense strand starting at position 3368 of SEQ ID NO: 914032
acaaucugcucuuuggaaa

SEQ ID NO: 972759 - RNA, 19 nt, Artificial Sequence
  Description of Artificial Sequence: Synthetic oligonucleotide
  Antisense strand to SEQ ID NO: 972758
uuuccaaagagcagauugu

SEQ ID NO: 972760 - RNA, 19 nt, Artificial Sequence
  Description of Artificial Sequence: Synthetic oligonucleotide
  Sense strand starting at position 3839 of SEQ ID NO: 914032
accuaucacugggauuuga

SEQ ID NO: 972761 - RNA, 19 nt, Artificial Sequence
  Description of Artificial Sequence: Synthetic oligonucleotide
  Antisense strand to SEQ ID NO: 972760
ucaaaucccagugauaggu

SEQ ID NO: 972762 - RNA, 19 nt, Artificial Sequence
  Description of Artificial Sequence: Synthetic oligonucleotide
  Sense strand starting at position 2838 of SEQ ID NO: 914032
cugagaguuaauggcuaga

SEQ ID NO: 972763 - RNA, 19 nt, Artificial Sequence
  Description of Artificial Sequence: Synthetic oligonucleotide
  Antisense strand to SEQ ID NO: 972762
ucuagccauuaacucucag

SEQ ID NO: 972764 - RNA, 19 nt, Artificial Sequence
  Description of Artificial Sequence: Synthetic oligonucleotide
  Sense strand starting at position 2740 of SEQ ID NO: 914032
gaaugaugugucuggacca

SEQ ID NO: 972765 - RNA, 19 nt, Artificial Sequence
  Description of Artificial Sequence: Synthetic oligonucleotide
  Antisense strand to SEQ ID NO: 972764
ugguccagacacaucauuc

SEQ ID NO: 972766 - RNA, 19 nt, Artificial Sequence
  Description of Artificial Sequence: Synthetic oligonucleotide
  Sense strand starting at position 2444 of SEQ ID NO: 914032
auuagauauuaccucuguu

SEQ ID NO: 972767 - RNA, 19 nt, Artificial Sequence
  Description of Artificial Sequence: Synthetic oligonucleotide
  Antisense strand to SEQ ID NO: 972766
aacagagguaauaucuaau

SEQ ID NO: 972768 - RNA, 19 nt, Artificial Sequence
  Description of Artificial Sequence: Synthetic oligonucleotide
  Sense strand starting at position 3483 of SEQ ID NO: 914032
gcucaagugacauaugguc

SEQ ID NO: 972769 - RNA, 19 nt, Artificial Sequence
  Description of Artificial Sequence: Synthetic oligonucleotide
  Antisense strand to SEQ ID NO: 972768
gaccauaugucacuugagc

SEQ ID NO: 972770 - RNA, 19 nt, Artificial Sequence
  Description of Artificial Sequence: Synthetic oligonucleotide
  Sense strand starting at position 3644 of SEQ ID NO: 914032
cugccuccacuuggagaau

SEQ ID NO: 972771 - RNA, 19 nt, Artificial Sequence
  Description of Artificial Sequence: Synthetic oligonucleotide
  Antisense strand to SEQ ID NO: 972770
auucuccaaguggaggcag

SEQ ID NO: 972772 - RNA, 19 nt, Artificial Sequence
  Description of Artificial Sequence: Synthetic oligonucleotide
  Sense strand starting at position 2328 of SEQ ID NO: 914032
gccucagggaaaugucuua

SEQ ID NO: 972773 - RNA, 19 nt, Artificial Sequence
  Description of Artificial Sequence: Synthetic oligonucleotide
  Antisense strand to SEQ ID NO: 972772
uaagacauuucccugaggc

SEQ ID NO: 972774 - RNA, 19 nt, Artificial Sequence
  Description of Artificial Sequence: Synthetic oligonucleotide
  Sense strand starting at position 2284 of SEQ ID NO: 914032
gcaaguccuccuuggagaa

SEQ ID NO: 972775 - RNA, 19 nt, Artificial Sequence
  Description of Artificial Sequence: Synthetic oligonucleotide
  Antisense strand to SEQ ID NO: 972774
uucuccaaggaggacuugc

SEQ ID NO: 972776 - RNA, 19 nt, Artificial Sequence
  Description of Artificial Sequence: Synthetic oligonucleotide
  Sense strand starting at position 2149 of SEQ ID NO: 914032
ugcuguguugugucugcau

SEQ ID NO: 972777 - RNA, 19 nt, Artificial Sequence
  Description of Artificial Sequence: Synthetic oligonucleotide
  Antisense strand to SEQ ID NO: 972776
augcagacacaacacagca

SEQ ID NO: 972778 - RNA, 19 nt, Artificial Sequence
  Description of Artificial Sequence: Synthetic oligonucleotide
  Sense strand starting at position 3411 of SEQ ID NO: 914032
cugcuuuaugaaggccaaa

SEQ ID NO: 972779 - RNA, 19 nt, Artificial Sequence
  Description of Artificial Sequence: Synthetic oligonucleotide
  Antisense strand to SEQ ID NO: 972778
uuuggccuucauaaagcag

SEQ ID NO: 972780 - RNA, 19 nt, Artificial Sequence
  Description of Artificial Sequence: Synthetic oligonucleotide
  Sense strand starting at position 2804 of SEQ ID NO: 914032
caggacuaguguucccauu

SEQ ID NO: 972781 - RNA, 19 nt, Artificial Sequence
  Description of Artificial Sequence: Synthetic oligonucleotide
  Antisense strand to SEQ ID NO: 972780
aaugggaacacuaguccug

SEQ ID NO: 972782 - RNA, 19 nt, Artificial Sequence
  Description of Artificial Sequence: Synthetic oligonucleotide
  Sense strand starting at position 2655 of SEQ ID NO: 914032
agccucagagcuugagauu

SEQ ID NO: 972783 - RNA, 19 nt, Artificial Sequence
  Description of Artificial Sequence: Synthetic oligonucleotide
  Antisense strand to SEQ ID NO: 972782
aaucucaagcucugaggcu

SEQ ID NO: 972784 - RNA, 19 nt, Artificial Sequence
  Description of Artificial Sequence: Synthetic oligonucleotide
  Sense strand starting at position 2658 of SEQ ID NO: 914032
cucagagcuugagauuuau

SEQ ID NO: 972785 - RNA, 19 nt, Artificial Sequence
  Description of Artificial Sequence: Synthetic oligonucleotide
  Antisense strand to SEQ ID NO: 972784
auaaaucucaagcucugag

SEQ ID NO: 972786 - RNA, 19 nt, Artificial Sequence
  Description of Artificial Sequence: Synthetic oligonucleotide
  Sense strand starting at position 3141 of SEQ ID NO: 914032
gcugaaugccucuggagau

SEQ ID NO: 972787 - RNA, 19 nt, Artificial Sequence
  Description of Artificial Sequence: Synthetic oligonucleotide
  Antisense strand to SEQ ID NO: 972786
aucuccagaggcauucagc

SEQ ID NO: 972788 - RNA, 19 nt, Artificial Sequence
  Description of Artificial Sequence: Synthetic oligonucleotide
  Sense strand starting at position 3474 of SEQ ID NO: 914032
uuguguaaugcucaaguga

SEQ ID NO: 972789 - RNA, 19 nt, Artificial Sequence
  Description of Artificial Sequence: Synthetic oligonucleotide
  Antisense strand to SEQ ID NO: 972788
ucacuugagcauuacacaa

SEQ ID NO: 972790 - RNA, 19 nt, Artificial Sequence
  Description of Artificial Sequence: Synthetic oligonucleotide
  Sense strand starting at position 3159 of SEQ ID NO: 914032
ugggcacuuuccucacuua

SEQ ID NO: 972791 - RNA, 19 nt, Artificial Sequence
  Description of Artificial Sequence: Synthetic oligonucleotide
  Antisense strand to SEQ ID NO: 972790
uaagugaggaaagugccca

SEQ ID NO: 972792 - RNA, 19 nt, Artificial Sequence
  Description of Artificial Sequence: Synthetic oligonucleotide
  Sense strand starting at position 2427 of SEQ ID NO: 914032
acugguaaguuaucuguau

SEQ ID NO: 972793 - RNA, 19 nt, Artificial Sequence
  Description of Artificial Sequence: Synthetic oligonucleotide
  Antisense strand to SEQ ID NO: 972792
auacagauaacuuaccagu

SEQ ID NO: 972794 - RNA, 19 nt, Artificial Sequence
  Description of Artificial Sequence: Synthetic oligonucleotide
  Sense strand starting at position 2827 of SEQ ID NO: 914032
ugagguuagcucugagagu

SEQ ID NO: 972795 - RNA, 19 nt, Artificial Sequence
  Description of Artificial Sequence: Synthetic oligonucleotide
  Antisense strand to SEQ ID NO: 972794
acucucagagcuaaccuca

SEQ ID NO: 972796 - RNA, 19 nt, Artificial Sequence
  Description of Artificial Sequence: Synthetic oligonucleotide
  Sense strand starting at position 3801 of SEQ ID NO: 914032
gucuuacuaagauguaguu

SEQ ID NO: 972797 - RNA, 19 nt, Artificial Sequence
  Description of Artificial Sequence: Synthetic oligonucleotide
  Antisense strand to SEQ ID NO: 972796
aacuacaucuuaguaagac

SEQ ID NO: 972798 - RNA, 19 nt, Artificial Sequence
  Description of Artificial Sequence: Synthetic oligonucleotide
  Sense strand starting at position 2429 of SEQ ID NO: 914032
ugguaaguuaucuguauua

SEQ ID NO: 972799 - RNA, 19 nt, Artificial Sequence
  Description of Artificial Sequence: Synthetic oligonucleotide
  Antisense strand to SEQ ID NO: 972798
uaauacagauaacuuacca

SEQ ID NO: 972800 - RNA, 19 nt, Artificial Sequence
  Description of Artificial Sequence: Synthetic oligonucleotide
  Sense strand starting at position 3850 of SEQ ID NO: 914032
ggauuugauuuguguggcu

SEQ ID NO: 972801 - RNA, 19 nt, Artificial Sequence
  Description of Artificial Sequence: Synthetic oligonucleotide
  Antisense strand to SEQ ID NO: 972800
agccacacaaaucaaaucc

SEQ ID NO: 972802 - RNA, 19 nt, Artificial Sequence
  Description of Artificial Sequence: Synthetic oligonucleotide
  Sense strand starting at position 2893 of SEQ ID NO: 914032
ugcaguucgcagggagaau

SEQ ID NO: 972803 - RNA, 19 nt, Artificial Sequence
  Description of Artificial Sequence: Synthetic oligonucleotide
  Antisense strand to SEQ ID NO: 972802
auucucccugcgaacugca

SEQ ID NO: 972804 - RNA, 19 nt, Artificial Sequence
  Description of Artificial Sequence: Synthetic oligonucleotide
  Sense strand starting at position 3696 of SEQ ID NO: 914032
agggcacuugucugccauu

SEQ ID NO: 972805 - RNA, 19 nt, Artificial Sequence
  Description of Artificial Sequence: Synthetic oligonucleotide
  Antisense strand to SEQ ID NO: 972804
aauggcagacaagugcccu

SEQ ID NO: 972806 - RNA, 19 nt, Artificial Sequence
  Description of Artificial Sequence: Synthetic oligonucleotide
  Sense strand starting at position 3798 of SEQ ID NO: 914033
aguucauuucgaugauggu

SEQ ID NO: 972807 - RNA, 19 nt, Artificial Sequence
  Description of Artificial Sequence: Synthetic oligonucleotide
  Antisense strand to SEQ ID NO: 972806
accaucaucgaaaugaacu

SEQ ID NO: 972808 - RNA, 19 nt, Artificial Sequence
  Description of Artificial Sequence: Synthetic oligonucleotide
  Sense strand starting at position 3633 of SEQ ID NO: 914033
agguucuuuagugauagag

SEQ ID NO: 972809 - RNA, 19 nt, Artificial Sequence
  Description of Artificial Sequence: Synthetic oligonucleotide
  Antisense strand to SEQ ID NO: 972808
cucuaucacuaaagaaccu

SEQ ID NO: 972810 - RNA, 19 nt, Artificial Sequence
  Description of Artificial Sequence: Synthetic oligonucleotide
  Sense strand starting at position 2546 of SEQ ID NO: 914033
uggucaauauuuguucuuu

SEQ ID NO: 972811 - RNA, 19 nt, Artificial Sequence
  Description of Artificial Sequence: Synthetic oligonucleotide
  Antisense strand to SEQ ID NO: 972810
aaagaacaaauauugacca

SEQ ID NO: 972812 - RNA, 19 nt, Artificial Sequence
  Description of Artificial Sequence: Synthetic oligonucleotide
  Sense strand starting at position 173 of SEQ ID NO: 914033
gagagagucucccugaaca

SEQ ID NO: 972813 - RNA, 19 nt, Artificial Sequence
  Description of Artificial Sequence: Synthetic oligonucleotide
  Antisense strand to SEQ ID NO: 972812
uguucagggagacucucuc

SEQ ID NO: 972814 - RNA, 19 nt, Artificial Sequence
  Description of Artificial Sequence: Synthetic oligonucleotide
  Sense strand starting at position 3010 of SEQ ID NO: 914033
ugauguggcaaagaaguau

SEQ ID NO: 972815 - RNA, 19 nt, Artificial Sequence
  Description of Artificial Sequence: Synthetic oligonucleotide
  Antisense strand to SEQ ID NO: 972814
auacuucuuugccacauca

SEQ ID NO: 972816 - RNA, 19 nt, Artificial Sequence
  Description of Artificial Sequence: Synthetic oligonucleotide
  Sense strand starting at position 3594 of SEQ ID NO: 914033
uucggcauuccagaggaga

SEQ ID NO: 972817 - RNA, 19 nt, Artificial Sequence
  Description of Artificial Sequence: Synthetic oligonucleotide
  Antisense strand to SEQ ID NO: 972816
ucuccucuggaaugccgaa

SEQ ID NO: 972818 - RNA, 19 nt, Artificial Sequence
  Description of Artificial Sequence: Synthetic oligonucleotide
  Sense strand starting at position 3841 of SEQ ID NO: 914033
uuauuuguuggguguuuaa

SEQ ID NO: 972819 - RNA, 19 nt, Artificial Sequence
  Description of Artificial Sequence: Synthetic oligonucleotide
  Antisense strand to SEQ ID NO: 972818
uuaaacacccaacaaauaa

SEQ ID NO: 972820 - RNA, 19 nt, Artificial Sequence
  Description of Artificial Sequence: Synthetic oligonucleotide
  Sense strand starting at position 3202 of SEQ ID NO: 914033
auccuuuaucuauagggca

SEQ ID NO: 972821 - RNA, 19 nt, Artificial Sequence
  Description of Artificial Sequence: Synthetic oligonucleotide
  Antisense strand to SEQ ID NO: 972820
ugcccuauagauaaaggau

SEQ ID NO: 972822 - RNA, 19 nt, Artificial Sequence
  Description of Artificial Sequence: Synthetic oligonucleotide
  Sense strand starting at position 145 of SEQ ID NO: 914033
ggacacuucuacccuggau

SEQ ID NO: 972823 - RNA, 19 nt, Artificial Sequence
  Description of Artificial Sequence: Synthetic oligonucleotide
  Antisense strand to SEQ ID NO: 972822
auccaggguagaagugucc

SEQ ID NO: 972824 - RNA, 19 nt, Artificial Sequence
  Description of Artificial Sequence: Synthetic oligonucleotide
  Sense strand starting at position 3840 of SEQ ID NO: 914033
uuuauuuguuggguguuua

SEQ ID NO: 972825 - RNA, 19 nt, Artificial Sequence
  Description of Artificial Sequence: Synthetic oligonucleotide
  Antisense strand to SEQ ID NO: 972824
uaaacacccaacaaauaaa

SEQ ID NO: 972826 - RNA, 19 nt, Artificial Sequence
  Description of Artificial Sequence: Synthetic oligonucleotide
  Sense strand starting at position 1557 of SEQ ID NO: 914033
gucccagagaacugugaga

SEQ ID NO: 972827 - RNA, 19 nt, Artificial Sequence
  Description of Artificial Sequence: Synthetic oligonucleotide
  Antisense strand to SEQ ID NO: 972826
ucucacaguucucugggac

SEQ ID NO: 972828 - RNA, 19 nt, Artificial Sequence
  Description of Artificial Sequence: Synthetic oligonucleotide
  Sense strand starting at position 3021 of SEQ ID NO: 914033
agaaguaucucuucuugag

SEQ ID NO: 972829 - RNA, 19 nt, Artificial Sequence
  Description of Artificial Sequence: Synthetic oligonucleotide
  Antisense strand to SEQ ID NO: 972828
cucaagaagagauacuucu

SEQ ID NO: 972830 - RNA, 19 nt, Artificial Sequence
  Description of Artificial Sequence: Synthetic oligonucleotide
  Sense strand starting at position 3444 of SEQ ID NO: 914033
uauagaagacuguguaauc

SEQ ID NO: 972831 - RNA, 19 nt, Artificial Sequence
  Description of Artificial Sequence: Synthetic oligonucleotide
  Antisense strand to SEQ ID NO: 972830
gauuacacagucuucuaua

SEQ ID NO: 972832 - RNA, 19 nt, Artificial Sequence
  Description of Artificial Sequence: Synthetic oligonucleotide
  Sense strand starting at position 3442 of SEQ ID NO: 914033
uuuauagaagacuguguaa

SEQ ID NO: 972833 - RNA, 19 nt, Artificial Sequence
  Description of Artificial Sequence: Synthetic oligonucleotide
  Antisense strand to SEQ ID NO: 972832
uuacacagucuucuauaaa

SEQ ID NO: 972834 - RNA, 19 nt, Artificial Sequence
  Description of Artificial Sequence: Synthetic oligonucleotide
  Sense strand starting at position 3766 of SEQ ID NO: 914033
cacacuguagguugaauaa

SEQ ID NO: 972835 - RNA, 19 nt, Artificial Sequence
  Description of Artificial Sequence: Synthetic oligonucleotide
  Antisense strand to SEQ ID NO: 972834
uuauucaaccuacagugug

SEQ ID NO: 972836 - RNA, 19 nt, Artificial Sequence
  Description of Artificial Sequence: Synthetic oligonucleotide
  Sense strand starting at position 3025 of SEQ ID NO: 914033
guaucucuucuugagauuc

SEQ ID NO: 972837 - RNA, 19 nt, Artificial Sequence
  Description of Artificial Sequence: Synthetic oligonucleotide
  Antisense strand to SEQ ID NO: 972836
gaaucucaagaagagauac

SEQ ID NO: 972838 - RNA, 19 nt, Artificial Sequence
  Description of Artificial Sequence: Synthetic oligonucleotide
  Sense strand starting at position 3158 of SEQ ID NO: 914033
guggcugccaaacagaaau

SEQ ID NO: 972839 - RNA, 19 nt, Artificial Sequence
  Description of Artificial Sequence: Synthetic oligonucleotide
  Antisense strand to SEQ ID NO: 972838
auuucuguuuggcagccac

SEQ ID NO: 972840 - RNA, 19 nt, Artificial Sequence
  Description of Artificial Sequence: Synthetic oligonucleotide
  Sense strand starting at position 540 of SEQ ID NO: 914033
ucucaugauuaggccaaau

SEQ ID NO: 972841 - RNA, 19 nt, Artificial Sequence
  Description of Artificial Sequence: Synthetic oligonucleotide
  Antisense strand to SEQ ID NO: 972840
auuuggccuaaucaugaga

SEQ ID NO: 972842 - RNA, 19 nt, Artificial Sequence
  Description of Artificial Sequence: Synthetic oligonucleotide
  Sense strand starting at position 560 of SEQ ID NO: 914033
uuaggauguucuucuacaa

SEQ ID NO: 972843 - RNA, 19 nt, Artificial Sequence
  Description of Artificial Sequence: Synthetic oligonucleotide
  Antisense strand to SEQ ID NO: 972842
uuguagaagaacauccuaa

SEQ ID NO: 972844 - RNA, 19 nt, Artificial Sequence
  Description of Artificial Sequence: Synthetic oligonucleotide
  Sense strand starting at position 3216 of SEQ ID NO: 914033
gggcauuagggcuaauucu

SEQ ID NO: 972845 - RNA, 19 nt, Artificial Sequence
  Description of Artificial Sequence: Synthetic oligonucleotide
  Antisense strand to SEQ ID NO: 972844
agaauuagcccuaaugccc

SEQ ID NO: 972846 - RNA, 19 nt, Artificial Sequence
  Description of Artificial Sequence: Synthetic oligonucleotide
  Sense strand starting at position 1152 of SEQ ID NO: 914033
cucacuuccuuucuggaga

SEQ ID NO: 972847 - RNA, 19 nt, Artificial Sequence
  Description of Artificial Sequence: Synthetic oligonucleotide
  Antisense strand to SEQ ID NO: 972846
ucuccagaaaggaagugag

SEQ ID NO: 972848 - RNA, 19 nt, Artificial Sequence
  Description of Artificial Sequence: Synthetic oligonucleotide
  Sense strand starting at position 1502 of SEQ ID NO: 914033
gauguuguccugcagaaag

SEQ ID NO: 972849 - RNA, 19 nt, Artificial Sequence
  Description of Artificial Sequence: Synthetic oligonucleotide
  Antisense strand to SEQ ID NO: 972848
cuuucugcaggacaacauc

SEQ ID NO: 972850 - RNA, 19 nt, Artificial Sequence
  Description of Artificial Sequence: Synthetic oligonucleotide
  Sense strand starting at position 3957 of SEQ ID NO: 914033
cuuagugcuccagauacca

SEQ ID NO: 972851 - RNA, 19 nt, Artificial Sequence
  Description of Artificial Sequence: Synthetic oligonucleotide
  Antisense strand to SEQ ID NO: 972850
ugguaucuggagcacuaag

SEQ ID NO: 972852 - RNA, 19 nt, Artificial Sequence
  Description of Artificial Sequence: Synthetic oligonucleotide
  Sense strand starting at position 3955 of SEQ ID NO: 914033
accuuagugcuccagauac

SEQ ID NO: 972853 - RNA, 19 nt, Artificial Sequence
  Description of Artificial Sequence: Synthetic oligonucleotide
  Antisense strand to SEQ ID NO: 972852
guaucuggagcacuaaggu

SEQ ID NO: 972854 - RNA, 19 nt, Artificial Sequence
  Description of Artificial Sequence: Synthetic oligonucleotide
  Sense strand starting at position 275 of SEQ ID NO: 914033
accugauccuggccugaga

SEQ ID NO: 972855 - RNA, 19 nt, Artificial Sequence
  Description of Artificial Sequence: Synthetic oligonucleotide
  Antisense strand to SEQ ID NO: 972854
ucucaggccaggaucaggu

SEQ ID NO: 972856 - RNA, 19 nt, Artificial Sequence
  Description of Artificial Sequence: Synthetic oligonucleotide
  Sense strand starting at position 3178 of SEQ ID NO: 914033
aggaguugauugguucuca

SEQ ID NO: 972857 - RNA, 19 nt, Artificial Sequence
  Description of Artificial Sequence: Synthetic oligonucleotide
  Antisense strand to SEQ ID NO: 972856
ugagaaccaaucaacuccu

SEQ ID NO: 972858 - RNA, 19 nt, Artificial Sequence
  Description of Artificial Sequence: Synthetic oligonucleotide
  Sense strand starting at position 2447 of SEQ ID NO: 914033
gguccacuugugcaggaau

SEQ ID NO: 972859 - RNA, 19 nt, Artificial Sequence
  Description of Artificial Sequence: Synthetic oligonucleotide
  Antisense strand to SEQ ID NO: 972858
auuccugcacaaguggacc

SEQ ID NO: 972860 - RNA, 19 nt, Artificial Sequence
  Description of Artificial Sequence: Synthetic oligonucleotide
  Sense strand starting at position 3179 of SEQ ID NO: 914033
ggaguugauugguucucag

SEQ ID NO: 972861 - RNA, 19 nt, Artificial Sequence
  Description of Artificial Sequence: Synthetic oligonucleotide
  Antisense strand to SEQ ID NO: 972860
cugagaaccaaucaacucc

SEQ ID NO: 972862 - RNA, 19 nt, Artificial Sequence
  Description of Artificial Sequence: Synthetic oligonucleotide
  Sense strand starting at position 1487 of SEQ ID NO: 914033
ggagaacuccgcgacgaug

SEQ ID NO: 972863 - RNA, 19 nt, Artificial Sequence
  Description of Artificial Sequence: Synthetic oligonucleotide
  Antisense strand to SEQ ID NO: 972862
caucgucgcggaguucucc

SEQ ID NO: 972864 - RNA, 19 nt, Artificial Sequence
  Description of Artificial Sequence: Synthetic oligonucleotide
  Sense strand starting at position 3631 of SEQ ID NO: 914033
ccagguucuuuagugauag

SEQ ID NO: 972865 - RNA, 19 nt, Artificial Sequence
  Description of Artificial Sequence: Synthetic oligonucleotide
  Antisense strand to SEQ ID NO: 972864
cuaucacuaaagaaccugg

SEQ ID NO: 972866 - RNA, 19 nt, Artificial Sequence
  Description of Artificial Sequence: Synthetic oligonucleotide
  Sense strand starting at position 3694 of SEQ ID NO: 914033
ccagaaacguucuccuaau

SEQ ID NO: 972867 - RNA, 19 nt, Artificial Sequence
  Description of Artificial Sequence: Synthetic oligonucleotide
  Antisense strand to SEQ ID NO: 972866
auuaggagaacguuucugg

SEQ ID NO: 972868 - RNA, 19 nt, Artificial Sequence
  Description of Artificial Sequence: Synthetic oligonucleotide
  Sense strand starting at position 277 of SEQ ID NO: 914033
cugauccuggccugagauu

SEQ ID NO: 972869 - RNA, 19 nt, Artificial Sequence
  Description of Artificial Sequence: Synthetic oligonucleotide
  Antisense strand to SEQ ID NO: 972868
aaucucaggccaggaucag

SEQ ID NO: 972870 - RNA, 19 nt, Artificial Sequence
  Description of Artificial Sequence: Synthetic oligonucleotide
  Sense strand starting at position 2872 of SEQ ID NO: 914033
gugugacuaguuuagguau

SEQ ID NO: 972871 - RNA, 19 nt, Artificial Sequence
  Description of Artificial Sequence: Synthetic oligonucleotide
  Antisense strand to SEQ ID NO: 972870
auaccuaaacuagucacac

SEQ ID NO: 972872 - RNA, 19 nt, Artificial Sequence
  Description of Artificial Sequence: Synthetic oligonucleotide
  Sense strand starting at position 3953 of SEQ ID NO: 914033
ggaccuuagugcuccagau

SEQ ID NO: 972873 - RNA, 19 nt, Artificial Sequence
  Description of Artificial Sequence: Synthetic oligonucleotide
  Antisense strand to SEQ ID NO: 972872
aucuggagcacuaaggucc

SEQ ID NO: 972874 - RNA, 19 nt, Artificial Sequence
  Description of Artificial Sequence: Synthetic oligonucleotide
  Sense strand starting at position 3182 of SEQ ID NO: 914033
guugauugguucucagacc

SEQ ID NO: 972875 - RNA, 19 nt, Artificial Sequence
  Description of Artificial Sequence: Synthetic oligonucleotide
  Antisense strand to SEQ ID NO: 972874
ggucugagaaccaaucaac

SEQ ID NO: 972876 - RNA, 19 nt, Artificial Sequence
  Description of Artificial Sequence: Synthetic oligonucleotide
  Sense strand starting at position 3670 of SEQ ID NO: 914033
guugccuuuggacaguuau

SEQ ID NO: 972877 - RNA, 19 nt, Artificial Sequence
  Description of Artificial Sequence: Synthetic oligonucleotide
  Antisense strand to SEQ ID NO: 972876
auaacuguccaaaggcaac

SEQ ID NO: 972878 - RNA, 19 nt, Artificial Sequence
  Description of Artificial Sequence: Synthetic oligonucleotide
  Sense strand starting at position 2708 of SEQ ID NO: 914033
acaccuaccgauuguuuau

SEQ ID NO: 972879 - RNA, 19 nt, Artificial Sequence
  Description of Artificial Sequence: Synthetic oligonucleotide
  Antisense strand to SEQ ID NO: 972878
auaaacaaucgguaggugu

SEQ ID NO: 972880 - RNA, 19 nt, Artificial Sequence
  Description of Artificial Sequence: Synthetic oligonucleotide
  Sense strand starting at position 2711 of SEQ ID NO: 914033
ccuaccgauuguuuaugau

SEQ ID NO: 972881 - RNA, 19 nt, Artificial Sequence
  Description of Artificial Sequence: Synthetic oligonucleotide
  Antisense strand to SEQ ID NO: 972880
aucauaaacaaucgguagg

SEQ ID NO: 972882 - RNA, 19 nt, Artificial Sequence
  Description of Artificial Sequence: Synthetic oligonucleotide
  Sense strand starting at position 2934 of SEQ ID NO: 914033
ucuguucgaaguuagaguu

SEQ ID NO: 972883 - RNA, 19 nt, Artificial Sequence
  Description of Artificial Sequence: Synthetic oligonucleotide
  Antisense strand to SEQ ID NO: 972882
aacucuaacuucgaacaga

SEQ ID NO: 972884 - RNA, 19 nt, Artificial Sequence
  Description of Artificial Sequence: Synthetic oligonucleotide
  Sense strand starting at position 1562 of SEQ ID NO: 914033
agagaacugugagaaggau

SEQ ID NO: 972885 - RNA, 19 nt, Artificial Sequence
  Description of Artificial Sequence: Synthetic oligonucleotide
  Antisense strand to SEQ ID NO: 972884
auccuucucacaguucucu

SEQ ID NO: 972886 - RNA, 19 nt, Artificial Sequence
  Description of Artificial Sequence: Synthetic oligonucleotide
  Sense strand starting at position 404 of SEQ ID NO: 914034
gacaucuacuaggucaaga

SEQ ID NO: 972887 - RNA, 19 nt, Artificial Sequence
  Description of Artificial Sequence: Synthetic oligonucleotide
  Antisense strand to SEQ ID NO: 972886
ucuugaccuaguagauguc

SEQ ID NO: 972888 - RNA, 19 nt, Artificial Sequence
  Description of Artificial Sequence: Synthetic oligonucleotide
  Sense strand starting at position 847 of SEQ ID NO: 914034
gcuguaacuacgucauugu

SEQ ID NO: 972889 - RNA, 19 nt, Artificial Sequence
  Description of Artificial Sequence: Synthetic oligonucleotide
  Antisense strand to SEQ ID NO: 972888
acaaugacguaguuacagc

SEQ ID NO: 972890 - RNA, 19 nt, Artificial Sequence
  Description of Artificial Sequence: Synthetic oligonucleotide
  Sense strand starting at position 2693 of SEQ ID NO: 914034
aaaggcugggucuaggauu

SEQ ID NO: 972891 - RNA, 19 nt, Artificial Sequence
  Description of Artificial Sequence: Synthetic oligonucleotide
  Antisense strand to SEQ ID NO: 972890
aauccuagacccagccuuu

SEQ ID NO: 972892 - RNA, 19 nt, Artificial Sequence
  Description of Artificial Sequence: Synthetic oligonucleotide
  Sense strand starting at position 2515 of SEQ ID NO: 914034
acgagucucguggugcaau

SEQ ID NO: 972893 - RNA, 19 nt, Artificial Sequence
  Description of Artificial Sequence: Synthetic oligonucleotide
  Antisense strand to SEQ ID NO: 972892
auugcaccacgagacucgu

SEQ ID NO: 972894 - RNA, 19 nt, Artificial Sequence
  Description of Artificial Sequence: Synthetic oligonucleotide
  Sense strand starting at position 3836 of SEQ ID NO: 914034
ugagaacagacauggugua

SEQ ID NO: 972895 - RNA, 19 nt, Artificial Sequence
  Description of Artificial Sequence: Synthetic oligonucleotide
  Antisense strand to SEQ ID NO: 972894
uacaccaugucuguucuca

SEQ ID NO: 972896 - RNA, 19 nt, Artificial Sequence
  Description of Artificial Sequence: Synthetic oligonucleotide
  Sense strand starting at position 3837 of SEQ ID NO: 914034
gagaacagacaugguguau

SEQ ID NO: 972897 - RNA, 19 nt, Artificial Sequence
  Description of Artificial Sequence: Synthetic oligonucleotide
  Antisense strand to SEQ ID NO: 972896
auacaccaugucuguucuc

SEQ ID NO: 972898 - RNA, 19 nt, Artificial Sequence
  Description of Artificial Sequence: Synthetic oligonucleotide
  Sense strand starting at position 2738 of SEQ ID NO: 914034
auauuacagcuguaagauu

SEQ ID NO: 972899 - RNA, 19 nt, Artificial Sequence
  Description of Artificial Sequence: Synthetic oligonucleotide
  Antisense strand to SEQ ID NO: 972898
aaucuuacagcuguaauau

SEQ ID NO: 972900 - RNA, 19 nt, Artificial Sequence
  Description of Artificial Sequence: Synthetic oligonucleotide
  Sense strand starting at position 418 of SEQ ID NO: 914034
caagaaagguaugccugaa

SEQ ID NO: 972901 - RNA, 19 nt, Artificial Sequence
  Description of Artificial Sequence: Synthetic oligonucleotide
  Antisense strand to SEQ ID NO: 972900
uucaggcauaccuuucuug

SEQ ID NO: 972902 - RNA, 19 nt, Artificial Sequence
  Description of Artificial Sequence: Synthetic oligonucleotide
  Sense strand starting at position 3777 of SEQ ID NO: 914034
auuucuuaucugugucauu

SEQ ID NO: 972903 - RNA, 19 nt, Artificial Sequence
  Description of Artificial Sequence: Synthetic oligonucleotide
  Antisense strand to SEQ ID NO: 972902
aaugacacagauaagaaau

SEQ ID NO: 972904 - RNA, 19 nt, Artificial Sequence
  Description of Artificial Sequence: Synthetic oligonucleotide
  Sense strand starting at position 3216 of SEQ ID NO: 914034
guucucagucaauaaauug

SEQ ID NO: 972905 - RNA, 19 nt, Artificial Sequence
  Description of Artificial Sequence: Synthetic oligonucleotide
  Antisense strand to SEQ ID NO: 972904
caauuuauugacugagaac

SEQ ID NO: 972906 - RNA, 19 nt, Artificial Sequence
  Description of Artificial Sequence: Synthetic oligonucleotide
  Sense strand starting at position 3812 of SEQ ID NO: 914034
uaauguacugaaugguaaa

SEQ ID NO: 972907 - RNA, 19 nt, Artificial Sequence
  Description of Artificial Sequence: Synthetic oligonucleotide
  Antisense strand to SEQ ID NO: 972906
uuuaccauucaguacauua

SEQ ID NO: 972908 - RNA, 19 nt, Artificial Sequence
  Description of Artificial Sequence: Synthetic oligonucleotide
  Sense strand starting at position 2471 of SEQ ID NO: 914034
aaaggaaucgucgagaggu

SEQ ID NO: 972909 - RNA, 19 nt, Artificial Sequence
  Description of Artificial Sequence: Synthetic oligonucleotide
  Antisense strand to SEQ ID NO: 972908
accucucgacgauuccuuu

SEQ ID NO: 972910 - RNA, 19 nt, Artificial Sequence
  Description of Artificial Sequence: Synthetic oligonucleotide
  Sense strand starting at position 296 of SEQ ID NO: 914034
agcugaagaacuggucaaa

SEQ ID NO: 972911 - RNA, 19 nt, Artificial Sequence
  Description of Artificial Sequence: Synthetic oligonucleotide
  Antisense strand to SEQ ID NO: 972910
uuugaccaguucuucagcu

SEQ ID NO: 972912 - RNA, 19 nt, Artificial Sequence
  Description of Artificial Sequence: Synthetic oligonucleotide
  Sense strand starting at position 2645 of SEQ ID NO: 914034
agacacgaaucuccauuau

SEQ ID NO: 972913 - RNA, 19 nt, Artificial Sequence
  Description of Artificial Sequence: Synthetic oligonucleotide
  Antisense strand to SEQ ID NO: 972912
auaauggagauucgugucu

SEQ ID NO: 972914 - RNA, 19 nt, Artificial Sequence
  Description of Artificial Sequence: Synthetic oligonucleotide
  Sense strand starting at position 3852 of SEQ ID NO: 914034
guauuagauuucuuugugu

SEQ ID NO: 972915 - RNA, 19 nt, Artificial Sequence
  Description of Artificial Sequence: Synthetic oligonucleotide
  Antisense strand to SEQ ID NO: 972914
acacaaagaaaucuaauac

SEQ ID NO: 972916 - RNA, 19 nt, Artificial Sequence
  Description of Artificial Sequence: Synthetic oligonucleotide
  Sense strand starting at position 2333 of SEQ ID NO: 914034
gaacucgguguccaauaaa

SEQ ID NO: 972917 - RNA, 19 nt, Artificial Sequence
  Description of Artificial Sequence: Synthetic oligonucleotide
  Antisense strand to SEQ ID NO: 972916
uuuauuggacaccgaguuc

SEQ ID NO: 972918 - RNA, 19 nt, Artificial Sequence
  Description of Artificial Sequence: Synthetic oligonucleotide
  Sense strand starting at position 2912 of SEQ ID NO: 914034
uccaguuaagacgauagua

SEQ ID NO: 972919 - RNA, 19 nt, Artificial Sequence
  Description of Artificial Sequence: Synthetic oligonucleotide
  Antisense strand to SEQ ID NO: 972918
uacuaucgucuuaacugga

SEQ ID NO: 972920 - RNA, 19 nt, Artificial Sequence
  Description of Artificial Sequence: Synthetic oligonucleotide
  Sense strand starting at position 732 of SEQ ID NO: 914034
uucuaaagcuuaucagaga

SEQ ID NO: 972921 - RNA, 19 nt, Artificial Sequence
  Description of Artificial Sequence: Synthetic oligonucleotide
  Antisense strand to SEQ ID NO: 972920
ucucugauaagcuuuagaa

SEQ ID NO: 972922 - RNA, 19 nt, Artificial Sequence
  Description of Artificial Sequence: Synthetic oligonucleotide
  Sense strand starting at position 137 of SEQ ID NO: 914034
ggaccuguacugcagauau

SEQ ID NO: 972923 - RNA, 19 nt, Artificial Sequence
  Description of Artificial Sequence: Synthetic oligonucleotide
  Antisense strand to SEQ ID NO: 972922
auaucugcaguacaggucc

SEQ ID NO: 972924 - RNA, 19 nt, Artificial Sequence
  Description of Artificial Sequence: Synthetic oligonucleotide
  Sense strand starting at position 3773 of SEQ ID NO: 914034
uucuauuucuuaucugugu

SEQ ID NO: 972925 - RNA, 19 nt, Artificial Sequence
  Description of Artificial Sequence: Synthetic oligonucleotide
  Antisense strand to SEQ ID NO: 972924
acacagauaagaaauagaa

SEQ ID NO: 972926 - RNA, 19 nt, Artificial Sequence
  Description of Artificial Sequence: Synthetic oligonucleotide
  Sense strand starting at position 1083 of SEQ ID NO: 914034
gcaaauauuuccgccgaga

SEQ ID NO: 972927 - RNA, 19 nt, Artificial Sequence
  Description of Artificial Sequence: Synthetic oligonucleotide
  Antisense strand to SEQ ID NO: 972926
ucucggcggaaauauuugc

SEQ ID NO: 972928 - RNA, 19 nt, Artificial Sequence
  Description of Artificial Sequence: Synthetic oligonucleotide
  Sense strand starting at position 417 of SEQ ID NO: 914034
ucaagaaagguaugccuga

SEQ ID NO: 972929 - RNA, 19 nt, Artificial Sequence
  Description of Artificial Sequence: Synthetic oligonucleotide
  Antisense strand to SEQ ID NO: 972928
ucaggcauaccuuucuuga

SEQ ID NO: 972930 - RNA, 19 nt, Artificial Sequence
  Description of Artificial Sequence: Synthetic oligonucleotide
  Sense strand starting at position 3158 of SEQ ID NO: 914034
cucugacuugcauggaaga

SEQ ID NO: 972931 - RNA, 19 nt, Artificial Sequence
  Description of Artificial Sequence: Synthetic oligonucleotide
  Antisense strand to SEQ ID NO: 972930
ucuuccaugcaagucagag

SEQ ID NO: 972932 - RNA, 19 nt, Artificial Sequence
  Description of Artificial Sequence: Synthetic oligonucleotide
  Sense strand starting at position 2629 of SEQ ID NO: 914034
ugcaaagacuguuuacaga

SEQ ID NO: 972933 - RNA, 19 nt, Artificial Sequence
  Description of Artificial Sequence: Synthetic oligonucleotide
  Antisense strand to SEQ ID NO: 972932
ucuguaaacagucuuugca

SEQ ID NO: 972934 - RNA, 19 nt, Artificial Sequence
  Description of Artificial Sequence: Synthetic oligonucleotide
  Sense strand starting at position 3809 of SEQ ID NO: 914034
gucuaauguacugaauggu

SEQ ID NO: 972935 - RNA, 19 nt, Artificial Sequence
  Description of Artificial Sequence: Synthetic oligonucleotide
  Antisense strand to SEQ ID NO: 972934
accauucaguacauuagac

SEQ ID NO: 972936 - RNA, 19 nt, Artificial Sequence
  Description of Artificial Sequence: Synthetic oligonucleotide
  Sense strand starting at position 3800 of SEQ ID NO: 914034
cucuaccaugucuaaugua

SEQ ID NO: 972937 - RNA, 19 nt, Artificial Sequence
  Description of Artificial Sequence: Synthetic oligonucleotide
  Antisense strand to SEQ ID NO: 972936
uacauuagacaugguagag

SEQ ID NO: 972938 - RNA, 19 nt, Artificial Sequence
  Description of Artificial Sequence: Synthetic oligonucleotide
  Sense strand starting at position 139 of SEQ ID NO: 914034
accuguacugcagauaucu

SEQ ID NO: 972939 - RNA, 19 nt, Artificial Sequence
  Description of Artificial Sequence: Synthetic oligonucleotide
  Antisense strand to SEQ ID NO: 972938
agauaucugcaguacaggu

SEQ ID NO: 972940 - RNA, 19 nt, Artificial Sequence
  Description of Artificial Sequence: Synthetic oligonucleotide
  Sense strand starting at position 3936 of SEQ ID NO: 914034
acagucacucuuuaggcau

SEQ ID NO: 972941 - RNA, 19 nt, Artificial Sequence
  Description of Artificial Sequence: Synthetic oligonucleotide
  Antisense strand to SEQ ID NO: 972940
augccuaaagagugacugu

SEQ ID NO: 972942 - RNA, 19 nt, Artificial Sequence
  Description of Artificial Sequence: Synthetic oligonucleotide
  Sense strand starting at position 2546 of SEQ ID NO: 914034
agaggaggauuucauguuu

SEQ ID NO: 972943 - RNA, 19 nt, Artificial Sequence
  Description of Artificial Sequence: Synthetic oligonucleotide
  Antisense strand to SEQ ID NO: 972942
aaacaugaaauccuccucu

SEQ ID NO: 972944 - RNA, 19 nt, Artificial Sequence
  Description of Artificial Sequence: Synthetic oligonucleotide
  Sense strand starting at position 2320 of SEQ ID NO: 914034
gagauauucgcaggaacuc

SEQ ID NO: 972945 - RNA, 19 nt, Artificial Sequence
  Description of Artificial Sequence: Synthetic oligonucleotide
  Antisense strand to SEQ ID NO: 972944
gaguuccugcgaauaucuc

SEQ ID NO: 972946 - RNA, 19 nt, Artificial Sequence
  Description of Artificial Sequence: Synthetic oligonucleotide
  Sense strand starting at position 2316 of SEQ ID NO: 914034
aagugagauauucgcagga

SEQ ID NO: 972947 - RNA, 19 nt, Artificial Sequence
  Description of Artificial Sequence: Synthetic oligonucleotide
  Antisense strand to SEQ ID NO: 972946
uccugcgaauaucucacuu

SEQ ID NO: 972948 - RNA, 19 nt, Artificial Sequence
  Description of Artificial Sequence: Synthetic oligonucleotide
  Sense strand starting at position 2985 of SEQ ID NO: 914034
uggagccuuuaauuaaagu

SEQ ID NO: 972949 - RNA, 19 nt, Artificial Sequence
  Description of Artificial Sequence: Synthetic oligonucleotide
  Antisense strand to SEQ ID NO: 972948
acuuuaauuaaaggcucca

SEQ ID NO: 972950 - RNA, 19 nt, Artificial Sequence
  Description of Artificial Sequence: Synthetic oligonucleotide
  Sense strand starting at position 2332 of SEQ ID NO: 914034
ggaacucgguguccaauaa

SEQ ID NO: 972951 - RNA, 19 nt, Artificial Sequence
  Description of Artificial Sequence: Synthetic oligonucleotide
  Antisense strand to SEQ ID NO: 972950
uuauuggacaccgaguucc

SEQ ID NO: 972952 - RNA, 19 nt, Artificial Sequence
  Description of Artificial Sequence: Synthetic oligonucleotide
  Sense strand starting at position 85 of SEQ ID NO: 914034
uguccaacacuggguauua

SEQ ID NO: 972953 - RNA, 19 nt, Artificial Sequence
  Description of Artificial Sequence: Synthetic oligonucleotide
  Antisense strand to SEQ ID NO: 972952
uaauacccaguguuggaca

SEQ ID NO: 972954 - RNA, 19 nt, Artificial Sequence
  Description of Artificial Sequence: Synthetic oligonucleotide
  Sense strand starting at position 3108 of SEQ ID NO: 914034
gccuuucaagggugauaug

SEQ ID NO: 972955 - RNA, 19 nt, Artificial Sequence
  Description of Artificial Sequence: Synthetic oligonucleotide
  Antisense strand to SEQ ID NO: 972954
cauaucacccuugaaaggc

SEQ ID NO: 972956 - RNA, 19 nt, Artificial Sequence
  Description of Artificial Sequence: Synthetic oligonucleotide
  Sense strand starting at position 3058 of SEQ ID NO: 914034
ucaguuucccugugauaaa

SEQ ID NO: 972957 - RNA, 19 nt, Artificial Sequence
  Description of Artificial Sequence: Synthetic oligonucleotide
  Antisense strand to SEQ ID NO: 972956
uuuaucacagggaaacuga

SEQ ID NO: 972958 - RNA, 19 nt, Artificial Sequence
  Description of Artificial Sequence: Synthetic oligonucleotide
  Sense strand starting at position 3390 of SEQ ID NO: 914034
ucagcauuauuugaggauc

SEQ ID NO: 972959 - RNA, 19 nt, Artificial Sequence
  Description of Artificial Sequence: Synthetic oligonucleotide
  Antisense strand to SEQ ID NO: 972958
gauccucaaauaaugcuga

SEQ ID NO: 972960 - RNA, 19 nt, Artificial Sequence
  Description of Artificial Sequence: Synthetic oligonucleotide
  Sense strand starting at position 97 of SEQ ID NO: 914034
gguauuagaguggguguaa

SEQ ID NO: 972961 - RNA, 19 nt, Artificial Sequence
  Description of Artificial Sequence: Synthetic oligonucleotide
  Antisense strand to SEQ ID NO: 972960
uuacacccacucuaauacc

SEQ ID NO: 972962 - RNA, 19 nt, Artificial Sequence
  Description of Artificial Sequence: Synthetic oligonucleotide
  Sense strand starting at position 96 of SEQ ID NO: 914034
ggguauuagagugggugua

SEQ ID NO: 972963 - RNA, 19 nt, Artificial Sequence
  Description of Artificial Sequence: Synthetic oligonucleotide
  Antisense strand to SEQ ID NO: 972962
uacacccacucuaauaccc

SEQ ID NO: 972964 - RNA, 19 nt, Artificial Sequence
  Description of Artificial Sequence: Synthetic oligonucleotide
  Sense strand starting at position 98 of SEQ ID NO: 914034
guauuagaguggguguaac

SEQ ID NO: 972965 - RNA, 19 nt, Artificial Sequence
  Description of Artificial Sequence: Synthetic oligonucleotide
  Antisense strand to SEQ ID NO: 972964
guuacacccacucuaauac

SEQ ID NO: 972966 - RNA, 19 nt, Artificial Sequence
  Description of Artificial Sequence: Synthetic oligonucleotide
  Sense strand starting at position 3559 of SEQ ID NO: 914035
gagagaaguggguaggcuu

SEQ ID NO: 972967 - RNA, 19 nt, Artificial Sequence
  Description of Artificial Sequence: Synthetic oligonucleotide
  Antisense strand to SEQ ID NO: 972966
aagccuacccacuucucuc

SEQ ID NO: 972968 - RNA, 19 nt, Artificial Sequence
  Description of Artificial Sequence: Synthetic oligonucleotide
  Sense strand starting at position 3156 of SEQ ID NO: 914035
auaagugaucugcacauca

SEQ ID NO: 972969 - RNA, 19 nt, Artificial Sequence
  Description of Artificial Sequence: Synthetic oligonucleotide
  Antisense strand to SEQ ID NO: 972968
ugaugugcagaucacuuau

SEQ ID NO: 972970 - RNA, 19 nt, Artificial Sequence
  Description of Artificial Sequence: Synthetic oligonucleotide
  Sense strand starting at position 2857 of SEQ ID NO: 914035
ggaaaugaugcgcauaaac

SEQ ID NO: 972971 - RNA, 19 nt, Artificial Sequence
  Description of Artificial Sequence: Synthetic oligonucleotide
  Antisense strand to SEQ ID NO: 972970
guuuaugcgcaucauuucc

SEQ ID NO: 972972 - RNA, 19 nt, Artificial Sequence
  Description of Artificial Sequence: Synthetic oligonucleotide
  Sense strand starting at position 840 of SEQ ID NO: 914035
gccaguuugagggacacuu

SEQ ID NO: 972973 - RNA, 19 nt, Artificial Sequence
  Description of Artificial Sequence: Synthetic oligonucleotide
  Antisense strand to SEQ ID NO: 972972
aagugucccucaaacuggc

SEQ ID NO: 972974 - RNA, 19 nt, Artificial Sequence
  Description of Artificial Sequence: Synthetic oligonucleotide
  Sense strand starting at position 3562 of SEQ ID NO: 914035
agaaguggguaggcuuaaa

SEQ ID NO: 972975 - RNA, 19 nt, Artificial Sequence
  Description of Artificial Sequence: Synthetic oligonucleotide
  Antisense strand to SEQ ID NO: 972974
uuuaagccuacccacuucu

SEQ ID NO: 972976 - RNA, 19 nt, Artificial Sequence
  Description of Artificial Sequence: Synthetic oligonucleotide
  Sense strand starting at position 738 of SEQ ID NO: 914035
gagaaagcccuuuguaagg

SEQ ID NO: 972977 - RNA, 19 nt, Artificial Sequence
  Description of Artificial Sequence: Synthetic oligonucleotide
  Antisense strand to SEQ ID NO: 972976
ccuuacaaagggcuuucuc

SEQ ID NO: 972978 - RNA, 19 nt, Artificial Sequence
  Description of Artificial Sequence: Synthetic oligonucleotide
  Sense strand starting at position 3166 of SEQ ID NO: 914035
ugcacaucacugcagauau

SEQ ID NO: 972979 - RNA, 19 nt, Artificial Sequence
  Description of Artificial Sequence: Synthetic oligonucleotide
  Antisense strand to SEQ ID NO: 972978
auaucugcagugaugugca

SEQ ID NO: 972980 - RNA, 19 nt, Artificial Sequence
  Description of Artificial Sequence: Synthetic oligonucleotide
  Sense strand starting at position 3370 of SEQ ID NO: 914035
aguuuauggagcuagaguu

SEQ ID NO: 972981 - RNA, 19 nt, Artificial Sequence
  Description of Artificial Sequence: Synthetic oligonucleotide
  Antisense strand to SEQ ID NO: 972980
aacucuagcuccauaaacu

SEQ ID NO: 972982 - RNA, 19 nt, Artificial Sequence
  Description of Artificial Sequence: Synthetic oligonucleotide
  Sense strand starting at position 3141 of SEQ ID NO: 914035
ugagcucagggcugaauaa

SEQ ID NO: 972983 - RNA, 19 nt, Artificial Sequence
  Description of Artificial Sequence: Synthetic oligonucleotide
  Antisense strand to SEQ ID NO: 972982
uuauucagcccugagcuca

SEQ ID NO: 972984 - RNA, 19 nt, Artificial Sequence
  Description of Artificial Sequence: Synthetic oligonucleotide
  Sense strand starting at position 3820 of SEQ ID NO: 914035
ggguguacccuguacacau

SEQ ID NO: 972985 - RNA, 19 nt, Artificial Sequence
  Description of Artificial Sequence: Synthetic oligonucleotide
  Antisense strand to SEQ ID NO: 972984
auguguacaggguacaccc

SEQ ID NO: 972986 - RNA, 19 nt, Artificial Sequence
  Description of Artificial Sequence: Synthetic oligonucleotide
  Sense strand starting at position 2856 of SEQ ID NO: 914035
uggaaaugaugcgcauaaa

SEQ ID NO: 972987 - RNA, 19 nt, Artificial Sequence
  Description of Artificial Sequence: Synthetic oligonucleotide
  Antisense strand to SEQ ID NO: 972986
uuuaugcgcaucauuucca

SEQ ID NO: 972988 - RNA, 19 nt, Artificial Sequence
  Description of Artificial Sequence: Synthetic oligonucleotide
  Sense strand starting at position 1327 of SEQ ID NO: 914035
cagaacucuccgcacgaau

SEQ ID NO: 972989 - RNA, 19 nt, Artificial Sequence
  Description of Artificial Sequence: Synthetic oligonucleotide
  Antisense strand to SEQ ID NO: 972988
auucgugcggagaguucug

SEQ ID NO: 972990 - RNA, 19 nt, Artificial Sequence
  Description of Artificial Sequence: Synthetic oligonucleotide
  Sense strand starting at position 2855 of SEQ ID NO: 914035
auggaaaugaugcgcauaa

SEQ ID NO: 972991 - RNA, 19 nt, Artificial Sequence
  Description of Artificial Sequence: Synthetic oligonucleotide
  Antisense strand to SEQ ID NO: 972990
uuaugcgcaucauuuccau

SEQ ID NO: 972992 - RNA, 19 nt, Artificial Sequence
  Description of Artificial Sequence: Synthetic oligonucleotide
  Sense strand starting at position 206 of SEQ ID NO: 914035
ggcucaccaucucuggauu

SEQ ID NO: 972993 - RNA, 19 nt, Artificial Sequence
  Description of Artificial Sequence: Synthetic oligonucleotide
  Antisense strand to SEQ ID NO: 972992
aauccagagauggugagcc

SEQ ID NO: 972994 - RNA, 19 nt, Artificial Sequence
  Description of Artificial Sequence: Synthetic oligonucleotide
  Sense strand starting at position 3539 of SEQ ID NO: 914035
uugccuccuaggugaauga

SEQ ID NO: 972995 - RNA, 19 nt, Artificial Sequence
  Description of Artificial Sequence: Synthetic oligonucleotide
  Antisense strand to SEQ ID NO: 972994
ucauucaccuaggaggcaa

SEQ ID NO: 972996 - RNA, 19 nt, Artificial Sequence
  Description of Artificial Sequence: Synthetic oligonucleotide
  Sense strand starting at position 3537 of SEQ ID NO: 914035
gauugccuccuaggugaau

SEQ ID NO: 972997 - RNA, 19 nt, Artificial Sequence
  Description of Artificial Sequence: Synthetic oligonucleotide
  Antisense strand to SEQ ID NO: 972996
auucaccuaggaggcaauc

SEQ ID NO: 972998 - RNA, 19 nt, Artificial Sequence
  Description of Artificial Sequence: Synthetic oligonucleotide
  Sense strand starting at position 1326 of SEQ ID NO: 914035
acagaacucuccgcacgaa

SEQ ID NO: 972999 - RNA, 19 nt, Artificial Sequence
  Description of Artificial Sequence: Synthetic oligonucleotide
  Antisense strand to SEQ ID NO: 972998
uucgugcggagaguucugu

SEQ ID NO: 973000 - RNA, 19 nt, Artificial Sequence
  Description of Artificial Sequence: Synthetic oligonucleotide
  Sense strand starting at position 460 of SEQ ID NO: 914035
gcgucagagcgccuuguuu

SEQ ID NO: 973001 - RNA, 19 nt, Artificial Sequence
  Description of Artificial Sequence: Synthetic oligonucleotide
  Antisense strand to SEQ ID NO: 973000
aaacaaggcgcucugacgc

SEQ ID NO: 973002 - RNA, 19 nt, Artificial Sequence
  Description of Artificial Sequence: Synthetic oligonucleotide
  Sense strand starting at position 1443 of SEQ ID NO: 914035
gauugagaccugcggcuau

SEQ ID NO: 973003 - RNA, 19 nt, Artificial Sequence
  Description of Artificial Sequence: Synthetic oligonucleotide
  Antisense strand to SEQ ID NO: 973002
auagccgcaggucucaauc

SEQ ID NO: 973004 - RNA, 19 nt, Artificial Sequence
  Description of Artificial Sequence: Synthetic oligonucleotide
  Sense strand starting at position 708 of SEQ ID NO: 914035
ggcuucuucuguucccaaa

SEQ ID NO: 973005 - RNA, 19 nt, Artificial Sequence
  Description of Artificial Sequence: Synthetic oligonucleotide
  Antisense strand to SEQ ID NO: 973004
uuugggaacagaagaagcc

SEQ ID NO: 973006 - RNA, 19 nt, Artificial Sequence
  Description of Artificial Sequence: Synthetic oligonucleotide
  Sense strand starting at position 2770 of SEQ ID NO: 914035
ggagaacucucaggagaug

SEQ ID NO: 973007 - RNA, 19 nt, Artificial Sequence
  Description of Artificial Sequence: Synthetic oligonucleotide
  Antisense strand to SEQ ID NO: 973006
caucuccugagaguucucc

SEQ ID NO: 973008 - RNA, 19 nt, Artificial Sequence
  Description of Artificial Sequence: Synthetic oligonucleotide
  Sense strand starting at position 950 of SEQ ID NO: 914035
accuaaugcugggauccua

SEQ ID NO: 973009 - RNA, 19 nt, Artificial Sequence
  Description of Artificial Sequence: Synthetic oligonucleotide
  Antisense strand to SEQ ID NO: 973008
uaggaucccagcauuaggu

SEQ ID NO: 973010 - RNA, 19 nt, Artificial Sequence
  Description of Artificial Sequence: Synthetic oligonucleotide
  Sense strand starting at position 2512 of SEQ ID NO: 914035
cgccauuucucagaggcga

SEQ ID NO: 973011 - RNA, 19 nt, Artificial Sequence
  Description of Artificial Sequence: Synthetic oligonucleotide
  Antisense strand to SEQ ID NO: 973010
ucgccucugagaaauggcg

SEQ ID NO: 973012 - RNA, 19 nt, Artificial Sequence
  Description of Artificial Sequence: Synthetic oligonucleotide
  Sense strand starting at position 3103 of SEQ ID NO: 914035
uugcuugcugugugcagaa

SEQ ID NO: 973013 - RNA, 19 nt, Artificial Sequence
  Description of Artificial Sequence: Synthetic oligonucleotide
  Antisense strand to SEQ ID NO: 973012
uucugcacacagcaagcaa

SEQ ID NO: 973014 - RNA, 19 nt, Artificial Sequence
  Description of Artificial Sequence: Synthetic oligonucleotide
  Sense strand starting at position 3620 of SEQ ID NO: 914035
gcccuuggcugacauugau

SEQ ID NO: 973015 - RNA, 19 nt, Artificial Sequence
  Description of Artificial Sequence: Synthetic oligonucleotide
  Antisense strand to SEQ ID NO: 973014
aucaaugucagccaagggc

SEQ ID NO: 973016 - RNA, 19 nt, Artificial Sequence
  Description of Artificial Sequence: Synthetic oligonucleotide
  Sense strand starting at position 3535 of SEQ ID NO: 914035
gugauugccuccuagguga

SEQ ID NO: 973017 - RNA, 19 nt, Artificial Sequence
  Description of Artificial Sequence: Synthetic oligonucleotide
  Antisense strand to SEQ ID NO: 973016
ucaccuaggaggcaaucac

SEQ ID NO: 973018 - RNA, 19 nt, Artificial Sequence
  Description of Artificial Sequence: Synthetic oligonucleotide
  Sense strand starting at position 3522 of SEQ ID NO: 914035
cagacaagcuccugugauu

SEQ ID NO: 973019 - RNA, 19 nt, Artificial Sequence
  Description of Artificial Sequence: Synthetic oligonucleotide
  Antisense strand to SEQ ID NO: 973018
aaucacaggagcuugucug

SEQ ID NO: 973020 - RNA, 19 nt, Artificial Sequence
  Description of Artificial Sequence: Synthetic oligonucleotide
  Sense strand starting at position 743 of SEQ ID NO: 914035
agcccuuuguaaggaguga

SEQ ID NO: 973021 - RNA, 19 nt, Artificial Sequence
  Description of Artificial Sequence: Synthetic oligonucleotide
  Antisense strand to SEQ ID NO: 973020
ucacuccuuacaaagggcu

SEQ ID NO: 973022 - RNA, 19 nt, Artificial Sequence
  Description of Artificial Sequence: Synthetic oligonucleotide
  Sense strand starting at position 897 of SEQ ID NO: 914035
ggcucacucugccagaguu

SEQ ID NO: 973023 - RNA, 19 nt, Artificial Sequence
  Description of Artificial Sequence: Synthetic oligonucleotide
  Antisense strand to SEQ ID NO: 973022
aacucuggcagagugagcc

SEQ ID NO: 973024 - RNA, 19 nt, Artificial Sequence
  Description of Artificial Sequence: Synthetic oligonucleotide
  Sense strand starting at position 78 of SEQ ID NO: 914035
agcuguggcuccugggaaa

SEQ ID NO: 973025 - RNA, 19 nt, Artificial Sequence
  Description of Artificial Sequence: Synthetic oligonucleotide
  Antisense strand to SEQ ID NO: 973024
uuucccaggagccacagcu

SEQ ID NO: 973026 - RNA, 19 nt, Artificial Sequence
  Description of Artificial Sequence: Synthetic oligonucleotide
  Sense strand starting at position 1310 of SEQ ID NO: 914035
gccgucuccugccgaaaca

SEQ ID NO: 973027 - RNA, 19 nt, Artificial Sequence
  Description of Artificial Sequence: Synthetic oligonucleotide
  Antisense strand to SEQ ID NO: 973026
uguuucggcaggagacggc

SEQ ID NO: 973028 - RNA, 19 nt, Artificial Sequence
  Description of Artificial Sequence: Synthetic oligonucleotide
  Sense strand starting at position 1527 of SEQ ID NO: 914036
ugggauucucagcaggauu

SEQ ID NO: 973029 - RNA, 19 nt, Artificial Sequence
  Description of Artificial Sequence: Synthetic oligonucleotide
  Antisense strand to SEQ ID NO: 973028
aauccugcugagaauccca

SEQ ID NO: 973030 - RNA, 19 nt, Artificial Sequence
  Description of Artificial Sequence: Synthetic oligonucleotide
  Sense strand starting at position 2253 of SEQ ID NO: 914036
cugagagccuaauuggaaa

SEQ ID NO: 973031 - RNA, 19 nt, Artificial Sequence
  Description of Artificial Sequence: Synthetic oligonucleotide
  Antisense strand to SEQ ID NO: 973030
uuuccaauuaggcucucag

SEQ ID NO: 973032 - RNA, 19 nt, Artificial Sequence
  Description of Artificial Sequence: Synthetic oligonucleotide
  Sense strand starting at position 1136 of SEQ ID NO: 914036
ugcguucuccaucaauuua

SEQ ID NO: 973033 - RNA, 19 nt, Artificial Sequence
  Description of Artificial Sequence: Synthetic oligonucleotide
  Antisense strand to SEQ ID NO: 973032
uaaauugauggagaacgca

SEQ ID NO: 973034 - RNA, 19 nt, Artificial Sequence
  Description of Artificial Sequence: Synthetic oligonucleotide
  Sense strand starting at position 1355 of SEQ ID NO: 914036
gagucuauuuaggcuagca

SEQ ID NO: 973035 - RNA, 19 nt, Artificial Sequence
  Description of Artificial Sequence: Synthetic oligonucleotide
  Antisense strand to SEQ ID NO: 973034
ugcuagccuaaauagacuc

SEQ ID NO: 973036 - RNA, 19 nt, Artificial Sequence
  Description of Artificial Sequence: Synthetic oligonucleotide
  Sense strand starting at position 2574 of SEQ ID NO: 914036
auaaguccugguuagauau

SEQ ID NO: 973037 - RNA, 19 nt, Artificial Sequence
  Description of Artificial Sequence: Synthetic oligonucleotide
  Antisense strand to SEQ ID NO: 973036
auaucuaaccaggacuuau

SEQ ID NO: 973038 - RNA, 19 nt, Artificial Sequence
  Description of Artificial Sequence: Synthetic oligonucleotide
  Sense strand starting at position 1544 of SEQ ID NO: 914036
uuuccaaggaguggauuaa

SEQ ID NO: 973039 - RNA, 19 nt, Artificial Sequence
  Description of Artificial Sequence: Synthetic oligonucleotide
  Antisense strand to SEQ ID NO: 973038
uuaauccacuccuuggaaa

SEQ ID NO: 973040 - RNA, 19 nt, Artificial Sequence
  Description of Artificial Sequence: Synthetic oligonucleotide
  Sense strand starting at position 2491 of SEQ ID NO: 914036
uaguuaugcgccuuggagu

SEQ ID NO: 973041 - RNA, 19 nt, Artificial Sequence
  Description of Artificial Sequence: Synthetic oligonucleotide
  Antisense strand to SEQ ID NO: 973040
acuccaaggcgcauaacua

SEQ ID NO: 973042 - RNA, 19 nt, Artificial Sequence
  Description of Artificial Sequence: Synthetic oligonucleotide
  Sense strand starting at position 2960 of SEQ ID NO: 914036
acaacuccaugaguuagau

SEQ ID NO: 973043 - RNA, 19 nt, Artificial Sequence
  Description of Artificial Sequence: Synthetic oligonucleotide
  Antisense strand to SEQ ID NO: 973042
aucuaacucauggaguugu

SEQ ID NO: 973044 - RNA, 19 nt, Artificial Sequence
  Description of Artificial Sequence: Synthetic oligonucleotide
  Sense strand starting at position 465 of SEQ ID NO: 914036
auggaauaauagcuguaaa

SEQ ID NO: 973045 - RNA, 19 nt, Artificial Sequence
  Description of Artificial Sequence: Synthetic oligonucleotide
  Antisense strand to SEQ ID NO: 973044
uuuacagcuauuauuccau

SEQ ID NO: 973046 - RNA, 19 nt, Artificial Sequence
  Description of Artificial Sequence: Synthetic oligonucleotide
  Sense strand starting at position 203 of SEQ ID NO: 914036
acaauagaucaaugccaug

SEQ ID NO: 973047 - RNA, 19 nt, Artificial Sequence
  Description of Artificial Sequence: Synthetic oligonucleotide
  Antisense strand to SEQ ID NO: 973046
cauggcauugaucuauugu

SEQ ID NO: 973048 - RNA, 19 nt, Artificial Sequence
  Description of Artificial Sequence: Synthetic oligonucleotide
  Sense strand starting at position 2972 of SEQ ID NO: 914036
guuagauaccauuauccuu

SEQ ID NO: 973049 - RNA, 19 nt, Artificial Sequence
  Description of Artificial Sequence: Synthetic oligonucleotide
  Antisense strand to SEQ ID NO: 973048
aaggauaaugguaucuaac

SEQ ID NO: 973050 - RNA, 19 nt, Artificial Sequence
  Description of Artificial Sequence: Synthetic oligonucleotide
  Sense strand starting at position 2658 of SEQ ID NO: 914036
cuaggacacugucuuagaa

SEQ ID NO: 973051 - RNA, 19 nt, Artificial Sequence
  Description of Artificial Sequence: Synthetic oligonucleotide
  Antisense strand to SEQ ID NO: 973050
uucuaagacaguguccuag

SEQ ID NO: 973052 - RNA, 19 nt, Artificial Sequence
  Description of Artificial Sequence: Synthetic oligonucleotide
  Sense strand starting at position 2358 of SEQ ID NO: 914036
ucaggcucacaugaguaua

SEQ ID NO: 973053 - RNA, 19 nt, Artificial Sequence
  Description of Artificial Sequence: Synthetic oligonucleotide
  Antisense strand to SEQ ID NO: 973052
uauacucaugugagccuga

SEQ ID NO: 973054 - RNA, 19 nt, Artificial Sequence
  Description of Artificial Sequence: Synthetic oligonucleotide
  Sense strand starting at position 2692 of SEQ ID NO: 914036
ccgucuugucagucuccga

SEQ ID NO: 973055 - RNA, 19 nt, Artificial Sequence
  Description of Artificial Sequence: Synthetic oligonucleotide
  Antisense strand to SEQ ID NO: 973054
ucggagacugacaagacgg

SEQ ID NO: 973056 - RNA, 19 nt, Artificial Sequence
  Description of Artificial Sequence: Synthetic oligonucleotide
  Sense strand starting at position 1514 of SEQ ID NO: 914036
gacugaucuuaugugggau

SEQ ID NO: 973057 - RNA, 19 nt, Artificial Sequence
  Description of Artificial Sequence: Synthetic oligonucleotide
  Antisense strand to SEQ ID NO: 973056
aucccacauaagaucaguc

SEQ ID NO: 973058 - RNA, 19 nt, Artificial Sequence
  Description of Artificial Sequence: Synthetic oligonucleotide
  Sense strand starting at position 132 of SEQ ID NO: 914036
aaagacaugcuaugguaca

SEQ ID NO: 973059 - RNA, 19 nt, Artificial Sequence
  Description of Artificial Sequence: Synthetic oligonucleotide
  Antisense strand to SEQ ID NO: 973058
uguaccauagcaugucuuu

SEQ ID NO: 973060 - RNA, 19 nt, Artificial Sequence
  Description of Artificial Sequence: Synthetic oligonucleotide
  Sense strand starting at position 847 of SEQ ID NO: 914036
aagcauuguguauauaaug

SEQ ID NO: 973061 - RNA, 19 nt, Artificial Sequence
  Description of Artificial Sequence: Synthetic oligonucleotide
  Antisense strand to SEQ ID NO: 973060
cauuauauacacaaugcuu

SEQ ID NO: 973062 - RNA, 19 nt, Artificial Sequence
  Description of Artificial Sequence: Synthetic oligonucleotide
  Sense strand starting at position 1218 of SEQ ID NO: 914036
gggauucuagguugaggua

SEQ ID NO: 973063 - RNA, 19 nt, Artificial Sequence
  Description of Artificial Sequence: Synthetic oligonucleotide
  Antisense strand to SEQ ID NO: 973062
uaccucaaccuagaauccc

SEQ ID NO: 973064 - RNA, 19 nt, Artificial Sequence
  Description of Artificial Sequence: Synthetic oligonucleotide
  Sense strand starting at position 1077 of SEQ ID NO: 914036
guucucauuaggugagaaa

SEQ ID NO: 973065 - RNA, 19 nt, Artificial Sequence
  Description of Artificial Sequence: Synthetic oligonucleotide
  Antisense strand to SEQ ID NO: 973064
uuucucaccuaaugagaac

SEQ ID NO: 973066 - RNA, 19 nt, Artificial Sequence
  Description of Artificial Sequence: Synthetic oligonucleotide
  Sense strand starting at position 3852 of SEQ ID NO: 914036
augagaagccaguauuguu

SEQ ID NO: 973067 - RNA, 19 nt, Artificial Sequence
  Description of Artificial Sequence: Synthetic oligonucleotide
  Antisense strand to SEQ ID NO: 973066
aacaauacuggcuucucau

SEQ ID NO: 973068 - RNA, 19 nt, Artificial Sequence
  Description of Artificial Sequence: Synthetic oligonucleotide
  Sense strand starting at position 728 of SEQ ID NO: 914036
ugaugagugcacuaaaguc

SEQ ID NO: 973069 - RNA, 19 nt, Artificial Sequence
  Description of Artificial Sequence: Synthetic oligonucleotide
  Antisense strand to SEQ ID NO: 973068
gacuuuagugcacucauca

SEQ ID NO: 973070 - RNA, 19 nt, Artificial Sequence
  Description of Artificial Sequence: Synthetic oligonucleotide
  Sense strand starting at position 3859 of SEQ ID NO: 914036
gccaguauuguugaaacag

SEQ ID NO: 973071 - RNA, 19 nt, Artificial Sequence
  Description of Artificial Sequence: Synthetic oligonucleotide
  Antisense strand to SEQ ID NO: 973070
cuguuucaacaauacuggc

SEQ ID NO: 973072 - RNA, 19 nt, Artificial Sequence
  Description of Artificial Sequence: Synthetic oligonucleotide
  Sense strand starting at position 972 of SEQ ID NO: 914036
auuguaggguucucaggaa

SEQ ID NO: 973073 - RNA, 19 nt, Artificial Sequence
  Description of Artificial Sequence: Synthetic oligonucleotide
  Antisense strand to SEQ ID NO: 973072
uuccugagaacccuacaau

SEQ ID NO: 973074 - RNA, 19 nt, Artificial Sequence
  Description of Artificial Sequence: Synthetic oligonucleotide
  Sense strand starting at position 1515 of SEQ ID NO: 914036
acugaucuuaugugggauu

SEQ ID NO: 973075 - RNA, 19 nt, Artificial Sequence
  Description of Artificial Sequence: Synthetic oligonucleotide
  Antisense strand to SEQ ID NO: 973074
aaucccacauaagaucagu

SEQ ID NO: 973076 - RNA, 19 nt, Artificial Sequence
  Description of Artificial Sequence: Synthetic oligonucleotide
  Sense strand starting at position 2416 of SEQ ID NO: 914036
ccugcugucagaggaagaa

SEQ ID NO: 973077 - RNA, 19 nt, Artificial Sequence
  Description of Artificial Sequence: Synthetic oligonucleotide
  Antisense strand to SEQ ID NO: 973076
uucuuccucugacagcagg

SEQ ID NO: 973078 - RNA, 19 nt, Artificial Sequence
  Description of Artificial Sequence: Synthetic oligonucleotide
  Sense strand starting at position 3606 of SEQ ID NO: 914036
uaugguguugguuaauaca

SEQ ID NO: 973079 - RNA, 19 nt, Artificial Sequence
  Description of Artificial Sequence: Synthetic oligonucleotide
  Antisense strand to SEQ ID NO: 973078
uguauuaaccaacaccaua

SEQ ID NO: 973080 - RNA, 19 nt, Artificial Sequence
  Description of Artificial Sequence: Synthetic oligonucleotide
  Sense strand starting at position 3641 of SEQ ID NO: 914036
ucaugccuucgagaucaca

SEQ ID NO: 973081 - RNA, 19 nt, Artificial Sequence
  Description of Artificial Sequence: Synthetic oligonucleotide
  Antisense strand to SEQ ID NO: 973080
ugugaucucgaaggcauga

SEQ ID NO: 973082 - RNA, 19 nt, Artificial Sequence
  Description of Artificial Sequence: Synthetic oligonucleotide
  Sense strand starting at position 2571 of SEQ ID NO: 914036
uauauaaguccugguuaga

SEQ ID NO: 973083 - RNA, 19 nt, Artificial Sequence
  Description of Artificial Sequence: Synthetic oligonucleotide
  Antisense strand to SEQ ID NO: 973082
ucuaaccaggacuuauaua

SEQ ID NO: 973084 - RNA, 19 nt, Artificial Sequence
  Description of Artificial Sequence: Synthetic oligonucleotide
  Sense strand starting at position 2884 of SEQ ID NO: 914036
agagcacuaucagcaacau

SEQ ID NO: 973085 - RNA, 19 nt, Artificial Sequence
  Description of Artificial Sequence: Synthetic oligonucleotide
  Antisense strand to SEQ ID NO: 973084
auguugcugauagugcucu

SEQ ID NO: 973086 - RNA, 19 nt, Artificial Sequence
  Description of Artificial Sequence: Synthetic oligonucleotide
  Sense strand starting at position 748 of SEQ ID NO: 914036
uagcauuugccacgaugua

SEQ ID NO: 973087 - RNA, 19 nt, Artificial Sequence
  Description of Artificial Sequence: Synthetic oligonucleotide
  Antisense strand to SEQ ID NO: 973086
uacaucguggcaaaugcua

SEQ ID NO: 973088 - RNA, 19 nt, Artificial Sequence
  Description of Artificial Sequence: Synthetic oligonucleotide
  Sense strand starting at position 1610 of SEQ ID NO: 914036
ugaucaucuccugggcaga

SEQ ID NO: 973089 - RNA, 19 nt, Artificial Sequence
  Description of Artificial Sequence: Synthetic oligonucleotide
  Antisense strand to SEQ ID NO: 973088
ucugcccaggagaugauca

SEQ ID NO: 973090 - RNA, 19 nt, Artificial Sequence
  Description of Artificial Sequence: Synthetic oligonucleotide
  Sense strand starting at position 1611 of SEQ ID NO: 914036
gaucaucuccugggcagau

SEQ ID NO: 973091 - RNA, 19 nt, Artificial Sequence
  Description of Artificial Sequence: Synthetic oligonucleotide
  Antisense strand to SEQ ID NO: 973090
aucugcccaggagaugauc

SEQ ID NO: 973092 - RNA, 19 nt, Artificial Sequence
  Description of Artificial Sequence: Synthetic oligonucleotide
  Sense strand starting at position 1517 of SEQ ID NO: 914036
ugaucuuaugugggauucu

SEQ ID NO: 973093 - RNA, 19 nt, Artificial Sequence
  Description of Artificial Sequence: Synthetic oligonucleotide
  Antisense strand to SEQ ID NO: 973092
agaaucccacauaagauca

SEQ ID NO: 973094 - RNA, 19 nt, Artificial Sequence
  Description of Artificial Sequence: Synthetic oligonucleotide
  Sense strand starting at position 1526 of SEQ ID NO: 914036
gugggauucucagcaggau

SEQ ID NO: 973095 - RNA, 19 nt, Artificial Sequence
  Description of Artificial Sequence: Synthetic oligonucleotide
  Antisense strand to SEQ ID NO: 973094
auccugcugagaaucccac

SEQ ID NO: 973096 - RNA, 19 nt, Artificial Sequence
  Description of Artificial Sequence: Synthetic oligonucleotide
  Sense strand starting at position 3793 of SEQ ID NO: 914036
gaaguauagcugggaagca

SEQ ID NO: 973097 - RNA, 19 nt, Artificial Sequence
  Description of Artificial Sequence: Synthetic oligonucleotide
  Antisense strand to SEQ ID NO: 973096
ugcuucccagcuauacuuc

SEQ ID NO: 973098 - RNA, 19 nt, Artificial Sequence
  Description of Artificial Sequence: Synthetic oligonucleotide
  Sense strand starting at position 1073 of SEQ ID NO: 914036
gucaguucucauuagguga

SEQ ID NO: 973099 - RNA, 19 nt, Artificial Sequence
  Description of Artificial Sequence: Synthetic oligonucleotide
  Antisense strand to SEQ ID NO: 973098
ucaccuaaugagaacugac

SEQ ID NO: 973100 - RNA, 19 nt, Artificial Sequence
  Description of Artificial Sequence: Synthetic oligonucleotide
  Sense strand starting at position 1272 of SEQ ID NO: 914036
agugcuugggcucauagga

SEQ ID NO: 973101 - RNA, 19 nt, Artificial Sequence
  Description of Artificial Sequence: Synthetic oligonucleotide
  Antisense strand to SEQ ID NO: 973100
uccuaugagcccaagcacu

SEQ ID NO: 973102 - RNA, 19 nt, Artificial Sequence
  Description of Artificial Sequence: Synthetic oligonucleotide
  Sense strand starting at position 2798 of SEQ ID NO: 914036
uaugcucuggcucaugaua

SEQ ID NO: 973103 - RNA, 19 nt, Artificial Sequence
  Description of Artificial Sequence: Synthetic oligonucleotide
  Antisense strand to SEQ ID NO: 973102
uaucaugagccagagcaua

SEQ ID NO: 973104 - RNA, 19 nt, Artificial Sequence
  Description of Artificial Sequence: Synthetic oligonucleotide
  Sense strand starting at position 2903 of SEQ ID NO: 914036
agcuaauauugagugaggu

SEQ ID NO: 973105 - RNA, 19 nt, Artificial Sequence
  Description of Artificial Sequence: Synthetic oligonucleotide
  Antisense strand to SEQ ID NO: 973104
accucacucaauauuagcu

SEQ ID NO: 973106 - RNA, 19 nt, Artificial Sequence
  Description of Artificial Sequence: Synthetic oligonucleotide
  Sense strand starting at position 3186 of SEQ ID NO: 914036
ucucaugaguccucacuua

SEQ ID NO: 973107 - RNA, 19 nt, Artificial Sequence
  Description of Artificial Sequence: Synthetic oligonucleotide
  Antisense strand to SEQ ID NO: 973106
uaagugaggacucaugaga

SEQ ID NO: 973108 - RNA, 19 nt, Artificial Sequence
  Description of Artificial Sequence: Synthetic oligonucleotide
  Sense strand starting at position 529 of SEQ ID NO: 914037
cauagagacugguuaacau

SEQ ID NO: 973109 - RNA, 19 nt, Artificial Sequence
  Description of Artificial Sequence: Synthetic oligonucleotide
  Antisense strand to SEQ ID NO: 973108
auguuaaccagucucuaug

SEQ ID NO: 973110 - RNA, 19 nt, Artificial Sequence
  Description of Artificial Sequence: Synthetic oligonucleotide
  Sense strand starting at position 3591 of SEQ ID NO: 914037
gaguccuggauccaaguga

SEQ ID NO: 973111 - RNA, 19 nt, Artificial Sequence
  Description of Artificial Sequence: Synthetic oligonucleotide
  Antisense strand to SEQ ID NO: 973110
ucacuuggauccaggacuc

SEQ ID NO: 973112 - RNA, 19 nt, Artificial Sequence
  Description of Artificial Sequence: Synthetic oligonucleotide
  Sense strand starting at position 591 of SEQ ID NO: 914037
agguuuacaugaccacuaa

SEQ ID NO: 973113 - RNA, 19 nt, Artificial Sequence
  Description of Artificial Sequence: Synthetic oligonucleotide
  Antisense strand to SEQ ID NO: 973112
uuaguggucauguaaaccu

SEQ ID NO: 973114 - RNA, 19 nt, Artificial Sequence
  Description of Artificial Sequence: Synthetic oligonucleotide
  Sense strand starting at position 561 of SEQ ID NO: 914037
ggaauucuuugacucacau

SEQ ID NO: 973115 - RNA, 19 nt, Artificial Sequence
  Description of Artificial Sequence: Synthetic oligonucleotide
  Antisense strand to SEQ ID NO: 973114
augugagucaaagaauucc

SEQ ID NO: 973116 - RNA, 19 nt, Artificial Sequence
  Description of Artificial Sequence: Synthetic oligonucleotide
  Sense strand starting at position 3587 of SEQ ID NO: 914037
ggcagaguccuggauccaa

SEQ ID NO: 973117 - RNA, 19 nt, Artificial Sequence
  Description of Artificial Sequence: Synthetic oligonucleotide
  Antisense strand to SEQ ID NO: 973116
uuggauccaggacucugcc

SEQ ID NO: 973118 - RNA, 19 nt, Artificial Sequence
  Description of Artificial Sequence: Synthetic oligonucleotide
  Sense strand starting at position 211 of SEQ ID NO: 914037
gagaaaggugcuggaacau

SEQ ID NO: 973119 - RNA, 19 nt, Artificial Sequence
  Description of Artificial Sequence: Synthetic oligonucleotide
  Antisense strand to SEQ ID NO: 973118
auguuccagcaccuuucuc

SEQ ID NO: 973120 - RNA, 19 nt, Artificial Sequence
  Description of Artificial Sequence: Synthetic oligonucleotide
  Sense strand starting at position 3821 of SEQ ID NO: 914037
ugaaucccuccugagcuaa

SEQ ID NO: 973121 - RNA, 19 nt, Artificial Sequence
  Description of Artificial Sequence: Synthetic oligonucleotide
  Antisense strand to SEQ ID NO: 973120
uuagcucaggagggauuca

SEQ ID NO: 973122 - RNA, 19 nt, Artificial Sequence
  Description of Artificial Sequence: Synthetic oligonucleotide
  Sense strand starting at position 3020 of SEQ ID NO: 914037
uuugguuugcaagaaauug

SEQ ID NO: 973123 - RNA, 19 nt, Artificial Sequence
  Description of Artificial Sequence: Synthetic oligonucleotide
  Antisense strand to SEQ ID NO: 973122
caauuucuugcaaaccaaa

SEQ ID NO: 973124 - RNA, 19 nt, Artificial Sequence
  Description of Artificial Sequence: Synthetic oligonucleotide
  Sense strand starting at position 3560 of SEQ ID NO: 914037
uuucguaagagcgggauuu

SEQ ID NO: 973125 - RNA, 19 nt, Artificial Sequence
  Description of Artificial Sequence: Synthetic oligonucleotide
  Antisense strand to SEQ ID NO: 973124
aaaucccgcucuuacgaaa

SEQ ID NO: 973126 - RNA, 19 nt, Artificial Sequence
  Description of Artificial Sequence: Synthetic oligonucleotide
  Sense strand starting at position 427 of SEQ ID NO: 914037
caaguaauuugcccagugu

SEQ ID NO: 973127 - RNA, 19 nt, Artificial Sequence
  Description of Artificial Sequence: Synthetic oligonucleotide
  Antisense strand to SEQ ID NO: 973126
acacugggcaaauuacuug

SEQ ID NO: 973128 - RNA, 19 nt, Artificial Sequence
  Description of Artificial Sequence: Synthetic oligonucleotide
  Sense strand starting at position 780 of SEQ ID NO: 914037
ccucauucugcagaaaggu

SEQ ID NO: 973129 - RNA, 19 nt, Artificial Sequence
  Description of Artificial Sequence: Synthetic oligonucleotide
  Antisense strand to SEQ ID NO: 973128
accuuucugcagaaugagg

SEQ ID NO: 973130 - RNA, 19 nt, Artificial Sequence
  Description of Artificial Sequence: Synthetic oligonucleotide
  Sense strand starting at position 1168 of SEQ ID NO: 914037
agcuauugugaugagcaaa

SEQ ID NO: 973131 - RNA, 19 nt, Artificial Sequence
  Description of Artificial Sequence: Synthetic oligonucleotide
  Antisense strand to SEQ ID NO: 973130
uuugcucaucacaauagcu

SEQ ID NO: 973132 - RNA, 19 nt, Artificial Sequence
  Description of Artificial Sequence: Synthetic oligonucleotide
  Sense strand starting at position 3516 of SEQ ID NO: 914037
augggaucaagcugugaua

SEQ ID NO: 973133 - RNA, 19 nt, Artificial Sequence
  Description of Artificial Sequence: Synthetic oligonucleotide
  Antisense strand to SEQ ID NO: 973132
uaucacagcuugaucccau

SEQ ID NO: 973134 - RNA, 19 nt, Artificial Sequence
  Description of Artificial Sequence: Synthetic oligonucleotide
  Sense strand starting at position 3797 of SEQ ID NO: 914037
acugguguggcuuaagaca

SEQ ID NO: 973135 - RNA, 19 nt, Artificial Sequence
  Description of Artificial Sequence: Synthetic oligonucleotide
  Antisense strand to SEQ ID NO: 973134
ugucuuaagccacaccagu

SEQ ID NO: 973136 - RNA, 19 nt, Artificial Sequence
  Description of Artificial Sequence: Synthetic oligonucleotide
  Sense strand starting at position 1233 of SEQ ID NO: 914037
gggucuuuggccuaucaag

SEQ ID NO: 973137 - RNA, 19 nt, Artificial Sequence
  Description of Artificial Sequence: Synthetic oligonucleotide
  Antisense strand to SEQ ID NO: 973136
cuugauaggccaaagaccc

SEQ ID NO: 973138 - RNA, 19 nt, Artificial Sequence
  Description of Artificial Sequence: Synthetic oligonucleotide
  Sense strand starting at position 228 of SEQ ID NO: 914037
aucagcucuccugagucaa

SEQ ID NO: 973139 - RNA, 19 nt, Artificial Sequence
  Description of Artificial Sequence: Synthetic oligonucleotide
  Antisense strand to SEQ ID NO: 973138
uugacucaggagagcugau

SEQ ID NO: 973140 - RNA, 19 nt, Artificial Sequence
  Description of Artificial Sequence: Synthetic oligonucleotide
  Sense strand starting at position 197 of SEQ ID NO: 914037
ccacuuugcagguggagaa

SEQ ID NO: 973141 - RNA, 19 nt, Artificial Sequence
  Description of Artificial Sequence: Synthetic oligonucleotide
  Antisense strand to SEQ ID NO: 973140
uucuccaccugcaaagugg

SEQ ID NO: 973142 - RNA, 19 nt, Artificial Sequence
  Description of Artificial Sequence: Synthetic oligonucleotide
  Sense strand starting at position 3518 of SEQ ID NO: 914037
gggaucaagcugugauacu

SEQ ID NO: 973143 - RNA, 19 nt, Artificial Sequence
  Description of Artificial Sequence: Synthetic oligonucleotide
  Antisense strand to SEQ ID NO: 973142
aguaucacagcuugauccc

SEQ ID NO: 973144 - RNA, 19 nt, Artificial Sequence
  Description of Artificial Sequence: Synthetic oligonucleotide
  Sense strand starting at position 2827 of SEQ ID NO: 914037
ucgggacacuucucuaacu

SEQ ID NO: 973145 - RNA, 19 nt, Artificial Sequence
  Description of Artificial Sequence: Synthetic oligonucleotide
  Antisense strand to SEQ ID NO: 973144
aguuagagaagugucccga

SEQ ID NO: 973146 - RNA, 19 nt, Artificial Sequence
  Description of Artificial Sequence: Synthetic oligonucleotide
  Sense strand starting at position 2828 of SEQ ID NO: 914037
cgggacacuucucuaacuu

SEQ ID NO: 973147 - RNA, 19 nt, Artificial Sequence
  Description of Artificial Sequence: Synthetic oligonucleotide
  Antisense strand to SEQ ID NO: 973146
aaguuagagaagugucccg

SEQ ID NO: 973148 - RNA, 19 nt, Artificial Sequence
  Description of Artificial Sequence: Synthetic oligonucleotide
  Sense strand starting at position 1544 of SEQ ID NO: 914037
gccguuccgcuuucggaau

SEQ ID NO: 973149 - RNA, 19 nt, Artificial Sequence
  Description of Artificial Sequence: Synthetic oligonucleotide
  Antisense strand to SEQ ID NO: 973148
auuccgaaagcggaacggc

SEQ ID NO: 973150 - RNA, 19 nt, Artificial Sequence
  Description of Artificial Sequence: Synthetic oligonucleotide
  Sense strand starting at position 3075 of SEQ ID NO: 914037
uggcuuugucucuaaauug

SEQ ID NO: 973151 - RNA, 19 nt, Artificial Sequence
  Description of Artificial Sequence: Synthetic oligonucleotide
  Antisense strand to SEQ ID NO: 973150
caauuuagagacaaagcca

SEQ ID NO: 973152 - RNA, 19 nt, Artificial Sequence
  Description of Artificial Sequence: Synthetic oligonucleotide
  Sense strand starting at position 1580 of SEQ ID NO: 914037
cuccaaaguuuggagauuu

SEQ ID NO: 973153 - RNA, 19 nt, Artificial Sequence
  Description of Artificial Sequence: Synthetic oligonucleotide
  Antisense strand to SEQ ID NO: 973152
aaaucuccaaacuuuggag

SEQ ID NO: 973154 - RNA, 19 nt, Artificial Sequence
  Description of Artificial Sequence: Synthetic oligonucleotide
  Sense strand starting at position 438 of SEQ ID NO: 914037
cccaguguugcugaaugac

SEQ ID NO: 973155 - RNA, 19 nt, Artificial Sequence
  Description of Artificial Sequence: Synthetic oligonucleotide
  Antisense strand to SEQ ID NO: 973154
gucauucagcaacacuggg

SEQ ID NO: 973156 - RNA, 19 nt, Artificial Sequence
  Description of Artificial Sequence: Synthetic oligonucleotide
  Sense strand starting at position 441 of SEQ ID NO: 914037
aguguugcugaaugacaga

SEQ ID NO: 973157 - RNA, 19 nt, Artificial Sequence
  Description of Artificial Sequence: Synthetic oligonucleotide
  Antisense strand to SEQ ID NO: 973156
ucugucauucagcaacacu

SEQ ID NO: 973158 - RNA, 19 nt, Artificial Sequence
  Description of Artificial Sequence: Synthetic oligonucleotide
  Sense strand starting at position 473 of SEQ ID NO: 914037
ccaagaguuuaauucgagu

SEQ ID NO: 973159 - RNA, 19 nt, Artificial Sequence
  Description of Artificial Sequence: Synthetic oligonucleotide
  Antisense strand to SEQ ID NO: 973158
acucgaauuaaacucuugg

SEQ ID NO: 973160 - RNA, 19 nt, Artificial Sequence
  Description of Artificial Sequence: Synthetic oligonucleotide
  Sense strand starting at position 3804 of SEQ ID NO: 914037
uggcuuaagacaugcuaug

SEQ ID NO: 973161 - RNA, 19 nt, Artificial Sequence
  Description of Artificial Sequence: Synthetic oligonucleotide
  Antisense strand to SEQ ID NO: 973160
cauagcaugucuuaagcca

SEQ ID NO: 973162 - RNA, 19 nt, Artificial Sequence
  Description of Artificial Sequence: Synthetic oligonucleotide
  Sense strand starting at position 942 of SEQ ID NO: 914037
ugaaucuuggcgugggaag

SEQ ID NO: 973163 - RNA, 19 nt, Artificial Sequence
  Description of Artificial Sequence: Synthetic oligonucleotide
  Antisense strand to SEQ ID NO: 973162
cuucccacgccaagauuca

SEQ ID NO: 973164 - RNA, 19 nt, Artificial Sequence
  Description of Artificial Sequence: Synthetic oligonucleotide
  Sense strand starting at position 3017 of SEQ ID NO: 914037
acauuugguuugcaagaaa

SEQ ID NO: 973165 - RNA, 19 nt, Artificial Sequence
  Description of Artificial Sequence: Synthetic oligonucleotide
  Antisense strand to SEQ ID NO: 973164
uuucuugcaaaccaaaugu

SEQ ID NO: 973166 - RNA, 19 nt, Artificial Sequence
  Description of Artificial Sequence: Synthetic oligonucleotide
  Sense strand starting at position 3082 of SEQ ID NO: 914037
gucucuaaauuggucuuua

SEQ ID NO: 973167 - RNA, 19 nt, Artificial Sequence
  Description of Artificial Sequence: Synthetic oligonucleotide
  Antisense strand to SEQ ID NO: 973166
uaaagaccaauuuagagac

SEQ ID NO: 973168 - RNA, 19 nt, Artificial Sequence
  Description of Artificial Sequence: Synthetic oligonucleotide
  Sense strand starting at position 310 of SEQ ID NO: 914037
ucaagcuaccuaugguuua

SEQ ID NO: 973169 - RNA, 19 nt, Artificial Sequence
  Description of Artificial Sequence: Synthetic oligonucleotide
  Antisense strand to SEQ ID NO: 973168
uaaaccauagguagcuuga

SEQ ID NO: 973170 - RNA, 19 nt, Artificial Sequence
  Description of Artificial Sequence: Synthetic oligonucleotide
  Sense strand starting at position 627 of SEQ ID NO: 914037
guacuugccgggcaacaau

SEQ ID NO: 973171 - RNA, 19 nt, Artificial Sequence
  Description of Artificial Sequence: Synthetic oligonucleotide
  Antisense strand to SEQ ID NO: 973170
auuguugcccggcaaguac

SEQ ID NO: 973172 - RNA, 19 nt, Artificial Sequence
  Description of Artificial Sequence: Synthetic oligonucleotide
  Sense strand starting at position 1244 of SEQ ID NO: 914037
cuaucaaguugcccgagau

SEQ ID NO: 973173 - RNA, 19 nt, Artificial Sequence
  Description of Artificial Sequence: Synthetic oligonucleotide
  Antisense strand to SEQ ID NO: 973172
aucucgggcaacuugauag

SEQ ID NO: 973174 - RNA, 19 nt, Artificial Sequence
  Description of Artificial Sequence: Synthetic oligonucleotide
  Sense strand starting at position 1245 of SEQ ID NO: 914037
uaucaaguugcccgagauc

SEQ ID NO: 973175 - RNA, 19 nt, Artificial Sequence
  Description of Artificial Sequence: Synthetic oligonucleotide
  Antisense strand to SEQ ID NO: 973174
gaucucgggcaacuugaua

SEQ ID NO: 973176 - RNA, 19 nt, Artificial Sequence
  Description of Artificial Sequence: Synthetic oligonucleotide
  Sense strand starting at position 3032 of SEQ ID NO: 914037
gaaauugucuuucuggcga

SEQ ID NO: 973177 - RNA, 19 nt, Artificial Sequence
  Description of Artificial Sequence: Synthetic oligonucleotide
  Antisense strand to SEQ ID NO: 973176
ucgccagaaagacaauuuc

SEQ ID NO: 973178 - RNA, 19 nt, Artificial Sequence
  Description of Artificial Sequence: Synthetic oligonucleotide
  Sense strand starting at position 3074 of SEQ ID NO: 914037
cuggcuuugucucuaaauu

SEQ ID NO: 973179 - RNA, 19 nt, Artificial Sequence
  Description of Artificial Sequence: Synthetic oligonucleotide
  Antisense strand to SEQ ID NO: 973178
aauuuagagacaaagccag

SEQ ID NO: 973180 - RNA, 19 nt, Artificial Sequence
  Description of Artificial Sequence: Synthetic oligonucleotide
  Sense strand starting at position 1292 of SEQ ID NO: 914037
caaggcgaauccuucguaa

SEQ ID NO: 973181 - RNA, 19 nt, Artificial Sequence
  Description of Artificial Sequence: Synthetic oligonucleotide
  Antisense strand to SEQ ID NO: 973180
uuacgaaggauucgccuug

SEQ ID NO: 973182 - RNA, 19 nt, Artificial Sequence
  Description of Artificial Sequence: Synthetic oligonucleotide
  Sense strand starting at position 3775 of SEQ ID NO: 914037
acccuagcguguccugaaa

SEQ ID NO: 973183 - RNA, 19 nt, Artificial Sequence
  Description of Artificial Sequence: Synthetic oligonucleotide
  Antisense strand to SEQ ID NO: 973182
uuucaggacacgcuagggu

SEQ ID NO: 973184 - RNA, 19 nt, Artificial Sequence
  Description of Artificial Sequence: Synthetic oligonucleotide
  Sense strand starting at position 559 of SEQ ID NO: 914037
agggaauucuuugacucac

SEQ ID NO: 973185 - RNA, 19 nt, Artificial Sequence
  Description of Artificial Sequence: Synthetic oligonucleotide
  Antisense strand to SEQ ID NO: 973184
gugagucaaagaauucccu

SEQ ID NO: 973186 - RNA, 19 nt, Artificial Sequence
  Description of Artificial Sequence: Synthetic oligonucleotide
  Sense strand starting at position 52 of SEQ ID NO: 914037
cgcguacagggcuauucau

SEQ ID NO: 973187 - RNA, 19 nt, Artificial Sequence
  Description of Artificial Sequence: Synthetic oligonucleotide
  Antisense strand to SEQ ID NO: 973186
augaauagcccuguacgcg

SEQ ID NO: 973188 - RNA, 19 nt, Artificial Sequence
  Description of Artificial Sequence: Synthetic oligonucleotide
  Sense strand starting at position 2145 of SEQ ID NO: 914038
gccaaacuguuauuuguag

SEQ ID NO: 973189 - RNA, 19 nt, Artificial Sequence
  Description of Artificial Sequence: Synthetic oligonucleotide
  Antisense strand to SEQ ID NO: 973188
cuacaaauaacaguuuggc

SEQ ID NO: 973190 - RNA, 19 nt, Artificial Sequence
  Description of Artificial Sequence: Synthetic oligonucleotide
  Sense strand starting at position 1061 of SEQ ID NO: 914038
ugcuguuaauuugcaggaa

SEQ ID NO: 973191 - RNA, 19 nt, Artificial Sequence
  Description of Artificial Sequence: Synthetic oligonucleotide
  Antisense strand to SEQ ID NO: 973190
uuccugcaaauuaacagca

SEQ ID NO: 973192 - RNA, 19 nt, Artificial Sequence
  Description of Artificial Sequence: Synthetic oligonucleotide
  Sense strand starting at position 1598 of SEQ ID NO: 914038
auucccuugccagagagau

SEQ ID NO: 973193 - RNA, 19 nt, Artificial Sequence
  Description of Artificial Sequence: Synthetic oligonucleotide
  Antisense strand to SEQ ID NO: 973192
aucucucuggcaagggaau

SEQ ID NO: 973194 - RNA, 19 nt, Artificial Sequence
  Description of Artificial Sequence: Synthetic oligonucleotide
  Sense strand starting at position 1542 of SEQ ID NO: 914038
aguguuuaucggcuccagu

SEQ ID NO: 973195 - RNA, 19 nt, Artificial Sequence
  Description of Artificial Sequence: Synthetic oligonucleotide
  Antisense strand to SEQ ID NO: 973194
acuggagccgauaaacacu

SEQ ID NO: 973196 - RNA, 19 nt, Artificial Sequence
  Description of Artificial Sequence: Synthetic oligonucleotide
  Sense strand starting at position 1543 of SEQ ID NO: 914038
guguuuaucggcuccagua

SEQ ID NO: 973197 - RNA, 19 nt, Artificial Sequence
  Description of Artificial Sequence: Synthetic oligonucleotide
  Antisense strand to SEQ ID NO: 973196
uacuggagccgauaaacac

SEQ ID NO: 973198 - RNA, 19 nt, Artificial Sequence
  Description of Artificial Sequence: Synthetic oligonucleotide
  Sense strand starting at position 2294 of SEQ ID NO: 914038
cugacauuucugcguaaag

SEQ ID NO: 973199 - RNA, 19 nt, Artificial Sequence
  Description of Artificial Sequence: Synthetic oligonucleotide
  Antisense strand to SEQ ID NO: 973198
cuuuacgcagaaaugucag

SEQ ID NO: 973200 - RNA, 19 nt, Artificial Sequence
  Description of Artificial Sequence: Synthetic oligonucleotide
  Sense strand starting at position 2296 of SEQ ID NO: 914038
gacauuucugcguaaagcu

SEQ ID NO: 973201 - RNA, 19 nt, Artificial Sequence
  Description of Artificial Sequence: Synthetic oligonucleotide
  Antisense strand to SEQ ID NO: 973200
agcuuuacgcagaaauguc

SEQ ID NO: 973202 - RNA, 19 nt, Artificial Sequence
  Description of Artificial Sequence: Synthetic oligonucleotide
  Sense strand starting at position 770 of SEQ ID NO: 914038
gguggaaucauccagcaca

SEQ ID NO: 973203 - RNA, 19 nt, Artificial Sequence
  Description of Artificial Sequence: Synthetic oligonucleotide
  Antisense strand to SEQ ID NO: 973202
ugugcuggaugauuccacc

SEQ ID NO: 973204 - RNA, 19 nt, Artificial Sequence
  Description of Artificial Sequence: Synthetic oligonucleotide
  Sense strand starting at position 837 of SEQ ID NO: 914038
uggcuucuggcgucaguaa

SEQ ID NO: 973205 - RNA, 19 nt, Artificial Sequence
  Description of Artificial Sequence: Synthetic oligonucleotide
  Antisense strand to SEQ ID NO: 973204
uuacugacgccagaagcca

SEQ ID NO: 973206 - RNA, 19 nt, Artificial Sequence
  Description of Artificial Sequence: Synthetic oligonucleotide
  Sense strand starting at position 3308 of SEQ ID NO: 914038
ugaaauagaucacuauguu

SEQ ID NO: 973207 - RNA, 19 nt, Artificial Sequence
  Description of Artificial Sequence: Synthetic oligonucleotide
  Antisense strand to SEQ ID NO: 973206
aacauagugaucuauuuca

SEQ ID NO: 973208 - RNA, 19 nt, Artificial Sequence
  Description of Artificial Sequence: Synthetic oligonucleotide
  Sense strand starting at position 1606 of SEQ ID NO: 914038
gccagagagaucugauuga

SEQ ID NO: 973209 - RNA, 19 nt, Artificial Sequence
  Description of Artificial Sequence: Synthetic oligonucleotide
  Antisense strand to SEQ ID NO: 973208
ucaaucagaucucucuggc

SEQ ID NO: 973210 - RNA, 19 nt, Artificial Sequence
  Description of Artificial Sequence: Synthetic oligonucleotide
  Sense strand starting at position 2293 of SEQ ID NO: 914038
ccugacauuucugcguaaa

SEQ ID NO: 973211 - RNA, 19 nt, Artificial Sequence
  Description of Artificial Sequence: Synthetic oligonucleotide
  Antisense strand to SEQ ID NO: 973210
uuuacgcagaaaugucagg

SEQ ID NO: 973212 - RNA, 19 nt, Artificial Sequence
  Description of Artificial Sequence: Synthetic oligonucleotide
  Sense strand starting at position 715 of SEQ ID NO: 914038
cuguuaagaguccaaucca

SEQ ID NO: 973213 - RNA, 19 nt, Artificial Sequence
  Description of Artificial Sequence: Synthetic oligonucleotide
  Antisense strand to SEQ ID NO: 973212
uggauuggacucuuaacag

SEQ ID NO: 973214 - RNA, 19 nt, Artificial Sequence
  Description of Artificial Sequence: Synthetic oligonucleotide
  Sense strand starting at position 1627 of SEQ ID NO: 914038
ugcaguuagcaggaaauaa

SEQ ID NO: 973215 - RNA, 19 nt, Artificial Sequence
  Description of Artificial Sequence: Synthetic oligonucleotide
  Antisense strand to SEQ ID NO: 973214
uuauuuccugcuaacugca

SEQ ID NO: 973216 - RNA, 19 nt, Artificial Sequence
  Description of Artificial Sequence: Synthetic oligonucleotide
  Sense strand starting at position 1039 of SEQ ID NO: 914038
gaaugcucacagcauggau

SEQ ID NO: 973217 - RNA, 19 nt, Artificial Sequence
  Description of Artificial Sequence: Synthetic oligonucleotide
  Antisense strand to SEQ ID NO: 973216
auccaugcugugagcauuc

SEQ ID NO: 973218 - RNA, 19 nt, Artificial Sequence
  Description of Artificial Sequence: Synthetic oligonucleotide
  Sense strand starting at position 3237 of SEQ ID NO: 914038
ggaaauauuuaccaaguga

SEQ ID NO: 973219 - RNA, 19 nt, Artificial Sequence
  Description of Artificial Sequence: Synthetic oligonucleotide
  Antisense strand to SEQ ID NO: 973218
ucacuugguaaauauuucc

SEQ ID NO: 973220 - RNA, 19 nt, Artificial Sequence
  Description of Artificial Sequence: Synthetic oligonucleotide
  Sense strand starting at position 3528 of SEQ ID NO: 914038
ugauaaagguguuugauga

SEQ ID NO: 973221 - RNA, 19 nt, Artificial Sequence
  Description of Artificial Sequence: Synthetic oligonucleotide
  Antisense strand to SEQ ID NO: 973220
ucaucaaacaccuuuauca

SEQ ID NO: 973222 - RNA, 19 nt, Artificial Sequence
  Description of Artificial Sequence: Synthetic oligonucleotide
  Sense strand starting at position 3529 of SEQ ID NO: 914038
gauaaagguguuugaugau

SEQ ID NO: 973223 - RNA, 19 nt, Artificial Sequence
  Description of Artificial Sequence: Synthetic oligonucleotide
  Antisense strand to SEQ ID NO: 973222
aucaucaaacaccuuuauc

SEQ ID NO: 973224 - RNA, 19 nt, Artificial Sequence
  Description of Artificial Sequence: Synthetic oligonucleotide
  Sense strand starting at position 1486 of SEQ ID NO: 914038
uguguaaggcuccagagaa

SEQ ID NO: 973225 - RNA, 19 nt, Artificial Sequence
  Description of Artificial Sequence: Synthetic oligonucleotide
  Antisense strand to SEQ ID NO: 973224
uucucuggagccuuacaca

SEQ ID NO: 973226 - RNA, 19 nt, Artificial Sequence
  Description of Artificial Sequence: Synthetic oligonucleotide
  Sense strand starting at position 1087 of SEQ ID NO: 914038
guaaucauccugcauagac

SEQ ID NO: 973227 - RNA, 19 nt, Artificial Sequence
  Description of Artificial Sequence: Synthetic oligonucleotide
  Antisense strand to SEQ ID NO: 973226
gucuaugcaggaugauuac

SEQ ID NO: 973228 - RNA, 19 nt, Artificial Sequence
  Description of Artificial Sequence: Synthetic oligonucleotide
  Sense strand starting at position 3437 of SEQ ID NO: 914038
cuacaagauucuguggauc

SEQ ID NO: 973229 - RNA, 19 nt, Artificial Sequence
  Description of Artificial Sequence: Synthetic oligonucleotide
  Antisense strand to SEQ ID NO: 973228
gauccacagaaucuuguag

SEQ ID NO: 973230 - RNA, 19 nt, Artificial Sequence
  Description of Artificial Sequence: Synthetic oligonucleotide
  Sense strand starting at position 3048 of SEQ ID NO: 914038
guugucuggcuggagagaa

SEQ ID NO: 973231 - RNA, 19 nt, Artificial Sequence
  Description of Artificial Sequence: Synthetic oligonucleotide
  Antisense strand to SEQ ID NO: 973230
uucucuccagccagacaac

SEQ ID NO: 973232 - RNA, 19 nt, Artificial Sequence
  Description of Artificial Sequence: Synthetic oligonucleotide
  Sense strand starting at position 1021 of SEQ ID NO: 914038
guaacacucaucggagaug

SEQ ID NO: 973233 - RNA, 19 nt, Artificial Sequence
  Description of Artificial Sequence: Synthetic oligonucleotide
  Antisense strand to SEQ ID NO: 973232
caucuccgaugaguguuac

SEQ ID NO: 973234 - RNA, 19 nt, Artificial Sequence
  Description of Artificial Sequence: Synthetic oligonucleotide
  Sense strand starting at position 1679 of SEQ ID NO: 914038
aguaauagccagcauccaa

SEQ ID NO: 973235 - RNA, 19 nt, Artificial Sequence
  Description of Artificial Sequence: Synthetic oligonucleotide
  Antisense strand to SEQ ID NO: 973234
uuggaugcuggcuauuacu

SEQ ID NO: 973236 - RNA, 19 nt, Artificial Sequence
  Description of Artificial Sequence: Synthetic oligonucleotide
  Sense strand starting at position 1274 of SEQ ID NO: 914038
agugguuugguacaacuca

SEQ ID NO: 973237 - RNA, 19 nt, Artificial Sequence
  Description of Artificial Sequence: Synthetic oligonucleotide
  Antisense strand to SEQ ID NO: 973236
ugaguuguaccaaaccacu

SEQ ID NO: 973238 - RNA, 19 nt, Artificial Sequence
  Description of Artificial Sequence: Synthetic oligonucleotide
  Sense strand starting at position 1055 of SEQ ID NO: 914038
gauuucugcuguuaauuug

SEQ ID NO: 973239 - RNA, 19 nt, Artificial Sequence
  Description of Artificial Sequence: Synthetic oligonucleotide
  Antisense strand to SEQ ID NO: 973238
caaauuaacagcagaaauc

SEQ ID NO: 973240 - RNA, 19 nt, Artificial Sequence
  Description of Artificial Sequence: Synthetic oligonucleotide
  Sense strand starting at position 3458 of SEQ ID NO: 914038
gacagcucuuuaccugaga

SEQ ID NO: 973241 - RNA, 19 nt, Artificial Sequence
  Description of Artificial Sequence: Synthetic oligonucleotide
  Antisense strand to SEQ ID NO: 973240
ucucagguaaagagcuguc

SEQ ID NO: 973242 - RNA, 19 nt, Artificial Sequence
  Description of Artificial Sequence: Synthetic oligonucleotide
  Sense strand starting at position 836 of SEQ ID NO: 914038
guggcuucuggcgucagua

SEQ ID NO: 973243 - RNA, 19 nt, Artificial Sequence
  Description of Artificial Sequence: Synthetic oligonucleotide
  Antisense strand to SEQ ID NO: 973242
uacugacgccagaagccac

SEQ ID NO: 973244 - RNA, 19 nt, Artificial Sequence
  Description of Artificial Sequence: Synthetic oligonucleotide
  Sense strand starting at position 1019 of SEQ ID NO: 914038
cuguaacacucaucggaga

SEQ ID NO: 973245 - RNA, 19 nt, Artificial Sequence
  Description of Artificial Sequence: Synthetic oligonucleotide
  Antisense strand to SEQ ID NO: 973244
ucuccgaugaguguuacag

SEQ ID NO: 973246 - RNA, 19 nt, Artificial Sequence
  Description of Artificial Sequence: Synthetic oligonucleotide
  Sense strand starting at position 2295 of SEQ ID NO: 914038
ugacauuucugcguaaagc

SEQ ID NO: 973247 - RNA, 19 nt, Artificial Sequence
  Description of Artificial Sequence: Synthetic oligonucleotide
  Antisense strand to SEQ ID NO: 973246
gcuuuacgcagaaauguca

SEQ ID NO: 973248 - RNA, 19 nt, Artificial Sequence
  Description of Artificial Sequence: Synthetic oligonucleotide
  Sense strand starting at position 722 of SEQ ID NO: 914038
gaguccaauccaugcagaa

SEQ ID NO: 973249 - RNA, 19 nt, Artificial Sequence
  Description of Artificial Sequence: Synthetic oligonucleotide
  Antisense strand to SEQ ID NO: 973248
uucugcauggauuggacuc

SEQ ID NO: 973250 - RNA, 19 nt, Artificial Sequence
  Description of Artificial Sequence: Synthetic oligonucleotide
  Sense strand starting at position 1942 of SEQ ID NO: 914038
ugguguccaccugagaagu

SEQ ID NO: 973251 - RNA, 19 nt, Artificial Sequence
  Description of Artificial Sequence: Synthetic oligonucleotide
  Antisense strand to SEQ ID NO: 973250
acuucucagguggacacca

SEQ ID NO: 973252 - RNA, 19 nt, Artificial Sequence
  Description of Artificial Sequence: Synthetic oligonucleotide
  Sense strand starting at position 1020 of SEQ ID NO: 914038
uguaacacucaucggagau

SEQ ID NO: 973253 - RNA, 19 nt, Artificial Sequence
  Description of Artificial Sequence: Synthetic oligonucleotide
  Antisense strand to SEQ ID NO: 973252
aucuccgaugaguguuaca

SEQ ID NO: 973254 - RNA, 19 nt, Artificial Sequence
  Description of Artificial Sequence: Synthetic oligonucleotide
  Sense strand starting at position 1182 of SEQ ID NO: 914038
ucagaagguuuguccuaag

SEQ ID NO: 973255 - RNA, 19 nt, Artificial Sequence
  Description of Artificial Sequence: Synthetic oligonucleotide
  Antisense strand to SEQ ID NO: 973254
cuuaggacaaaccuucuga

SEQ ID NO: 973256 - RNA, 19 nt, Artificial Sequence
  Description of Artificial Sequence: Synthetic oligonucleotide
  Sense strand starting at position 3226 of SEQ ID NO: 914038
aaggaagacuaggaaauau

SEQ ID NO: 973257 - RNA, 19 nt, Artificial Sequence
  Description of Artificial Sequence: Synthetic oligonucleotide
  Antisense strand to SEQ ID NO: 973256
auauuuccuagucuuccuu

SEQ ID NO: 973258 - RNA, 19 nt, Artificial Sequence
  Description of Artificial Sequence: Synthetic oligonucleotide
  Sense strand starting at position 3314 of SEQ ID NO: 914038
agaucacuauguuucuuua

SEQ ID NO: 973259 - RNA, 19 nt, Artificial Sequence
  Description of Artificial Sequence: Synthetic oligonucleotide
  Antisense strand to SEQ ID NO: 973258
uaaagaaacauagugaucu

SEQ ID NO: 973260 - RNA, 19 nt, Artificial Sequence
  Description of Artificial Sequence: Synthetic oligonucleotide
  Sense strand starting at position 3459 of SEQ ID NO: 914038
acagcucuuuaccugagau

SEQ ID NO: 973261 - RNA, 19 nt, Artificial Sequence
  Description of Artificial Sequence: Synthetic oligonucleotide
  Antisense strand to SEQ ID NO: 973260
aucucagguaaagagcugu

SEQ ID NO: 973262 - RNA, 19 nt, Artificial Sequence
  Description of Artificial Sequence: Synthetic oligonucleotide
  Sense strand starting at position 2037 of SEQ ID NO: 914038
cacccuuggguccgaagaa

SEQ ID NO: 973263 - RNA, 19 nt, Artificial Sequence
  Description of Artificial Sequence: Synthetic oligonucleotide
  Antisense strand to SEQ ID NO: 973262
uucuucggacccaagggug

SEQ ID NO: 973264 - RNA, 19 nt, Artificial Sequence
  Description of Artificial Sequence: Synthetic oligonucleotide
  Sense strand starting at position 1181 of SEQ ID NO: 914038
cucagaagguuuguccuaa

SEQ ID NO: 973265 - RNA, 19 nt, Artificial Sequence
  Description of Artificial Sequence: Synthetic oligonucleotide
  Antisense strand to SEQ ID NO: 973264
uuaggacaaaccuucugag

SEQ ID NO: 973266 - RNA, 19 nt, Artificial Sequence
  Description of Artificial Sequence: Synthetic oligonucleotide
  Sense strand starting at position 3656 of SEQ ID NO: 914038
ggaggaaaguugucagcuc

SEQ ID NO: 973267 - RNA, 19 nt, Artificial Sequence
  Description of Artificial Sequence: Synthetic oligonucleotide
  Antisense strand to SEQ ID NO: 973266
gagcugacaacuuuccucc

SEQ ID NO: 973268 - RNA, 19 nt, Artificial Sequence
  Description of Artificial Sequence: Synthetic oligonucleotide
  Sense strand starting at position 3556 of SEQ ID NO: 914039
aggugucuacuccaagaac

SEQ ID NO: 973269 - RNA, 19 nt, Artificial Sequence
  Description of Artificial Sequence: Synthetic oligonucleotide
  Antisense strand to SEQ ID NO: 973268
guucuuggaguagacaccu

SEQ ID NO: 973270 - RNA, 19 nt, Artificial Sequence
  Description of Artificial Sequence: Synthetic oligonucleotide
  Sense strand starting at position 2914 of SEQ ID NO: 914039
auuaguaugccuuaugaaa

SEQ ID NO: 973271 - RNA, 19 nt, Artificial Sequence
  Description of Artificial Sequence: Synthetic oligonucleotide
  Antisense strand to SEQ ID NO: 973270
uuucauaaggcauacuaau

SEQ ID NO: 973272 - RNA, 19 nt, Artificial Sequence
  Description of Artificial Sequence: Synthetic oligonucleotide
  Sense strand starting at position 865 of SEQ ID NO: 914039
uugugugcuaacgugcaaa

SEQ ID NO: 973273 - RNA, 19 nt, Artificial Sequence
  Description of Artificial Sequence: Synthetic oligonucleotide
  Antisense strand to SEQ ID NO: 973272
uuugcacguuagcacacaa

SEQ ID NO: 973274 - RNA, 19 nt, Artificial Sequence
  Description of Artificial Sequence: Synthetic oligonucleotide
  Sense strand starting at position 929 of SEQ ID NO: 914039
cuuguccaagucuaaauau

SEQ ID NO: 973275 - RNA, 19 nt, Artificial Sequence
  Description of Artificial Sequence: Synthetic oligonucleotide
  Antisense strand to SEQ ID NO: 973274
auauuuagacuuggacaag

SEQ ID NO: 973276 - RNA, 19 nt, Artificial Sequence
  Description of Artificial Sequence: Synthetic oligonucleotide
  Sense strand starting at position 3923 of SEQ ID NO: 914039
acugacuucccuuaguauu

SEQ ID NO: 973277 - RNA, 19 nt, Artificial Sequence
  Description of Artificial Sequence: Synthetic oligonucleotide
  Antisense strand to SEQ ID NO: 973276
aauacuaagggaagucagu

SEQ ID NO: 973278 - RNA, 19 nt, Artificial Sequence
  Description of Artificial Sequence: Synthetic oligonucleotide
  Sense strand starting at position 3579 of SEQ ID NO: 914039
ccaagaggugggugaucau

SEQ ID NO: 973279 - RNA, 19 nt, Artificial Sequence
  Description of Artificial Sequence: Synthetic oligonucleotide
  Antisense strand to SEQ ID NO: 973278
augaucacccaccucuugg

SEQ ID NO: 973280 - RNA, 19 nt, Artificial Sequence
  Description of Artificial Sequence: Synthetic oligonucleotide
  Sense strand starting at position 3290 of SEQ ID NO: 914039
ccaagauucccaggugacu

SEQ ID NO: 973281 - RNA, 19 nt, Artificial Sequence
  Description of Artificial Sequence: Synthetic oligonucleotide
  Antisense strand to SEQ ID NO: 973280
agucaccugggaaucuugg

SEQ ID NO: 973282 - RNA, 19 nt, Artificial Sequence
  Description of Artificial Sequence: Synthetic oligonucleotide
  Sense strand starting at position 2803 of SEQ ID NO: 914039
augcuuauagagugacaag

SEQ ID NO: 973283 - RNA, 19 nt, Artificial Sequence
  Description of Artificial Sequence: Synthetic oligonucleotide
  Antisense strand to SEQ ID NO: 973282
cuugucacucuauaagcau

SEQ ID NO: 973284 - RNA, 19 nt, Artificial Sequence
  Description of Artificial Sequence: Synthetic oligonucleotide
  Sense strand starting at position 417 of SEQ ID NO: 914039
aaugaaacguaguuccaaa

SEQ ID NO: 973285 - RNA, 19 nt, Artificial Sequence
  Description of Artificial Sequence: Synthetic oligonucleotide
  Antisense strand to SEQ ID NO: 973284
uuuggaacuacguuucauu

SEQ ID NO: 973286 - RNA, 19 nt, Artificial Sequence
  Description of Artificial Sequence: Synthetic oligonucleotide
  Sense strand starting at position 462 of SEQ ID NO: 914039
uuaccagaguauguuuaaa

SEQ ID NO: 973287 - RNA, 19 nt, Artificial Sequence
  Description of Artificial Sequence: Synthetic oligonucleotide
  Antisense strand to SEQ ID NO: 973286
uuuaaacauacucugguaa

SEQ ID NO: 973288 - RNA, 19 nt, Artificial Sequence
  Description of Artificial Sequence: Synthetic oligonucleotide
  Sense strand starting at position 3038 of SEQ ID NO: 914039
ggcugugugcagagagcua

SEQ ID NO: 973289 - RNA, 19 nt, Artificial Sequence
  Description of Artificial Sequence: Synthetic oligonucleotide
  Antisense strand to SEQ ID NO: 973288
uagcucucugcacacagcc

SEQ ID NO: 973290 - RNA, 19 nt, Artificial Sequence
  Description of Artificial Sequence: Synthetic oligonucleotide
  Sense strand starting at position 3446 of SEQ ID NO: 914039
ccggcaaccucauuuguuu

SEQ ID NO: 973291 - RNA, 19 nt, Artificial Sequence
  Description of Artificial Sequence: Synthetic oligonucleotide
  Antisense strand to SEQ ID NO: 973290
aaacaaaugagguugccgg

SEQ ID NO: 973292 - RNA, 19 nt, Artificial Sequence
  Description of Artificial Sequence: Synthetic oligonucleotide
  Sense strand starting at position 3554 of SEQ ID NO: 914039
acaggugucuacuccaaga

SEQ ID NO: 973293 - RNA, 19 nt, Artificial Sequence
  Description of Artificial Sequence: Synthetic oligonucleotide
  Antisense strand to SEQ ID NO: 973292
ucuuggaguagacaccugu

SEQ ID NO: 973294 - RNA, 19 nt, Artificial Sequence
  Description of Artificial Sequence: Synthetic oligonucleotide
  Sense strand starting at position 3346 of SEQ ID NO: 914039
uuguauucucuugaaguca

SEQ ID NO: 973295 - RNA, 19 nt, Artificial Sequence
  Description of Artificial Sequence: Synthetic oligonucleotide
  Antisense strand to SEQ ID NO: 973294
ugacuucaagagaauacaa

SEQ ID NO: 973296 - RNA, 19 nt, Artificial Sequence
  Description of Artificial Sequence: Synthetic oligonucleotide
  Sense strand starting at position 412 of SEQ ID NO: 914039
cuggaaaugaaacguaguu

SEQ ID NO: 973297 - RNA, 19 nt, Artificial Sequence
  Description of Artificial Sequence: Synthetic oligonucleotide
  Antisense strand to SEQ ID NO: 973296
aacuacguuucauuuccag

SEQ ID NO: 973298 - RNA, 19 nt, Artificial Sequence
  Description of Artificial Sequence: Synthetic oligonucleotide
  Sense strand starting at position 962 of SEQ ID NO: 914039
aguugagauguuugauacu

SEQ ID NO: 973299 - RNA, 19 nt, Artificial Sequence
  Description of Artificial Sequence: Synthetic oligonucleotide
  Antisense strand to SEQ ID NO: 973298
aguaucaaacaucucaacu

SEQ ID NO: 973300 - RNA, 19 nt, Artificial Sequence
  Description of Artificial Sequence: Synthetic oligonucleotide
  Sense strand starting at position 757 of SEQ ID NO: 914039
ggucuuaacuuccuagauu

SEQ ID NO: 973301 - RNA, 19 nt, Artificial Sequence
  Description of Artificial Sequence: Synthetic oligonucleotide
  Antisense strand to SEQ ID NO: 973300
aaucuaggaaguuaagacc

SEQ ID NO: 973302 - RNA, 19 nt, Artificial Sequence
  Description of Artificial Sequence: Synthetic oligonucleotide
  Sense strand starting at position 461 of SEQ ID NO: 914039
cuuaccagaguauguuuaa

SEQ ID NO: 973303 - RNA, 19 nt, Artificial Sequence
  Description of Artificial Sequence: Synthetic oligonucleotide
  Antisense strand to SEQ ID NO: 973302
uuaaacauacucugguaag

SEQ ID NO: 973304 - RNA, 19 nt, Artificial Sequence
  Description of Artificial Sequence: Synthetic oligonucleotide
  Sense strand starting at position 74 of SEQ ID NO: 914039
ccaccugugugaucacaga

SEQ ID NO: 973305 - RNA, 19 nt, Artificial Sequence
  Description of Artificial Sequence: Synthetic oligonucleotide
  Antisense strand to SEQ ID NO: 973304
ucugugaucacacaggugg

SEQ ID NO: 973306 - RNA, 19 nt, Artificial Sequence
  Description of Artificial Sequence: Synthetic oligonucleotide
  Sense strand starting at position 26 of SEQ ID NO: 914039
uuguauuauugagccaaua

SEQ ID NO: 973307 - RNA, 19 nt, Artificial Sequence
  Description of Artificial Sequence: Synthetic oligonucleotide
  Antisense strand to SEQ ID NO: 973306
uauuggcucaauaauacaa

SEQ ID NO: 973308 - RNA, 19 nt, Artificial Sequence
  Description of Artificial Sequence: Synthetic oligonucleotide
  Sense strand starting at position 385 of SEQ ID NO: 914039
ugacucucuuaggcaucua

SEQ ID NO: 973309 - RNA, 19 nt, Artificial Sequence
  Description of Artificial Sequence: Synthetic oligonucleotide
  Antisense strand to SEQ ID NO: 973308
uagaugccuaagagaguca

SEQ ID NO: 973310 - RNA, 19 nt, Artificial Sequence
  Description of Artificial Sequence: Synthetic oligonucleotide
  Sense strand starting at position 3435 of SEQ ID NO: 914039
gaaaguuaucaccggcaac

SEQ ID NO: 973311 - RNA, 19 nt, Artificial Sequence
  Description of Artificial Sequence: Synthetic oligonucleotide
  Antisense strand to SEQ ID NO: 973310
guugccggugauaacuuuc

SEQ ID NO: 973312 - RNA, 19 nt, Artificial Sequence
  Description of Artificial Sequence: Synthetic oligonucleotide
  Sense strand starting at position 2470 of SEQ ID NO: 914039
cugacuaagggcugcauua

SEQ ID NO: 973313 - RNA, 19 nt, Artificial Sequence
  Description of Artificial Sequence: Synthetic oligonucleotide
  Antisense strand to SEQ ID NO: 973312
uaaugcagcccuuagucag

SEQ ID NO: 973314 - RNA, 19 nt, Artificial Sequence
  Description of Artificial Sequence: Synthetic oligonucleotide
  Sense strand starting at position 3103 of SEQ ID NO: 914039
cagguaauguguuccuaag

SEQ ID NO: 973315 - RNA, 19 nt, Artificial Sequence
  Description of Artificial Sequence: Synthetic oligonucleotide
  Antisense strand to SEQ ID NO: 973314
cuuaggaacacauuaccug

SEQ ID NO: 973316 - RNA, 19 nt, Artificial Sequence
  Description of Artificial Sequence: Synthetic oligonucleotide
  Sense strand starting at position 3105 of SEQ ID NO: 914039
gguaauguguuccuaagau

SEQ ID NO: 973317 - RNA, 19 nt, Artificial Sequence
  Description of Artificial Sequence: Synthetic oligonucleotide
  Antisense strand to SEQ ID NO: 973316
aucuuaggaacacauuacc

SEQ ID NO: 973318 - RNA, 19 nt, Artificial Sequence
  Description of Artificial Sequence: Synthetic oligonucleotide
  Sense strand starting at position 3307 of SEQ ID NO: 914039
cuuccaguccaguggauau

SEQ ID NO: 973319 - RNA, 19 nt, Artificial Sequence
  Description of Artificial Sequence: Synthetic oligonucleotide
  Antisense strand to SEQ ID NO: 973318
auauccacuggacuggaag

SEQ ID NO: 973320 - RNA, 19 nt, Artificial Sequence
  Description of Artificial Sequence: Synthetic oligonucleotide
  Sense strand starting at position 2061 of SEQ ID NO: 914039
agccuucgcggcuauuuau

SEQ ID NO: 973321 - RNA, 19 nt, Artificial Sequence
  Description of Artificial Sequence: Synthetic oligonucleotide
  Antisense strand to SEQ ID NO: 973320
auaaauagccgcgaaggcu

SEQ ID NO: 973322 - RNA, 19 nt, Artificial Sequence
  Description of Artificial Sequence: Synthetic oligonucleotide
  Sense strand starting at position 266 of SEQ ID NO: 914039
ucaggaaucucagaggaaa

SEQ ID NO: 973323 - RNA, 19 nt, Artificial Sequence
  Description of Artificial Sequence: Synthetic oligonucleotide
  Antisense strand to SEQ ID NO: 973322
uuuccucugagauuccuga

SEQ ID NO: 973324 - RNA, 19 nt, Artificial Sequence
  Description of Artificial Sequence: Synthetic oligonucleotide
  Sense strand starting at position 1643 of SEQ ID NO: 914039
gcggcugcucggagaaguu

SEQ ID NO: 973325 - RNA, 19 nt, Artificial Sequence
  Description of Artificial Sequence: Synthetic oligonucleotide
  Antisense strand to SEQ ID NO: 973324
aacuucuccgagcagccgc

SEQ ID NO: 973326 - RNA, 19 nt, Artificial Sequence
  Description of Artificial Sequence: Synthetic oligonucleotide
  Sense strand starting at position 3506 of SEQ ID NO: 914039
aggcccuagucuuugauau

SEQ ID NO: 973327 - RNA, 19 nt, Artificial Sequence
  Description of Artificial Sequence: Synthetic oligonucleotide
  Antisense strand to SEQ ID NO: 973326
auaucaaagacuagggccu

SEQ ID NO: 973328 - RNA, 19 nt, Artificial Sequence
  Description of Artificial Sequence: Synthetic oligonucleotide
  Sense strand starting at position 790 of SEQ ID NO: 914039
ugccucuguguauauauua

SEQ ID NO: 973329 - RNA, 19 nt, Artificial Sequence
  Description of Artificial Sequence: Synthetic oligonucleotide
  Antisense strand to SEQ ID NO: 973328
uaauauauacacagaggca

SEQ ID NO: 973330 - RNA, 19 nt, Artificial Sequence
  Description of Artificial Sequence: Synthetic oligonucleotide
  Sense strand starting at position 2690 of SEQ ID NO: 914039
cugucuuggucuuccaaga

SEQ ID NO: 973331 - RNA, 19 nt, Artificial Sequence
  Description of Artificial Sequence: Synthetic oligonucleotide
  Antisense strand to SEQ ID NO: 973330
ucuuggaagaccaagacag

SEQ ID NO: 973332 - RNA, 19 nt, Artificial Sequence
  Description of Artificial Sequence: Synthetic oligonucleotide
  Sense strand starting at position 603 of SEQ ID NO: 914039
uagaguauguuagugcaga

SEQ ID NO: 973333 - RNA, 19 nt, Artificial Sequence
  Description of Artificial Sequence: Synthetic oligonucleotide
  Antisense strand to SEQ ID NO: 973332
ucugcacuaacauacucua

SEQ ID NO: 973334 - RNA, 19 nt, Artificial Sequence
  Description of Artificial Sequence: Synthetic oligonucleotide
  Sense strand starting at position 84 of SEQ ID NO: 914039
gaucacagagccuguguua

SEQ ID NO: 973335 - RNA, 19 nt, Artificial Sequence
  Description of Artificial Sequence: Synthetic oligonucleotide
  Antisense strand to SEQ ID NO: 973334
uaacacaggcucugugauc

SEQ ID NO: 973336 - RNA, 19 nt, Artificial Sequence
  Description of Artificial Sequence: Synthetic oligonucleotide
  Sense strand starting at position 608 of SEQ ID NO: 914039
uauguuagugcagaacgua

SEQ ID NO: 973337 - RNA, 19 nt, Artificial Sequence
  Description of Artificial Sequence: Synthetic oligonucleotide
  Antisense strand to SEQ ID NO: 973336
uacguucugcacuaacaua

SEQ ID NO: 973338 - RNA, 19 nt, Artificial Sequence
  Description of Artificial Sequence: Synthetic oligonucleotide
  Sense strand starting at position 747 of SEQ ID NO: 914039
cgacucuucuggucuuaac

SEQ ID NO: 973339 - RNA, 19 nt, Artificial Sequence
  Description of Artificial Sequence: Synthetic oligonucleotide
  Antisense strand to SEQ ID NO: 973338
guuaagaccagaagagucg

SEQ ID NO: 973340 - RNA, 19 nt, Artificial Sequence
  Description of Artificial Sequence: Synthetic oligonucleotide
  Sense strand starting at position 336 of SEQ ID NO: 914039
agacauuauuuaugcugaa

SEQ ID NO: 973341 - RNA, 19 nt, Artificial Sequence
  Description of Artificial Sequence: Synthetic oligonucleotide
  Antisense strand to SEQ ID NO: 973340
uucagcauaaauaaugucu

SEQ ID NO: 973342 - RNA, 19 nt, Artificial Sequence
  Description of Artificial Sequence: Synthetic oligonucleotide
  Sense strand starting at position 1072 of SEQ ID NO: 914039
ggauucuccugucugcaca

SEQ ID NO: 973343 - RNA, 19 nt, Artificial Sequence
  Description of Artificial Sequence: Synthetic oligonucleotide
  Antisense strand to SEQ ID NO: 973342
ugugcagacaggagaaucc

SEQ ID NO: 973344 - RNA, 19 nt, Artificial Sequence
  Description of Artificial Sequence: Synthetic oligonucleotide
  Sense strand starting at position 3507 of SEQ ID NO: 914039
ggcccuagucuuugauauc

SEQ ID NO: 973345 - RNA, 19 nt, Artificial Sequence
  Description of Artificial Sequence: Synthetic oligonucleotide
  Antisense strand to SEQ ID NO: 973344
gauaucaaagacuagggcc

SEQ ID NO: 973346 - RNA, 19 nt, Artificial Sequence
  Description of Artificial Sequence: Synthetic oligonucleotide
  Sense strand starting at position 1133 of SEQ ID NO: 914039
aagguaaggugcucugcaa

SEQ ID NO: 973347 - RNA, 19 nt, Artificial Sequence
  Description of Artificial Sequence: Synthetic oligonucleotide
  Antisense strand to SEQ ID NO: 973346
uugcagagcaccuuaccuu

SEQ ID NO: 973348 - RNA, 19 nt, Artificial Sequence
  Description of Artificial Sequence: Synthetic oligonucleotide
  Sense strand starting at position 2216 of SEQ ID NO: 914040
agagaagcagcuuaaccua

SEQ ID NO: 973349 - RNA, 19 nt, Artificial Sequence
  Description of Artificial Sequence: Synthetic oligonucleotide
  Antisense strand to SEQ ID NO: 973348
uagguuaagcugcuucucu

SEQ ID NO: 973350 - RNA, 19 nt, Artificial Sequence
  Description of Artificial Sequence: Synthetic oligonucleotide
  Sense strand starting at position 1196 of SEQ ID NO: 914040
ggagucagugaauggauaa

SEQ ID NO: 973351 - RNA, 19 nt, Artificial Sequence
  Description of Artificial Sequence: Synthetic oligonucleotide
  Antisense strand to SEQ ID NO: 973350
uuauccauucacugacucc

SEQ ID NO: 973352 - RNA, 19 nt, Artificial Sequence
  Description of Artificial Sequence: Synthetic oligonucleotide
  Sense strand starting at position 56 of SEQ ID NO: 914040
aacauuguuccggaaauau

SEQ ID NO: 973353 - RNA, 19 nt, Artificial Sequence
  Description of Artificial Sequence: Synthetic oligonucleotide
  Antisense strand to SEQ ID NO: 973352
auauuuccggaacaauguu

SEQ ID NO: 973354 - RNA, 19 nt, Artificial Sequence
  Description of Artificial Sequence: Synthetic oligonucleotide
  Sense strand starting at position 3166 of SEQ ID NO: 914040
uggauagaguucuugaaua

SEQ ID NO: 973355 - RNA, 19 nt, Artificial Sequence
  Description of Artificial Sequence: Synthetic oligonucleotide
  Antisense strand to SEQ ID NO: 973354
uauucaagaacucuaucca

SEQ ID NO: 973356 - RNA, 19 nt, Artificial Sequence
  Description of Artificial Sequence: Synthetic oligonucleotide
  Sense strand starting at position 270 of SEQ ID NO: 914040
ugaagaaauuccuugaggu

SEQ ID NO: 973357 - RNA, 19 nt, Artificial Sequence
  Description of Artificial Sequence: Synthetic oligonucleotide
  Antisense strand to SEQ ID NO: 973356
accucaaggaauuucuuca

SEQ ID NO: 973358 - RNA, 19 nt, Artificial Sequence
  Description of Artificial Sequence: Synthetic oligonucleotide
  Sense strand starting at position 36 of SEQ ID NO: 914040
gcucaauagagagaugcau

SEQ ID NO: 973359 - RNA, 19 nt, Artificial Sequence
  Description of Artificial Sequence: Synthetic oligonucleotide
  Antisense strand to SEQ ID NO: 973358
augcaucucucuauugagc

SEQ ID NO: 973360 - RNA, 19 nt, Artificial Sequence
  Description of Artificial Sequence: Synthetic oligonucleotide
  Sense strand starting at position 77 of SEQ ID NO: 914040
acuggaagcuuaucaauga

SEQ ID NO: 973361 - RNA, 19 nt, Artificial Sequence
  Description of Artificial Sequence: Synthetic oligonucleotide
  Antisense strand to SEQ ID NO: 973360
ucauugauaagcuuccagu

SEQ ID NO: 973362 - RNA, 19 nt, Artificial Sequence
  Description of Artificial Sequence: Synthetic oligonucleotide
  Sense strand starting at position 1140 of SEQ ID NO: 914040
agucaugaacaauguaaca

SEQ ID NO: 973363 - RNA, 19 nt, Artificial Sequence
  Description of Artificial Sequence: Synthetic oligonucleotide
  Antisense strand to SEQ ID NO: 973362
uguuacauuguucaugacu

SEQ ID NO: 973364 - RNA, 19 nt, Artificial Sequence
  Description of Artificial Sequence: Synthetic oligonucleotide
  Sense strand starting at position 115 of SEQ ID NO: 914040
gcuauugaucagcaaauag

SEQ ID NO: 973365 - RNA, 19 nt, Artificial Sequence
  Description of Artificial Sequence: Synthetic oligonucleotide
  Antisense strand to SEQ ID NO: 973364
cuauuugcugaucaauagc

SEQ ID NO: 973366 - RNA, 19 nt, Artificial Sequence
  Description of Artificial Sequence: Synthetic oligonucleotide
  Sense strand starting at position 3777 of SEQ ID NO: 914040
aucgucaaucuggaaagua

SEQ ID NO: 973367 - RNA, 19 nt, Artificial Sequence
  Description of Artificial Sequence: Synthetic oligonucleotide
  Antisense strand to SEQ ID NO: 973366
uacuuuccagauugacgau

SEQ ID NO: 973368 - RNA, 19 nt, Artificial Sequence
  Description of Artificial Sequence: Synthetic oligonucleotide
  Sense strand starting at position 2930 of SEQ ID NO: 914040
aauguagacgggcauauau

SEQ ID NO: 973369 - RNA, 19 nt, Artificial Sequence
  Description of Artificial Sequence: Synthetic oligonucleotide
  Antisense strand to SEQ ID NO: 973368
auauaugcccgucuacauu

SEQ ID NO: 973370 - RNA, 19 nt, Artificial Sequence
  Description of Artificial Sequence: Synthetic oligonucleotide
  Sense strand starting at position 1168 of SEQ ID NO: 914040
accauuauagugcauauau

SEQ ID NO: 973371 - RNA, 19 nt, Artificial Sequence
  Description of Artificial Sequence: Synthetic oligonucleotide
  Antisense strand to SEQ ID NO: 973370
auauaugcacuauaauggu

SEQ ID NO: 973372 - RNA, 19 nt, Artificial Sequence
  Description of Artificial Sequence: Synthetic oligonucleotide
  Sense strand starting at position 112 of SEQ ID NO: 914040
cuagcuauugaucagcaaa

SEQ ID NO: 973373 - RNA, 19 nt, Artificial Sequence
  Description of Artificial Sequence: Synthetic oligonucleotide
  Antisense strand to SEQ ID NO: 973372
uuugcugaucaauagcuag

SEQ ID NO: 973374 - RNA, 19 nt, Artificial Sequence
  Description of Artificial Sequence: Synthetic oligonucleotide
  Sense strand starting at position 1355 of SEQ ID NO: 914040
ucauaaucugcagaaagcu

SEQ ID NO: 973375 - RNA, 19 nt, Artificial Sequence
  Description of Artificial Sequence: Synthetic oligonucleotide
  Antisense strand to SEQ ID NO: 973374
agcuuucugcagauuauga

SEQ ID NO: 973376 - RNA, 19 nt, Artificial Sequence
  Description of Artificial Sequence: Synthetic oligonucleotide
  Sense strand starting at position 2403 of SEQ ID NO: 914040
uucuuagaccugggacuuu

SEQ ID NO: 973377 - RNA, 19 nt, Artificial Sequence
  Description of Artificial Sequence: Synthetic oligonucleotide
  Antisense strand to SEQ ID NO: 973376
aaagucccaggucuaagaa

SEQ ID NO: 973378 - RNA, 19 nt, Artificial Sequence
  Description of Artificial Sequence: Synthetic oligonucleotide
  Sense strand starting at position 2402 of SEQ ID NO: 914040
uuucuuagaccugggacuu

SEQ ID NO: 973379 - RNA, 19 nt, Artificial Sequence
  Description of Artificial Sequence: Synthetic oligonucleotide
  Antisense strand to SEQ ID NO: 973378
aagucccaggucuaagaaa

SEQ ID NO: 973380 - RNA, 19 nt, Artificial Sequence
  Description of Artificial Sequence: Synthetic oligonucleotide
  Sense strand starting at position 2870 of SEQ ID NO: 914040
ccauguaucaaauggguga

SEQ ID NO: 973381 - RNA, 19 nt, Artificial Sequence
  Description of Artificial Sequence: Synthetic oligonucleotide
  Antisense strand to SEQ ID NO: 973380
ucacccauuugauacaugg

SEQ ID NO: 973382 - RNA, 19 nt, Artificial Sequence
  Description of Artificial Sequence: Synthetic oligonucleotide
  Sense strand starting at position 3155 of SEQ ID NO: 914040
uguguauauauuggauaga

SEQ ID NO: 973383 - RNA, 19 nt, Artificial Sequence
  Description of Artificial Sequence: Synthetic oligonucleotide
  Antisense strand to SEQ ID NO: 973382
ucuauccaauauauacaca

SEQ ID NO: 973384 - RNA, 19 nt, Artificial Sequence
  Description of Artificial Sequence: Synthetic oligonucleotide
  Sense strand starting at position 3188 of SEQ ID NO: 914040
agaaauacguaaguccaau

SEQ ID NO: 973385 - RNA, 19 nt, Artificial Sequence
  Description of Artificial Sequence: Synthetic oligonucleotide
  Antisense strand to SEQ ID NO: 973384
auuggacuuacguauuucu

SEQ ID NO: 973386 - RNA, 19 nt, Artificial Sequence
  Description of Artificial Sequence: Synthetic oligonucleotide
  Sense strand starting at position 1335 of SEQ ID NO: 914040
cuaugaucacuuugggagu

SEQ ID NO: 973387 - RNA, 19 nt, Artificial Sequence
  Description of Artificial Sequence: Synthetic oligonucleotide
  Antisense strand to SEQ ID NO: 973386
acucccaaagugaucauag

SEQ ID NO: 973388 - RNA, 19 nt, Artificial Sequence
  Description of Artificial Sequence: Synthetic oligonucleotide
  Sense strand starting at position 52 of SEQ ID NO: 914040
cauaaacauuguuccggaa

SEQ ID NO: 973389 - RNA, 19 nt, Artificial Sequence
  Description of Artificial Sequence: Synthetic oligonucleotide
  Antisense strand to SEQ ID NO: 973388
uuccggaacaauguuuaug

SEQ ID NO: 973390 - RNA, 19 nt, Artificial Sequence
  Description of Artificial Sequence: Synthetic oligonucleotide
  Sense strand starting at position 621 of SEQ ID NO: 914040
gccuauuucucuguaagca

SEQ ID NO: 973391 - RNA, 19 nt, Artificial Sequence
  Description of Artificial Sequence: Synthetic oligonucleotide
  Antisense strand to SEQ ID NO: 973390
ugcuuacagagaaauaggc

SEQ ID NO: 973392 - RNA, 19 nt, Artificial Sequence
  Description of Artificial Sequence: Synthetic oligonucleotide
  Sense strand starting at position 2792 of SEQ ID NO: 914040
ugacaaugguagccaauua

SEQ ID NO: 973393 - RNA, 19 nt, Artificial Sequence
  Description of Artificial Sequence: Synthetic oligonucleotide
  Antisense strand to SEQ ID NO: 973392
uaauuggcuaccauuguca

SEQ ID NO: 973394 - RNA, 19 nt, Artificial Sequence
  Description of Artificial Sequence: Synthetic oligonucleotide
  Sense strand starting at position 2874 of SEQ ID NO: 914040
guaucaaaugggugacgaa

SEQ ID NO: 973395 - RNA, 19 nt, Artificial Sequence
  Description of Artificial Sequence: Synthetic oligonucleotide
  Antisense strand to SEQ ID NO: 973394
uucgucacccauuugauac

SEQ ID NO: 973396 - RNA, 19 nt, Artificial Sequence
  Description of Artificial Sequence: Synthetic oligonucleotide
  Sense strand starting at position 3451 of SEQ ID NO: 914040
uguauacuuuauguagaga

SEQ ID NO: 973397 - RNA, 19 nt, Artificial Sequence
  Description of Artificial Sequence: Synthetic oligonucleotide
  Antisense strand to SEQ ID NO: 973396
ucucuacauaaaguauaca

SEQ ID NO: 973398 - RNA, 19 nt, Artificial Sequence
  Description of Artificial Sequence: Synthetic oligonucleotide
  Sense strand starting at position 27 of SEQ ID NO: 914040
agccauguagcucaauaga

SEQ ID NO: 973399 - RNA, 19 nt, Artificial Sequence
  Description of Artificial Sequence: Synthetic oligonucleotide
  Antisense strand to SEQ ID NO: 973398
ucuauugagcuacauggcu

SEQ ID NO: 973400 - RNA, 19 nt, Artificial Sequence
  Description of Artificial Sequence: Synthetic oligonucleotide
  Sense strand starting at position 114 of SEQ ID NO: 914040
agcuauugaucagcaaaua

SEQ ID NO: 973401 - RNA, 19 nt, Artificial Sequence
  Description of Artificial Sequence: Synthetic oligonucleotide
  Antisense strand to SEQ ID NO: 973400
uauuugcugaucaauagcu

SEQ ID NO: 973402 - RNA, 19 nt, Artificial Sequence
  Description of Artificial Sequence: Synthetic oligonucleotide
  Sense strand starting at position 2163 of SEQ ID NO: 914040
ugggcuauuguugggagaa

SEQ ID NO: 973403 - RNA, 19 nt, Artificial Sequence
  Description of Artificial Sequence: Synthetic oligonucleotide
  Antisense strand to SEQ ID NO: 973402
uucucccaacaauagccca

SEQ ID NO: 973404 - RNA, 19 nt, Artificial Sequence
  Description of Artificial Sequence: Synthetic oligonucleotide
  Sense strand starting at position 620 of SEQ ID NO: 914040
ggccuauuucucuguaagc

SEQ ID NO: 973405 - RNA, 19 nt, Artificial Sequence
  Description of Artificial Sequence: Synthetic oligonucleotide
  Antisense strand to SEQ ID NO: 973404
gcuuacagagaaauaggcc

SEQ ID NO: 973406 - RNA, 19 nt, Artificial Sequence
  Description of Artificial Sequence: Synthetic oligonucleotide
  Sense strand starting at position 1352 of SEQ ID NO: 914040
gucucauaaucugcagaaa

SEQ ID NO: 973407 - RNA, 19 nt, Artificial Sequence
  Description of Artificial Sequence: Synthetic oligonucleotide
  Antisense strand to SEQ ID NO: 973406
uuucugcagauuaugagac

SEQ ID NO: 973408 - RNA, 19 nt, Artificial Sequence
  Description of Artificial Sequence: Synthetic oligonucleotide
  Sense strand starting at position 841 of SEQ ID NO: 914040
ugcuaagauugauuccacu

SEQ ID NO: 973409 - RNA, 19 nt, Artificial Sequence
  Description of Artificial Sequence: Synthetic oligonucleotide
  Antisense strand to SEQ ID NO: 973408
aguggaaucaaucuuagca

SEQ ID NO: 973410 - RNA, 19 nt, Artificial Sequence
  Description of Artificial Sequence: Synthetic oligonucleotide
  Sense strand starting at position 1114 of SEQ ID NO: 914040
ugaucagauugugagauuu

SEQ ID NO: 973411 - RNA, 19 nt, Artificial Sequence
  Description of Artificial Sequence: Synthetic oligonucleotide
  Antisense strand to SEQ ID NO: 973410
aaaucucacaaucugauca

SEQ ID NO: 973412 - RNA, 19 nt, Artificial Sequence
  Description of Artificial Sequence: Synthetic oligonucleotide
  Sense strand starting at position 3194 of SEQ ID NO: 914040
acguaaguccaauaagcau

SEQ ID NO: 973413 - RNA, 19 nt, Artificial Sequence
  Description of Artificial Sequence: Synthetic oligonucleotide
  Antisense strand to SEQ ID NO: 973412
augcuuauuggacuuacgu

SEQ ID NO: 973414 - RNA, 19 nt, Artificial Sequence
  Description of Artificial Sequence: Synthetic oligonucleotide
  Sense strand starting at position 3887 of SEQ ID NO: 914040
cuaucaucucaacggugaa

SEQ ID NO: 973415 - RNA, 19 nt, Artificial Sequence
  Description of Artificial Sequence: Synthetic oligonucleotide
  Antisense strand to SEQ ID NO: 973414
uucaccguugagaugauag

SEQ ID NO: 973416 - RNA, 19 nt, Artificial Sequence
  Description of Artificial Sequence: Synthetic oligonucleotide
  Sense strand starting at position 2721 of SEQ ID NO: 914040
cgcugacuugcagauaaau

SEQ ID NO: 973417 - RNA, 19 nt, Artificial Sequence
  Description of Artificial Sequence: Synthetic oligonucleotide
  Antisense strand to SEQ ID NO: 973416
auuuaucugcaagucagcg

SEQ ID NO: 973418 - RNA, 19 nt, Artificial Sequence
  Description of Artificial Sequence: Synthetic oligonucleotide
  Sense strand starting at position 3054 of SEQ ID NO: 914040
auaguaaauuucugaaagg

SEQ ID NO: 973419 - RNA, 19 nt, Artificial Sequence
  Description of Artificial Sequence: Synthetic oligonucleotide
  Antisense strand to SEQ ID NO: 973418
ccuuucagaaauuuacuau

SEQ ID NO: 973420 - RNA, 19 nt, Artificial Sequence
  Description of Artificial Sequence: Synthetic oligonucleotide
  Sense strand starting at position 2303 of SEQ ID NO: 914040
agaagaauuuaccagcgau

SEQ ID NO: 973421 - RNA, 19 nt, Artificial Sequence
  Description of Artificial Sequence: Synthetic oligonucleotide
  Antisense strand to SEQ ID NO: 973420
aucgcugguaaauucuucu

SEQ ID NO: 973422 - RNA, 19 nt, Artificial Sequence
  Description of Artificial Sequence: Synthetic oligonucleotide
  Sense strand starting at position 111 of SEQ ID NO: 914040
acuagcuauugaucagcaa

SEQ ID NO: 973423 - RNA, 19 nt, Artificial Sequence
  Description of Artificial Sequence: Synthetic oligonucleotide
  Antisense strand to SEQ ID NO: 973422
uugcugaucaauagcuagu

SEQ ID NO: 973424 - RNA, 19 nt, Artificial Sequence
  Description of Artificial Sequence: Synthetic oligonucleotide
  Sense strand starting at position 3055 of SEQ ID NO: 914040
uaguaaauuucugaaaggu

SEQ ID NO: 973425 - RNA, 19 nt, Artificial Sequence
  Description of Artificial Sequence: Synthetic oligonucleotide
  Antisense strand to SEQ ID NO: 973424
accuuucagaaauuuacua

SEQ ID NO: 973426 - RNA, 19 nt, Artificial Sequence
  Description of Artificial Sequence: Synthetic oligonucleotide
  Sense strand starting at position 2327 of SEQ ID NO: 914040
gggcaaccuuuccucuaau

SEQ ID NO: 973427 - RNA, 19 nt, Artificial Sequence
  Description of Artificial Sequence: Synthetic oligonucleotide
  Antisense strand to SEQ ID NO: 973426
auuagaggaaagguugccc

SEQ ID NO: 973428 - RNA, 19 nt, Artificial Sequence
  Description of Artificial Sequence: Synthetic oligonucleotide
  Sense strand starting at position 3224 of SEQ ID NO: 914041
gguauuaucuaccuagagg

SEQ ID NO: 973429 - RNA, 19 nt, Artificial Sequence
  Description of Artificial Sequence: Synthetic oligonucleotide
  Antisense strand to SEQ ID NO: 973428
ccucuagguagauaauacc

SEQ ID NO: 973430 - RNA, 19 nt, Artificial Sequence
  Description of Artificial Sequence: Synthetic oligonucleotide
  Sense strand starting at position 3096 of SEQ ID NO: 914041
gaucuaggagcaugaaagu

SEQ ID NO: 973431 - RNA, 19 nt, Artificial Sequence
  Description of Artificial Sequence: Synthetic oligonucleotide
  Antisense strand to SEQ ID NO: 973430
acuuucaugcuccuagauc

SEQ ID NO: 973432 - RNA, 19 nt, Artificial Sequence
  Description of Artificial Sequence: Synthetic oligonucleotide
  Sense strand starting at position 2358 of SEQ ID NO: 914041
ugaauucuguagguuuaaa

SEQ ID NO: 973433 - RNA, 19 nt, Artificial Sequence
  Description of Artificial Sequence: Synthetic oligonucleotide
  Antisense strand to SEQ ID NO: 973432
uuuaaaccuacagaauuca

SEQ ID NO: 973434 - RNA, 19 nt, Artificial Sequence
  Description of Artificial Sequence: Synthetic oligonucleotide
  Sense strand starting at position 3090 of SEQ ID NO: 914041
agagcugaucuaggagcau

SEQ ID NO: 973435 - RNA, 19 nt, Artificial Sequence
  Description of Artificial Sequence: Synthetic oligonucleotide
  Antisense strand to SEQ ID NO: 973434
augcuccuagaucagcucu

SEQ ID NO: 973436 - RNA, 19 nt, Artificial Sequence
  Description of Artificial Sequence: Synthetic oligonucleotide
  Sense strand starting at position 3767 of SEQ ID NO: 914041
uccaacuucugagcucaga

SEQ ID NO: 973437 - RNA, 19 nt, Artificial Sequence
  Description of Artificial Sequence: Synthetic oligonucleotide
  Antisense strand to SEQ ID NO: 973436
ucugagcucagaaguugga

SEQ ID NO: 973438 - RNA, 19 nt, Artificial Sequence
  Description of Artificial Sequence: Synthetic oligonucleotide
  Sense strand starting at position 2761 of SEQ ID NO: 914041
gauuuaggguuuggaagag

SEQ ID NO: 973439 - RNA, 19 nt, Artificial Sequence
  Description of Artificial Sequence: Synthetic oligonucleotide
  Antisense strand to SEQ ID NO: 973438
cucuuccaaacccuaaauc

SEQ ID NO: 973440 - RNA, 19 nt, Artificial Sequence
  Description of Artificial Sequence: Synthetic oligonucleotide
  Sense strand starting at position 3105 of SEQ ID NO: 914041
gcaugaaaguguccaccaa

SEQ ID NO: 973441 - RNA, 19 nt, Artificial Sequence
  Description of Artificial Sequence: Synthetic oligonucleotide
  Antisense strand to SEQ ID NO: 973440
uugguggacacuuucaugc

SEQ ID NO: 973442 - RNA, 19 nt, Artificial Sequence
  Description of Artificial Sequence: Synthetic oligonucleotide
  Sense strand starting at position 2355 of SEQ ID NO: 914041
cugugaauucuguagguuu

SEQ ID NO: 973443 - RNA, 19 nt, Artificial Sequence
  Description of Artificial Sequence: Synthetic oligonucleotide
  Antisense strand to SEQ ID NO: 973442
aaaccuacagaauucacag

SEQ ID NO: 973444 - RNA, 19 nt, Artificial Sequence
  Description of Artificial Sequence: Synthetic oligonucleotide
  Sense strand starting at position 2344 of SEQ ID NO: 914041
ucaaguacaggcugugaau

SEQ ID NO: 973445 - RNA, 19 nt, Artificial Sequence
  Description of Artificial Sequence: Synthetic oligonucleotide
  Antisense strand to SEQ ID NO: 973444
auucacagccuguacuuga

SEQ ID NO: 973446 - RNA, 19 nt, Artificial Sequence
  Description of Artificial Sequence: Synthetic oligonucleotide
  Sense strand starting at position 2357 of SEQ ID NO: 914041
gugaauucuguagguuuaa

SEQ ID NO: 973447 - RNA, 19 nt, Artificial Sequence
  Description of Artificial Sequence: Synthetic oligonucleotide
  Antisense strand to SEQ ID NO: 973446
uuaaaccuacagaauucac

SEQ ID NO: 973448 - RNA, 19 nt, Artificial Sequence
  Description of Artificial Sequence: Synthetic oligonucleotide
  Sense strand starting at position 3074 of SEQ ID NO: 914041
uuccuaguuuguuccaaga

SEQ ID NO: 973449 - RNA, 19 nt, Artificial Sequence
  Description of Artificial Sequence: Synthetic oligonucleotide
  Antisense strand to SEQ ID NO: 973448
ucuuggaacaaacuaggaa

SEQ ID NO: 973450 - RNA, 19 nt, Artificial Sequence
  Description of Artificial Sequence: Synthetic oligonucleotide
  Sense strand starting at position 2849 of SEQ ID NO: 914041
ugacucuuccaucgucaag

SEQ ID NO: 973451 - RNA, 19 nt, Artificial Sequence
  Description of Artificial Sequence: Synthetic oligonucleotide
  Antisense strand to SEQ ID NO: 973450
cuugacgauggaagaguca

SEQ ID NO: 973452 - RNA, 19 nt, Artificial Sequence
  Description of Artificial Sequence: Synthetic oligonucleotide
  Sense strand starting at position 2311 of SEQ ID NO: 914041
aaacauaguuuggagagaa

SEQ ID NO: 973453 - RNA, 19 nt, Artificial Sequence
  Description of Artificial Sequence: Synthetic oligonucleotide
  Antisense strand to SEQ ID NO: 973452
uucucuccaaacuauguuu

SEQ ID NO: 973454 - RNA, 19 nt, Artificial Sequence
  Description of Artificial Sequence: Synthetic oligonucleotide
  Sense strand starting at position 2948 of SEQ ID NO: 914041
cggccagcuccugaucuua

SEQ ID NO: 973455 - RNA, 19 nt, Artificial Sequence
  Description of Artificial Sequence: Synthetic oligonucleotide
  Antisense strand to SEQ ID NO: 973454
uaagaucaggagcuggccg

SEQ ID NO: 973456 - RNA, 19 nt, Artificial Sequence
  Description of Artificial Sequence: Synthetic oligonucleotide
  Sense strand starting at position 3137 of SEQ ID NO: 914041
gagcacuuugcauggaguu

SEQ ID NO: 973457 - RNA, 19 nt, Artificial Sequence
  Description of Artificial Sequence: Synthetic oligonucleotide
  Antisense strand to SEQ ID NO: 973456
aacuccaugcaaagugcuc

SEQ ID NO: 973458 - RNA, 19 nt, Artificial Sequence
  Description of Artificial Sequence: Synthetic oligonucleotide
  Sense strand starting at position 3243 of SEQ ID NO: 914041
aaccgauguugaggauuua

SEQ ID NO: 973459 - RNA, 19 nt, Artificial Sequence
  Description of Artificial Sequence: Synthetic oligonucleotide
  Antisense strand to SEQ ID NO: 973458
uaaauccucaacaucgguu

SEQ ID NO: 973460 - RNA, 19 nt, Artificial Sequence
  Description of Artificial Sequence: Synthetic oligonucleotide
  Sense strand starting at position 2746 of SEQ ID NO: 914041
augagaaggucugaagauu

SEQ ID NO: 973461 - RNA, 19 nt, Artificial Sequence
  Description of Artificial Sequence: Synthetic oligonucleotide
  Antisense strand to SEQ ID NO: 973460
aaucuucagaccuucucau

SEQ ID NO: 973462 - RNA, 19 nt, Artificial Sequence
  Description of Artificial Sequence: Synthetic oligonucleotide
  Sense strand starting at position 3600 of SEQ ID NO: 914041
gugcaauggcuuuauguug

SEQ ID NO: 973463 - RNA, 19 nt, Artificial Sequence
  Description of Artificial Sequence: Synthetic oligonucleotide
  Antisense strand to SEQ ID NO: 973462
caacauaaagccauugcac

SEQ ID NO: 973464 - RNA, 19 nt, Artificial Sequence
  Description of Artificial Sequence: Synthetic oligonucleotide
  Sense strand starting at position 3213 of SEQ ID NO: 914041
cucuauguguugguauuau

SEQ ID NO: 973465 - RNA, 19 nt, Artificial Sequence
  Description of Artificial Sequence: Synthetic oligonucleotide
  Antisense strand to SEQ ID NO: 973464
auaauaccaacacauagag

SEQ ID NO: 973466 - RNA, 19 nt, Artificial Sequence
  Description of Artificial Sequence: Synthetic oligonucleotide
  Sense strand starting at position 3200 of SEQ ID NO: 914041
aacccuguguggucucuau

SEQ ID NO: 973467 - RNA, 19 nt, Artificial Sequence
  Description of Artificial Sequence: Synthetic oligonucleotide
  Antisense strand to SEQ ID NO: 973466
auagagaccacacaggguu

SEQ ID NO: 973468 - RNA, 19 nt, Artificial Sequence
  Description of Artificial Sequence: Synthetic oligonucleotide
  Sense strand starting at position 3138 of SEQ ID NO: 914041
agcacuuugcauggaguuu

SEQ ID NO: 973469 - RNA, 19 nt, Artificial Sequence
  Description of Artificial Sequence: Synthetic oligonucleotide
  Antisense strand to SEQ ID NO: 973468
aaacuccaugcaaagugcu

SEQ ID NO: 973470 - RNA, 19 nt, Artificial Sequence
  Description of Artificial Sequence: Synthetic oligonucleotide
  Sense strand starting at position 3212 of SEQ ID NO: 914041
ucucuauguguugguauua

SEQ ID NO: 973471 - RNA, 19 nt, Artificial Sequence
  Description of Artificial Sequence: Synthetic oligonucleotide
  Antisense strand to SEQ ID NO: 973470
uaauaccaacacauagaga

SEQ ID NO: 973472 - RNA, 19 nt, Artificial Sequence
  Description of Artificial Sequence: Synthetic oligonucleotide
  Sense strand starting at position 3123 of SEQ ID NO: 914041
aucuaauauuuguggagca

SEQ ID NO: 973473 - RNA, 19 nt, Artificial Sequence
  Description of Artificial Sequence: Synthetic oligonucleotide
  Antisense strand to SEQ ID NO: 973472
ugcuccacaaauauuagau

SEQ ID NO: 973474 - RNA, 19 nt, Artificial Sequence
  Description of Artificial Sequence: Synthetic oligonucleotide
  Sense strand starting at position 3607 of SEQ ID NO: 914041
ggcuuuauguugguuuacu

SEQ ID NO: 973475 - RNA, 19 nt, Artificial Sequence
  Description of Artificial Sequence: Synthetic oligonucleotide
  Antisense strand to SEQ ID NO: 973474
aguaaaccaacauaaagcc

SEQ ID NO: 973476 - RNA, 19 nt, Artificial Sequence
  Description of Artificial Sequence: Synthetic oligonucleotide
  Sense strand starting at position 3608 of SEQ ID NO: 914041
gcuuuauguugguuuacug

SEQ ID NO: 973477 - RNA, 19 nt, Artificial Sequence
  Description of Artificial Sequence: Synthetic oligonucleotide
  Antisense strand to SEQ ID NO: 973476
caguaaaccaacauaaagc

SEQ ID NO: 973478 - RNA, 19 nt, Artificial Sequence
  Description of Artificial Sequence: Synthetic oligonucleotide
  Sense strand starting at position 2310 of SEQ ID NO: 914041
gaaacauaguuuggagaga

SEQ ID NO: 973479 - RNA, 19 nt, Artificial Sequence
  Description of Artificial Sequence: Synthetic oligonucleotide
  Antisense strand to SEQ ID NO: 973478
ucucuccaaacuauguuuc

SEQ ID NO: 973480 - RNA, 19 nt, Artificial Sequence
  Description of Artificial Sequence: Synthetic oligonucleotide
  Sense strand starting at position 3209 of SEQ ID NO: 914041
uggucucuauguguuggua

SEQ ID NO: 973481 - RNA, 19 nt, Artificial Sequence
  Description of Artificial Sequence: Synthetic oligonucleotide
  Antisense strand to SEQ ID NO: 973480
uaccaacacauagagacca

SEQ ID NO: 973482 - RNA, 19 nt, Artificial Sequence
  Description of Artificial Sequence: Synthetic oligonucleotide
  Sense strand starting at position 3204 of SEQ ID NO: 914041
cuguguggucucuaugugu

SEQ ID NO: 973483 - RNA, 19 nt, Artificial Sequence
  Description of Artificial Sequence: Synthetic oligonucleotide
  Antisense strand to SEQ ID NO: 973482
acacauagagaccacacag

SEQ ID NO: 973484 - RNA, 19 nt, Artificial Sequence
  Description of Artificial Sequence: Synthetic oligonucleotide
  Sense strand starting at position 2720 of SEQ ID NO: 914041
agggaucccuucuggaaga

SEQ ID NO: 973485 - RNA, 19 nt, Artificial Sequence
  Description of Artificial Sequence: Synthetic oligonucleotide
  Antisense strand to SEQ ID NO: 973484
ucuuccagaagggaucccu

SEQ ID NO: 973486 - RNA, 19 nt, Artificial Sequence
  Description of Artificial Sequence: Synthetic oligonucleotide
  Sense strand starting at position 2547 of SEQ ID NO: 914041
gccuguaaccuuugcuacu

SEQ ID NO: 973487 - RNA, 19 nt, Artificial Sequence
  Description of Artificial Sequence: Synthetic oligonucleotide
  Antisense strand to SEQ ID NO: 973486
aguagcaaagguuacaggc

SEQ ID NO: 973488 - RNA, 19 nt, Artificial Sequence
  Description of Artificial Sequence: Synthetic oligonucleotide
  Sense strand starting at position 2621 of SEQ ID NO: 914041
cggagauaaugccauugca

SEQ ID NO: 973489 - RNA, 19 nt, Artificial Sequence
  Description of Artificial Sequence: Synthetic oligonucleotide
  Antisense strand to SEQ ID NO: 973488
ugcaauggcauuaucuccg

SEQ ID NO: 973490 - RNA, 19 nt, Artificial Sequence
  Description of Artificial Sequence: Synthetic oligonucleotide
  Sense strand starting at position 3605 of SEQ ID NO: 914041
auggcuuuauguugguuua

SEQ ID NO: 973491 - RNA, 19 nt, Artificial Sequence
  Description of Artificial Sequence: Synthetic oligonucleotide
  Antisense strand to SEQ ID NO: 973490
uaaaccaacauaaagccau

SEQ ID NO: 973492 - RNA, 19 nt, Artificial Sequence
  Description of Artificial Sequence: Synthetic oligonucleotide
  Sense strand starting at position 2353 of SEQ ID NO: 914041
ggcugugaauucuguaggu

SEQ ID NO: 973493 - RNA, 19 nt, Artificial Sequence
  Description of Artificial Sequence: Synthetic oligonucleotide
  Antisense strand to SEQ ID NO: 973492
accuacagaauucacagcc

SEQ ID NO: 973494 - RNA, 19 nt, Artificial Sequence
  Description of Artificial Sequence: Synthetic oligonucleotide
  Sense strand starting at position 3211 of SEQ ID NO: 914041
gucucuauguguugguauu

SEQ ID NO: 973495 - RNA, 19 nt, Artificial Sequence
  Description of Artificial Sequence: Synthetic oligonucleotide
  Antisense strand to SEQ ID NO: 973494
aauaccaacacauagagac

SEQ ID NO: 973496 - RNA, 19 nt, Artificial Sequence
  Description of Artificial Sequence: Synthetic oligonucleotide
  Sense strand starting at position 2146 of SEQ ID NO: 914042
agaaauaugcuuuggauaa

SEQ ID NO: 973497 - RNA, 19 nt, Artificial Sequence
  Description of Artificial Sequence: Synthetic oligonucleotide
  Antisense strand to SEQ ID NO: 973496
uuauccaaagcauauuucu

SEQ ID NO: 973498 - RNA, 19 nt, Artificial Sequence
  Description of Artificial Sequence: Synthetic oligonucleotide
  Sense strand starting at position 2144 of SEQ ID NO: 914042
agagaaauaugcuuuggau

SEQ ID NO: 973499 - RNA, 19 nt, Artificial Sequence
  Description of Artificial Sequence: Synthetic oligonucleotide
  Antisense strand to SEQ ID NO: 973498
auccaaagcauauuucucu

SEQ ID NO: 973500 - RNA, 19 nt, Artificial Sequence
  Description of Artificial Sequence: Synthetic oligonucleotide
  Sense strand starting at position 3243 of SEQ ID NO: 914042
aguggaggaaugugauuaa

SEQ ID NO: 973501 - RNA, 19 nt, Artificial Sequence
  Description of Artificial Sequence: Synthetic oligonucleotide
  Antisense strand to SEQ ID NO: 973500
uuaaucacauuccuccacu

SEQ ID NO: 973502 - RNA, 19 nt, Artificial Sequence
  Description of Artificial Sequence: Synthetic oligonucleotide
  Sense strand starting at position 3311 of SEQ ID NO: 914042
uggauuauggcauggagga

SEQ ID NO: 973503 - RNA, 19 nt, Artificial Sequence
  Description of Artificial Sequence: Synthetic oligonucleotide
  Antisense strand to SEQ ID NO: 973502
uccuccaugccauaaucca

SEQ ID NO: 973504 - RNA, 19 nt, Artificial Sequence
  Description of Artificial Sequence: Synthetic oligonucleotide
  Sense strand starting at position 2354 of SEQ ID NO: 914042
guagacauuugccaauuua

SEQ ID NO: 973505 - RNA, 19 nt, Artificial Sequence
  Description of Artificial Sequence: Synthetic oligonucleotide
  Antisense strand to SEQ ID NO: 973504
uaaauuggcaaaugucuac

SEQ ID NO: 973506 - RNA, 19 nt, Artificial Sequence
  Description of Artificial Sequence: Synthetic oligonucleotide
  Sense strand starting at position 2516 of SEQ ID NO: 914042
gggauugguugaguaagga

SEQ ID NO: 973507 - RNA, 19 nt, Artificial Sequence
  Description of Artificial Sequence: Synthetic oligonucleotide
  Antisense strand to SEQ ID NO: 973506
uccuuacucaaccaauccc

SEQ ID NO: 973508 - RNA, 19 nt, Artificial Sequence
  Description of Artificial Sequence: Synthetic oligonucleotide
  Sense strand starting at position 2475 of SEQ ID NO: 914042
acagaauggucaucauacu

SEQ ID NO: 973509 - RNA, 19 nt, Artificial Sequence
  Description of Artificial Sequence: Synthetic oligonucleotide
  Antisense strand to SEQ ID NO: 973508
aguaugaugaccauucugu

SEQ ID NO: 973510 - RNA, 19 nt, Artificial Sequence
  Description of Artificial Sequence: Synthetic oligonucleotide
  Sense strand starting at position 2472 of SEQ ID NO: 914042
cuaacagaauggucaucau

SEQ ID NO: 973511 - RNA, 19 nt, Artificial Sequence
  Description of Artificial Sequence: Synthetic oligonucleotide
  Antisense strand to SEQ ID NO: 973510
augaugaccauucuguuag

SEQ ID NO: 973512 - RNA, 19 nt, Artificial Sequence
  Description of Artificial Sequence: Synthetic oligonucleotide
  Sense strand starting at position 2830 of SEQ ID NO: 914042
accauugaugucugaggga

SEQ ID NO: 973513 - RNA, 19 nt, Artificial Sequence
  Description of Artificial Sequence: Synthetic oligonucleotide
  Antisense strand to SEQ ID NO: 973512
ucccucagacaucaauggu

SEQ ID NO: 973514 - RNA, 19 nt, Artificial Sequence
  Description of Artificial Sequence: Synthetic oligonucleotide
  Sense strand starting at position 3979 of SEQ ID NO: 914042
gagaucugaagcugggauu

SEQ ID NO: 973515 - RNA, 19 nt, Artificial Sequence
  Description of Artificial Sequence: Synthetic oligonucleotide
  Antisense strand to SEQ ID NO: 973514
aaucccagcuucagaucuc

SEQ ID NO: 973516 - RNA, 19 nt, Artificial Sequence
  Description of Artificial Sequence: Synthetic oligonucleotide
  Sense strand starting at position 3700 of SEQ ID NO: 914042
guguaugucuauuuauauc

SEQ ID NO: 973517 - RNA, 19 nt, Artificial Sequence
  Description of Artificial Sequence: Synthetic oligonucleotide
  Antisense strand to SEQ ID NO: 973516
gauauaaauagacauacac

SEQ ID NO: 973518 - RNA, 19 nt, Artificial Sequence
  Description of Artificial Sequence: Synthetic oligonucleotide
  Sense strand starting at position 2918 of SEQ ID NO: 914042
guugaauaucaccauugug

SEQ ID NO: 973519 - RNA, 19 nt, Artificial Sequence
  Description of Artificial Sequence: Synthetic oligonucleotide
  Antisense strand to SEQ ID NO: 973518
cacaauggugauauucaac

SEQ ID NO: 973520 - RNA, 19 nt, Artificial Sequence
  Description of Artificial Sequence: Synthetic oligonucleotide
  Sense strand starting at position 3144 of SEQ ID NO: 914042
ggaugccugagucauauau

SEQ ID NO: 973521 - RNA, 19 nt, Artificial Sequence
  Description of Artificial Sequence: Synthetic oligonucleotide
  Antisense strand to SEQ ID NO: 973520
auauaugacucaggcaucc

SEQ ID NO: 973522 - RNA, 19 nt, Artificial Sequence
  Description of Artificial Sequence: Synthetic oligonucleotide
  Sense strand starting at position 2867 of SEQ ID NO: 914042
guuuccaggcucuaaacaa

SEQ ID NO: 973523 - RNA, 19 nt, Artificial Sequence
  Description of Artificial Sequence: Synthetic oligonucleotide
  Antisense strand to SEQ ID NO: 973522
uuguuuagagccuggaaac

SEQ ID NO: 973524 - RNA, 19 nt, Artificial Sequence
  Description of Artificial Sequence: Synthetic oligonucleotide
  Sense strand starting at position 3749 of SEQ ID NO: 914042
cuugacugauagucucaga

SEQ ID NO: 973525 - RNA, 19 nt, Artificial Sequence
  Description of Artificial Sequence: Synthetic oligonucleotide
  Antisense strand to SEQ ID NO: 973524
ucugagacuaucagucaag

SEQ ID NO: 973526 - RNA, 19 nt, Artificial Sequence
  Description of Artificial Sequence: Synthetic oligonucleotide
  Sense strand starting at position 3680 of SEQ ID NO: 914042
gcauuuguauguguauaca

SEQ ID NO: 973527 - RNA, 19 nt, Artificial Sequence
  Description of Artificial Sequence: Synthetic oligonucleotide
  Antisense strand to SEQ ID NO: 973526
uguauacacauacaaaugc

SEQ ID NO: 973528 - RNA, 19 nt, Artificial Sequence
  Description of Artificial Sequence: Synthetic oligonucleotide
  Sense strand starting at position 3385 of SEQ ID NO: 914042
ugucaacuugccuaggaca

SEQ ID NO: 973529 - RNA, 19 nt, Artificial Sequence
  Description of Artificial Sequence: Synthetic oligonucleotide
  Antisense strand to SEQ ID NO: 973528
uguccuaggcaaguugaca

SEQ ID NO: 973530 - RNA, 19 nt, Artificial Sequence
  Description of Artificial Sequence: Synthetic oligonucleotide
  Sense strand starting at position 341 of SEQ ID NO: 914042
agccaaaguuauccaaaug

SEQ ID NO: 973531 - RNA, 19 nt, Artificial Sequence
  Description of Artificial Sequence: Synthetic oligonucleotide
  Antisense strand to SEQ ID NO: 973530
cauuuggauaacuuuggcu

SEQ ID NO: 973532 - RNA, 19 nt, Artificial Sequence
  Description of Artificial Sequence: Synthetic oligonucleotide
  Sense strand starting at position 2713 of SEQ ID NO: 914042
uugccaaaguaauuaaaug

SEQ ID NO: 973533 - RNA, 19 nt, Artificial Sequence
  Description of Artificial Sequence: Synthetic oligonucleotide
  Antisense strand to SEQ ID NO: 973532
cauuuaauuacuuuggcaa

SEQ ID NO: 973534 - RNA, 19 nt, Artificial Sequence
  Description of Artificial Sequence: Synthetic oligonucleotide
  Sense strand starting at position 3387 of SEQ ID NO: 914042
ucaacuugccuaggacaua

SEQ ID NO: 973535 - RNA, 19 nt, Artificial Sequence
  Description of Artificial Sequence: Synthetic oligonucleotide
  Antisense strand to SEQ ID NO: 973534
uauguccuaggcaaguuga

SEQ ID NO: 973536 - RNA, 19 nt, Artificial Sequence
  Description of Artificial Sequence: Synthetic oligonucleotide
  Sense strand starting at position 2469 of SEQ ID NO: 914042
uagcuaacagaauggucau

SEQ ID NO: 973537 - RNA, 19 nt, Artificial Sequence
  Description of Artificial Sequence: Synthetic oligonucleotide
  Antisense strand to SEQ ID NO: 973536
augaccauucuguuagcua

SEQ ID NO: 973538 - RNA, 19 nt, Artificial Sequence
  Description of Artificial Sequence: Synthetic oligonucleotide
  Sense strand starting at position 3274 of SEQ ID NO: 914042
uuauaaucccuguaguuug

SEQ ID NO: 973539 - RNA, 19 nt, Artificial Sequence
  Description of Artificial Sequence: Synthetic oligonucleotide
  Antisense strand to SEQ ID NO: 973538
caaacuacagggauuauaa

SEQ ID NO: 973540 - RNA, 19 nt, Artificial Sequence
  Description of Artificial Sequence: Synthetic oligonucleotide
  Sense strand starting at position 3503 of SEQ ID NO: 914042
ggauuuccuuaagagcaaa

SEQ ID NO: 973541 - RNA, 19 nt, Artificial Sequence
  Description of Artificial Sequence: Synthetic oligonucleotide
  Antisense strand to SEQ ID NO: 973540
uuugcucuuaaggaaaucc

SEQ ID NO: 973542 - RNA, 19 nt, Artificial Sequence
  Description of Artificial Sequence: Synthetic oligonucleotide
  Sense strand starting at position 2231 of SEQ ID NO: 914042
auucgucaccuggaaaguu

SEQ ID NO: 973543 - RNA, 19 nt, Artificial Sequence
  Description of Artificial Sequence: Synthetic oligonucleotide
  Antisense strand to SEQ ID NO: 973542
aacuuuccaggugacgaau

SEQ ID NO: 973544 - RNA, 19 nt, Artificial Sequence
  Description of Artificial Sequence: Synthetic oligonucleotide
  Sense strand starting at position 2303 of SEQ ID NO: 914042
uugaauuuaugagagucca

SEQ ID NO: 973545 - RNA, 19 nt, Artificial Sequence
  Description of Artificial Sequence: Synthetic oligonucleotide
  Antisense strand to SEQ ID NO: 973544
uggacucucauaaauucaa

SEQ ID NO: 973546 - RNA, 19 nt, Artificial Sequence
  Description of Artificial Sequence: Synthetic oligonucleotide
  Sense strand starting at position 1173 of SEQ ID NO: 914042
caagcaucuguggagucau

SEQ ID NO: 973547 - RNA, 19 nt, Artificial Sequence
  Description of Artificial Sequence: Synthetic oligonucleotide
  Antisense strand to SEQ ID NO: 973546
augacuccacagaugcuug

SEQ ID NO: 973548 - RNA, 19 nt, Artificial Sequence
  Description of Artificial Sequence: Synthetic oligonucleotide
  Sense strand starting at position 2917 of SEQ ID NO: 914042
aguugaauaucaccauugu

SEQ ID NO: 973549 - RNA, 19 nt, Artificial Sequence
  Description of Artificial Sequence: Synthetic oligonucleotide
  Antisense strand to SEQ ID NO: 973548
acaauggugauauucaacu

SEQ ID NO: 973550 - RNA, 19 nt, Artificial Sequence
  Description of Artificial Sequence: Synthetic oligonucleotide
  Sense strand starting at position 3948 of SEQ ID NO: 914042
gaaugauauuccguaccau

SEQ ID NO: 973551 - RNA, 19 nt, Artificial Sequence
  Description of Artificial Sequence: Synthetic oligonucleotide
  Antisense strand to SEQ ID NO: 973550
augguacggaauaucauuc

SEQ ID NO: 973552 - RNA, 19 nt, Artificial Sequence
  Description of Artificial Sequence: Synthetic oligonucleotide
  Sense strand starting at position 3743 of SEQ ID NO: 914042
gagagccuugacugauagu

SEQ ID NO: 973553 - RNA, 19 nt, Artificial Sequence
  Description of Artificial Sequence: Synthetic oligonucleotide
  Antisense strand to SEQ ID NO: 973552
acuaucagucaaggcucuc

SEQ ID NO: 973554 - RNA, 19 nt, Artificial Sequence
  Description of Artificial Sequence: Synthetic oligonucleotide
  Sense strand starting at position 2338 of SEQ ID NO: 914042
ccaggcauucccuacugua

SEQ ID NO: 973555 - RNA, 19 nt, Artificial Sequence
  Description of Artificial Sequence: Synthetic oligonucleotide
  Antisense strand to SEQ ID NO: 973554
uacaguagggaaugccugg

SEQ ID NO: 973556 - RNA, 19 nt, Artificial Sequence
  Description of Artificial Sequence: Synthetic oligonucleotide
  Sense strand starting at position 2329 of SEQ ID NO: 914042
gaguuauaaccaggcauuc

SEQ ID NO: 973557 - RNA, 19 nt, Artificial Sequence
  Description of Artificial Sequence: Synthetic oligonucleotide
  Antisense strand to SEQ ID NO: 973556
gaaugccugguuauaacuc

SEQ ID NO: 973558 - RNA, 19 nt, Artificial Sequence
  Description of Artificial Sequence: Synthetic oligonucleotide
  Sense strand starting at position 3142 of SEQ ID NO: 914042
auggaugccugagucauau

SEQ ID NO: 973559 - RNA, 19 nt, Artificial Sequence
  Description of Artificial Sequence: Synthetic oligonucleotide
  Antisense strand to SEQ ID NO: 973558
auaugacucaggcauccau

SEQ ID NO: 973560 - RNA, 19 nt, Artificial Sequence
  Description of Artificial Sequence: Synthetic oligonucleotide
  Sense strand starting at position 3364 of SEQ ID NO: 914042
cucugugagggucaguuua

SEQ ID NO: 973561 - RNA, 19 nt, Artificial Sequence
  Description of Artificial Sequence: Synthetic oligonucleotide
  Antisense strand to SEQ ID NO: 973560
uaaacugacccucacagag

SEQ ID NO: 973562 - RNA, 19 nt, Artificial Sequence
  Description of Artificial Sequence: Synthetic oligonucleotide
  Sense strand starting at position 2430 of SEQ ID NO: 914042
cuaauuaaaucgcucugaa

SEQ ID NO: 973563 - RNA, 19 nt, Artificial Sequence
  Description of Artificial Sequence: Synthetic oligonucleotide
  Antisense strand to SEQ ID NO: 973562
uucagagcgauuuaauuag

SEQ ID NO: 973564 - RNA, 19 nt, Artificial Sequence
  Description of Artificial Sequence: Synthetic oligonucleotide
  Sense strand starting at position 2229 of SEQ ID NO: 914042
ucauucgucaccuggaaag

SEQ ID NO: 973565 - RNA, 19 nt, Artificial Sequence
  Description of Artificial Sequence: Synthetic oligonucleotide
  Antisense strand to SEQ ID NO: 973564
cuuuccaggugacgaauga

SEQ ID NO: 973566 - RNA, 19 nt, Artificial Sequence
  Description of Artificial Sequence: Synthetic oligonucleotide
  Sense strand starting at position 2433 of SEQ ID NO: 914042
auuaaaucgcucugaauua

SEQ ID NO: 973567 - RNA, 19 nt, Artificial Sequence
  Description of Artificial Sequence: Synthetic oligonucleotide
  Antisense strand to SEQ ID NO: 973566
uaauucagagcgauuuaau

SEQ ID NO: 973568 - RNA, 19 nt, Artificial Sequence
  Description of Artificial Sequence: Synthetic oligonucleotide
  Sense strand starting at position 2190 of SEQ ID NO: 914042
auaucaguagguugaguau

SEQ ID NO: 973569 - RNA, 19 nt, Artificial Sequence
  Description of Artificial Sequence: Synthetic oligonucleotide
  Antisense strand to SEQ ID NO: 973568
auacucaaccuacugauau

SEQ ID NO: 973570 - RNA, 19 nt, Artificial Sequence
  Description of Artificial Sequence: Synthetic oligonucleotide
  Sense strand starting at position 2184 of SEQ ID NO: 914042
gcaacaauaucaguagguu

SEQ ID NO: 973571 - RNA, 19 nt, Artificial Sequence
  Description of Artificial Sequence: Synthetic oligonucleotide
  Antisense strand to SEQ ID NO: 973570
aaccuacugauauuguugc

SEQ ID NO: 973572 - RNA, 19 nt, Artificial Sequence
  Description of Artificial Sequence: Synthetic oligonucleotide
  Sense strand starting at position 2625 of SEQ ID NO: 914042
agaaguguuguguaauagu

SEQ ID NO: 973573 - RNA, 19 nt, Artificial Sequence
  Description of Artificial Sequence: Synthetic oligonucleotide
  Antisense strand to SEQ ID NO: 973572
acuauuacacaacacuucu

SEQ ID NO: 973574 - RNA, 19 nt, Artificial Sequence
  Description of Artificial Sequence: Synthetic oligonucleotide
  Sense strand starting at position 2075 of SEQ ID NO: 914042
uagauuaugucuguucuag

SEQ ID NO: 973575 - RNA, 19 nt, Artificial Sequence
  Description of Artificial Sequence: Synthetic oligonucleotide
  Antisense strand to SEQ ID NO: 973574
cuagaacagacauaaucua

SEQ ID NO: 973576 - RNA, 19 nt, Artificial Sequence
  Description of Artificial Sequence: Synthetic oligonucleotide
  Sense strand starting at position 3594 of SEQ ID NO: 914043
caaucuagauuggucagaa

SEQ ID NO: 973577 - RNA, 19 nt, Artificial Sequence
  Description of Artificial Sequence: Synthetic oligonucleotide
  Antisense strand to SEQ ID NO: 973576
uucugaccaaucuagauug

SEQ ID NO: 973578 - RNA, 19 nt, Artificial Sequence
  Description of Artificial Sequence: Synthetic oligonucleotide
  Sense strand starting at position 3364 of SEQ ID NO: 914043
ggaggaaggaucuguucca

SEQ ID NO: 973579 - RNA, 19 nt, Artificial Sequence
  Description of Artificial Sequence: Synthetic oligonucleotide
  Antisense strand to SEQ ID NO: 973578
uggaacagauccuuccucc

SEQ ID NO: 973580 - RNA, 19 nt, Artificial Sequence
  Description of Artificial Sequence: Synthetic oligonucleotide
  Sense strand starting at position 3812 of SEQ ID NO: 914043
cuucuagcuguuucgugau

SEQ ID NO: 973581 - RNA, 19 nt, Artificial Sequence
  Description of Artificial Sequence: Synthetic oligonucleotide
  Antisense strand to SEQ ID NO: 973580
aucacgaaacagcuagaag

SEQ ID NO: 973582 - RNA, 19 nt, Artificial Sequence
  Description of Artificial Sequence: Synthetic oligonucleotide
  Sense strand starting at position 1569 of SEQ ID NO: 914043
agaagauuguacccuugga

SEQ ID NO: 973583 - RNA, 19 nt, Artificial Sequence
  Description of Artificial Sequence: Synthetic oligonucleotide
  Antisense strand to SEQ ID NO: 973582
uccaaggguacaaucuucu

SEQ ID NO: 973584 - RNA, 19 nt, Artificial Sequence
  Description of Artificial Sequence: Synthetic oligonucleotide
  Sense strand starting at position 3634 of SEQ ID NO: 914043
ggugaauaaggugauaguu

SEQ ID NO: 973585 - RNA, 19 nt, Artificial Sequence
  Description of Artificial Sequence: Synthetic oligonucleotide
  Antisense strand to SEQ ID NO: 973584
aacuaucaccuuauucacc

SEQ ID NO: 973586 - RNA, 19 nt, Artificial Sequence
  Description of Artificial Sequence: Synthetic oligonucleotide
  Sense strand starting at position 871 of SEQ ID NO: 914043
augggauggcgucaggaaa

SEQ ID NO: 973587 - RNA, 19 nt, Artificial Sequence
  Description of Artificial Sequence: Synthetic oligonucleotide
  Antisense strand to SEQ ID NO: 973586
uuuccugacgccaucccau

SEQ ID NO: 973588 - RNA, 19 nt, Artificial Sequence
  Description of Artificial Sequence: Synthetic oligonucleotide
  Sense strand starting at position 3080 of SEQ ID NO: 914043
auuagaggcucggucauuu

SEQ ID NO: 973589 - RNA, 19 nt, Artificial Sequence
  Description of Artificial Sequence: Synthetic oligonucleotide
  Antisense strand to SEQ ID NO: 973588
aaaugaccgagccucuaau

SEQ ID NO: 973590 - RNA, 19 nt, Artificial Sequence
  Description of Artificial Sequence: Synthetic oligonucleotide
  Sense strand starting at position 892 of SEQ ID NO: 914043
ccucauugaggagguaaua

SEQ ID NO: 973591 - RNA, 19 nt, Artificial Sequence
  Description of Artificial Sequence: Synthetic oligonucleotide
  Antisense strand to SEQ ID NO: 973590
uauuaccuccucaaugagg

SEQ ID NO: 973592 - RNA, 19 nt, Artificial Sequence
  Description of Artificial Sequence: Synthetic oligonucleotide
  Sense strand starting at position 3365 of SEQ ID NO: 914043
gaggaaggaucuguuccau

SEQ ID NO: 973593 - RNA, 19 nt, Artificial Sequence
  Description of Artificial Sequence: Synthetic oligonucleotide
  Antisense strand to SEQ ID NO: 973592
auggaacagauccuuccuc

SEQ ID NO: 973594 - RNA, 19 nt, Artificial Sequence
  Description of Artificial Sequence: Synthetic oligonucleotide
  Sense strand starting at position 1064 of SEQ ID NO: 914043
cagucauuucgccacggau

SEQ ID NO: 973595 - RNA, 19 nt, Artificial Sequence
  Description of Artificial Sequence: Synthetic oligonucleotide
  Antisense strand to SEQ ID NO: 973594
auccguggcgaaaugacug

SEQ ID NO: 973596 - RNA, 19 nt, Artificial Sequence
  Description of Artificial Sequence: Synthetic oligonucleotide
  Sense strand starting at position 803 of SEQ ID NO: 914043
uguuaagcacaguaaauaa

SEQ ID NO: 973597 - RNA, 19 nt, Artificial Sequence
  Description of Artificial Sequence: Synthetic oligonucleotide
  Antisense strand to SEQ ID NO: 973596
uuauuuacugugcuuaaca

SEQ ID NO: 973598 - RNA, 19 nt, Artificial Sequence
  Description of Artificial Sequence: Synthetic oligonucleotide
  Sense strand starting at position 1203 of SEQ ID NO: 914043
cucugaggagcagauguua

SEQ ID NO: 973599 - RNA, 19 nt, Artificial Sequence
  Description of Artificial Sequence: Synthetic oligonucleotide
  Antisense strand to SEQ ID NO: 973598
uaacaucugcuccucagag

SEQ ID NO: 973600 - RNA, 19 nt, Artificial Sequence
  Description of Artificial Sequence: Synthetic oligonucleotide
  Sense strand starting at position 2792 of SEQ ID NO: 914043
ucaaacuaccugugaugaa

SEQ ID NO: 973601 - RNA, 19 nt, Artificial Sequence
  Description of Artificial Sequence: Synthetic oligonucleotide
  Antisense strand to SEQ ID NO: 973600
uucaucacagguaguuuga

SEQ ID NO: 973602 - RNA, 19 nt, Artificial Sequence
  Description of Artificial Sequence: Synthetic oligonucleotide
  Sense strand starting at position 1662 of SEQ ID NO: 914043
cccucauugcaggaaagua

SEQ ID NO: 973603 - RNA, 19 nt, Artificial Sequence
  Description of Artificial Sequence: Synthetic oligonucleotide
  Antisense strand to SEQ ID NO: 973602
uacuuuccugcaaugaggg

SEQ ID NO: 973604 - RNA, 19 nt, Artificial Sequence
  Description of Artificial Sequence: Synthetic oligonucleotide
  Sense strand starting at position 1019 of SEQ ID NO: 914043
guaccacagagauaacguu

SEQ ID NO: 973605 - RNA, 19 nt, Artificial Sequence
  Description of Artificial Sequence: Synthetic oligonucleotide
  Antisense strand to SEQ ID NO: 973604
aacguuaucucugugguac

SEQ ID NO: 973606 - RNA, 19 nt, Artificial Sequence
  Description of Artificial Sequence: Synthetic oligonucleotide
  Sense strand starting at position 3476 of SEQ ID NO: 914043
agagaauauuacuucugca

SEQ ID NO: 973607 - RNA, 19 nt, Artificial Sequence
  Description of Artificial Sequence: Synthetic oligonucleotide
  Antisense strand to SEQ ID NO: 973606
ugcagaaguaauauucucu

SEQ ID NO: 973608 - RNA, 19 nt, Artificial Sequence
  Description of Artificial Sequence: Synthetic oligonucleotide
  Sense strand starting at position 1159 of SEQ ID NO: 914043
ugaacaguaucaguaauca

SEQ ID NO: 973609 - RNA, 19 nt, Artificial Sequence
  Description of Artificial Sequence: Synthetic oligonucleotide
  Antisense strand to SEQ ID NO: 973608
ugauuacugauacuguuca

SEQ ID NO: 973610 - RNA, 19 nt, Artificial Sequence
  Description of Artificial Sequence: Synthetic oligonucleotide
  Sense strand starting at position 2963 of SEQ ID NO: 914043
ugaucaggagcuuggauua

SEQ ID NO: 973611 - RNA, 19 nt, Artificial Sequence
  Description of Artificial Sequence: Synthetic oligonucleotide
  Antisense strand to SEQ ID NO: 973610
uaauccaagcuccugauca

SEQ ID NO: 973612 - RNA, 19 nt, Artificial Sequence
  Description of Artificial Sequence: Synthetic oligonucleotide
  Sense strand starting at position 1521 of SEQ ID NO: 914043
agacacugucgugagaauc

SEQ ID NO: 973613 - RNA, 19 nt, Artificial Sequence
  Description of Artificial Sequence: Synthetic oligonucleotide
  Antisense strand to SEQ ID NO: 973612
gauucucacgacagugucu

SEQ ID NO: 973614 - RNA, 19 nt, Artificial Sequence
  Description of Artificial Sequence: Synthetic oligonucleotide
  Sense strand starting at position 2949 of SEQ ID NO: 914043
ugaauagaaucugcugauc

SEQ ID NO: 973615 - RNA, 19 nt, Artificial Sequence
  Description of Artificial Sequence: Synthetic oligonucleotide
  Antisense strand to SEQ ID NO: 973614
gaucagcagauucuauuca

SEQ ID NO: 973616 - RNA, 19 nt, Artificial Sequence
  Description of Artificial Sequence: Synthetic oligonucleotide
  Sense strand starting at position 299 of SEQ ID NO: 914043
ccuaccguucuacagaaau

SEQ ID NO: 973617 - RNA, 19 nt, Artificial Sequence
  Description of Artificial Sequence: Synthetic oligonucleotide
  Antisense strand to SEQ ID NO: 973616
auuucuguagaacgguagg

SEQ ID NO: 973618 - RNA, 19 nt, Artificial Sequence
  Description of Artificial Sequence: Synthetic oligonucleotide
  Sense strand starting at position 1546 of SEQ ID NO: 914043
ggcugauaguaacuuagaa

SEQ ID NO: 973619 - RNA, 19 nt, Artificial Sequence
  Description of Artificial Sequence: Synthetic oligonucleotide
  Antisense strand to SEQ ID NO: 973618
uucuaaguuacuaucagcc

SEQ ID NO: 973620 - RNA, 19 nt, Artificial Sequence
  Description of Artificial Sequence: Synthetic oligonucleotide
  Sense strand starting at position 3633 of SEQ ID NO: 914043
aggugaauaaggugauagu

SEQ ID NO: 973621 - RNA, 19 nt, Artificial Sequence
  Description of Artificial Sequence: Synthetic oligonucleotide
  Antisense strand to SEQ ID NO: 973620
acuaucaccuuauucaccu

SEQ ID NO: 973622 - RNA, 19 nt, Artificial Sequence
  Description of Artificial Sequence: Synthetic oligonucleotide
  Sense strand starting at position 1063 of SEQ ID NO: 914043
acagucauuucgccacgga

SEQ ID NO: 973623 - RNA, 19 nt, Artificial Sequence
  Description of Artificial Sequence: Synthetic oligonucleotide
  Antisense strand to SEQ ID NO: 973622
uccguggcgaaaugacugu

SEQ ID NO: 973624 - RNA, 19 nt, Artificial Sequence
  Description of Artificial Sequence: Synthetic oligonucleotide
  Sense strand starting at position 1067 of SEQ ID NO: 914043
ucauuucgccacggauacu

SEQ ID NO: 973625 - RNA, 19 nt, Artificial Sequence
  Description of Artificial Sequence: Synthetic oligonucleotide
  Antisense strand to SEQ ID NO: 973624
aguauccguggcgaaauga

SEQ ID NO: 973626 - RNA, 19 nt, Artificial Sequence
  Description of Artificial Sequence: Synthetic oligonucleotide
  Sense strand starting at position 2712 of SEQ ID NO: 914043
uccgacuuaguguaaauga

SEQ ID NO: 973627 - RNA, 19 nt, Artificial Sequence
  Description of Artificial Sequence: Synthetic oligonucleotide
  Antisense strand to SEQ ID NO: 973626
ucauuuacacuaagucgga

SEQ ID NO: 973628 - RNA, 19 nt, Artificial Sequence
  Description of Artificial Sequence: Synthetic oligonucleotide
  Sense strand starting at position 1711 of SEQ ID NO: 914043
cgaguuucccgcgcuagga

SEQ ID NO: 973629 - RNA, 19 nt, Artificial Sequence
  Description of Artificial Sequence: Synthetic oligonucleotide
  Antisense strand to SEQ ID NO: 973628
uccuagcgcgggaaacucg

SEQ ID NO: 973630 - RNA, 19 nt, Artificial Sequence
  Description of Artificial Sequence: Synthetic oligonucleotide
  Sense strand starting at position 325 of SEQ ID NO: 914043
aggaucuguuucuccacaa

SEQ ID NO: 973631 - RNA, 19 nt, Artificial Sequence
  Description of Artificial Sequence: Synthetic oligonucleotide
  Antisense strand to SEQ ID NO: 973630
uuguggagaaacagauccu

SEQ ID NO: 973632 - RNA, 19 nt, Artificial Sequence
  Description of Artificial Sequence: Synthetic oligonucleotide
  Sense strand starting at position 326 of SEQ ID NO: 914043
ggaucuguuucuccacaaa

SEQ ID NO: 973633 - RNA, 19 nt, Artificial Sequence
  Description of Artificial Sequence: Synthetic oligonucleotide
  Antisense strand to SEQ ID NO: 973632
uuuguggagaaacagaucc

SEQ ID NO: 973634 - RNA, 19 nt, Artificial Sequence
  Description of Artificial Sequence: Synthetic oligonucleotide
  Sense strand starting at position 2090 of SEQ ID NO: 914043
ggagaaacuuacuugcuuu

SEQ ID NO: 973635 - RNA, 19 nt, Artificial Sequence
  Description of Artificial Sequence: Synthetic oligonucleotide
  Antisense strand to SEQ ID NO: 973634
aaagcaaguaaguuucucc

SEQ ID NO: 973636 - RNA, 19 nt, Artificial Sequence
  Description of Artificial Sequence: Synthetic oligonucleotide
  Sense strand starting at position 3173 of SEQ ID NO: 914043
cguuauugaccaggaugga

SEQ ID NO: 973637 - RNA, 19 nt, Artificial Sequence
  Description of Artificial Sequence: Synthetic oligonucleotide
  Antisense strand to SEQ ID NO: 973636
uccauccuggucaauaacg

SEQ ID NO: 973638 - RNA, 19 nt, Artificial Sequence
  Description of Artificial Sequence: Synthetic oligonucleotide
  Sense strand starting at position 2992 of SEQ ID NO: 914043
gccaaaguacuguaaacuu

SEQ ID NO: 973639 - RNA, 19 nt, Artificial Sequence
  Description of Artificial Sequence: Synthetic oligonucleotide
  Antisense strand to SEQ ID NO: 973638
aaguuuacaguacuuuggc

SEQ ID NO: 973640 - RNA, 19 nt, Artificial Sequence
  Description of Artificial Sequence: Synthetic oligonucleotide
  Sense strand starting at position 3532 of SEQ ID NO: 914043
ucaugagaauaucuagugu

SEQ ID NO: 973641 - RNA, 19 nt, Artificial Sequence
  Description of Artificial Sequence: Synthetic oligonucleotide
  Antisense strand to SEQ ID NO: 973640
acacuagauauucucauga

SEQ ID NO: 973642 - RNA, 19 nt, Artificial Sequence
  Description of Artificial Sequence: Synthetic oligonucleotide
  Sense strand starting at position 2719 of SEQ ID NO: 914043
uaguguaaaugaucuauug

SEQ ID NO: 973643 - RNA, 19 nt, Artificial Sequence
  Description of Artificial Sequence: Synthetic oligonucleotide
  Antisense strand to SEQ ID NO: 973642
caauagaucauuuacacua

SEQ ID NO: 973644 - RNA, 19 nt, Artificial Sequence
  Description of Artificial Sequence: Synthetic oligonucleotide
  Sense strand starting at position 1419 of SEQ ID NO: 914043
ucucucugucuagauagua

SEQ ID NO: 973645 - RNA, 19 nt, Artificial Sequence
  Description of Artificial Sequence: Synthetic oligonucleotide
  Antisense strand to SEQ ID NO: 973644
uacuaucuagacagagaga

SEQ ID NO: 973646 - RNA, 19 nt, Artificial Sequence
  Description of Artificial Sequence: Synthetic oligonucleotide
  Sense strand starting at position 978 of SEQ ID NO: 914043
agaucaucaugucuacuuu

SEQ ID NO: 973647 - RNA, 19 nt, Artificial Sequence
  Description of Artificial Sequence: Synthetic oligonucleotide
  Antisense strand to SEQ ID NO: 973646
aaaguagacaugaugaucu

SEQ ID NO: 973648 - RNA, 19 nt, Artificial Sequence
  Description of Artificial Sequence: Synthetic oligonucleotide
  Sense strand starting at position 3164 of SEQ ID NO: 914043
agaguaucucguuauugac

SEQ ID NO: 973649 - RNA, 19 nt, Artificial Sequence
  Description of Artificial Sequence: Synthetic oligonucleotide
  Antisense strand to SEQ ID NO: 973648
gucaauaacgagauacucu

SEQ ID NO: 973650 - RNA, 19 nt, Artificial Sequence
  Description of Artificial Sequence: Synthetic oligonucleotide
  Sense strand starting at position 1066 of SEQ ID NO: 914043
gucauuucgccacggauac

SEQ ID NO: 973651 - RNA, 19 nt, Artificial Sequence
  Description of Artificial Sequence: Synthetic oligonucleotide
  Antisense strand to SEQ ID NO: 973650
guauccguggcgaaaugac

SEQ ID NO: 973652 - RNA, 19 nt, Artificial Sequence
  Description of Artificial Sequence: Synthetic oligonucleotide
  Sense strand starting at position 2936 of SEQ ID NO: 914043
cccuauaccuggcugaaua

SEQ ID NO: 973653 - RNA, 19 nt, Artificial Sequence
  Description of Artificial Sequence: Synthetic oligonucleotide
  Antisense strand to SEQ ID NO: 973652
uauucagccagguauaggg

SEQ ID NO: 973654 - RNA, 19 nt, Artificial Sequence
  Description of Artificial Sequence: Synthetic oligonucleotide
  Sense strand starting at position 3965 of SEQ ID NO: 914043
caaucaguuggcuauaggu

SEQ ID NO: 973655 - RNA, 19 nt, Artificial Sequence
  Description of Artificial Sequence: Synthetic oligonucleotide
  Antisense strand to SEQ ID NO: 973654
accuauagccaacugauug

SEQ ID NO: 973656 - RNA, 19 nt, Artificial Sequence
  Description of Artificial Sequence: Synthetic oligonucleotide
  Sense strand starting at position 3677 of SEQ ID NO: 914044
cuaugcuaagaugauuauu

SEQ ID NO: 973657 - RNA, 19 nt, Artificial Sequence
  Description of Artificial Sequence: Synthetic oligonucleotide
  Antisense strand to SEQ ID NO: 973656
aauaaucaucuuagcauag

SEQ ID NO: 973658 - RNA, 19 nt, Artificial Sequence
  Description of Artificial Sequence: Synthetic oligonucleotide
  Sense strand starting at position 3874 of SEQ ID NO: 914044
uuucgaaaguaauuucugu

SEQ ID NO: 973659 - RNA, 19 nt, Artificial Sequence
  Description of Artificial Sequence: Synthetic oligonucleotide
  Antisense strand to SEQ ID NO: 973658
acagaaauuacuuucgaaa

SEQ ID NO: 973660 - RNA, 19 nt, Artificial Sequence
  Description of Artificial Sequence: Synthetic oligonucleotide
  Sense strand starting at position 3250 of SEQ ID NO: 914044
ggagguuacacaggguaaa

SEQ ID NO: 973661 - RNA, 19 nt, Artificial Sequence
  Description of Artificial Sequence: Synthetic oligonucleotide
  Antisense strand to SEQ ID NO: 973660
uuuacccuguguaaccucc

SEQ ID NO: 973662 - RNA, 19 nt, Artificial Sequence
  Description of Artificial Sequence: Synthetic oligonucleotide
  Sense strand starting at position 1264 of SEQ ID NO: 914044
agaaucucccgacacagua

SEQ ID NO: 973663 - RNA, 19 nt, Artificial Sequence
  Description of Artificial Sequence: Synthetic oligonucleotide
  Antisense strand to SEQ ID NO: 973662
uacugugucgggagauucu

SEQ ID NO: 973664 - RNA, 19 nt, Artificial Sequence
  Description of Artificial Sequence: Synthetic oligonucleotide
  Sense strand starting at position 3450 of SEQ ID NO: 914044
aggagacauccauacguuu

SEQ ID NO: 973665 - RNA, 19 nt, Artificial Sequence
  Description of Artificial Sequence: Synthetic oligonucleotide
  Antisense strand to SEQ ID NO: 973664
aaacguauggaugucuccu

SEQ ID NO: 973666 - RNA, 19 nt, Artificial Sequence
  Description of Artificial Sequence: Synthetic oligonucleotide
  Sense strand starting at position 1262 of SEQ ID NO: 914044
guagaaucucccgacacag

SEQ ID NO: 973667 - RNA, 19 nt, Artificial Sequence
  Description of Artificial Sequence: Synthetic oligonucleotide
  Antisense strand to SEQ ID NO: 973666
cugugucgggagauucuac

SEQ ID NO: 973668 - RNA, 19 nt, Artificial Sequence
  Description of Artificial Sequence: Synthetic oligonucleotide
  Sense strand starting at position 1052 of SEQ ID NO: 914044
gcaagcguuccagugugaa

SEQ ID NO: 973669 - RNA, 19 nt, Artificial Sequence
  Description of Artificial Sequence: Synthetic oligonucleotide
  Antisense strand to SEQ ID NO: 973668
uucacacuggaacgcuugc

SEQ ID NO: 973670 - RNA, 19 nt, Artificial Sequence
  Description of Artificial Sequence: Synthetic oligonucleotide
  Sense strand starting at position 2818 of SEQ ID NO: 914044
gguauaguuucugugauuu

SEQ ID NO: 973671 - RNA, 19 nt, Artificial Sequence
  Description of Artificial Sequence: Synthetic oligonucleotide
  Antisense strand to SEQ ID NO: 973670
aaaucacagaaacuauacc

SEQ ID NO: 973672 - RNA, 19 nt, Artificial Sequence
  Description of Artificial Sequence: Synthetic oligonucleotide
  Sense strand starting at position 3306 of SEQ ID NO: 914044
aagagaugacagugaguuu

SEQ ID NO: 973673 - RNA, 19 nt, Artificial Sequence
  Description of Artificial Sequence: Synthetic oligonucleotide
  Antisense strand to SEQ ID NO: 973672
aaacucacugucaucucuu

SEQ ID NO: 973674 - RNA, 19 nt, Artificial Sequence
  Description of Artificial Sequence: Synthetic oligonucleotide
  Sense strand starting at position 994 of SEQ ID NO: 914044
uagagaaagcggugagaaa

SEQ ID NO: 973675 - RNA, 19 nt, Artificial Sequence
  Description of Artificial Sequence: Synthetic oligonucleotide
  Antisense strand to SEQ ID NO: 973674
uuucucaccgcuuucucua

SEQ ID NO: 973676 - RNA, 19 nt, Artificial Sequence
  Description of Artificial Sequence: Synthetic oligonucleotide
  Sense strand starting at position 2826 of SEQ ID NO: 914044
uucugugauuucuuucuuu

SEQ ID NO: 973677 - RNA, 19 nt, Artificial Sequence
  Description of Artificial Sequence: Synthetic oligonucleotide
  Antisense strand to SEQ ID NO: 973676
aaagaaagaaaucacagaa

SEQ ID NO: 973678 - RNA, 19 nt, Artificial Sequence
  Description of Artificial Sequence: Synthetic oligonucleotide
  Sense strand starting at position 1101 of SEQ ID NO: 914044
ugauuagaaagacguuaua

SEQ ID NO: 973679 - RNA, 19 nt, Artificial Sequence
  Description of Artificial Sequence: Synthetic oligonucleotide
  Antisense strand to SEQ ID NO: 973678
uauaacgucuuucuaauca

SEQ ID NO: 973680 - RNA, 19 nt, Artificial Sequence
  Description of Artificial Sequence: Synthetic oligonucleotide
  Sense strand starting at position 194 of SEQ ID NO: 914044
ggaacaguaugcuuaggga

SEQ ID NO: 973681 - RNA, 19 nt, Artificial Sequence
  Description of Artificial Sequence: Synthetic oligonucleotide
  Antisense strand to SEQ ID NO: 973680
ucccuaagcauacuguucc

SEQ ID NO: 973682 - RNA, 19 nt, Artificial Sequence
  Description of Artificial Sequence: Synthetic oligonucleotide
  Sense strand starting at position 3237 of SEQ ID NO: 914044
gucaaagaucauuggaggu

SEQ ID NO: 973683 - RNA, 19 nt, Artificial Sequence
  Description of Artificial Sequence: Synthetic oligonucleotide
  Antisense strand to SEQ ID NO: 973682
accuccaaugaucuuugac

SEQ ID NO: 973684 - RNA, 19 nt, Artificial Sequence
  Description of Artificial Sequence: Synthetic oligonucleotide
  Sense strand starting at position 2634 of SEQ ID NO: 914044
ggaaucuggaucuguugau

SEQ ID NO: 973685 - RNA, 19 nt, Artificial Sequence
  Description of Artificial Sequence: Synthetic oligonucleotide
  Antisense strand to SEQ ID NO: 973684
aucaacagauccagauucc

SEQ ID NO: 973686 - RNA, 19 nt, Artificial Sequence
  Description of Artificial Sequence: Synthetic oligonucleotide
  Sense strand starting at position 3663 of SEQ ID NO: 914044
gaagacauguuccucuaug

SEQ ID NO: 973687 - RNA, 19 nt, Artificial Sequence
  Description of Artificial Sequence: Synthetic oligonucleotide
  Antisense strand to SEQ ID NO: 973686
cauagaggaacaugucuuc

SEQ ID NO: 973688 - RNA, 19 nt, Artificial Sequence
  Description of Artificial Sequence: Synthetic oligonucleotide
  Sense strand starting at position 3711 of SEQ ID NO: 914044
aguuaagugcuugauaaau

SEQ ID NO: 973689 - RNA, 19 nt, Artificial Sequence
  Description of Artificial Sequence: Synthetic oligonucleotide
  Antisense strand to SEQ ID NO: 973688
auuuaucaagcacuuaacu

SEQ ID NO: 973690 - RNA, 19 nt, Artificial Sequence
  Description of Artificial Sequence: Synthetic oligonucleotide
  Sense strand starting at position 1093 of SEQ ID NO: 914044
aggugucgugauuagaaag

SEQ ID NO: 973691 - RNA, 19 nt, Artificial Sequence
  Description of Artificial Sequence: Synthetic oligonucleotide
  Antisense strand to SEQ ID NO: 973690
cuuucuaaucacgacaccu

SEQ ID NO: 973692 - RNA, 19 nt, Artificial Sequence
  Description of Artificial Sequence: Synthetic oligonucleotide
  Sense strand starting at position 2449 of SEQ ID NO: 914044
agggaaucuugagcccgaa

SEQ ID NO: 973693 - RNA, 19 nt, Artificial Sequence
  Description of Artificial Sequence: Synthetic oligonucleotide
  Antisense strand to SEQ ID NO: 973692
uucgggcucaagauucccu

SEQ ID NO: 973694 - RNA, 19 nt, Artificial Sequence
  Description of Artificial Sequence: Synthetic oligonucleotide
  Sense strand starting at position 2438 of SEQ ID NO: 914044
ggcaauaaugcagggaauc

SEQ ID NO: 973695 - RNA, 19 nt, Artificial Sequence
  Description of Artificial Sequence: Synthetic oligonucleotide
  Antisense strand to SEQ ID NO: 973694
gauucccugcauuauugcc

SEQ ID NO: 973696 - RNA, 19 nt, Artificial Sequence
  Description of Artificial Sequence: Synthetic oligonucleotide
  Sense strand starting at position 1099 of SEQ ID NO: 914044
cgugauuagaaagacguua

SEQ ID NO: 973697 - RNA, 19 nt, Artificial Sequence
  Description of Artificial Sequence: Synthetic oligonucleotide
  Antisense strand to SEQ ID NO: 973696
uaacgucuuucuaaucacg

SEQ ID NO: 973698 - RNA, 19 nt, Artificial Sequence
  Description of Artificial Sequence: Synthetic oligonucleotide
  Sense strand starting at position 3313 of SEQ ID NO: 914044
gacagugaguuugugagaa

SEQ ID NO: 973699 - RNA, 19 nt, Artificial Sequence
  Description of Artificial Sequence: Synthetic oligonucleotide
  Antisense strand to SEQ ID NO: 973698
uucucacaaacucacuguc

SEQ ID NO: 973700 - RNA, 19 nt, Artificial Sequence
  Description of Artificial Sequence: Synthetic oligonucleotide
  Sense strand starting at position 1238 of SEQ ID NO: 914044
aauacauguuagucggaaa

SEQ ID NO: 973701 - RNA, 19 nt, Artificial Sequence
  Description of Artificial Sequence: Synthetic oligonucleotide
  Antisense strand to SEQ ID NO: 973700
uuuccgacuaacauguauu

SEQ ID NO: 973702 - RNA, 19 nt, Artificial Sequence
  Description of Artificial Sequence: Synthetic oligonucleotide
  Sense strand starting at position 3649 of SEQ ID NO: 914044
ucuugugcggauuagaaga

SEQ ID NO: 973703 - RNA, 19 nt, Artificial Sequence
  Description of Artificial Sequence: Synthetic oligonucleotide
  Antisense strand to SEQ ID NO: 973702
ucuucuaauccgcacaaga

SEQ ID NO: 973704 - RNA, 19 nt, Artificial Sequence
  Description of Artificial Sequence: Synthetic oligonucleotide
  Sense strand starting at position 2439 of SEQ ID NO: 914044
gcaauaaugcagggaaucu

SEQ ID NO: 973705 - RNA, 19 nt, Artificial Sequence
  Description of Artificial Sequence: Synthetic oligonucleotide
  Antisense strand to SEQ ID NO: 973704
agauucccugcauuauugc

SEQ ID NO: 973706 - RNA, 19 nt, Artificial Sequence
  Description of Artificial Sequence: Synthetic oligonucleotide
  Sense strand starting at position 3691 of SEQ ID NO: 914044
uuauuaugugcggaacaca

SEQ ID NO: 973707 - RNA, 19 nt, Artificial Sequence
  Description of Artificial Sequence: Synthetic oligonucleotide
  Antisense strand to SEQ ID NO: 973706
uguguuccgcacauaauaa

SEQ ID NO: 973708 - RNA, 19 nt, Artificial Sequence
  Description of Artificial Sequence: Synthetic oligonucleotide
  Sense strand starting at position 1301 of SEQ ID NO: 914044
aguugagaacgguauuggu

SEQ ID NO: 973709 - RNA, 19 nt, Artificial Sequence
  Description of Artificial Sequence: Synthetic oligonucleotide
  Antisense strand to SEQ ID NO: 973708
accaauaccguucucaacu

SEQ ID NO: 973710 - RNA, 19 nt, Artificial Sequence
  Description of Artificial Sequence: Synthetic oligonucleotide
  Sense strand starting at position 3169 of SEQ ID NO: 914044
uguuuaaguaccuauguag

SEQ ID NO: 973711 - RNA, 19 nt, Artificial Sequence
  Description of Artificial Sequence: Synthetic oligonucleotide
  Antisense strand to SEQ ID NO: 973710
cuacauagguacuuaaaca

SEQ ID NO: 973712 - RNA, 19 nt, Artificial Sequence
  Description of Artificial Sequence: Synthetic oligonucleotide
  Sense strand starting at position 3349 of SEQ ID NO: 914044
aaaugaauugugugaguua

SEQ ID NO: 973713 - RNA, 19 nt, Artificial Sequence
  Description of Artificial Sequence: Synthetic oligonucleotide
  Antisense strand to SEQ ID NO: 973712
uaacucacacaauucauuu

SEQ ID NO: 973714 - RNA, 19 nt, Artificial Sequence
  Description of Artificial Sequence: Synthetic oligonucleotide
  Sense strand starting at position 1298 of SEQ ID NO: 914044
uaaaguugagaacgguauu

SEQ ID NO: 973715 - RNA, 19 nt, Artificial Sequence
  Description of Artificial Sequence: Synthetic oligonucleotide
  Antisense strand to SEQ ID NO: 973714
aauaccguucucaacuuua

SEQ ID NO: 973716 - RNA, 19 nt, Artificial Sequence
  Description of Artificial Sequence: Synthetic oligonucleotide
  Sense strand starting at position 1175 of SEQ ID NO: 914044
agucguccagguuagaaau

SEQ ID NO: 973717 - RNA, 19 nt, Artificial Sequence
  Description of Artificial Sequence: Synthetic oligonucleotide
  Antisense strand to SEQ ID NO: 973716
auuucuaaccuggacgacu

SEQ ID NO: 973718 - RNA, 19 nt, Artificial Sequence
  Description of Artificial Sequence: Synthetic oligonucleotide
  Sense strand starting at position 3263 of SEQ ID NO: 914044
gguaaagugcaguaugauu

SEQ ID NO: 973719 - RNA, 19 nt, Artificial Sequence
  Description of Artificial Sequence: Synthetic oligonucleotide
  Antisense strand to SEQ ID NO: 973718
aaucauacugcacuuuacc

SEQ ID NO: 973720 - RNA, 19 nt, Artificial Sequence
  Description of Artificial Sequence: Synthetic oligonucleotide
  Sense strand starting at position 1114 of SEQ ID NO: 914044
guuauagaucuuuguggau

SEQ ID NO: 973721 - RNA, 19 nt, Artificial Sequence
  Description of Artificial Sequence: Synthetic oligonucleotide
  Antisense strand to SEQ ID NO: 973720
auccacaaagaucuauaac

SEQ ID NO: 973722 - RNA, 19 nt, Artificial Sequence
  Description of Artificial Sequence: Synthetic oligonucleotide
  Sense strand starting at position 3646 of SEQ ID NO: 914044
aucucuugugcggauuaga

SEQ ID NO: 973723 - RNA, 19 nt, Artificial Sequence
  Description of Artificial Sequence: Synthetic oligonucleotide
  Antisense strand to SEQ ID NO: 973722
ucuaauccgcacaagagau

SEQ ID NO: 973724 - RNA, 19 nt, Artificial Sequence
  Description of Artificial Sequence: Synthetic oligonucleotide
  Sense strand starting at position 3360 of SEQ ID NO: 914044
gugaguuagcuaugaugaa

SEQ ID NO: 973725 - RNA, 19 nt, Artificial Sequence
  Description of Artificial Sequence: Synthetic oligonucleotide
  Antisense strand to SEQ ID NO: 973724
uucaucauagcuaacucac

SEQ ID NO: 973726 - RNA, 19 nt, Artificial Sequence
  Description of Artificial Sequence: Synthetic oligonucleotide
  Sense strand starting at position 3709 of SEQ ID NO: 914044
auaguuaagugcuugauaa

SEQ ID NO: 973727 - RNA, 19 nt, Artificial Sequence
  Description of Artificial Sequence: Synthetic oligonucleotide
  Antisense strand to SEQ ID NO: 973726
uuaucaagcacuuaacuau

SEQ ID NO: 973728 - RNA, 19 nt, Artificial Sequence
  Description of Artificial Sequence: Synthetic oligonucleotide
  Sense strand starting at position 2854 of SEQ ID NO: 914044
uuauuauuguuguugagac

SEQ ID NO: 973729 - RNA, 19 nt, Artificial Sequence
  Description of Artificial Sequence: Synthetic oligonucleotide
  Antisense strand to SEQ ID NO: 973728
gucucaacaacaauaauaa

SEQ ID NO: 973730 - RNA, 19 nt, Artificial Sequence
  Description of Artificial Sequence: Synthetic oligonucleotide
  Sense strand starting at position 3710 of SEQ ID NO: 914044
uaguuaagugcuugauaaa

SEQ ID NO: 973731 - RNA, 19 nt, Artificial Sequence
  Description of Artificial Sequence: Synthetic oligonucleotide
  Antisense strand to SEQ ID NO: 973730
uuuaucaagcacuuaacua

SEQ ID NO: 973732 - RNA, 19 nt, Artificial Sequence
  Description of Artificial Sequence: Synthetic oligonucleotide
  Sense strand starting at position 2296 of SEQ ID NO: 914044
cuguauuugccuugccuca

SEQ ID NO: 973733 - RNA, 19 nt, Artificial Sequence
  Description of Artificial Sequence: Synthetic oligonucleotide
  Antisense strand to SEQ ID NO: 973732
ugaggcaaggcaaauacag

SEQ ID NO: 973734 - RNA, 19 nt, Artificial Sequence
  Description of Artificial Sequence: Synthetic oligonucleotide
  Sense strand starting at position 3593 of SEQ ID NO: 914044
ucuuaugaccuaggcaagu

SEQ ID NO: 973735 - RNA, 19 nt, Artificial Sequence
  Description of Artificial Sequence: Synthetic oligonucleotide
  Antisense strand to SEQ ID NO: 973734
acuugccuaggucauaaga

SEQ ID NO: 973736 - RNA, 19 nt, Artificial Sequence
  Description of Artificial Sequence: Synthetic oligonucleotide
  Sense strand starting at position 1770 of SEQ ID NO: 914045
cgugccuauagcucaagua

SEQ ID NO: 973737 - RNA, 19 nt, Artificial Sequence
  Description of Artificial Sequence: Synthetic oligonucleotide
  Antisense strand to SEQ ID NO: 973736
uacuugagcuauaggcacg

SEQ ID NO: 973738 - RNA, 19 nt, Artificial Sequence
  Description of Artificial Sequence: Synthetic oligonucleotide
  Sense strand starting at position 2277 of SEQ ID NO: 914045
ugcagaaacccugacucua

SEQ ID NO: 973739 - RNA, 19 nt, Artificial Sequence
  Description of Artificial Sequence: Synthetic oligonucleotide
  Antisense strand to SEQ ID NO: 973738
uagagucaggguuucugca

SEQ ID NO: 973740 - RNA, 19 nt, Artificial Sequence
  Description of Artificial Sequence: Synthetic oligonucleotide
  Sense strand starting at position 3124 of SEQ ID NO: 914045
uugauugcuccagaaauau

SEQ ID NO: 973741 - RNA, 19 nt, Artificial Sequence
  Description of Artificial Sequence: Synthetic oligonucleotide
  Antisense strand to SEQ ID NO: 973740
auauuucuggagcaaucaa

SEQ ID NO: 973742 - RNA, 19 nt, Artificial Sequence
  Description of Artificial Sequence: Synthetic oligonucleotide
  Sense strand starting at position 2233 of SEQ ID NO: 914045
ggauauccucucuaacagu

SEQ ID NO: 973743 - RNA, 19 nt, Artificial Sequence
  Description of Artificial Sequence: Synthetic oligonucleotide
  Antisense strand to SEQ ID NO: 973742
acuguuagagaggauaucc

SEQ ID NO: 973744 - RNA, 19 nt, Artificial Sequence
  Description of Artificial Sequence: Synthetic oligonucleotide
  Sense strand starting at position 259 of SEQ ID NO: 914045
agauaucaaguuuagcauu

SEQ ID NO: 973745 - RNA, 19 nt, Artificial Sequence
  Description of Artificial Sequence: Synthetic oligonucleotide
  Antisense strand to SEQ ID NO: 973744
aaugcuaaacuugauaucu

SEQ ID NO: 973746 - RNA, 19 nt, Artificial Sequence
  Description of Artificial Sequence: Synthetic oligonucleotide
  Sense strand starting at position 1224 of SEQ ID NO: 914045
gguacucaauucuugaaag

SEQ ID NO: 973747 - RNA, 19 nt, Artificial Sequence
  Description of Artificial Sequence: Synthetic oligonucleotide
  Antisense strand to SEQ ID NO: 973746
cuuucaagaauugaguacc

SEQ ID NO: 973748 - RNA, 19 nt, Artificial Sequence
  Description of Artificial Sequence: Synthetic oligonucleotide
  Sense strand starting at position 3143 of SEQ ID NO: 914045
uuucuuuaacgugaaacag

SEQ ID NO: 973749 - RNA, 19 nt, Artificial Sequence
  Description of Artificial Sequence: Synthetic oligonucleotide
  Antisense strand to SEQ ID NO: 973748
cuguuucacguuaaagaaa

SEQ ID NO: 973750 - RNA, 19 nt, Artificial Sequence
  Description of Artificial Sequence: Synthetic oligonucleotide
  Sense strand starting at position 2156 of SEQ ID NO: 914045
uuugaauuccgguaaacca

SEQ ID NO: 973751 - RNA, 19 nt, Artificial Sequence
  Description of Artificial Sequence: Synthetic oligonucleotide
  Antisense strand to SEQ ID NO: 973750
ugguuuaccggaauucaaa

SEQ ID NO: 973752 - RNA, 19 nt, Artificial Sequence
  Description of Artificial Sequence: Synthetic oligonucleotide
  Sense strand starting at position 1235 of SEQ ID NO: 914045
cuugaaaguaacggaucaa

SEQ ID NO: 973753 - RNA, 19 nt, Artificial Sequence
  Description of Artificial Sequence: Synthetic oligonucleotide
  Antisense strand to SEQ ID NO: 973752
uugauccguuacuuucaag

SEQ ID NO: 973754 - RNA, 19 nt, Artificial Sequence
  Description of Artificial Sequence: Synthetic oligonucleotide
  Sense strand starting at position 1088 of SEQ ID NO: 914045
aaaugugggcauuaagcaa

SEQ ID NO: 973755 - RNA, 19 nt, Artificial Sequence
  Description of Artificial Sequence: Synthetic oligonucleotide
  Antisense strand to SEQ ID NO: 973754
uugcuuaaugcccacauuu

SEQ ID NO: 973756 - RNA, 19 nt, Artificial Sequence
  Description of Artificial Sequence: Synthetic oligonucleotide
  Sense strand starting at position 2201 of SEQ ID NO: 914045
guuagagguggguaaacuu

SEQ ID NO: 973757 - RNA, 19 nt, Artificial Sequence
  Description of Artificial Sequence: Synthetic oligonucleotide
  Antisense strand to SEQ ID NO: 973756
aaguuuacccaccucuaac

SEQ ID NO: 973758 - RNA, 19 nt, Artificial Sequence
  Description of Artificial Sequence: Synthetic oligonucleotide
  Sense strand starting at position 2141 of SEQ ID NO: 914045
guugaauuguacguauuug

SEQ ID NO: 973759 - RNA, 19 nt, Artificial Sequence
  Description of Artificial Sequence: Synthetic oligonucleotide
  Antisense strand to SEQ ID NO: 973758
caaauacguacaauucaac

SEQ ID NO: 973760 - RNA, 19 nt, Artificial Sequence
  Description of Artificial Sequence: Synthetic oligonucleotide
  Sense strand starting at position 3204 of SEQ ID NO: 914045
agaagaauuucccaaaugu

SEQ ID NO: 973761 - RNA, 19 nt, Artificial Sequence
  Description of Artificial Sequence: Synthetic oligonucleotide
  Antisense strand to SEQ ID NO: 973760
acauuugggaaauucuucu

SEQ ID NO: 973762 - RNA, 19 nt, Artificial Sequence
  Description of Artificial Sequence: Synthetic oligonucleotide
  Sense strand starting at position 2417 of SEQ ID NO: 914045
gcaaaucuuggucauuaug

SEQ ID NO: 973763 - RNA, 19 nt, Artificial Sequence
  Description of Artificial Sequence: Synthetic oligonucleotide
  Antisense strand to SEQ ID NO: 973762
cauaaugaccaagauuugc

SEQ ID NO: 973764 - RNA, 19 nt, Artificial Sequence
  Description of Artificial Sequence: Synthetic oligonucleotide
  Sense strand starting at position 1854 of SEQ ID NO: 914045
caccaugauggcgaucuau

SEQ ID NO: 973765 - RNA, 19 nt, Artificial Sequence
  Description of Artificial Sequence: Synthetic oligonucleotide
  Antisense strand to SEQ ID NO: 973764
auagaucgccaucauggug

SEQ ID NO: 973766 - RNA, 19 nt, Artificial Sequence
  Description of Artificial Sequence: Synthetic oligonucleotide
  Sense strand starting at position 1720 of SEQ ID NO: 914045
cgacaaccauccucugaca

SEQ ID NO: 973767 - RNA, 19 nt, Artificial Sequence
  Description of Artificial Sequence: Synthetic oligonucleotide
  Antisense strand to SEQ ID NO: 973766
ugucagaggaugguugucg

SEQ ID NO: 973768 - RNA, 19 nt, Artificial Sequence
  Description of Artificial Sequence: Synthetic oligonucleotide
  Sense strand starting at position 2199 of SEQ ID NO: 914045
gaguuagagguggguaaac

SEQ ID NO: 973769 - RNA, 19 nt, Artificial Sequence
  Description of Artificial Sequence: Synthetic oligonucleotide
  Antisense strand to SEQ ID NO: 973768
guuuacccaccucuaacuc

SEQ ID NO: 973770 - RNA, 19 nt, Artificial Sequence
  Description of Artificial Sequence: Synthetic oligonucleotide
  Sense strand starting at position 2140 of SEQ ID NO: 914045
uguugaauuguacguauuu

SEQ ID NO: 973771 - RNA, 19 nt, Artificial Sequence
  Description of Artificial Sequence: Synthetic oligonucleotide
  Antisense strand to SEQ ID NO: 973770
aaauacguacaauucaaca

SEQ ID NO: 973772 - RNA, 19 nt, Artificial Sequence
  Description of Artificial Sequence: Synthetic oligonucleotide
  Sense strand starting at position 2258 of SEQ ID NO: 914045
guuauauggcuagggaaac

SEQ ID NO: 973773 - RNA, 19 nt, Artificial Sequence
  Description of Artificial Sequence: Synthetic oligonucleotide
  Antisense strand to SEQ ID NO: 973772
guuucccuagccauauaac

SEQ ID NO: 973774 - RNA, 19 nt, Artificial Sequence
  Description of Artificial Sequence: Synthetic oligonucleotide
  Sense strand starting at position 2256 of SEQ ID NO: 914045
ucguuauauggcuagggaa

SEQ ID NO: 973775 - RNA, 19 nt, Artificial Sequence
  Description of Artificial Sequence: Synthetic oligonucleotide
  Antisense strand to SEQ ID NO: 973774
uucccuagccauauaacga

SEQ ID NO: 973776 - RNA, 19 nt, Artificial Sequence
  Description of Artificial Sequence: Synthetic oligonucleotide
  Sense strand starting at position 864 of SEQ ID NO: 914045
aucacuccggguugagaau

SEQ ID NO: 973777 - RNA, 19 nt, Artificial Sequence
  Description of Artificial Sequence: Synthetic oligonucleotide
  Antisense strand to SEQ ID NO: 973776
auucucaacccggagugau

SEQ ID NO: 973778 - RNA, 19 nt, Artificial Sequence
  Description of Artificial Sequence: Synthetic oligonucleotide
  Sense strand starting at position 2198 of SEQ ID NO: 914045
cgaguuagagguggguaaa

SEQ ID NO: 973779 - RNA, 19 nt, Artificial Sequence
  Description of Artificial Sequence: Synthetic oligonucleotide
  Antisense strand to SEQ ID NO: 973778
uuuacccaccucuaacucg

SEQ ID NO: 973780 - RNA, 19 nt, Artificial Sequence
  Description of Artificial Sequence: Synthetic oligonucleotide
  Sense strand starting at position 1218 of SEQ ID NO: 914045
gucagugguacucaauucu

SEQ ID NO: 973781 - RNA, 19 nt, Artificial Sequence
  Description of Artificial Sequence: Synthetic oligonucleotide
  Antisense strand to SEQ ID NO: 973780
agaauugaguaccacugac

SEQ ID NO: 973782 - RNA, 19 nt, Artificial Sequence
  Description of Artificial Sequence: Synthetic oligonucleotide
  Sense strand starting at position 2191 of SEQ ID NO: 914045
cuucuuccgaguuagaggu

SEQ ID NO: 973783 - RNA, 19 nt, Artificial Sequence
  Description of Artificial Sequence: Synthetic oligonucleotide
  Antisense strand to SEQ ID NO: 973782
accucuaacucggaagaag

SEQ ID NO: 973784 - RNA, 19 nt, Artificial Sequence
  Description of Artificial Sequence: Synthetic oligonucleotide
  Sense strand starting at position 926 of SEQ ID NO: 914045
cucaaugaacuguguuuau

SEQ ID NO: 973785 - RNA, 19 nt, Artificial Sequence
  Description of Artificial Sequence: Synthetic oligonucleotide
  Antisense strand to SEQ ID NO: 973784
auaaacacaguucauugag

SEQ ID NO: 973786 - RNA, 19 nt, Artificial Sequence
  Description of Artificial Sequence: Synthetic oligonucleotide
  Sense strand starting at position 944 of SEQ ID NO: 914045
ucaugucuugcacaaaugu

SEQ ID NO: 973787 - RNA, 19 nt, Artificial Sequence
  Description of Artificial Sequence: Synthetic oligonucleotide
  Antisense strand to SEQ ID NO: 973786
acauuugugcaagacauga

SEQ ID NO: 973788 - RNA, 19 nt, Artificial Sequence
  Description of Artificial Sequence: Synthetic oligonucleotide
  Sense strand starting at position 901 of SEQ ID NO: 914045
acugcuguggcucauauaa

SEQ ID NO: 973789 - RNA, 19 nt, Artificial Sequence
  Description of Artificial Sequence: Synthetic oligonucleotide
  Antisense strand to SEQ ID NO: 973788
uuauaugagccacagcagu

SEQ ID NO: 973790 - RNA, 19 nt, Artificial Sequence
  Description of Artificial Sequence: Synthetic oligonucleotide
  Sense strand starting at position 507 of SEQ ID NO: 914045
ccauuagucauguagcgaa

SEQ ID NO: 973791 - RNA, 19 nt, Artificial Sequence
  Description of Artificial Sequence: Synthetic oligonucleotide
  Antisense strand to SEQ ID NO: 973790
uucgcuacaugacuaaugg

SEQ ID NO: 973792 - RNA, 19 nt, Artificial Sequence
  Description of Artificial Sequence: Synthetic oligonucleotide
  Sense strand starting at position 2197 of SEQ ID NO: 914045
ccgaguuagagguggguaa

SEQ ID NO: 973793 - RNA, 19 nt, Artificial Sequence
  Description of Artificial Sequence: Synthetic oligonucleotide
  Antisense strand to SEQ ID NO: 973792
uuacccaccucuaacucgg

SEQ ID NO: 973794 - RNA, 19 nt, Artificial Sequence
  Description of Artificial Sequence: Synthetic oligonucleotide
  Sense strand starting at position 2415 of SEQ ID NO: 914045
cugcaaaucuuggucauua

SEQ ID NO: 973795 - RNA, 19 nt, Artificial Sequence
  Description of Artificial Sequence: Synthetic oligonucleotide
  Antisense strand to SEQ ID NO: 973794
uaaugaccaagauuugcag

SEQ ID NO: 973796 - RNA, 19 nt, Artificial Sequence
  Description of Artificial Sequence: Synthetic oligonucleotide
  Sense strand starting at position 2416 of SEQ ID NO: 914045
ugcaaaucuuggucauuau

SEQ ID NO: 973797 - RNA, 19 nt, Artificial Sequence
  Description of Artificial Sequence: Synthetic oligonucleotide
  Antisense strand to SEQ ID NO: 973796
auaaugaccaagauuugca

SEQ ID NO: 973798 - RNA, 19 nt, Artificial Sequence
  Description of Artificial Sequence: Synthetic oligonucleotide
  Sense strand starting at position 3213 of SEQ ID NO: 914045
ucccaaauguuagugcaga

SEQ ID NO: 973799 - RNA, 19 nt, Artificial Sequence
  Description of Artificial Sequence: Synthetic oligonucleotide
  Antisense strand to SEQ ID NO: 973798
ucugcacuaacauuuggga

SEQ ID NO: 973800 - RNA, 19 nt, Artificial Sequence
  Description of Artificial Sequence: Synthetic oligonucleotide
  Sense strand starting at position 840 of SEQ ID NO: 914045
gccaacuguucccuuagga

SEQ ID NO: 973801 - RNA, 19 nt, Artificial Sequence
  Description of Artificial Sequence: Synthetic oligonucleotide
  Antisense strand to SEQ ID NO: 973800
uccuaagggaacaguuggc

SEQ ID NO: 973802 - RNA, 19 nt, Artificial Sequence
  Description of Artificial Sequence: Synthetic oligonucleotide
  Sense strand starting at position 1414 of SEQ ID NO: 914045
cuagcuuacacgugggaau

SEQ ID NO: 973803 - RNA, 19 nt, Artificial Sequence
  Description of Artificial Sequence: Synthetic oligonucleotide
  Antisense strand to SEQ ID NO: 973802
auucccacguguaagcuag

SEQ ID NO: 973804 - RNA, 19 nt, Artificial Sequence
  Description of Artificial Sequence: Synthetic oligonucleotide
  Sense strand starting at position 2255 of SEQ ID NO: 914045
cucguuauauggcuaggga

SEQ ID NO: 973805 - RNA, 19 nt, Artificial Sequence
  Description of Artificial Sequence: Synthetic oligonucleotide
  Antisense strand to SEQ ID NO: 973804
ucccuagccauauaacgag

SEQ ID NO: 973806 - RNA, 19 nt, Artificial Sequence
  Description of Artificial Sequence: Synthetic oligonucleotide
  Sense strand starting at position 1309 of SEQ ID NO: 914045
gcuaauaacgcaugacuua

SEQ ID NO: 973807 - RNA, 19 nt, Artificial Sequence
  Description of Artificial Sequence: Synthetic oligonucleotide
  Antisense strand to SEQ ID NO: 973806
uaagucaugcguuauuagc

SEQ ID NO: 973808 - RNA, 19 nt, Artificial Sequence
  Description of Artificial Sequence: Synthetic oligonucleotide
  Sense strand starting at position 2414 of SEQ ID NO: 914045
ucugcaaaucuuggucauu

SEQ ID NO: 973809 - RNA, 19 nt, Artificial Sequence
  Description of Artificial Sequence: Synthetic oligonucleotide
  Antisense strand to SEQ ID NO: 973808
aaugaccaagauuugcaga

SEQ ID NO: 973810 - RNA, 19 nt, Artificial Sequence
  Description of Artificial Sequence: Synthetic oligonucleotide
  Sense strand starting at position 1248 of SEQ ID NO: 914045
gaucaaagguaaggagaaa

SEQ ID NO: 973811 - RNA, 19 nt, Artificial Sequence
  Description of Artificial Sequence: Synthetic oligonucleotide
  Antisense strand to SEQ ID NO: 973810
uuucuccuuaccuuugauc

SEQ ID NO: 973812 - RNA, 19 nt, Artificial Sequence
  Description of Artificial Sequence: Synthetic oligonucleotide
  Sense strand starting at position 2247 of SEQ ID NO: 914045
acagucuccucguuauaug

SEQ ID NO: 973813 - RNA, 19 nt, Artificial Sequence
  Description of Artificial Sequence: Synthetic oligonucleotide
  Antisense strand to SEQ ID NO: 973812
cauauaacgaggagacugu

SEQ ID NO: 973814 - RNA, 19 nt, Artificial Sequence
  Description of Artificial Sequence: Synthetic oligonucleotide
  Sense strand starting at position 2244 of SEQ ID NO: 914045
cuaacagucuccucguuau

SEQ ID NO: 973815 - RNA, 19 nt, Artificial Sequence
  Description of Artificial Sequence: Synthetic oligonucleotide
  Antisense strand to SEQ ID NO: 973814
auaacgaggagacuguuag

SEQ ID NO: 973816 - RNA, 19 nt, Artificial Sequence
  Description of Artificial Sequence: Synthetic oligonucleotide
  Sense strand starting at position 989 of SEQ ID NO: 914046
gacguuugugcagucggaa

SEQ ID NO: 973817 - RNA, 19 nt, Artificial Sequence
  Description of Artificial Sequence: Synthetic oligonucleotide
  Antisense strand to SEQ ID NO: 973816
uuccgacugcacaaacguc

SEQ ID NO: 973818 - RNA, 19 nt, Artificial Sequence
  Description of Artificial Sequence: Synthetic oligonucleotide
  Sense strand starting at position 1442 of SEQ ID NO: 914046
aggugaacgcgcucuguaa

SEQ ID NO: 973819 - RNA, 19 nt, Artificial Sequence
  Description of Artificial Sequence: Synthetic oligonucleotide
  Antisense strand to SEQ ID NO: 973818
uuacagagcgcguucaccu

SEQ ID NO: 973820 - RNA, 19 nt, Artificial Sequence
  Description of Artificial Sequence: Synthetic oligonucleotide
  Sense strand starting at position 1443 of SEQ ID NO: 914046
ggugaacgcgcucuguaaa

SEQ ID NO: 973821 - RNA, 19 nt, Artificial Sequence
  Description of Artificial Sequence: Synthetic oligonucleotide
  Antisense strand to SEQ ID NO: 973820
uuuacagagcgcguucacc

SEQ ID NO: 973822 - RNA, 19 nt, Artificial Sequence
  Description of Artificial Sequence: Synthetic oligonucleotide
  Sense strand starting at position 2265 of SEQ ID NO: 914046
ccugaucaccagggugaaa

SEQ ID NO: 973823 - RNA, 19 nt, Artificial Sequence
  Description of Artificial Sequence: Synthetic oligonucleotide
  Antisense strand to SEQ ID NO: 973822
uuucacccuggugaucagg

SEQ ID NO: 973824 - RNA, 19 nt, Artificial Sequence
  Description of Artificial Sequence: Synthetic oligonucleotide
  Sense strand starting at position 818 of SEQ ID NO: 914046
acgcaucauccagaaauac

SEQ ID NO: 973825 - RNA, 19 nt, Artificial Sequence
  Description of Artificial Sequence: Synthetic oligonucleotide
  Antisense strand to SEQ ID NO: 973824
guauuucuggaugaugcgu

SEQ ID NO: 973826 - RNA, 19 nt, Artificial Sequence
  Description of Artificial Sequence: Synthetic oligonucleotide
  Sense strand starting at position 1031 of SEQ ID NO: 914046
ggacuucucggugagaacc

SEQ ID NO: 973827 - RNA, 19 nt, Artificial Sequence
  Description of Artificial Sequence: Synthetic oligonucleotide
  Antisense strand to SEQ ID NO: 973826
gguucucaccgagaagucc

SEQ ID NO: 973828 - RNA, 19 nt, Artificial Sequence
  Description of Artificial Sequence: Synthetic oligonucleotide
  Sense strand starting at position 3709 of SEQ ID NO: 914046
cuggaauuccaacaccgua

SEQ ID NO: 973829 - RNA, 19 nt, Artificial Sequence
  Description of Artificial Sequence: Synthetic oligonucleotide
  Antisense strand to SEQ ID NO: 973828
uacgguguuggaauuccag

SEQ ID NO: 973830 - RNA, 19 nt, Artificial Sequence
  Description of Artificial Sequence: Synthetic oligonucleotide
  Sense strand starting at position 1029 of SEQ ID NO: 914046
gaggacuucucggugagaa

SEQ ID NO: 973831 - RNA, 19 nt, Artificial Sequence
  Description of Artificial Sequence: Synthetic oligonucleotide
  Antisense strand to SEQ ID NO: 973830
uucucaccgagaaguccuc

SEQ ID NO: 973832 - RNA, 19 nt, Artificial Sequence
  Description of Artificial Sequence: Synthetic oligonucleotide
  Sense strand starting at position 50 of SEQ ID NO: 914046
acaggagcucugugaauga

SEQ ID NO: 973833 - RNA, 19 nt, Artificial Sequence
  Description of Artificial Sequence: Synthetic oligonucleotide
  Antisense strand to SEQ ID NO: 973832
ucauucacagagcuccugu

SEQ ID NO: 973834 - RNA, 19 nt, Artificial Sequence
  Description of Artificial Sequence: Synthetic oligonucleotide
  Sense strand starting at position 1030 of SEQ ID NO: 914046
aggacuucucggugagaac

SEQ ID NO: 973835 - RNA, 19 nt, Artificial Sequence
  Description of Artificial Sequence: Synthetic oligonucleotide
  Antisense strand to SEQ ID NO: 973834
guucucaccgagaaguccu

SEQ ID NO: 973836 - RNA, 19 nt, Artificial Sequence
  Description of Artificial Sequence: Synthetic oligonucleotide
  Sense strand starting at position 2264 of SEQ ID NO: 914046
gccugaucaccagggugaa

SEQ ID NO: 973837 - RNA, 19 nt, Artificial Sequence
  Description of Artificial Sequence: Synthetic oligonucleotide
  Antisense strand to SEQ ID NO: 973836
uucacccuggugaucaggc

SEQ ID NO: 973838 - RNA, 19 nt, Artificial Sequence
  Description of Artificial Sequence: Synthetic oligonucleotide
  Sense strand starting at position 3033 of SEQ ID NO: 914046
gccuuaugacagcauucca

SEQ ID NO: 973839 - RNA, 19 nt, Artificial Sequence
  Description of Artificial Sequence: Synthetic oligonucleotide
  Antisense strand to SEQ ID NO: 973838
uggaaugcugucauaaggc

SEQ ID NO: 973840 - RNA, 19 nt, Artificial Sequence
  Description of Artificial Sequence: Synthetic oligonucleotide
  Sense strand starting at position 2081 of SEQ ID NO: 914046
ggaggaaguuagguugcua

SEQ ID NO: 973841 - RNA, 19 nt, Artificial Sequence
  Description of Artificial Sequence: Synthetic oligonucleotide
  Antisense strand to SEQ ID NO: 973840
uagcaaccuaacuuccucc

SEQ ID NO: 973842 - RNA, 19 nt, Artificial Sequence
  Description of Artificial Sequence: Synthetic oligonucleotide
  Sense strand starting at position 3005 of SEQ ID NO: 914046
uggagauacucaguugcua

SEQ ID NO: 973843 - RNA, 19 nt, Artificial Sequence
  Description of Artificial Sequence: Synthetic oligonucleotide
  Antisense strand to SEQ ID NO: 973842
uagcaacugaguaucucca

SEQ ID NO: 973844 - RNA, 19 nt, Artificial Sequence
  Description of Artificial Sequence: Synthetic oligonucleotide
  Sense strand starting at position 3560 of SEQ ID NO: 914046
agcagcauucuuuggaaga

SEQ ID NO: 973845 - RNA, 19 nt, Artificial Sequence
  Description of Artificial Sequence: Synthetic oligonucleotide
  Antisense strand to SEQ ID NO: 973844
ucuuccaaagaaugcugcu

SEQ ID NO: 973846 - RNA, 19 nt, Artificial Sequence
  Description of Artificial Sequence: Synthetic oligonucleotide
  Sense strand starting at position 2967 of SEQ ID NO: 914046
ugguguucuagacaagcuu

SEQ ID NO: 973847 - RNA, 19 nt, Artificial Sequence
  Description of Artificial Sequence: Synthetic oligonucleotide
  Antisense strand to SEQ ID NO: 973846
aagcuugucuagaacacca

SEQ ID NO: 973848 - RNA, 19 nt, Artificial Sequence
  Description of Artificial Sequence: Synthetic oligonucleotide
  Sense strand starting at position 1114 of SEQ ID NO: 914046
acugcagcucauuauguaa

SEQ ID NO: 973849 - RNA, 19 nt, Artificial Sequence
  Description of Artificial Sequence: Synthetic oligonucleotide
  Antisense strand to SEQ ID NO: 973848
uuacauaaugagcugcagu

SEQ ID NO: 973850 - RNA, 19 nt, Artificial Sequence
  Description of Artificial Sequence: Synthetic oligonucleotide
  Sense strand starting at position 3025 of SEQ ID NO: 914046
gccaccuugccuuaugaca

SEQ ID NO: 973851 - RNA, 19 nt, Artificial Sequence
  Description of Artificial Sequence: Synthetic oligonucleotide
  Antisense strand to SEQ ID NO: 973850
ugucauaaggcaagguggc

SEQ ID NO: 973852 - RNA, 19 nt, Artificial Sequence
  Description of Artificial Sequence: Synthetic oligonucleotide
  Sense strand starting at position 1028 of SEQ ID NO: 914046
cgaggacuucucggugaga

SEQ ID NO: 973853 - RNA, 19 nt, Artificial Sequence
  Description of Artificial Sequence: Synthetic oligonucleotide
  Antisense strand to SEQ ID NO: 973852
ucucaccgagaaguccucg

SEQ ID NO: 973854 - RNA, 19 nt, Artificial Sequence
  Description of Artificial Sequence: Synthetic oligonucleotide
  Sense strand starting at position 3558 of SEQ ID NO: 914046
uuagcagcauucuuuggaa

SEQ ID NO: 973855 - RNA, 19 nt, Artificial Sequence
  Description of Artificial Sequence: Synthetic oligonucleotide
  Antisense strand to SEQ ID NO: 973854
uuccaaagaaugcugcuaa

SEQ ID NO: 973856 - RNA, 19 nt, Artificial Sequence
  Description of Artificial Sequence: Synthetic oligonucleotide
  Sense strand starting at position 682 of SEQ ID NO: 914046
cuguguuagguauagcuga

SEQ ID NO: 973857 - RNA, 19 nt, Artificial Sequence
  Description of Artificial Sequence: Synthetic oligonucleotide
  Antisense strand to SEQ ID NO: 973856
ucagcuauaccuaacacag

SEQ ID NO: 973858 - RNA, 19 nt, Artificial Sequence
  Description of Artificial Sequence: Synthetic oligonucleotide
  Sense strand starting at position 1990 of SEQ ID NO: 914046
ugugcauuacuaugguaaa

SEQ ID NO: 973859 - RNA, 19 nt, Artificial Sequence
  Description of Artificial Sequence: Synthetic oligonucleotide
  Antisense strand to SEQ ID NO: 973858
uuuaccauaguaaugcaca

SEQ ID NO: 973860 - RNA, 19 nt, Artificial Sequence
  Description of Artificial Sequence: Synthetic oligonucleotide
  Sense strand starting at position 3698 of SEQ ID NO: 914046
ugaugcuuggccuggaauu

SEQ ID NO: 973861 - RNA, 19 nt, Artificial Sequence
  Description of Artificial Sequence: Synthetic oligonucleotide
  Antisense strand to SEQ ID NO: 973860
aauuccaggccaagcauca

SEQ ID NO: 973862 - RNA, 19 nt, Artificial Sequence
  Description of Artificial Sequence: Synthetic oligonucleotide
  Sense strand starting at position 2974 of SEQ ID NO: 914046
cuagacaagcuuugcuauu

SEQ ID NO: 973863 - RNA, 19 nt, Artificial Sequence
  Description of Artificial Sequence: Synthetic oligonucleotide
  Antisense strand to SEQ ID NO: 973862
aauagcaaagcuugucuag

SEQ ID NO: 973864 - RNA, 19 nt, Artificial Sequence
  Description of Artificial Sequence: Synthetic oligonucleotide
  Sense strand starting at position 495 of SEQ ID NO: 914046
ugaagauugcgcuacugca

SEQ ID NO: 973865 - RNA, 19 nt, Artificial Sequence
  Description of Artificial Sequence: Synthetic oligonucleotide
  Antisense strand to SEQ ID NO: 973864
ugcaguagcgcaaucuuca

SEQ ID NO: 973866 - RNA, 19 nt, Artificial Sequence
  Description of Artificial Sequence: Synthetic oligonucleotide
  Sense strand starting at position 1113 of SEQ ID NO: 914046
gacugcagcucauuaugua

SEQ ID NO: 973867 - RNA, 19 nt, Artificial Sequence
  Description of Artificial Sequence: Synthetic oligonucleotide
  Antisense strand to SEQ ID NO: 973866
uacauaaugagcugcaguc

SEQ ID NO: 973868 - RNA, 19 nt, Artificial Sequence
  Description of Artificial Sequence: Synthetic oligonucleotide
  Sense strand starting at position 3696 of SEQ ID NO: 914046
gcugaugcuuggccuggaa

SEQ ID NO: 973869 - RNA, 19 nt, Artificial Sequence
  Description of Artificial Sequence: Synthetic oligonucleotide
  Antisense strand to SEQ ID NO: 973868
uuccaggccaagcaucagc

SEQ ID NO: 973870 - RNA, 19 nt, Artificial Sequence
  Description of Artificial Sequence: Synthetic oligonucleotide
  Sense strand starting at position 1545 of SEQ ID NO: 914046
guuucuguaucugcuaaau

SEQ ID NO: 973871 - RNA, 19 nt, Artificial Sequence
  Description of Artificial Sequence: Synthetic oligonucleotide
  Antisense strand to SEQ ID NO: 973870
auuuagcagauacagaaac

SEQ ID NO: 973872 - RNA, 19 nt, Artificial Sequence
  Description of Artificial Sequence: Synthetic oligonucleotide
  Sense strand starting at position 838 of SEQ ID NO: 914046
agcuguugucaucggagac

SEQ ID NO: 973873 - RNA, 19 nt, Artificial Sequence
  Description of Artificial Sequence: Synthetic oligonucleotide
  Antisense strand to SEQ ID NO: 973872
gucuccgaugacaacagcu

SEQ ID NO: 973874 - RNA, 19 nt, Artificial Sequence
  Description of Artificial Sequence: Synthetic oligonucleotide
  Sense strand starting at position 1982 of SEQ ID NO: 914046
cggauucgugugcauuacu

SEQ ID NO: 973875 - RNA, 19 nt, Artificial Sequence
  Description of Artificial Sequence: Synthetic oligonucleotide
  Antisense strand to SEQ ID NO: 973874
aguaaugcacacgaauccg

SEQ ID NO: 973876 - RNA, 19 nt, Artificial Sequence
  Description of Artificial Sequence: Synthetic oligonucleotide
  Sense strand starting at position 680 of SEQ ID NO: 914046
ugcuguguuagguauagcu

SEQ ID NO: 973877 - RNA, 19 nt, Artificial Sequence
  Description of Artificial Sequence: Synthetic oligonucleotide
  Antisense strand to SEQ ID NO: 973876
agcuauaccuaacacagca

SEQ ID NO: 973878 - RNA, 19 nt, Artificial Sequence
  Description of Artificial Sequence: Synthetic oligonucleotide
  Sense strand starting at position 490 of SEQ ID NO: 914046
gugagugaagauugcgcua

SEQ ID NO: 973879 - RNA, 19 nt, Artificial Sequence
  Description of Artificial Sequence: Synthetic oligonucleotide
  Antisense strand to SEQ ID NO: 973878
uagcgcaaucuucacucac

SEQ ID NO: 973880 - RNA, 19 nt, Artificial Sequence
  Description of Artificial Sequence: Synthetic oligonucleotide
  Sense strand starting at position 3562 of SEQ ID NO: 914046
cagcauucuuuggaagaag

SEQ ID NO: 973881 - RNA, 19 nt, Artificial Sequence
  Description of Artificial Sequence: Synthetic oligonucleotide
  Antisense strand to SEQ ID NO: 973880
cuucuuccaaagaaugcug

SEQ ID NO: 973882 - RNA, 19 nt, Artificial Sequence
  Description of Artificial Sequence: Synthetic oligonucleotide
  Sense strand starting at position 689 of SEQ ID NO: 914046
agguauagcugaggagaga

SEQ ID NO: 973883 - RNA, 19 nt, Artificial Sequence
  Description of Artificial Sequence: Synthetic oligonucleotide
  Antisense strand to SEQ ID NO: 973882
ucucuccucagcuauaccu

SEQ ID NO: 973884 - RNA, 19 nt, Artificial Sequence
  Description of Artificial Sequence: Synthetic oligonucleotide
  Sense strand starting at position 1980 of SEQ ID NO: 914046
uccggauucgugugcauua

SEQ ID NO: 973885 - RNA, 19 nt, Artificial Sequence
  Description of Artificial Sequence: Synthetic oligonucleotide
  Antisense strand to SEQ ID NO: 973884
uaaugcacacgaauccgga

SEQ ID NO: 973886 - RNA, 19 nt, Artificial Sequence
  Description of Artificial Sequence: Synthetic oligonucleotide
  Sense strand starting at position 1972 of SEQ ID NO: 914046
gcgucacuuccggauucgu

SEQ ID NO: 973887 - RNA, 19 nt, Artificial Sequence
  Description of Artificial Sequence: Synthetic oligonucleotide
  Antisense strand to SEQ ID NO: 973886
acgaauccggaagugacgc

SEQ ID NO: 973888 - RNA, 19 nt, Artificial Sequence
  Description of Artificial Sequence: Synthetic oligonucleotide
  Sense strand starting at position 588 of SEQ ID NO: 914046
uuuaguucuugcuagauaa

SEQ ID NO: 973889 - RNA, 19 nt, Artificial Sequence
  Description of Artificial Sequence: Synthetic oligonucleotide
  Antisense strand to SEQ ID NO: 973888
uuaucuagcaagaacuaaa

SEQ ID NO: 973890 - RNA, 19 nt, Artificial Sequence
  Description of Artificial Sequence: Synthetic oligonucleotide
  Sense strand starting at position 1547 of SEQ ID NO: 914046
uucuguaucugcuaaauug

SEQ ID NO: 973891 - RNA, 19 nt, Artificial Sequence
  Description of Artificial Sequence: Synthetic oligonucleotide
  Antisense strand to SEQ ID NO: 973890
caauuuagcagauacagaa

SEQ ID NO: 973892 - RNA, 19 nt, Artificial Sequence
  Description of Artificial Sequence: Synthetic oligonucleotide
  Sense strand starting at position 988 of SEQ ID NO: 914046
ugacguuugugcagucgga

SEQ ID NO: 973893 - RNA, 19 nt, Artificial Sequence
  Description of Artificial Sequence: Synthetic oligonucleotide
  Antisense strand to SEQ ID NO: 973892
uccgacugcacaaacguca

SEQ ID NO: 973894 - RNA, 19 nt, Artificial Sequence
  Description of Artificial Sequence: Synthetic oligonucleotide
  Sense strand starting at position 492 of SEQ ID NO: 914046
gagugaagauugcgcuacu

SEQ ID NO: 973895 - RNA, 19 nt, Artificial Sequence
  Description of Artificial Sequence: Synthetic oligonucleotide
  Antisense strand to SEQ ID NO: 973894
aguagcgcaaucuucacuc

SEQ ID NO: 973896 - RNA, 19 nt, Artificial Sequence
  Description of Artificial Sequence: Synthetic oligonucleotide
  Sense strand starting at position 1417 of SEQ ID NO: 914047
ggucuaaaccaguacaauc

SEQ ID NO: 973897 - RNA, 19 nt, Artificial Sequence
  Description of Artificial Sequence: Synthetic oligonucleotide
  Antisense strand to SEQ ID NO: 973896
gauuguacugguuuagacc

SEQ ID NO: 973898 - RNA, 19 nt, Artificial Sequence
  Description of Artificial Sequence: Synthetic oligonucleotide
  Sense strand starting at position 2362 of SEQ ID NO: 914047
aauguuucgcuuguguaau

SEQ ID NO: 973899 - RNA, 19 nt, Artificial Sequence
  Description of Artificial Sequence: Synthetic oligonucleotide
  Antisense strand to SEQ ID NO: 973898
auuacacaagcgaaacauu

SEQ ID NO: 973900 - RNA, 19 nt, Artificial Sequence
  Description of Artificial Sequence: Synthetic oligonucleotide
  Sense strand starting at position 2103 of SEQ ID NO: 914047
uggcuaaucacguucguua

SEQ ID NO: 973901 - RNA, 19 nt, Artificial Sequence
  Description of Artificial Sequence: Synthetic oligonucleotide
  Antisense strand to SEQ ID NO: 973900
uaacgaacgugauuagcca

SEQ ID NO: 973902 - RNA, 19 nt, Artificial Sequence
  Description of Artificial Sequence: Synthetic oligonucleotide
  Sense strand starting at position 2104 of SEQ ID NO: 914047
ggcuaaucacguucguuau

SEQ ID NO: 973903 - RNA, 19 nt, Artificial Sequence
  Description of Artificial Sequence: Synthetic oligonucleotide
  Antisense strand to SEQ ID NO: 973902
auaacgaacgugauuagcc

SEQ ID NO: 973904 - RNA, 19 nt, Artificial Sequence
  Description of Artificial Sequence: Synthetic oligonucleotide
  Sense strand starting at position 2116 of SEQ ID NO: 914047
ucguuauucggcuucgaga

SEQ ID NO: 973905 - RNA, 19 nt, Artificial Sequence
  Description of Artificial Sequence: Synthetic oligonucleotide
  Antisense strand to SEQ ID NO: 973904
ucucgaagccgaauaacga

SEQ ID NO: 973906 - RNA, 19 nt, Artificial Sequence
  Description of Artificial Sequence: Synthetic oligonucleotide
  Sense strand starting at position 2456 of SEQ ID NO: 914047
gcaguuucccgcccuauua

SEQ ID NO: 973907 - RNA, 19 nt, Artificial Sequence
  Description of Artificial Sequence: Synthetic oligonucleotide
  Antisense strand to SEQ ID NO: 973906
uaauagggcgggaaacugc

SEQ ID NO: 973908 - RNA, 19 nt, Artificial Sequence
  Description of Artificial Sequence: Synthetic oligonucleotide
  Sense strand starting at position 2374 of SEQ ID NO: 914047
guguaauagccgcuccacu

SEQ ID NO: 973909 - RNA, 19 nt, Artificial Sequence
  Description of Artificial Sequence: Synthetic oligonucleotide
  Antisense strand to SEQ ID NO: 973908
aguggagcggcuauuacac

SEQ ID NO: 973910 - RNA, 19 nt, Artificial Sequence
  Description of Artificial Sequence: Synthetic oligonucleotide
  Sense strand starting at position 3946 of SEQ ID NO: 914047
agguaucaccgaggauaau

SEQ ID NO: 973911 - RNA, 19 nt, Artificial Sequence
  Description of Artificial Sequence: Synthetic oligonucleotide
  Antisense strand to SEQ ID NO: 973910
auuauccucggugauaccu

SEQ ID NO: 973912 - RNA, 19 nt, Artificial Sequence
  Description of Artificial Sequence: Synthetic oligonucleotide
  Sense strand starting at position 434 of SEQ ID NO: 914047
ccaagaucugaacgaguag

SEQ ID NO: 973913 - RNA, 19 nt, Artificial Sequence
  Description of Artificial Sequence: Synthetic oligonucleotide
  Antisense strand to SEQ ID NO: 973912
cuacucguucagaucuugg

SEQ ID NO: 973914 - RNA, 19 nt, Artificial Sequence
  Description of Artificial Sequence: Synthetic oligonucleotide
  Sense strand starting at position 3766 of SEQ ID NO: 914047
ugauuuauccuguggccuc

SEQ ID NO: 973915 - RNA, 19 nt, Artificial Sequence
  Description of Artificial Sequence: Synthetic oligonucleotide
  Antisense strand to SEQ ID NO: 973914
gaggccacaggauaaauca

SEQ ID NO: 973916 - RNA, 19 nt, Artificial Sequence
  Description of Artificial Sequence: Synthetic oligonucleotide
  Sense strand starting at position 38 of SEQ ID NO: 914047
ugucacauccuggaguuga

SEQ ID NO: 973917 - RNA, 19 nt, Artificial Sequence
  Description of Artificial Sequence: Synthetic oligonucleotide
  Antisense strand to SEQ ID NO: 973916
ucaacuccaggaugugaca

SEQ ID NO: 973918 - RNA, 19 nt, Artificial Sequence
  Description of Artificial Sequence: Synthetic oligonucleotide
  Sense strand starting at position 241 of SEQ ID NO: 914047
aguacaauccuaugugaga

SEQ ID NO: 973919 - RNA, 19 nt, Artificial Sequence
  Description of Artificial Sequence: Synthetic oligonucleotide
  Antisense strand to SEQ ID NO: 973918
ucucacauaggauuguacu

SEQ ID NO: 973920 - RNA, 19 nt, Artificial Sequence
  Description of Artificial Sequence: Synthetic oligonucleotide
  Sense strand starting at position 242 of SEQ ID NO: 914047
guacaauccuaugugagag

SEQ ID NO: 973921 - RNA, 19 nt, Artificial Sequence
  Description of Artificial Sequence: Synthetic oligonucleotide
  Antisense strand to SEQ ID NO: 973920
cucucacauaggauuguac

SEQ ID NO: 973922 - RNA, 19 nt, Artificial Sequence
  Description of Artificial Sequence: Synthetic oligonucleotide
  Sense strand starting at position 3276 of SEQ ID NO: 914047
gcaugauaucaagguacag

SEQ ID NO: 973923 - RNA, 19 nt, Artificial Sequence
  Description of Artificial Sequence: Synthetic oligonucleotide
  Antisense strand to SEQ ID NO: 973922
cuguaccuugauaucaugc

SEQ ID NO: 973924 - RNA, 19 nt, Artificial Sequence
  Description of Artificial Sequence: Synthetic oligonucleotide
  Sense strand starting at position 966 of SEQ ID NO: 914047
ugauuaaacugggcaguga

SEQ ID NO: 973925 - RNA, 19 nt, Artificial Sequence
  Description of Artificial Sequence: Synthetic oligonucleotide
  Antisense strand to SEQ ID NO: 973924
ucacugcccaguuuaauca

SEQ ID NO: 973926 - RNA, 19 nt, Artificial Sequence
  Description of Artificial Sequence: Synthetic oligonucleotide
  Sense strand starting at position 757 of SEQ ID NO: 914047
ggcacauugggccaacauu

SEQ ID NO: 973927 - RNA, 19 nt, Artificial Sequence
  Description of Artificial Sequence: Synthetic oligonucleotide
  Antisense strand to SEQ ID NO: 973926
aauguuggcccaaugugcc

SEQ ID NO: 973928 - RNA, 19 nt, Artificial Sequence
  Description of Artificial Sequence: Synthetic oligonucleotide
  Sense strand starting at position 389 of SEQ ID NO: 914047
ggugcaaacgacugagaaa

SEQ ID NO: 973929 - RNA, 19 nt, Artificial Sequence
  Description of Artificial Sequence: Synthetic oligonucleotide
  Antisense strand to SEQ ID NO: 973928
uuucucagucguuugcacc

SEQ ID NO: 973930 - RNA, 19 nt, Artificial Sequence
  Description of Artificial Sequence: Synthetic oligonucleotide
  Sense strand starting at position 476 of SEQ ID NO: 914047
gguucagaauggcuggaau

SEQ ID NO: 973931 - RNA, 19 nt, Artificial Sequence
  Description of Artificial Sequence: Synthetic oligonucleotide
  Antisense strand to SEQ ID NO: 973930
auuccagccauucugaacc

SEQ ID NO: 973932 - RNA, 19 nt, Artificial Sequence
  Description of Artificial Sequence: Synthetic oligonucleotide
  Sense strand starting at position 1125 of SEQ ID NO: 914047
gcuuauuaaccauggaacu

SEQ ID NO: 973933 - RNA, 19 nt, Artificial Sequence
  Description of Artificial Sequence: Synthetic oligonucleotide
  Antisense strand to SEQ ID NO: 973932
aguuccaugguuaauaagc

SEQ ID NO: 973934 - RNA, 19 nt, Artificial Sequence
  Description of Artificial Sequence: Synthetic oligonucleotide
  Sense strand starting at position 957 of SEQ ID NO: 914047
gugacccagugauuaaacu

SEQ ID NO: 973935 - RNA, 19 nt, Artificial Sequence
  Description of Artificial Sequence: Synthetic oligonucleotide
  Antisense strand to SEQ ID NO: 973934
aguuuaaucacugggucac

SEQ ID NO: 973936 - RNA, 19 nt, Artificial Sequence
  Description of Artificial Sequence: Synthetic oligonucleotide
  Sense strand starting at position 3724 of SEQ ID NO: 914047
ucucacaauccuggaaguu

SEQ ID NO: 973937 - RNA, 19 nt, Artificial Sequence
  Description of Artificial Sequence: Synthetic oligonucleotide
  Antisense strand to SEQ ID NO: 973936
aacuuccaggauugugaga

SEQ ID NO: 973938 - RNA, 19 nt, Artificial Sequence
  Description of Artificial Sequence: Synthetic oligonucleotide
  Sense strand starting at position 768 of SEQ ID NO: 914047
ccaacauuccuauggugac

SEQ ID NO: 973939 - RNA, 19 nt, Artificial Sequence
  Description of Artificial Sequence: Synthetic oligonucleotide
  Antisense strand to SEQ ID NO: 973938
gucaccauaggaauguugg

SEQ ID NO: 973940 - RNA, 19 nt, Artificial Sequence
  Description of Artificial Sequence: Synthetic oligonucleotide
  Sense strand starting at position 728 of SEQ ID NO: 914047
gaaucuugguuccuuuaag

SEQ ID NO: 973941 - RNA, 19 nt, Artificial Sequence
  Description of Artificial Sequence: Synthetic oligonucleotide
  Antisense strand to SEQ ID NO: 973940
cuuaaaggaaccaagauuc

SEQ ID NO: 973942 - RNA, 19 nt, Artificial Sequence
  Description of Artificial Sequence: Synthetic oligonucleotide
  Sense strand starting at position 1115 of SEQ ID NO: 914047
gcacaagaaugcuuauuaa

SEQ ID NO: 973943 - RNA, 19 nt, Artificial Sequence
  Description of Artificial Sequence: Synthetic oligonucleotide
  Antisense strand to SEQ ID NO: 973942
uuaauaagcauucuugugc

SEQ ID NO: 973944 - RNA, 19 nt, Artificial Sequence
  Description of Artificial Sequence: Synthetic oligonucleotide
  Sense strand starting at position 2993 of SEQ ID NO: 914047
auguaauuauaucuccgaa

SEQ ID NO: 973945 - RNA, 19 nt, Artificial Sequence
  Description of Artificial Sequence: Synthetic oligonucleotide
  Antisense strand to SEQ ID NO: 973944
uucggagauauaauuacau

SEQ ID NO: 973946 - RNA, 19 nt, Artificial Sequence
  Description of Artificial Sequence: Synthetic oligonucleotide
  Sense strand starting at position 725 of SEQ ID NO: 914047
auagaaucuugguuccuuu

SEQ ID NO: 973947 - RNA, 19 nt, Artificial Sequence
  Description of Artificial Sequence: Synthetic oligonucleotide
  Antisense strand to SEQ ID NO: 973946
aaaggaaccaagauucuau

SEQ ID NO: 973948 - RNA, 19 nt, Artificial Sequence
  Description of Artificial Sequence: Synthetic oligonucleotide
  Sense strand starting at position 3620 of SEQ ID NO: 914047
gugaaucuugccuagguag

SEQ ID NO: 973949 - RNA, 19 nt, Artificial Sequence
  Description of Artificial Sequence: Synthetic oligonucleotide
  Antisense strand to SEQ ID NO: 973948
cuaccuaggcaagauucac

SEQ ID NO: 973950 - RNA, 19 nt, Artificial Sequence
  Description of Artificial Sequence: Synthetic oligonucleotide
  Sense strand starting at position 530 of SEQ ID NO: 914047
ucagaaaggccuuguacau

SEQ ID NO: 973951 - RNA, 19 nt, Artificial Sequence
  Description of Artificial Sequence: Synthetic oligonucleotide
  Antisense strand to SEQ ID NO: 973950
auguacaaggccuuucuga

SEQ ID NO: 973952 - RNA, 19 nt, Artificial Sequence
  Description of Artificial Sequence: Synthetic oligonucleotide
  Sense strand starting at position 3410 of SEQ ID NO: 914047
ggaggugcuacuugauuac

SEQ ID NO: 973953 - RNA, 19 nt, Artificial Sequence
  Description of Artificial Sequence: Synthetic oligonucleotide
  Antisense strand to SEQ ID NO: 973952
guaaucaaguagcaccucc

SEQ ID NO: 973954 - RNA, 19 nt, Artificial Sequence
  Description of Artificial Sequence: Synthetic oligonucleotide
  Sense strand starting at position 872 of SEQ ID NO: 914047
cuuggaggcaugugaaucu

SEQ ID NO: 973955 - RNA, 19 nt, Artificial Sequence
  Description of Artificial Sequence: Synthetic oligonucleotide
  Antisense strand to SEQ ID NO: 973954
agauucacaugccuccaag

SEQ ID NO: 973956 - RNA, 19 nt, Artificial Sequence
  Description of Artificial Sequence: Synthetic oligonucleotide
  Sense strand starting at position 2345 of SEQ ID NO: 914047
gaaguaaauugcuuccgaa

SEQ ID NO: 973957 - RNA, 19 nt, Artificial Sequence
  Description of Artificial Sequence: Synthetic oligonucleotide
  Antisense strand to SEQ ID NO: 973956
uucggaagcaauuuacuuc

SEQ ID NO: 973958 - RNA, 19 nt, Artificial Sequence
  Description of Artificial Sequence: Synthetic oligonucleotide
  Sense strand starting at position 2969 of SEQ ID NO: 914047
gccuuaaggagauguggua

SEQ ID NO: 973959 - RNA, 19 nt, Artificial Sequence
  Description of Artificial Sequence: Synthetic oligonucleotide
  Antisense strand to SEQ ID NO: 973958
uaccacaucuccuuaaggc

SEQ ID NO: 973960 - RNA, 19 nt, Artificial Sequence
  Description of Artificial Sequence: Synthetic oligonucleotide
  Sense strand starting at position 2344 of SEQ ID NO: 914047
ggaaguaaauugcuuccga

SEQ ID NO: 973961 - RNA, 19 nt, Artificial Sequence
  Description of Artificial Sequence: Synthetic oligonucleotide
  Antisense strand to SEQ ID NO: 973960
ucggaagcaauuuacuucc

SEQ ID NO: 973962 - RNA, 19 nt, Artificial Sequence
  Description of Artificial Sequence: Synthetic oligonucleotide
  Sense strand starting at position 2092 of SEQ ID NO: 914047
guggaagaggcuggcuaau

SEQ ID NO: 973963 - RNA, 19 nt, Artificial Sequence
  Description of Artificial Sequence: Synthetic oligonucleotide
  Antisense strand to SEQ ID NO: 973962
auuagccagccucuuccac

SEQ ID NO: 973964 - RNA, 19 nt, Artificial Sequence
  Description of Artificial Sequence: Synthetic oligonucleotide
  Sense strand starting at position 566 of SEQ ID NO: 914047
agcauuaccgucgauaaug

SEQ ID NO: 973965 - RNA, 19 nt, Artificial Sequence
  Description of Artificial Sequence: Synthetic oligonucleotide
  Antisense strand to SEQ ID NO: 973964
cauuaucgacgguaaugcu

SEQ ID NO: 973966 - RNA, 19 nt, Artificial Sequence
  Description of Artificial Sequence: Synthetic oligonucleotide
  Sense strand starting at position 3101 of SEQ ID NO: 914047
ccauuagucuucuuugauc

SEQ ID NO: 973967 - RNA, 19 nt, Artificial Sequence
  Description of Artificial Sequence: Synthetic oligonucleotide
  Antisense strand to SEQ ID NO: 973966
gaucaaagaagacuaaugg

SEQ ID NO: 973968 - RNA, 19 nt, Artificial Sequence
  Description of Artificial Sequence: Synthetic oligonucleotide
  Sense strand starting at position 3099 of SEQ ID NO: 914047
cuccauuagucuucuuuga

SEQ ID NO: 973969 - RNA, 19 nt, Artificial Sequence
  Description of Artificial Sequence: Synthetic oligonucleotide
  Antisense strand to SEQ ID NO: 973968
ucaaagaagacuaauggag

SEQ ID NO: 973970 - RNA, 19 nt, Artificial Sequence
  Description of Artificial Sequence: Synthetic oligonucleotide
  Sense strand starting at position 2885 of SEQ ID NO: 914047
uucuucuacuggucaccua

SEQ ID NO: 973971 - RNA, 19 nt, Artificial Sequence
  Description of Artificial Sequence: Synthetic oligonucleotide
  Antisense strand to SEQ ID NO: 973970
uaggugaccaguagaagaa

SEQ ID NO: 973972 - RNA, 19 nt, Artificial Sequence
  Description of Artificial Sequence: Synthetic oligonucleotide
  Sense strand starting at position 1483 of SEQ ID NO: 914047
agcucauccacgggagagu

SEQ ID NO: 973973 - RNA, 19 nt, Artificial Sequence
  Description of Artificial Sequence: Synthetic oligonucleotide
  Antisense strand to SEQ ID NO: 973972
acucucccguggaugagcu

SEQ ID NO: 973974 - RNA, 19 nt, Artificial Sequence
  Description of Artificial Sequence: Synthetic oligonucleotide
  Sense strand starting at position 1496 of SEQ ID NO: 914047
gagaguccugcccgagaac

SEQ ID NO: 973975 - RNA, 19 nt, Artificial Sequence
  Description of Artificial Sequence: Synthetic oligonucleotide
  Antisense strand to SEQ ID NO: 973974
guucucgggcaggacucuc

SEQ ID NO: 973976 - RNA, 19 nt, Artificial Sequence
  Description of Artificial Sequence: Synthetic oligonucleotide
  Sense strand starting at position 1021 of SEQ ID NO: 914048
ugaugcugccaagaaauaa

SEQ ID NO: 973977 - RNA, 19 nt, Artificial Sequence
  Description of Artificial Sequence: Synthetic oligonucleotide
  Antisense strand to SEQ ID NO: 973976
uuauuucuuggcagcauca

SEQ ID NO: 973978 - RNA, 19 nt, Artificial Sequence
  Description of Artificial Sequence: Synthetic oligonucleotide
  Sense strand starting at position 3435 of SEQ ID NO: 914048
agucaaccaguuuagaauu

SEQ ID NO: 973979 - RNA, 19 nt, Artificial Sequence
  Description of Artificial Sequence: Synthetic oligonucleotide
  Antisense strand to SEQ ID NO: 973978
aauucuaaacugguugacu

SEQ ID NO: 973980 - RNA, 19 nt, Artificial Sequence
  Description of Artificial Sequence: Synthetic oligonucleotide
  Sense strand starting at position 945 of SEQ ID NO: 914048
gcuuaaagacaucagaguu

SEQ ID NO: 973981 - RNA, 19 nt, Artificial Sequence
  Description of Artificial Sequence: Synthetic oligonucleotide
  Antisense strand to SEQ ID NO: 973980
aacucugaugucuuuaagc

SEQ ID NO: 973982 - RNA, 19 nt, Artificial Sequence
  Description of Artificial Sequence: Synthetic oligonucleotide
  Sense strand starting at position 2141 of SEQ ID NO: 914048
gggagcuuucugcccgcau

SEQ ID NO: 973983 - RNA, 19 nt, Artificial Sequence
  Description of Artificial Sequence: Synthetic oligonucleotide
  Antisense strand to SEQ ID NO: 973982
augcgggcagaaagcuccc

SEQ ID NO: 973984 - RNA, 19 nt, Artificial Sequence
  Description of Artificial Sequence: Synthetic oligonucleotide
  Sense strand starting at position 3589 of SEQ ID NO: 914048
gaccuuucucuugggagaa

SEQ ID NO: 973985 - RNA, 19 nt, Artificial Sequence
  Description of Artificial Sequence: Synthetic oligonucleotide
  Antisense strand to SEQ ID NO: 973984
uucucccaagagaaagguc

SEQ ID NO: 973986 - RNA, 19 nt, Artificial Sequence
  Description of Artificial Sequence: Synthetic oligonucleotide
  Sense strand starting at position 978 of SEQ ID NO: 914048
uaaaguuaugguuaagagu

SEQ ID NO: 973987 - RNA, 19 nt, Artificial Sequence
  Description of Artificial Sequence: Synthetic oligonucleotide
  Antisense strand to SEQ ID NO: 973986
acucuuaaccauaacuuua

SEQ ID NO: 973988 - RNA, 19 nt, Artificial Sequence
  Description of Artificial Sequence: Synthetic oligonucleotide
  Sense strand starting at position 3569 of SEQ ID NO: 914048
agaauacaguuguuacaag

SEQ ID NO: 973989 - RNA, 19 nt, Artificial Sequence
  Description of Artificial Sequence: Synthetic oligonucleotide
  Antisense strand to SEQ ID NO: 973988
cuuguaacaacuguauucu

SEQ ID NO: 973990 - RNA, 19 nt, Artificial Sequence
  Description of Artificial Sequence: Synthetic oligonucleotide
  Sense strand starting at position 3702 of SEQ ID NO: 914048
uggaguaggacuuauguuu

SEQ ID NO: 973991 - RNA, 19 nt, Artificial Sequence
  Description of Artificial Sequence: Synthetic oligonucleotide
  Antisense strand to SEQ ID NO: 973990
aaacauaaguccuacucca

SEQ ID NO: 973992 - RNA, 19 nt, Artificial Sequence
  Description of Artificial Sequence: Synthetic oligonucleotide
  Sense strand starting at position 3561 of SEQ ID NO: 914048
uuaucuguagaauacaguu

SEQ ID NO: 973993 - RNA, 19 nt, Artificial Sequence
  Description of Artificial Sequence: Synthetic oligonucleotide
  Antisense strand to SEQ ID NO: 973992
aacuguauucuacagauaa

SEQ ID NO: 973994 - RNA, 19 nt, Artificial Sequence
  Description of Artificial Sequence: Synthetic oligonucleotide
  Sense strand starting at position 2767 of SEQ ID NO: 914048
ccucuucuugaagagucua

SEQ ID NO: 973995 - RNA, 19 nt, Artificial Sequence
  Description of Artificial Sequence: Synthetic oligonucleotide
  Antisense strand to SEQ ID NO: 973994
uagacucuucaagaagagg

SEQ ID NO: 973996 - RNA, 19 nt, Artificial Sequence
  Description of Artificial Sequence: Synthetic oligonucleotide
  Sense strand starting at position 3630 of SEQ ID NO: 914048
uuuauuauacaccgggaga

SEQ ID NO: 973997 - RNA, 19 nt, Artificial Sequence
  Description of Artificial Sequence: Synthetic oligonucleotide
  Antisense strand to SEQ ID NO: 973996
ucucccgguguauaauaaa

SEQ ID NO: 973998 - RNA, 19 nt, Artificial Sequence
  Description of Artificial Sequence: Synthetic oligonucleotide
  Sense strand starting at position 3654 of SEQ ID NO: 914048
ccaggaauugcuuaaguac

SEQ ID NO: 973999 - RNA, 19 nt, Artificial Sequence
  Description of Artificial Sequence: Synthetic oligonucleotide
  Antisense strand to SEQ ID NO: 973998
guacuuaagcaauuccugg

SEQ ID NO: 974000 - RNA, 19 nt, Artificial Sequence
  Description of Artificial Sequence: Synthetic oligonucleotide
  Sense strand starting at position 3430 of SEQ ID NO: 914048
aggugagucaaccaguuua

SEQ ID NO: 974001 - RNA, 19 nt, Artificial Sequence
  Description of Artificial Sequence: Synthetic oligonucleotide
  Antisense strand to SEQ ID NO: 974000
uaaacugguugacucaccu

SEQ ID NO: 974002 - RNA, 19 nt, Artificial Sequence
  Description of Artificial Sequence: Synthetic oligonucleotide
  Sense strand starting at position 3378 of SEQ ID NO: 914048
cucucaguugcagaucaaa

SEQ ID NO: 974003 - RNA, 19 nt, Artificial Sequence
  Description of Artificial Sequence: Synthetic oligonucleotide
  Antisense strand to SEQ ID NO: 974002
uuugaucugcaacugagag

SEQ ID NO: 974004 - RNA, 19 nt, Artificial Sequence
  Description of Artificial Sequence: Synthetic oligonucleotide
  Sense strand starting at position 2762 of SEQ ID NO: 914048
ggaagccucuucuugaaga

SEQ ID NO: 974005 - RNA, 19 nt, Artificial Sequence
  Description of Artificial Sequence: Synthetic oligonucleotide
  Antisense strand to SEQ ID NO: 974004
ucuucaagaagaggcuucc

SEQ ID NO: 974006 - RNA, 19 nt, Artificial Sequence
  Description of Artificial Sequence: Synthetic oligonucleotide
  Sense strand starting at position 2760 of SEQ ID NO: 914048
gaggaagccucuucuugaa

SEQ ID NO: 974007 - RNA, 19 nt, Artificial Sequence
  Description of Artificial Sequence: Synthetic oligonucleotide
  Antisense strand to SEQ ID NO: 974006
uucaagaagaggcuuccuc

SEQ ID NO: 974008 - RNA, 19 nt, Artificial Sequence
  Description of Artificial Sequence: Synthetic oligonucleotide
  Sense strand starting at position 2764 of SEQ ID NO: 914048
aagccucuucuugaagagu

SEQ ID NO: 974009 - RNA, 19 nt, Artificial Sequence
  Description of Artificial Sequence: Synthetic oligonucleotide
  Antisense strand to SEQ ID NO: 974008
acucuucaagaagaggcuu

SEQ ID NO: 974010 - RNA, 19 nt, Artificial Sequence
  Description of Artificial Sequence: Synthetic oligonucleotide
  Sense strand starting at position 521 of SEQ ID NO: 914048
cuauaugauaggugcaaga

SEQ ID NO: 974011 - RNA, 19 nt, Artificial Sequence
  Description of Artificial Sequence: Synthetic oligonucleotide
  Antisense strand to SEQ ID NO: 974010
ucuugcaccuaucauauag

SEQ ID NO: 974012 - RNA, 19 nt, Artificial Sequence
  Description of Artificial Sequence: Synthetic oligonucleotide
  Sense strand starting at position 674 of SEQ ID NO: 914048
gcauaaguauuacugauaa

SEQ ID NO: 974013 - RNA, 19 nt, Artificial Sequence
  Description of Artificial Sequence: Synthetic oligonucleotide
  Antisense strand to SEQ ID NO: 974012
uuaucaguaauacuuaugc

SEQ ID NO: 974014 - RNA, 19 nt, Artificial Sequence
  Description of Artificial Sequence: Synthetic oligonucleotide
  Sense strand starting at position 357 of SEQ ID NO: 914048
uguaucuucccacauguaa

SEQ ID NO: 974015 - RNA, 19 nt, Artificial Sequence
  Description of Artificial Sequence: Synthetic oligonucleotide
  Antisense strand to SEQ ID NO: 974014
uuacaugugggaagauaca

SEQ ID NO: 974016 - RNA, 19 nt, Artificial Sequence
  Description of Artificial Sequence: Synthetic oligonucleotide
  Sense strand starting at position 2812 of SEQ ID NO: 914048
ccuagaaacccuugggcau

SEQ ID NO: 974017 - RNA, 19 nt, Artificial Sequence
  Description of Artificial Sequence: Synthetic oligonucleotide
  Antisense strand to SEQ ID NO: 974016
augcccaaggguuucuagg

SEQ ID NO: 974018 - RNA, 19 nt, Artificial Sequence
  Description of Artificial Sequence: Synthetic oligonucleotide
  Sense strand starting at position 2813 of SEQ ID NO: 914048
cuagaaacccuugggcauu

SEQ ID NO: 974019 - RNA, 19 nt, Artificial Sequence
  Description of Artificial Sequence: Synthetic oligonucleotide
  Antisense strand to SEQ ID NO: 974018
aaugcccaaggguuucuag

SEQ ID NO: 974020 - RNA, 19 nt, Artificial Sequence
  Description of Artificial Sequence: Synthetic oligonucleotide
  Sense strand starting at position 3464 of SEQ ID NO: 914048
agaggaguauuugaugagu

SEQ ID NO: 974021 - RNA, 19 nt, Artificial Sequence
  Description of Artificial Sequence: Synthetic oligonucleotide
  Antisense strand to SEQ ID NO: 974020
acucaucaaauacuccucu

SEQ ID NO: 974022 - RNA, 19 nt, Artificial Sequence
  Description of Artificial Sequence: Synthetic oligonucleotide
  Sense strand starting at position 372 of SEQ ID NO: 914048
guaaauaacccaggcuuua

SEQ ID NO: 974023 - RNA, 19 nt, Artificial Sequence
  Description of Artificial Sequence: Synthetic oligonucleotide
  Antisense strand to SEQ ID NO: 974022
uaaagccuggguuauuuac

SEQ ID NO: 974024 - RNA, 19 nt, Artificial Sequence
  Description of Artificial Sequence: Synthetic oligonucleotide
  Sense strand starting at position 3657 of SEQ ID NO: 914048
ggaauugcuuaaguacuua

SEQ ID NO: 974025 - RNA, 19 nt, Artificial Sequence
  Description of Artificial Sequence: Synthetic oligonucleotide
  Antisense strand to SEQ ID NO: 974024
uaaguacuuaagcaauucc

SEQ ID NO: 974026 - RNA, 19 nt, Artificial Sequence
  Description of Artificial Sequence: Synthetic oligonucleotide
  Sense strand starting at position 3567 of SEQ ID NO: 914048
guagaauacaguuguuaca

SEQ ID NO: 974027 - RNA, 19 nt, Artificial Sequence
  Description of Artificial Sequence: Synthetic oligonucleotide
  Antisense strand to SEQ ID NO: 974026
uguaacaacuguauucuac

SEQ ID NO: 974028 - RNA, 19 nt, Artificial Sequence
  Description of Artificial Sequence: Synthetic oligonucleotide
  Sense strand starting at position 1033 of SEQ ID NO: 914048
gaaauaauguugguuuagu

SEQ ID NO: 974029 - RNA, 19 nt, Artificial Sequence
  Description of Artificial Sequence: Synthetic oligonucleotide
  Antisense strand to SEQ ID NO: 974028
acuaaaccaacauuauuuc

SEQ ID NO: 974030 - RNA, 19 nt, Artificial Sequence
  Description of Artificial Sequence: Synthetic oligonucleotide
  Sense strand starting at position 3303 of SEQ ID NO: 914048
gcuguaguaccugacucaa

SEQ ID NO: 974031 - RNA, 19 nt, Artificial Sequence
  Description of Artificial Sequence: Synthetic oligonucleotide
  Antisense strand to SEQ ID NO: 974030
uugagucagguacuacagc

SEQ ID NO: 974032 - RNA, 19 nt, Artificial Sequence
  Description of Artificial Sequence: Synthetic oligonucleotide
  Sense strand starting at position 2841 of SEQ ID NO: 914048
uaaauaggugcccauguuu

SEQ ID NO: 974033 - RNA, 19 nt, Artificial Sequence
  Description of Artificial Sequence: Synthetic oligonucleotide
  Antisense strand to SEQ ID NO: 974032
aaacaugggcaccuauuua

SEQ ID NO: 974034 - RNA, 19 nt, Artificial Sequence
  Description of Artificial Sequence: Synthetic oligonucleotide
  Sense strand starting at position 814 of SEQ ID NO: 914048
ggugccuccauaugaauga

SEQ ID NO: 974035 - RNA, 19 nt, Artificial Sequence
  Description of Artificial Sequence: Synthetic oligonucleotide
  Antisense strand to SEQ ID NO: 974034
ucauucauauggaggcacc

SEQ ID NO: 974036 - RNA, 19 nt, Artificial Sequence
  Description of Artificial Sequence: Synthetic oligonucleotide
  Sense strand starting at position 2932 of SEQ ID NO: 914048
aguggauauuaugugguca

SEQ ID NO: 974037 - RNA, 19 nt, Artificial Sequence
  Description of Artificial Sequence: Synthetic oligonucleotide
  Antisense strand to SEQ ID NO: 974036
ugaccacauaauauccacu

SEQ ID NO: 974038 - RNA, 19 nt, Artificial Sequence
  Description of Artificial Sequence: Synthetic oligonucleotide
  Sense strand starting at position 2980 of SEQ ID NO: 914048
uugguuugagaauguacuu

SEQ ID NO: 974039 - RNA, 19 nt, Artificial Sequence
  Description of Artificial Sequence: Synthetic oligonucleotide
  Antisense strand to SEQ ID NO: 974038
aaguacauucucaaaccaa

SEQ ID NO: 974040 - RNA, 19 nt, Artificial Sequence
  Description of Artificial Sequence: Synthetic oligonucleotide
  Sense strand starting at position 3259 of SEQ ID NO: 914048
gugguauaauuaucuccua

SEQ ID NO: 974041 - RNA, 19 nt, Artificial Sequence
  Description of Artificial Sequence: Synthetic oligonucleotide
  Antisense strand to SEQ ID NO: 974040
uaggagauaauuauaccac

SEQ ID NO: 974042 - RNA, 19 nt, Artificial Sequence
  Description of Artificial Sequence: Synthetic oligonucleotide
  Sense strand starting at position 3709 of SEQ ID NO: 914048
ggacuuauguuuccuuauu

SEQ ID NO: 974043 - RNA, 19 nt, Artificial Sequence
  Description of Artificial Sequence: Synthetic oligonucleotide
  Antisense strand to SEQ ID NO: 974042
aauaaggaaacauaagucc

SEQ ID NO: 974044 - RNA, 19 nt, Artificial Sequence
  Description of Artificial Sequence: Synthetic oligonucleotide
  Sense strand starting at position 807 of SEQ ID NO: 914048
gauaucaggugccuccaua

SEQ ID NO: 974045 - RNA, 19 nt, Artificial Sequence
  Description of Artificial Sequence: Synthetic oligonucleotide
  Antisense strand to SEQ ID NO: 974044
uauggaggcaccugauauc

SEQ ID NO: 974046 - RNA, 19 nt, Artificial Sequence
  Description of Artificial Sequence: Synthetic oligonucleotide
  Sense strand starting at position 1477 of SEQ ID NO: 914048
accucagcugccugagaaa

SEQ ID NO: 974047 - RNA, 19 nt, Artificial Sequence
  Description of Artificial Sequence: Synthetic oligonucleotide
  Antisense strand to SEQ ID NO: 974046
uuucucaggcagcugaggu

SEQ ID NO: 974048 - RNA, 19 nt, Artificial Sequence
  Description of Artificial Sequence: Synthetic oligonucleotide
  Sense strand starting at position 352 of SEQ ID NO: 914048
aguauuguaucuucccaca

SEQ ID NO: 974049 - RNA, 19 nt, Artificial Sequence
  Description of Artificial Sequence: Synthetic oligonucleotide
  Antisense strand to SEQ ID NO: 974048
ugugggaagauacaauacu

SEQ ID NO: 974050 - RNA, 19 nt, Artificial Sequence
  Description of Artificial Sequence: Synthetic oligonucleotide
  Sense strand starting at position 2370 of SEQ ID NO: 914048
auucaucagguucgugaga

SEQ ID NO: 974051 - RNA, 19 nt, Artificial Sequence
  Description of Artificial Sequence: Synthetic oligonucleotide
  Antisense strand to SEQ ID NO: 974050
ucucacgaaccugaugaau

SEQ ID NO: 974052 - RNA, 19 nt, Artificial Sequence
  Description of Artificial Sequence: Synthetic oligonucleotide
  Sense strand starting at position 2933 of SEQ ID NO: 914048
guggauauuauguggucau

SEQ ID NO: 974053 - RNA, 19 nt, Artificial Sequence
  Description of Artificial Sequence: Synthetic oligonucleotide
  Antisense strand to SEQ ID NO: 974052
augaccacauaauauccac

SEQ ID NO: 974054 - RNA, 19 nt, Artificial Sequence
  Description of Artificial Sequence: Synthetic oligonucleotide
  Sense strand starting at position 3608 of SEQ ID NO: 914048
gaaguuaugaugugguccu

SEQ ID NO: 974055 - RNA, 19 nt, Artificial Sequence
  Description of Artificial Sequence: Synthetic oligonucleotide
  Antisense strand to SEQ ID NO: 974054
aggaccacaucauaacuuc

SEQ ID NO: 974056 - RNA, 19 nt, Artificial Sequence
  Description of Artificial Sequence: Synthetic oligonucleotide
  Sense strand starting at position 3286 of SEQ ID NO: 914049
ggaauuagauaggcauauc

SEQ ID NO: 974057 - RNA, 19 nt, Artificial Sequence
  Description of Artificial Sequence: Synthetic oligonucleotide
  Antisense strand to SEQ ID NO: 974056
gauaugccuaucuaauucc

SEQ ID NO: 974058 - RNA, 19 nt, Artificial Sequence
  Description of Artificial Sequence: Synthetic oligonucleotide
  Sense strand starting at position 2912 of SEQ ID NO: 914049
gaggcugagcuggauagau

SEQ ID NO: 974059 - RNA, 19 nt, Artificial Sequence
  Description of Artificial Sequence: Synthetic oligonucleotide
  Antisense strand to SEQ ID NO: 974058
aucuauccagcucagccuc

SEQ ID NO: 974060 - RNA, 19 nt, Artificial Sequence
  Description of Artificial Sequence: Synthetic oligonucleotide
  Sense strand starting at position 2914 of SEQ ID NO: 914049
ggcugagcuggauagauca

SEQ ID NO: 974061 - RNA, 19 nt, Artificial Sequence
  Description of Artificial Sequence: Synthetic oligonucleotide
  Antisense strand to SEQ ID NO: 974060
ugaucuauccagcucagcc

SEQ ID NO: 974062 - RNA, 19 nt, Artificial Sequence
  Description of Artificial Sequence: Synthetic oligonucleotide
  Sense strand starting at position 3644 of SEQ ID NO: 914049
guaagagacugaguaaagu

SEQ ID NO: 974063 - RNA, 19 nt, Artificial Sequence
  Description of Artificial Sequence: Synthetic oligonucleotide
  Antisense strand to SEQ ID NO: 974062
acuuuacucagucucuuac

SEQ ID NO: 974064 - RNA, 19 nt, Artificial Sequence
  Description of Artificial Sequence: Synthetic oligonucleotide
  Sense strand starting at position 3274 of SEQ ID NO: 914049
agugacucaaguggaauua

SEQ ID NO: 974065 - RNA, 19 nt, Artificial Sequence
  Description of Artificial Sequence: Synthetic oligonucleotide
  Antisense strand to SEQ ID NO: 974064
uaauuccacuugagucacu

SEQ ID NO: 974066 - RNA, 19 nt, Artificial Sequence
  Description of Artificial Sequence: Synthetic oligonucleotide
  Sense strand starting at position 2759 of SEQ ID NO: 914049
uuugguaaagcucauuaca

SEQ ID NO: 974067 - RNA, 19 nt, Artificial Sequence
  Description of Artificial Sequence: Synthetic oligonucleotide
  Antisense strand to SEQ ID NO: 974066
uguaaugagcuuuaccaaa

SEQ ID NO: 974068 - RNA, 19 nt, Artificial Sequence
  Description of Artificial Sequence: Synthetic oligonucleotide
  Sense strand starting at position 3573 of SEQ ID NO: 914049
cagcaauaugaagguauau

SEQ ID NO: 974069 - RNA, 19 nt, Artificial Sequence
  Description of Artificial Sequence: Synthetic oligonucleotide
  Antisense strand to SEQ ID NO: 974068
auauaccuucauauugcug

SEQ ID NO: 974070 - RNA, 19 nt, Artificial Sequence
  Description of Artificial Sequence: Synthetic oligonucleotide
  Sense strand starting at position 3060 of SEQ ID NO: 914049
ggaucacccggucagaagu

SEQ ID NO: 974071 - RNA, 19 nt, Artificial Sequence
  Description of Artificial Sequence: Synthetic oligonucleotide
  Antisense strand to SEQ ID NO: 974070
acuucugaccgggugaucc

SEQ ID NO: 974072 - RNA, 19 nt, Artificial Sequence
  Description of Artificial Sequence: Synthetic oligonucleotide
  Sense strand starting at position 3242 of SEQ ID NO: 914049
gauuaugagcccuagucau

SEQ ID NO: 974073 - RNA, 19 nt, Artificial Sequence
  Description of Artificial Sequence: Synthetic oligonucleotide
  Antisense strand to SEQ ID NO: 974072
augacuagggcucauaauc

SEQ ID NO: 974074 - RNA, 19 nt, Artificial Sequence
  Description of Artificial Sequence: Synthetic oligonucleotide
  Sense strand starting at position 2761 of SEQ ID NO: 914049
ugguaaagcucauuacaaa

SEQ ID NO: 974075 - RNA, 19 nt, Artificial Sequence
  Description of Artificial Sequence: Synthetic oligonucleotide
  Antisense strand to SEQ ID NO: 974074
uuuguaaugagcuuuacca

SEQ ID NO: 974076 - RNA, 19 nt, Artificial Sequence
  Description of Artificial Sequence: Synthetic oligonucleotide
  Sense strand starting at position 933 of SEQ ID NO: 914049
cuagauagcuaggcaugaa

SEQ ID NO: 974077 - RNA, 19 nt, Artificial Sequence
  Description of Artificial Sequence: Synthetic oligonucleotide
  Antisense strand to SEQ ID NO: 974076
uucaugccuagcuaucuag

SEQ ID NO: 974078 - RNA, 19 nt, Artificial Sequence
  Description of Artificial Sequence: Synthetic oligonucleotide
  Sense strand starting at position 389 of SEQ ID NO: 914049
gaagaagccguccaauucu

SEQ ID NO: 974079 - RNA, 19 nt, Artificial Sequence
  Description of Artificial Sequence: Synthetic oligonucleotide
  Antisense strand to SEQ ID NO: 974078
agaauuggacggcuucuuc

SEQ ID NO: 974080 - RNA, 19 nt, Artificial Sequence
  Description of Artificial Sequence: Synthetic oligonucleotide
  Sense strand starting at position 899 of SEQ ID NO: 914049
agucuccaaugaucuagua

SEQ ID NO: 974081 - RNA, 19 nt, Artificial Sequence
  Description of Artificial Sequence: Synthetic oligonucleotide
  Antisense strand to SEQ ID NO: 974080
uacuagaucauuggagacu

SEQ ID NO: 974082 - RNA, 19 nt, Artificial Sequence
  Description of Artificial Sequence: Synthetic oligonucleotide
  Sense strand starting at position 932 of SEQ ID NO: 914049
ucuagauagcuaggcauga

SEQ ID NO: 974083 - RNA, 19 nt, Artificial Sequence
  Description of Artificial Sequence: Synthetic oligonucleotide
  Antisense strand to SEQ ID NO: 974082
ucaugccuagcuaucuaga

SEQ ID NO: 974084 - RNA, 19 nt, Artificial Sequence
  Description of Artificial Sequence: Synthetic oligonucleotide
  Sense strand starting at position 2236 of SEQ ID NO: 914049
gcgcgaaggccggauuuca

SEQ ID NO: 974085 - RNA, 19 nt, Artificial Sequence
  Description of Artificial Sequence: Synthetic oligonucleotide
  Antisense strand to SEQ ID NO: 974084
ugaaauccggccuucgcgc

SEQ ID NO: 974086 - RNA, 19 nt, Artificial Sequence
  Description of Artificial Sequence: Synthetic oligonucleotide
  Sense strand starting at position 332 of SEQ ID NO: 914049
auuccagugucauccacaa

SEQ ID NO: 974087 - RNA, 19 nt, Artificial Sequence
  Description of Artificial Sequence: Synthetic oligonucleotide
  Antisense strand to SEQ ID NO: 974086
uuguggaugacacuggaau

SEQ ID NO: 974088 - RNA, 19 nt, Artificial Sequence
  Description of Artificial Sequence: Synthetic oligonucleotide
  Sense strand starting at position 3854 of SEQ ID NO: 914049
aguuaaguccaguauccga

SEQ ID NO: 974089 - RNA, 19 nt, Artificial Sequence
  Description of Artificial Sequence: Synthetic oligonucleotide
  Antisense strand to SEQ ID NO: 974088
ucggauacuggacuuaacu

SEQ ID NO: 974090 - RNA, 19 nt, Artificial Sequence
  Description of Artificial Sequence: Synthetic oligonucleotide
  Sense strand starting at position 219 of SEQ ID NO: 914049
guuuaagggccucaugcaa

SEQ ID NO: 974091 - RNA, 19 nt, Artificial Sequence
  Description of Artificial Sequence: Synthetic oligonucleotide
  Antisense strand to SEQ ID NO: 974090
uugcaugaggcccuuaaac

SEQ ID NO: 974092 - RNA, 19 nt, Artificial Sequence
  Description of Artificial Sequence: Synthetic oligonucleotide
  Sense strand starting at position 327 of SEQ ID NO: 914049
cuaggauuccagugucauc

SEQ ID NO: 974093 - RNA, 19 nt, Artificial Sequence
  Description of Artificial Sequence: Synthetic oligonucleotide
  Antisense strand to SEQ ID NO: 974092
gaugacacuggaauccuag

SEQ ID NO: 974094 - RNA, 19 nt, Artificial Sequence
  Description of Artificial Sequence: Synthetic oligonucleotide
  Sense strand starting at position 3164 of SEQ ID NO: 914049
ucccaagauuccgucucaa

SEQ ID NO: 974095 - RNA, 19 nt, Artificial Sequence
  Description of Artificial Sequence: Synthetic oligonucleotide
  Antisense strand to SEQ ID NO: 974094
uugagacggaaucuuggga

SEQ ID NO: 974096 - RNA, 19 nt, Artificial Sequence
  Description of Artificial Sequence: Synthetic oligonucleotide
  Sense strand starting at position 3865 of SEQ ID NO: 914049
guauccgaugguuaucuuu

SEQ ID NO: 974097 - RNA, 19 nt, Artificial Sequence
  Description of Artificial Sequence: Synthetic oligonucleotide
  Antisense strand to SEQ ID NO: 974096
aaagauaaccaucggauac

SEQ ID NO: 974098 - RNA, 19 nt, Artificial Sequence
  Description of Artificial Sequence: Synthetic oligonucleotide
  Sense strand starting at position 453 of SEQ ID NO: 914049
ucuguauugcaugacuguu

SEQ ID NO: 974099 - RNA, 19 nt, Artificial Sequence
  Description of Artificial Sequence: Synthetic oligonucleotide
  Antisense strand to SEQ ID NO: 974098
aacagucaugcaauacaga

SEQ ID NO: 974100 - RNA, 19 nt, Artificial Sequence
  Description of Artificial Sequence: Synthetic oligonucleotide
  Sense strand starting at position 289 of SEQ ID NO: 914049
agaauaaacuggcaauaaa

SEQ ID NO: 974101 - RNA, 19 nt, Artificial Sequence
  Description of Artificial Sequence: Synthetic oligonucleotide
  Antisense strand to SEQ ID NO: 974100
uuuauugccaguuuauucu

SEQ ID NO: 974102 - RNA, 19 nt, Artificial Sequence
  Description of Artificial Sequence: Synthetic oligonucleotide
  Sense strand starting at position 3677 of SEQ ID NO: 914049
auaguuaugaugugugggu

SEQ ID NO: 974103 - RNA, 19 nt, Artificial Sequence
  Description of Artificial Sequence: Synthetic oligonucleotide
  Antisense strand to SEQ ID NO: 974102
acccacacaucauaacuau

SEQ ID NO: 974104 - RNA, 19 nt, Artificial Sequence
  Description of Artificial Sequence: Synthetic oligonucleotide
  Sense strand starting at position 3862 of SEQ ID NO: 914049
ccaguauccgaugguuauc

SEQ ID NO: 974105 - RNA, 19 nt, Artificial Sequence
  Description of Artificial Sequence: Synthetic oligonucleotide
  Antisense strand to SEQ ID NO: 974104
gauaaccaucggauacugg

SEQ ID NO: 974106 - RNA, 19 nt, Artificial Sequence
  Description of Artificial Sequence: Synthetic oligonucleotide
  Sense strand starting at position 3861 of SEQ ID NO: 914049
uccaguauccgaugguuau

SEQ ID NO: 974107 - RNA, 19 nt, Artificial Sequence
  Description of Artificial Sequence: Synthetic oligonucleotide
  Antisense strand to SEQ ID NO: 974106
auaaccaucggauacugga

SEQ ID NO: 974108 - RNA, 19 nt, Artificial Sequence
  Description of Artificial Sequence: Synthetic oligonucleotide
  Sense strand starting at position 445 of SEQ ID NO: 914049
acuguaguucuguauugca

SEQ ID NO: 974109 - RNA, 19 nt, Artificial Sequence
  Description of Artificial Sequence: Synthetic oligonucleotide
  Antisense strand to SEQ ID NO: 974108
ugcaauacagaacuacagu

SEQ ID NO: 974110 - RNA, 19 nt, Artificial Sequence
  Description of Artificial Sequence: Synthetic oligonucleotide
  Sense strand starting at position 3787 of SEQ ID NO: 914049
ugugaagguugguugcaua

SEQ ID NO: 974111 - RNA, 19 nt, Artificial Sequence
  Description of Artificial Sequence: Synthetic oligonucleotide
  Antisense strand to SEQ ID NO: 974110
uaugcaaccaaccuucaca

SEQ ID NO: 974112 - RNA, 19 nt, Artificial Sequence
  Description of Artificial Sequence: Synthetic oligonucleotide
  Sense strand starting at position 3786 of SEQ ID NO: 914049
augugaagguugguugcau

SEQ ID NO: 974113 - RNA, 19 nt, Artificial Sequence
  Description of Artificial Sequence: Synthetic oligonucleotide
  Antisense strand to SEQ ID NO: 974112
augcaaccaaccuucacau

SEQ ID NO: 974114 - RNA, 19 nt, Artificial Sequence
  Description of Artificial Sequence: Synthetic oligonucleotide
  Sense strand starting at position 3057 of SEQ ID NO: 914049
ggcggaucacccggucaga

SEQ ID NO: 974115 - RNA, 19 nt, Artificial Sequence
  Description of Artificial Sequence: Synthetic oligonucleotide
  Antisense strand to SEQ ID NO: 974114
ucugaccgggugauccgcc

SEQ ID NO: 974116 - RNA, 19 nt, Artificial Sequence
  Description of Artificial Sequence: Synthetic oligonucleotide
  Sense strand starting at position 440 of SEQ ID NO: 914049
uucugacuguaguucugua

SEQ ID NO: 974117 - RNA, 19 nt, Artificial Sequence
  Description of Artificial Sequence: Synthetic oligonucleotide
  Antisense strand to SEQ ID NO: 974116
uacagaacuacagucagaa

SEQ ID NO: 974118 - RNA, 19 nt, Artificial Sequence
  Description of Artificial Sequence: Synthetic oligonucleotide
  Sense strand starting at position 178 of SEQ ID NO: 914049
augaucuucuauggagaua

SEQ ID NO: 974119 - RNA, 19 nt, Artificial Sequence
  Description of Artificial Sequence: Synthetic oligonucleotide
  Antisense strand to SEQ ID NO: 974118
uaucuccauagaagaucau

SEQ ID NO: 974120 - RNA, 19 nt, Artificial Sequence
  Description of Artificial Sequence: Synthetic oligonucleotide
  Sense strand starting at position 2411 of SEQ ID NO: 914049
acuaguuagucccaaauua

SEQ ID NO: 974121 - RNA, 19 nt, Artificial Sequence
  Description of Artificial Sequence: Synthetic oligonucleotide
  Antisense strand to SEQ ID NO: 974120
uaauuugggacuaacuagu

SEQ ID NO: 974122 - RNA, 19 nt, Artificial Sequence
  Description of Artificial Sequence: Synthetic oligonucleotide
  Sense strand starting at position 80 of SEQ ID NO: 914049
agccaaaguuaaugaauua

SEQ ID NO: 974123 - RNA, 19 nt, Artificial Sequence
  Description of Artificial Sequence: Synthetic oligonucleotide
  Antisense strand to SEQ ID NO: 974122
uaauucauuaacuuuggcu

SEQ ID NO: 974124 - RNA, 19 nt, Artificial Sequence
  Description of Artificial Sequence: Synthetic oligonucleotide
  Sense strand starting at position 798 of SEQ ID NO: 914049
cgaagcacuuaguauaaca

SEQ ID NO: 974125 - RNA, 19 nt, Artificial Sequence
  Description of Artificial Sequence: Synthetic oligonucleotide
  Antisense strand to SEQ ID NO: 974124
uguuauacuaagugcuucg

SEQ ID NO: 974126 - RNA, 19 nt, Artificial Sequence
  Description of Artificial Sequence: Synthetic oligonucleotide
  Sense strand starting at position 1060 of SEQ ID NO: 914049
uggucugacucccacuauu

SEQ ID NO: 974127 - RNA, 19 nt, Artificial Sequence
  Description of Artificial Sequence: Synthetic oligonucleotide
  Antisense strand to SEQ ID NO: 974126
aauagugggagucagacca

SEQ ID NO: 974128 - RNA, 19 nt, Artificial Sequence
  Description of Artificial Sequence: Synthetic oligonucleotide
  Sense strand starting at position 118 of SEQ ID NO: 914049
cugccauucuccuguauuu

SEQ ID NO: 974129 - RNA, 19 nt, Artificial Sequence
  Description of Artificial Sequence: Synthetic oligonucleotide
  Antisense strand to SEQ ID NO: 974128
aaauacaggagaauggcag

SEQ ID NO: 974130 - RNA, 19 nt, Artificial Sequence
  Description of Artificial Sequence: Synthetic oligonucleotide
  Sense strand starting at position 3297 of SEQ ID NO: 914049
ggcauauccuauuagcuag

SEQ ID NO: 974131 - RNA, 19 nt, Artificial Sequence
  Description of Artificial Sequence: Synthetic oligonucleotide
  Antisense strand to SEQ ID NO: 974130
cuagcuaauaggauaugcc

SEQ ID NO: 974132 - RNA, 19 nt, Artificial Sequence
  Description of Artificial Sequence: Synthetic oligonucleotide
  Sense strand starting at position 737 of SEQ ID NO: 914049
uguugugacuggugggaau

SEQ ID NO: 974133 - RNA, 19 nt, Artificial Sequence
  Description of Artificial Sequence: Synthetic oligonucleotide
  Antisense strand to SEQ ID NO: 974132
auucccaccagucacaaca

SEQ ID NO: 974134 - RNA, 19 nt, Artificial Sequence
  Description of Artificial Sequence: Synthetic oligonucleotide
  Sense strand starting at position 3859 of SEQ ID NO: 914049
aguccaguauccgaugguu

SEQ ID NO: 974135 - RNA, 19 nt, Artificial Sequence
  Description of Artificial Sequence: Synthetic oligonucleotide
  Antisense strand to SEQ ID NO: 974134
aaccaucggauacuggacu

SEQ ID NO: 974136 - RNA, 19 nt, Artificial Sequence
  Description of Artificial Sequence: Synthetic oligonucleotide
  Sense strand starting at position 3391 of SEQ ID NO: 914050
ggaauuagauaggcauauc

SEQ ID NO: 974137 - RNA, 19 nt, Artificial Sequence
  Description of Artificial Sequence: Synthetic oligonucleotide
  Antisense strand to SEQ ID NO: 974136
gauaugccuaucuaauucc

SEQ ID NO: 974138 - RNA, 19 nt, Artificial Sequence
  Description of Artificial Sequence: Synthetic oligonucleotide
  Sense strand starting at position 3017 of SEQ ID NO: 914050
gaggcugagcuggauagau

SEQ ID NO: 974139 - RNA, 19 nt, Artificial Sequence
  Description of Artificial Sequence: Synthetic oligonucleotide
  Antisense strand to SEQ ID NO: 974138
aucuauccagcucagccuc

SEQ ID NO: 974140 - RNA, 19 nt, Artificial Sequence
  Description of Artificial Sequence: Synthetic oligonucleotide
  Sense strand starting at position 3019 of SEQ ID NO: 914050
ggcugagcuggauagauca

SEQ ID NO: 974141 - RNA, 19 nt, Artificial Sequence
  Description of Artificial Sequence: Synthetic oligonucleotide
  Antisense strand to SEQ ID NO: 974140
ugaucuauccagcucagcc

SEQ ID NO: 974142 - RNA, 19 nt, Artificial Sequence
  Description of Artificial Sequence: Synthetic oligonucleotide
  Sense strand starting at position 3749 of SEQ ID NO: 914050
guaagagacugaguaaagu

SEQ ID NO: 974143 - RNA, 19 nt, Artificial Sequence
  Description of Artificial Sequence: Synthetic oligonucleotide
  Antisense strand to SEQ ID NO: 974142
acuuuacucagucucuuac

SEQ ID NO: 974144 - RNA, 19 nt, Artificial Sequence
  Description of Artificial Sequence: Synthetic oligonucleotide
  Sense strand starting at position 3379 of SEQ ID NO: 914050
agugacucaaguggaauua

SEQ ID NO: 974145 - RNA, 19 nt, Artificial Sequence
  Description of Artificial Sequence: Synthetic oligonucleotide
  Antisense strand to SEQ ID NO: 974144
uaauuccacuugagucacu

SEQ ID NO: 974146 - RNA, 19 nt, Artificial Sequence
  Description of Artificial Sequence: Synthetic oligonucleotide
  Sense strand starting at position 2864 of SEQ ID NO: 914050
uuugguaaagcucauuaca

SEQ ID NO: 974147 - RNA, 19 nt, Artificial Sequence
  Description of Artificial Sequence: Synthetic oligonucleotide
  Antisense strand to SEQ ID NO: 974146
uguaaugagcuuuaccaaa

SEQ ID NO: 974148 - RNA, 19 nt, Artificial Sequence
  Description of Artificial Sequence: Synthetic oligonucleotide
  Sense strand starting at position 3678 of SEQ ID NO: 914050
cagcaauaugaagguauau

SEQ ID NO: 974149 - RNA, 19 nt, Artificial Sequence
  Description of Artificial Sequence: Synthetic oligonucleotide
  Antisense strand to SEQ ID NO: 974148
auauaccuucauauugcug

SEQ ID NO: 974150 - RNA, 19 nt, Artificial Sequence
  Description of Artificial Sequence: Synthetic oligonucleotide
  Sense strand starting at position 3165 of SEQ ID NO: 914050
ggaucacccggucagaagu

SEQ ID NO: 974151 - RNA, 19 nt, Artificial Sequence
  Description of Artificial Sequence: Synthetic oligonucleotide
  Antisense strand to SEQ ID NO: 974150
acuucugaccgggugaucc

SEQ ID NO: 974152 - RNA, 19 nt, Artificial Sequence
  Description of Artificial Sequence: Synthetic oligonucleotide
  Sense strand starting at position 3347 of SEQ ID NO: 914050
gauuaugagcccuagucau

SEQ ID NO: 974153 - RNA, 19 nt, Artificial Sequence
  Description of Artificial Sequence: Synthetic oligonucleotide
  Antisense strand to SEQ ID NO: 974152
augacuagggcucauaauc

SEQ ID NO: 974154 - RNA, 19 nt, Artificial Sequence
  Description of Artificial Sequence: Synthetic oligonucleotide
  Sense strand starting at position 2866 of SEQ ID NO: 914050
ugguaaagcucauuacaaa

SEQ ID NO: 974155 - RNA, 19 nt, Artificial Sequence
  Description of Artificial Sequence: Synthetic oligonucleotide
  Antisense strand to SEQ ID NO: 974154
uuuguaaugagcuuuacca

SEQ ID NO: 974156 - RNA, 19 nt, Artificial Sequence
  Description of Artificial Sequence: Synthetic oligonucleotide
  Sense strand starting at position 1038 of SEQ ID NO: 914050
cuagauagcuaggcaugaa

SEQ ID NO: 974157 - RNA, 19 nt, Artificial Sequence
  Description of Artificial Sequence: Synthetic oligonucleotide
  Antisense strand to SEQ ID NO: 974156
uucaugccuagcuaucuag

SEQ ID NO: 974158 - RNA, 19 nt, Artificial Sequence
  Description of Artificial Sequence: Synthetic oligonucleotide
  Sense strand starting at position 494 of SEQ ID NO: 914050
gaagaagccguccaauucu

SEQ ID NO: 974159 - RNA, 19 nt, Artificial Sequence
  Description of Artificial Sequence: Synthetic oligonucleotide
  Antisense strand to SEQ ID NO: 974158
agaauuggacggcuucuuc

SEQ ID NO: 974160 - RNA, 19 nt, Artificial Sequence
  Description of Artificial Sequence: Synthetic oligonucleotide
  Sense strand starting at position 1004 of SEQ ID NO: 914050
agucuccaaugaucuagua

SEQ ID NO: 974161 - RNA, 19 nt, Artificial Sequence
  Description of Artificial Sequence: Synthetic oligonucleotide
  Antisense strand to SEQ ID NO: 974160
uacuagaucauuggagacu

SEQ ID NO: 974162 - RNA, 19 nt, Artificial Sequence
  Description of Artificial Sequence: Synthetic oligonucleotide
  Sense strand starting at position 1037 of SEQ ID NO: 914050
ucuagauagcuaggcauga

SEQ ID NO: 974163 - RNA, 19 nt, Artificial Sequence
  Description of Artificial Sequence: Synthetic oligonucleotide
  Antisense strand to SEQ ID NO: 974162
ucaugccuagcuaucuaga

SEQ ID NO: 974164 - RNA, 19 nt, Artificial Sequence
  Description of Artificial Sequence: Synthetic oligonucleotide
  Sense strand starting at position 2341 of SEQ ID NO: 914050
gcgcgaaggccggauuuca

SEQ ID NO: 974165 - RNA, 19 nt, Artificial Sequence
  Description of Artificial Sequence: Synthetic oligonucleotide
  Antisense strand to SEQ ID NO: 974164
ugaaauccggccuucgcgc

SEQ ID NO: 974166 - RNA, 19 nt, Artificial Sequence
  Description of Artificial Sequence: Synthetic oligonucleotide
  Sense strand starting at position 437 of SEQ ID NO: 914050
auuccagugucauccacaa

SEQ ID NO: 974167 - RNA, 19 nt, Artificial Sequence
  Description of Artificial Sequence: Synthetic oligonucleotide
  Antisense strand to SEQ ID NO: 974166
uuguggaugacacuggaau

SEQ ID NO: 974168 - RNA, 19 nt, Artificial Sequence
  Description of Artificial Sequence: Synthetic oligonucleotide
  Sense strand starting at position 3959 of SEQ ID NO: 914050
aguuaaguccaguauccga

SEQ ID NO: 974169 - RNA, 19 nt, Artificial Sequence
  Description of Artificial Sequence: Synthetic oligonucleotide
  Antisense strand to SEQ ID NO: 974168
ucggauacuggacuuaacu

SEQ ID NO: 974170 - RNA, 19 nt, Artificial Sequence
  Description of Artificial Sequence: Synthetic oligonucleotide
  Sense strand starting at position 324 of SEQ ID NO: 914050
guuuaagggccucaugcaa

SEQ ID NO: 974171 - RNA, 19 nt, Artificial Sequence
  Description of Artificial Sequence: Synthetic oligonucleotide
  Antisense strand to SEQ ID NO: 974170
uugcaugaggcccuuaaac

SEQ ID NO: 974172 - RNA, 19 nt, Artificial Sequence
  Description of Artificial Sequence: Synthetic oligonucleotide
  Sense strand starting at position 432 of SEQ ID NO: 914050
cuaggauuccagugucauc

SEQ ID NO: 974173 - RNA, 19 nt, Artificial Sequence
  Description of Artificial Sequence: Synthetic oligonucleotide
  Antisense strand to SEQ ID NO: 974172
gaugacacuggaauccuag

SEQ ID NO: 974174 - RNA, 19 nt, Artificial Sequence
  Description of Artificial Sequence: Synthetic oligonucleotide
  Sense strand starting at position 3269 of SEQ ID NO: 914050
ucccaagauuccgucucaa

SEQ ID NO: 974175 - RNA, 19 nt, Artificial Sequence
  Description of Artificial Sequence: Synthetic oligonucleotide
  Antisense strand to SEQ ID NO: 974174
uugagacggaaucuuggga

SEQ ID NO: 974176 - RNA, 19 nt, Artificial Sequence
  Description of Artificial Sequence: Synthetic oligonucleotide
  Sense strand starting at position 3970 of SEQ ID NO: 914050
guauccgaugguuaucuuu

SEQ ID NO: 974177 - RNA, 19 nt, Artificial Sequence
  Description of Artificial Sequence: Synthetic oligonucleotide
  Antisense strand to SEQ ID NO: 974176
aaagauaaccaucggauac

SEQ ID NO: 974178 - RNA, 19 nt, Artificial Sequence
  Description of Artificial Sequence: Synthetic oligonucleotide
  Sense strand starting at position 558 of SEQ ID NO: 914050
ucuguauugcaugacuguu

SEQ ID NO: 974179 - RNA, 19 nt, Artificial Sequence
  Description of Artificial Sequence: Synthetic oligonucleotide
  Antisense strand to SEQ ID NO: 974178
aacagucaugcaauacaga

SEQ ID NO: 974180 - RNA, 19 nt, Artificial Sequence
  Description of Artificial Sequence: Synthetic oligonucleotide
  Sense strand starting at position 394 of SEQ ID NO: 914050
agaauaaacuggcaauaaa

SEQ ID NO: 974181 - RNA, 19 nt, Artificial Sequence
  Description of Artificial Sequence: Synthetic oligonucleotide
  Antisense strand to SEQ ID NO: 974180
uuuauugccaguuuauucu

SEQ ID NO: 974182 - RNA, 19 nt, Artificial Sequence
  Description of Artificial Sequence: Synthetic oligonucleotide
  Sense strand starting at position 3782 of SEQ ID NO: 914050
auaguuaugaugugugggu

SEQ ID NO: 974183 - RNA, 19 nt, Artificial Sequence
  Description of Artificial Sequence: Synthetic oligonucleotide
  Antisense strand to SEQ ID NO: 974182
acccacacaucauaacuau

SEQ ID NO: 974184 - RNA, 19 nt, Artificial Sequence
  Description of Artificial Sequence: Synthetic oligonucleotide
  Sense strand starting at position 3967 of SEQ ID NO: 914050
ccaguauccgaugguuauc

SEQ ID NO: 974185 - RNA, 19 nt, Artificial Sequence
  Description of Artificial Sequence: Synthetic oligonucleotide
  Antisense strand to SEQ ID NO: 974184
gauaaccaucggauacugg

SEQ ID NO: 974186 - RNA, 19 nt, Artificial Sequence
  Description of Artificial Sequence: Synthetic oligonucleotide
  Sense strand starting at position 3966 of SEQ ID NO: 914050
uccaguauccgaugguuau

SEQ ID NO: 974187 - RNA, 19 nt, Artificial Sequence
  Description of Artificial Sequence: Synthetic oligonucleotide
  Antisense strand to SEQ ID NO: 974186
auaaccaucggauacugga

SEQ ID NO: 974188 - RNA, 19 nt, Artificial Sequence
  Description of Artificial Sequence: Synthetic oligonucleotide
  Sense strand starting at position 550 of SEQ ID NO: 914050
acuguaguucuguauugca

SEQ ID NO: 974189 - RNA, 19 nt, Artificial Sequence
  Description of Artificial Sequence: Synthetic oligonucleotide
  Antisense strand to SEQ ID NO: 974188
ugcaauacagaacuacagu

SEQ ID NO: 974190 - RNA, 19 nt, Artificial Sequence
  Description of Artificial Sequence: Synthetic oligonucleotide
  Sense strand starting at position 3892 of SEQ ID NO: 914050
ugugaagguugguugcaua

SEQ ID NO: 974191 - RNA, 19 nt, Artificial Sequence
  Description of Artificial Sequence: Synthetic oligonucleotide
  Antisense strand to SEQ ID NO: 974190
uaugcaaccaaccuucaca

SEQ ID NO: 974192 - RNA, 19 nt, Artificial Sequence
  Description of Artificial Sequence: Synthetic oligonucleotide
  Sense strand starting at position 3891 of SEQ ID NO: 914050
augugaagguugguugcau

SEQ ID NO: 974193 - RNA, 19 nt, Artificial Sequence
  Description of Artificial Sequence: Synthetic oligonucleotide
  Antisense strand to SEQ ID NO: 974192
augcaaccaaccuucacau

SEQ ID NO: 974194 - RNA, 19 nt, Artificial Sequence
  Description of Artificial Sequence: Synthetic oligonucleotide
  Sense strand starting at position 3162 of SEQ ID NO: 914050
ggcggaucacccggucaga

SEQ ID NO: 974195 - RNA, 19 nt, Artificial Sequence
  Description of Artificial Sequence: Synthetic oligonucleotide
  Antisense strand to SEQ ID NO: 974194
ucugaccgggugauccgcc

SEQ ID NO: 974196 - RNA, 19 nt, Artificial Sequence
  Description of Artificial Sequence: Synthetic oligonucleotide
  Sense strand starting at position 545 of SEQ ID NO: 914050
uucugacuguaguucugua

SEQ ID NO: 974197 - RNA, 19 nt, Artificial Sequence
  Description of Artificial Sequence: Synthetic oligonucleotide
  Antisense strand to SEQ ID NO: 974196
uacagaacuacagucagaa

SEQ ID NO: 974198 - RNA, 19 nt, Artificial Sequence
  Description of Artificial Sequence: Synthetic oligonucleotide
  Sense strand starting at position 283 of SEQ ID NO: 914050
augaucuucuauggagaua

SEQ ID NO: 974199 - RNA, 19 nt, Artificial Sequence
  Description of Artificial Sequence: Synthetic oligonucleotide
  Antisense strand to SEQ ID NO: 974198
uaucuccauagaagaucau

SEQ ID NO: 974200 - RNA, 19 nt, Artificial Sequence
  Description of Artificial Sequence: Synthetic oligonucleotide
  Sense strand starting at position 2516 of SEQ ID NO: 914050
acuaguuagucccaaauua

SEQ ID NO: 974201 - RNA, 19 nt, Artificial Sequence
  Description of Artificial Sequence: Synthetic oligonucleotide
  Antisense strand to SEQ ID NO: 974200
uaauuugggacuaacuagu

SEQ ID NO: 974202 - RNA, 19 nt, Artificial Sequence
  Description of Artificial Sequence: Synthetic oligonucleotide
  Sense strand starting at position 185 of SEQ ID NO: 914050
agccaaaguuaaugaauua

SEQ ID NO: 974203 - RNA, 19 nt, Artificial Sequence
  Description of Artificial Sequence: Synthetic oligonucleotide
  Antisense strand to SEQ ID NO: 974202
uaauucauuaacuuuggcu

SEQ ID NO: 974204 - RNA, 19 nt, Artificial Sequence
  Description of Artificial Sequence: Synthetic oligonucleotide
  Sense strand starting at position 903 of SEQ ID NO: 914050
cgaagcacuuaguauaaca

SEQ ID NO: 974205 - RNA, 19 nt, Artificial Sequence
  Description of Artificial Sequence: Synthetic oligonucleotide
  Antisense strand to SEQ ID NO: 974204
uguuauacuaagugcuucg

SEQ ID NO: 974206 - RNA, 19 nt, Artificial Sequence
  Description of Artificial Sequence: Synthetic oligonucleotide
  Sense strand starting at position 1165 of SEQ ID NO: 914050
uggucugacucccacuauu

SEQ ID NO: 974207 - RNA, 19 nt, Artificial Sequence
  Description of Artificial Sequence: Synthetic oligonucleotide
  Antisense strand to SEQ ID NO: 974206
aauagugggagucagacca

SEQ ID NO: 974208 - RNA, 19 nt, Artificial Sequence
  Description of Artificial Sequence: Synthetic oligonucleotide
  Sense strand starting at position 223 of SEQ ID NO: 914050
cugccauucuccuguauuu

SEQ ID NO: 974209 - RNA, 19 nt, Artificial Sequence
  Description of Artificial Sequence: Synthetic oligonucleotide
  Antisense strand to SEQ ID NO: 974208
aaauacaggagaauggcag

SEQ ID NO: 974210 - RNA, 19 nt, Artificial Sequence
  Description of Artificial Sequence: Synthetic oligonucleotide
  Sense strand starting at position 3402 of SEQ ID NO: 914050
ggcauauccuauuagcuag

SEQ ID NO: 974211 - RNA, 19 nt, Artificial Sequence
  Description of Artificial Sequence: Synthetic oligonucleotide
  Antisense strand to SEQ ID NO: 974210
cuagcuaauaggauaugcc

SEQ ID NO: 974212 - RNA, 19 nt, Artificial Sequence
  Description of Artificial Sequence: Synthetic oligonucleotide
  Sense strand starting at position 842 of SEQ ID NO: 914050
uguugugacuggugggaau

SEQ ID NO: 974213 - RNA, 19 nt, Artificial Sequence
  Description of Artificial Sequence: Synthetic oligonucleotide
  Antisense strand to SEQ ID NO: 974212
auucccaccagucacaaca

SEQ ID NO: 974214 - RNA, 19 nt, Artificial Sequence
  Description of Artificial Sequence: Synthetic oligonucleotide
  Sense strand starting at position 3964 of SEQ ID NO: 914050
aguccaguauccgaugguu

SEQ ID NO: 974215 - RNA, 19 nt, Artificial Sequence
  Description of Artificial Sequence: Synthetic oligonucleotide
  Antisense strand to SEQ ID NO: 974214
aaccaucggauacuggacu

SEQ ID NO: 974216 - RNA, 19 nt, Artificial Sequence
  Description of Artificial Sequence: Synthetic oligonucleotide
  Sense strand starting at position 3083 of SEQ ID NO: 914051
ugguucugaaugggauaga

SEQ ID NO: 974217 - RNA, 19 nt, Artificial Sequence
  Description of Artificial Sequence: Synthetic oligonucleotide
  Antisense strand to SEQ ID NO: 974216
ucuaucccauucagaacca

SEQ ID NO: 974218 - RNA, 19 nt, Artificial Sequence
  Description of Artificial Sequence: Synthetic oligonucleotide
  Sense strand starting at position 1749 of SEQ ID NO: 914051
gauuccauuccagagcuga

SEQ ID NO: 974219 - RNA, 19 nt, Artificial Sequence
  Description of Artificial Sequence: Synthetic oligonucleotide
  Antisense strand to SEQ ID NO: 974218
ucagcucuggaauggaauc

SEQ ID NO: 974220 - RNA, 19 nt, Artificial Sequence
  Description of Artificial Sequence: Synthetic oligonucleotide
  Sense strand starting at position 3092 of SEQ ID NO: 914051
augggauagacaugagugu

SEQ ID NO: 974221 - RNA, 19 nt, Artificial Sequence
  Description of Artificial Sequence: Synthetic oligonucleotide
  Antisense strand to SEQ ID NO: 974220
acacucaugucuaucccau

SEQ ID NO: 974222 - RNA, 19 nt, Artificial Sequence
  Description of Artificial Sequence: Synthetic oligonucleotide
  Sense strand starting at position 467 of SEQ ID NO: 914051
ggaacuaugucuucuauaa

SEQ ID NO: 974223 - RNA, 19 nt, Artificial Sequence
  Description of Artificial Sequence: Synthetic oligonucleotide
  Antisense strand to SEQ ID NO: 974222
uuauagaagacauaguucc

SEQ ID NO: 974224 - RNA, 19 nt, Artificial Sequence
  Description of Artificial Sequence: Synthetic oligonucleotide
  Sense strand starting at position 745 of SEQ ID NO: 914051
agaaacuugcauugaccau

SEQ ID NO: 974225 - RNA, 19 nt, Artificial Sequence
  Description of Artificial Sequence: Synthetic oligonucleotide
  Antisense strand to SEQ ID NO: 974224
auggucaaugcaaguuucu

SEQ ID NO: 974226 - RNA, 19 nt, Artificial Sequence
  Description of Artificial Sequence: Synthetic oligonucleotide
  Sense strand starting at position 2987 of SEQ ID NO: 914051
cuagcauuggcauaaacca

SEQ ID NO: 974227 - RNA, 19 nt, Artificial Sequence
  Description of Artificial Sequence: Synthetic oligonucleotide
  Antisense strand to SEQ ID NO: 974226
ugguuuaugccaaugcuag

SEQ ID NO: 974228 - RNA, 19 nt, Artificial Sequence
  Description of Artificial Sequence: Synthetic oligonucleotide
  Sense strand starting at position 334 of SEQ ID NO: 914051
gagacauguggcuaaaguc

SEQ ID NO: 974229 - RNA, 19 nt, Artificial Sequence
  Description of Artificial Sequence: Synthetic oligonucleotide
  Antisense strand to SEQ ID NO: 974228
gacuuuagccacaugucuc

SEQ ID NO: 974230 - RNA, 19 nt, Artificial Sequence
  Description of Artificial Sequence: Synthetic oligonucleotide
  Sense strand starting at position 330 of SEQ ID NO: 914051
auaugagacauguggcuaa

SEQ ID NO: 974231 - RNA, 19 nt, Artificial Sequence
  Description of Artificial Sequence: Synthetic oligonucleotide
  Antisense strand to SEQ ID NO: 974230
uuagccacaugucucauau

SEQ ID NO: 974232 - RNA, 19 nt, Artificial Sequence
  Description of Artificial Sequence: Synthetic oligonucleotide
  Sense strand starting at position 3364 of SEQ ID NO: 914051
acuguuucugaugacaguu

SEQ ID NO: 974233 - RNA, 19 nt, Artificial Sequence
  Description of Artificial Sequence: Synthetic oligonucleotide
  Antisense strand to SEQ ID NO: 974232
aacugucaucagaaacagu

SEQ ID NO: 974234 - RNA, 19 nt, Artificial Sequence
  Description of Artificial Sequence: Synthetic oligonucleotide
  Sense strand starting at position 2385 of SEQ ID NO: 914051
uccgaauuccucuggagag

SEQ ID NO: 974235 - RNA, 19 nt, Artificial Sequence
  Description of Artificial Sequence: Synthetic oligonucleotide
  Antisense strand to SEQ ID NO: 974234
cucuccagaggaauucgga

SEQ ID NO: 974236 - RNA, 19 nt, Artificial Sequence
  Description of Artificial Sequence: Synthetic oligonucleotide
  Sense strand starting at position 1426 of SEQ ID NO: 914051
auaagagggcuccguaaga

SEQ ID NO: 974237 - RNA, 19 nt, Artificial Sequence
  Description of Artificial Sequence: Synthetic oligonucleotide
  Antisense strand to SEQ ID NO: 974236
ucuuacggagcccucuuau

SEQ ID NO: 974238 - RNA, 19 nt, Artificial Sequence
  Description of Artificial Sequence: Synthetic oligonucleotide
  Sense strand starting at position 465 of SEQ ID NO: 914051
uuggaacuaugucuucuau

SEQ ID NO: 974239 - RNA, 19 nt, Artificial Sequence
  Description of Artificial Sequence: Synthetic oligonucleotide
  Antisense strand to SEQ ID NO: 974238
auagaagacauaguuccaa

SEQ ID NO: 974240 - RNA, 19 nt, Artificial Sequence
  Description of Artificial Sequence: Synthetic oligonucleotide
  Sense strand starting at position 1197 of SEQ ID NO: 914051
aguacauugcccuagugau

SEQ ID NO: 974241 - RNA, 19 nt, Artificial Sequence
  Description of Artificial Sequence: Synthetic oligonucleotide
  Antisense strand to SEQ ID NO: 974240
aucacuagggcaauguacu

SEQ ID NO: 974242 - RNA, 19 nt, Artificial Sequence
  Description of Artificial Sequence: Synthetic oligonucleotide
  Sense strand starting at position 333 of SEQ ID NO: 914051
ugagacauguggcuaaagu

SEQ ID NO: 974243 - RNA, 19 nt, Artificial Sequence
  Description of Artificial Sequence: Synthetic oligonucleotide
  Antisense strand to SEQ ID NO: 974242
acuuuagccacaugucuca

SEQ ID NO: 974244 - RNA, 19 nt, Artificial Sequence
  Description of Artificial Sequence: Synthetic oligonucleotide
  Sense strand starting at position 1046 of SEQ ID NO: 914051
agaaucacgucuuccacua

SEQ ID NO: 974245 - RNA, 19 nt, Artificial Sequence
  Description of Artificial Sequence: Synthetic oligonucleotide
  Antisense strand to SEQ ID NO: 974244
uaguggaagacgugauucu

SEQ ID NO: 974246 - RNA, 19 nt, Artificial Sequence
  Description of Artificial Sequence: Synthetic oligonucleotide
  Sense strand starting at position 947 of SEQ ID NO: 914051
aucuuaacaugucugguau

SEQ ID NO: 974247 - RNA, 19 nt, Artificial Sequence
  Description of Artificial Sequence: Synthetic oligonucleotide
  Antisense strand to SEQ ID NO: 974246
auaccagacauguuaagau

SEQ ID NO: 974248 - RNA, 19 nt, Artificial Sequence
  Description of Artificial Sequence: Synthetic oligonucleotide
  Sense strand starting at position 3467 of SEQ ID NO: 914051
cugagaaguuagccaucuu

SEQ ID NO: 974249 - RNA, 19 nt, Artificial Sequence
  Description of Artificial Sequence: Synthetic oligonucleotide
  Antisense strand to SEQ ID NO: 974248
aagauggcuaacuucucag

SEQ ID NO: 974250 - RNA, 19 nt, Artificial Sequence
  Description of Artificial Sequence: Synthetic oligonucleotide
  Sense strand starting at position 822 of SEQ ID NO: 914051
cauguugaguaucuguaaa

SEQ ID NO: 974251 - RNA, 19 nt, Artificial Sequence
  Description of Artificial Sequence: Synthetic oligonucleotide
  Antisense strand to SEQ ID NO: 974250
uuuacagauacucaacaug

SEQ ID NO: 974252 - RNA, 19 nt, Artificial Sequence
  Description of Artificial Sequence: Synthetic oligonucleotide
  Sense strand starting at position 778 of SEQ ID NO: 914051
gcaaauacaugugucaacu

SEQ ID NO: 974253 - RNA, 19 nt, Artificial Sequence
  Description of Artificial Sequence: Synthetic oligonucleotide
  Antisense strand to SEQ ID NO: 974252
aguugacacauguauuugc

SEQ ID NO: 974254 - RNA, 19 nt, Artificial Sequence
  Description of Artificial Sequence: Synthetic oligonucleotide
  Sense strand starting at position 3302 of SEQ ID NO: 914051
ugaccuuucucaguuucua

SEQ ID NO: 974255 - RNA, 19 nt, Artificial Sequence
  Description of Artificial Sequence: Synthetic oligonucleotide
  Antisense strand to SEQ ID NO: 974254
uagaaacugagaaagguca

SEQ ID NO: 974256 - RNA, 19 nt, Artificial Sequence
  Description of Artificial Sequence: Synthetic oligonucleotide
  Sense strand starting at position 3454 of SEQ ID NO: 914051
ucagccuucucuucugaga

SEQ ID NO: 974257 - RNA, 19 nt, Artificial Sequence
  Description of Artificial Sequence: Synthetic oligonucleotide
  Antisense strand to SEQ ID NO: 974256
ucucagaagagaaggcuga

SEQ ID NO: 974258 - RNA, 19 nt, Artificial Sequence
  Description of Artificial Sequence: Synthetic oligonucleotide
  Sense strand starting at position 2984 of SEQ ID NO: 914051
ggucuagcauuggcauaaa

SEQ ID NO: 974259 - RNA, 19 nt, Artificial Sequence
  Description of Artificial Sequence: Synthetic oligonucleotide
  Antisense strand to SEQ ID NO: 974258
uuuaugccaaugcuagacc

SEQ ID NO: 974260 - RNA, 19 nt, Artificial Sequence
  Description of Artificial Sequence: Synthetic oligonucleotide
  Sense strand starting at position 948 of SEQ ID NO: 914051
ucuuaacaugucugguauu

SEQ ID NO: 974261 - RNA, 19 nt, Artificial Sequence
  Description of Artificial Sequence: Synthetic oligonucleotide
  Antisense strand to SEQ ID NO: 974260
aauaccagacauguuaaga

SEQ ID NO: 974262 - RNA, 19 nt, Artificial Sequence
  Description of Artificial Sequence: Synthetic oligonucleotide
  Sense strand starting at position 2464 of SEQ ID NO: 914051
acucuuugacagugucuau

SEQ ID NO: 974263 - RNA, 19 nt, Artificial Sequence
  Description of Artificial Sequence: Synthetic oligonucleotide
  Antisense strand to SEQ ID NO: 974262
auagacacugucaaagagu

SEQ ID NO: 974264 - RNA, 19 nt, Artificial Sequence
  Description of Artificial Sequence: Synthetic oligonucleotide
  Sense strand starting at position 2983 of SEQ ID NO: 914051
aggucuagcauuggcauaa

SEQ ID NO: 974265 - RNA, 19 nt, Artificial Sequence
  Description of Artificial Sequence: Synthetic oligonucleotide
  Antisense strand to SEQ ID NO: 974264
uuaugccaaugcuagaccu

SEQ ID NO: 974266 - RNA, 19 nt, Artificial Sequence
  Description of Artificial Sequence: Synthetic oligonucleotide
  Sense strand starting at position 1207 of SEQ ID NO: 914051
ccuagugaucuuugauguu

SEQ ID NO: 974267 - RNA, 19 nt, Artificial Sequence
  Description of Artificial Sequence: Synthetic oligonucleotide
  Antisense strand to SEQ ID NO: 974266
aacaucaaagaucacuagg

SEQ ID NO: 974268 - RNA, 19 nt, Artificial Sequence
  Description of Artificial Sequence: Synthetic oligonucleotide
  Sense strand starting at position 1203 of SEQ ID NO: 914051
uugcccuagugaucuuuga

SEQ ID NO: 974269 - RNA, 19 nt, Artificial Sequence
  Description of Artificial Sequence: Synthetic oligonucleotide
  Antisense strand to SEQ ID NO: 974268
ucaaagaucacuagggcaa

SEQ ID NO: 974270 - RNA, 19 nt, Artificial Sequence
  Description of Artificial Sequence: Synthetic oligonucleotide
  Sense strand starting at position 3299 of SEQ ID NO: 914051
gguugaccuuucucaguuu

SEQ ID NO: 974271 - RNA, 19 nt, Artificial Sequence
  Description of Artificial Sequence: Synthetic oligonucleotide
  Antisense strand to SEQ ID NO: 974270
aaacugagaaaggucaacc

SEQ ID NO: 974272 - RNA, 19 nt, Artificial Sequence
  Description of Artificial Sequence: Synthetic oligonucleotide
  Sense strand starting at position 2982 of SEQ ID NO: 914051
caggucuagcauuggcaua

SEQ ID NO: 974273 - RNA, 19 nt, Artificial Sequence
  Description of Artificial Sequence: Synthetic oligonucleotide
  Antisense strand to SEQ ID NO: 974272
uaugccaaugcuagaccug

SEQ ID NO: 974274 - RNA, 19 nt, Artificial Sequence
  Description of Artificial Sequence: Synthetic oligonucleotide
  Sense strand starting at position 775 of SEQ ID NO: 914051
guggcaaauacauguguca

SEQ ID NO: 974275 - RNA, 19 nt, Artificial Sequence
  Description of Artificial Sequence: Synthetic oligonucleotide
  Antisense strand to SEQ ID NO: 974274
ugacacauguauuugccac

SEQ ID NO: 974276 - RNA, 19 nt, Artificial Sequence
  Description of Artificial Sequence: Synthetic oligonucleotide
  Sense strand starting at position 217 of SEQ ID NO: 914051
cagcgaaucucugucucaa

SEQ ID NO: 974277 - RNA, 19 nt, Artificial Sequence
  Description of Artificial Sequence: Synthetic oligonucleotide
  Antisense strand to SEQ ID NO: 974276
uugagacagagauucgcug

SEQ ID NO: 974278 - RNA, 19 nt, Artificial Sequence
  Description of Artificial Sequence: Synthetic oligonucleotide
  Sense strand starting at position 1518 of SEQ ID NO: 914051
aggucuugcuccucugacu

SEQ ID NO: 974279 - RNA, 19 nt, Artificial Sequence
  Description of Artificial Sequence: Synthetic oligonucleotide
  Antisense strand to SEQ ID NO: 974278
agucagaggagcaagaccu

SEQ ID NO: 974280 - RNA, 19 nt, Artificial Sequence
  Description of Artificial Sequence: Synthetic oligonucleotide
  Sense strand starting at position 3921 of SEQ ID NO: 914051
gucccugaccuccguaauu

SEQ ID NO: 974281 - RNA, 19 nt, Artificial Sequence
  Description of Artificial Sequence: Synthetic oligonucleotide
  Antisense strand to SEQ ID NO: 974280
aauuacggaggucagggac

SEQ ID NO: 974282 - RNA, 19 nt, Artificial Sequence
  Description of Artificial Sequence: Synthetic oligonucleotide
  Sense strand starting at position 676 of SEQ ID NO: 914051
gguuaucagugagaggaag

SEQ ID NO: 974283 - RNA, 19 nt, Artificial Sequence
  Description of Artificial Sequence: Synthetic oligonucleotide
  Antisense strand to SEQ ID NO: 974282
cuuccucucacugauaacc

SEQ ID NO: 974284 - RNA, 19 nt, Artificial Sequence
  Description of Artificial Sequence: Synthetic oligonucleotide
  Sense strand starting at position 2506 of SEQ ID NO: 914051
auuuaauccuugugcuaag

SEQ ID NO: 974285 - RNA, 19 nt, Artificial Sequence
  Description of Artificial Sequence: Synthetic oligonucleotide
  Antisense strand to SEQ ID NO: 974284
cuuagcacaaggauuaaau

SEQ ID NO: 974286 - RNA, 19 nt, Artificial Sequence
  Description of Artificial Sequence: Synthetic oligonucleotide
  Sense strand starting at position 949 of SEQ ID NO: 914051
cuuaacaugucugguauuu

SEQ ID NO: 974287 - RNA, 19 nt, Artificial Sequence
  Description of Artificial Sequence: Synthetic oligonucleotide
  Antisense strand to SEQ ID NO: 974286
aaauaccagacauguuaag

SEQ ID NO: 974288 - RNA, 19 nt, Artificial Sequence
  Description of Artificial Sequence: Synthetic oligonucleotide
  Sense strand starting at position 3459 of SEQ ID NO: 914051
cuucucuucugagaaguua

SEQ ID NO: 974289 - RNA, 19 nt, Artificial Sequence
  Description of Artificial Sequence: Synthetic oligonucleotide
  Antisense strand to SEQ ID NO: 974288
uaacuucucagaagagaag

SEQ ID NO: 974290 - RNA, 19 nt, Artificial Sequence
  Description of Artificial Sequence: Synthetic oligonucleotide
  Sense strand starting at position 3361 of SEQ ID NO: 914051
cccacuguuucugaugaca

SEQ ID NO: 974291 - RNA, 19 nt, Artificial Sequence
  Description of Artificial Sequence: Synthetic oligonucleotide
  Antisense strand to SEQ ID NO: 974290
ugucaucagaaacaguggg

SEQ ID NO: 974292 - RNA, 19 nt, Artificial Sequence
  Description of Artificial Sequence: Synthetic oligonucleotide
  Sense strand starting at position 364 of SEQ ID NO: 914051
ggaaccauguuaugacuua

SEQ ID NO: 974293 - RNA, 19 nt, Artificial Sequence
  Description of Artificial Sequence: Synthetic oligonucleotide
  Antisense strand to SEQ ID NO: 974292
uaagucauaacaugguucc

SEQ ID NO: 974294 - RNA, 19 nt, Artificial Sequence
  Description of Artificial Sequence: Synthetic oligonucleotide
  Sense strand starting at position 2386 of SEQ ID NO: 914051
ccgaauuccucuggagaga

SEQ ID NO: 974295 - RNA, 19 nt, Artificial Sequence
  Description of Artificial Sequence: Synthetic oligonucleotide
  Antisense strand to SEQ ID NO: 974294
ucucuccagaggaauucgg

SEQ ID NO: 974296 - RNA, 19 nt, Artificial Sequence
  Description of Artificial Sequence: Synthetic oligonucleotide
  Sense strand starting at position 884 of SEQ ID NO: 914052
accaccuuacgagaaguua

SEQ ID NO: 974297 - RNA, 19 nt, Artificial Sequence
  Description of Artificial Sequence: Synthetic oligonucleotide
  Antisense strand to SEQ ID NO: 974296
uaacuucucguaagguggu

SEQ ID NO: 974298 - RNA, 19 nt, Artificial Sequence
  Description of Artificial Sequence: Synthetic oligonucleotide
  Sense strand starting at position 3434 of SEQ ID NO: 914052
cugggacuccagcaauacu

SEQ ID NO: 974299 - RNA, 19 nt, Artificial Sequence
  Description of Artificial Sequence: Synthetic oligonucleotide
  Antisense strand to SEQ ID NO: 974298
aguauugcuggagucccag

SEQ ID NO: 974300 - RNA, 19 nt, Artificial Sequence
  Description of Artificial Sequence: Synthetic oligonucleotide
  Sense strand starting at position 170 of SEQ ID NO: 914052
uggguuguaaaggagugau

SEQ ID NO: 974301 - RNA, 19 nt, Artificial Sequence
  Description of Artificial Sequence: Synthetic oligonucleotide
  Antisense strand to SEQ ID NO: 974300
aucacuccuuuacaaccca

SEQ ID NO: 974302 - RNA, 19 nt, Artificial Sequence
  Description of Artificial Sequence: Synthetic oligonucleotide
  Sense strand starting at position 689 of SEQ ID NO: 914052
uccuguuaacaguacauaa

SEQ ID NO: 974303 - RNA, 19 nt, Artificial Sequence
  Description of Artificial Sequence: Synthetic oligonucleotide
  Antisense strand to SEQ ID NO: 974302
uuauguacuguuaacagga

SEQ ID NO: 974304 - RNA, 19 nt, Artificial Sequence
  Description of Artificial Sequence: Synthetic oligonucleotide
  Sense strand starting at position 3273 of SEQ ID NO: 914052
gggaacuaacccuguugga

SEQ ID NO: 974305 - RNA, 19 nt, Artificial Sequence
  Description of Artificial Sequence: Synthetic oligonucleotide
  Antisense strand to SEQ ID NO: 974304
uccaacaggguuaguuccc

SEQ ID NO: 974306 - RNA, 19 nt, Artificial Sequence
  Description of Artificial Sequence: Synthetic oligonucleotide
  Sense strand starting at position 110 of SEQ ID NO: 914052
uuuacaagucuguaaagua

SEQ ID NO: 974307 - RNA, 19 nt, Artificial Sequence
  Description of Artificial Sequence: Synthetic oligonucleotide
  Antisense strand to SEQ ID NO: 974306
uacuuuacagacuuguaaa

SEQ ID NO: 974308 - RNA, 19 nt, Artificial Sequence
  Description of Artificial Sequence: Synthetic oligonucleotide
  Sense strand starting at position 3856 of SEQ ID NO: 914052
gggugaaacaggcauuguu

SEQ ID NO: 974309 - RNA, 19 nt, Artificial Sequence
  Description of Artificial Sequence: Synthetic oligonucleotide
  Antisense strand to SEQ ID NO: 974308
aacaaugccuguuucaccc

SEQ ID NO: 974310 - RNA, 19 nt, Artificial Sequence
  Description of Artificial Sequence: Synthetic oligonucleotide
  Sense strand starting at position 173 of SEQ ID NO: 914052
guuguaaaggagugaugag

SEQ ID NO: 974311 - RNA, 19 nt, Artificial Sequence
  Description of Artificial Sequence: Synthetic oligonucleotide
  Antisense strand to SEQ ID NO: 974310
cucaucacuccuuuacaac

SEQ ID NO: 974312 - RNA, 19 nt, Artificial Sequence
  Description of Artificial Sequence: Synthetic oligonucleotide
  Sense strand starting at position 2995 of SEQ ID NO: 914052
aggacagucccacgagauu

SEQ ID NO: 974313 - RNA, 19 nt, Artificial Sequence
  Description of Artificial Sequence: Synthetic oligonucleotide
  Antisense strand to SEQ ID NO: 974312
aaucucgugggacuguccu

SEQ ID NO: 974314 - RNA, 19 nt, Artificial Sequence
  Description of Artificial Sequence: Synthetic oligonucleotide
  Sense strand starting at position 3529 of SEQ ID NO: 914052
uguccugucacagaaaggu

SEQ ID NO: 974315 - RNA, 19 nt, Artificial Sequence
  Description of Artificial Sequence: Synthetic oligonucleotide
  Antisense strand to SEQ ID NO: 974314
accuuucugugacaggaca

SEQ ID NO: 974316 - RNA, 19 nt, Artificial Sequence
  Description of Artificial Sequence: Synthetic oligonucleotide
  Sense strand starting at position 3761 of SEQ ID NO: 914052
gcaggcagauucucagaaa

SEQ ID NO: 974317 - RNA, 19 nt, Artificial Sequence
  Description of Artificial Sequence: Synthetic oligonucleotide
  Antisense strand to SEQ ID NO: 974316
uuucugagaaucugccugc

SEQ ID NO: 974318 - RNA, 19 nt, Artificial Sequence
  Description of Artificial Sequence: Synthetic oligonucleotide
  Sense strand starting at position 919 of SEQ ID NO: 914052
uaagguaggucucuaaacu

SEQ ID NO: 974319 - RNA, 19 nt, Artificial Sequence
  Description of Artificial Sequence: Synthetic oligonucleotide
  Antisense strand to SEQ ID NO: 974318
aguuuagagaccuaccuua

SEQ ID NO: 974320 - RNA, 19 nt, Artificial Sequence
  Description of Artificial Sequence: Synthetic oligonucleotide
  Sense strand starting at position 475 of SEQ ID NO: 914052
guaccaacucaucaguagu

SEQ ID NO: 974321 - RNA, 19 nt, Artificial Sequence
  Description of Artificial Sequence: Synthetic oligonucleotide
  Antisense strand to SEQ ID NO: 974320
acuacugaugaguugguac

SEQ ID NO: 974322 - RNA, 19 nt, Artificial Sequence
  Description of Artificial Sequence: Synthetic oligonucleotide
  Sense strand starting at position 2813 of SEQ ID NO: 914052
gcacgcuuugucuaauuuc

SEQ ID NO: 974323 - RNA, 19 nt, Artificial Sequence
  Description of Artificial Sequence: Synthetic oligonucleotide
  Antisense strand to SEQ ID NO: 974322
gaaauuagacaaagcgugc

SEQ ID NO: 974324 - RNA, 19 nt, Artificial Sequence
  Description of Artificial Sequence: Synthetic oligonucleotide
  Sense strand starting at position 2353 of SEQ ID NO: 914052
gguggaucccuccaagcuu

SEQ ID NO: 974325 - RNA, 19 nt, Artificial Sequence
  Description of Artificial Sequence: Synthetic oligonucleotide
  Antisense strand to SEQ ID NO: 974324
aagcuuggagggauccacc

SEQ ID NO: 974326 - RNA, 19 nt, Artificial Sequence
  Description of Artificial Sequence: Synthetic oligonucleotide
  Sense strand starting at position 2958 of SEQ ID NO: 914052
ccaguauauuucgcaugca

SEQ ID NO: 974327 - RNA, 19 nt, Artificial Sequence
  Description of Artificial Sequence: Synthetic oligonucleotide
  Antisense strand to SEQ ID NO: 974326
ugcaugcgaaauauacugg

SEQ ID NO: 974328 - RNA, 19 nt, Artificial Sequence
  Description of Artificial Sequence: Synthetic oligonucleotide
  Sense strand starting at position 563 of SEQ ID NO: 914052
ggccucauuuaacaagaua

SEQ ID NO: 974329 - RNA, 19 nt, Artificial Sequence
  Description of Artificial Sequence: Synthetic oligonucleotide
  Antisense strand to SEQ ID NO: 974328
uaucuuguuaaaugaggcc

SEQ ID NO: 974330 - RNA, 19 nt, Artificial Sequence
  Description of Artificial Sequence: Synthetic oligonucleotide
  Sense strand starting at position 616 of SEQ ID NO: 914052
uaagacggcucaguugaaa

SEQ ID NO: 974331 - RNA, 19 nt, Artificial Sequence
  Description of Artificial Sequence: Synthetic oligonucleotide
  Antisense strand to SEQ ID NO: 974330
uuucaacugagccgucuua

SEQ ID NO: 974332 - RNA, 19 nt, Artificial Sequence
  Description of Artificial Sequence: Synthetic oligonucleotide
  Sense strand starting at position 866 of SEQ ID NO: 914052
cuauucuugguccauugua

SEQ ID NO: 974333 - RNA, 19 nt, Artificial Sequence
  Description of Artificial Sequence: Synthetic oligonucleotide
  Antisense strand to SEQ ID NO: 974332
uacaauggaccaagaauag

SEQ ID NO: 974334 - RNA, 19 nt, Artificial Sequence
  Description of Artificial Sequence: Synthetic oligonucleotide
  Sense strand starting at position 2781 of SEQ ID NO: 914052
acuuauguuccaggcagag

SEQ ID NO: 974335 - RNA, 19 nt, Artificial Sequence
  Description of Artificial Sequence: Synthetic oligonucleotide
  Antisense strand to SEQ ID NO: 974334
cucugccuggaacauaagu

SEQ ID NO: 974336 - RNA, 19 nt, Artificial Sequence
  Description of Artificial Sequence: Synthetic oligonucleotide
  Sense strand starting at position 2783 of SEQ ID NO: 914052
uuauguuccaggcagagca

SEQ ID NO: 974337 - RNA, 19 nt, Artificial Sequence
  Description of Artificial Sequence: Synthetic oligonucleotide
  Antisense strand to SEQ ID NO: 974336
ugcucugccuggaacauaa

SEQ ID NO: 974338 - RNA, 19 nt, Artificial Sequence
  Description of Artificial Sequence: Synthetic oligonucleotide
  Sense strand starting at position 458 of SEQ ID NO: 914052
uuaagaucuuaggauuugu

SEQ ID NO: 974339 - RNA, 19 nt, Artificial Sequence
  Description of Artificial Sequence: Synthetic oligonucleotide
  Antisense strand to SEQ ID NO: 974338
acaaauccuaagaucuuaa

SEQ ID NO: 974340 - RNA, 19 nt, Artificial Sequence
  Description of Artificial Sequence: Synthetic oligonucleotide
  Sense strand starting at position 604 of SEQ ID NO: 914052
ugcugaguccuuuaagacg

SEQ ID NO: 974341 - RNA, 19 nt, Artificial Sequence
  Description of Artificial Sequence: Synthetic oligonucleotide
  Antisense strand to SEQ ID NO: 974340
cgucuuaaaggacucagca

SEQ ID NO: 974342 - RNA, 19 nt, Artificial Sequence
  Description of Artificial Sequence: Synthetic oligonucleotide
  Sense strand starting at position 3673 of SEQ ID NO: 914052
auuacuggcuuuguugaga

SEQ ID NO: 974343 - RNA, 19 nt, Artificial Sequence
  Description of Artificial Sequence: Synthetic oligonucleotide
  Antisense strand to SEQ ID NO: 974342
ucucaacaaagccaguaau

SEQ ID NO: 974344 - RNA, 19 nt, Artificial Sequence
  Description of Artificial Sequence: Synthetic oligonucleotide
  Sense strand starting at position 2096 of SEQ ID NO: 914052
gggcauaaggcgugacaaa

SEQ ID NO: 974345 - RNA, 19 nt, Artificial Sequence
  Description of Artificial Sequence: Synthetic oligonucleotide
  Antisense strand to SEQ ID NO: 974344
uuugucacgccuuaugccc

SEQ ID NO: 974346 - RNA, 19 nt, Artificial Sequence
  Description of Artificial Sequence: Synthetic oligonucleotide
  Sense strand starting at position 602 of SEQ ID NO: 914052
uuugcugaguccuuuaaga

SEQ ID NO: 974347 - RNA, 19 nt, Artificial Sequence
  Description of Artificial Sequence: Synthetic oligonucleotide
  Antisense strand to SEQ ID NO: 974346
ucuuaaaggacucagcaaa

SEQ ID NO: 974348 - RNA, 19 nt, Artificial Sequence
  Description of Artificial Sequence: Synthetic oligonucleotide
  Sense strand starting at position 976 of SEQ ID NO: 914052
ugcgaauuccagggcuaaa

SEQ ID NO: 974349 - RNA, 19 nt, Artificial Sequence
  Description of Artificial Sequence: Synthetic oligonucleotide
  Antisense strand to SEQ ID NO: 974348
uuuagcccuggaauucgca

SEQ ID NO: 974350 - RNA, 19 nt, Artificial Sequence
  Description of Artificial Sequence: Synthetic oligonucleotide
  Sense strand starting at position 2859 of SEQ ID NO: 914052
augcuaguauuauccuuau

SEQ ID NO: 974351 - RNA, 19 nt, Artificial Sequence
  Description of Artificial Sequence: Synthetic oligonucleotide
  Antisense strand to SEQ ID NO: 974350
auaaggauaauacuagcau

SEQ ID NO: 974352 - RNA, 19 nt, Artificial Sequence
  Description of Artificial Sequence: Synthetic oligonucleotide
  Sense strand starting at position 863 of SEQ ID NO: 914052
uuucuauucuugguccauu

SEQ ID NO: 974353 - RNA, 19 nt, Artificial Sequence
  Description of Artificial Sequence: Synthetic oligonucleotide
  Antisense strand to SEQ ID NO: 974352
aauggaccaagaauagaaa

SEQ ID NO: 974354 - RNA, 19 nt, Artificial Sequence
  Description of Artificial Sequence: Synthetic oligonucleotide
  Sense strand starting at position 577 of SEQ ID NO: 914052
agauaaagaugaggauacu

SEQ ID NO: 974355 - RNA, 19 nt, Artificial Sequence
  Description of Artificial Sequence: Synthetic oligonucleotide
  Antisense strand to SEQ ID NO: 974354
aguauccucaucuuuaucu

SEQ ID NO: 974356 - RNA, 19 nt, Artificial Sequence
  Description of Artificial Sequence: Synthetic oligonucleotide
  Sense strand starting at position 1060 of SEQ ID NO: 914052
acgcauuacuuguuauaca

SEQ ID NO: 974357 - RNA, 19 nt, Artificial Sequence
  Description of Artificial Sequence: Synthetic oligonucleotide
  Antisense strand to SEQ ID NO: 974356
uguauaacaaguaaugcgu

SEQ ID NO: 974358 - RNA, 19 nt, Artificial Sequence
  Description of Artificial Sequence: Synthetic oligonucleotide
  Sense strand starting at position 975 of SEQ ID NO: 914052
uugcgaauuccagggcuaa

SEQ ID NO: 974359 - RNA, 19 nt, Artificial Sequence
  Description of Artificial Sequence: Synthetic oligonucleotide
  Antisense strand to SEQ ID NO: 974358
uuagcccuggaauucgcaa

SEQ ID NO: 974360 - RNA, 19 nt, Artificial Sequence
  Description of Artificial Sequence: Synthetic oligonucleotide
  Sense strand starting at position 3868 of SEQ ID NO: 914052
cauuguugugcacauaguu

SEQ ID NO: 974361 - RNA, 19 nt, Artificial Sequence
  Description of Artificial Sequence: Synthetic oligonucleotide
  Antisense strand to SEQ ID NO: 974360
aacuaugugcacaacaaug

SEQ ID NO: 974362 - RNA, 19 nt, Artificial Sequence
  Description of Artificial Sequence: Synthetic oligonucleotide
  Sense strand starting at position 1551 of SEQ ID NO: 914052
cugugaggcucuuccgaga

SEQ ID NO: 974363 - RNA, 19 nt, Artificial Sequence
  Description of Artificial Sequence: Synthetic oligonucleotide
  Antisense strand to SEQ ID NO: 974362
ucucggaagagccucacag

SEQ ID NO: 974364 - RNA, 19 nt, Artificial Sequence
  Description of Artificial Sequence: Synthetic oligonucleotide
  Sense strand starting at position 637 of SEQ ID NO: 914052
guaauagugccagggcuua

SEQ ID NO: 974365 - RNA, 19 nt, Artificial Sequence
  Description of Artificial Sequence: Synthetic oligonucleotide
  Antisense strand to SEQ ID NO: 974364
uaagcccuggcacuauuac

SEQ ID NO: 974366 - RNA, 19 nt, Artificial Sequence
  Description of Artificial Sequence: Synthetic oligonucleotide
  Sense strand starting at position 3865 of SEQ ID NO: 914052
aggcauuguugugcacaua

SEQ ID NO: 974367 - RNA, 19 nt, Artificial Sequence
  Description of Artificial Sequence: Synthetic oligonucleotide
  Antisense strand to SEQ ID NO: 974366
uaugugcacaacaaugccu

SEQ ID NO: 974368 - RNA, 19 nt, Artificial Sequence
  Description of Artificial Sequence: Synthetic oligonucleotide
  Sense strand starting at position 3148 of SEQ ID NO: 914052
ggauuaauaggucgugugu

SEQ ID NO: 974369 - RNA, 19 nt, Artificial Sequence
  Description of Artificial Sequence: Synthetic oligonucleotide
  Antisense strand to SEQ ID NO: 974368
acacacgaccuauuaaucc

SEQ ID NO: 974370 - RNA, 19 nt, Artificial Sequence
  Description of Artificial Sequence: Synthetic oligonucleotide
  Sense strand starting at position 3504 of SEQ ID NO: 914052
ggucuuagauguugaauuu

SEQ ID NO: 974371 - RNA, 19 nt, Artificial Sequence
  Description of Artificial Sequence: Synthetic oligonucleotide
  Antisense strand to SEQ ID NO: 974370
aaauucaacaucuaagacc

SEQ ID NO: 974372 - RNA, 19 nt, Artificial Sequence
  Description of Artificial Sequence: Synthetic oligonucleotide
  Sense strand starting at position 455 of SEQ ID NO: 914052
uccuuaagaucuuaggauu

SEQ ID NO: 974373 - RNA, 19 nt, Artificial Sequence
  Description of Artificial Sequence: Synthetic oligonucleotide
  Antisense strand to SEQ ID NO: 974372
aauccuaagaucuuaagga

SEQ ID NO: 974374 - RNA, 19 nt, Artificial Sequence
  Description of Artificial Sequence: Synthetic oligonucleotide
  Sense strand starting at position 892 of SEQ ID NO: 914052
acgagaaguuaagaguaau

SEQ ID NO: 974375 - RNA, 19 nt, Artificial Sequence
  Description of Artificial Sequence: Synthetic oligonucleotide
  Antisense strand to SEQ ID NO: 974374
auuacucuuaacuucucgu

SEQ ID NO: 974376 - RNA, 19 nt, Artificial Sequence
  Description of Artificial Sequence: Synthetic oligonucleotide
  Sense strand starting at position 2643 of SEQ ID NO: 914053
uguggaaaccgucaggaaa

SEQ ID NO: 974377 - RNA, 19 nt, Artificial Sequence
  Description of Artificial Sequence: Synthetic oligonucleotide
  Antisense strand to SEQ ID NO: 974376
uuuccugacgguuuccaca

SEQ ID NO: 974378 - RNA, 19 nt, Artificial Sequence
  Description of Artificial Sequence: Synthetic oligonucleotide
  Sense strand starting at position 2722 of SEQ ID NO: 914053
cuggcagguauugaauuau

SEQ ID NO: 974379 - RNA, 19 nt, Artificial Sequence
  Description of Artificial Sequence: Synthetic oligonucleotide
  Antisense strand to SEQ ID NO: 974378
auaauucaauaccugccag

SEQ ID NO: 974380 - RNA, 19 nt, Artificial Sequence
  Description of Artificial Sequence: Synthetic oligonucleotide
  Sense strand starting at position 3147 of SEQ ID NO: 914053
cggagugcugcgccaauga

SEQ ID NO: 974381 - RNA, 19 nt, Artificial Sequence
  Description of Artificial Sequence: Synthetic oligonucleotide
  Antisense strand to SEQ ID NO: 974380
ucauuggcgcagcacuccg

SEQ ID NO: 974382 - RNA, 19 nt, Artificial Sequence
  Description of Artificial Sequence: Synthetic oligonucleotide
  Sense strand starting at position 2696 of SEQ ID NO: 914053
agggcuuggauguggaaua

SEQ ID NO: 974383 - RNA, 19 nt, Artificial Sequence
  Description of Artificial Sequence: Synthetic oligonucleotide
  Antisense strand to SEQ ID NO: 974382
uauuccacauccaagcccu

SEQ ID NO: 974384 - RNA, 19 nt, Artificial Sequence
  Description of Artificial Sequence: Synthetic oligonucleotide
  Sense strand starting at position 3780 of SEQ ID NO: 914053
cucuuucgagcagagauca

SEQ ID NO: 974385 - RNA, 19 nt, Artificial Sequence
  Description of Artificial Sequence: Synthetic oligonucleotide
  Antisense strand to SEQ ID NO: 974384
ugaucucugcucgaaagag

SEQ ID NO: 974386 - RNA, 19 nt, Artificial Sequence
  Description of Artificial Sequence: Synthetic oligonucleotide
  Sense strand starting at position 3029 of SEQ ID NO: 914053
gagccuuaccaugagagcu

SEQ ID NO: 974387 - RNA, 19 nt, Artificial Sequence
  Description of Artificial Sequence: Synthetic oligonucleotide
  Antisense strand to SEQ ID NO: 974386
agcucucaugguaaggcuc

SEQ ID NO: 974388 - RNA, 19 nt, Artificial Sequence
  Description of Artificial Sequence: Synthetic oligonucleotide
  Sense strand starting at position 3862 of SEQ ID NO: 914053
ugauuuggauucuaagauu

SEQ ID NO: 974389 - RNA, 19 nt, Artificial Sequence
  Description of Artificial Sequence: Synthetic oligonucleotide
  Antisense strand to SEQ ID NO: 974388
aaucuuagaauccaaauca

SEQ ID NO: 974390 - RNA, 19 nt, Artificial Sequence
  Description of Artificial Sequence: Synthetic oligonucleotide
  Sense strand starting at position 3379 of SEQ ID NO: 914053
uggcauguggcacagaaau

SEQ ID NO: 974391 - RNA, 19 nt, Artificial Sequence
  Description of Artificial Sequence: Synthetic oligonucleotide
  Antisense strand to SEQ ID NO: 974390
auuucugugccacaugcca

SEQ ID NO: 974392 - RNA, 19 nt, Artificial Sequence
  Description of Artificial Sequence: Synthetic oligonucleotide
  Sense strand starting at position 3431 of SEQ ID NO: 914053
ugcaaugucuaauuugcuu

SEQ ID NO: 974393 - RNA, 19 nt, Artificial Sequence
  Description of Artificial Sequence: Synthetic oligonucleotide
  Antisense strand to SEQ ID NO: 974392
aagcaaauuagacauugca

SEQ ID NO: 974394 - RNA, 19 nt, Artificial Sequence
  Description of Artificial Sequence: Synthetic oligonucleotide
  Sense strand starting at position 279 of SEQ ID NO: 914053
cuagaaagccaaugguuua

SEQ ID NO: 974395 - RNA, 19 nt, Artificial Sequence
  Description of Artificial Sequence: Synthetic oligonucleotide
  Antisense strand to SEQ ID NO: 974394
uaaaccauuggcuuucuag

SEQ ID NO: 974396 - RNA, 19 nt, Artificial Sequence
  Description of Artificial Sequence: Synthetic oligonucleotide
  Sense strand starting at position 3192 of SEQ ID NO: 914053
gggauuuccugggagguag

SEQ ID NO: 974397 - RNA, 19 nt, Artificial Sequence
  Description of Artificial Sequence: Synthetic oligonucleotide
  Antisense strand to SEQ ID NO: 974396
cuaccucccaggaaauccc

SEQ ID NO: 974398 - RNA, 19 nt, Artificial Sequence
  Description of Artificial Sequence: Synthetic oligonucleotide
  Sense strand starting at position 3778 of SEQ ID NO: 914053
uucucuuucgagcagagau

SEQ ID NO: 974399 - RNA, 19 nt, Artificial Sequence
  Description of Artificial Sequence: Synthetic oligonucleotide
  Antisense strand to SEQ ID NO: 974398
aucucugcucgaaagagaa

SEQ ID NO: 974400 - RNA, 19 nt, Artificial Sequence
  Description of Artificial Sequence: Synthetic oligonucleotide
  Sense strand starting at position 2630 of SEQ ID NO: 914053
uuggaaucuucuuugugga

SEQ ID NO: 974401 - RNA, 19 nt, Artificial Sequence
  Description of Artificial Sequence: Synthetic oligonucleotide
  Antisense strand to SEQ ID NO: 974400
uccacaaagaagauuccaa

SEQ ID NO: 974402 - RNA, 19 nt, Artificial Sequence
  Description of Artificial Sequence: Synthetic oligonucleotide
  Sense strand starting at position 3834 of SEQ ID NO: 914053
ucaagugacaguggucaaa

SEQ ID NO: 974403 - RNA, 19 nt, Artificial Sequence
  Description of Artificial Sequence: Synthetic oligonucleotide
  Antisense strand to SEQ ID NO: 974402
uuugaccacugucacuuga

SEQ ID NO: 974404 - RNA, 19 nt, Artificial Sequence
  Description of Artificial Sequence: Synthetic oligonucleotide
  Sense strand starting at position 2129 of SEQ ID NO: 914053
ggagcuuucucucuggaag

SEQ ID NO: 974405 - RNA, 19 nt, Artificial Sequence
  Description of Artificial Sequence: Synthetic oligonucleotide
  Antisense strand to SEQ ID NO: 974404
cuuccagagagaaagcucc

SEQ ID NO: 974406 - RNA, 19 nt, Artificial Sequence
  Description of Artificial Sequence: Synthetic oligonucleotide
  Sense strand starting at position 2130 of SEQ ID NO: 914053
gagcuuucucucuggaagg

SEQ ID NO: 974407 - RNA, 19 nt, Artificial Sequence
  Description of Artificial Sequence: Synthetic oligonucleotide
  Antisense strand to SEQ ID NO: 974406
ccuuccagagagaaagcuc

SEQ ID NO: 974408 - RNA, 19 nt, Artificial Sequence
  Description of Artificial Sequence: Synthetic oligonucleotide
  Sense strand starting at position 282 of SEQ ID NO: 914053
gaaagccaaugguuuagua

SEQ ID NO: 974409 - RNA, 19 nt, Artificial Sequence
  Description of Artificial Sequence: Synthetic oligonucleotide
  Antisense strand to SEQ ID NO: 974408
uacuaaaccauuggcuuuc

SEQ ID NO: 974410 - RNA, 19 nt, Artificial Sequence
  Description of Artificial Sequence: Synthetic oligonucleotide
  Sense strand starting at position 2850 of SEQ ID NO: 914053
ggaauaacuugcccauggu

SEQ ID NO: 974411 - RNA, 19 nt, Artificial Sequence
  Description of Artificial Sequence: Synthetic oligonucleotide
  Antisense strand to SEQ ID NO: 974410
accaugggcaaguuauucc

SEQ ID NO: 974412 - RNA, 19 nt, Artificial Sequence
  Description of Artificial Sequence: Synthetic oligonucleotide
  Sense strand starting at position 3357 of SEQ ID NO: 914053
ccagucaugccucagaagu

SEQ ID NO: 974413 - RNA, 19 nt, Artificial Sequence
  Description of Artificial Sequence: Synthetic oligonucleotide
  Antisense strand to SEQ ID NO: 974412
acuucugaggcaugacugg

SEQ ID NO: 974414 - RNA, 19 nt, Artificial Sequence
  Description of Artificial Sequence: Synthetic oligonucleotide
  Sense strand starting at position 586 of SEQ ID NO: 914053
ugguguccucuguaagauc

SEQ ID NO: 974415 - RNA, 19 nt, Artificial Sequence
  Description of Artificial Sequence: Synthetic oligonucleotide
  Antisense strand to SEQ ID NO: 974414
gaucuuacagaggacacca

SEQ ID NO: 974416 - RNA, 19 nt, Artificial Sequence
  Description of Artificial Sequence: Synthetic oligonucleotide
  Sense strand starting at position 254 of SEQ ID NO: 914053
agccuaugauugcucaaca

SEQ ID NO: 974417 - RNA, 19 nt, Artificial Sequence
  Description of Artificial Sequence: Synthetic oligonucleotide
  Antisense strand to SEQ ID NO: 974416
uguugagcaaucauaggcu

SEQ ID NO: 974418 - RNA, 19 nt, Artificial Sequence
  Description of Artificial Sequence: Synthetic oligonucleotide
  Sense strand starting at position 3747 of SEQ ID NO: 914053
acgccuggcccggagaaua

SEQ ID NO: 974419 - RNA, 19 nt, Artificial Sequence
  Description of Artificial Sequence: Synthetic oligonucleotide
  Antisense strand to SEQ ID NO: 974418
uauucuccgggccaggcgu

SEQ ID NO: 974420 - RNA, 19 nt, Artificial Sequence
  Description of Artificial Sequence: Synthetic oligonucleotide
  Sense strand starting at position 1087 of SEQ ID NO: 914053
ggguguauccgagacgcaa

SEQ ID NO: 974421 - RNA, 19 nt, Artificial Sequence
  Description of Artificial Sequence: Synthetic oligonucleotide
  Antisense strand to SEQ ID NO: 974420
uugcgucucggauacaccc

SEQ ID NO: 974422 - RNA, 19 nt, Artificial Sequence
  Description of Artificial Sequence: Synthetic oligonucleotide
  Sense strand starting at position 255 of SEQ ID NO: 914053
gccuaugauugcucaacac

SEQ ID NO: 974423 - RNA, 19 nt, Artificial Sequence
  Description of Artificial Sequence: Synthetic oligonucleotide
  Antisense strand to SEQ ID NO: 974422
guguugagcaaucauaggc

SEQ ID NO: 974424 - RNA, 19 nt, Artificial Sequence
  Description of Artificial Sequence: Synthetic oligonucleotide
  Sense strand starting at position 104 of SEQ ID NO: 914053
ucaucuuccucuguaacga

SEQ ID NO: 974425 - RNA, 19 nt, Artificial Sequence
  Description of Artificial Sequence: Synthetic oligonucleotide
  Antisense strand to SEQ ID NO: 974424
ucguuacagaggaagauga

SEQ ID NO: 974426 - RNA, 19 nt, Artificial Sequence
  Description of Artificial Sequence: Synthetic oligonucleotide
  Sense strand starting at position 3819 of SEQ ID NO: 914053
gucacacugugguucucaa

SEQ ID NO: 974427 - RNA, 19 nt, Artificial Sequence
  Description of Artificial Sequence: Synthetic oligonucleotide
  Antisense strand to SEQ ID NO: 974426
uugagaaccacagugugac

SEQ ID NO: 974428 - RNA, 19 nt, Artificial Sequence
  Description of Artificial Sequence: Synthetic oligonucleotide
  Sense strand starting at position 3419 of SEQ ID NO: 914053
ucagguucucucugcaaug

SEQ ID NO: 974429 - RNA, 19 nt, Artificial Sequence
  Description of Artificial Sequence: Synthetic oligonucleotide
  Antisense strand to SEQ ID NO: 974428
cauugcagagagaaccuga

SEQ ID NO: 974430 - RNA, 19 nt, Artificial Sequence
  Description of Artificial Sequence: Synthetic oligonucleotide
  Sense strand starting at position 225 of SEQ ID NO: 914053
cucucucccugaguaguuu

SEQ ID NO: 974431 - RNA, 19 nt, Artificial Sequence
  Description of Artificial Sequence: Synthetic oligonucleotide
  Antisense strand to SEQ ID NO: 974430
aaacuacucagggagagag

SEQ ID NO: 974432 - RNA, 19 nt, Artificial Sequence
  Description of Artificial Sequence: Synthetic oligonucleotide
  Sense strand starting at position 3775 of SEQ ID NO: 914053
uauuucucuuucgagcaga

SEQ ID NO: 974433 - RNA, 19 nt, Artificial Sequence
  Description of Artificial Sequence: Synthetic oligonucleotide
  Antisense strand to SEQ ID NO: 974432
ucugcucgaaagagaaaua

SEQ ID NO: 974434 - RNA, 19 nt, Artificial Sequence
  Description of Artificial Sequence: Synthetic oligonucleotide
  Sense strand starting at position 3296 of SEQ ID NO: 914053
cucccuguccggugugaaa

SEQ ID NO: 974435 - RNA, 19 nt, Artificial Sequence
  Description of Artificial Sequence: Synthetic oligonucleotide
  Antisense strand to SEQ ID NO: 974434
uuucacaccggacagggag

SEQ ID NO: 974436 - RNA, 19 nt, Artificial Sequence
  Description of Artificial Sequence: Synthetic oligonucleotide
  Sense strand starting at position 584 of SEQ ID NO: 914053
gcugguguccucuguaaga

SEQ ID NO: 974437 - RNA, 19 nt, Artificial Sequence
  Description of Artificial Sequence: Synthetic oligonucleotide
  Antisense strand to SEQ ID NO: 974436
ucuuacagaggacaccagc

SEQ ID NO: 974438 - RNA, 19 nt, Artificial Sequence
  Description of Artificial Sequence: Synthetic oligonucleotide
  Sense strand starting at position 3308 of SEQ ID NO: 914053
ugugaaaguucugaacaag

SEQ ID NO: 974439 - RNA, 19 nt, Artificial Sequence
  Description of Artificial Sequence: Synthetic oligonucleotide
  Antisense strand to SEQ ID NO: 974438
cuuguucagaacuuucaca

SEQ ID NO: 974440 - RNA, 19 nt, Artificial Sequence
  Description of Artificial Sequence: Synthetic oligonucleotide
  Sense strand starting at position 3298 of SEQ ID NO: 914053
cccuguccggugugaaagu

SEQ ID NO: 974441 - RNA, 19 nt, Artificial Sequence
  Description of Artificial Sequence: Synthetic oligonucleotide
  Antisense strand to SEQ ID NO: 974440
acuuucacaccggacaggg

SEQ ID NO: 974442 - RNA, 19 nt, Artificial Sequence
  Description of Artificial Sequence: Synthetic oligonucleotide
  Sense strand starting at position 1067 of SEQ ID NO: 914053
gccguaguucacugagggu

SEQ ID NO: 974443 - RNA, 19 nt, Artificial Sequence
  Description of Artificial Sequence: Synthetic oligonucleotide
  Antisense strand to SEQ ID NO: 974442
acccucagugaacuacggc

SEQ ID NO: 974444 - RNA, 19 nt, Artificial Sequence
  Description of Artificial Sequence: Synthetic oligonucleotide
  Sense strand starting at position 236 of SEQ ID NO: 914053
aguaguuucccuugugcua

SEQ ID NO: 974445 - RNA, 19 nt, Artificial Sequence
  Description of Artificial Sequence: Synthetic oligonucleotide
  Antisense strand to SEQ ID NO: 974444
uagcacaagggaaacuacu

SEQ ID NO: 974446 - RNA, 19 nt, Artificial Sequence
  Description of Artificial Sequence: Synthetic oligonucleotide
  Sense strand starting at position 2236 of SEQ ID NO: 914053
ggaaguuucucaggaaaca

SEQ ID NO: 974447 - RNA, 19 nt, Artificial Sequence
  Description of Artificial Sequence: Synthetic oligonucleotide
  Antisense strand to SEQ ID NO: 974446
uguuuccugagaaacuucc

SEQ ID NO: 974448 - RNA, 19 nt, Artificial Sequence
  Description of Artificial Sequence: Synthetic oligonucleotide
  Sense strand starting at position 2970 of SEQ ID NO: 914053
cugagaugcucugacccua

SEQ ID NO: 974449 - RNA, 19 nt, Artificial Sequence
  Description of Artificial Sequence: Synthetic oligonucleotide
  Antisense strand to SEQ ID NO: 974448
uagggucagagcaucucag

SEQ ID NO: 974450 - RNA, 19 nt, Artificial Sequence
  Description of Artificial Sequence: Synthetic oligonucleotide
  Sense strand starting at position 2714 of SEQ ID NO: 914053
aagaauagcuggcagguau

SEQ ID NO: 974451 - RNA, 19 nt, Artificial Sequence
  Description of Artificial Sequence: Synthetic oligonucleotide
  Antisense strand to SEQ ID NO: 974450
auaccugccagcuauucuu

SEQ ID NO: 974452 - RNA, 19 nt, Artificial Sequence
  Description of Artificial Sequence: Synthetic oligonucleotide
  Sense strand starting at position 2633 of SEQ ID NO: 914053
gaaucuucuuuguggaaac

SEQ ID NO: 974453 - RNA, 19 nt, Artificial Sequence
  Description of Artificial Sequence: Synthetic oligonucleotide
  Antisense strand to SEQ ID NO: 974452
guuuccacaaagaagauuc

SEQ ID NO: 974454 - RNA, 19 nt, Artificial Sequence
  Description of Artificial Sequence: Synthetic oligonucleotide
  Sense strand starting at position 2697 of SEQ ID NO: 914053
gggcuuggauguggaauaa

SEQ ID NO: 974455 - RNA, 19 nt, Artificial Sequence
  Description of Artificial Sequence: Synthetic oligonucleotide
  Antisense strand to SEQ ID NO: 974454
uuauuccacauccaagccc

SEQ ID NO: 974456 - RNA, 19 nt, Artificial Sequence
  Description of Artificial Sequence: Synthetic oligonucleotide
  Sense strand starting at position 635 of SEQ ID NO: 914054
gcaaucucccuggacaaua

SEQ ID NO: 974457 - RNA, 19 nt, Artificial Sequence
  Description of Artificial Sequence: Synthetic oligonucleotide
  Antisense strand to SEQ ID NO: 974456
uauuguccagggagauugc

SEQ ID NO: 974458 - RNA, 19 nt, Artificial Sequence
  Description of Artificial Sequence: Synthetic oligonucleotide
  Sense strand starting at position 2352 of SEQ ID NO: 914054
guguuuaauccauagggag

SEQ ID NO: 974459 - RNA, 19 nt, Artificial Sequence
  Description of Artificial Sequence: Synthetic oligonucleotide
  Antisense strand to SEQ ID NO: 974458
cucccuauggauuaaacac

SEQ ID NO: 974460 - RNA, 19 nt, Artificial Sequence
  Description of Artificial Sequence: Synthetic oligonucleotide
  Sense strand starting at position 1492 of SEQ ID NO: 914054
aaaccuggccaguaaugau

SEQ ID NO: 974461 - RNA, 19 nt, Artificial Sequence
  Description of Artificial Sequence: Synthetic oligonucleotide
  Antisense strand to SEQ ID NO: 974460
aucauuacuggccagguuu

SEQ ID NO: 974462 - RNA, 19 nt, Artificial Sequence
  Description of Artificial Sequence: Synthetic oligonucleotide
  Sense strand starting at position 735 of SEQ ID NO: 914054
auguauugucuugaaagau

SEQ ID NO: 974463 - RNA, 19 nt, Artificial Sequence
  Description of Artificial Sequence: Synthetic oligonucleotide
  Antisense strand to SEQ ID NO: 974462
aucuuucaagacaauacau

SEQ ID NO: 974464 - RNA, 19 nt, Artificial Sequence
  Description of Artificial Sequence: Synthetic oligonucleotide
  Sense strand starting at position 3126 of SEQ ID NO: 914054
uguggauaacuuggacaua

SEQ ID NO: 974465 - RNA, 19 nt, Artificial Sequence
  Description of Artificial Sequence: Synthetic oligonucleotide
  Antisense strand to SEQ ID NO: 974464
uauguccaaguuauccaca

SEQ ID NO: 974466 - RNA, 19 nt, Artificial Sequence
  Description of Artificial Sequence: Synthetic oligonucleotide
  Sense strand starting at position 301 of SEQ ID NO: 914054
uguacuaggcccuaaauaa

SEQ ID NO: 974467 - RNA, 19 nt, Artificial Sequence
  Description of Artificial Sequence: Synthetic oligonucleotide
  Antisense strand to SEQ ID NO: 974466
uuauuuagggccuaguaca

SEQ ID NO: 974468 - RNA, 19 nt, Artificial Sequence
  Description of Artificial Sequence: Synthetic oligonucleotide
  Sense strand starting at position 726 of SEQ ID NO: 914054
gaagaagugauguauuguc

SEQ ID NO: 974469 - RNA, 19 nt, Artificial Sequence
  Description of Artificial Sequence: Synthetic oligonucleotide
  Antisense strand to SEQ ID NO: 974468
gacaauacaucacuucuuc

SEQ ID NO: 974470 - RNA, 19 nt, Artificial Sequence
  Description of Artificial Sequence: Synthetic oligonucleotide
  Sense strand starting at position 2082 of SEQ ID NO: 914054
gcaauugacccugaaaguc

SEQ ID NO: 974471 - RNA, 19 nt, Artificial Sequence
  Description of Artificial Sequence: Synthetic oligonucleotide
  Antisense strand to SEQ ID NO: 974470
gacuuucagggucaauugc

SEQ ID NO: 974472 - RNA, 19 nt, Artificial Sequence
  Description of Artificial Sequence: Synthetic oligonucleotide
  Sense strand starting at position 3550 of SEQ ID NO: 914054
ugcuuauccagaggagaca

SEQ ID NO: 974473 - RNA, 19 nt, Artificial Sequence
  Description of Artificial Sequence: Synthetic oligonucleotide
  Antisense strand to SEQ ID NO: 974472
ugucuccucuggauaagca

SEQ ID NO: 974474 - RNA, 19 nt, Artificial Sequence
  Description of Artificial Sequence: Synthetic oligonucleotide
  Sense strand starting at position 51 of SEQ ID NO: 914054
ugggaauauaaucgugaau

SEQ ID NO: 974475 - RNA, 19 nt, Artificial Sequence
  Description of Artificial Sequence: Synthetic oligonucleotide
  Antisense strand to SEQ ID NO: 974474
auucacgauuauauuccca

SEQ ID NO: 974476 - RNA, 19 nt, Artificial Sequence
  Description of Artificial Sequence: Synthetic oligonucleotide
  Sense strand starting at position 102 of SEQ ID NO: 914054
ccuagugcaguggaauaaa

SEQ ID NO: 974477 - RNA, 19 nt, Artificial Sequence
  Description of Artificial Sequence: Synthetic oligonucleotide
  Antisense strand to SEQ ID NO: 974476
uuuauuccacugcacuagg

SEQ ID NO: 974478 - RNA, 19 nt, Artificial Sequence
  Description of Artificial Sequence: Synthetic oligonucleotide
  Sense strand starting at position 1351 of SEQ ID NO: 914054
acggguauucagcaaagau

SEQ ID NO: 974479 - RNA, 19 nt, Artificial Sequence
  Description of Artificial Sequence: Synthetic oligonucleotide
  Antisense strand to SEQ ID NO: 974478
aucuuugcugaauacccgu

SEQ ID NO: 974480 - RNA, 19 nt, Artificial Sequence
  Description of Artificial Sequence: Synthetic oligonucleotide
  Sense strand starting at position 2071 of SEQ ID NO: 914054
cgaauugagacgcaauuga

SEQ ID NO: 974481 - RNA, 19 nt, Artificial Sequence
  Description of Artificial Sequence: Synthetic oligonucleotide
  Antisense strand to SEQ ID NO: 974480
ucaauugcgucucaauucg

SEQ ID NO: 974482 - RNA, 19 nt, Artificial Sequence
  Description of Artificial Sequence: Synthetic oligonucleotide
  Sense strand starting at position 7 of SEQ ID NO: 914054
acugaauaauuggucuacu

SEQ ID NO: 974483 - RNA, 19 nt, Artificial Sequence
  Description of Artificial Sequence: Synthetic oligonucleotide
  Antisense strand to SEQ ID NO: 974482
aguagaccaauuauucagu

SEQ ID NO: 974484 - RNA, 19 nt, Artificial Sequence
  Description of Artificial Sequence: Synthetic oligonucleotide
  Sense strand starting at position 8 of SEQ ID NO: 914054
cugaauaauuggucuacua

SEQ ID NO: 974485 - RNA, 19 nt, Artificial Sequence
  Description of Artificial Sequence: Synthetic oligonucleotide
  Antisense strand to SEQ ID NO: 974484
uaguagaccaauuauucag

SEQ ID NO: 974486 - RNA, 19 nt, Artificial Sequence
  Description of Artificial Sequence: Synthetic oligonucleotide
  Sense strand starting at position 1489 of SEQ ID NO: 914054
cucaaaccuggccaguaau

SEQ ID NO: 974487 - RNA, 19 nt, Artificial Sequence
  Description of Artificial Sequence: Synthetic oligonucleotide
  Antisense strand to SEQ ID NO: 974486
auuacuggccagguuugag

SEQ ID NO: 974488 - RNA, 19 nt, Artificial Sequence
  Description of Artificial Sequence: Synthetic oligonucleotide
  Sense strand starting at position 2951 of SEQ ID NO: 914054
auugcuugaggccaaauua

SEQ ID NO: 974489 - RNA, 19 nt, Artificial Sequence
  Description of Artificial Sequence: Synthetic oligonucleotide
  Antisense strand to SEQ ID NO: 974488
uaauuuggccucaagcaau

SEQ ID NO: 974490 - RNA, 19 nt, Artificial Sequence
  Description of Artificial Sequence: Synthetic oligonucleotide
  Sense strand starting at position 50 of SEQ ID NO: 914054
gugggaauauaaucgugaa

SEQ ID NO: 974491 - RNA, 19 nt, Artificial Sequence
  Description of Artificial Sequence: Synthetic oligonucleotide
  Antisense strand to SEQ ID NO: 974490
uucacgauuauauucccac

SEQ ID NO: 974492 - RNA, 19 nt, Artificial Sequence
  Description of Artificial Sequence: Synthetic oligonucleotide
  Sense strand starting at position 3346 of SEQ ID NO: 914054
ugggacacucguuaaagca

SEQ ID NO: 974493 - RNA, 19 nt, Artificial Sequence
  Description of Artificial Sequence: Synthetic oligonucleotide
  Antisense strand to SEQ ID NO: 974492
ugcuuuaacgaguguccca

SEQ ID NO: 974494 - RNA, 19 nt, Artificial Sequence
  Description of Artificial Sequence: Synthetic oligonucleotide
  Sense strand starting at position 1515 of SEQ ID NO: 914054
gcaagcuauccagagggua

SEQ ID NO: 974495 - RNA, 19 nt, Artificial Sequence
  Description of Artificial Sequence: Synthetic oligonucleotide
  Antisense strand to SEQ ID NO: 974494
uacccucuggauagcuugc

SEQ ID NO: 974496 - RNA, 19 nt, Artificial Sequence
  Description of Artificial Sequence: Synthetic oligonucleotide
  Sense strand starting at position 3137 of SEQ ID NO: 914054
uggacauaauugucaucuu

SEQ ID NO: 974497 - RNA, 19 nt, Artificial Sequence
  Description of Artificial Sequence: Synthetic oligonucleotide
  Antisense strand to SEQ ID NO: 974496
aagaugacaauuaugucca

SEQ ID NO: 974498 - RNA, 19 nt, Artificial Sequence
  Description of Artificial Sequence: Synthetic oligonucleotide
  Sense strand starting at position 634 of SEQ ID NO: 914054
agcaaucucccuggacaau

SEQ ID NO: 974499 - RNA, 19 nt, Artificial Sequence
  Description of Artificial Sequence: Synthetic oligonucleotide
  Antisense strand to SEQ ID NO: 974498
auuguccagggagauugcu

SEQ ID NO: 974500 - RNA, 19 nt, Artificial Sequence
  Description of Artificial Sequence: Synthetic oligonucleotide
  Sense strand starting at position 1062 of SEQ ID NO: 914054
uaaggaaugcauuguauau

SEQ ID NO: 974501 - RNA, 19 nt, Artificial Sequence
  Description of Artificial Sequence: Synthetic oligonucleotide
  Antisense strand to SEQ ID NO: 974500
auauacaaugcauuccuua

SEQ ID NO: 974502 - RNA, 19 nt, Artificial Sequence
  Description of Artificial Sequence: Synthetic oligonucleotide
  Sense strand starting at position 3713 of SEQ ID NO: 914054
ucauguguccggaguuggu

SEQ ID NO: 974503 - RNA, 19 nt, Artificial Sequence
  Description of Artificial Sequence: Synthetic oligonucleotide
  Antisense strand to SEQ ID NO: 974502
accaacuccggacacauga

SEQ ID NO: 974504 - RNA, 19 nt, Artificial Sequence
  Description of Artificial Sequence: Synthetic oligonucleotide
  Sense strand starting at position 2143 of SEQ ID NO: 914054
caggauggcucuccugaca

SEQ ID NO: 974505 - RNA, 19 nt, Artificial Sequence
  Description of Artificial Sequence: Synthetic oligonucleotide
  Antisense strand to SEQ ID NO: 974504
ugucaggagagccauccug

SEQ ID NO: 974506 - RNA, 19 nt, Artificial Sequence
  Description of Artificial Sequence: Synthetic oligonucleotide
  Sense strand starting at position 2308 of SEQ ID NO: 914054
cauugugguugacccagaa

SEQ ID NO: 974507 - RNA, 19 nt, Artificial Sequence
  Description of Artificial Sequence: Synthetic oligonucleotide
  Antisense strand to SEQ ID NO: 974506
uucugggucaaccacaaug

SEQ ID NO: 974508 - RNA, 19 nt, Artificial Sequence
  Description of Artificial Sequence: Synthetic oligonucleotide
  Sense strand starting at position 336 of SEQ ID NO: 914054
aggcaauuaggucauagcu

SEQ ID NO: 974509 - RNA, 19 nt, Artificial Sequence
  Description of Artificial Sequence: Synthetic oligonucleotide
  Antisense strand to SEQ ID NO: 974508
agcuaugaccuaauugccu

SEQ ID NO: 974510 - RNA, 19 nt, Artificial Sequence
  Description of Artificial Sequence: Synthetic oligonucleotide
  Sense strand starting at position 2305 of SEQ ID NO: 914054
gaacauugugguugaccca

SEQ ID NO: 974511 - RNA, 19 nt, Artificial Sequence
  Description of Artificial Sequence: Synthetic oligonucleotide
  Antisense strand to SEQ ID NO: 974510
ugggucaaccacaauguuc

SEQ ID NO: 974512 - RNA, 19 nt, Artificial Sequence
  Description of Artificial Sequence: Synthetic oligonucleotide
  Sense strand starting at position 2348 of SEQ ID NO: 914054
uuaaguguuuaauccauag

SEQ ID NO: 974513 - RNA, 19 nt, Artificial Sequence
  Description of Artificial Sequence: Synthetic oligonucleotide
  Antisense strand to SEQ ID NO: 974512
cuauggauuaaacacuuaa

SEQ ID NO: 974514 - RNA, 19 nt, Artificial Sequence
  Description of Artificial Sequence: Synthetic oligonucleotide
  Sense strand starting at position 39 of SEQ ID NO: 914054
cauucuaggcagugggaau

SEQ ID NO: 974515 - RNA, 19 nt, Artificial Sequence
  Description of Artificial Sequence: Synthetic oligonucleotide
  Antisense strand to SEQ ID NO: 974514
auucccacugccuagaaug

SEQ ID NO: 974516 - RNA, 19 nt, Artificial Sequence
  Description of Artificial Sequence: Synthetic oligonucleotide
  Sense strand starting at position 3354 of SEQ ID NO: 914054
ucguuaaagcaguaaauua

SEQ ID NO: 974517 - RNA, 19 nt, Artificial Sequence
  Description of Artificial Sequence: Synthetic oligonucleotide
  Antisense strand to SEQ ID NO: 974516
uaauuuacugcuuuaacga

SEQ ID NO: 974518 - RNA, 19 nt, Artificial Sequence
  Description of Artificial Sequence: Synthetic oligonucleotide
  Sense strand starting at position 130 of SEQ ID NO: 914054
guacaugucagguagugac

SEQ ID NO: 974519 - RNA, 19 nt, Artificial Sequence
  Description of Artificial Sequence: Synthetic oligonucleotide
  Antisense strand to SEQ ID NO: 974518
gucacuaccugacauguac

SEQ ID NO: 974520 - RNA, 19 nt, Artificial Sequence
  Description of Artificial Sequence: Synthetic oligonucleotide
  Sense strand starting at position 3092 of SEQ ID NO: 914054
acaguaagcugacuuacuu

SEQ ID NO: 974521 - RNA, 19 nt, Artificial Sequence
  Description of Artificial Sequence: Synthetic oligonucleotide
  Antisense strand to SEQ ID NO: 974520
aaguaagucagcuuacugu

SEQ ID NO: 974522 - RNA, 19 nt, Artificial Sequence
  Description of Artificial Sequence: Synthetic oligonucleotide
  Sense strand starting at position 1622 of SEQ ID NO: 914054
uuauuaccucccgguaaga

SEQ ID NO: 974523 - RNA, 19 nt, Artificial Sequence
  Description of Artificial Sequence: Synthetic oligonucleotide
  Antisense strand to SEQ ID NO: 974522
ucuuaccgggagguaauaa

SEQ ID NO: 974524 - RNA, 19 nt, Artificial Sequence
  Description of Artificial Sequence: Synthetic oligonucleotide
  Sense strand starting at position 470 of SEQ ID NO: 914054
auuacaauucugugaggcu

SEQ ID NO: 974525 - RNA, 19 nt, Artificial Sequence
  Description of Artificial Sequence: Synthetic oligonucleotide
  Antisense strand to SEQ ID NO: 974524
agccucacagaauuguaau

SEQ ID NO: 974526 - RNA, 19 nt, Artificial Sequence
  Description of Artificial Sequence: Synthetic oligonucleotide
  Sense strand starting at position 1239 of SEQ ID NO: 914054
gguaucuuaccguauccua

SEQ ID NO: 974527 - RNA, 19 nt, Artificial Sequence
  Description of Artificial Sequence: Synthetic oligonucleotide
  Antisense strand to SEQ ID NO: 974526
uaggauacgguaagauacc

SEQ ID NO: 974528 - RNA, 19 nt, Artificial Sequence
  Description of Artificial Sequence: Synthetic oligonucleotide
  Sense strand starting at position 2051 of SEQ ID NO: 914054
gcagguucuggauagacgu

SEQ ID NO: 974529 - RNA, 19 nt, Artificial Sequence
  Description of Artificial Sequence: Synthetic oligonucleotide
  Antisense strand to SEQ ID NO: 974528
acgucuauccagaaccugc

SEQ ID NO: 974530 - RNA, 19 nt, Artificial Sequence
  Description of Artificial Sequence: Synthetic oligonucleotide
  Sense strand starting at position 731 of SEQ ID NO: 914054
agugauguauugucuugaa

SEQ ID NO: 974531 - RNA, 19 nt, Artificial Sequence
  Description of Artificial Sequence: Synthetic oligonucleotide
  Antisense strand to SEQ ID NO: 974530
uucaagacaauacaucacu

SEQ ID NO: 974532 - RNA, 19 nt, Artificial Sequence
  Description of Artificial Sequence: Synthetic oligonucleotide
  Sense strand starting at position 100 of SEQ ID NO: 914054
auccuagugcaguggaaua

SEQ ID NO: 974533 - RNA, 19 nt, Artificial Sequence
  Description of Artificial Sequence: Synthetic oligonucleotide
  Antisense strand to SEQ ID NO: 974532
uauuccacugcacuaggau

SEQ ID NO: 974534 - RNA, 19 nt, Artificial Sequence
  Description of Artificial Sequence: Synthetic oligonucleotide
  Sense strand starting at position 1194 of SEQ ID NO: 914054
gacaguguaccguauccua

SEQ ID NO: 974535 - RNA, 19 nt, Artificial Sequence
  Description of Artificial Sequence: Synthetic oligonucleotide
  Antisense strand to SEQ ID NO: 974534
uaggauacgguacacuguc

SEQ ID NO: 974536 - RNA, 19 nt, Artificial Sequence
  Description of Artificial Sequence: Synthetic oligonucleotide
  Sense strand starting at position 2504 of SEQ ID NO: 914055
ggaugaaauuaggccacau

SEQ ID NO: 974537 - RNA, 19 nt, Artificial Sequence
  Description of Artificial Sequence: Synthetic oligonucleotide
  Antisense strand to SEQ ID NO: 974536
auguggccuaauuucaucc

SEQ ID NO: 974538 - RNA, 19 nt, Artificial Sequence
  Description of Artificial Sequence: Synthetic oligonucleotide
  Sense strand starting at position 2158 of SEQ ID NO: 914055
guauguauuucccuccuga

SEQ ID NO: 974539 - RNA, 19 nt, Artificial Sequence
  Description of Artificial Sequence: Synthetic oligonucleotide
  Antisense strand to SEQ ID NO: 974538
ucaggagggaaauacauac

SEQ ID NO: 974540 - RNA, 19 nt, Artificial Sequence
  Description of Artificial Sequence: Synthetic oligonucleotide
  Sense strand starting at position 2146 of SEQ ID NO: 914055
cucugcugagucguaugua

SEQ ID NO: 974541 - RNA, 19 nt, Artificial Sequence
  Description of Artificial Sequence: Synthetic oligonucleotide
  Antisense strand to SEQ ID NO: 974540
uacauacgacucagcagag

SEQ ID NO: 974542 - RNA, 19 nt, Artificial Sequence
  Description of Artificial Sequence: Synthetic oligonucleotide
  Sense strand starting at position 1103 of SEQ ID NO: 914055
ggaugaauuagagggccuu

SEQ ID NO: 974543 - RNA, 19 nt, Artificial Sequence
  Description of Artificial Sequence: Synthetic oligonucleotide
  Antisense strand to SEQ ID NO: 974542
aaggcccucuaauucaucc

SEQ ID NO: 974544 - RNA, 19 nt, Artificial Sequence
  Description of Artificial Sequence: Synthetic oligonucleotide
  Sense strand starting at position 3449 of SEQ ID NO: 914055
uucccuggucuugauaaau

SEQ ID NO: 974545 - RNA, 19 nt, Artificial Sequence
  Description of Artificial Sequence: Synthetic oligonucleotide
  Antisense strand to SEQ ID NO: 974544
auuuaucaagaccagggaa

SEQ ID NO: 974546 - RNA, 19 nt, Artificial Sequence
  Description of Artificial Sequence: Synthetic oligonucleotide
  Sense strand starting at position 2524 of SEQ ID NO: 914055
ggccgcuuggcaucauagu

SEQ ID NO: 974547 - RNA, 19 nt, Artificial Sequence
  Description of Artificial Sequence: Synthetic oligonucleotide
  Antisense strand to SEQ ID NO: 974546
acuaugaugccaagcggcc

SEQ ID NO: 974548 - RNA, 19 nt, Artificial Sequence
  Description of Artificial Sequence: Synthetic oligonucleotide
  Sense strand starting at position 3661 of SEQ ID NO: 914055
acuauauauuaggcauuga

SEQ ID NO: 974549 - RNA, 19 nt, Artificial Sequence
  Description of Artificial Sequence: Synthetic oligonucleotide
  Antisense strand to SEQ ID NO: 974548
ucaaugccuaauauauagu

SEQ ID NO: 974550 - RNA, 19 nt, Artificial Sequence
  Description of Artificial Sequence: Synthetic oligonucleotide
  Sense strand starting at position 1380 of SEQ ID NO: 914055
ggucacugacacuaaguuu

SEQ ID NO: 974551 - RNA, 19 nt, Artificial Sequence
  Description of Artificial Sequence: Synthetic oligonucleotide
  Antisense strand to SEQ ID NO: 974550
aaacuuagugucagugacc

SEQ ID NO: 974552 - RNA, 19 nt, Artificial Sequence
  Description of Artificial Sequence: Synthetic oligonucleotide
  Sense strand starting at position 1507 of SEQ ID NO: 914055
gacugaagucucgacucca

SEQ ID NO: 974553 - RNA, 19 nt, Artificial Sequence
  Description of Artificial Sequence: Synthetic oligonucleotide
  Antisense strand to SEQ ID NO: 974552
uggagucgagacuucaguc

SEQ ID NO: 974554 - RNA, 19 nt, Artificial Sequence
  Description of Artificial Sequence: Synthetic oligonucleotide
  Sense strand starting at position 1104 of SEQ ID NO: 914055
gaugaauuagagggccuuu

SEQ ID NO: 974555 - RNA, 19 nt, Artificial Sequence
  Description of Artificial Sequence: Synthetic oligonucleotide
  Antisense strand to SEQ ID NO: 974554
aaaggcccucuaauucauc

SEQ ID NO: 974556 - RNA, 19 nt, Artificial Sequence
  Description of Artificial Sequence: Synthetic oligonucleotide
  Sense strand starting at position 1573 of SEQ ID NO: 914055
uuccuagaacucugaaagu

SEQ ID NO: 974557 - RNA, 19 nt, Artificial Sequence
  Description of Artificial Sequence: Synthetic oligonucleotide
  Antisense strand to SEQ ID NO: 974556
acuuucagaguucuaggaa

SEQ ID NO: 974558 - RNA, 19 nt, Artificial Sequence
  Description of Artificial Sequence: Synthetic oligonucleotide
  Sense strand starting at position 1520 of SEQ ID NO: 914055
acuccauucuggguggaua

SEQ ID NO: 974559 - RNA, 19 nt, Artificial Sequence
  Description of Artificial Sequence: Synthetic oligonucleotide
  Antisense strand to SEQ ID NO: 974558
uauccacccagaauggagu

SEQ ID NO: 974560 - RNA, 19 nt, Artificial Sequence
  Description of Artificial Sequence: Synthetic oligonucleotide
  Sense strand starting at position 3676 of SEQ ID NO: 914055
uugagcaugcuuuacuaaa

SEQ ID NO: 974561 - RNA, 19 nt, Artificial Sequence
  Description of Artificial Sequence: Synthetic oligonucleotide
  Antisense strand to SEQ ID NO: 974560
uuuaguaaagcaugcucaa

SEQ ID NO: 974562 - RNA, 19 nt, Artificial Sequence
  Description of Artificial Sequence: Synthetic oligonucleotide
  Sense strand starting at position 1451 of SEQ ID NO: 914055
aggagcuucuucuccagaa

SEQ ID NO: 974563 - RNA, 19 nt, Artificial Sequence
  Description of Artificial Sequence: Synthetic oligonucleotide
  Antisense strand to SEQ ID NO: 974562
uucuggagaagaagcuccu

SEQ ID NO: 974564 - RNA, 19 nt, Artificial Sequence
  Description of Artificial Sequence: Synthetic oligonucleotide
  Sense strand starting at position 1452 of SEQ ID NO: 914055
ggagcuucuucuccagaaa

SEQ ID NO: 974565 - RNA, 19 nt, Artificial Sequence
  Description of Artificial Sequence: Synthetic oligonucleotide
  Antisense strand to SEQ ID NO: 974564
uuucuggagaagaagcucc

SEQ ID NO: 974566 - RNA, 19 nt, Artificial Sequence
  Description of Artificial Sequence: Synthetic oligonucleotide
  Sense strand starting at position 1374 of SEQ ID NO: 914055
gagguaggucacugacacu

SEQ ID NO: 974567 - RNA, 19 nt, Artificial Sequence
  Description of Artificial Sequence: Synthetic oligonucleotide
  Antisense strand to SEQ ID NO: 974566
agugucagugaccuaccuc

SEQ ID NO: 974568 - RNA, 19 nt, Artificial Sequence
  Description of Artificial Sequence: Synthetic oligonucleotide
  Sense strand starting at position 2934 of SEQ ID NO: 914055
caguuuaugguuugaaaca

SEQ ID NO: 974569 - RNA, 19 nt, Artificial Sequence
  Description of Artificial Sequence: Synthetic oligonucleotide
  Antisense strand to SEQ ID NO: 974568
uguuucaaaccauaaacug

SEQ ID NO: 974570 - RNA, 19 nt, Artificial Sequence
  Description of Artificial Sequence: Synthetic oligonucleotide
  Sense strand starting at position 2557 of SEQ ID NO: 914055
ggucaauuguuauuaacca

SEQ ID NO: 974571 - RNA, 19 nt, Artificial Sequence
  Description of Artificial Sequence: Synthetic oligonucleotide
  Antisense strand to SEQ ID NO: 974570
ugguuaauaacaauugacc

SEQ ID NO: 974572 - RNA, 19 nt, Artificial Sequence
  Description of Artificial Sequence: Synthetic oligonucleotide
  Sense strand starting at position 3646 of SEQ ID NO: 914055
uaggcugugcuggaaacua

SEQ ID NO: 974573 - RNA, 19 nt, Artificial Sequence
  Description of Artificial Sequence: Synthetic oligonucleotide
  Antisense strand to SEQ ID NO: 974572
uaguuuccagcacagccua

SEQ ID NO: 974574 - RNA, 19 nt, Artificial Sequence
  Description of Artificial Sequence: Synthetic oligonucleotide
  Sense strand starting at position 2599 of SEQ ID NO: 914055
ggugcagagcuuuaucaga

SEQ ID NO: 974575 - RNA, 19 nt, Artificial Sequence
  Description of Artificial Sequence: Synthetic oligonucleotide
  Antisense strand to SEQ ID NO: 974574
ucugauaaagcucugcacc

SEQ ID NO: 974576 - RNA, 19 nt, Artificial Sequence
  Description of Artificial Sequence: Synthetic oligonucleotide
  Sense strand starting at position 3462 of SEQ ID NO: 914055
auaaaucagcuuugucaag

SEQ ID NO: 974577 - RNA, 19 nt, Artificial Sequence
  Description of Artificial Sequence: Synthetic oligonucleotide
  Antisense strand to SEQ ID NO: 974576
cuugacaaagcugauuuau

SEQ ID NO: 974578 - RNA, 19 nt, Artificial Sequence
  Description of Artificial Sequence: Synthetic oligonucleotide
  Sense strand starting at position 1039 of SEQ ID NO: 914055
cccuuacgauuguuaugaa

SEQ ID NO: 974579 - RNA, 19 nt, Artificial Sequence
  Description of Artificial Sequence: Synthetic oligonucleotide
  Antisense strand to SEQ ID NO: 974578
uucauaacaaucguaaggg

SEQ ID NO: 974580 - RNA, 19 nt, Artificial Sequence
  Description of Artificial Sequence: Synthetic oligonucleotide
  Sense strand starting at position 1298 of SEQ ID NO: 914055
ggagcugauccuggucuaa

SEQ ID NO: 974581 - RNA, 19 nt, Artificial Sequence
  Description of Artificial Sequence: Synthetic oligonucleotide
  Antisense strand to SEQ ID NO: 974580
uuagaccaggaucagcucc

SEQ ID NO: 974582 - RNA, 19 nt, Artificial Sequence
  Description of Artificial Sequence: Synthetic oligonucleotide
  Sense strand starting at position 3665 of SEQ ID NO: 914055
uauauuaggcauugagcau

SEQ ID NO: 974583 - RNA, 19 nt, Artificial Sequence
  Description of Artificial Sequence: Synthetic oligonucleotide
  Antisense strand to SEQ ID NO: 974582
augcucaaugccuaauaua

SEQ ID NO: 974584 - RNA, 19 nt, Artificial Sequence
  Description of Artificial Sequence: Synthetic oligonucleotide
  Sense strand starting at position 3530 of SEQ ID NO: 914055
uguucuugggucuggaaau

SEQ ID NO: 974585 - RNA, 19 nt, Artificial Sequence
  Description of Artificial Sequence: Synthetic oligonucleotide
  Antisense strand to SEQ ID NO: 974584
auuuccagacccaagaaca

SEQ ID NO: 974586 - RNA, 19 nt, Artificial Sequence
  Description of Artificial Sequence: Synthetic oligonucleotide
  Sense strand starting at position 3607 of SEQ ID NO: 914055
gaggcacagagugguuuau

SEQ ID NO: 974587 - RNA, 19 nt, Artificial Sequence
  Description of Artificial Sequence: Synthetic oligonucleotide
  Antisense strand to SEQ ID NO: 974586
auaaaccacucugugccuc

SEQ ID NO: 974588 - RNA, 19 nt, Artificial Sequence
  Description of Artificial Sequence: Synthetic oligonucleotide
  Sense strand starting at position 2998 of SEQ ID NO: 914055
ggaccagucugucuuuaca

SEQ ID NO: 974589 - RNA, 19 nt, Artificial Sequence
  Description of Artificial Sequence: Synthetic oligonucleotide
  Antisense strand to SEQ ID NO: 974588
uguaaagacagacuggucc

SEQ ID NO: 974590 - RNA, 19 nt, Artificial Sequence
  Description of Artificial Sequence: Synthetic oligonucleotide
  Sense strand starting at position 2287 of SEQ ID NO: 914055
auuagugaccucugagcua

SEQ ID NO: 974591 - RNA, 19 nt, Artificial Sequence
  Description of Artificial Sequence: Synthetic oligonucleotide
  Antisense strand to SEQ ID NO: 974590
uagcucagaggucacuaau

SEQ ID NO: 974592 - RNA, 19 nt, Artificial Sequence
  Description of Artificial Sequence: Synthetic oligonucleotide
  Sense strand starting at position 3328 of SEQ ID NO: 914055
ucgccaaauuaucuuuaag

SEQ ID NO: 974593 - RNA, 19 nt, Artificial Sequence
  Description of Artificial Sequence: Synthetic oligonucleotide
  Antisense strand to SEQ ID NO: 974592
cuuaaagauaauuuggcga

SEQ ID NO: 974594 - RNA, 19 nt, Artificial Sequence
  Description of Artificial Sequence: Synthetic oligonucleotide
  Sense strand starting at position 3197 of SEQ ID NO: 914055
ccaguaaccuggcucaauc

SEQ ID NO: 974595 - RNA, 19 nt, Artificial Sequence
  Description of Artificial Sequence: Synthetic oligonucleotide
  Antisense strand to SEQ ID NO: 974594
gauugagccagguuacugg

SEQ ID NO: 974596 - RNA, 19 nt, Artificial Sequence
  Description of Artificial Sequence: Synthetic oligonucleotide
  Sense strand starting at position 3527 of SEQ ID NO: 914055
ccauguucuugggucugga

SEQ ID NO: 974597 - RNA, 19 nt, Artificial Sequence
  Description of Artificial Sequence: Synthetic oligonucleotide
  Antisense strand to SEQ ID NO: 974596
uccagacccaagaacaugg

SEQ ID NO: 974598 - RNA, 19 nt, Artificial Sequence
  Description of Artificial Sequence: Synthetic oligonucleotide
  Sense strand starting at position 2149 of SEQ ID NO: 914055
ugcugagucguauguauuu

SEQ ID NO: 974599 - RNA, 19 nt, Artificial Sequence
  Description of Artificial Sequence: Synthetic oligonucleotide
  Antisense strand to SEQ ID NO: 974598
aaauacauacgacucagca

SEQ ID NO: 974600 - RNA, 19 nt, Artificial Sequence
  Description of Artificial Sequence: Synthetic oligonucleotide
  Sense strand starting at position 2283 of SEQ ID NO: 914055
acguauuagugaccucuga

SEQ ID NO: 974601 - RNA, 19 nt, Artificial Sequence
  Description of Artificial Sequence: Synthetic oligonucleotide
  Antisense strand to SEQ ID NO: 974600
ucagaggucacuaauacgu

SEQ ID NO: 974602 - RNA, 19 nt, Artificial Sequence
  Description of Artificial Sequence: Synthetic oligonucleotide
  Sense strand starting at position 3609 of SEQ ID NO: 914055
ggcacagagugguuuauuc

SEQ ID NO: 974603 - RNA, 19 nt, Artificial Sequence
  Description of Artificial Sequence: Synthetic oligonucleotide
  Antisense strand to SEQ ID NO: 974602
gaauaaaccacucugugcc

SEQ ID NO: 974604 - RNA, 19 nt, Artificial Sequence
  Description of Artificial Sequence: Synthetic oligonucleotide
  Sense strand starting at position 1225 of SEQ ID NO: 914055
cacucagaguugcugcaaa

SEQ ID NO: 974605 - RNA, 19 nt, Artificial Sequence
  Description of Artificial Sequence: Synthetic oligonucleotide
  Antisense strand to SEQ ID NO: 974604
uuugcagcaacucugagug

SEQ ID NO: 974606 - RNA, 19 nt, Artificial Sequence
  Description of Artificial Sequence: Synthetic oligonucleotide
  Sense strand starting at position 2820 of SEQ ID NO: 914055
aggaaauuaugauagugga

SEQ ID NO: 974607 - RNA, 19 nt, Artificial Sequence
  Description of Artificial Sequence: Synthetic oligonucleotide
  Antisense strand to SEQ ID NO: 974606
uccacuaucauaauuuccu

SEQ ID NO: 974608 - RNA, 19 nt, Artificial Sequence
  Description of Artificial Sequence: Synthetic oligonucleotide
  Sense strand starting at position 3445 of SEQ ID NO: 914055
gcaauucccuggucuugau

SEQ ID NO: 974609 - RNA, 19 nt, Artificial Sequence
  Description of Artificial Sequence: Synthetic oligonucleotide
  Antisense strand to SEQ ID NO: 974608
aucaagaccagggaauugc

SEQ ID NO: 974610 - RNA, 19 nt, Artificial Sequence
  Description of Artificial Sequence: Synthetic oligonucleotide
  Sense strand starting at position 1406 of SEQ ID NO: 914055
guccucucccuuuauguuu

SEQ ID NO: 974611 - RNA, 19 nt, Artificial Sequence
  Description of Artificial Sequence: Synthetic oligonucleotide
  Antisense strand to SEQ ID NO: 974610
aaacauaaagggagaggac

SEQ ID NO: 974612 - RNA, 19 nt, Artificial Sequence
  Description of Artificial Sequence: Synthetic oligonucleotide
  Sense strand starting at position 3371 of SEQ ID NO: 914055
gagacuaauuuguguaaua

SEQ ID NO: 974613 - RNA, 19 nt, Artificial Sequence
  Description of Artificial Sequence: Synthetic oligonucleotide
  Antisense strand to SEQ ID NO: 974612
uauuacacaaauuagucuc

SEQ ID NO: 974614 - RNA, 19 nt, Artificial Sequence
  Description of Artificial Sequence: Synthetic oligonucleotide
  Sense strand starting at position 3442 of SEQ ID NO: 914055
auugcaauucccuggucuu

SEQ ID NO: 974615 - RNA, 19 nt, Artificial Sequence
  Description of Artificial Sequence: Synthetic oligonucleotide
  Antisense strand to SEQ ID NO: 974614
aagaccagggaauugcaau

SEQ ID NO: 974616 - RNA, 19 nt, Artificial Sequence
  Description of Artificial Sequence: Synthetic oligonucleotide
  Sense strand starting at position 1157 of SEQ ID NO: 914056
cgauaagcagcugugcauu

SEQ ID NO: 974617 - RNA, 19 nt, Artificial Sequence
  Description of Artificial Sequence: Synthetic oligonucleotide
  Antisense strand to SEQ ID NO: 974616
aaugcacagcugcuuaucg

SEQ ID NO: 974618 - RNA, 19 nt, Artificial Sequence
  Description of Artificial Sequence: Synthetic oligonucleotide
  Sense strand starting at position 2197 of SEQ ID NO: 914056
gggucagaucuggaccagu

SEQ ID NO: 974619 - RNA, 19 nt, Artificial Sequence
  Description of Artificial Sequence: Synthetic oligonucleotide
  Antisense strand to SEQ ID NO: 974618
acugguccagaucugaccc

SEQ ID NO: 974620 - RNA, 19 nt, Artificial Sequence
  Description of Artificial Sequence: Synthetic oligonucleotide
  Sense strand starting at position 2489 of SEQ ID NO: 914056
ccugaaauauuugaggaac

SEQ ID NO: 974621 - RNA, 19 nt, Artificial Sequence
  Description of Artificial Sequence: Synthetic oligonucleotide
  Antisense strand to SEQ ID NO: 974620
guuccucaaauauuucagg

SEQ ID NO: 974622 - RNA, 19 nt, Artificial Sequence
  Description of Artificial Sequence: Synthetic oligonucleotide
  Sense strand starting at position 2675 of SEQ ID NO: 914056
ugggcauaucaccaaaggu

SEQ ID NO: 974623 - RNA, 19 nt, Artificial Sequence
  Description of Artificial Sequence: Synthetic oligonucleotide
  Antisense strand to SEQ ID NO: 974622
accuuuggugauaugccca

SEQ ID NO: 974624 - RNA, 19 nt, Artificial Sequence
  Description of Artificial Sequence: Synthetic oligonucleotide
  Sense strand starting at position 3004 of SEQ ID NO: 914056
gccaguuaucaugauggag

SEQ ID NO: 974625 - RNA, 19 nt, Artificial Sequence
  Description of Artificial Sequence: Synthetic oligonucleotide
  Antisense strand to SEQ ID NO: 974624
cuccaucaugauaacuggc

SEQ ID NO: 974626 - RNA, 19 nt, Artificial Sequence
  Description of Artificial Sequence: Synthetic oligonucleotide
  Sense strand starting at position 2549 of SEQ ID NO: 914056
gauauuccagccgauaaug

SEQ ID NO: 974627 - RNA, 19 nt, Artificial Sequence
  Description of Artificial Sequence: Synthetic oligonucleotide
  Antisense strand to SEQ ID NO: 974626
cauuaucggcuggaauauc

SEQ ID NO: 974628 - RNA, 19 nt, Artificial Sequence
  Description of Artificial Sequence: Synthetic oligonucleotide
  Sense strand starting at position 3354 of SEQ ID NO: 914056
uaagaauucuugcugggag

SEQ ID NO: 974629 - RNA, 19 nt, Artificial Sequence
  Description of Artificial Sequence: Synthetic oligonucleotide
  Antisense strand to SEQ ID NO: 974628
cucccagcaagaauucuua

SEQ ID NO: 974630 - RNA, 19 nt, Artificial Sequence
  Description of Artificial Sequence: Synthetic oligonucleotide
  Sense strand starting at position 1592 of SEQ ID NO: 914056
cagggucagcaaugacaga

SEQ ID NO: 974631 - RNA, 19 nt, Artificial Sequence
  Description of Artificial Sequence: Synthetic oligonucleotide
  Antisense strand to SEQ ID NO: 974630
ucugucauugcugacccug

SEQ ID NO: 974632 - RNA, 19 nt, Artificial Sequence
  Description of Artificial Sequence: Synthetic oligonucleotide
  Sense strand starting at position 2607 of SEQ ID NO: 914056
aaauguucuguagacaggu

SEQ ID NO: 974633 - RNA, 19 nt, Artificial Sequence
  Description of Artificial Sequence: Synthetic oligonucleotide
  Antisense strand to SEQ ID NO: 974632
accugucuacagaacauuu

SEQ ID NO: 974634 - RNA, 19 nt, Artificial Sequence
  Description of Artificial Sequence: Synthetic oligonucleotide
  Sense strand starting at position 1298 of SEQ ID NO: 914056
ccguauuucuaaccacugu

SEQ ID NO: 974635 - RNA, 19 nt, Artificial Sequence
  Description of Artificial Sequence: Synthetic oligonucleotide
  Antisense strand to SEQ ID NO: 974634
acagugguuagaaauacgg

SEQ ID NO: 974636 - RNA, 19 nt, Artificial Sequence
  Description of Artificial Sequence: Synthetic oligonucleotide
  Sense strand starting at position 3298 of SEQ ID NO: 914056
ucggguaggacaugauuaa

SEQ ID NO: 974637 - RNA, 19 nt, Artificial Sequence
  Description of Artificial Sequence: Synthetic oligonucleotide
  Antisense strand to SEQ ID NO: 974636
uuaaucauguccuacccga

SEQ ID NO: 974638 - RNA, 19 nt, Artificial Sequence
  Description of Artificial Sequence: Synthetic oligonucleotide
  Sense strand starting at position 1474 of SEQ ID NO: 914056
caaugaaaugcucgacaga

SEQ ID NO: 974639 - RNA, 19 nt, Artificial Sequence
  Description of Artificial Sequence: Synthetic oligonucleotide
  Antisense strand to SEQ ID NO: 974638
ucugucgagcauuucauug

SEQ ID NO: 974640 - RNA, 19 nt, Artificial Sequence
  Description of Artificial Sequence: Synthetic oligonucleotide
  Sense strand starting at position 3291 of SEQ ID NO: 914056
cacaguuucggguaggaca

SEQ ID NO: 974641 - RNA, 19 nt, Artificial Sequence
  Description of Artificial Sequence: Synthetic oligonucleotide
  Antisense strand to SEQ ID NO: 974640
uguccuacccgaaacugug

SEQ ID NO: 974642 - RNA, 19 nt, Artificial Sequence
  Description of Artificial Sequence: Synthetic oligonucleotide
  Sense strand starting at position 1216 of SEQ ID NO: 914056
agguaaguacuaugauuau

SEQ ID NO: 974643 - RNA, 19 nt, Artificial Sequence
  Description of Artificial Sequence: Synthetic oligonucleotide
  Antisense strand to SEQ ID NO: 974642
auaaucauaguacuuaccu

SEQ ID NO: 974644 - RNA, 19 nt, Artificial Sequence
  Description of Artificial Sequence: Synthetic oligonucleotide
  Sense strand starting at position 962 of SEQ ID NO: 914056
acuuucuagcgugaagaaa

SEQ ID NO: 974645 - RNA, 19 nt, Artificial Sequence
  Description of Artificial Sequence: Synthetic oligonucleotide
  Antisense strand to SEQ ID NO: 974644
uuucuucacgcuagaaagu

SEQ ID NO: 974646 - RNA, 19 nt, Artificial Sequence
  Description of Artificial Sequence: Synthetic oligonucleotide
  Sense strand starting at position 2434 of SEQ ID NO: 914056
gguugaauuaagggcuaua

SEQ ID NO: 974647 - RNA, 19 nt, Artificial Sequence
  Description of Artificial Sequence: Synthetic oligonucleotide
  Antisense strand to SEQ ID NO: 974646
uauagcccuuaauucaacc

SEQ ID NO: 974648 - RNA, 19 nt, Artificial Sequence
  Description of Artificial Sequence: Synthetic oligonucleotide
  Sense strand starting at position 1207 of SEQ ID NO: 914056
ggucuuaucagguaaguac

SEQ ID NO: 974649 - RNA, 19 nt, Artificial Sequence
  Description of Artificial Sequence: Synthetic oligonucleotide
  Antisense strand to SEQ ID NO: 974648
guacuuaccugauaagacc

SEQ ID NO: 974650 - RNA, 19 nt, Artificial Sequence
  Description of Artificial Sequence: Synthetic oligonucleotide
  Sense strand starting at position 2290 of SEQ ID NO: 914056
auguauugaagcgggagaa

SEQ ID NO: 974651 - RNA, 19 nt, Artificial Sequence
  Description of Artificial Sequence: Synthetic oligonucleotide
  Antisense strand to SEQ ID NO: 974650
uucucccgcuucaauacau

SEQ ID NO: 974652 - RNA, 19 nt, Artificial Sequence
  Description of Artificial Sequence: Synthetic oligonucleotide
  Sense strand starting at position 1287 of SEQ ID NO: 914056
gcaucaagagcccguauuu

SEQ ID NO: 974653 - RNA, 19 nt, Artificial Sequence
  Description of Artificial Sequence: Synthetic oligonucleotide
  Antisense strand to SEQ ID NO: 974652
aaauacgggcucuugaugc

SEQ ID NO: 974654 - RNA, 19 nt, Artificial Sequence
  Description of Artificial Sequence: Synthetic oligonucleotide
  Sense strand starting at position 3132 of SEQ ID NO: 914056
ccuacuaaguacucaagua

SEQ ID NO: 974655 - RNA, 19 nt, Artificial Sequence
  Description of Artificial Sequence: Synthetic oligonucleotide
  Antisense strand to SEQ ID NO: 974654
uacuugaguacuuaguagg

SEQ ID NO: 974656 - RNA, 19 nt, Artificial Sequence
  Description of Artificial Sequence: Synthetic oligonucleotide
  Sense strand starting at position 2280 of SEQ ID NO: 914056
cucauuaucuauguauuga

SEQ ID NO: 974657 - RNA, 19 nt, Artificial Sequence
  Description of Artificial Sequence: Synthetic oligonucleotide
  Antisense strand to SEQ ID NO: 974656
ucaauacauagauaaugag

SEQ ID NO: 974658 - RNA, 19 nt, Artificial Sequence
  Description of Artificial Sequence: Synthetic oligonucleotide
  Sense strand starting at position 1169 of SEQ ID NO: 914056
gugcauuugaugugcauau

SEQ ID NO: 974659 - RNA, 19 nt, Artificial Sequence
  Description of Artificial Sequence: Synthetic oligonucleotide
  Antisense strand to SEQ ID NO: 974658
auaugcacaucaaaugcac

SEQ ID NO: 974660 - RNA, 19 nt, Artificial Sequence
  Description of Artificial Sequence: Synthetic oligonucleotide
  Sense strand starting at position 2279 of SEQ ID NO: 914056
acucauuaucuauguauug

SEQ ID NO: 974661 - RNA, 19 nt, Artificial Sequence
  Description of Artificial Sequence: Synthetic oligonucleotide
  Antisense strand to SEQ ID NO: 974660
caauacauagauaaugagu

SEQ ID NO: 974662 - RNA, 19 nt, Artificial Sequence
  Description of Artificial Sequence: Synthetic oligonucleotide
  Sense strand starting at position 2580 of SEQ ID NO: 914056
ugaagaaauugugccacuu

SEQ ID NO: 974663 - RNA, 19 nt, Artificial Sequence
  Description of Artificial Sequence: Synthetic oligonucleotide
  Antisense strand to SEQ ID NO: 974662
aaguggcacaauuucuuca

SEQ ID NO: 974664 - RNA, 19 nt, Artificial Sequence
  Description of Artificial Sequence: Synthetic oligonucleotide
  Sense strand starting at position 2127 of SEQ ID NO: 914056
cggagaacguuuccaaaca

SEQ ID NO: 974665 - RNA, 19 nt, Artificial Sequence
  Description of Artificial Sequence: Synthetic oligonucleotide
  Antisense strand to SEQ ID NO: 974664
uguuuggaaacguucuccg

SEQ ID NO: 974666 - RNA, 19 nt, Artificial Sequence
  Description of Artificial Sequence: Synthetic oligonucleotide
  Sense strand starting at position 2289 of SEQ ID NO: 914056
uauguauugaagcgggaga

SEQ ID NO: 974667 - RNA, 19 nt, Artificial Sequence
  Description of Artificial Sequence: Synthetic oligonucleotide
  Antisense strand to SEQ ID NO: 974666
ucucccgcuucaauacaua

SEQ ID NO: 974668 - RNA, 19 nt, Artificial Sequence
  Description of Artificial Sequence: Synthetic oligonucleotide
  Sense strand starting at position 2551 of SEQ ID NO: 914056
uauuccagccgauaaugua

SEQ ID NO: 974669 - RNA, 19 nt, Artificial Sequence
  Description of Artificial Sequence: Synthetic oligonucleotide
  Antisense strand to SEQ ID NO: 974668
uacauuaucggcuggaaua

SEQ ID NO: 974670 - RNA, 19 nt, Artificial Sequence
  Description of Artificial Sequence: Synthetic oligonucleotide
  Sense strand starting at position 2970 of SEQ ID NO: 914056
guauuccugccugauacac

SEQ ID NO: 974671 - RNA, 19 nt, Artificial Sequence
  Description of Artificial Sequence: Synthetic oligonucleotide
  Antisense strand to SEQ ID NO: 974670
guguaucaggcaggaauac

SEQ ID NO: 974672 - RNA, 19 nt, Artificial Sequence
  Description of Artificial Sequence: Synthetic oligonucleotide
  Sense strand starting at position 136 of SEQ ID NO: 914056
uugauuguaucaucucuca

SEQ ID NO: 974673 - RNA, 19 nt, Artificial Sequence
  Description of Artificial Sequence: Synthetic oligonucleotide
  Antisense strand to SEQ ID NO: 974672
ugagagaugauacaaucaa

SEQ ID NO: 974674 - RNA, 19 nt, Artificial Sequence
  Description of Artificial Sequence: Synthetic oligonucleotide
  Sense strand starting at position 3356 of SEQ ID NO: 914056
agaauucuugcugggagca

SEQ ID NO: 974675 - RNA, 19 nt, Artificial Sequence
  Description of Artificial Sequence: Synthetic oligonucleotide
  Antisense strand to SEQ ID NO: 974674
ugcucccagcaagaauucu

SEQ ID NO: 974676 - RNA, 19 nt, Artificial Sequence
  Description of Artificial Sequence: Synthetic oligonucleotide
  Sense strand starting at position 502 of SEQ ID NO: 914056
augacuggcuccuuauauc

SEQ ID NO: 974677 - RNA, 19 nt, Artificial Sequence
  Description of Artificial Sequence: Synthetic oligonucleotide
  Antisense strand to SEQ ID NO: 974676
gauauaaggagccagucau

SEQ ID NO: 974678 - RNA, 19 nt, Artificial Sequence
  Description of Artificial Sequence: Synthetic oligonucleotide
  Sense strand starting at position 3021 of SEQ ID NO: 914056
agcccaacucauugugaca

SEQ ID NO: 974679 - RNA, 19 nt, Artificial Sequence
  Description of Artificial Sequence: Synthetic oligonucleotide
  Antisense strand to SEQ ID NO: 974678
ugucacaaugaguugggcu

SEQ ID NO: 974680 - RNA, 19 nt, Artificial Sequence
  Description of Artificial Sequence: Synthetic oligonucleotide
  Sense strand starting at position 617 of SEQ ID NO: 914056
uuauauugacauugucagu

SEQ ID NO: 974681 - RNA, 19 nt, Artificial Sequence
  Description of Artificial Sequence: Synthetic oligonucleotide
  Antisense strand to SEQ ID NO: 974680
acugacaaugucaauauaa

SEQ ID NO: 974682 - RNA, 19 nt, Artificial Sequence
  Description of Artificial Sequence: Synthetic oligonucleotide
  Sense strand starting at position 1045 of SEQ ID NO: 914056
guauucugugaccagcuca

SEQ ID NO: 974683 - RNA, 19 nt, Artificial Sequence
  Description of Artificial Sequence: Synthetic oligonucleotide
  Antisense strand to SEQ ID NO: 974682
ugagcuggucacagaauac

SEQ ID NO: 974684 - RNA, 19 nt, Artificial Sequence
  Description of Artificial Sequence: Synthetic oligonucleotide
  Sense strand starting at position 718 of SEQ ID NO: 914056
augucuggcauaugguaaa

SEQ ID NO: 974685 - RNA, 19 nt, Artificial Sequence
  Description of Artificial Sequence: Synthetic oligonucleotide
  Antisense strand to SEQ ID NO: 974684
uuuaccauaugccagacau

SEQ ID NO: 974686 - RNA, 19 nt, Artificial Sequence
  Description of Artificial Sequence: Synthetic oligonucleotide
  Sense strand starting at position 2171 of SEQ ID NO: 914056
ccucaccuacccugugauu

SEQ ID NO: 974687 - RNA, 19 nt, Artificial Sequence
  Description of Artificial Sequence: Synthetic oligonucleotide
  Antisense strand to SEQ ID NO: 974686
aaucacaggguaggugagg

SEQ ID NO: 974688 - RNA, 19 nt, Artificial Sequence
  Description of Artificial Sequence: Synthetic oligonucleotide
  Sense strand starting at position 3251 of SEQ ID NO: 914056
auggaauacuccuaaagaa

SEQ ID NO: 974689 - RNA, 19 nt, Artificial Sequence
  Description of Artificial Sequence: Synthetic oligonucleotide
  Antisense strand to SEQ ID NO: 974688
uucuuuaggaguauuccau

SEQ ID NO: 974690 - RNA, 19 nt, Artificial Sequence
  Description of Artificial Sequence: Synthetic oligonucleotide
  Sense strand starting at position 999 of SEQ ID NO: 914056
agccaagauuuccaaagca

SEQ ID NO: 974691 - RNA, 19 nt, Artificial Sequence
  Description of Artificial Sequence: Synthetic oligonucleotide
  Antisense strand to SEQ ID NO: 974690
ugcuuuggaaaucuuggcu

SEQ ID NO: 974692 - RNA, 19 nt, Artificial Sequence
  Description of Artificial Sequence: Synthetic oligonucleotide
  Sense strand starting at position 2949 of SEQ ID NO: 914056
ugcuuaacgcaugaauucu

SEQ ID NO: 974693 - RNA, 19 nt, Artificial Sequence
  Description of Artificial Sequence: Synthetic oligonucleotide
  Antisense strand to SEQ ID NO: 974692
agaauucaugcguuaagca

SEQ ID NO: 974694 - RNA, 19 nt, Artificial Sequence
  Description of Artificial Sequence: Synthetic oligonucleotide
  Sense strand starting at position 498 of SEQ ID NO: 914056
cgacaugacuggcuccuua

SEQ ID NO: 974695 - RNA, 19 nt, Artificial Sequence
  Description of Artificial Sequence: Synthetic oligonucleotide
  Antisense strand to SEQ ID NO: 974694
uaaggagccagucaugucg

SEQ ID NO: 974696 - RNA, 19 nt, Artificial Sequence
  Description of Artificial Sequence: Synthetic oligonucleotide
  Sense strand starting at position 2768 of SEQ ID NO: 914057
ugacacgucguuguguaua

SEQ ID NO: 974697 - RNA, 19 nt, Artificial Sequence
  Description of Artificial Sequence: Synthetic oligonucleotide
  Antisense strand to SEQ ID NO: 974696
uauacacaacgacguguca

SEQ ID NO: 974698 - RNA, 19 nt, Artificial Sequence
  Description of Artificial Sequence: Synthetic oligonucleotide
  Sense strand starting at position 772 of SEQ ID NO: 914057
aggauuaacuaauugucau

SEQ ID NO: 974699 - RNA, 19 nt, Artificial Sequence
  Description of Artificial Sequence: Synthetic oligonucleotide
  Antisense strand to SEQ ID NO: 974698
augacaauuaguuaauccu

SEQ ID NO: 974700 - RNA, 19 nt, Artificial Sequence
  Description of Artificial Sequence: Synthetic oligonucleotide
  Sense strand starting at position 2216 of SEQ ID NO: 914057
ggguucuucgucgucuaca

SEQ ID NO: 974701 - RNA, 19 nt, Artificial Sequence
  Description of Artificial Sequence: Synthetic oligonucleotide
  Antisense strand to SEQ ID NO: 974700
uguagacgacgaagaaccc

SEQ ID NO: 974702 - RNA, 19 nt, Artificial Sequence
  Description of Artificial Sequence: Synthetic oligonucleotide
  Sense strand starting at position 1475 of SEQ ID NO: 914057
gcaacaugccaaggaaaga

SEQ ID NO: 974703 - RNA, 19 nt, Artificial Sequence
  Description of Artificial Sequence: Synthetic oligonucleotide
  Antisense strand to SEQ ID NO: 974702
ucuuuccuuggcauguugc

SEQ ID NO: 974704 - RNA, 19 nt, Artificial Sequence
  Description of Artificial Sequence: Synthetic oligonucleotide
  Sense strand starting at position 3731 of SEQ ID NO: 914057
ccugauaugcaguaaacuu

SEQ ID NO: 974705 - RNA, 19 nt, Artificial Sequence
  Description of Artificial Sequence: Synthetic oligonucleotide
  Antisense strand to SEQ ID NO: 974704
aaguuuacugcauaucagg

SEQ ID NO: 974706 - RNA, 19 nt, Artificial Sequence
  Description of Artificial Sequence: Synthetic oligonucleotide
  Sense strand starting at position 388 of SEQ ID NO: 914057
uugccuaaaguugacuaua

SEQ ID NO: 974707 - RNA, 19 nt, Artificial Sequence
  Description of Artificial Sequence: Synthetic oligonucleotide
  Antisense strand to SEQ ID NO: 974706
uauagucaacuuuaggcaa

SEQ ID NO: 974708 - RNA, 19 nt, Artificial Sequence
  Description of Artificial Sequence: Synthetic oligonucleotide
  Sense strand starting at position 966 of SEQ ID NO: 914057
ucaggaggcuuccuagaac

SEQ ID NO: 974709 - RNA, 19 nt, Artificial Sequence
  Description of Artificial Sequence: Synthetic oligonucleotide
  Antisense strand to SEQ ID NO: 974708
guucuaggaagccuccuga

SEQ ID NO: 974710 - RNA, 19 nt, Artificial Sequence
  Description of Artificial Sequence: Synthetic oligonucleotide
  Sense strand starting at position 943 of SEQ ID NO: 914057
acgcgaaacaaguaucaau

SEQ ID NO: 974711 - RNA, 19 nt, Artificial Sequence
  Description of Artificial Sequence: Synthetic oligonucleotide
  Antisense strand to SEQ ID NO: 974710
auugauacuuguuucgcgu

SEQ ID NO: 974712 - RNA, 19 nt, Artificial Sequence
  Description of Artificial Sequence: Synthetic oligonucleotide
  Sense strand starting at position 779 of SEQ ID NO: 914057
acuaauugucaugggcaga

SEQ ID NO: 974713 - RNA, 19 nt, Artificial Sequence
  Description of Artificial Sequence: Synthetic oligonucleotide
  Antisense strand to SEQ ID NO: 974712
ucugcccaugacaauuagu

SEQ ID NO: 974714 - RNA, 19 nt, Artificial Sequence
  Description of Artificial Sequence: Synthetic oligonucleotide
  Sense strand starting at position 753 of SEQ ID NO: 914057
gucacugauguuugacaga

SEQ ID NO: 974715 - RNA, 19 nt, Artificial Sequence
  Description of Artificial Sequence: Synthetic oligonucleotide
  Antisense strand to SEQ ID NO: 974714
ucugucaaacaucagugac

SEQ ID NO: 974716 - RNA, 19 nt, Artificial Sequence
  Description of Artificial Sequence: Synthetic oligonucleotide
  Sense strand starting at position 438 of SEQ ID NO: 914057
ugggcagucaccgauauau

SEQ ID NO: 974717 - RNA, 19 nt, Artificial Sequence
  Description of Artificial Sequence: Synthetic oligonucleotide
  Antisense strand to SEQ ID NO: 974716
auauaucggugacugccca

SEQ ID NO: 974718 - RNA, 19 nt, Artificial Sequence
  Description of Artificial Sequence: Synthetic oligonucleotide
  Sense strand starting at position 246 of SEQ ID NO: 914057
gggucugcaauguggagaa

SEQ ID NO: 974719 - RNA, 19 nt, Artificial Sequence
  Description of Artificial Sequence: Synthetic oligonucleotide
  Antisense strand to SEQ ID NO: 974718
uucuccacauugcagaccc

SEQ ID NO: 974720 - RNA, 19 nt, Artificial Sequence
  Description of Artificial Sequence: Synthetic oligonucleotide
  Sense strand starting at position 780 of SEQ ID NO: 914057
cuaauugucaugggcagau

SEQ ID NO: 974721 - RNA, 19 nt, Artificial Sequence
  Description of Artificial Sequence: Synthetic oligonucleotide
  Antisense strand to SEQ ID NO: 974720
aucugcccaugacaauuag

SEQ ID NO: 974722 - RNA, 19 nt, Artificial Sequence
  Description of Artificial Sequence: Synthetic oligonucleotide
  Sense strand starting at position 390 of SEQ ID NO: 914057
gccuaaaguugacuauauu

SEQ ID NO: 974723 - RNA, 19 nt, Artificial Sequence
  Description of Artificial Sequence: Synthetic oligonucleotide
  Antisense strand to SEQ ID NO: 974722
aauauagucaacuuuaggc

SEQ ID NO: 974724 - RNA, 19 nt, Artificial Sequence
  Description of Artificial Sequence: Synthetic oligonucleotide
  Sense strand starting at position 2761 of SEQ ID NO: 914057
acauuugugacacgucguu

SEQ ID NO: 974725 - RNA, 19 nt, Artificial Sequence
  Description of Artificial Sequence: Synthetic oligonucleotide
  Antisense strand to SEQ ID NO: 974724
aacgacgugucacaaaugu

SEQ ID NO: 974726 - RNA, 19 nt, Artificial Sequence
  Description of Artificial Sequence: Synthetic oligonucleotide
  Sense strand starting at position 935 of SEQ ID NO: 914057
cauugcuaacgcgaaacaa

SEQ ID NO: 974727 - RNA, 19 nt, Artificial Sequence
  Description of Artificial Sequence: Synthetic oligonucleotide
  Antisense strand to SEQ ID NO: 974726
uuguuucgcguuagcaaug

SEQ ID NO: 974728 - RNA, 19 nt, Artificial Sequence
  Description of Artificial Sequence: Synthetic oligonucleotide
  Sense strand starting at position 784 of SEQ ID NO: 914057
uugucaugggcagauguuu

SEQ ID NO: 974729 - RNA, 19 nt, Artificial Sequence
  Description of Artificial Sequence: Synthetic oligonucleotide
  Antisense strand to SEQ ID NO: 974728
aaacaucugcccaugacaa

SEQ ID NO: 974730 - RNA, 19 nt, Artificial Sequence
  Description of Artificial Sequence: Synthetic oligonucleotide
  Sense strand starting at position 7 of SEQ ID NO: 914057
guuacucucccagguaaua

SEQ ID NO: 974731 - RNA, 19 nt, Artificial Sequence
  Description of Artificial Sequence: Synthetic oligonucleotide
  Antisense strand to SEQ ID NO: 974730
uauuaccugggagaguaac

SEQ ID NO: 974732 - RNA, 19 nt, Artificial Sequence
  Description of Artificial Sequence: Synthetic oligonucleotide
  Sense strand starting at position 437 of SEQ ID NO: 914057
augggcagucaccgauaua

SEQ ID NO: 974733 - RNA, 19 nt, Artificial Sequence
  Description of Artificial Sequence: Synthetic oligonucleotide
  Antisense strand to SEQ ID NO: 974732
uauaucggugacugcccau

SEQ ID NO: 974734 - RNA, 19 nt, Artificial Sequence
  Description of Artificial Sequence: Synthetic oligonucleotide
  Sense strand starting at position 351 of SEQ ID NO: 914057
ugucuuaaagcugacguga

SEQ ID NO: 974735 - RNA, 19 nt, Artificial Sequence
  Description of Artificial Sequence: Synthetic oligonucleotide
  Antisense strand to SEQ ID NO: 974734
ucacgucagcuuuaagaca

SEQ ID NO: 974736 - RNA, 19 nt, Artificial Sequence
  Description of Artificial Sequence: Synthetic oligonucleotide
  Sense strand starting at position 440 of SEQ ID NO: 914057
ggcagucaccgauauaugu

SEQ ID NO: 974737 - RNA, 19 nt, Artificial Sequence
  Description of Artificial Sequence: Synthetic oligonucleotide
  Antisense strand to SEQ ID NO: 974736
acauauaucggugacugcc

SEQ ID NO: 974738 - RNA, 19 nt, Artificial Sequence
  Description of Artificial Sequence: Synthetic oligonucleotide
  Sense strand starting at position 3311 of SEQ ID NO: 914057
gagucucugcuguacuuga

SEQ ID NO: 974739 - RNA, 19 nt, Artificial Sequence
  Description of Artificial Sequence: Synthetic oligonucleotide
  Antisense strand to SEQ ID NO: 974738
ucaaguacagcagagacuc

SEQ ID NO: 974740 - RNA, 19 nt, Artificial Sequence
  Description of Artificial Sequence: Synthetic oligonucleotide
  Sense strand starting at position 795 of SEQ ID NO: 914057
agauguuuguuacccaagu

SEQ ID NO: 974741 - RNA, 19 nt, Artificial Sequence
  Description of Artificial Sequence: Synthetic oligonucleotide
  Antisense strand to SEQ ID NO: 974740
acuuggguaacaaacaucu

SEQ ID NO: 974742 - RNA, 19 nt, Artificial Sequence
  Description of Artificial Sequence: Synthetic oligonucleotide
  Sense strand starting at position 796 of SEQ ID NO: 914057
gauguuuguuacccaagua

SEQ ID NO: 974743 - RNA, 19 nt, Artificial Sequence
  Description of Artificial Sequence: Synthetic oligonucleotide
  Antisense strand to SEQ ID NO: 974742
uacuuggguaacaaacauc

SEQ ID NO: 974744 - RNA, 19 nt, Artificial Sequence
  Description of Artificial Sequence: Synthetic oligonucleotide
  Sense strand starting at position 447 of SEQ ID NO: 914057
accgauauauguuuguuua

SEQ ID NO: 974745 - RNA, 19 nt, Artificial Sequence
  Description of Artificial Sequence: Synthetic oligonucleotide
  Antisense strand to SEQ ID NO: 974744
uaaacaaacauauaucggu

SEQ ID NO: 974746 - RNA, 19 nt, Artificial Sequence
  Description of Artificial Sequence: Synthetic oligonucleotide
  Sense strand starting at position 3063 of SEQ ID NO: 914057
gcagguuuccgccaccaaa

SEQ ID NO: 974747 - RNA, 19 nt, Artificial Sequence
  Description of Artificial Sequence: Synthetic oligonucleotide
  Antisense strand to SEQ ID NO: 974746
uuugguggcggaaaccugc

SEQ ID NO: 974748 - RNA, 19 nt, Artificial Sequence
  Description of Artificial Sequence: Synthetic oligonucleotide
  Sense strand starting at position 792 of SEQ ID NO: 914057
ggcagauguuuguuaccca

SEQ ID NO: 974749 - RNA, 19 nt, Artificial Sequence
  Description of Artificial Sequence: Synthetic oligonucleotide
  Antisense strand to SEQ ID NO: 974748
uggguaacaaacaucugcc

SEQ ID NO: 974750 - RNA, 19 nt, Artificial Sequence
  Description of Artificial Sequence: Synthetic oligonucleotide
  Sense strand starting at position 381 of SEQ ID NO: 914057
ucuguaguugccuaaaguu

SEQ ID NO: 974751 - RNA, 19 nt, Artificial Sequence
  Description of Artificial Sequence: Synthetic oligonucleotide
  Antisense strand to SEQ ID NO: 974750
aacuuuaggcaacuacaga

SEQ ID NO: 974752 - RNA, 19 nt, Artificial Sequence
  Description of Artificial Sequence: Synthetic oligonucleotide
  Sense strand starting at position 1095 of SEQ ID NO: 914057
ccugucuauccuugugaug

SEQ ID NO: 974753 - RNA, 19 nt, Artificial Sequence
  Description of Artificial Sequence: Synthetic oligonucleotide
  Antisense strand to SEQ ID NO: 974752
caucacaaggauagacagg

SEQ ID NO: 974754 - RNA, 19 nt, Artificial Sequence
  Description of Artificial Sequence: Synthetic oligonucleotide
  Sense strand starting at position 1094 of SEQ ID NO: 914057
cccugucuauccuugugau

SEQ ID NO: 974755 - RNA, 19 nt, Artificial Sequence
  Description of Artificial Sequence: Synthetic oligonucleotide
  Antisense strand to SEQ ID NO: 974754
aucacaaggauagacaggg

SEQ ID NO: 974756 - RNA, 19 nt, Artificial Sequence
  Description of Artificial Sequence: Synthetic oligonucleotide
  Sense strand starting at position 3749 of SEQ ID NO: 914057
ucuagauagaguggucguu

SEQ ID NO: 974757 - RNA, 19 nt, Artificial Sequence
  Description of Artificial Sequence: Synthetic oligonucleotide
  Antisense strand to SEQ ID NO: 974756
aacgaccacucuaucuaga

SEQ ID NO: 974758 - RNA, 19 nt, Artificial Sequence
  Description of Artificial Sequence: Synthetic oligonucleotide
  Sense strand starting at position 448 of SEQ ID NO: 914057
ccgauauauguuuguuuau

SEQ ID NO: 974759 - RNA, 19 nt, Artificial Sequence
  Description of Artificial Sequence: Synthetic oligonucleotide
  Antisense strand to SEQ ID NO: 974758
auaaacaaacauauaucgg

SEQ ID NO: 974760 - RNA, 19 nt, Artificial Sequence
  Description of Artificial Sequence: Synthetic oligonucleotide
  Sense strand starting at position 28 of SEQ ID NO: 914057
aaaguacuugcuuguguaa

SEQ ID NO: 974761 - RNA, 19 nt, Artificial Sequence
  Description of Artificial Sequence: Synthetic oligonucleotide
  Antisense strand to SEQ ID NO: 974760
uuacacaagcaaguacuuu

SEQ ID NO: 974762 - RNA, 19 nt, Artificial Sequence
  Description of Artificial Sequence: Synthetic oligonucleotide
  Sense strand starting at position 2737 of SEQ ID NO: 914057
ucguuaucucuuggaaguu

SEQ ID NO: 974763 - RNA, 19 nt, Artificial Sequence
  Description of Artificial Sequence: Synthetic oligonucleotide
  Antisense strand to SEQ ID NO: 974762
aacuuccaagagauaacga

SEQ ID NO: 974764 - RNA, 19 nt, Artificial Sequence
  Description of Artificial Sequence: Synthetic oligonucleotide
  Sense strand starting at position 2729 of SEQ ID NO: 914057
gcuucuuaucguuaucucu

SEQ ID NO: 974765 - RNA, 19 nt, Artificial Sequence
  Description of Artificial Sequence: Synthetic oligonucleotide
  Antisense strand to SEQ ID NO: 974764
agagauaacgauaagaagc

SEQ ID NO: 974766 - RNA, 19 nt, Artificial Sequence
  Description of Artificial Sequence: Synthetic oligonucleotide
  Sense strand starting at position 2776 of SEQ ID NO: 914057
cguuguguauaguuaauag

SEQ ID NO: 974767 - RNA, 19 nt, Artificial Sequence
  Description of Artificial Sequence: Synthetic oligonucleotide
  Antisense strand to SEQ ID NO: 974766
cuauuaacuauacacaacg

SEQ ID NO: 974768 - RNA, 19 nt, Artificial Sequence
  Description of Artificial Sequence: Synthetic oligonucleotide
  Sense strand starting at position 2806 of SEQ ID NO: 914057
ucugucucgacguaagcua

SEQ ID NO: 974769 - RNA, 19 nt, Artificial Sequence
  Description of Artificial Sequence: Synthetic oligonucleotide
  Antisense strand to SEQ ID NO: 974768
uagcuuacgucgagacaga

SEQ ID NO: 974770 - RNA, 19 nt, Artificial Sequence
  Description of Artificial Sequence: Synthetic oligonucleotide
  Sense strand starting at position 362 of SEQ ID NO: 914057
ugacgugagugauuacguu

SEQ ID NO: 974771 - RNA, 19 nt, Artificial Sequence
  Description of Artificial Sequence: Synthetic oligonucleotide
  Antisense strand to SEQ ID NO: 974770
aacguaaucacucacguca

SEQ ID NO: 974772 - RNA, 19 nt, Artificial Sequence
  Description of Artificial Sequence: Synthetic oligonucleotide
  Sense strand starting at position 380 of SEQ ID NO: 914057
uucuguaguugccuaaagu

SEQ ID NO: 974773 - RNA, 19 nt, Artificial Sequence
  Description of Artificial Sequence: Synthetic oligonucleotide
  Antisense strand to SEQ ID NO: 974772
acuuuaggcaacuacagaa

SEQ ID NO: 974774 - RNA, 19 nt, Artificial Sequence
  Description of Artificial Sequence: Synthetic oligonucleotide
  Sense strand starting at position 227 of SEQ ID NO: 914057
gcuucuguccuuugccaaa

SEQ ID NO: 974775 - RNA, 19 nt, Artificial Sequence
  Description of Artificial Sequence: Synthetic oligonucleotide
  Antisense strand to SEQ ID NO: 974774
uuuggcaaaggacagaagc

SEQ ID NO: 974776 - RNA, 19 nt, Artificial Sequence
  Description of Artificial Sequence: Synthetic oligonucleotide
  Sense strand starting at position 3331 of SEQ ID NO: 914058
acacuuauaguuuaagagu

SEQ ID NO: 974777 - RNA, 19 nt, Artificial Sequence
  Description of Artificial Sequence: Synthetic oligonucleotide
  Antisense strand to SEQ ID NO: 974776
acucuuaaacuauaagugu

SEQ ID NO: 974778 - RNA, 19 nt, Artificial Sequence
  Description of Artificial Sequence: Synthetic oligonucleotide
  Sense strand starting at position 676 of SEQ ID NO: 914058
gggagcuaugaucauguca

SEQ ID NO: 974779 - RNA, 19 nt, Artificial Sequence
  Description of Artificial Sequence: Synthetic oligonucleotide
  Antisense strand to SEQ ID NO: 974778
ugacaugaucauagcuccc

SEQ ID NO: 974780 - RNA, 19 nt, Artificial Sequence
  Description of Artificial Sequence: Synthetic oligonucleotide
  Sense strand starting at position 3766 of SEQ ID NO: 914058
gcaguucuugaacacacaa

SEQ ID NO: 974781 - RNA, 19 nt, Artificial Sequence
  Description of Artificial Sequence: Synthetic oligonucleotide
  Antisense strand to SEQ ID NO: 974780
uuguguguucaagaacugc

SEQ ID NO: 974782 - RNA, 19 nt, Artificial Sequence
  Description of Artificial Sequence: Synthetic oligonucleotide
  Sense strand starting at position 3464 of SEQ ID NO: 914058
auauacucacagggaguuu

SEQ ID NO: 974783 - RNA, 19 nt, Artificial Sequence
  Description of Artificial Sequence: Synthetic oligonucleotide
  Antisense strand to SEQ ID NO: 974782
aaacucccugugaguauau

SEQ ID NO: 974784 - RNA, 19 nt, Artificial Sequence
  Description of Artificial Sequence: Synthetic oligonucleotide
  Sense strand starting at position 419 of SEQ ID NO: 914058
ccaccagaugguugaauua

SEQ ID NO: 974785 - RNA, 19 nt, Artificial Sequence
  Description of Artificial Sequence: Synthetic oligonucleotide
  Antisense strand to SEQ ID NO: 974784
uaauucaaccaucuggugg

SEQ ID NO: 974786 - RNA, 19 nt, Artificial Sequence
  Description of Artificial Sequence: Synthetic oligonucleotide
  Sense strand starting at position 3233 of SEQ ID NO: 914058
cuccuauuugcucagugca

SEQ ID NO: 974787 - RNA, 19 nt, Artificial Sequence
  Description of Artificial Sequence: Synthetic oligonucleotide
  Antisense strand to SEQ ID NO: 974786
ugcacugagcaaauaggag

SEQ ID NO: 974788 - RNA, 19 nt, Artificial Sequence
  Description of Artificial Sequence: Synthetic oligonucleotide
  Sense strand starting at position 861 of SEQ ID NO: 914058
ggcaucccugauugaggaa

SEQ ID NO: 974789 - RNA, 19 nt, Artificial Sequence
  Description of Artificial Sequence: Synthetic oligonucleotide
  Antisense strand to SEQ ID NO: 974788
uuccucaaucagggaugcc

SEQ ID NO: 974790 - RNA, 19 nt, Artificial Sequence
  Description of Artificial Sequence: Synthetic oligonucleotide
  Sense strand starting at position 3235 of SEQ ID NO: 914058
ccuauuugcucagugcaaa

SEQ ID NO: 974791 - RNA, 19 nt, Artificial Sequence
  Description of Artificial Sequence: Synthetic oligonucleotide
  Antisense strand to SEQ ID NO: 974790
uuugcacugagcaaauagg

SEQ ID NO: 974792 - RNA, 19 nt, Artificial Sequence
  Description of Artificial Sequence: Synthetic oligonucleotide
  Sense strand starting at position 3342 of SEQ ID NO: 914058
uuaagagucacauggguga

SEQ ID NO: 974793 - RNA, 19 nt, Artificial Sequence
  Description of Artificial Sequence: Synthetic oligonucleotide
  Antisense strand to SEQ ID NO: 974792
ucacccaugugacucuuaa

SEQ ID NO: 974794 - RNA, 19 nt, Artificial Sequence
  Description of Artificial Sequence: Synthetic oligonucleotide
  Sense strand starting at position 2975 of SEQ ID NO: 914058
cuaucuggccuuggaaaga

SEQ ID NO: 974795 - RNA, 19 nt, Artificial Sequence
  Description of Artificial Sequence: Synthetic oligonucleotide
  Antisense strand to SEQ ID NO: 974794
ucuuuccaaggccagauag

SEQ ID NO: 974796 - RNA, 19 nt, Artificial Sequence
  Description of Artificial Sequence: Synthetic oligonucleotide
  Sense strand starting at position 860 of SEQ ID NO: 914058
uggcaucccugauugagga

SEQ ID NO: 974797 - RNA, 19 nt, Artificial Sequence
  Description of Artificial Sequence: Synthetic oligonucleotide
  Antisense strand to SEQ ID NO: 974796
uccucaaucagggaugcca

SEQ ID NO: 974798 - RNA, 19 nt, Artificial Sequence
  Description of Artificial Sequence: Synthetic oligonucleotide
  Sense strand starting at position 21 of SEQ ID NO: 914058
uaagcaucuguagagguua

SEQ ID NO: 974799 - RNA, 19 nt, Artificial Sequence
  Description of Artificial Sequence: Synthetic oligonucleotide
  Antisense strand to SEQ ID NO: 974798
uaaccucuacagaugcuua

SEQ ID NO: 974800 - RNA, 19 nt, Artificial Sequence
  Description of Artificial Sequence: Synthetic oligonucleotide
  Sense strand starting at position 3271 of SEQ ID NO: 914058
gcacuauggcuaggaggaa

SEQ ID NO: 974801 - RNA, 19 nt, Artificial Sequence
  Description of Artificial Sequence: Synthetic oligonucleotide
  Antisense strand to SEQ ID NO: 974800
uuccuccuagccauagugc

SEQ ID NO: 974802 - RNA, 19 nt, Artificial Sequence
  Description of Artificial Sequence: Synthetic oligonucleotide
  Sense strand starting at position 3346 of SEQ ID NO: 914058
gagucacaugggugacuau

SEQ ID NO: 974803 - RNA, 19 nt, Artificial Sequence
  Description of Artificial Sequence: Synthetic oligonucleotide
  Antisense strand to SEQ ID NO: 974802
auagucacccaugugacuc

SEQ ID NO: 974804 - RNA, 19 nt, Artificial Sequence
  Description of Artificial Sequence: Synthetic oligonucleotide
  Sense strand starting at position 2463 of SEQ ID NO: 914058
gagagcucccucuggaauu

SEQ ID NO: 974805 - RNA, 19 nt, Artificial Sequence
  Description of Artificial Sequence: Synthetic oligonucleotide
  Antisense strand to SEQ ID NO: 974804
aauuccagagggagcucuc

SEQ ID NO: 974806 - RNA, 19 nt, Artificial Sequence
  Description of Artificial Sequence: Synthetic oligonucleotide
  Sense strand starting at position 100 of SEQ ID NO: 914058
gaauguguggcuuaauuau

SEQ ID NO: 974807 - RNA, 19 nt, Artificial Sequence
  Description of Artificial Sequence: Synthetic oligonucleotide
  Antisense strand to SEQ ID NO: 974806
auaauuaagccacacauuc

SEQ ID NO: 974808 - RNA, 19 nt, Artificial Sequence
  Description of Artificial Sequence: Synthetic oligonucleotide
  Sense strand starting at position 362 of SEQ ID NO: 914058
uugauuauuugggauccca

SEQ ID NO: 974809 - RNA, 19 nt, Artificial Sequence
  Description of Artificial Sequence: Synthetic oligonucleotide
  Antisense strand to SEQ ID NO: 974808
ugggaucccaaauaaucaa

SEQ ID NO: 974810 - RNA, 19 nt, Artificial Sequence
  Description of Artificial Sequence: Synthetic oligonucleotide
  Sense strand starting at position 2971 of SEQ ID NO: 914058
uuaacuaucuggccuugga

SEQ ID NO: 974811 - RNA, 19 nt, Artificial Sequence
  Description of Artificial Sequence: Synthetic oligonucleotide
  Antisense strand to SEQ ID NO: 974810
uccaaggccagauaguuaa

SEQ ID NO: 974812 - RNA, 19 nt, Artificial Sequence
  Description of Artificial Sequence: Synthetic oligonucleotide
  Sense strand starting at position 3763 of SEQ ID NO: 914058
cacgcaguucuugaacaca

SEQ ID NO: 974813 - RNA, 19 nt, Artificial Sequence
  Description of Artificial Sequence: Synthetic oligonucleotide
  Antisense strand to SEQ ID NO: 974812
uguguucaagaacugcgug

SEQ ID NO: 974814 - RNA, 19 nt, Artificial Sequence
  Description of Artificial Sequence: Synthetic oligonucleotide
  Sense strand starting at position 418 of SEQ ID NO: 914058
gccaccagaugguugaauu

SEQ ID NO: 974815 - RNA, 19 nt, Artificial Sequence
  Description of Artificial Sequence: Synthetic oligonucleotide
  Antisense strand to SEQ ID NO: 974814
aauucaaccaucugguggc

SEQ ID NO: 974816 - RNA, 19 nt, Artificial Sequence
  Description of Artificial Sequence: Synthetic oligonucleotide
  Sense strand starting at position 2036 of SEQ ID NO: 914058
ucuguauguggguggaaga

SEQ ID NO: 974817 - RNA, 19 nt, Artificial Sequence
  Description of Artificial Sequence: Synthetic oligonucleotide
  Antisense strand to SEQ ID NO: 974816
ucuuccacccacauacaga

SEQ ID NO: 974818 - RNA, 19 nt, Artificial Sequence
  Description of Artificial Sequence: Synthetic oligonucleotide
  Sense strand starting at position 2037 of SEQ ID NO: 914058
cuguauguggguggaagau

SEQ ID NO: 974819 - RNA, 19 nt, Artificial Sequence
  Description of Artificial Sequence: Synthetic oligonucleotide
  Antisense strand to SEQ ID NO: 974818
aucuuccacccacauacag

SEQ ID NO: 974820 - RNA, 19 nt, Artificial Sequence
  Description of Artificial Sequence: Synthetic oligonucleotide
  Sense strand starting at position 3674 of SEQ ID NO: 914058
cauguauguguagggacau

SEQ ID NO: 974821 - RNA, 19 nt, Artificial Sequence
  Description of Artificial Sequence: Synthetic oligonucleotide
  Antisense strand to SEQ ID NO: 974820
augucccuacacauacaug

SEQ ID NO: 974822 - RNA, 19 nt, Artificial Sequence
  Description of Artificial Sequence: Synthetic oligonucleotide
  Sense strand starting at position 2648 of SEQ ID NO: 914058
uauaaugucugugcagaag

SEQ ID NO: 974823 - RNA, 19 nt, Artificial Sequence
  Description of Artificial Sequence: Synthetic oligonucleotide
  Antisense strand to SEQ ID NO: 974822
cuucugcacagacauuaua

SEQ ID NO: 974824 - RNA, 19 nt, Artificial Sequence
  Description of Artificial Sequence: Synthetic oligonucleotide
  Sense strand starting at position 438 of SEQ ID NO: 914058
gaaguacugugcccagaug

SEQ ID NO: 974825 - RNA, 19 nt, Artificial Sequence
  Description of Artificial Sequence: Synthetic oligonucleotide
  Antisense strand to SEQ ID NO: 974824
caucugggcacaguacuuc

SEQ ID NO: 974826 - RNA, 19 nt, Artificial Sequence
  Description of Artificial Sequence: Synthetic oligonucleotide
  Sense strand starting at position 3890 of SEQ ID NO: 914058
gccucuguuccugaaaguc

SEQ ID NO: 974827 - RNA, 19 nt, Artificial Sequence
  Description of Artificial Sequence: Synthetic oligonucleotide
  Antisense strand to SEQ ID NO: 974826
gacuuucaggaacagaggc

SEQ ID NO: 974828 - RNA, 19 nt, Artificial Sequence
  Description of Artificial Sequence: Synthetic oligonucleotide
  Sense strand starting at position 2634 of SEQ ID NO: 914058
ccugguugcacagguauaa

SEQ ID NO: 974829 - RNA, 19 nt, Artificial Sequence
  Description of Artificial Sequence: Synthetic oligonucleotide
  Antisense strand to SEQ ID NO: 974828
uuauaccugugcaaccagg

SEQ ID NO: 974830 - RNA, 19 nt, Artificial Sequence
  Description of Artificial Sequence: Synthetic oligonucleotide
  Sense strand starting at position 98 of SEQ ID NO: 914058
uggaauguguggcuuaauu

SEQ ID NO: 974831 - RNA, 19 nt, Artificial Sequence
  Description of Artificial Sequence: Synthetic oligonucleotide
  Antisense strand to SEQ ID NO: 974830
aauuaagccacacauucca

SEQ ID NO: 974832 - RNA, 19 nt, Artificial Sequence
  Description of Artificial Sequence: Synthetic oligonucleotide
  Sense strand starting at position 3 of SEQ ID NO: 914058
uaaguaacccaucguaagu

SEQ ID NO: 974833 - RNA, 19 nt, Artificial Sequence
  Description of Artificial Sequence: Synthetic oligonucleotide
  Antisense strand to SEQ ID NO: 974832
acuuacgauggguuacuua

SEQ ID NO: 974834 - RNA, 19 nt, Artificial Sequence
  Description of Artificial Sequence: Synthetic oligonucleotide
  Sense strand starting at position 2647 of SEQ ID NO: 914058
guauaaugucugugcagaa

SEQ ID NO: 974835 - RNA, 19 nt, Artificial Sequence
  Description of Artificial Sequence: Synthetic oligonucleotide
  Antisense strand to SEQ ID NO: 974834
uucugcacagacauuauac

SEQ ID NO: 974836 - RNA, 19 nt, Artificial Sequence
  Description of Artificial Sequence: Synthetic oligonucleotide
  Sense strand starting at position 2646 of SEQ ID NO: 914058
gguauaaugucugugcaga

SEQ ID NO: 974837 - RNA, 19 nt, Artificial Sequence
  Description of Artificial Sequence: Synthetic oligonucleotide
  Antisense strand to SEQ ID NO: 974836
ucugcacagacauuauacc

SEQ ID NO: 974838 - RNA, 19 nt, Artificial Sequence
  Description of Artificial Sequence: Synthetic oligonucleotide
  Sense strand starting at position 3615 of SEQ ID NO: 914058
acauguggguuugugucaa

SEQ ID NO: 974839 - RNA, 19 nt, Artificial Sequence
  Description of Artificial Sequence: Synthetic oligonucleotide
  Antisense strand to SEQ ID NO: 974838
uugacacaaacccacaugu

SEQ ID NO: 974840 - RNA, 19 nt, Artificial Sequence
  Description of Artificial Sequence: Synthetic oligonucleotide
  Sense strand starting at position 2030 of SEQ ID NO: 914058
cuuugaucuguaugugggu

SEQ ID NO: 974841 - RNA, 19 nt, Artificial Sequence
  Description of Artificial Sequence: Synthetic oligonucleotide
  Antisense strand to SEQ ID NO: 974840
acccacauacagaucaaag

SEQ ID NO: 974842 - RNA, 19 nt, Artificial Sequence
  Description of Artificial Sequence: Synthetic oligonucleotide
  Sense strand starting at position 2644 of SEQ ID NO: 914058
cagguauaaugucugugca

SEQ ID NO: 974843 - RNA, 19 nt, Artificial Sequence
  Description of Artificial Sequence: Synthetic oligonucleotide
  Antisense strand to SEQ ID NO: 974842
ugcacagacauuauaccug

SEQ ID NO: 974844 - RNA, 19 nt, Artificial Sequence
  Description of Artificial Sequence: Synthetic oligonucleotide
  Sense strand starting at position 3364 of SEQ ID NO: 914058
uuaggaaggugauauacau

SEQ ID NO: 974845 - RNA, 19 nt, Artificial Sequence
  Description of Artificial Sequence: Synthetic oligonucleotide
  Antisense strand to SEQ ID NO: 974844
auguauaucaccuuccuaa

SEQ ID NO: 974846 - RNA, 19 nt, Artificial Sequence
  Description of Artificial Sequence: Synthetic oligonucleotide
  Sense strand starting at position 3587 of SEQ ID NO: 914058
cucagacauugaggagaga

SEQ ID NO: 974847 - RNA, 19 nt, Artificial Sequence
  Description of Artificial Sequence: Synthetic oligonucleotide
  Antisense strand to SEQ ID NO: 974846
ucucuccucaaugucugag

SEQ ID NO: 974848 - RNA, 19 nt, Artificial Sequence
  Description of Artificial Sequence: Synthetic oligonucleotide
  Sense strand starting at position 3621 of SEQ ID NO: 914058
ggguuugugucaaggacug

SEQ ID NO: 974849 - RNA, 19 nt, Artificial Sequence
  Description of Artificial Sequence: Synthetic oligonucleotide
  Antisense strand to SEQ ID NO: 974848
caguccuugacacaaaccc

SEQ ID NO: 974850 - RNA, 19 nt, Artificial Sequence
  Description of Artificial Sequence: Synthetic oligonucleotide
  Sense strand starting at position 2464 of SEQ ID NO: 914058
agagcucccucuggaauuu

SEQ ID NO: 974851 - RNA, 19 nt, Artificial Sequence
  Description of Artificial Sequence: Synthetic oligonucleotide
  Antisense strand to SEQ ID NO: 974850
aaauuccagagggagcucu

SEQ ID NO: 974852 - RNA, 19 nt, Artificial Sequence
  Description of Artificial Sequence: Synthetic oligonucleotide
  Sense strand starting at position 864 of SEQ ID NO: 914058
aucccugauugaggaagaa

SEQ ID NO: 974853 - RNA, 19 nt, Artificial Sequence
  Description of Artificial Sequence: Synthetic oligonucleotide
  Antisense strand to SEQ ID NO: 974852
uucuuccucaaucagggau

SEQ ID NO: 974854 - RNA, 19 nt, Artificial Sequence
  Description of Artificial Sequence: Synthetic oligonucleotide
  Sense strand starting at position 3652 of SEQ ID NO: 914058
acaggaggguccuauacau

SEQ ID NO: 974855 - RNA, 19 nt, Artificial Sequence
  Description of Artificial Sequence: Synthetic oligonucleotide
  Antisense strand to SEQ ID NO: 974854
auguauaggacccuccugu

SEQ ID NO: 974856 - RNA, 19 nt, Artificial Sequence
  Description of Artificial Sequence: Synthetic oligonucleotide
  Sense strand starting at position 223 of SEQ ID NO: 914059
acacgauuccaagaagucu

SEQ ID NO: 974857 - RNA, 19 nt, Artificial Sequence
  Description of Artificial Sequence: Synthetic oligonucleotide
  Antisense strand to SEQ ID NO: 974856
agacuucuuggaaucgugu

SEQ ID NO: 974858 - RNA, 19 nt, Artificial Sequence
  Description of Artificial Sequence: Synthetic oligonucleotide
  Sense strand starting at position 2088 of SEQ ID NO: 914059
guggcauccguugcaugau

SEQ ID NO: 974859 - RNA, 19 nt, Artificial Sequence
  Description of Artificial Sequence: Synthetic oligonucleotide
  Antisense strand to SEQ ID NO: 974858
aucaugcaacggaugccac

SEQ ID NO: 974860 - RNA, 19 nt, Artificial Sequence
  Description of Artificial Sequence: Synthetic oligonucleotide
  Sense strand starting at position 3667 of SEQ ID NO: 914059
uccguaagaggugagauua

SEQ ID NO: 974861 - RNA, 19 nt, Artificial Sequence
  Description of Artificial Sequence: Synthetic oligonucleotide
  Antisense strand to SEQ ID NO: 974860
uaaucucaccucuuacgga

SEQ ID NO: 974862 - RNA, 19 nt, Artificial Sequence
  Description of Artificial Sequence: Synthetic oligonucleotide
  Sense strand starting at position 3328 of SEQ ID NO: 914059
ugugauuuagcacguagga

SEQ ID NO: 974863 - RNA, 19 nt, Artificial Sequence
  Description of Artificial Sequence: Synthetic oligonucleotide
  Antisense strand to SEQ ID NO: 974862
uccuacgugcuaaaucaca

SEQ ID NO: 974864 - RNA, 19 nt, Artificial Sequence
  Description of Artificial Sequence: Synthetic oligonucleotide
  Sense strand starting at position 3862 of SEQ ID NO: 914059
agcaguucucugccgcaga

SEQ ID NO: 974865 - RNA, 19 nt, Artificial Sequence
  Description of Artificial Sequence: Synthetic oligonucleotide
  Antisense strand to SEQ ID NO: 974864
ucugcggcagagaacugcu

SEQ ID NO: 974866 - RNA, 19 nt, Artificial Sequence
  Description of Artificial Sequence: Synthetic oligonucleotide
  Sense strand starting at position 3581 of SEQ ID NO: 914059
gggaaacagguccggaauu

SEQ ID NO: 974867 - RNA, 19 nt, Artificial Sequence
  Description of Artificial Sequence: Synthetic oligonucleotide
  Antisense strand to SEQ ID NO: 974866
aauuccggaccuguuuccc

SEQ ID NO: 974868 - RNA, 19 nt, Artificial Sequence
  Description of Artificial Sequence: Synthetic oligonucleotide
  Sense strand starting at position 733 of SEQ ID NO: 914059
augugcagugauuagggaa

SEQ ID NO: 974869 - RNA, 19 nt, Artificial Sequence
  Description of Artificial Sequence: Synthetic oligonucleotide
  Antisense strand to SEQ ID NO: 974868
uucccuaaucacugcacau

SEQ ID NO: 974870 - RNA, 19 nt, Artificial Sequence
  Description of Artificial Sequence: Synthetic oligonucleotide
  Sense strand starting at position 3728 of SEQ ID NO: 914059
gacagagcucugcagaacu

SEQ ID NO: 974871 - RNA, 19 nt, Artificial Sequence
  Description of Artificial Sequence: Synthetic oligonucleotide
  Antisense strand to SEQ ID NO: 974870
aguucugcagagcucuguc

SEQ ID NO: 974872 - RNA, 19 nt, Artificial Sequence
  Description of Artificial Sequence: Synthetic oligonucleotide
  Sense strand starting at position 3614 of SEQ ID NO: 914059
ggcucagagaugcaaaucu

SEQ ID NO: 974873 - RNA, 19 nt, Artificial Sequence
  Description of Artificial Sequence: Synthetic oligonucleotide
  Antisense strand to SEQ ID NO: 974872
agauuugcaucucugagcc

SEQ ID NO: 974874 - RNA, 19 nt, Artificial Sequence
  Description of Artificial Sequence: Synthetic oligonucleotide
  Sense strand starting at position 3937 of SEQ ID NO: 914059
gaucaucuggcagagucau

SEQ ID NO: 974875 - RNA, 19 nt, Artificial Sequence
  Description of Artificial Sequence: Synthetic oligonucleotide
  Antisense strand to SEQ ID NO: 974874
augacucugccagaugauc

SEQ ID NO: 974876 - RNA, 19 nt, Artificial Sequence
  Description of Artificial Sequence: Synthetic oligonucleotide
  Sense strand starting at position 303 of SEQ ID NO: 914059
cuuagaguuaugggaaagu

SEQ ID NO: 974877 - RNA, 19 nt, Artificial Sequence
  Description of Artificial Sequence: Synthetic oligonucleotide
  Antisense strand to SEQ ID NO: 974876
acuuucccauaacucuaag

SEQ ID NO: 974878 - RNA, 19 nt, Artificial Sequence
  Description of Artificial Sequence: Synthetic oligonucleotide
  Sense strand starting at position 159 of SEQ ID NO: 914059
acgguuugggaugagcaau

SEQ ID NO: 974879 - RNA, 19 nt, Artificial Sequence
  Description of Artificial Sequence: Synthetic oligonucleotide
  Antisense strand to SEQ ID NO: 974878
auugcucaucccaaaccgu

SEQ ID NO: 974880 - RNA, 19 nt, Artificial Sequence
  Description of Artificial Sequence: Synthetic oligonucleotide
  Sense strand starting at position 675 of SEQ ID NO: 914059
aguacuagauucuuacauu

SEQ ID NO: 974881 - RNA, 19 nt, Artificial Sequence
  Description of Artificial Sequence: Synthetic oligonucleotide
  Antisense strand to SEQ ID NO: 974880
aauguaagaaucuaguacu

SEQ ID NO: 974882 - RNA, 19 nt, Artificial Sequence
  Description of Artificial Sequence: Synthetic oligonucleotide
  Sense strand starting at position 3273 of SEQ ID NO: 914059
cggagauguacuugaacug

SEQ ID NO: 974883 - RNA, 19 nt, Artificial Sequence
  Description of Artificial Sequence: Synthetic oligonucleotide
  Antisense strand to SEQ ID NO: 974882
caguucaaguacaucuccg

SEQ ID NO: 974884 - RNA, 19 nt, Artificial Sequence
  Description of Artificial Sequence: Synthetic oligonucleotide
  Sense strand starting at position 122 of SEQ ID NO: 914059
gaguuugggcaguaaucca

SEQ ID NO: 974885 - RNA, 19 nt, Artificial Sequence
  Description of Artificial Sequence: Synthetic oligonucleotide
  Antisense strand to SEQ ID NO: 974884
uggauuacugcccaaacuc

SEQ ID NO: 974886 - RNA, 19 nt, Artificial Sequence
  Description of Artificial Sequence: Synthetic oligonucleotide
  Sense strand starting at position 2658 of SEQ ID NO: 914059
cugggcuuucgagauucua

SEQ ID NO: 974887 - RNA, 19 nt, Artificial Sequence
  Description of Artificial Sequence: Synthetic oligonucleotide
  Antisense strand to SEQ ID NO: 974886
uagaaucucgaaagcccag

SEQ ID NO: 974888 - RNA, 19 nt, Artificial Sequence
  Description of Artificial Sequence: Synthetic oligonucleotide
  Sense strand starting at position 3325 of SEQ ID NO: 914059
uggugugauuuagcacgua

SEQ ID NO: 974889 - RNA, 19 nt, Artificial Sequence
  Description of Artificial Sequence: Synthetic oligonucleotide
  Antisense strand to SEQ ID NO: 974888
uacgugcuaaaucacacca

SEQ ID NO: 974890 - RNA, 19 nt, Artificial Sequence
  Description of Artificial Sequence: Synthetic oligonucleotide
  Sense strand starting at position 729 of SEQ ID NO: 914059
ggaaaugugcagugauuag

SEQ ID NO: 974891 - RNA, 19 nt, Artificial Sequence
  Description of Artificial Sequence: Synthetic oligonucleotide
  Antisense strand to SEQ ID NO: 974890
cuaaucacugcacauuucc

SEQ ID NO: 974892 - RNA, 19 nt, Artificial Sequence
  Description of Artificial Sequence: Synthetic oligonucleotide
  Sense strand starting at position 450 of SEQ ID NO: 914059
ucacgaggcauccaguuau

SEQ ID NO: 974893 - RNA, 19 nt, Artificial Sequence
  Description of Artificial Sequence: Synthetic oligonucleotide
  Antisense strand to SEQ ID NO: 974892
auaacuggaugccucguga

SEQ ID NO: 974894 - RNA, 19 nt, Artificial Sequence
  Description of Artificial Sequence: Synthetic oligonucleotide
  Sense strand starting at position 2480 of SEQ ID NO: 914059
cugcaaaguuucuugaaca

SEQ ID NO: 974895 - RNA, 19 nt, Artificial Sequence
  Description of Artificial Sequence: Synthetic oligonucleotide
  Antisense strand to SEQ ID NO: 974894
uguucaagaaacuuugcag

SEQ ID NO: 974896 - RNA, 19 nt, Artificial Sequence
  Description of Artificial Sequence: Synthetic oligonucleotide
  Sense strand starting at position 2569 of SEQ ID NO: 914059
acauguucgagcgaacaug

SEQ ID NO: 974897 - RNA, 19 nt, Artificial Sequence
  Description of Artificial Sequence: Synthetic oligonucleotide
  Antisense strand to SEQ ID NO: 974896
cauguucgcucgaacaugu

SEQ ID NO: 974898 - RNA, 19 nt, Artificial Sequence
  Description of Artificial Sequence: Synthetic oligonucleotide
  Sense strand starting at position 2709 of SEQ ID NO: 914059
ucagauaucguuuagggcu

SEQ ID NO: 974899 - RNA, 19 nt, Artificial Sequence
  Description of Artificial Sequence: Synthetic oligonucleotide
  Antisense strand to SEQ ID NO: 974898
agcccuaaacgauaucuga

SEQ ID NO: 974900 - RNA, 19 nt, Artificial Sequence
  Description of Artificial Sequence: Synthetic oligonucleotide
  Sense strand starting at position 3666 of SEQ ID NO: 914059
cuccguaagaggugagauu

SEQ ID NO: 974901 - RNA, 19 nt, Artificial Sequence
  Description of Artificial Sequence: Synthetic oligonucleotide
  Antisense strand to SEQ ID NO: 974900
aaucucaccucuuacggag

SEQ ID NO: 974902 - RNA, 19 nt, Artificial Sequence
  Description of Artificial Sequence: Synthetic oligonucleotide
  Sense strand starting at position 2471 of SEQ ID NO: 914059
ggagacguccugcaaaguu

SEQ ID NO: 974903 - RNA, 19 nt, Artificial Sequence
  Description of Artificial Sequence: Synthetic oligonucleotide
  Antisense strand to SEQ ID NO: 974902
aacuuugcaggacgucucc

SEQ ID NO: 974904 - RNA, 19 nt, Artificial Sequence
  Description of Artificial Sequence: Synthetic oligonucleotide
  Sense strand starting at position 2796 of SEQ ID NO: 914059
aauguuauuugggagcaga

SEQ ID NO: 974905 - RNA, 19 nt, Artificial Sequence
  Description of Artificial Sequence: Synthetic oligonucleotide
  Antisense strand to SEQ ID NO: 974904
ucugcucccaaauaacauu

SEQ ID NO: 974906 - RNA, 19 nt, Artificial Sequence
  Description of Artificial Sequence: Synthetic oligonucleotide
  Sense strand starting at position 3964 of SEQ ID NO: 914059
uucuuugccggugaugaga

SEQ ID NO: 974907 - RNA, 19 nt, Artificial Sequence
  Description of Artificial Sequence: Synthetic oligonucleotide
  Antisense strand to SEQ ID NO: 974906
ucucaucaccggcaaagaa

SEQ ID NO: 974908 - RNA, 19 nt, Artificial Sequence
  Description of Artificial Sequence: Synthetic oligonucleotide
  Sense strand starting at position 158 of SEQ ID NO: 914059
cacgguuugggaugagcaa

SEQ ID NO: 974909 - RNA, 19 nt, Artificial Sequence
  Description of Artificial Sequence: Synthetic oligonucleotide
  Antisense strand to SEQ ID NO: 974908
uugcucaucccaaaccgug

SEQ ID NO: 974910 - RNA, 19 nt, Artificial Sequence
  Description of Artificial Sequence: Synthetic oligonucleotide
  Sense strand starting at position 2888 of SEQ ID NO: 914059
aacauuuccgcuugccagu

SEQ ID NO: 974911 - RNA, 19 nt, Artificial Sequence
  Description of Artificial Sequence: Synthetic oligonucleotide
  Antisense strand to SEQ ID NO: 974910
acuggcaagcggaaauguu

SEQ ID NO: 974912 - RNA, 19 nt, Artificial Sequence
  Description of Artificial Sequence: Synthetic oligonucleotide
  Sense strand starting at position 2750 of SEQ ID NO: 914059
aggaaugccgaucgaacuu

SEQ ID NO: 974913 - RNA, 19 nt, Artificial Sequence
  Description of Artificial Sequence: Synthetic oligonucleotide
  Antisense strand to SEQ ID NO: 974912
aaguucgaucggcauuccu

SEQ ID NO: 974914 - RNA, 19 nt, Artificial Sequence
  Description of Artificial Sequence: Synthetic oligonucleotide
  Sense strand starting at position 757 of SEQ ID NO: 914059
gggauccauuugcauuaau

SEQ ID NO: 974915 - RNA, 19 nt, Artificial Sequence
  Description of Artificial Sequence: Synthetic oligonucleotide
  Antisense strand to SEQ ID NO: 974914
auuaaugcaaauggauccc

SEQ ID NO: 974916 - RNA, 19 nt, Artificial Sequence
  Description of Artificial Sequence: Synthetic oligonucleotide
  Sense strand starting at position 3945 of SEQ ID NO: 914059
ggcagagucaugcauccuu

SEQ ID NO: 974917 - RNA, 19 nt, Artificial Sequence
  Description of Artificial Sequence: Synthetic oligonucleotide
  Antisense strand to SEQ ID NO: 974916
aaggaugcaugacucugcc

SEQ ID NO: 974918 - RNA, 19 nt, Artificial Sequence
  Description of Artificial Sequence: Synthetic oligonucleotide
  Sense strand starting at position 3633 of SEQ ID NO: 914059
gggugccaucagcauguaa

SEQ ID NO: 974919 - RNA, 19 nt, Artificial Sequence
  Description of Artificial Sequence: Synthetic oligonucleotide
  Antisense strand to SEQ ID NO: 974918
uuacaugcugauggcaccc

SEQ ID NO: 974920 - RNA, 19 nt, Artificial Sequence
  Description of Artificial Sequence: Synthetic oligonucleotide
  Sense strand starting at position 676 of SEQ ID NO: 914059
guacuagauucuuacauuu

SEQ ID NO: 974921 - RNA, 19 nt, Artificial Sequence
  Description of Artificial Sequence: Synthetic oligonucleotide
  Antisense strand to SEQ ID NO: 974920
aaauguaagaaucuaguac

SEQ ID NO: 974922 - RNA, 19 nt, Artificial Sequence
  Description of Artificial Sequence: Synthetic oligonucleotide
  Sense strand starting at position 2996 of SEQ ID NO: 914059
uguaguaaguuugcaaaga

SEQ ID NO: 974923 - RNA, 19 nt, Artificial Sequence
  Description of Artificial Sequence: Synthetic oligonucleotide
  Antisense strand to SEQ ID NO: 974922
ucuuugcaaacuuacuaca

SEQ ID NO: 974924 - RNA, 19 nt, Artificial Sequence
  Description of Artificial Sequence: Synthetic oligonucleotide
  Sense strand starting at position 3980 of SEQ ID NO: 914059
agagcuucuuccuugggua

SEQ ID NO: 974925 - RNA, 19 nt, Artificial Sequence
  Description of Artificial Sequence: Synthetic oligonucleotide
  Antisense strand to SEQ ID NO: 974924
uacccaaggaagaagcucu

SEQ ID NO: 974926 - RNA, 19 nt, Artificial Sequence
  Description of Artificial Sequence: Synthetic oligonucleotide
  Sense strand starting at position 2604 of SEQ ID NO: 914059
auguguucgaauugacauc

SEQ ID NO: 974927 - RNA, 19 nt, Artificial Sequence
  Description of Artificial Sequence: Synthetic oligonucleotide
  Antisense strand to SEQ ID NO: 974926
gaugucaauucgaacacau

SEQ ID NO: 974928 - RNA, 19 nt, Artificial Sequence
  Description of Artificial Sequence: Synthetic oligonucleotide
  Sense strand starting at position 3231 of SEQ ID NO: 914059
gggucacgguucucauuaa

SEQ ID NO: 974929 - RNA, 19 nt, Artificial Sequence
  Description of Artificial Sequence: Synthetic oligonucleotide
  Antisense strand to SEQ ID NO: 974928
uuaaugagaaccgugaccc

SEQ ID NO: 974930 - RNA, 19 nt, Artificial Sequence
  Description of Artificial Sequence: Synthetic oligonucleotide
  Sense strand starting at position 3567 of SEQ ID NO: 914059
gaccaaaguuaauagggaa

SEQ ID NO: 974931 - RNA, 19 nt, Artificial Sequence
  Description of Artificial Sequence: Synthetic oligonucleotide
  Antisense strand to SEQ ID NO: 974930
uucccuauuaacuuugguc

SEQ ID NO: 974932 - RNA, 19 nt, Artificial Sequence
  Description of Artificial Sequence: Synthetic oligonucleotide
  Sense strand starting at position 519 of SEQ ID NO: 914059
ggaauuguguggcuaucac

SEQ ID NO: 974933 - RNA, 19 nt, Artificial Sequence
  Description of Artificial Sequence: Synthetic oligonucleotide
  Antisense strand to SEQ ID NO: 974932
gugauagccacacaauucc

SEQ ID NO: 974934 - RNA, 19 nt, Artificial Sequence
  Description of Artificial Sequence: Synthetic oligonucleotide
  Sense strand starting at position 89 of SEQ ID NO: 914059
acgcacaucgcucauauaa

SEQ ID NO: 974935 - RNA, 19 nt, Artificial Sequence
  Description of Artificial Sequence: Synthetic oligonucleotide
  Antisense strand to SEQ ID NO: 974934
uuauaugagcgaugugcgu

SEQ ID NO: 974936 - RNA, 19 nt, Artificial Sequence
  Description of Artificial Sequence: Synthetic oligonucleotide
  Sense strand starting at position 756 of SEQ ID NO: 914060
gagcaaauugcgcuuguca

SEQ ID NO: 974937 - RNA, 19 nt, Artificial Sequence
  Description of Artificial Sequence: Synthetic oligonucleotide
  Antisense strand to SEQ ID NO: 974936
ugacaagcgcaauuugcuc

SEQ ID NO: 974938 - RNA, 19 nt, Artificial Sequence
  Description of Artificial Sequence: Synthetic oligonucleotide
  Sense strand starting at position 384 of SEQ ID NO: 914060
ucuccagaaguuugagaac

SEQ ID NO: 974939 - RNA, 19 nt, Artificial Sequence
  Description of Artificial Sequence: Synthetic oligonucleotide
  Antisense strand to SEQ ID NO: 974938
guucucaaacuucuggaga

SEQ ID NO: 974940 - RNA, 19 nt, Artificial Sequence
  Description of Artificial Sequence: Synthetic oligonucleotide
  Sense strand starting at position 1833 of SEQ ID NO: 914060
gcaggagcccacuauuaag

SEQ ID NO: 974941 - RNA, 19 nt, Artificial Sequence
  Description of Artificial Sequence: Synthetic oligonucleotide
  Antisense strand to SEQ ID NO: 974940
cuuaauagugggcuccugc

SEQ ID NO: 974942 - RNA, 19 nt, Artificial Sequence
  Description of Artificial Sequence: Synthetic oligonucleotide
  Sense strand starting at position 3679 of SEQ ID NO: 914060
agcucauuccaauauggca

SEQ ID NO: 974943 - RNA, 19 nt, Artificial Sequence
  Description of Artificial Sequence: Synthetic oligonucleotide
  Antisense strand to SEQ ID NO: 974942
ugccauauuggaaugagcu

SEQ ID NO: 974944 - RNA, 19 nt, Artificial Sequence
  Description of Artificial Sequence: Synthetic oligonucleotide
  Sense strand starting at position 666 of SEQ ID NO: 914060
ucgagaacccuguggaaug

SEQ ID NO: 974945 - RNA, 19 nt, Artificial Sequence
  Description of Artificial Sequence: Synthetic oligonucleotide
  Antisense strand to SEQ ID NO: 974944
cauuccacaggguucucga

SEQ ID NO: 974946 - RNA, 19 nt, Artificial Sequence
  Description of Artificial Sequence: Synthetic oligonucleotide
  Sense strand starting at position 2509 of SEQ ID NO: 914060
gcaguuguggcgcuuccaa

SEQ ID NO: 974947 - RNA, 19 nt, Artificial Sequence
  Description of Artificial Sequence: Synthetic oligonucleotide
  Antisense strand to SEQ ID NO: 974946
uuggaagcgccacaacugc

SEQ ID NO: 974948 - RNA, 19 nt, Artificial Sequence
  Description of Artificial Sequence: Synthetic oligonucleotide
  Sense strand starting at position 664 of SEQ ID NO: 914060
cuucgagaacccuguggaa

SEQ ID NO: 974949 - RNA, 19 nt, Artificial Sequence
  Description of Artificial Sequence: Synthetic oligonucleotide
  Antisense strand to SEQ ID NO: 974948
uuccacaggguucucgaag

SEQ ID NO: 974950 - RNA, 19 nt, Artificial Sequence
  Description of Artificial Sequence: Synthetic oligonucleotide
  Sense strand starting at position 2008 of SEQ ID NO: 914060
gcucgucuccuagaaagac

SEQ ID NO: 974951 - RNA, 19 nt, Artificial Sequence
  Description of Artificial Sequence: Synthetic oligonucleotide
  Antisense strand to SEQ ID NO: 974950
gucuuucuaggagacgagc

SEQ ID NO: 974952 - RNA, 19 nt, Artificial Sequence
  Description of Artificial Sequence: Synthetic oligonucleotide
  Sense strand starting at position 678 of SEQ ID NO: 914060
uggaauguucuuuguaauc

SEQ ID NO: 974953 - RNA, 19 nt, Artificial Sequence
  Description of Artificial Sequence: Synthetic oligonucleotide
  Antisense strand to SEQ ID NO: 974952
gauuacaaagaacauucca

SEQ ID NO: 974954 - RNA, 19 nt, Artificial Sequence
  Description of Artificial Sequence: Synthetic oligonucleotide
  Sense strand starting at position 2133 of SEQ ID NO: 914060
ggugguucucuuugacaca

SEQ ID NO: 974955 - RNA, 19 nt, Artificial Sequence
  Description of Artificial Sequence: Synthetic oligonucleotide
  Antisense strand to SEQ ID NO: 974954
ugugucaaagagaaccacc

SEQ ID NO: 974956 - RNA, 19 nt, Artificial Sequence
  Description of Artificial Sequence: Synthetic oligonucleotide
  Sense strand starting at position 376 of SEQ ID NO: 914060
cgagcuggucuccagaagu

SEQ ID NO: 974957 - RNA, 19 nt, Artificial Sequence
  Description of Artificial Sequence: Synthetic oligonucleotide
  Antisense strand to SEQ ID NO: 974956
acuucuggagaccagcucg

SEQ ID NO: 974958 - RNA, 19 nt, Artificial Sequence
  Description of Artificial Sequence: Synthetic oligonucleotide
  Sense strand starting at position 1769 of SEQ ID NO: 914060
uuuggucuucuccaagcuu

SEQ ID NO: 974959 - RNA, 19 nt, Artificial Sequence
  Description of Artificial Sequence: Synthetic oligonucleotide
  Antisense strand to SEQ ID NO: 974958
aagcuuggagaagaccaaa

SEQ ID NO: 974960 - RNA, 19 nt, Artificial Sequence
  Description of Artificial Sequence: Synthetic oligonucleotide
  Sense strand starting at position 677 of SEQ ID NO: 914060
guggaauguucuuuguaau

SEQ ID NO: 974961 - RNA, 19 nt, Artificial Sequence
  Description of Artificial Sequence: Synthetic oligonucleotide
  Antisense strand to SEQ ID NO: 974960
auuacaaagaacauuccac

SEQ ID NO: 974962 - RNA, 19 nt, Artificial Sequence
  Description of Artificial Sequence: Synthetic oligonucleotide
  Sense strand starting at position 676 of SEQ ID NO: 914060
uguggaauguucuuuguaa

SEQ ID NO: 974963 - RNA, 19 nt, Artificial Sequence
  Description of Artificial Sequence: Synthetic oligonucleotide
  Antisense strand to SEQ ID NO: 974962
uuacaaagaacauuccaca

SEQ ID NO: 974964 - RNA, 19 nt, Artificial Sequence
  Description of Artificial Sequence: Synthetic oligonucleotide
  Sense strand starting at position 2943 of SEQ ID NO: 914060
uccgaaugucugcacgauu

SEQ ID NO: 974965 - RNA, 19 nt, Artificial Sequence
  Description of Artificial Sequence: Synthetic oligonucleotide
  Antisense strand to SEQ ID NO: 974964
aaucgugcagacauucgga

SEQ ID NO: 974966 - RNA, 19 nt, Artificial Sequence
  Description of Artificial Sequence: Synthetic oligonucleotide
  Sense strand starting at position 1119 of SEQ ID NO: 914060
gccaacaugucuuuguaac

SEQ ID NO: 974967 - RNA, 19 nt, Artificial Sequence
  Description of Artificial Sequence: Synthetic oligonucleotide
  Antisense strand to SEQ ID NO: 974966
guuacaaagacauguuggc

SEQ ID NO: 974968 - RNA, 19 nt, Artificial Sequence
  Description of Artificial Sequence: Synthetic oligonucleotide
  Sense strand starting at position 108 of SEQ ID NO: 914060
cgucuaaauugguuuccca

SEQ ID NO: 974969 - RNA, 19 nt, Artificial Sequence
  Description of Artificial Sequence: Synthetic oligonucleotide
  Antisense strand to SEQ ID NO: 974968
ugggaaaccaauuuagacg

SEQ ID NO: 974970 - RNA, 19 nt, Artificial Sequence
  Description of Artificial Sequence: Synthetic oligonucleotide
  Sense strand starting at position 1117 of SEQ ID NO: 914060
uggccaacaugucuuugua

SEQ ID NO: 974971 - RNA, 19 nt, Artificial Sequence
  Description of Artificial Sequence: Synthetic oligonucleotide
  Antisense strand to SEQ ID NO: 974970
uacaaagacauguuggcca

SEQ ID NO: 974972 - RNA, 19 nt, Artificial Sequence
  Description of Artificial Sequence: Synthetic oligonucleotide
  Sense strand starting at position 2942 of SEQ ID NO: 914060
uuccgaaugucugcacgau

SEQ ID NO: 974973 - RNA, 19 nt, Artificial Sequence
  Description of Artificial Sequence: Synthetic oligonucleotide
  Antisense strand to SEQ ID NO: 974972
aucgugcagacauucggaa

SEQ ID NO: 974974 - RNA, 19 nt, Artificial Sequence
  Description of Artificial Sequence: Synthetic oligonucleotide
  Sense strand starting at position 3270 of SEQ ID NO: 914060
guuugaagcuucgcucaag

SEQ ID NO: 974975 - RNA, 19 nt, Artificial Sequence
  Description of Artificial Sequence: Synthetic oligonucleotide
  Antisense strand to SEQ ID NO: 974974
cuugagcgaagcuucaaac

SEQ ID NO: 974976 - RNA, 19 nt, Artificial Sequence
  Description of Artificial Sequence: Synthetic oligonucleotide
  Sense strand starting at position 6 of SEQ ID NO: 914060
gcuaguaggucucccaguu

SEQ ID NO: 974977 - RNA, 19 nt, Artificial Sequence
  Description of Artificial Sequence: Synthetic oligonucleotide
  Antisense strand to SEQ ID NO: 974976
aacugggagaccuacuagc

SEQ ID NO: 974978 - RNA, 19 nt, Artificial Sequence
  Description of Artificial Sequence: Synthetic oligonucleotide
  Sense strand starting at position 2818 of SEQ ID NO: 914060
gugacaggauauuacuuua

SEQ ID NO: 974979 - RNA, 19 nt, Artificial Sequence
  Description of Artificial Sequence: Synthetic oligonucleotide
  Antisense strand to SEQ ID NO: 974978
uaaaguaauauccugucac

SEQ ID NO: 974980 - RNA, 19 nt, Artificial Sequence
  Description of Artificial Sequence: Synthetic oligonucleotide
  Sense strand starting at position 2004 of SEQ ID NO: 914060
gcuagcucgucuccuagaa

SEQ ID NO: 974981 - RNA, 19 nt, Artificial Sequence
  Description of Artificial Sequence: Synthetic oligonucleotide
  Antisense strand to SEQ ID NO: 974980
uucuaggagacgagcuagc

SEQ ID NO: 974982 - RNA, 19 nt, Artificial Sequence
  Description of Artificial Sequence: Synthetic oligonucleotide
  Sense strand starting at position 2001 of SEQ ID NO: 914060
agagcuagcucgucuccua

SEQ ID NO: 974983 - RNA, 19 nt, Artificial Sequence
  Description of Artificial Sequence: Synthetic oligonucleotide
  Antisense strand to SEQ ID NO: 974982
uaggagacgagcuagcucu

SEQ ID NO: 974984 - RNA, 19 nt, Artificial Sequence
  Description of Artificial Sequence: Synthetic oligonucleotide
  Sense strand starting at position 3271 of SEQ ID NO: 914060
uuugaagcuucgcucaagu

SEQ ID NO: 974985 - RNA, 19 nt, Artificial Sequence
  Description of Artificial Sequence: Synthetic oligonucleotide
  Antisense strand to SEQ ID NO: 974984
acuugagcgaagcuucaaa

SEQ ID NO: 974986 - RNA, 19 nt, Artificial Sequence
  Description of Artificial Sequence: Synthetic oligonucleotide
  Sense strand starting at position 305 of SEQ ID NO: 914060
cgccuugccuucuuggaau

SEQ ID NO: 974987 - RNA, 19 nt, Artificial Sequence
  Description of Artificial Sequence: Synthetic oligonucleotide
  Antisense strand to SEQ ID NO: 974986
auuccaagaaggcaaggcg

SEQ ID NO: 974988 - RNA, 19 nt, Artificial Sequence
  Description of Artificial Sequence: Synthetic oligonucleotide
  Sense strand starting at position 2919 of SEQ ID NO: 914060
ggcaaauguuuccaaggga

SEQ ID NO: 974989 - RNA, 19 nt, Artificial Sequence
  Description of Artificial Sequence: Synthetic oligonucleotide
  Antisense strand to SEQ ID NO: 974988
ucccuuggaaacauuugcc

SEQ ID NO: 974990 - RNA, 19 nt, Artificial Sequence
  Description of Artificial Sequence: Synthetic oligonucleotide
  Sense strand starting at position 3509 of SEQ ID NO: 914060
cggcguccuaccuggugaa

SEQ ID NO: 974991 - RNA, 19 nt, Artificial Sequence
  Description of Artificial Sequence: Synthetic oligonucleotide
  Antisense strand to SEQ ID NO: 974990
uucaccagguaggacgccg

SEQ ID NO: 974992 - RNA, 19 nt, Artificial Sequence
  Description of Artificial Sequence: Synthetic oligonucleotide
  Sense strand starting at position 387 of SEQ ID NO: 914060
ccagaaguuugagaacggu

SEQ ID NO: 974993 - RNA, 19 nt, Artificial Sequence
  Description of Artificial Sequence: Synthetic oligonucleotide
  Antisense strand to SEQ ID NO: 974992
accguucucaaacuucugg

SEQ ID NO: 974994 - RNA, 19 nt, Artificial Sequence
  Description of Artificial Sequence: Synthetic oligonucleotide
  Sense strand starting at position 429 of SEQ ID NO: 914060
ccgggauucucggacacca

SEQ ID NO: 974995 - RNA, 19 nt, Artificial Sequence
  Description of Artificial Sequence: Synthetic oligonucleotide
  Antisense strand to SEQ ID NO: 974994
ugguguccgagaaucccgg

SEQ ID NO: 974996 - RNA, 19 nt, Artificial Sequence
  Description of Artificial Sequence: Synthetic oligonucleotide
  Sense strand starting at position 2006 of SEQ ID NO: 914060
uagcucgucuccuagaaag

SEQ ID NO: 974997 - RNA, 19 nt, Artificial Sequence
  Description of Artificial Sequence: Synthetic oligonucleotide
  Antisense strand to SEQ ID NO: 974996
cuuucuaggagacgagcua

SEQ ID NO: 974998 - RNA, 19 nt, Artificial Sequence
  Description of Artificial Sequence: Synthetic oligonucleotide
  Sense strand starting at position 2649 of SEQ ID NO: 914060
auaaauacaucucgcaguu

SEQ ID NO: 974999 - RNA, 19 nt, Artificial Sequence
  Description of Artificial Sequence: Synthetic oligonucleotide
  Antisense strand to SEQ ID NO: 974998
aacugcgagauguauuuau

SEQ ID NO: 975000 - RNA, 19 nt, Artificial Sequence
  Description of Artificial Sequence: Synthetic oligonucleotide
  Sense strand starting at position 3512 of SEQ ID NO: 914060
cguccuaccuggugaaguu

SEQ ID NO: 975001 - RNA, 19 nt, Artificial Sequence
  Description of Artificial Sequence: Synthetic oligonucleotide
  Antisense strand to SEQ ID NO: 975000
aacuucaccagguaggacg

SEQ ID NO: 975002 - RNA, 19 nt, Artificial Sequence
  Description of Artificial Sequence: Synthetic oligonucleotide
  Sense strand starting at position 2073 of SEQ ID NO: 914060
cgcaguuugucacgucaaa

SEQ ID NO: 975003 - RNA, 19 nt, Artificial Sequence
  Description of Artificial Sequence: Synthetic oligonucleotide
  Antisense strand to SEQ ID NO: 975002
uuugacgugacaaacugcg

SEQ ID NO: 975004 - RNA, 19 nt, Artificial Sequence
  Description of Artificial Sequence: Synthetic oligonucleotide
  Sense strand starting at position 3143 of SEQ ID NO: 914061
acgugagacccagaagagu

SEQ ID NO: 975005 - RNA, 19 nt, Artificial Sequence
  Description of Artificial Sequence: Synthetic oligonucleotide
  Antisense strand to SEQ ID NO: 975004
acucuucugggucucacgu

SEQ ID NO: 975006 - RNA, 19 nt, Artificial Sequence
  Description of Artificial Sequence: Synthetic oligonucleotide
  Sense strand starting at position 2932 of SEQ ID NO: 914061
ccgagaagccgcucuccuu

SEQ ID NO: 975007 - RNA, 19 nt, Artificial Sequence
  Description of Artificial Sequence: Synthetic oligonucleotide
  Antisense strand to SEQ ID NO: 975006
aaggagagcggcuucucgg

SEQ ID NO: 975008 - RNA, 19 nt, Artificial Sequence
  Description of Artificial Sequence: Synthetic oligonucleotide
  Sense strand starting at position 2585 of SEQ ID NO: 914061
uguauauuucugcgaaaua

SEQ ID NO: 975009 - RNA, 19 nt, Artificial Sequence
  Description of Artificial Sequence: Synthetic oligonucleotide
  Antisense strand to SEQ ID NO: 975008
uauuucgcagaaauauaca

SEQ ID NO: 975010 - RNA, 19 nt, Artificial Sequence
  Description of Artificial Sequence: Synthetic oligonucleotide
  Sense strand starting at position 1857 of SEQ ID NO: 914061
acaugaucugcagaaaguu

SEQ ID NO: 975011 - RNA, 19 nt, Artificial Sequence
  Description of Artificial Sequence: Synthetic oligonucleotide
  Antisense strand to SEQ ID NO: 975010
aacuuucugcagaucaugu

SEQ ID NO: 975012 - RNA, 19 nt, Artificial Sequence
  Description of Artificial Sequence: Synthetic oligonucleotide
  Sense strand starting at position 2584 of SEQ ID NO: 914061
uuguauauuucugcgaaau

SEQ ID NO: 975013 - RNA, 19 nt, Artificial Sequence
  Description of Artificial Sequence: Synthetic oligonucleotide
  Antisense strand to SEQ ID NO: 975012
auuucgcagaaauauacaa

SEQ ID NO: 975014 - RNA, 19 nt, Artificial Sequence
  Description of Artificial Sequence: Synthetic oligonucleotide
  Sense strand starting at position 2582 of SEQ ID NO: 914061
cauuguauauuucugcgaa

SEQ ID NO: 975015 - RNA, 19 nt, Artificial Sequence
  Description of Artificial Sequence: Synthetic oligonucleotide
  Antisense strand to SEQ ID NO: 975014
uucgcagaaauauacaaug

SEQ ID NO: 975016 - RNA, 19 nt, Artificial Sequence
  Description of Artificial Sequence: Synthetic oligonucleotide
  Sense strand starting at position 2151 of SEQ ID NO: 914061
agagcuauucgagggaaag

SEQ ID NO: 975017 - RNA, 19 nt, Artificial Sequence
  Description of Artificial Sequence: Synthetic oligonucleotide
  Antisense strand to SEQ ID NO: 975016
cuuucccucgaauagcucu

SEQ ID NO: 975018 - RNA, 19 nt, Artificial Sequence
  Description of Artificial Sequence: Synthetic oligonucleotide
  Sense strand starting at position 3065 of SEQ ID NO: 914061
cuccuuacaccuuggagaa

SEQ ID NO: 975019 - RNA, 19 nt, Artificial Sequence
  Description of Artificial Sequence: Synthetic oligonucleotide
  Antisense strand to SEQ ID NO: 975018
uucuccaagguguaaggag

SEQ ID NO: 975020 - RNA, 19 nt, Artificial Sequence
  Description of Artificial Sequence: Synthetic oligonucleotide
  Sense strand starting at position 2153 of SEQ ID NO: 914061
agcuauucgagggaaaggu

SEQ ID NO: 975021 - RNA, 19 nt, Artificial Sequence
  Description of Artificial Sequence: Synthetic oligonucleotide
  Antisense strand to SEQ ID NO: 975020
accuuucccucgaauagcu

SEQ ID NO: 975022 - RNA, 19 nt, Artificial Sequence
  Description of Artificial Sequence: Synthetic oligonucleotide
  Sense strand starting at position 2152 of SEQ ID NO: 914061
gagcuauucgagggaaagg

SEQ ID NO: 975023 - RNA, 19 nt, Artificial Sequence
  Description of Artificial Sequence: Synthetic oligonucleotide
  Antisense strand to SEQ ID NO: 975022
ccuuucccucgaauagcuc

SEQ ID NO: 975024 - RNA, 19 nt, Artificial Sequence
  Description of Artificial Sequence: Synthetic oligonucleotide
  Sense strand starting at position 2148 of SEQ ID NO: 914061
aggagagcuauucgaggga

SEQ ID NO: 975025 - RNA, 19 nt, Artificial Sequence
  Description of Artificial Sequence: Synthetic oligonucleotide
  Antisense strand to SEQ ID NO: 975024
ucccucgaauagcucuccu

SEQ ID NO: 975026 - RNA, 19 nt, Artificial Sequence
  Description of Artificial Sequence: Synthetic oligonucleotide
  Sense strand starting at position 3981 of SEQ ID NO: 914061
gaucccaaacaguguauga

SEQ ID NO: 975027 - RNA, 19 nt, Artificial Sequence
  Description of Artificial Sequence: Synthetic oligonucleotide
  Antisense strand to SEQ ID NO: 975026
ucauacacuguuugggauc

SEQ ID NO: 975028 - RNA, 19 nt, Artificial Sequence
  Description of Artificial Sequence: Synthetic oligonucleotide
  Sense strand starting at position 2982 of SEQ ID NO: 914061
aaaggaucugccgagcuga

SEQ ID NO: 975029 - RNA, 19 nt, Artificial Sequence
  Description of Artificial Sequence: Synthetic oligonucleotide
  Antisense strand to SEQ ID NO: 975028
ucagcucggcagauccuuu

SEQ ID NO: 975030 - RNA, 19 nt, Artificial Sequence
  Description of Artificial Sequence: Synthetic oligonucleotide
  Sense strand starting at position 1534 of SEQ ID NO: 914061
agcucauuccaauauggca

SEQ ID NO: 975031 - RNA, 19 nt, Artificial Sequence
  Description of Artificial Sequence: Synthetic oligonucleotide
  Antisense strand to SEQ ID NO: 975030
ugccauauuggaaugagcu

SEQ ID NO: 975032 - RNA, 19 nt, Artificial Sequence
  Description of Artificial Sequence: Synthetic oligonucleotide
  Sense strand starting at position 3924 of SEQ ID NO: 914061
aucauugugcacgaaacau

SEQ ID NO: 975033 - RNA, 19 nt, Artificial Sequence
  Description of Artificial Sequence: Synthetic oligonucleotide
  Antisense strand to SEQ ID NO: 975032
auguuucgugcacaaugau

SEQ ID NO: 975034 - RNA, 19 nt, Artificial Sequence
  Description of Artificial Sequence: Synthetic oligonucleotide
  Sense strand starting at position 364 of SEQ ID NO: 914061
gcaguuguggcgcuuccaa

SEQ ID NO: 975035 - RNA, 19 nt, Artificial Sequence
  Description of Artificial Sequence: Synthetic oligonucleotide
  Antisense strand to SEQ ID NO: 975034
uuggaagcgccacaacugc

SEQ ID NO: 975036 - RNA, 19 nt, Artificial Sequence
  Description of Artificial Sequence: Synthetic oligonucleotide
  Sense strand starting at position 3053 of SEQ ID NO: 914061
ggaagauccugccuccuua

SEQ ID NO: 975037 - RNA, 19 nt, Artificial Sequence
  Description of Artificial Sequence: Synthetic oligonucleotide
  Antisense strand to SEQ ID NO: 975036
uaaggaggcaggaucuucc

SEQ ID NO: 975038 - RNA, 19 nt, Artificial Sequence
  Description of Artificial Sequence: Synthetic oligonucleotide
  Sense strand starting at position 1842 of SEQ ID NO: 914061
gugagcucccuccauacau

SEQ ID NO: 975039 - RNA, 19 nt, Artificial Sequence
  Description of Artificial Sequence: Synthetic oligonucleotide
  Antisense strand to SEQ ID NO: 975038
auguauggagggagcucac

SEQ ID NO: 975040 - RNA, 19 nt, Artificial Sequence
  Description of Artificial Sequence: Synthetic oligonucleotide
  Sense strand starting at position 2667 of SEQ ID NO: 914061
ccaaaucugugucccauga

SEQ ID NO: 975041 - RNA, 19 nt, Artificial Sequence
  Description of Artificial Sequence: Synthetic oligonucleotide
  Antisense strand to SEQ ID NO: 975040
ucaugggacacagauuugg

SEQ ID NO: 975042 - RNA, 19 nt, Artificial Sequence
  Description of Artificial Sequence: Synthetic oligonucleotide
  Sense strand starting at position 3921 of SEQ ID NO: 914061
gucaucauugugcacgaaa

SEQ ID NO: 975043 - RNA, 19 nt, Artificial Sequence
  Description of Artificial Sequence: Synthetic oligonucleotide
  Antisense strand to SEQ ID NO: 975042
uuucgugcacaaugaugac

SEQ ID NO: 975044 - RNA, 19 nt, Artificial Sequence
  Description of Artificial Sequence: Synthetic oligonucleotide
  Sense strand starting at position 3186 of SEQ ID NO: 914061
uuuaaacucuagccugagu

SEQ ID NO: 975045 - RNA, 19 nt, Artificial Sequence
  Description of Artificial Sequence: Synthetic oligonucleotide
  Antisense strand to SEQ ID NO: 975044
acucaggcuagaguuuaaa

SEQ ID NO: 975046 - RNA, 19 nt, Artificial Sequence
  Description of Artificial Sequence: Synthetic oligonucleotide
  Sense strand starting at position 3923 of SEQ ID NO: 914061
caucauugugcacgaaaca

SEQ ID NO: 975047 - RNA, 19 nt, Artificial Sequence
  Description of Artificial Sequence: Synthetic oligonucleotide
  Antisense strand to SEQ ID NO: 975046
uguuucgugcacaaugaug

SEQ ID NO: 975048 - RNA, 19 nt, Artificial Sequence
  Description of Artificial Sequence: Synthetic oligonucleotide
  Sense strand starting at position 3116 of SEQ ID NO: 914061
ccugucacuccaugugaca

SEQ ID NO: 975049 - RNA, 19 nt, Artificial Sequence
  Description of Artificial Sequence: Synthetic oligonucleotide
  Antisense strand to SEQ ID NO: 975048
ugucacauggagugacagg

SEQ ID NO: 975050 - RNA, 19 nt, Artificial Sequence
  Description of Artificial Sequence: Synthetic oligonucleotide
  Sense strand starting at position 1954 of SEQ ID NO: 914061
cuggguuuccaauggcuca

SEQ ID NO: 975051 - RNA, 19 nt, Artificial Sequence
  Description of Artificial Sequence: Synthetic oligonucleotide
  Antisense strand to SEQ ID NO: 975050
ugagccauuggaaacccag

SEQ ID NO: 975052 - RNA, 19 nt, Artificial Sequence
  Description of Artificial Sequence: Synthetic oligonucleotide
  Sense strand starting at position 798 of SEQ ID NO: 914061
uccgaaugucugcacgauu

SEQ ID NO: 975053 - RNA, 19 nt, Artificial Sequence
  Description of Artificial Sequence: Synthetic oligonucleotide
  Antisense strand to SEQ ID NO: 975052
aaucgugcagacauucgga

SEQ ID NO: 975054 - RNA, 19 nt, Artificial Sequence
  Description of Artificial Sequence: Synthetic oligonucleotide
  Sense strand starting at position 2285 of SEQ ID NO: 914061
aaagaaucgucgcucacac

SEQ ID NO: 975055 - RNA, 19 nt, Artificial Sequence
  Description of Artificial Sequence: Synthetic oligonucleotide
  Antisense strand to SEQ ID NO: 975054
gugugagcgacgauucuuu

SEQ ID NO: 975056 - RNA, 19 nt, Artificial Sequence
  Description of Artificial Sequence: Synthetic oligonucleotide
  Sense strand starting at position 3397 of SEQ ID NO: 914061
gacugcggcguccagaaau

SEQ ID NO: 975057 - RNA, 19 nt, Artificial Sequence
  Description of Artificial Sequence: Synthetic oligonucleotide
  Antisense strand to SEQ ID NO: 975056
auuucuggacgccgcaguc

SEQ ID NO: 975058 - RNA, 19 nt, Artificial Sequence
  Description of Artificial Sequence: Synthetic oligonucleotide
  Sense strand starting at position 2783 of SEQ ID NO: 914061
ggagagguguccgcucuga

SEQ ID NO: 975059 - RNA, 19 nt, Artificial Sequence
  Description of Artificial Sequence: Synthetic oligonucleotide
  Antisense strand to SEQ ID NO: 975058
ucagagcggacaccucucc

SEQ ID NO: 975060 - RNA, 19 nt, Artificial Sequence
  Description of Artificial Sequence: Synthetic oligonucleotide
  Sense strand starting at position 3920 of SEQ ID NO: 914061
ggucaucauugugcacgaa

SEQ ID NO: 975061 - RNA, 19 nt, Artificial Sequence
  Description of Artificial Sequence: Synthetic oligonucleotide
  Antisense strand to SEQ ID NO: 975060
uucgugcacaaugaugacc

SEQ ID NO: 975062 - RNA, 19 nt, Artificial Sequence
  Description of Artificial Sequence: Synthetic oligonucleotide
  Sense strand starting at position 2586 of SEQ ID NO: 914061
guauauuucugcgaaauag

SEQ ID NO: 975063 - RNA, 19 nt, Artificial Sequence
  Description of Artificial Sequence: Synthetic oligonucleotide
  Antisense strand to SEQ ID NO: 975062
cuauuucgcagaaauauac

SEQ ID NO: 975064 - RNA, 19 nt, Artificial Sequence
  Description of Artificial Sequence: Synthetic oligonucleotide
  Sense strand starting at position 797 of SEQ ID NO: 914061
uuccgaaugucugcacgau

SEQ ID NO: 975065 - RNA, 19 nt, Artificial Sequence
  Description of Artificial Sequence: Synthetic oligonucleotide
  Antisense strand to SEQ ID NO: 975064
aucgugcagacauucggaa

SEQ ID NO: 975066 - RNA, 19 nt, Artificial Sequence
  Description of Artificial Sequence: Synthetic oligonucleotide
  Sense strand starting at position 1125 of SEQ ID NO: 914061
guuugaagcuucgcucaag

SEQ ID NO: 975067 - RNA, 19 nt, Artificial Sequence
  Description of Artificial Sequence: Synthetic oligonucleotide
  Antisense strand to SEQ ID NO: 975066
cuugagcgaagcuucaaac

SEQ ID NO: 975068 - RNA, 19 nt, Artificial Sequence
  Description of Artificial Sequence: Synthetic oligonucleotide
  Sense strand starting at position 673 of SEQ ID NO: 914061
gugacaggauauuacuuua

SEQ ID NO: 975069 - RNA, 19 nt, Artificial Sequence
  Description of Artificial Sequence: Synthetic oligonucleotide
  Antisense strand to SEQ ID NO: 975068
uaaaguaauauccugucac

SEQ ID NO: 975070 - RNA, 19 nt, Artificial Sequence
  Description of Artificial Sequence: Synthetic oligonucleotide
  Sense strand starting at position 2573 of SEQ ID NO: 914061
gugggccugcauuguauau

SEQ ID NO: 975071 - RNA, 19 nt, Artificial Sequence
  Description of Artificial Sequence: Synthetic oligonucleotide
  Antisense strand to SEQ ID NO: 975070
auauacaaugcaggcccac

SEQ ID NO: 975072 - RNA, 19 nt, Artificial Sequence
  Description of Artificial Sequence: Synthetic oligonucleotide
  Sense strand starting at position 1126 of SEQ ID NO: 914061
uuugaagcuucgcucaagu

SEQ ID NO: 975073 - RNA, 19 nt, Artificial Sequence
  Description of Artificial Sequence: Synthetic oligonucleotide
  Antisense strand to SEQ ID NO: 975072
acuugagcgaagcuucaaa

SEQ ID NO: 975074 - RNA, 19 nt, Artificial Sequence
  Description of Artificial Sequence: Synthetic oligonucleotide
  Sense strand starting at position 1984 of SEQ ID NO: 914061
gcacaaacuugcgcuuuau

SEQ ID NO: 975075 - RNA, 19 nt, Artificial Sequence
  Description of Artificial Sequence: Synthetic oligonucleotide
  Antisense strand to SEQ ID NO: 975074
auaaagcgcaaguuugugc

SEQ ID NO: 975076 - RNA, 19 nt, Artificial Sequence
  Description of Artificial Sequence: Synthetic oligonucleotide
  Sense strand starting at position 3839 of SEQ ID NO: 914061
guaauuuccuucugcagga

SEQ ID NO: 975077 - RNA, 19 nt, Artificial Sequence
  Description of Artificial Sequence: Synthetic oligonucleotide
  Antisense strand to SEQ ID NO: 975076
uccugcagaaggaaauuac

SEQ ID NO: 975078 - RNA, 19 nt, Artificial Sequence
  Description of Artificial Sequence: Synthetic oligonucleotide
  Sense strand starting at position 2575 of SEQ ID NO: 914061
gggccugcauuguauauuu

SEQ ID NO: 975079 - RNA, 19 nt, Artificial Sequence
  Description of Artificial Sequence: Synthetic oligonucleotide
  Antisense strand to SEQ ID NO: 975078
aaauauacaaugcaggccc

SEQ ID NO: 975080 - RNA, 19 nt, Artificial Sequence
  Description of Artificial Sequence: Synthetic oligonucleotide
  Sense strand starting at position 774 of SEQ ID NO: 914061
ggcaaauguuuccaaggga

SEQ ID NO: 975081 - RNA, 19 nt, Artificial Sequence
  Description of Artificial Sequence: Synthetic oligonucleotide
  Antisense strand to SEQ ID NO: 975080
ucccuuggaaacauuugcc

SEQ ID NO: 975082 - RNA, 19 nt, Artificial Sequence
  Description of Artificial Sequence: Synthetic oligonucleotide
  Sense strand starting at position 1364 of SEQ ID NO: 914061
cggcguccuaccuggugaa

SEQ ID NO: 975083 - RNA, 19 nt, Artificial Sequence
  Description of Artificial Sequence: Synthetic oligonucleotide
  Antisense strand to SEQ ID NO: 975082
uucaccagguaggacgccg

SEQ ID NO: 975084 - RNA, 19 nt, Artificial Sequence
  Description of Artificial Sequence: Synthetic oligonucleotide
  Sense strand starting at position 2728 of SEQ ID NO: 914062
uuagaaaucuauccgagag

SEQ ID NO: 975085 - RNA, 19 nt, Artificial Sequence
  Description of Artificial Sequence: Synthetic oligonucleotide
  Antisense strand to SEQ ID NO: 975084
cucucggauagauuucuaa

SEQ ID NO: 975086 - RNA, 19 nt, Artificial Sequence
  Description of Artificial Sequence: Synthetic oligonucleotide
  Sense strand starting at position 2662 of SEQ ID NO: 914062
ggugguuccagagaccaca

SEQ ID NO: 975087 - RNA, 19 nt, Artificial Sequence
  Description of Artificial Sequence: Synthetic oligonucleotide
  Antisense strand to SEQ ID NO: 975086
uguggucucuggaaccacc

SEQ ID NO: 975088 - RNA, 19 nt, Artificial Sequence
  Description of Artificial Sequence: Synthetic oligonucleotide
  Sense strand starting at position 3137 of SEQ ID NO: 914062
gguuuagugaaagaguuga

SEQ ID NO: 975089 - RNA, 19 nt, Artificial Sequence
  Description of Artificial Sequence: Synthetic oligonucleotide
  Antisense strand to SEQ ID NO: 975088
ucaacucuuucacuaaacc

SEQ ID NO: 975090 - RNA, 19 nt, Artificial Sequence
  Description of Artificial Sequence: Synthetic oligonucleotide
  Sense strand starting at position 2208 of SEQ ID NO: 914062
gcaugauuggcagaauuaa

SEQ ID NO: 975091 - RNA, 19 nt, Artificial Sequence
  Description of Artificial Sequence: Synthetic oligonucleotide
  Antisense strand to SEQ ID NO: 975090
uuaauucugccaaucaugc

SEQ ID NO: 975092 - RNA, 19 nt, Artificial Sequence
  Description of Artificial Sequence: Synthetic oligonucleotide
  Sense strand starting at position 2952 of SEQ ID NO: 914062
gcagaacaaucacuacaug

SEQ ID NO: 975093 - RNA, 19 nt, Artificial Sequence
  Description of Artificial Sequence: Synthetic oligonucleotide
  Antisense strand to SEQ ID NO: 975092
cauguagugauuguucugc

SEQ ID NO: 975094 - RNA, 19 nt, Artificial Sequence
  Description of Artificial Sequence: Synthetic oligonucleotide
  Sense strand starting at position 1567 of SEQ ID NO: 914062
agccgaaaccuugacucaa

SEQ ID NO: 975095 - RNA, 19 nt, Artificial Sequence
  Description of Artificial Sequence: Synthetic oligonucleotide
  Antisense strand to SEQ ID NO: 975094
uugagucaagguuucggcu

SEQ ID NO: 975096 - RNA, 19 nt, Artificial Sequence
  Description of Artificial Sequence: Synthetic oligonucleotide
  Sense strand starting at position 1764 of SEQ ID NO: 914062
cgacaaaggcauuaacuuu

SEQ ID NO: 975097 - RNA, 19 nt, Artificial Sequence
  Description of Artificial Sequence: Synthetic oligonucleotide
  Antisense strand to SEQ ID NO: 975096
aaaguuaaugccuuugucg

SEQ ID NO: 975098 - RNA, 19 nt, Artificial Sequence
  Description of Artificial Sequence: Synthetic oligonucleotide
  Sense strand starting at position 448 of SEQ ID NO: 914062
gcacucauaggcuauaaag

SEQ ID NO: 975099 - RNA, 19 nt, Artificial Sequence
  Description of Artificial Sequence: Synthetic oligonucleotide
  Antisense strand to SEQ ID NO: 975098
cuuuauagccuaugagugc

SEQ ID NO: 975100 - RNA, 19 nt, Artificial Sequence
  Description of Artificial Sequence: Synthetic oligonucleotide
  Sense strand starting at position 3316 of SEQ ID NO: 914062
agcagucagguauaauaau

SEQ ID NO: 975101 - RNA, 19 nt, Artificial Sequence
  Description of Artificial Sequence: Synthetic oligonucleotide
  Antisense strand to SEQ ID NO: 975100
auuauuauaccugacugcu

SEQ ID NO: 975102 - RNA, 19 nt, Artificial Sequence
  Description of Artificial Sequence: Synthetic oligonucleotide
  Sense strand starting at position 3521 of SEQ ID NO: 914062
agagcuagguaucuaggaa

SEQ ID NO: 975103 - RNA, 19 nt, Artificial Sequence
  Description of Artificial Sequence: Synthetic oligonucleotide
  Antisense strand to SEQ ID NO: 975102
uuccuagauaccuagcucu

SEQ ID NO: 975104 - RNA, 19 nt, Artificial Sequence
  Description of Artificial Sequence: Synthetic oligonucleotide
  Sense strand starting at position 678 of SEQ ID NO: 914062
uguugagaaguuuauccca

SEQ ID NO: 975105 - RNA, 19 nt, Artificial Sequence
  Description of Artificial Sequence: Synthetic oligonucleotide
  Antisense strand to SEQ ID NO: 975104
ugggauaaacuucucaaca

SEQ ID NO: 975106 - RNA, 19 nt, Artificial Sequence
  Description of Artificial Sequence: Synthetic oligonucleotide
  Sense strand starting at position 1279 of SEQ ID NO: 914062
auuguauugguguacaaag

SEQ ID NO: 975107 - RNA, 19 nt, Artificial Sequence
  Description of Artificial Sequence: Synthetic oligonucleotide
  Antisense strand to SEQ ID NO: 975106
cuuuguacaccaauacaau

SEQ ID NO: 975108 - RNA, 19 nt, Artificial Sequence
  Description of Artificial Sequence: Synthetic oligonucleotide
  Sense strand starting at position 3141 of SEQ ID NO: 914062
uagugaaagaguugaguaa

SEQ ID NO: 975109 - RNA, 19 nt, Artificial Sequence
  Description of Artificial Sequence: Synthetic oligonucleotide
  Antisense strand to SEQ ID NO: 975108
uuacucaacucuuucacua

SEQ ID NO: 975110 - RNA, 19 nt, Artificial Sequence
  Description of Artificial Sequence: Synthetic oligonucleotide
  Sense strand starting at position 3902 of SEQ ID NO: 914062
auccauuggcaucaguuaa

SEQ ID NO: 975111 - RNA, 19 nt, Artificial Sequence
  Description of Artificial Sequence: Synthetic oligonucleotide
  Antisense strand to SEQ ID NO: 975110
uuaacugaugccaauggau

SEQ ID NO: 975112 - RNA, 19 nt, Artificial Sequence
  Description of Artificial Sequence: Synthetic oligonucleotide
  Sense strand starting at position 3129 of SEQ ID NO: 914062
gagcacuggguuuagugaa

SEQ ID NO: 975113 - RNA, 19 nt, Artificial Sequence
  Description of Artificial Sequence: Synthetic oligonucleotide
  Antisense strand to SEQ ID NO: 975112
uucacuaaacccagugcuc

SEQ ID NO: 975114 - RNA, 19 nt, Artificial Sequence
  Description of Artificial Sequence: Synthetic oligonucleotide
  Sense strand starting at position 3148 of SEQ ID NO: 914062
agaguugaguaacuucuga

SEQ ID NO: 975115 - RNA, 19 nt, Artificial Sequence
  Description of Artificial Sequence: Synthetic oligonucleotide
  Antisense strand to SEQ ID NO: 975114
ucagaaguuacucaacucu

SEQ ID NO: 975116 - RNA, 19 nt, Artificial Sequence
  Description of Artificial Sequence: Synthetic oligonucleotide
  Sense strand starting at position 22 of SEQ ID NO: 914062
ugcaaugguccugaaauuc

SEQ ID NO: 975117 - RNA, 19 nt, Artificial Sequence
  Description of Artificial Sequence: Synthetic oligonucleotide
  Antisense strand to SEQ ID NO: 975116
gaauuucaggaccauugca

SEQ ID NO: 975118 - RNA, 19 nt, Artificial Sequence
  Description of Artificial Sequence: Synthetic oligonucleotide
  Sense strand starting at position 921 of SEQ ID NO: 914062
ucauauaugucaccuuaga

SEQ ID NO: 975119 - RNA, 19 nt, Artificial Sequence
  Description of Artificial Sequence: Synthetic oligonucleotide
  Antisense strand to SEQ ID NO: 975118
ucuaaggugacauauauga

SEQ ID NO: 975120 - RNA, 19 nt, Artificial Sequence
  Description of Artificial Sequence: Synthetic oligonucleotide
  Sense strand starting at position 833 of SEQ ID NO: 914062
cuccaucuggaguauugua

SEQ ID NO: 975121 - RNA, 19 nt, Artificial Sequence
  Description of Artificial Sequence: Synthetic oligonucleotide
  Antisense strand to SEQ ID NO: 975120
uacaauacuccagauggag

SEQ ID NO: 975122 - RNA, 19 nt, Artificial Sequence
  Description of Artificial Sequence: Synthetic oligonucleotide
  Sense strand starting at position 3536 of SEQ ID NO: 914062
ggaagcacucaguaguuau

SEQ ID NO: 975123 - RNA, 19 nt, Artificial Sequence
  Description of Artificial Sequence: Synthetic oligonucleotide
  Antisense strand to SEQ ID NO: 975122
auaacuacugagugcuucc

SEQ ID NO: 975124 - RNA, 19 nt, Artificial Sequence
  Description of Artificial Sequence: Synthetic oligonucleotide
  Sense strand starting at position 3533 of SEQ ID NO: 914062
cuaggaagcacucaguagu

SEQ ID NO: 975125 - RNA, 19 nt, Artificial Sequence
  Description of Artificial Sequence: Synthetic oligonucleotide
  Antisense strand to SEQ ID NO: 975124
acuacugagugcuuccuag

SEQ ID NO: 975126 - RNA, 19 nt, Artificial Sequence
  Description of Artificial Sequence: Synthetic oligonucleotide
  Sense strand starting at position 3295 of SEQ ID NO: 914062
aagggaguuaccugagucu

SEQ ID NO: 975127 - RNA, 19 nt, Artificial Sequence
  Description of Artificial Sequence: Synthetic oligonucleotide
  Antisense strand to SEQ ID NO: 975126
agacucagguaacucccuu

SEQ ID NO: 975128 - RNA, 19 nt, Artificial Sequence
  Description of Artificial Sequence: Synthetic oligonucleotide
  Sense strand starting at position 681 of SEQ ID NO: 914062
ugagaaguuuaucccagua

SEQ ID NO: 975129 - RNA, 19 nt, Artificial Sequence
  Description of Artificial Sequence: Synthetic oligonucleotide
  Antisense strand to SEQ ID NO: 975128
uacugggauaaacuucuca

SEQ ID NO: 975130 - RNA, 19 nt, Artificial Sequence
  Description of Artificial Sequence: Synthetic oligonucleotide
  Sense strand starting at position 724 of SEQ ID NO: 914062
aagcacaugccugauagua

SEQ ID NO: 975131 - RNA, 19 nt, Artificial Sequence
  Description of Artificial Sequence: Synthetic oligonucleotide
  Antisense strand to SEQ ID NO: 975130
uacuaucaggcaugugcuu

SEQ ID NO: 975132 - RNA, 19 nt, Artificial Sequence
  Description of Artificial Sequence: Synthetic oligonucleotide
  Sense strand starting at position 3298 of SEQ ID NO: 914062
ggaguuaccugagucuuaa

SEQ ID NO: 975133 - RNA, 19 nt, Artificial Sequence
  Description of Artificial Sequence: Synthetic oligonucleotide
  Antisense strand to SEQ ID NO: 975132
uuaagacucagguaacucc

SEQ ID NO: 975134 - RNA, 19 nt, Artificial Sequence
  Description of Artificial Sequence: Synthetic oligonucleotide
  Sense strand starting at position 3909 of SEQ ID NO: 914062
ggcaucaguuaaucucaaa

SEQ ID NO: 975135 - RNA, 19 nt, Artificial Sequence
  Description of Artificial Sequence: Synthetic oligonucleotide
  Antisense strand to SEQ ID NO: 975134
uuugagauuaacugaugcc

SEQ ID NO: 975136 - RNA, 19 nt, Artificial Sequence
  Description of Artificial Sequence: Synthetic oligonucleotide
  Sense strand starting at position 3385 of SEQ ID NO: 914062
agucaaauugucuagguuc

SEQ ID NO: 975137 - RNA, 19 nt, Artificial Sequence
  Description of Artificial Sequence: Synthetic oligonucleotide
  Antisense strand to SEQ ID NO: 975136
gaaccuagacaauuugacu

SEQ ID NO: 975138 - RNA, 19 nt, Artificial Sequence
  Description of Artificial Sequence: Synthetic oligonucleotide
  Sense strand starting at position 3270 of SEQ ID NO: 914062
acaguaguggcuuagaagu

SEQ ID NO: 975139 - RNA, 19 nt, Artificial Sequence
  Description of Artificial Sequence: Synthetic oligonucleotide
  Antisense strand to SEQ ID NO: 975138
acuucuaagccacuacugu

SEQ ID NO: 975140 - RNA, 19 nt, Artificial Sequence
  Description of Artificial Sequence: Synthetic oligonucleotide
  Sense strand starting at position 680 of SEQ ID NO: 914062
uugagaaguuuaucccagu

SEQ ID NO: 975141 - RNA, 19 nt, Artificial Sequence
  Description of Artificial Sequence: Synthetic oligonucleotide
  Antisense strand to SEQ ID NO: 975140
acugggauaaacuucucaa

SEQ ID NO: 975142 - RNA, 19 nt, Artificial Sequence
  Description of Artificial Sequence: Synthetic oligonucleotide
  Sense strand starting at position 1480 of SEQ ID NO: 914062
aaauucugccuuggaagua

SEQ ID NO: 975143 - RNA, 19 nt, Artificial Sequence
  Description of Artificial Sequence: Synthetic oligonucleotide
  Antisense strand to SEQ ID NO: 975142
uacuuccaaggcagaauuu

SEQ ID NO: 975144 - RNA, 19 nt, Artificial Sequence
  Description of Artificial Sequence: Synthetic oligonucleotide
  Sense strand starting at position 3672 of SEQ ID NO: 914062
ugcugugaucuguaagauc

SEQ ID NO: 975145 - RNA, 19 nt, Artificial Sequence
  Description of Artificial Sequence: Synthetic oligonucleotide
  Antisense strand to SEQ ID NO: 975144
gaucuuacagaucacagca

SEQ ID NO: 975146 - RNA, 19 nt, Artificial Sequence
  Description of Artificial Sequence: Synthetic oligonucleotide
  Sense strand starting at position 3968 of SEQ ID NO: 914062
gcagacucugcauauucuu

SEQ ID NO: 975147 - RNA, 19 nt, Artificial Sequence
  Description of Artificial Sequence: Synthetic oligonucleotide
  Antisense strand to SEQ ID NO: 975146
aagaauaugcagagucugc

SEQ ID NO: 975148 - RNA, 19 nt, Artificial Sequence
  Description of Artificial Sequence: Synthetic oligonucleotide
  Sense strand starting at position 3034 of SEQ ID NO: 914062
agcauccucagucgagaaa

SEQ ID NO: 975149 - RNA, 19 nt, Artificial Sequence
  Description of Artificial Sequence: Synthetic oligonucleotide
  Antisense strand to SEQ ID NO: 975148
uuucucgacugaggaugcu

SEQ ID NO: 975150 - RNA, 19 nt, Artificial Sequence
  Description of Artificial Sequence: Synthetic oligonucleotide
  Sense strand starting at position 914 of SEQ ID NO: 914062
gugggugucauauauguca

SEQ ID NO: 975151 - RNA, 19 nt, Artificial Sequence
  Description of Artificial Sequence: Synthetic oligonucleotide
  Antisense strand to SEQ ID NO: 975150
ugacauauaugacacccac

SEQ ID NO: 975152 - RNA, 19 nt, Artificial Sequence
  Description of Artificial Sequence: Synthetic oligonucleotide
  Sense strand starting at position 1479 of SEQ ID NO: 914062
caaauucugccuuggaagu

SEQ ID NO: 975153 - RNA, 19 nt, Artificial Sequence
  Description of Artificial Sequence: Synthetic oligonucleotide
  Antisense strand to SEQ ID NO: 975152
acuuccaaggcagaauuug

SEQ ID NO: 975154 - RNA, 19 nt, Artificial Sequence
  Description of Artificial Sequence: Synthetic oligonucleotide
  Sense strand starting at position 2205 of SEQ ID NO: 914062
gacgcaugauuggcagaau

SEQ ID NO: 975155 - RNA, 19 nt, Artificial Sequence
  Description of Artificial Sequence: Synthetic oligonucleotide
  Antisense strand to SEQ ID NO: 975154
auucugccaaucaugcguc

SEQ ID NO: 975156 - RNA, 19 nt, Artificial Sequence
  Description of Artificial Sequence: Synthetic oligonucleotide
  Sense strand starting at position 2324 of SEQ ID NO: 914062
ugagcuucggaauguuaaa

SEQ ID NO: 975157 - RNA, 19 nt, Artificial Sequence
  Description of Artificial Sequence: Synthetic oligonucleotide
  Antisense strand to SEQ ID NO: 975156
uuuaacauuccgaagcuca

SEQ ID NO: 975158 - RNA, 19 nt, Artificial Sequence
  Description of Artificial Sequence: Synthetic oligonucleotide
  Sense strand starting at position 3105 of SEQ ID NO: 914062
cgacaaaguuagcuacauu

SEQ ID NO: 975159 - RNA, 19 nt, Artificial Sequence
  Description of Artificial Sequence: Synthetic oligonucleotide
  Antisense strand to SEQ ID NO: 975158
aauguagcuaacuuugucg

SEQ ID NO: 975160 - RNA, 19 nt, Artificial Sequence
  Description of Artificial Sequence: Synthetic oligonucleotide
  Sense strand starting at position 3277 of SEQ ID NO: 914062
uggcuuagaaguggccaaa

SEQ ID NO: 975161 - RNA, 19 nt, Artificial Sequence
  Description of Artificial Sequence: Synthetic oligonucleotide
  Antisense strand to SEQ ID NO: 975160
uuuggccacuucuaagcca

SEQ ID NO: 975162 - RNA, 19 nt, Artificial Sequence
  Description of Artificial Sequence: Synthetic oligonucleotide
  Sense strand starting at position 3831 of SEQ ID NO: 914062
uugugauaaagguguuacu

SEQ ID NO: 975163 - RNA, 19 nt, Artificial Sequence
  Description of Artificial Sequence: Synthetic oligonucleotide
  Antisense strand to SEQ ID NO: 975162
aguaacaccuuuaucacaa

SEQ ID NO: 975164 - RNA, 19 nt, Artificial Sequence
  Description of Artificial Sequence: Synthetic oligonucleotide
  Sense strand starting at position 2615 of SEQ ID NO: 914063
uuagaaaucuauccgagag

SEQ ID NO: 975165 - RNA, 19 nt, Artificial Sequence
  Description of Artificial Sequence: Synthetic oligonucleotide
  Antisense strand to SEQ ID NO: 975164
cucucggauagauuucuaa

SEQ ID NO: 975166 - RNA, 19 nt, Artificial Sequence
  Description of Artificial Sequence: Synthetic oligonucleotide
  Sense strand starting at position 2549 of SEQ ID NO: 914063
ggugguuccagagaccaca

SEQ ID NO: 975167 - RNA, 19 nt, Artificial Sequence
  Description of Artificial Sequence: Synthetic oligonucleotide
  Antisense strand to SEQ ID NO: 975166
uguggucucuggaaccacc

SEQ ID NO: 975168 - RNA, 19 nt, Artificial Sequence
  Description of Artificial Sequence: Synthetic oligonucleotide
  Sense strand starting at position 3024 of SEQ ID NO: 914063
gguuuagugaaagaguuga

SEQ ID NO: 975169 - RNA, 19 nt, Artificial Sequence
  Description of Artificial Sequence: Synthetic oligonucleotide
  Antisense strand to SEQ ID NO: 975168
ucaacucuuucacuaaacc

SEQ ID NO: 975170 - RNA, 19 nt, Artificial Sequence
  Description of Artificial Sequence: Synthetic oligonucleotide
  Sense strand starting at position 2095 of SEQ ID NO: 914063
gcaugauuggcagaauuaa

SEQ ID NO: 975171 - RNA, 19 nt, Artificial Sequence
  Description of Artificial Sequence: Synthetic oligonucleotide
  Antisense strand to SEQ ID NO: 975170
uuaauucugccaaucaugc

SEQ ID NO: 975172 - RNA, 19 nt, Artificial Sequence
  Description of Artificial Sequence: Synthetic oligonucleotide
  Sense strand starting at position 2839 of SEQ ID NO: 914063
gcagaacaaucacuacaug

SEQ ID NO: 975173 - RNA, 19 nt, Artificial Sequence
  Description of Artificial Sequence: Synthetic oligonucleotide
  Antisense strand to SEQ ID NO: 975172
cauguagugauuguucugc

SEQ ID NO: 975174 - RNA, 19 nt, Artificial Sequence
  Description of Artificial Sequence: Synthetic oligonucleotide
  Sense strand starting at position 1454 of SEQ ID NO: 914063
agccgaaaccuugacucaa

SEQ ID NO: 975175 - RNA, 19 nt, Artificial Sequence
  Description of Artificial Sequence: Synthetic oligonucleotide
  Antisense strand to SEQ ID NO: 975174
uugagucaagguuucggcu

SEQ ID NO: 975176 - RNA, 19 nt, Artificial Sequence
  Description of Artificial Sequence: Synthetic oligonucleotide
  Sense strand starting at position 1651 of SEQ ID NO: 914063
cgacaaaggcauuaacuuu

SEQ ID NO: 975177 - RNA, 19 nt, Artificial Sequence
  Description of Artificial Sequence: Synthetic oligonucleotide
  Antisense strand to SEQ ID NO: 975176
aaaguuaaugccuuugucg

SEQ ID NO: 975178 - RNA, 19 nt, Artificial Sequence
  Description of Artificial Sequence: Synthetic oligonucleotide
  Sense strand starting at position 335 of SEQ ID NO: 914063
gcacucauaggcuauaaag

SEQ ID NO: 975179 - RNA, 19 nt, Artificial Sequence
  Description of Artificial Sequence: Synthetic oligonucleotide
  Antisense strand to SEQ ID NO: 975178
cuuuauagccuaugagugc

SEQ ID NO: 975180 - RNA, 19 nt, Artificial Sequence
  Description of Artificial Sequence: Synthetic oligonucleotide
  Sense strand starting at position 3203 of SEQ ID NO: 914063
agcagucagguauaauaau

SEQ ID NO: 975181 - RNA, 19 nt, Artificial Sequence
  Description of Artificial Sequence: Synthetic oligonucleotide
  Antisense strand to SEQ ID NO: 975180
auuauuauaccugacugcu

SEQ ID NO: 975182 - RNA, 19 nt, Artificial Sequence
  Description of Artificial Sequence: Synthetic oligonucleotide
  Sense strand starting at position 3408 of SEQ ID NO: 914063
agagcuagguaucuaggaa

SEQ ID NO: 975183 - RNA, 19 nt, Artificial Sequence
  Description of Artificial Sequence: Synthetic oligonucleotide
  Antisense strand to SEQ ID NO: 975182
uuccuagauaccuagcucu

SEQ ID NO: 975184 - RNA, 19 nt, Artificial Sequence
  Description of Artificial Sequence: Synthetic oligonucleotide
  Sense strand starting at position 565 of SEQ ID NO: 914063
uguugagaaguuuauccca

SEQ ID NO: 975185 - RNA, 19 nt, Artificial Sequence
  Description of Artificial Sequence: Synthetic oligonucleotide
  Antisense strand to SEQ ID NO: 975184
ugggauaaacuucucaaca

SEQ ID NO: 975186 - RNA, 19 nt, Artificial Sequence
  Description of Artificial Sequence: Synthetic oligonucleotide
  Sense strand starting at position 1166 of SEQ ID NO: 914063
auuguauugguguacaaag

SEQ ID NO: 975187 - RNA, 19 nt, Artificial Sequence
  Description of Artificial Sequence: Synthetic oligonucleotide
  Antisense strand to SEQ ID NO: 975186
cuuuguacaccaauacaau

SEQ ID NO: 975188 - RNA, 19 nt, Artificial Sequence
  Description of Artificial Sequence: Synthetic oligonucleotide
  Sense strand starting at position 3028 of SEQ ID NO: 914063
uagugaaagaguugaguaa

SEQ ID NO: 975189 - RNA, 19 nt, Artificial Sequence
  Description of Artificial Sequence: Synthetic oligonucleotide
  Antisense strand to SEQ ID NO: 975188
uuacucaacucuuucacua

SEQ ID NO: 975190 - RNA, 19 nt, Artificial Sequence
  Description of Artificial Sequence: Synthetic oligonucleotide
  Sense strand starting at position 3884 of SEQ ID NO: 914063
ggcauaagggcgaguuguu

SEQ ID NO: 975191 - RNA, 19 nt, Artificial Sequence
  Description of Artificial Sequence: Synthetic oligonucleotide
  Antisense strand to SEQ ID NO: 975190
aacaacucgcccuuaugcc

SEQ ID NO: 975192 - RNA, 19 nt, Artificial Sequence
  Description of Artificial Sequence: Synthetic oligonucleotide
  Sense strand starting at position 3789 of SEQ ID NO: 914063
auccauuggcaucaguuaa

SEQ ID NO: 975193 - RNA, 19 nt, Artificial Sequence
  Description of Artificial Sequence: Synthetic oligonucleotide
  Antisense strand to SEQ ID NO: 975192
uuaacugaugccaauggau

SEQ ID NO: 975194 - RNA, 19 nt, Artificial Sequence
  Description of Artificial Sequence: Synthetic oligonucleotide
  Sense strand starting at position 3016 of SEQ ID NO: 914063
gagcacuggguuuagugaa

SEQ ID NO: 975195 - RNA, 19 nt, Artificial Sequence
  Description of Artificial Sequence: Synthetic oligonucleotide
  Antisense strand to SEQ ID NO: 975194
uucacuaaacccagugcuc

SEQ ID NO: 975196 - RNA, 19 nt, Artificial Sequence
  Description of Artificial Sequence: Synthetic oligonucleotide
  Sense strand starting at position 3035 of SEQ ID NO: 914063
agaguugaguaacuucuga

SEQ ID NO: 975197 - RNA, 19 nt, Artificial Sequence
  Description of Artificial Sequence: Synthetic oligonucleotide
  Antisense strand to SEQ ID NO: 975196
ucagaaguuacucaacucu

SEQ ID NO: 975198 - RNA, 19 nt, Artificial Sequence
  Description of Artificial Sequence: Synthetic oligonucleotide
  Sense strand starting at position 808 of SEQ ID NO: 914063
ucauauaugucaccuuaga

SEQ ID NO: 975199 - RNA, 19 nt, Artificial Sequence
  Description of Artificial Sequence: Synthetic oligonucleotide
  Antisense strand to SEQ ID NO: 975198
ucuaaggugacauauauga

SEQ ID NO: 975200 - RNA, 19 nt, Artificial Sequence
  Description of Artificial Sequence: Synthetic oligonucleotide
  Sense strand starting at position 720 of SEQ ID NO: 914063
cuccaucuggaguauugua

SEQ ID NO: 975201 - RNA, 19 nt, Artificial Sequence
  Description of Artificial Sequence: Synthetic oligonucleotide
  Antisense strand to SEQ ID NO: 975200
uacaauacuccagauggag

SEQ ID NO: 975202 - RNA, 19 nt, Artificial Sequence
  Description of Artificial Sequence: Synthetic oligonucleotide
  Sense strand starting at position 3423 of SEQ ID NO: 914063
ggaagcacucaguaguuau

SEQ ID NO: 975203 - RNA, 19 nt, Artificial Sequence
  Description of Artificial Sequence: Synthetic oligonucleotide
  Antisense strand to SEQ ID NO: 975202
auaacuacugagugcuucc

SEQ ID NO: 975204 - RNA, 19 nt, Artificial Sequence
  Description of Artificial Sequence: Synthetic oligonucleotide
  Sense strand starting at position 3420 of SEQ ID NO: 914063
cuaggaagcacucaguagu

SEQ ID NO: 975205 - RNA, 19 nt, Artificial Sequence
  Description of Artificial Sequence: Synthetic oligonucleotide
  Antisense strand to SEQ ID NO: 975204
acuacugagugcuuccuag

SEQ ID NO: 975206 - RNA, 19 nt, Artificial Sequence
  Description of Artificial Sequence: Synthetic oligonucleotide
  Sense strand starting at position 3182 of SEQ ID NO: 914063
aagggaguuaccugagucu

SEQ ID NO: 975207 - RNA, 19 nt, Artificial Sequence
  Description of Artificial Sequence: Synthetic oligonucleotide
  Antisense strand to SEQ ID NO: 975206
agacucagguaacucccuu

SEQ ID NO: 975208 - RNA, 19 nt, Artificial Sequence
  Description of Artificial Sequence: Synthetic oligonucleotide
  Sense strand starting at position 568 of SEQ ID NO: 914063
ugagaaguuuaucccagua

SEQ ID NO: 975209 - RNA, 19 nt, Artificial Sequence
  Description of Artificial Sequence: Synthetic oligonucleotide
  Antisense strand to SEQ ID NO: 975208
uacugggauaaacuucuca

SEQ ID NO: 975210 - RNA, 19 nt, Artificial Sequence
  Description of Artificial Sequence: Synthetic oligonucleotide
  Sense strand starting at position 611 of SEQ ID NO: 914063
aagcacaugccugauagua

SEQ ID NO: 975211 - RNA, 19 nt, Artificial Sequence
  Description of Artificial Sequence: Synthetic oligonucleotide
  Antisense strand to SEQ ID NO: 975210
uacuaucaggcaugugcuu

SEQ ID NO: 975212 - RNA, 19 nt, Artificial Sequence
  Description of Artificial Sequence: Synthetic oligonucleotide
  Sense strand starting at position 3185 of SEQ ID NO: 914063
ggaguuaccugagucuuaa

SEQ ID NO: 975213 - RNA, 19 nt, Artificial Sequence
  Description of Artificial Sequence: Synthetic oligonucleotide
  Antisense strand to SEQ ID NO: 975212
uuaagacucagguaacucc

SEQ ID NO: 975214 - RNA, 19 nt, Artificial Sequence
  Description of Artificial Sequence: Synthetic oligonucleotide
  Sense strand starting at position 3796 of SEQ ID NO: 914063
ggcaucaguuaaucucaaa

SEQ ID NO: 975215 - RNA, 19 nt, Artificial Sequence
  Description of Artificial Sequence: Synthetic oligonucleotide
  Antisense strand to SEQ ID NO: 975214
uuugagauuaacugaugcc

SEQ ID NO: 975216 - RNA, 19 nt, Artificial Sequence
  Description of Artificial Sequence: Synthetic oligonucleotide
  Sense strand starting at position 3945 of SEQ ID NO: 914063
guuacaaccuaagcuuaga

SEQ ID NO: 975217 - RNA, 19 nt, Artificial Sequence
  Description of Artificial Sequence: Synthetic oligonucleotide
  Antisense strand to SEQ ID NO: 975216
ucuaagcuuagguuguaac

SEQ ID NO: 975218 - RNA, 19 nt, Artificial Sequence
  Description of Artificial Sequence: Synthetic oligonucleotide
  Sense strand starting at position 3272 of SEQ ID NO: 914063
agucaaauugucuagguuc

SEQ ID NO: 975219 - RNA, 19 nt, Artificial Sequence
  Description of Artificial Sequence: Synthetic oligonucleotide
  Antisense strand to SEQ ID NO: 975218
gaaccuagacaauuugacu

SEQ ID NO: 975220 - RNA, 19 nt, Artificial Sequence
  Description of Artificial Sequence: Synthetic oligonucleotide
  Sense strand starting at position 3157 of SEQ ID NO: 914063
acaguaguggcuuagaagu

SEQ ID NO: 975221 - RNA, 19 nt, Artificial Sequence
  Description of Artificial Sequence: Synthetic oligonucleotide
  Antisense strand to SEQ ID NO: 975220
acuucuaagccacuacugu

SEQ ID NO: 975222 - RNA, 19 nt, Artificial Sequence
  Description of Artificial Sequence: Synthetic oligonucleotide
  Sense strand starting at position 567 of SEQ ID NO: 914063
uugagaaguuuaucccagu

SEQ ID NO: 975223 - RNA, 19 nt, Artificial Sequence
  Description of Artificial Sequence: Synthetic oligonucleotide
  Antisense strand to SEQ ID NO: 975222
acugggauaaacuucucaa

SEQ ID NO: 975224 - RNA, 19 nt, Artificial Sequence
  Description of Artificial Sequence: Synthetic oligonucleotide
  Sense strand starting at position 1367 of SEQ ID NO: 914063
aaauucugccuuggaagua

SEQ ID NO: 975225 - RNA, 19 nt, Artificial Sequence
  Description of Artificial Sequence: Synthetic oligonucleotide
  Antisense strand to SEQ ID NO: 975224
uacuuccaaggcagaauuu

SEQ ID NO: 975226 - RNA, 19 nt, Artificial Sequence
  Description of Artificial Sequence: Synthetic oligonucleotide
  Sense strand starting at position 3559 of SEQ ID NO: 914063
ugcugugaucuguaagauc

SEQ ID NO: 975227 - RNA, 19 nt, Artificial Sequence
  Description of Artificial Sequence: Synthetic oligonucleotide
  Antisense strand to SEQ ID NO: 975226
gaucuuacagaucacagca

SEQ ID NO: 975228 - RNA, 19 nt, Artificial Sequence
  Description of Artificial Sequence: Synthetic oligonucleotide
  Sense strand starting at position 3855 of SEQ ID NO: 914063
gcagacucugcauauucuu

SEQ ID NO: 975229 - RNA, 19 nt, Artificial Sequence
  Description of Artificial Sequence: Synthetic oligonucleotide
  Antisense strand to SEQ ID NO: 975228
aagaauaugcagagucugc

SEQ ID NO: 975230 - RNA, 19 nt, Artificial Sequence
  Description of Artificial Sequence: Synthetic oligonucleotide
  Sense strand starting at position 2921 of SEQ ID NO: 914063
agcauccucagucgagaaa

SEQ ID NO: 975231 - RNA, 19 nt, Artificial Sequence
  Description of Artificial Sequence: Synthetic oligonucleotide
  Antisense strand to SEQ ID NO: 975230
uuucucgacugaggaugcu

SEQ ID NO: 975232 - RNA, 19 nt, Artificial Sequence
  Description of Artificial Sequence: Synthetic oligonucleotide
  Sense strand starting at position 801 of SEQ ID NO: 914063
gugggugucauauauguca

SEQ ID NO: 975233 - RNA, 19 nt, Artificial Sequence
  Description of Artificial Sequence: Synthetic oligonucleotide
  Antisense strand to SEQ ID NO: 975232
ugacauauaugacacccac

SEQ ID NO: 975234 - RNA, 19 nt, Artificial Sequence
  Description of Artificial Sequence: Synthetic oligonucleotide
  Sense strand starting at position 1366 of SEQ ID NO: 914063
caaauucugccuuggaagu

SEQ ID NO: 975235 - RNA, 19 nt, Artificial Sequence
  Description of Artificial Sequence: Synthetic oligonucleotide
  Antisense strand to SEQ ID NO: 975234
acuuccaaggcagaauuug

SEQ ID NO: 975236 - RNA, 19 nt, Artificial Sequence
  Description of Artificial Sequence: Synthetic oligonucleotide
  Sense strand starting at position 2092 of SEQ ID NO: 914063
gacgcaugauuggcagaau

SEQ ID NO: 975237 - RNA, 19 nt, Artificial Sequence
  Description of Artificial Sequence: Synthetic oligonucleotide
  Antisense strand to SEQ ID NO: 975236
auucugccaaucaugcguc

SEQ ID NO: 975238 - RNA, 19 nt, Artificial Sequence
  Description of Artificial Sequence: Synthetic oligonucleotide
  Sense strand starting at position 2211 of SEQ ID NO: 914063
ugagcuucggaauguuaaa

SEQ ID NO: 975239 - RNA, 19 nt, Artificial Sequence
  Description of Artificial Sequence: Synthetic oligonucleotide
  Antisense strand to SEQ ID NO: 975238
uuuaacauuccgaagcuca

SEQ ID NO: 975240 - RNA, 19 nt, Artificial Sequence
  Description of Artificial Sequence: Synthetic oligonucleotide
  Sense strand starting at position 2992 of SEQ ID NO: 914063
cgacaaaguuagcuacauu

SEQ ID NO: 975241 - RNA, 19 nt, Artificial Sequence
  Description of Artificial Sequence: Synthetic oligonucleotide
  Antisense strand to SEQ ID NO: 975240
aauguagcuaacuuugucg

SEQ ID NO: 975242 - RNA, 19 nt, Artificial Sequence
  Description of Artificial Sequence: Synthetic oligonucleotide
  Sense strand starting at position 3164 of SEQ ID NO: 914063
uggcuuagaaguggccaaa

SEQ ID NO: 975243 - RNA, 19 nt, Artificial Sequence
  Description of Artificial Sequence: Synthetic oligonucleotide
  Antisense strand to SEQ ID NO: 975242
uuuggccacuucuaagcca

SEQ ID NO: 975244 - RNA, 19 nt, Artificial Sequence
  Description of Artificial Sequence: Synthetic oligonucleotide
  Sense strand starting at position 2578 of SEQ ID NO: 914064
ucuauuuagugagcucuua

SEQ ID NO: 975245 - RNA, 19 nt, Artificial Sequence
  Description of Artificial Sequence: Synthetic oligonucleotide
  Antisense strand to SEQ ID NO: 975244
uaagagcucacuaaauaga

SEQ ID NO: 975246 - RNA, 19 nt, Artificial Sequence
  Description of Artificial Sequence: Synthetic oligonucleotide
  Sense strand starting at position 3904 of SEQ ID NO: 914064
agauccuggccacauauua

SEQ ID NO: 975247 - RNA, 19 nt, Artificial Sequence
  Description of Artificial Sequence: Synthetic oligonucleotide
  Antisense strand to SEQ ID NO: 975246
uaauauguggccaggaucu

SEQ ID NO: 975248 - RNA, 19 nt, Artificial Sequence
  Description of Artificial Sequence: Synthetic oligonucleotide
  Sense strand starting at position 2841 of SEQ ID NO: 914064
acagauuagagcugggauu

SEQ ID NO: 975249 - RNA, 19 nt, Artificial Sequence
  Description of Artificial Sequence: Synthetic oligonucleotide
  Antisense strand to SEQ ID NO: 975248
aaucccagcucuaaucugu

SEQ ID NO: 975250 - RNA, 19 nt, Artificial Sequence
  Description of Artificial Sequence: Synthetic oligonucleotide
  Sense strand starting at position 3902 of SEQ ID NO: 914064
ucagauccuggccacauau

SEQ ID NO: 975251 - RNA, 19 nt, Artificial Sequence
  Description of Artificial Sequence: Synthetic oligonucleotide
  Antisense strand to SEQ ID NO: 975250
auauguggccaggaucuga

SEQ ID NO: 975252 - RNA, 19 nt, Artificial Sequence
  Description of Artificial Sequence: Synthetic oligonucleotide
  Sense strand starting at position 59 of SEQ ID NO: 914064
agggauucuuauuccuauu

SEQ ID NO: 975253 - RNA, 19 nt, Artificial Sequence
  Description of Artificial Sequence: Synthetic oligonucleotide
  Antisense strand to SEQ ID NO: 975252
aauaggaauaagaaucccu

SEQ ID NO: 975254 - RNA, 19 nt, Artificial Sequence
  Description of Artificial Sequence: Synthetic oligonucleotide
  Sense strand starting at position 3061 of SEQ ID NO: 914064
gugguaagauaacuuccaa

SEQ ID NO: 975255 - RNA, 19 nt, Artificial Sequence
  Description of Artificial Sequence: Synthetic oligonucleotide
  Antisense strand to SEQ ID NO: 975254
uuggaaguuaucuuaccac

SEQ ID NO: 975256 - RNA, 19 nt, Artificial Sequence
  Description of Artificial Sequence: Synthetic oligonucleotide
  Sense strand starting at position 738 of SEQ ID NO: 914064
ggaagaggguggagaucuu

SEQ ID NO: 975257 - RNA, 19 nt, Artificial Sequence
  Description of Artificial Sequence: Synthetic oligonucleotide
  Antisense strand to SEQ ID NO: 975256
aagaucuccacccucuucc

SEQ ID NO: 975258 - RNA, 19 nt, Artificial Sequence
  Description of Artificial Sequence: Synthetic oligonucleotide
  Sense strand starting at position 2989 of SEQ ID NO: 914064
acagcucauaugugaagga

SEQ ID NO: 975259 - RNA, 19 nt, Artificial Sequence
  Description of Artificial Sequence: Synthetic oligonucleotide
  Antisense strand to SEQ ID NO: 975258
uccuucacauaugagcugu

SEQ ID NO: 975260 - RNA, 19 nt, Artificial Sequence
  Description of Artificial Sequence: Synthetic oligonucleotide
  Sense strand starting at position 3658 of SEQ ID NO: 914064
ggagaagccucaucucacu

SEQ ID NO: 975261 - RNA, 19 nt, Artificial Sequence
  Description of Artificial Sequence: Synthetic oligonucleotide
  Antisense strand to SEQ ID NO: 975260
agugagaugaggcuucucc

SEQ ID NO: 975262 - RNA, 19 nt, Artificial Sequence
  Description of Artificial Sequence: Synthetic oligonucleotide
  Sense strand starting at position 2993 of SEQ ID NO: 914064
cucauaugugaaggagcua

SEQ ID NO: 975263 - RNA, 19 nt, Artificial Sequence
  Description of Artificial Sequence: Synthetic oligonucleotide
  Antisense strand to SEQ ID NO: 975262
uagcuccuucacauaugag

SEQ ID NO: 975264 - RNA, 19 nt, Artificial Sequence
  Description of Artificial Sequence: Synthetic oligonucleotide
  Sense strand starting at position 3702 of SEQ ID NO: 914064
guuugauguccaggaugac

SEQ ID NO: 975265 - RNA, 19 nt, Artificial Sequence
  Description of Artificial Sequence: Synthetic oligonucleotide
  Antisense strand to SEQ ID NO: 975264
gucauccuggacaucaaac

SEQ ID NO: 975266 - RNA, 19 nt, Artificial Sequence
  Description of Artificial Sequence: Synthetic oligonucleotide
  Sense strand starting at position 3021 of SEQ ID NO: 914064
uccagauguugggcuacaa

SEQ ID NO: 975267 - RNA, 19 nt, Artificial Sequence
  Description of Artificial Sequence: Synthetic oligonucleotide
  Antisense strand to SEQ ID NO: 975266
uuguagcccaacaucugga

SEQ ID NO: 975268 - RNA, 19 nt, Artificial Sequence
  Description of Artificial Sequence: Synthetic oligonucleotide
  Sense strand starting at position 2564 of SEQ ID NO: 914064
agguaaucauagcuucuau

SEQ ID NO: 975269 - RNA, 19 nt, Artificial Sequence
  Description of Artificial Sequence: Synthetic oligonucleotide
  Antisense strand to SEQ ID NO: 975268
auagaagcuaugauuaccu

SEQ ID NO: 975270 - RNA, 19 nt, Artificial Sequence
  Description of Artificial Sequence: Synthetic oligonucleotide
  Sense strand starting at position 936 of SEQ ID NO: 914064
aggcauucuugggcugaga

SEQ ID NO: 975271 - RNA, 19 nt, Artificial Sequence
  Description of Artificial Sequence: Synthetic oligonucleotide
  Antisense strand to SEQ ID NO: 975270
ucucagcccaagaaugccu

SEQ ID NO: 975272 - RNA, 19 nt, Artificial Sequence
  Description of Artificial Sequence: Synthetic oligonucleotide
  Sense strand starting at position 910 of SEQ ID NO: 914064
ggugaaaggcauuguuuaa

SEQ ID NO: 975273 - RNA, 19 nt, Artificial Sequence
  Description of Artificial Sequence: Synthetic oligonucleotide
  Antisense strand to SEQ ID NO: 975272
uuaaacaaugccuuucacc

SEQ ID NO: 975274 - RNA, 19 nt, Artificial Sequence
  Description of Artificial Sequence: Synthetic oligonucleotide
  Sense strand starting at position 783 of SEQ ID NO: 914064
cgcagaucauaguccagaa

SEQ ID NO: 975275 - RNA, 19 nt, Artificial Sequence
  Description of Artificial Sequence: Synthetic oligonucleotide
  Antisense strand to SEQ ID NO: 975274
uucuggacuaugaucugcg

SEQ ID NO: 975276 - RNA, 19 nt, Artificial Sequence
  Description of Artificial Sequence: Synthetic oligonucleotide
  Sense strand starting at position 577 of SEQ ID NO: 914064
guuucaugagccugggaug

SEQ ID NO: 975277 - RNA, 19 nt, Artificial Sequence
  Description of Artificial Sequence: Synthetic oligonucleotide
  Antisense strand to SEQ ID NO: 975276
caucccaggcucaugaaac

SEQ ID NO: 975278 - RNA, 19 nt, Artificial Sequence
  Description of Artificial Sequence: Synthetic oligonucleotide
  Sense strand starting at position 699 of SEQ ID NO: 914064
cugagccuuacccgaauga

SEQ ID NO: 975279 - RNA, 19 nt, Artificial Sequence
  Description of Artificial Sequence: Synthetic oligonucleotide
  Antisense strand to SEQ ID NO: 975278
ucauucggguaaggcucag

SEQ ID NO: 975280 - RNA, 19 nt, Artificial Sequence
  Description of Artificial Sequence: Synthetic oligonucleotide
  Sense strand starting at position 2911 of SEQ ID NO: 914064
ccuggauucugagucugua

SEQ ID NO: 975281 - RNA, 19 nt, Artificial Sequence
  Description of Artificial Sequence: Synthetic oligonucleotide
  Antisense strand to SEQ ID NO: 975280
uacagacucagaauccagg

SEQ ID NO: 975282 - RNA, 19 nt, Artificial Sequence
  Description of Artificial Sequence: Synthetic oligonucleotide
  Sense strand starting at position 3738 of SEQ ID NO: 914064
gaguaaacuuuggccuucu

SEQ ID NO: 975283 - RNA, 19 nt, Artificial Sequence
  Description of Artificial Sequence: Synthetic oligonucleotide
  Antisense strand to SEQ ID NO: 975282
agaaggccaaaguuuacuc

SEQ ID NO: 975284 - RNA, 19 nt, Artificial Sequence
  Description of Artificial Sequence: Synthetic oligonucleotide
  Sense strand starting at position 2690 of SEQ ID NO: 914064
auacuuagugggugcuaau

SEQ ID NO: 975285 - RNA, 19 nt, Artificial Sequence
  Description of Artificial Sequence: Synthetic oligonucleotide
  Antisense strand to SEQ ID NO: 975284
auuagcacccacuaaguau

SEQ ID NO: 975286 - RNA, 19 nt, Artificial Sequence
  Description of Artificial Sequence: Synthetic oligonucleotide
  Sense strand starting at position 3605 of SEQ ID NO: 914064
uguuccuucugaucuaguu

SEQ ID NO: 975287 - RNA, 19 nt, Artificial Sequence
  Description of Artificial Sequence: Synthetic oligonucleotide
  Antisense strand to SEQ ID NO: 975286
aacuagaucagaaggaaca

SEQ ID NO: 975288 - RNA, 19 nt, Artificial Sequence
  Description of Artificial Sequence: Synthetic oligonucleotide
  Sense strand starting at position 3689 of SEQ ID NO: 914064
ugggacaagccguguuuga

SEQ ID NO: 975289 - RNA, 19 nt, Artificial Sequence
  Description of Artificial Sequence: Synthetic oligonucleotide
  Antisense strand to SEQ ID NO: 975288
ucaaacacggcuuguccca

SEQ ID NO: 975290 - RNA, 19 nt, Artificial Sequence
  Description of Artificial Sequence: Synthetic oligonucleotide
  Sense strand starting at position 3048 of SEQ ID NO: 914064
gcuuaaccacucuguggua

SEQ ID NO: 975291 - RNA, 19 nt, Artificial Sequence
  Description of Artificial Sequence: Synthetic oligonucleotide
  Antisense strand to SEQ ID NO: 975290
uaccacagagugguuaagc

SEQ ID NO: 975292 - RNA, 19 nt, Artificial Sequence
  Description of Artificial Sequence: Synthetic oligonucleotide
  Sense strand starting at position 2655 of SEQ ID NO: 914064
guuccaagcuuaucagcua

SEQ ID NO: 975293 - RNA, 19 nt, Artificial Sequence
  Description of Artificial Sequence: Synthetic oligonucleotide
  Antisense strand to SEQ ID NO: 975292
uagcugauaagcuuggaac

SEQ ID NO: 975294 - RNA, 19 nt, Artificial Sequence
  Description of Artificial Sequence: Synthetic oligonucleotide
  Sense strand starting at position 3699 of SEQ ID NO: 914064
cguguuugauguccaggau

SEQ ID NO: 975295 - RNA, 19 nt, Artificial Sequence
  Description of Artificial Sequence: Synthetic oligonucleotide
  Antisense strand to SEQ ID NO: 975294
auccuggacaucaaacacg

SEQ ID NO: 975296 - RNA, 19 nt, Artificial Sequence
  Description of Artificial Sequence: Synthetic oligonucleotide
  Sense strand starting at position 878 of SEQ ID NO: 914064
ggaugaugcuugcuuuggu

SEQ ID NO: 975297 - RNA, 19 nt, Artificial Sequence
  Description of Artificial Sequence: Synthetic oligonucleotide
  Antisense strand to SEQ ID NO: 975296
accaaagcaagcaucaucc

SEQ ID NO: 975298 - RNA, 19 nt, Artificial Sequence
  Description of Artificial Sequence: Synthetic oligonucleotide
  Sense strand starting at position 3599 of SEQ ID NO: 914064
uggcucuguuccuucugau

SEQ ID NO: 975299 - RNA, 19 nt, Artificial Sequence
  Description of Artificial Sequence: Synthetic oligonucleotide
  Antisense strand to SEQ ID NO: 975298
aucagaaggaacagagcca

SEQ ID NO: 975300 - RNA, 19 nt, Artificial Sequence
  Description of Artificial Sequence: Synthetic oligonucleotide
  Sense strand starting at position 3613 of SEQ ID NO: 914064
cugaucuaguuguaagaaa

SEQ ID NO: 975301 - RNA, 19 nt, Artificial Sequence
  Description of Artificial Sequence: Synthetic oligonucleotide
  Antisense strand to SEQ ID NO: 975300
uuucuuacaacuagaucag

SEQ ID NO: 975302 - RNA, 19 nt, Artificial Sequence
  Description of Artificial Sequence: Synthetic oligonucleotide
  Sense strand starting at position 2700 of SEQ ID NO: 914064
ggugcuaauugugugccaa

SEQ ID NO: 975303 - RNA, 19 nt, Artificial Sequence
  Description of Artificial Sequence: Synthetic oligonucleotide
  Antisense strand to SEQ ID NO: 975302
uuggcacacaauuagcacc

SEQ ID NO: 975304 - RNA, 19 nt, Artificial Sequence
  Description of Artificial Sequence: Synthetic oligonucleotide
  Sense strand starting at position 744 of SEQ ID NO: 914064
ggguggagaucuuaggguu

SEQ ID NO: 975305 - RNA, 19 nt, Artificial Sequence
  Description of Artificial Sequence: Synthetic oligonucleotide
  Antisense strand to SEQ ID NO: 975304
aacccuaagaucuccaccc

SEQ ID NO: 975306 - RNA, 19 nt, Artificial Sequence
  Description of Artificial Sequence: Synthetic oligonucleotide
  Sense strand starting at position 416 of SEQ ID NO: 914064
acucaagucugacagcaga

SEQ ID NO: 975307 - RNA, 19 nt, Artificial Sequence
  Description of Artificial Sequence: Synthetic oligonucleotide
  Antisense strand to SEQ ID NO: 975306
ucugcugucagacuugagu

SEQ ID NO: 975308 - RNA, 19 nt, Artificial Sequence
  Description of Artificial Sequence: Synthetic oligonucleotide
  Sense strand starting at position 3053 of SEQ ID NO: 914064
accacucugugguaagaua

SEQ ID NO: 975309 - RNA, 19 nt, Artificial Sequence
  Description of Artificial Sequence: Synthetic oligonucleotide
  Antisense strand to SEQ ID NO: 975308
uaucuuaccacagaguggu

SEQ ID NO: 975310 - RNA, 19 nt, Artificial Sequence
  Description of Artificial Sequence: Synthetic oligonucleotide
  Sense strand starting at position 3223 of SEQ ID NO: 914064
gcucucccuugagaggaau

SEQ ID NO: 975311 - RNA, 19 nt, Artificial Sequence
  Description of Artificial Sequence: Synthetic oligonucleotide
  Antisense strand to SEQ ID NO: 975310
auuccucucaagggagagc

SEQ ID NO: 975312 - RNA, 19 nt, Artificial Sequence
  Description of Artificial Sequence: Synthetic oligonucleotide
  Sense strand starting at position 2716 of SEQ ID NO: 914064
caagucugaucugagcaca

SEQ ID NO: 975313 - RNA, 19 nt, Artificial Sequence
  Description of Artificial Sequence: Synthetic oligonucleotide
  Antisense strand to SEQ ID NO: 975312
ugugcucagaucagacuug

SEQ ID NO: 975314 - RNA, 19 nt, Artificial Sequence
  Description of Artificial Sequence: Synthetic oligonucleotide
  Sense strand starting at position 747 of SEQ ID NO: 914064
uggagaucuuaggguucca

SEQ ID NO: 975315 - RNA, 19 nt, Artificial Sequence
  Description of Artificial Sequence: Synthetic oligonucleotide
  Antisense strand to SEQ ID NO: 975314
uggaacccuaagaucucca

SEQ ID NO: 975316 - RNA, 19 nt, Artificial Sequence
  Description of Artificial Sequence: Synthetic oligonucleotide
  Sense strand starting at position 2985 of SEQ ID NO: 914064
ccacacagcucauauguga

SEQ ID NO: 975317 - RNA, 19 nt, Artificial Sequence
  Description of Artificial Sequence: Synthetic oligonucleotide
  Antisense strand to SEQ ID NO: 975316
ucacauaugagcugugugg

SEQ ID NO: 975318 - RNA, 19 nt, Artificial Sequence
  Description of Artificial Sequence: Synthetic oligonucleotide
  Sense strand starting at position 3269 of SEQ ID NO: 914064
auuccuuccugagagccua

SEQ ID NO: 975319 - RNA, 19 nt, Artificial Sequence
  Description of Artificial Sequence: Synthetic oligonucleotide
  Antisense strand to SEQ ID NO: 975318
uaggcucucaggaaggaau

SEQ ID NO: 975320 - RNA, 19 nt, Artificial Sequence
  Description of Artificial Sequence: Synthetic oligonucleotide
  Sense strand starting at position 2666 of SEQ ID NO: 914064
aucagcuauugcuaaugau

SEQ ID NO: 975321 - RNA, 19 nt, Artificial Sequence
  Description of Artificial Sequence: Synthetic oligonucleotide
  Antisense strand to SEQ ID NO: 975320
aucauuagcaauagcugau

SEQ ID NO: 975322 - RNA, 19 nt, Artificial Sequence
  Description of Artificial Sequence: Synthetic oligonucleotide
  Sense strand starting at position 3051 of SEQ ID NO: 914064
uaaccacucugugguaaga

SEQ ID NO: 975323 - RNA, 19 nt, Artificial Sequence
  Description of Artificial Sequence: Synthetic oligonucleotide
  Antisense strand to SEQ ID NO: 975322
ucuuaccacagagugguua

SEQ ID NO: 975324 - RNA, 19 nt, Artificial Sequence
  Description of Artificial Sequence: Synthetic oligonucleotide
  Sense strand starting at position 3477 of SEQ ID NO: 914065
auccauuucugagccaugu

SEQ ID NO: 975325 - RNA, 19 nt, Artificial Sequence
  Description of Artificial Sequence: Synthetic oligonucleotide
  Antisense strand to SEQ ID NO: 975324
acauggcucagaaauggau

SEQ ID NO: 975326 - RNA, 19 nt, Artificial Sequence
  Description of Artificial Sequence: Synthetic oligonucleotide
  Sense strand starting at position 1487 of SEQ ID NO: 914065
gaaucuuccgugcucugca

SEQ ID NO: 975327 - RNA, 19 nt, Artificial Sequence
  Description of Artificial Sequence: Synthetic oligonucleotide
  Antisense strand to SEQ ID NO: 975326
ugcagagcacggaagauuc

SEQ ID NO: 975328 - RNA, 19 nt, Artificial Sequence
  Description of Artificial Sequence: Synthetic oligonucleotide
  Sense strand starting at position 2496 of SEQ ID NO: 914065
ggcaaauaugcugcacguu

SEQ ID NO: 975329 - RNA, 19 nt, Artificial Sequence
  Description of Artificial Sequence: Synthetic oligonucleotide
  Antisense strand to SEQ ID NO: 975328
aacgugcagcauauuugcc

SEQ ID NO: 975330 - RNA, 19 nt, Artificial Sequence
  Description of Artificial Sequence: Synthetic oligonucleotide
  Sense strand starting at position 641 of SEQ ID NO: 914065
gagacauggauguguagga

SEQ ID NO: 975331 - RNA, 19 nt, Artificial Sequence
  Description of Artificial Sequence: Synthetic oligonucleotide
  Antisense strand to SEQ ID NO: 975330
uccuacacauccaugucuc

SEQ ID NO: 975332 - RNA, 19 nt, Artificial Sequence
  Description of Artificial Sequence: Synthetic oligonucleotide
  Sense strand starting at position 2603 of SEQ ID NO: 914065
agaacaucacuuuggguga

SEQ ID NO: 975333 - RNA, 19 nt, Artificial Sequence
  Description of Artificial Sequence: Synthetic oligonucleotide
  Antisense strand to SEQ ID NO: 975332
ucacccaaagugauguucu

SEQ ID NO: 975334 - RNA, 19 nt, Artificial Sequence
  Description of Artificial Sequence: Synthetic oligonucleotide
  Sense strand starting at position 3731 of SEQ ID NO: 914065
gcggcaugugacuuuaguu

SEQ ID NO: 975335 - RNA, 19 nt, Artificial Sequence
  Description of Artificial Sequence: Synthetic oligonucleotide
  Antisense strand to SEQ ID NO: 975334
aacuaaagucacaugccgc

SEQ ID NO: 975336 - RNA, 19 nt, Artificial Sequence
  Description of Artificial Sequence: Synthetic oligonucleotide
  Sense strand starting at position 1748 of SEQ ID NO: 914065
uagggauggaucuggccaa

SEQ ID NO: 975337 - RNA, 19 nt, Artificial Sequence
  Description of Artificial Sequence: Synthetic oligonucleotide
  Antisense strand to SEQ ID NO: 975336
uuggccagauccaucccua

SEQ ID NO: 975338 - RNA, 19 nt, Artificial Sequence
  Description of Artificial Sequence: Synthetic oligonucleotide
  Sense strand starting at position 3597 of SEQ ID NO: 914065
agaguuacuguguagaaug

SEQ ID NO: 975339 - RNA, 19 nt, Artificial Sequence
  Description of Artificial Sequence: Synthetic oligonucleotide
  Antisense strand to SEQ ID NO: 975338
cauucuacacaguaacucu

SEQ ID NO: 975340 - RNA, 19 nt, Artificial Sequence
  Description of Artificial Sequence: Synthetic oligonucleotide
  Sense strand starting at position 3840 of SEQ ID NO: 914065
uuaaucagugacuauguua

SEQ ID NO: 975341 - RNA, 19 nt, Artificial Sequence
  Description of Artificial Sequence: Synthetic oligonucleotide
  Antisense strand to SEQ ID NO: 975340
uaacauagucacugauuaa

SEQ ID NO: 975342 - RNA, 19 nt, Artificial Sequence
  Description of Artificial Sequence: Synthetic oligonucleotide
  Sense strand starting at position 2096 of SEQ ID NO: 914065
aggaaaugggcauaguguu

SEQ ID NO: 975343 - RNA, 19 nt, Artificial Sequence
  Description of Artificial Sequence: Synthetic oligonucleotide
  Antisense strand to SEQ ID NO: 975342
aacacuaugcccauuuccu

SEQ ID NO: 975344 - RNA, 19 nt, Artificial Sequence
  Description of Artificial Sequence: Synthetic oligonucleotide
  Sense strand starting at position 3683 of SEQ ID NO: 914065
gcagaaaugcgauagacau

SEQ ID NO: 975345 - RNA, 19 nt, Artificial Sequence
  Description of Artificial Sequence: Synthetic oligonucleotide
  Antisense strand to SEQ ID NO: 975344
augucuaucgcauuucugc

SEQ ID NO: 975346 - RNA, 19 nt, Artificial Sequence
  Description of Artificial Sequence: Synthetic oligonucleotide
  Sense strand starting at position 2197 of SEQ ID NO: 914065
aacuccaggucuguaagaa

SEQ ID NO: 975347 - RNA, 19 nt, Artificial Sequence
  Description of Artificial Sequence: Synthetic oligonucleotide
  Antisense strand to SEQ ID NO: 975346
uucuuacagaccuggaguu

SEQ ID NO: 975348 - RNA, 19 nt, Artificial Sequence
  Description of Artificial Sequence: Synthetic oligonucleotide
  Sense strand starting at position 1736 of SEQ ID NO: 914065
ugcugaacccuguagggau

SEQ ID NO: 975349 - RNA, 19 nt, Artificial Sequence
  Description of Artificial Sequence: Synthetic oligonucleotide
  Antisense strand to SEQ ID NO: 975348
aucccuacaggguucagca

SEQ ID NO: 975350 - RNA, 19 nt, Artificial Sequence
  Description of Artificial Sequence: Synthetic oligonucleotide
  Sense strand starting at position 1443 of SEQ ID NO: 914065
cuauguuacccugggaaac

SEQ ID NO: 975351 - RNA, 19 nt, Artificial Sequence
  Description of Artificial Sequence: Synthetic oligonucleotide
  Antisense strand to SEQ ID NO: 975350
guuucccaggguaacauag

SEQ ID NO: 975352 - RNA, 19 nt, Artificial Sequence
  Description of Artificial Sequence: Synthetic oligonucleotide
  Sense strand starting at position 1444 of SEQ ID NO: 914065
uauguuacccugggaaacu

SEQ ID NO: 975353 - RNA, 19 nt, Artificial Sequence
  Description of Artificial Sequence: Synthetic oligonucleotide
  Antisense strand to SEQ ID NO: 975352
aguuucccaggguaacaua

SEQ ID NO: 975354 - RNA, 19 nt, Artificial Sequence
  Description of Artificial Sequence: Synthetic oligonucleotide
  Sense strand starting at position 2592 of SEQ ID NO: 914065
cugucuuugguagaacauc

SEQ ID NO: 975355 - RNA, 19 nt, Artificial Sequence
  Description of Artificial Sequence: Synthetic oligonucleotide
  Antisense strand to SEQ ID NO: 975354
gauguucuaccaaagacag

SEQ ID NO: 975356 - RNA, 19 nt, Artificial Sequence
  Description of Artificial Sequence: Synthetic oligonucleotide
  Sense strand starting at position 3768 of SEQ ID NO: 914065
guucuuguugaucauugaa

SEQ ID NO: 975357 - RNA, 19 nt, Artificial Sequence
  Description of Artificial Sequence: Synthetic oligonucleotide
  Antisense strand to SEQ ID NO: 975356
uucaaugaucaacaagaac

SEQ ID NO: 975358 - RNA, 19 nt, Artificial Sequence
  Description of Artificial Sequence: Synthetic oligonucleotide
  Sense strand starting at position 2196 of SEQ ID NO: 914065
gaacuccaggucuguaaga

SEQ ID NO: 975359 - RNA, 19 nt, Artificial Sequence
  Description of Artificial Sequence: Synthetic oligonucleotide
  Antisense strand to SEQ ID NO: 975358
ucuuacagaccuggaguuc

SEQ ID NO: 975360 - RNA, 19 nt, Artificial Sequence
  Description of Artificial Sequence: Synthetic oligonucleotide
  Sense strand starting at position 322 of SEQ ID NO: 914065
ccugaauugugaccacacu

SEQ ID NO: 975361 - RNA, 19 nt, Artificial Sequence
  Description of Artificial Sequence: Synthetic oligonucleotide
  Antisense strand to SEQ ID NO: 975360
aguguggucacaauucagg

SEQ ID NO: 975362 - RNA, 19 nt, Artificial Sequence
  Description of Artificial Sequence: Synthetic oligonucleotide
  Sense strand starting at position 2342 of SEQ ID NO: 914065
ugaagaacucacugcucca

SEQ ID NO: 975363 - RNA, 19 nt, Artificial Sequence
  Description of Artificial Sequence: Synthetic oligonucleotide
  Antisense strand to SEQ ID NO: 975362
uggagcagugaguucuuca

SEQ ID NO: 975364 - RNA, 19 nt, Artificial Sequence
  Description of Artificial Sequence: Synthetic oligonucleotide
  Sense strand starting at position 3647 of SEQ ID NO: 914065
auuggcucaugauuagauu

SEQ ID NO: 975365 - RNA, 19 nt, Artificial Sequence
  Description of Artificial Sequence: Synthetic oligonucleotide
  Antisense strand to SEQ ID NO: 975364
aaucuaaucaugagccaau

SEQ ID NO: 975366 - RNA, 19 nt, Artificial Sequence
  Description of Artificial Sequence: Synthetic oligonucleotide
  Sense strand starting at position 3843 of SEQ ID NO: 914065
aucagugacuauguuauga

SEQ ID NO: 975367 - RNA, 19 nt, Artificial Sequence
  Description of Artificial Sequence: Synthetic oligonucleotide
  Antisense strand to SEQ ID NO: 975366
ucauaacauagucacugau

SEQ ID NO: 975368 - RNA, 19 nt, Artificial Sequence
  Description of Artificial Sequence: Synthetic oligonucleotide
  Sense strand starting at position 3771 of SEQ ID NO: 914065
cuuguugaucauugaauua

SEQ ID NO: 975369 - RNA, 19 nt, Artificial Sequence
  Description of Artificial Sequence: Synthetic oligonucleotide
  Antisense strand to SEQ ID NO: 975368
uaauucaaugaucaacaag

SEQ ID NO: 975370 - RNA, 19 nt, Artificial Sequence
  Description of Artificial Sequence: Synthetic oligonucleotide
  Sense strand starting at position 3174 of SEQ ID NO: 914065
uguggacucagucagguua

SEQ ID NO: 975371 - RNA, 19 nt, Artificial Sequence
  Description of Artificial Sequence: Synthetic oligonucleotide
  Antisense strand to SEQ ID NO: 975370
uaaccugacugaguccaca

SEQ ID NO: 975372 - RNA, 19 nt, Artificial Sequence
  Description of Artificial Sequence: Synthetic oligonucleotide
  Sense strand starting at position 3592 of SEQ ID NO: 914065
acaggagaguuacugugua

SEQ ID NO: 975373 - RNA, 19 nt, Artificial Sequence
  Description of Artificial Sequence: Synthetic oligonucleotide
  Antisense strand to SEQ ID NO: 975372
uacacaguaacucuccugu

SEQ ID NO: 975374 - RNA, 19 nt, Artificial Sequence
  Description of Artificial Sequence: Synthetic oligonucleotide
  Sense strand starting at position 3596 of SEQ ID NO: 914065
gagaguuacuguguagaau

SEQ ID NO: 975375 - RNA, 19 nt, Artificial Sequence
  Description of Artificial Sequence: Synthetic oligonucleotide
  Antisense strand to SEQ ID NO: 975374
auucuacacaguaacucuc

SEQ ID NO: 975376 - RNA, 19 nt, Artificial Sequence
  Description of Artificial Sequence: Synthetic oligonucleotide
  Sense strand starting at position 3765 of SEQ ID NO: 914065
gauguucuuguugaucauu

SEQ ID NO: 975377 - RNA, 19 nt, Artificial Sequence
  Description of Artificial Sequence: Synthetic oligonucleotide
  Antisense strand to SEQ ID NO: 975376
aaugaucaacaagaacauc

SEQ ID NO: 975378 - RNA, 19 nt, Artificial Sequence
  Description of Artificial Sequence: Synthetic oligonucleotide
  Sense strand starting at position 3770 of SEQ ID NO: 914065
ucuuguugaucauugaauu

SEQ ID NO: 975379 - RNA, 19 nt, Artificial Sequence
  Description of Artificial Sequence: Synthetic oligonucleotide
  Antisense strand to SEQ ID NO: 975378
aauucaaugaucaacaaga

SEQ ID NO: 975380 - RNA, 19 nt, Artificial Sequence
  Description of Artificial Sequence: Synthetic oligonucleotide
  Sense strand starting at position 382 of SEQ ID NO: 914065
uacuuagguugagccaaau

SEQ ID NO: 975381 - RNA, 19 nt, Artificial Sequence
  Description of Artificial Sequence: Synthetic oligonucleotide
  Antisense strand to SEQ ID NO: 975380
auuuggcucaaccuaagua

SEQ ID NO: 975382 - RNA, 19 nt, Artificial Sequence
  Description of Artificial Sequence: Synthetic oligonucleotide
  Sense strand starting at position 3301 of SEQ ID NO: 914065
guagguugucagcaugaaa

SEQ ID NO: 975383 - RNA, 19 nt, Artificial Sequence
  Description of Artificial Sequence: Synthetic oligonucleotide
  Antisense strand to SEQ ID NO: 975382
uuucaugcugacaaccuac

SEQ ID NO: 975384 - RNA, 19 nt, Artificial Sequence
  Description of Artificial Sequence: Synthetic oligonucleotide
  Sense strand starting at position 3293 of SEQ ID NO: 914065
cuaugaaaguagguuguca

SEQ ID NO: 975385 - RNA, 19 nt, Artificial Sequence
  Description of Artificial Sequence: Synthetic oligonucleotide
  Antisense strand to SEQ ID NO: 975384
ugacaaccuacuuucauag

SEQ ID NO: 975386 - RNA, 19 nt, Artificial Sequence
  Description of Artificial Sequence: Synthetic oligonucleotide
  Sense strand starting at position 2634 of SEQ ID NO: 914065
ugcaauggugauuaugcua

SEQ ID NO: 975387 - RNA, 19 nt, Artificial Sequence
  Description of Artificial Sequence: Synthetic oligonucleotide
  Antisense strand to SEQ ID NO: 975386
uagcauaaucaccauugca

SEQ ID NO: 975388 - RNA, 19 nt, Artificial Sequence
  Description of Artificial Sequence: Synthetic oligonucleotide
  Sense strand starting at position 3182 of SEQ ID NO: 914065
cagucagguuauguaacau

SEQ ID NO: 975389 - RNA, 19 nt, Artificial Sequence
  Description of Artificial Sequence: Synthetic oligonucleotide
  Antisense strand to SEQ ID NO: 975388
auguuacauaaccugacug

SEQ ID NO: 975390 - RNA, 19 nt, Artificial Sequence
  Description of Artificial Sequence: Synthetic oligonucleotide
  Sense strand starting at position 2637 of SEQ ID NO: 914065
aauggugauuaugcuaagu

SEQ ID NO: 975391 - RNA, 19 nt, Artificial Sequence
  Description of Artificial Sequence: Synthetic oligonucleotide
  Antisense strand to SEQ ID NO: 975390
acuuagcauaaucaccauu

SEQ ID NO: 975392 - RNA, 19 nt, Artificial Sequence
  Description of Artificial Sequence: Synthetic oligonucleotide
  Sense strand starting at position 3758 of SEQ ID NO: 914065
gauugaugauguucuuguu

SEQ ID NO: 975393 - RNA, 19 nt, Artificial Sequence
  Description of Artificial Sequence: Synthetic oligonucleotide
  Antisense strand to SEQ ID NO: 975392
aacaagaacaucaucaauc

SEQ ID NO: 975394 - RNA, 19 nt, Artificial Sequence
  Description of Artificial Sequence: Synthetic oligonucleotide
  Sense strand starting at position 2315 of SEQ ID NO: 914065
cuggguuccugguuuagau

SEQ ID NO: 975395 - RNA, 19 nt, Artificial Sequence
  Description of Artificial Sequence: Synthetic oligonucleotide
  Antisense strand to SEQ ID NO: 975394
aucuaaaccaggaacccag

SEQ ID NO: 975396 - RNA, 19 nt, Artificial Sequence
  Description of Artificial Sequence: Synthetic oligonucleotide
  Sense strand starting at position 2360 of SEQ ID NO: 914065
agcugagauuggucagguu

SEQ ID NO: 975397 - RNA, 19 nt, Artificial Sequence
  Description of Artificial Sequence: Synthetic oligonucleotide
  Antisense strand to SEQ ID NO: 975396
aaccugaccaaucucagcu

SEQ ID NO: 975398 - RNA, 19 nt, Artificial Sequence
  Description of Artificial Sequence: Synthetic oligonucleotide
  Sense strand starting at position 3383 of SEQ ID NO: 914065
ucaagaaauuaacauggau

SEQ ID NO: 975399 - RNA, 19 nt, Artificial Sequence
  Description of Artificial Sequence: Synthetic oligonucleotide
  Antisense strand to SEQ ID NO: 975398
auccauguuaauuucuuga

SEQ ID NO: 975400 - RNA, 19 nt, Artificial Sequence
  Description of Artificial Sequence: Synthetic oligonucleotide
  Sense strand starting at position 3767 of SEQ ID NO: 914065
uguucuuguugaucauuga

SEQ ID NO: 975401 - RNA, 19 nt, Artificial Sequence
  Description of Artificial Sequence: Synthetic oligonucleotide
  Antisense strand to SEQ ID NO: 975400
ucaaugaucaacaagaaca

SEQ ID NO: 975402 - RNA, 19 nt, Artificial Sequence
  Description of Artificial Sequence: Synthetic oligonucleotide
  Sense strand starting at position 2102 of SEQ ID NO: 914065
ugggcauaguguuuacaca

SEQ ID NO: 975403 - RNA, 19 nt, Artificial Sequence
  Description of Artificial Sequence: Synthetic oligonucleotide
  Antisense strand to SEQ ID NO: 975402
uguguaaacacuaugccca

SEQ ID NO: 975404 - RNA, 19 nt, Artificial Sequence
  Description of Artificial Sequence: Synthetic oligonucleotide
  Sense strand starting at position 1753 of SEQ ID NO: 914066
ggaucuggccaaggaagau

SEQ ID NO: 975405 - RNA, 19 nt, Artificial Sequence
  Description of Artificial Sequence: Synthetic oligonucleotide
  Antisense strand to SEQ ID NO: 975404
aucuuccuuggccagaucc

SEQ ID NO: 975406 - RNA, 19 nt, Artificial Sequence
  Description of Artificial Sequence: Synthetic oligonucleotide
  Sense strand starting at position 2445 of SEQ ID NO: 914066
ggcaaauaugcugcacguu

SEQ ID NO: 975407 - RNA, 19 nt, Artificial Sequence
  Description of Artificial Sequence: Synthetic oligonucleotide
  Antisense strand to SEQ ID NO: 975406
aacgugcagcauauuugcc

SEQ ID NO: 975408 - RNA, 19 nt, Artificial Sequence
  Description of Artificial Sequence: Synthetic oligonucleotide
  Sense strand starting at position 550 of SEQ ID NO: 914066
ccauuauucccaggaggac

SEQ ID NO: 975409 - RNA, 19 nt, Artificial Sequence
  Description of Artificial Sequence: Synthetic oligonucleotide
  Antisense strand to SEQ ID NO: 975408
guccuccugggaauaaugg

SEQ ID NO: 975410 - RNA, 19 nt, Artificial Sequence
  Description of Artificial Sequence: Synthetic oligonucleotide
  Sense strand starting at position 611 of SEQ ID NO: 914066
gagacauggauguguagga

SEQ ID NO: 975411 - RNA, 19 nt, Artificial Sequence
  Description of Artificial Sequence: Synthetic oligonucleotide
  Antisense strand to SEQ ID NO: 975410
uccuacacauccaugucuc

SEQ ID NO: 975412 - RNA, 19 nt, Artificial Sequence
  Description of Artificial Sequence: Synthetic oligonucleotide
  Sense strand starting at position 1995 of SEQ ID NO: 914066
caaguuagagcauaaaggu

SEQ ID NO: 975413 - RNA, 19 nt, Artificial Sequence
  Description of Artificial Sequence: Synthetic oligonucleotide
  Antisense strand to SEQ ID NO: 975412
accuuuaugcucuaacuug

SEQ ID NO: 975414 - RNA, 19 nt, Artificial Sequence
  Description of Artificial Sequence: Synthetic oligonucleotide
  Sense strand starting at position 2552 of SEQ ID NO: 914066
agaacaucacuuuggguga

SEQ ID NO: 975415 - RNA, 19 nt, Artificial Sequence
  Description of Artificial Sequence: Synthetic oligonucleotide
  Antisense strand to SEQ ID NO: 975414
ucacccaaagugauguucu

SEQ ID NO: 975416 - RNA, 19 nt, Artificial Sequence
  Description of Artificial Sequence: Synthetic oligonucleotide
  Sense strand starting at position 3231 of SEQ ID NO: 914066
guagguugucaacaugaaa

SEQ ID NO: 975417 - RNA, 19 nt, Artificial Sequence
  Description of Artificial Sequence: Synthetic oligonucleotide
  Antisense strand to SEQ ID NO: 975416
uuucauguugacaaccuac

SEQ ID NO: 975418 - RNA, 19 nt, Artificial Sequence
  Description of Artificial Sequence: Synthetic oligonucleotide
  Sense strand starting at position 2096 of SEQ ID NO: 914066
aggaaauaggcauaguguu

SEQ ID NO: 975419 - RNA, 19 nt, Artificial Sequence
  Description of Artificial Sequence: Synthetic oligonucleotide
  Antisense strand to SEQ ID NO: 975418
aacacuaugccuauuuccu

SEQ ID NO: 975420 - RNA, 19 nt, Artificial Sequence
  Description of Artificial Sequence: Synthetic oligonucleotide
  Sense strand starting at position 2198 of SEQ ID NO: 914066
aauaccaggucuguaagaa

SEQ ID NO: 975421 - RNA, 19 nt, Artificial Sequence
  Description of Artificial Sequence: Synthetic oligonucleotide
  Antisense strand to SEQ ID NO: 975420
uucuuacagaccugguauu

SEQ ID NO: 975422 - RNA, 19 nt, Artificial Sequence
  Description of Artificial Sequence: Synthetic oligonucleotide
  Sense strand starting at position 1746 of SEQ ID NO: 914066
uagggauggaucuggccaa

SEQ ID NO: 975423 - RNA, 19 nt, Artificial Sequence
  Description of Artificial Sequence: Synthetic oligonucleotide
  Antisense strand to SEQ ID NO: 975422
uuggccagauccaucccua

SEQ ID NO: 975424 - RNA, 19 nt, Artificial Sequence
  Description of Artificial Sequence: Synthetic oligonucleotide
  Sense strand starting at position 2060 of SEQ ID NO: 914066
cccugagagcucuaccaca

SEQ ID NO: 975425 - RNA, 19 nt, Artificial Sequence
  Description of Artificial Sequence: Synthetic oligonucleotide
  Antisense strand to SEQ ID NO: 975424
ugugguagagcucucaggg

SEQ ID NO: 975426 - RNA, 19 nt, Artificial Sequence
  Description of Artificial Sequence: Synthetic oligonucleotide
  Sense strand starting at position 3698 of SEQ ID NO: 914066
ucguguugaucauuuaauu

SEQ ID NO: 975427 - RNA, 19 nt, Artificial Sequence
  Description of Artificial Sequence: Synthetic oligonucleotide
  Antisense strand to SEQ ID NO: 975426
aauuaaaugaucaacacga

SEQ ID NO: 975428 - RNA, 19 nt, Artificial Sequence
  Description of Artificial Sequence: Synthetic oligonucleotide
  Sense strand starting at position 2197 of SEQ ID NO: 914066
aaauaccaggucuguaaga

SEQ ID NO: 975429 - RNA, 19 nt, Artificial Sequence
  Description of Artificial Sequence: Synthetic oligonucleotide
  Antisense strand to SEQ ID NO: 975428
ucuuacagaccugguauuu

SEQ ID NO: 975430 - RNA, 19 nt, Artificial Sequence
  Description of Artificial Sequence: Synthetic oligonucleotide
  Sense strand starting at position 3301 of SEQ ID NO: 914066
uuauaaccguaaucaagaa

SEQ ID NO: 975431 - RNA, 19 nt, Artificial Sequence
  Description of Artificial Sequence: Synthetic oligonucleotide
  Antisense strand to SEQ ID NO: 975430
uucuugauuacgguuauaa

SEQ ID NO: 975432 - RNA, 19 nt, Artificial Sequence
  Description of Artificial Sequence: Synthetic oligonucleotide
  Sense strand starting at position 3954 of SEQ ID NO: 914066
uguugagacagguacaguu

SEQ ID NO: 975433 - RNA, 19 nt, Artificial Sequence
  Description of Artificial Sequence: Synthetic oligonucleotide
  Antisense strand to SEQ ID NO: 975432
aacuguaccugucucaaca

SEQ ID NO: 975434 - RNA, 19 nt, Artificial Sequence
  Description of Artificial Sequence: Synthetic oligonucleotide
  Sense strand starting at position 3602 of SEQ ID NO: 914066
guaacuucggcagaaauac

SEQ ID NO: 975435 - RNA, 19 nt, Artificial Sequence
  Description of Artificial Sequence: Synthetic oligonucleotide
  Antisense strand to SEQ ID NO: 975434
guauuucugccgaaguuac

SEQ ID NO: 975436 - RNA, 19 nt, Artificial Sequence
  Description of Artificial Sequence: Synthetic oligonucleotide
  Sense strand starting at position 1405 of SEQ ID NO: 914066
cuauguuacccugggaaac

SEQ ID NO: 975437 - RNA, 19 nt, Artificial Sequence
  Description of Artificial Sequence: Synthetic oligonucleotide
  Antisense strand to SEQ ID NO: 975436
guuucccaggguaacauag

SEQ ID NO: 975438 - RNA, 19 nt, Artificial Sequence
  Description of Artificial Sequence: Synthetic oligonucleotide
  Sense strand starting at position 1406 of SEQ ID NO: 914066
uauguuacccugggaaacu

SEQ ID NO: 975439 - RNA, 19 nt, Artificial Sequence
  Description of Artificial Sequence: Synthetic oligonucleotide
  Antisense strand to SEQ ID NO: 975438
aguuucccaggguaacaua

SEQ ID NO: 975440 - RNA, 19 nt, Artificial Sequence
  Description of Artificial Sequence: Synthetic oligonucleotide
  Sense strand starting at position 2541 of SEQ ID NO: 914066
cugucuuugguagaacauc

SEQ ID NO: 975441 - RNA, 19 nt, Artificial Sequence
  Description of Artificial Sequence: Synthetic oligonucleotide
  Antisense strand to SEQ ID NO: 975440
gauguucuaccaaagacag

SEQ ID NO: 975442 - RNA, 19 nt, Artificial Sequence
  Description of Artificial Sequence: Synthetic oligonucleotide
  Sense strand starting at position 3298 of SEQ ID NO: 914066
gcauuauaaccguaaucaa

SEQ ID NO: 975443 - RNA, 19 nt, Artificial Sequence
  Description of Artificial Sequence: Synthetic oligonucleotide
  Antisense strand to SEQ ID NO: 975442
uugauuacgguuauaaugc

SEQ ID NO: 975444 - RNA, 19 nt, Artificial Sequence
  Description of Artificial Sequence: Synthetic oligonucleotide
  Sense strand starting at position 3794 of SEQ ID NO: 914066
gcacuuugggacuauugua

SEQ ID NO: 975445 - RNA, 19 nt, Artificial Sequence
  Description of Artificial Sequence: Synthetic oligonucleotide
  Antisense strand to SEQ ID NO: 975444
uacaauagucccaaagugc

SEQ ID NO: 975446 - RNA, 19 nt, Artificial Sequence
  Description of Artificial Sequence: Synthetic oligonucleotide
  Sense strand starting at position 293 of SEQ ID NO: 914066
ucugaauugugaccacacu

SEQ ID NO: 975447 - RNA, 19 nt, Artificial Sequence
  Description of Artificial Sequence: Synthetic oligonucleotide
  Antisense strand to SEQ ID NO: 975446
aguguggucacaauucaga

SEQ ID NO: 975448 - RNA, 19 nt, Artificial Sequence
  Description of Artificial Sequence: Synthetic oligonucleotide
  Sense strand starting at position 3600 of SEQ ID NO: 914066
cuguaacuucggcagaaau

SEQ ID NO: 975449 - RNA, 19 nt, Artificial Sequence
  Description of Artificial Sequence: Synthetic oligonucleotide
  Antisense strand to SEQ ID NO: 975448
auuucugccgaaguuacag

SEQ ID NO: 975450 - RNA, 19 nt, Artificial Sequence
  Description of Artificial Sequence: Synthetic oligonucleotide
  Sense strand starting at position 3227 of SEQ ID NO: 914066
gagaguagguugucaacau

SEQ ID NO: 975451 - RNA, 19 nt, Artificial Sequence
  Description of Artificial Sequence: Synthetic oligonucleotide
  Antisense strand to SEQ ID NO: 975450
auguugacaaccuacucuc

SEQ ID NO: 975452 - RNA, 19 nt, Artificial Sequence
  Description of Artificial Sequence: Synthetic oligonucleotide
  Sense strand starting at position 353 of SEQ ID NO: 914066
uacuuagguugagccaaau

SEQ ID NO: 975453 - RNA, 19 nt, Artificial Sequence
  Description of Artificial Sequence: Synthetic oligonucleotide
  Antisense strand to SEQ ID NO: 975452
auuuggcucaaccuaagua

SEQ ID NO: 975454 - RNA, 19 nt, Artificial Sequence
  Description of Artificial Sequence: Synthetic oligonucleotide
  Sense strand starting at position 3225 of SEQ ID NO: 914066
augagaguagguugucaac

SEQ ID NO: 975455 - RNA, 19 nt, Artificial Sequence
  Description of Artificial Sequence: Synthetic oligonucleotide
  Antisense strand to SEQ ID NO: 975454
guugacaaccuacucucau

SEQ ID NO: 975456 - RNA, 19 nt, Artificial Sequence
  Description of Artificial Sequence: Synthetic oligonucleotide
  Sense strand starting at position 1806 of SEQ ID NO: 914066
uugaccaugcugugaaaca

SEQ ID NO: 975457 - RNA, 19 nt, Artificial Sequence
  Description of Artificial Sequence: Synthetic oligonucleotide
  Antisense strand to SEQ ID NO: 975456
uguuucacagcauggucaa

SEQ ID NO: 975458 - RNA, 19 nt, Artificial Sequence
  Description of Artificial Sequence: Synthetic oligonucleotide
  Sense strand starting at position 2583 of SEQ ID NO: 914066
ugcaauggugauuaugcua

SEQ ID NO: 975459 - RNA, 19 nt, Artificial Sequence
  Description of Artificial Sequence: Synthetic oligonucleotide
  Antisense strand to SEQ ID NO: 975458
uagcauaaucaccauugca

SEQ ID NO: 975460 - RNA, 19 nt, Artificial Sequence
  Description of Artificial Sequence: Synthetic oligonucleotide
  Sense strand starting at position 2218 of SEQ ID NO: 914066
agaaaugccucacuggcua

SEQ ID NO: 975461 - RNA, 19 nt, Artificial Sequence
  Description of Artificial Sequence: Synthetic oligonucleotide
  Antisense strand to SEQ ID NO: 975460
uagccagugaggcauuucu

SEQ ID NO: 975462 - RNA, 19 nt, Artificial Sequence
  Description of Artificial Sequence: Synthetic oligonucleotide
  Sense strand starting at position 2586 of SEQ ID NO: 914066
aauggugauuaugcuaagu

SEQ ID NO: 975463 - RNA, 19 nt, Artificial Sequence
  Description of Artificial Sequence: Synthetic oligonucleotide
  Antisense strand to SEQ ID NO: 975462
acuuagcauaaucaccauu

SEQ ID NO: 975464 - RNA, 19 nt, Artificial Sequence
  Description of Artificial Sequence: Synthetic oligonucleotide
  Sense strand starting at position 1786 of SEQ ID NO: 914066
gucuuuguaggucauccau

SEQ ID NO: 975465 - RNA, 19 nt, Artificial Sequence
  Description of Artificial Sequence: Synthetic oligonucleotide
  Antisense strand to SEQ ID NO: 975464
auggaugaccuacaaagac

SEQ ID NO: 975466 - RNA, 19 nt, Artificial Sequence
  Description of Artificial Sequence: Synthetic oligonucleotide
  Sense strand starting at position 2102 of SEQ ID NO: 914066
uaggcauaguguuuacaca

SEQ ID NO: 975467 - RNA, 19 nt, Artificial Sequence
  Description of Artificial Sequence: Synthetic oligonucleotide
  Antisense strand to SEQ ID NO: 975466
uguguaaacacuaugccua

SEQ ID NO: 975468 - RNA, 19 nt, Artificial Sequence
  Description of Artificial Sequence: Synthetic oligonucleotide
  Sense strand starting at position 3599 of SEQ ID NO: 914066
ucuguaacuucggcagaaa

SEQ ID NO: 975469 - RNA, 19 nt, Artificial Sequence
  Description of Artificial Sequence: Synthetic oligonucleotide
  Antisense strand to SEQ ID NO: 975468
uuucugccgaaguuacaga

SEQ ID NO: 975470 - RNA, 19 nt, Artificial Sequence
  Description of Artificial Sequence: Synthetic oligonucleotide
  Sense strand starting at position 1453 of SEQ ID NO: 914066
cuuccaugcucugcagaaa

SEQ ID NO: 975471 - RNA, 19 nt, Artificial Sequence
  Description of Artificial Sequence: Synthetic oligonucleotide
  Antisense strand to SEQ ID NO: 975470
uuucugcagagcauggaag

SEQ ID NO: 975472 - RNA, 19 nt, Artificial Sequence
  Description of Artificial Sequence: Synthetic oligonucleotide
  Sense strand starting at position 1983 of SEQ ID NO: 914066
ggucucugccuccaaguua

SEQ ID NO: 975473 - RNA, 19 nt, Artificial Sequence
  Description of Artificial Sequence: Synthetic oligonucleotide
  Antisense strand to SEQ ID NO: 975472
uaacuuggaggcagagacc

SEQ ID NO: 975474 - RNA, 19 nt, Artificial Sequence
  Description of Artificial Sequence: Synthetic oligonucleotide
  Sense strand starting at position 1792 of SEQ ID NO: 914066
guaggucauccauguugac

SEQ ID NO: 975475 - RNA, 19 nt, Artificial Sequence
  Description of Artificial Sequence: Synthetic oligonucleotide
  Antisense strand to SEQ ID NO: 975474
gucaacauggaugaccuac

SEQ ID NO: 975476 - RNA, 19 nt, Artificial Sequence
  Description of Artificial Sequence: Synthetic oligonucleotide
  Sense strand starting at position 3693 of SEQ ID NO: 914066
gauguucguguugaucauu

SEQ ID NO: 975477 - RNA, 19 nt, Artificial Sequence
  Description of Artificial Sequence: Synthetic oligonucleotide
  Antisense strand to SEQ ID NO: 975476
aaugaucaacacgaacauc

SEQ ID NO: 975478 - RNA, 19 nt, Artificial Sequence
  Description of Artificial Sequence: Synthetic oligonucleotide
  Sense strand starting at position 3570 of SEQ ID NO: 914066
uuuguauugccuuacaguu

SEQ ID NO: 975479 - RNA, 19 nt, Artificial Sequence
  Description of Artificial Sequence: Synthetic oligonucleotide
  Antisense strand to SEQ ID NO: 975478
aacuguaaggcaauacaaa

SEQ ID NO: 975480 - RNA, 19 nt, Artificial Sequence
  Description of Artificial Sequence: Synthetic oligonucleotide
  Sense strand starting at position 3295 of SEQ ID NO: 914066
uuugcauuauaaccguaau

SEQ ID NO: 975481 - RNA, 19 nt, Artificial Sequence
  Description of Artificial Sequence: Synthetic oligonucleotide
  Antisense strand to SEQ ID NO: 975480
auuacgguuauaaugcaaa

SEQ ID NO: 975482 - RNA, 19 nt, Artificial Sequence
  Description of Artificial Sequence: Synthetic oligonucleotide
  Sense strand starting at position 2577 of SEQ ID NO: 914066
gcaaccugcaauggugauu

SEQ ID NO: 975483 - RNA, 19 nt, Artificial Sequence
  Description of Artificial Sequence: Synthetic oligonucleotide
  Antisense strand to SEQ ID NO: 975482
aaucaccauugcagguugc

SEQ ID NO: 975484 - RNA, 19 nt, Artificial Sequence
  Description of Artificial Sequence: Synthetic oligonucleotide
  Sense strand starting at position 2807 of SEQ ID NO: 914067
gcauuuauagcucacugca

SEQ ID NO: 975485 - RNA, 19 nt, Artificial Sequence
  Description of Artificial Sequence: Synthetic oligonucleotide
  Antisense strand to SEQ ID NO: 975484
ugcagugagcuauaaaugc

SEQ ID NO: 975486 - RNA, 19 nt, Artificial Sequence
  Description of Artificial Sequence: Synthetic oligonucleotide
  Sense strand starting at position 3788 of SEQ ID NO: 914067
cuguauuucugucugacua

SEQ ID NO: 975487 - RNA, 19 nt, Artificial Sequence
  Description of Artificial Sequence: Synthetic oligonucleotide
  Antisense strand to SEQ ID NO: 975486
uagucagacagaaauacag

SEQ ID NO: 975488 - RNA, 19 nt, Artificial Sequence
  Description of Artificial Sequence: Synthetic oligonucleotide
  Sense strand starting at position 1615 of SEQ ID NO: 914067
ugaagaaaucagugcagaa

SEQ ID NO: 975489 - RNA, 19 nt, Artificial Sequence
  Description of Artificial Sequence: Synthetic oligonucleotide
  Antisense strand to SEQ ID NO: 975488
uucugcacugauuucuuca

SEQ ID NO: 975490 - RNA, 19 nt, Artificial Sequence
  Description of Artificial Sequence: Synthetic oligonucleotide
  Sense strand starting at position 2254 of SEQ ID NO: 914067
aucaucagugucuguauuu

SEQ ID NO: 975491 - RNA, 19 nt, Artificial Sequence
  Description of Artificial Sequence: Synthetic oligonucleotide
  Antisense strand to SEQ ID NO: 975490
aaauacagacacugaugau

SEQ ID NO: 975492 - RNA, 19 nt, Artificial Sequence
  Description of Artificial Sequence: Synthetic oligonucleotide
  Sense strand starting at position 1017 of SEQ ID NO: 914067
ccugguagucucuagaaac

SEQ ID NO: 975493 - RNA, 19 nt, Artificial Sequence
  Description of Artificial Sequence: Synthetic oligonucleotide
  Antisense strand to SEQ ID NO: 975492
guuucuagagacuaccagg

SEQ ID NO: 975494 - RNA, 19 nt, Artificial Sequence
  Description of Artificial Sequence: Synthetic oligonucleotide
  Sense strand starting at position 3541 of SEQ ID NO: 914067
acgauaugccuuuaugagg

SEQ ID NO: 975495 - RNA, 19 nt, Artificial Sequence
  Description of Artificial Sequence: Synthetic oligonucleotide
  Antisense strand to SEQ ID NO: 975494
ccucauaaaggcauaucgu

SEQ ID NO: 975496 - RNA, 19 nt, Artificial Sequence
  Description of Artificial Sequence: Synthetic oligonucleotide
  Sense strand starting at position 3234 of SEQ ID NO: 914067
uguuuagaacuuuaagcau

SEQ ID NO: 975497 - RNA, 19 nt, Artificial Sequence
  Description of Artificial Sequence: Synthetic oligonucleotide
  Antisense strand to SEQ ID NO: 975496
augcuuaaaguucuaaaca

SEQ ID NO: 975498 - RNA, 19 nt, Artificial Sequence
  Description of Artificial Sequence: Synthetic oligonucleotide
  Sense strand starting at position 1083 of SEQ ID NO: 914067
cuggcagaggcucaaucau

SEQ ID NO: 975499 - RNA, 19 nt, Artificial Sequence
  Description of Artificial Sequence: Synthetic oligonucleotide
  Antisense strand to SEQ ID NO: 975498
augauugagccucugccag

SEQ ID NO: 975500 - RNA, 19 nt, Artificial Sequence
  Description of Artificial Sequence: Synthetic oligonucleotide
  Sense strand starting at position 165 of SEQ ID NO: 914067
aggugcugucucuagagaa

SEQ ID NO: 975501 - RNA, 19 nt, Artificial Sequence
  Description of Artificial Sequence: Synthetic oligonucleotide
  Antisense strand to SEQ ID NO: 975500
uucucuagagacagcaccu

SEQ ID NO: 975502 - RNA, 19 nt, Artificial Sequence
  Description of Artificial Sequence: Synthetic oligonucleotide
  Sense strand starting at position 3265 of SEQ ID NO: 914067
uggucuuguggugacaaau

SEQ ID NO: 975503 - RNA, 19 nt, Artificial Sequence
  Description of Artificial Sequence: Synthetic oligonucleotide
  Antisense strand to SEQ ID NO: 975502
auuugucaccacaagacca

SEQ ID NO: 975504 - RNA, 19 nt, Artificial Sequence
  Description of Artificial Sequence: Synthetic oligonucleotide
  Sense strand starting at position 131 of SEQ ID NO: 914067
gcacauuugccuggcaauu

SEQ ID NO: 975505 - RNA, 19 nt, Artificial Sequence
  Description of Artificial Sequence: Synthetic oligonucleotide
  Antisense strand to SEQ ID NO: 975504
aauugccaggcaaaugugc

SEQ ID NO: 975506 - RNA, 19 nt, Artificial Sequence
  Description of Artificial Sequence: Synthetic oligonucleotide
  Sense strand starting at position 130 of SEQ ID NO: 914067
ugcacauuugccuggcaau

SEQ ID NO: 975507 - RNA, 19 nt, Artificial Sequence
  Description of Artificial Sequence: Synthetic oligonucleotide
  Antisense strand to SEQ ID NO: 975506
auugccaggcaaaugugca

SEQ ID NO: 975508 - RNA, 19 nt, Artificial Sequence
  Description of Artificial Sequence: Synthetic oligonucleotide
  Sense strand starting at position 3108 of SEQ ID NO: 914067
uguuccugucaugauaauu

SEQ ID NO: 975509 - RNA, 19 nt, Artificial Sequence
  Description of Artificial Sequence: Synthetic oligonucleotide
  Antisense strand to SEQ ID NO: 975508
aauuaucaugacaggaaca

SEQ ID NO: 975510 - RNA, 19 nt, Artificial Sequence
  Description of Artificial Sequence: Synthetic oligonucleotide
  Sense strand starting at position 814 of SEQ ID NO: 914067
aucagauucgcagaggcua

SEQ ID NO: 975511 - RNA, 19 nt, Artificial Sequence
  Description of Artificial Sequence: Synthetic oligonucleotide
  Antisense strand to SEQ ID NO: 975510
uagccucugcgaaucugau

SEQ ID NO: 975512 - RNA, 19 nt, Artificial Sequence
  Description of Artificial Sequence: Synthetic oligonucleotide
  Sense strand starting at position 1767 of SEQ ID NO: 914067
ggcugaggccacugaauaa

SEQ ID NO: 975513 - RNA, 19 nt, Artificial Sequence
  Description of Artificial Sequence: Synthetic oligonucleotide
  Antisense strand to SEQ ID NO: 975512
uuauucaguggccucagcc

SEQ ID NO: 975514 - RNA, 19 nt, Artificial Sequence
  Description of Artificial Sequence: Synthetic oligonucleotide
  Sense strand starting at position 3599 of SEQ ID NO: 914067
cuccuaucuggaugucuaa

SEQ ID NO: 975515 - RNA, 19 nt, Artificial Sequence
  Description of Artificial Sequence: Synthetic oligonucleotide
  Antisense strand to SEQ ID NO: 975514
uuagacauccagauaggag

SEQ ID NO: 975516 - RNA, 19 nt, Artificial Sequence
  Description of Artificial Sequence: Synthetic oligonucleotide
  Sense strand starting at position 3467 of SEQ ID NO: 914067
cuguauagauuagacauuu

SEQ ID NO: 975517 - RNA, 19 nt, Artificial Sequence
  Description of Artificial Sequence: Synthetic oligonucleotide
  Antisense strand to SEQ ID NO: 975516
aaaugucuaaucuauacag

SEQ ID NO: 975518 - RNA, 19 nt, Artificial Sequence
  Description of Artificial Sequence: Synthetic oligonucleotide
  Sense strand starting at position 3432 of SEQ ID NO: 914067
ugcuaagaaguccauuguu

SEQ ID NO: 975519 - RNA, 19 nt, Artificial Sequence
  Description of Artificial Sequence: Synthetic oligonucleotide
  Antisense strand to SEQ ID NO: 975518
aacaauggacuucuuagca

SEQ ID NO: 975520 - RNA, 19 nt, Artificial Sequence
  Description of Artificial Sequence: Synthetic oligonucleotide
  Sense strand starting at position 3208 of SEQ ID NO: 914067
ugaggaguauuguccauuc

SEQ ID NO: 975521 - RNA, 19 nt, Artificial Sequence
  Description of Artificial Sequence: Synthetic oligonucleotide
  Antisense strand to SEQ ID NO: 975520
gaauggacaauacuccuca

SEQ ID NO: 975522 - RNA, 19 nt, Artificial Sequence
  Description of Artificial Sequence: Synthetic oligonucleotide
  Sense strand starting at position 2176 of SEQ ID NO: 914067
ucacuauaguuugcagaac

SEQ ID NO: 975523 - RNA, 19 nt, Artificial Sequence
  Description of Artificial Sequence: Synthetic oligonucleotide
  Antisense strand to SEQ ID NO: 975522
guucugcaaacuauaguga

SEQ ID NO: 975524 - RNA, 19 nt, Artificial Sequence
  Description of Artificial Sequence: Synthetic oligonucleotide
  Sense strand starting at position 2437 of SEQ ID NO: 914067
cugagagcugcuuggaaua

SEQ ID NO: 975525 - RNA, 19 nt, Artificial Sequence
  Description of Artificial Sequence: Synthetic oligonucleotide
  Antisense strand to SEQ ID NO: 975524
uauuccaagcagcucucag

SEQ ID NO: 975526 - RNA, 19 nt, Artificial Sequence
  Description of Artificial Sequence: Synthetic oligonucleotide
  Sense strand starting at position 3533 of SEQ ID NO: 914067
gucugaugacgauaugccu

SEQ ID NO: 975527 - RNA, 19 nt, Artificial Sequence
  Description of Artificial Sequence: Synthetic oligonucleotide
  Antisense strand to SEQ ID NO: 975526
aggcauaucgucaucagac

SEQ ID NO: 975528 - RNA, 19 nt, Artificial Sequence
  Description of Artificial Sequence: Synthetic oligonucleotide
  Sense strand starting at position 3119 of SEQ ID NO: 914067
ugauaauuguuacccaguu

SEQ ID NO: 975529 - RNA, 19 nt, Artificial Sequence
  Description of Artificial Sequence: Synthetic oligonucleotide
  Antisense strand to SEQ ID NO: 975528
aacuggguaacaauuauca

SEQ ID NO: 975530 - RNA, 19 nt, Artificial Sequence
  Description of Artificial Sequence: Synthetic oligonucleotide
  Sense strand starting at position 1427 of SEQ ID NO: 914067
ggccaucuccucugaacau

SEQ ID NO: 975531 - RNA, 19 nt, Artificial Sequence
  Description of Artificial Sequence: Synthetic oligonucleotide
  Antisense strand to SEQ ID NO: 975530
auguucagaggagauggcc

SEQ ID NO: 975532 - RNA, 19 nt, Artificial Sequence
  Description of Artificial Sequence: Synthetic oligonucleotide
  Sense strand starting at position 3796 of SEQ ID NO: 914067
cugucugacuagguuaauu

SEQ ID NO: 975533 - RNA, 19 nt, Artificial Sequence
  Description of Artificial Sequence: Synthetic oligonucleotide
  Antisense strand to SEQ ID NO: 975532
aauuaaccuagucagacag

SEQ ID NO: 975534 - RNA, 19 nt, Artificial Sequence
  Description of Artificial Sequence: Synthetic oligonucleotide
  Sense strand starting at position 998 of SEQ ID NO: 914067
ucaccacuuccuuggguau

SEQ ID NO: 975535 - RNA, 19 nt, Artificial Sequence
  Description of Artificial Sequence: Synthetic oligonucleotide
  Antisense strand to SEQ ID NO: 975534
auacccaaggaagugguga

SEQ ID NO: 975536 - RNA, 19 nt, Artificial Sequence
  Description of Artificial Sequence: Synthetic oligonucleotide
  Sense strand starting at position 2167 of SEQ ID NO: 914067
gcacauccaucacuauagu

SEQ ID NO: 975537 - RNA, 19 nt, Artificial Sequence
  Description of Artificial Sequence: Synthetic oligonucleotide
  Antisense strand to SEQ ID NO: 975536
acuauagugauggaugugc

SEQ ID NO: 975538 - RNA, 19 nt, Artificial Sequence
  Description of Artificial Sequence: Synthetic oligonucleotide
  Sense strand starting at position 3435 of SEQ ID NO: 914067
uaagaaguccauuguuagu

SEQ ID NO: 975539 - RNA, 19 nt, Artificial Sequence
  Description of Artificial Sequence: Synthetic oligonucleotide
  Antisense strand to SEQ ID NO: 975538
acuaacaauggacuucuua

SEQ ID NO: 975540 - RNA, 19 nt, Artificial Sequence
  Description of Artificial Sequence: Synthetic oligonucleotide
  Sense strand starting at position 3795 of SEQ ID NO: 914067
ucugucugacuagguuaau

SEQ ID NO: 975541 - RNA, 19 nt, Artificial Sequence
  Description of Artificial Sequence: Synthetic oligonucleotide
  Antisense strand to SEQ ID NO: 975540
auuaaccuagucagacaga

SEQ ID NO: 975542 - RNA, 19 nt, Artificial Sequence
  Description of Artificial Sequence: Synthetic oligonucleotide
  Sense strand starting at position 2239 of SEQ ID NO: 914067
ugugaauuaaguggcauca

SEQ ID NO: 975543 - RNA, 19 nt, Artificial Sequence
  Description of Artificial Sequence: Synthetic oligonucleotide
  Antisense strand to SEQ ID NO: 975542
ugaugccacuuaauucaca

SEQ ID NO: 975544 - RNA, 19 nt, Artificial Sequence
  Description of Artificial Sequence: Synthetic oligonucleotide
  Sense strand starting at position 2530 of SEQ ID NO: 914067
ccuggaaagaguugcucuu

SEQ ID NO: 975545 - RNA, 19 nt, Artificial Sequence
  Description of Artificial Sequence: Synthetic oligonucleotide
  Antisense strand to SEQ ID NO: 975544
aagagcaacucuuuccagg

SEQ ID NO: 975546 - RNA, 19 nt, Artificial Sequence
  Description of Artificial Sequence: Synthetic oligonucleotide
  Sense strand starting at position 3275 of SEQ ID NO: 914067
gugacaaauucccuuugca

SEQ ID NO: 975547 - RNA, 19 nt, Artificial Sequence
  Description of Artificial Sequence: Synthetic oligonucleotide
  Antisense strand to SEQ ID NO: 975546
ugcaaagggaauuugucac

SEQ ID NO: 975548 - RNA, 19 nt, Artificial Sequence
  Description of Artificial Sequence: Synthetic oligonucleotide
  Sense strand starting at position 92 of SEQ ID NO: 914067
uuaguaauguccuuccuga

SEQ ID NO: 975549 - RNA, 19 nt, Artificial Sequence
  Description of Artificial Sequence: Synthetic oligonucleotide
  Antisense strand to SEQ ID NO: 975548
ucaggaaggacauuacuaa

SEQ ID NO: 975550 - RNA, 19 nt, Artificial Sequence
  Description of Artificial Sequence: Synthetic oligonucleotide
  Sense strand starting at position 2418 of SEQ ID NO: 914067
cccagauauugggaaagag

SEQ ID NO: 975551 - RNA, 19 nt, Artificial Sequence
  Description of Artificial Sequence: Synthetic oligonucleotide
  Antisense strand to SEQ ID NO: 975550
cucuuucccaauaucuggg

SEQ ID NO: 975552 - RNA, 19 nt, Artificial Sequence
  Description of Artificial Sequence: Synthetic oligonucleotide
  Sense strand starting at position 841 of SEQ ID NO: 914067
gccagagggacuugugcaa

SEQ ID NO: 975553 - RNA, 19 nt, Artificial Sequence
  Description of Artificial Sequence: Synthetic oligonucleotide
  Antisense strand to SEQ ID NO: 975552
uugcacaagucccucuggc

SEQ ID NO: 975554 - RNA, 19 nt, Artificial Sequence
  Description of Artificial Sequence: Synthetic oligonucleotide
  Sense strand starting at position 3552 of SEQ ID NO: 914067
uuaugagguuucucuugua

SEQ ID NO: 975555 - RNA, 19 nt, Artificial Sequence
  Description of Artificial Sequence: Synthetic oligonucleotide
  Antisense strand to SEQ ID NO: 975554
uacaagagaaaccucauaa

SEQ ID NO: 975556 - RNA, 19 nt, Artificial Sequence
  Description of Artificial Sequence: Synthetic oligonucleotide
  Sense strand starting at position 649 of SEQ ID NO: 914067
uaguguuguggguaagcaa

SEQ ID NO: 975557 - RNA, 19 nt, Artificial Sequence
  Description of Artificial Sequence: Synthetic oligonucleotide
  Antisense strand to SEQ ID NO: 975556
uugcuuacccacaacacua

SEQ ID NO: 975558 - RNA, 19 nt, Artificial Sequence
  Description of Artificial Sequence: Synthetic oligonucleotide
  Sense strand starting at position 2791 of SEQ ID NO: 914067
gcuagagugccauaaugca

SEQ ID NO: 975559 - RNA, 19 nt, Artificial Sequence
  Description of Artificial Sequence: Synthetic oligonucleotide
  Antisense strand to SEQ ID NO: 975558
ugcauuauggcacucuagc

SEQ ID NO: 975560 - RNA, 19 nt, Artificial Sequence
  Description of Artificial Sequence: Synthetic oligonucleotide
  Sense strand starting at position 2238 of SEQ ID NO: 914067
cugugaauuaaguggcauc

SEQ ID NO: 975561 - RNA, 19 nt, Artificial Sequence
  Description of Artificial Sequence: Synthetic oligonucleotide
  Antisense strand to SEQ ID NO: 975560
gaugccacuuaauucacag

SEQ ID NO: 975562 - RNA, 19 nt, Artificial Sequence
  Description of Artificial Sequence: Synthetic oligonucleotide
  Sense strand starting at position 1092 of SEQ ID NO: 914067
gcucaaucaugagcagcaa

SEQ ID NO: 975563 - RNA, 19 nt, Artificial Sequence
  Description of Artificial Sequence: Synthetic oligonucleotide
  Antisense strand to SEQ ID NO: 975562
uugcugcucaugauugagc

SEQ ID NO: 975564 - RNA, 19 nt, Artificial Sequence
  Description of Artificial Sequence: Synthetic oligonucleotide
  Sense strand starting at position 3517 of SEQ ID NO: 914068
ugaguagauuuagaaagga

SEQ ID NO: 975565 - RNA, 19 nt, Artificial Sequence
  Description of Artificial Sequence: Synthetic oligonucleotide
  Antisense strand to SEQ ID NO: 975564
uccuuucuaaaucuacuca

SEQ ID NO: 975566 - RNA, 19 nt, Artificial Sequence
  Description of Artificial Sequence: Synthetic oligonucleotide
  Sense strand starting at position 3199 of SEQ ID NO: 914068
augguugugacagaucuga

SEQ ID NO: 975567 - RNA, 19 nt, Artificial Sequence
  Description of Artificial Sequence: Synthetic oligonucleotide
  Antisense strand to SEQ ID NO: 975566
ucagaucugucacaaccau

SEQ ID NO: 975568 - RNA, 19 nt, Artificial Sequence
  Description of Artificial Sequence: Synthetic oligonucleotide
  Sense strand starting at position 3419 of SEQ ID NO: 914068
ugagccauuucuguugauu

SEQ ID NO: 975569 - RNA, 19 nt, Artificial Sequence
  Description of Artificial Sequence: Synthetic oligonucleotide
  Antisense strand to SEQ ID NO: 975568
aaucaacagaaauggcuca

SEQ ID NO: 975570 - RNA, 19 nt, Artificial Sequence
  Description of Artificial Sequence: Synthetic oligonucleotide
  Sense strand starting at position 727 of SEQ ID NO: 914068
acggaaccuggcuaauuaa

SEQ ID NO: 975571 - RNA, 19 nt, Artificial Sequence
  Description of Artificial Sequence: Synthetic oligonucleotide
  Antisense strand to SEQ ID NO: 975570
uuaauuagccagguuccgu

SEQ ID NO: 975572 - RNA, 19 nt, Artificial Sequence
  Description of Artificial Sequence: Synthetic oligonucleotide
  Sense strand starting at position 2595 of SEQ ID NO: 914068
cggagagcagcuuucgcua

SEQ ID NO: 975573 - RNA, 19 nt, Artificial Sequence
  Description of Artificial Sequence: Synthetic oligonucleotide
  Antisense strand to SEQ ID NO: 975572
uagcgaaagcugcucuccg

SEQ ID NO: 975574 - RNA, 19 nt, Artificial Sequence
  Description of Artificial Sequence: Synthetic oligonucleotide
  Sense strand starting at position 3688 of SEQ ID NO: 914068
aucauuuauacgugagcug

SEQ ID NO: 975575 - RNA, 19 nt, Artificial Sequence
  Description of Artificial Sequence: Synthetic oligonucleotide
  Antisense strand to SEQ ID NO: 975574
cagcucacguauaaaugau

SEQ ID NO: 975576 - RNA, 19 nt, Artificial Sequence
  Description of Artificial Sequence: Synthetic oligonucleotide
  Sense strand starting at position 3253 of SEQ ID NO: 914068
guuaguuggagggaguuaa

SEQ ID NO: 975577 - RNA, 19 nt, Artificial Sequence
  Description of Artificial Sequence: Synthetic oligonucleotide
  Antisense strand to SEQ ID NO: 975576
uuaacucccuccaacuaac

SEQ ID NO: 975578 - RNA, 19 nt, Artificial Sequence
  Description of Artificial Sequence: Synthetic oligonucleotide
  Sense strand starting at position 3689 of SEQ ID NO: 914068
ucauuuauacgugagcugu

SEQ ID NO: 975579 - RNA, 19 nt, Artificial Sequence
  Description of Artificial Sequence: Synthetic oligonucleotide
  Antisense strand to SEQ ID NO: 975578
acagcucacguauaaauga

SEQ ID NO: 975580 - RNA, 19 nt, Artificial Sequence
  Description of Artificial Sequence: Synthetic oligonucleotide
  Sense strand starting at position 3569 of SEQ ID NO: 914068
uuguuaaagaaguaggguu

SEQ ID NO: 975581 - RNA, 19 nt, Artificial Sequence
  Description of Artificial Sequence: Synthetic oligonucleotide
  Antisense strand to SEQ ID NO: 975580
aacccuacuucuuuaacaa

SEQ ID NO: 975582 - RNA, 19 nt, Artificial Sequence
  Description of Artificial Sequence: Synthetic oligonucleotide
  Sense strand starting at position 3832 of SEQ ID NO: 914068
ugagaagugcaugagaguu

SEQ ID NO: 975583 - RNA, 19 nt, Artificial Sequence
  Description of Artificial Sequence: Synthetic oligonucleotide
  Antisense strand to SEQ ID NO: 975582
aacucucaugcacuucuca

SEQ ID NO: 975584 - RNA, 19 nt, Artificial Sequence
  Description of Artificial Sequence: Synthetic oligonucleotide
  Sense strand starting at position 3408 of SEQ ID NO: 914068
uuuagaaauguugagccau

SEQ ID NO: 975585 - RNA, 19 nt, Artificial Sequence
  Description of Artificial Sequence: Synthetic oligonucleotide
  Antisense strand to SEQ ID NO: 975584
auggcucaacauuucuaaa

SEQ ID NO: 975586 - RNA, 19 nt, Artificial Sequence
  Description of Artificial Sequence: Synthetic oligonucleotide
  Sense strand starting at position 140 of SEQ ID NO: 914068
agcagaagugcacaagauu

SEQ ID NO: 975587 - RNA, 19 nt, Artificial Sequence
  Description of Artificial Sequence: Synthetic oligonucleotide
  Antisense strand to SEQ ID NO: 975586
aaucuugugcacuucugcu

SEQ ID NO: 975588 - RNA, 19 nt, Artificial Sequence
  Description of Artificial Sequence: Synthetic oligonucleotide
  Sense strand starting at position 3842 of SEQ ID NO: 914068
augagaguuggcuaacuuu

SEQ ID NO: 975589 - RNA, 19 nt, Artificial Sequence
  Description of Artificial Sequence: Synthetic oligonucleotide
  Antisense strand to SEQ ID NO: 975588
aaaguuagccaacucucau

SEQ ID NO: 975590 - RNA, 19 nt, Artificial Sequence
  Description of Artificial Sequence: Synthetic oligonucleotide
  Sense strand starting at position 3560 of SEQ ID NO: 914068
auugucagauuguuaaaga

SEQ ID NO: 975591 - RNA, 19 nt, Artificial Sequence
  Description of Artificial Sequence: Synthetic oligonucleotide
  Antisense strand to SEQ ID NO: 975590
ucuuuaacaaucugacaau

SEQ ID NO: 975592 - RNA, 19 nt, Artificial Sequence
  Description of Artificial Sequence: Synthetic oligonucleotide
  Sense strand starting at position 3347 of SEQ ID NO: 914068
agagccugucaucaaacuu

SEQ ID NO: 975593 - RNA, 19 nt, Artificial Sequence
  Description of Artificial Sequence: Synthetic oligonucleotide
  Antisense strand to SEQ ID NO: 975592
aaguuugaugacaggcucu

SEQ ID NO: 975594 - RNA, 19 nt, Artificial Sequence
  Description of Artificial Sequence: Synthetic oligonucleotide
  Sense strand starting at position 3505 of SEQ ID NO: 914068
cagauuauccagugaguag

SEQ ID NO: 975595 - RNA, 19 nt, Artificial Sequence
  Description of Artificial Sequence: Synthetic oligonucleotide
  Antisense strand to SEQ ID NO: 975594
cuacucacuggauaaucug

SEQ ID NO: 975596 - RNA, 19 nt, Artificial Sequence
  Description of Artificial Sequence: Synthetic oligonucleotide
  Sense strand starting at position 1002 of SEQ ID NO: 914068
ggccuagcacguuugugua

SEQ ID NO: 975597 - RNA, 19 nt, Artificial Sequence
  Description of Artificial Sequence: Synthetic oligonucleotide
  Antisense strand to SEQ ID NO: 975596
uacacaaacgugcuaggcc

SEQ ID NO: 975598 - RNA, 19 nt, Artificial Sequence
  Description of Artificial Sequence: Synthetic oligonucleotide
  Sense strand starting at position 3571 of SEQ ID NO: 914068
guuaaagaaguaggguuau

SEQ ID NO: 975599 - RNA, 19 nt, Artificial Sequence
  Description of Artificial Sequence: Synthetic oligonucleotide
  Antisense strand to SEQ ID NO: 975598
auaacccuacuucuuuaac

SEQ ID NO: 975600 - RNA, 19 nt, Artificial Sequence
  Description of Artificial Sequence: Synthetic oligonucleotide
  Sense strand starting at position 2930 of SEQ ID NO: 914068
aggaucugauuguugguga

SEQ ID NO: 975601 - RNA, 19 nt, Artificial Sequence
  Description of Artificial Sequence: Synthetic oligonucleotide
  Antisense strand to SEQ ID NO: 975600
ucaccaacaaucagauccu

SEQ ID NO: 975602 - RNA, 19 nt, Artificial Sequence
  Description of Artificial Sequence: Synthetic oligonucleotide
  Sense strand starting at position 3831 of SEQ ID NO: 914068
augagaagugcaugagagu

SEQ ID NO: 975603 - RNA, 19 nt, Artificial Sequence
  Description of Artificial Sequence: Synthetic oligonucleotide
  Antisense strand to SEQ ID NO: 975602
acucucaugcacuucucau

SEQ ID NO: 975604 - RNA, 19 nt, Artificial Sequence
  Description of Artificial Sequence: Synthetic oligonucleotide
  Sense strand starting at position 3508 of SEQ ID NO: 914068
auuauccagugaguagauu

SEQ ID NO: 975605 - RNA, 19 nt, Artificial Sequence
  Description of Artificial Sequence: Synthetic oligonucleotide
  Antisense strand to SEQ ID NO: 975604
aaucuacucacuggauaau

SEQ ID NO: 975606 - RNA, 19 nt, Artificial Sequence
  Description of Artificial Sequence: Synthetic oligonucleotide
  Sense strand starting at position 3959 of SEQ ID NO: 914068
ugcaaauuggcacaguaua

SEQ ID NO: 975607 - RNA, 19 nt, Artificial Sequence
  Description of Artificial Sequence: Synthetic oligonucleotide
  Antisense strand to SEQ ID NO: 975606
uauacugugccaauuugca

SEQ ID NO: 975608 - RNA, 19 nt, Artificial Sequence
  Description of Artificial Sequence: Synthetic oligonucleotide
  Sense strand starting at position 3192 of SEQ ID NO: 914068
cuaaauuaugguugugaca

SEQ ID NO: 975609 - RNA, 19 nt, Artificial Sequence
  Description of Artificial Sequence: Synthetic oligonucleotide
  Antisense strand to SEQ ID NO: 975608
ugucacaaccauaauuuag

SEQ ID NO: 975610 - RNA, 19 nt, Artificial Sequence
  Description of Artificial Sequence: Synthetic oligonucleotide
  Sense strand starting at position 3501 of SEQ ID NO: 914068
uggucagauuauccaguga

SEQ ID NO: 975611 - RNA, 19 nt, Artificial Sequence
  Description of Artificial Sequence: Synthetic oligonucleotide
  Antisense strand to SEQ ID NO: 975610
ucacuggauaaucugacca

SEQ ID NO: 975612 - RNA, 19 nt, Artificial Sequence
  Description of Artificial Sequence: Synthetic oligonucleotide
  Sense strand starting at position 3085 of SEQ ID NO: 914068
gcuugaguucuccaaacug

SEQ ID NO: 975613 - RNA, 19 nt, Artificial Sequence
  Description of Artificial Sequence: Synthetic oligonucleotide
  Antisense strand to SEQ ID NO: 975612
caguuuggagaacucaagc

SEQ ID NO: 975614 - RNA, 19 nt, Artificial Sequence
  Description of Artificial Sequence: Synthetic oligonucleotide
  Sense strand starting at position 388 of SEQ ID NO: 914068
gcuguuaggcaccagacaa

SEQ ID NO: 975615 - RNA, 19 nt, Artificial Sequence
  Description of Artificial Sequence: Synthetic oligonucleotide
  Antisense strand to SEQ ID NO: 975614
uugucuggugccuaacagc

SEQ ID NO: 975616 - RNA, 19 nt, Artificial Sequence
  Description of Artificial Sequence: Synthetic oligonucleotide
  Sense strand starting at position 3207 of SEQ ID NO: 914068
gacagaucugaccguugac

SEQ ID NO: 975617 - RNA, 19 nt, Artificial Sequence
  Description of Artificial Sequence: Synthetic oligonucleotide
  Antisense strand to SEQ ID NO: 975616
gucaacggucagaucuguc

SEQ ID NO: 975618 - RNA, 19 nt, Artificial Sequence
  Description of Artificial Sequence: Synthetic oligonucleotide
  Sense strand starting at position 910 of SEQ ID NO: 914068
gaaauuugguaugaaaugu

SEQ ID NO: 975619 - RNA, 19 nt, Artificial Sequence
  Description of Artificial Sequence: Synthetic oligonucleotide
  Antisense strand to SEQ ID NO: 975618
acauuucauaccaaauuuc

SEQ ID NO: 975620 - RNA, 19 nt, Artificial Sequence
  Description of Artificial Sequence: Synthetic oligonucleotide
  Sense strand starting at position 726 of SEQ ID NO: 914068
cacggaaccuggcuaauua

SEQ ID NO: 975621 - RNA, 19 nt, Artificial Sequence
  Description of Artificial Sequence: Synthetic oligonucleotide
  Antisense strand to SEQ ID NO: 975620
uaauuagccagguuccgug

SEQ ID NO: 975622 - RNA, 19 nt, Artificial Sequence
  Description of Artificial Sequence: Synthetic oligonucleotide
  Sense strand starting at position 2799 of SEQ ID NO: 914068
aaguaagucccacgacaca

SEQ ID NO: 975623 - RNA, 19 nt, Artificial Sequence
  Description of Artificial Sequence: Synthetic oligonucleotide
  Antisense strand to SEQ ID NO: 975622
ugugucgugggacuuacuu

SEQ ID NO: 975624 - RNA, 19 nt, Artificial Sequence
  Description of Artificial Sequence: Synthetic oligonucleotide
  Sense strand starting at position 2887 of SEQ ID NO: 914068
uuccucagucccgaauuau

SEQ ID NO: 975625 - RNA, 19 nt, Artificial Sequence
  Description of Artificial Sequence: Synthetic oligonucleotide
  Antisense strand to SEQ ID NO: 975624
auaauucgggacugaggaa

SEQ ID NO: 975626 - RNA, 19 nt, Artificial Sequence
  Description of Artificial Sequence: Synthetic oligonucleotide
  Sense strand starting at position 3892 of SEQ ID NO: 914068
guaauccaugauuguuuaa

SEQ ID NO: 975627 - RNA, 19 nt, Artificial Sequence
  Description of Artificial Sequence: Synthetic oligonucleotide
  Antisense strand to SEQ ID NO: 975626
uuaaacaaucauggauuac

SEQ ID NO: 975628 - RNA, 19 nt, Artificial Sequence
  Description of Artificial Sequence: Synthetic oligonucleotide
  Sense strand starting at position 3210 of SEQ ID NO: 914068
agaucugaccguugacacu

SEQ ID NO: 975629 - RNA, 19 nt, Artificial Sequence
  Description of Artificial Sequence: Synthetic oligonucleotide
  Antisense strand to SEQ ID NO: 975628
agugucaacggucagaucu

SEQ ID NO: 975630 - RNA, 19 nt, Artificial Sequence
  Description of Artificial Sequence: Synthetic oligonucleotide
  Sense strand starting at position 2644 of SEQ ID NO: 914068
cgcggcuuugcaguaaagu

SEQ ID NO: 975631 - RNA, 19 nt, Artificial Sequence
  Description of Artificial Sequence: Synthetic oligonucleotide
  Antisense strand to SEQ ID NO: 975630
acuuuacugcaaagccgcg

SEQ ID NO: 975632 - RNA, 19 nt, Artificial Sequence
  Description of Artificial Sequence: Synthetic oligonucleotide
  Sense strand starting at position 3881 of SEQ ID NO: 914068
aaguguacuguguaaucca

SEQ ID NO: 975633 - RNA, 19 nt, Artificial Sequence
  Description of Artificial Sequence: Synthetic oligonucleotide
  Antisense strand to SEQ ID NO: 975632
uggauuacacaguacacuu

SEQ ID NO: 975634 - RNA, 19 nt, Artificial Sequence
  Description of Artificial Sequence: Synthetic oligonucleotide
  Sense strand starting at position 3251 of SEQ ID NO: 914068
caguuaguuggagggaguu

SEQ ID NO: 975635 - RNA, 19 nt, Artificial Sequence
  Description of Artificial Sequence: Synthetic oligonucleotide
  Antisense strand to SEQ ID NO: 975634
aacucccuccaacuaacug

SEQ ID NO: 975636 - RNA, 19 nt, Artificial Sequence
  Description of Artificial Sequence: Synthetic oligonucleotide
  Sense strand starting at position 3889 of SEQ ID NO: 914068
uguguaauccaugauuguu

SEQ ID NO: 975637 - RNA, 19 nt, Artificial Sequence
  Description of Artificial Sequence: Synthetic oligonucleotide
  Antisense strand to SEQ ID NO: 975636
aacaaucauggauuacaca

SEQ ID NO: 975638 - RNA, 19 nt, Artificial Sequence
  Description of Artificial Sequence: Synthetic oligonucleotide
  Sense strand starting at position 3891 of SEQ ID NO: 914068
uguaauccaugauuguuua

SEQ ID NO: 975639 - RNA, 19 nt, Artificial Sequence
  Description of Artificial Sequence: Synthetic oligonucleotide
  Antisense strand to SEQ ID NO: 975638
uaaacaaucauggauuaca

SEQ ID NO: 975640 - RNA, 19 nt, Artificial Sequence
  Description of Artificial Sequence: Synthetic oligonucleotide
  Sense strand starting at position 3863 of SEQ ID NO: 914068
ccaguuuguugaucaauua

SEQ ID NO: 975641 - RNA, 19 nt, Artificial Sequence
  Description of Artificial Sequence: Synthetic oligonucleotide
  Antisense strand to SEQ ID NO: 975640
uaauugaucaacaaacugg

SEQ ID NO: 975642 - RNA, 19 nt, Artificial Sequence
  Description of Artificial Sequence: Synthetic oligonucleotide
  Sense strand starting at position 3012 of SEQ ID NO: 914068
agaauuuccuucgaaaccu

SEQ ID NO: 975643 - RNA, 19 nt, Artificial Sequence
  Description of Artificial Sequence: Synthetic oligonucleotide
  Antisense strand to SEQ ID NO: 975642
agguuucgaaggaaauucu

SEQ ID NO: 975644 - RNA, 19 nt, Artificial Sequence
  Description of Artificial Sequence: Synthetic oligonucleotide
  Sense strand starting at position 1548 of SEQ ID NO: 914069
gugcaucagaaggauucuu

SEQ ID NO: 975645 - RNA, 19 nt, Artificial Sequence
  Description of Artificial Sequence: Synthetic oligonucleotide
  Antisense strand to SEQ ID NO: 975644
aagaauccuucugaugcac

SEQ ID NO: 975646 - RNA, 19 nt, Artificial Sequence
  Description of Artificial Sequence: Synthetic oligonucleotide
  Sense strand starting at position 288 of SEQ ID NO: 914069
cggauaagagcaggauuca

SEQ ID NO: 975647 - RNA, 19 nt, Artificial Sequence
  Description of Artificial Sequence: Synthetic oligonucleotide
  Antisense strand to SEQ ID NO: 975646
ugaauccugcucuuauccg

SEQ ID NO: 975648 - RNA, 19 nt, Artificial Sequence
  Description of Artificial Sequence: Synthetic oligonucleotide
  Sense strand starting at position 3875 of SEQ ID NO: 914069
agguguuacaagggaccua

SEQ ID NO: 975649 - RNA, 19 nt, Artificial Sequence
  Description of Artificial Sequence: Synthetic oligonucleotide
  Antisense strand to SEQ ID NO: 975648
uaggucccuuguaacaccu

SEQ ID NO: 975650 - RNA, 19 nt, Artificial Sequence
  Description of Artificial Sequence: Synthetic oligonucleotide
  Sense strand starting at position 100 of SEQ ID NO: 914069
uuaucuguuccagaucuca

SEQ ID NO: 975651 - RNA, 19 nt, Artificial Sequence
  Description of Artificial Sequence: Synthetic oligonucleotide
  Antisense strand to SEQ ID NO: 975650
ugagaucuggaacagauaa

SEQ ID NO: 975652 - RNA, 19 nt, Artificial Sequence
  Description of Artificial Sequence: Synthetic oligonucleotide
  Sense strand starting at position 1365 of SEQ ID NO: 914069
gugccugugccucuucuau

SEQ ID NO: 975653 - RNA, 19 nt, Artificial Sequence
  Description of Artificial Sequence: Synthetic oligonucleotide
  Antisense strand to SEQ ID NO: 975652
auagaagaggcacaggcac

SEQ ID NO: 975654 - RNA, 19 nt, Artificial Sequence
  Description of Artificial Sequence: Synthetic oligonucleotide
  Sense strand starting at position 3975 of SEQ ID NO: 914069
gugagcugucaccaacaaa

SEQ ID NO: 975655 - RNA, 19 nt, Artificial Sequence
  Description of Artificial Sequence: Synthetic oligonucleotide
  Antisense strand to SEQ ID NO: 975654
uuuguuggugacagcucac

SEQ ID NO: 975656 - RNA, 19 nt, Artificial Sequence
  Description of Artificial Sequence: Synthetic oligonucleotide
  Sense strand starting at position 569 of SEQ ID NO: 914069
acacuugaaugugugacua

SEQ ID NO: 975657 - RNA, 19 nt, Artificial Sequence
  Description of Artificial Sequence: Synthetic oligonucleotide
  Antisense strand to SEQ ID NO: 975656
uagucacacauucaagugu

SEQ ID NO: 975658 - RNA, 19 nt, Artificial Sequence
  Description of Artificial Sequence: Synthetic oligonucleotide
  Sense strand starting at position 573 of SEQ ID NO: 914069
uugaaugugugacuacaca

SEQ ID NO: 975659 - RNA, 19 nt, Artificial Sequence
  Description of Artificial Sequence: Synthetic oligonucleotide
  Antisense strand to SEQ ID NO: 975658
uguguagucacacauucaa

SEQ ID NO: 975660 - RNA, 19 nt, Artificial Sequence
  Description of Artificial Sequence: Synthetic oligonucleotide
  Sense strand starting at position 505 of SEQ ID NO: 914069
ggagguguccuguauacac

SEQ ID NO: 975661 - RNA, 19 nt, Artificial Sequence
  Description of Artificial Sequence: Synthetic oligonucleotide
  Antisense strand to SEQ ID NO: 975660
guguauacaggacaccucc

SEQ ID NO: 975662 - RNA, 19 nt, Artificial Sequence
  Description of Artificial Sequence: Synthetic oligonucleotide
  Sense strand starting at position 358 of SEQ ID NO: 914069
ggcugaguugggcagaauc

SEQ ID NO: 975663 - RNA, 19 nt, Artificial Sequence
  Description of Artificial Sequence: Synthetic oligonucleotide
  Antisense strand to SEQ ID NO: 975662
gauucugcccaacucagcc

SEQ ID NO: 975664 - RNA, 19 nt, Artificial Sequence
  Description of Artificial Sequence: Synthetic oligonucleotide
  Sense strand starting at position 2972 of SEQ ID NO: 914069
cuagcagauuccuucugga

SEQ ID NO: 975665 - RNA, 19 nt, Artificial Sequence
  Description of Artificial Sequence: Synthetic oligonucleotide
  Antisense strand to SEQ ID NO: 975664
uccagaaggaaucugcuag

SEQ ID NO: 975666 - RNA, 19 nt, Artificial Sequence
  Description of Artificial Sequence: Synthetic oligonucleotide
  Sense strand starting at position 96 of SEQ ID NO: 914069
gggcuuaucuguuccagau

SEQ ID NO: 975667 - RNA, 19 nt, Artificial Sequence
  Description of Artificial Sequence: Synthetic oligonucleotide
  Antisense strand to SEQ ID NO: 975666
aucuggaacagauaagccc

SEQ ID NO: 975668 - RNA, 19 nt, Artificial Sequence
  Description of Artificial Sequence: Synthetic oligonucleotide
  Sense strand starting at position 2486 of SEQ ID NO: 914069
cccgcauaugcaugagaga

SEQ ID NO: 975669 - RNA, 19 nt, Artificial Sequence
  Description of Artificial Sequence: Synthetic oligonucleotide
  Antisense strand to SEQ ID NO: 975668
ucucucaugcauaugcggg

SEQ ID NO: 975670 - RNA, 19 nt, Artificial Sequence
  Description of Artificial Sequence: Synthetic oligonucleotide
  Sense strand starting at position 3641 of SEQ ID NO: 914069
caaccaguccauuguguga

SEQ ID NO: 975671 - RNA, 19 nt, Artificial Sequence
  Description of Artificial Sequence: Synthetic oligonucleotide
  Antisense strand to SEQ ID NO: 975670
ucacacaauggacugguug

SEQ ID NO: 975672 - RNA, 19 nt, Artificial Sequence
  Description of Artificial Sequence: Synthetic oligonucleotide
  Sense strand starting at position 3584 of SEQ ID NO: 914069
agauccauuguguguacuu

SEQ ID NO: 975673 - RNA, 19 nt, Artificial Sequence
  Description of Artificial Sequence: Synthetic oligonucleotide
  Antisense strand to SEQ ID NO: 975672
aaguacacacaauggaucu

SEQ ID NO: 975674 - RNA, 19 nt, Artificial Sequence
  Description of Artificial Sequence: Synthetic oligonucleotide
  Sense strand starting at position 2671 of SEQ ID NO: 914069
guauaaagucagcgagagu

SEQ ID NO: 975675 - RNA, 19 nt, Artificial Sequence
  Description of Artificial Sequence: Synthetic oligonucleotide
  Antisense strand to SEQ ID NO: 975674
acucucgcugacuuuauac

SEQ ID NO: 975676 - RNA, 19 nt, Artificial Sequence
  Description of Artificial Sequence: Synthetic oligonucleotide
  Sense strand starting at position 3585 of SEQ ID NO: 914069
gauccauuguguguacuuc

SEQ ID NO: 975677 - RNA, 19 nt, Artificial Sequence
  Description of Artificial Sequence: Synthetic oligonucleotide
  Antisense strand to SEQ ID NO: 975676
gaaguacacacaauggauc

SEQ ID NO: 975678 - RNA, 19 nt, Artificial Sequence
  Description of Artificial Sequence: Synthetic oligonucleotide
  Sense strand starting at position 276 of SEQ ID NO: 914069
gccacuugccuccggauaa

SEQ ID NO: 975679 - RNA, 19 nt, Artificial Sequence
  Description of Artificial Sequence: Synthetic oligonucleotide
  Antisense strand to SEQ ID NO: 975678
uuauccggaggcaaguggc

SEQ ID NO: 975680 - RNA, 19 nt, Artificial Sequence
  Description of Artificial Sequence: Synthetic oligonucleotide
  Sense strand starting at position 3217 of SEQ ID NO: 914069
gcgucauccucaucaacuc

SEQ ID NO: 975681 - RNA, 19 nt, Artificial Sequence
  Description of Artificial Sequence: Synthetic oligonucleotide
  Antisense strand to SEQ ID NO: 975680
gaguugaugaggaugacgc

SEQ ID NO: 975682 - RNA, 19 nt, Artificial Sequence
  Description of Artificial Sequence: Synthetic oligonucleotide
  Sense strand starting at position 366 of SEQ ID NO: 914069
ugggcagaauccuacagaa

SEQ ID NO: 975683 - RNA, 19 nt, Artificial Sequence
  Description of Artificial Sequence: Synthetic oligonucleotide
  Antisense strand to SEQ ID NO: 975682
uucuguaggauucugccca

SEQ ID NO: 975684 - RNA, 19 nt, Artificial Sequence
  Description of Artificial Sequence: Synthetic oligonucleotide
  Sense strand starting at position 1556 of SEQ ID NO: 914069
gaaggauucuuaggauucu

SEQ ID NO: 975685 - RNA, 19 nt, Artificial Sequence
  Description of Artificial Sequence: Synthetic oligonucleotide
  Antisense strand to SEQ ID NO: 975684
agaauccuaagaauccuuc

SEQ ID NO: 975686 - RNA, 19 nt, Artificial Sequence
  Description of Artificial Sequence: Synthetic oligonucleotide
  Sense strand starting at position 131 of SEQ ID NO: 914069
ugaugucagccaugugugu

SEQ ID NO: 975687 - RNA, 19 nt, Artificial Sequence
  Description of Artificial Sequence: Synthetic oligonucleotide
  Antisense strand to SEQ ID NO: 975686
acacacauggcugacauca

SEQ ID NO: 975688 - RNA, 19 nt, Artificial Sequence
  Description of Artificial Sequence: Synthetic oligonucleotide
  Sense strand starting at position 2865 of SEQ ID NO: 914069
ucacacuucugagaggcau

SEQ ID NO: 975689 - RNA, 19 nt, Artificial Sequence
  Description of Artificial Sequence: Synthetic oligonucleotide
  Antisense strand to SEQ ID NO: 975688
augccucucagaaguguga

SEQ ID NO: 975690 - RNA, 19 nt, Artificial Sequence
  Description of Artificial Sequence: Synthetic oligonucleotide
  Sense strand starting at position 571 of SEQ ID NO: 914069
acuugaaugugugacuaca

SEQ ID NO: 975691 - RNA, 19 nt, Artificial Sequence
  Description of Artificial Sequence: Synthetic oligonucleotide
  Antisense strand to SEQ ID NO: 975690
uguagucacacauucaagu

SEQ ID NO: 975692 - RNA, 19 nt, Artificial Sequence
  Description of Artificial Sequence: Synthetic oligonucleotide
  Sense strand starting at position 1544 of SEQ ID NO: 914069
gcaagugcaucagaaggau

SEQ ID NO: 975693 - RNA, 19 nt, Artificial Sequence
  Description of Artificial Sequence: Synthetic oligonucleotide
  Antisense strand to SEQ ID NO: 975692
auccuucugaugcacuugc

SEQ ID NO: 975694 - RNA, 19 nt, Artificial Sequence
  Description of Artificial Sequence: Synthetic oligonucleotide
  Sense strand starting at position 938 of SEQ ID NO: 914069
gggugucauucgaggcgau

SEQ ID NO: 975695 - RNA, 19 nt, Artificial Sequence
  Description of Artificial Sequence: Synthetic oligonucleotide
  Antisense strand to SEQ ID NO: 975694
aucgccucgaaugacaccc

SEQ ID NO: 975696 - RNA, 19 nt, Artificial Sequence
  Description of Artificial Sequence: Synthetic oligonucleotide
  Sense strand starting at position 2245 of SEQ ID NO: 914069
gagcuucucugagggaacu

SEQ ID NO: 975697 - RNA, 19 nt, Artificial Sequence
  Description of Artificial Sequence: Synthetic oligonucleotide
  Antisense strand to SEQ ID NO: 975696
aguucccucagagaagcuc

SEQ ID NO: 975698 - RNA, 19 nt, Artificial Sequence
  Description of Artificial Sequence: Synthetic oligonucleotide
  Sense strand starting at position 2660 of SEQ ID NO: 914069
ccaccugccuuguauaaag

SEQ ID NO: 975699 - RNA, 19 nt, Artificial Sequence
  Description of Artificial Sequence: Synthetic oligonucleotide
  Antisense strand to SEQ ID NO: 975698
cuuuauacaaggcaggugg

SEQ ID NO: 975700 - RNA, 19 nt, Artificial Sequence
  Description of Artificial Sequence: Synthetic oligonucleotide
  Sense strand starting at position 1629 of SEQ ID NO: 914069
agagacgccuucugacaga

SEQ ID NO: 975701 - RNA, 19 nt, Artificial Sequence
  Description of Artificial Sequence: Synthetic oligonucleotide
  Antisense strand to SEQ ID NO: 975700
ucugucagaaggcgucucu

SEQ ID NO: 975702 - RNA, 19 nt, Artificial Sequence
  Description of Artificial Sequence: Synthetic oligonucleotide
  Sense strand starting at position 98 of SEQ ID NO: 914069
gcuuaucuguuccagaucu

SEQ ID NO: 975703 - RNA, 19 nt, Artificial Sequence
  Description of Artificial Sequence: Synthetic oligonucleotide
  Antisense strand to SEQ ID NO: 975702
agaucuggaacagauaagc

SEQ ID NO: 975704 - RNA, 19 nt, Artificial Sequence
  Description of Artificial Sequence: Synthetic oligonucleotide
  Sense strand starting at position 2975 of SEQ ID NO: 914069
gcagauuccuucuggaccu

SEQ ID NO: 975705 - RNA, 19 nt, Artificial Sequence
  Description of Artificial Sequence: Synthetic oligonucleotide
  Antisense strand to SEQ ID NO: 975704
agguccagaaggaaucugc

SEQ ID NO: 975706 - RNA, 19 nt, Artificial Sequence
  Description of Artificial Sequence: Synthetic oligonucleotide
  Sense strand starting at position 3139 of SEQ ID NO: 914069
cgcgauaccugcuaaggaa

SEQ ID NO: 975707 - RNA, 19 nt, Artificial Sequence
  Description of Artificial Sequence: Synthetic oligonucleotide
  Antisense strand to SEQ ID NO: 975706
uuccuuagcagguaucgcg

SEQ ID NO: 975708 - RNA, 19 nt, Artificial Sequence
  Description of Artificial Sequence: Synthetic oligonucleotide
  Sense strand starting at position 3643 of SEQ ID NO: 914069
accaguccauugugugaca

SEQ ID NO: 975709 - RNA, 19 nt, Artificial Sequence
  Description of Artificial Sequence: Synthetic oligonucleotide
  Antisense strand to SEQ ID NO: 975708
ugucacacaauggacuggu

SEQ ID NO: 975710 - RNA, 19 nt, Artificial Sequence
  Description of Artificial Sequence: Synthetic oligonucleotide
  Sense strand starting at position 3811 of SEQ ID NO: 914069
gaccuaagcuuauguaguu

SEQ ID NO: 975711 - RNA, 19 nt, Artificial Sequence
  Description of Artificial Sequence: Synthetic oligonucleotide
  Antisense strand to SEQ ID NO: 975710
aacuacauaagcuuagguc

SEQ ID NO: 975712 - RNA, 19 nt, Artificial Sequence
  Description of Artificial Sequence: Synthetic oligonucleotide
  Sense strand starting at position 3715 of SEQ ID NO: 914069
gggcuuccgugcugaagga

SEQ ID NO: 975713 - RNA, 19 nt, Artificial Sequence
  Description of Artificial Sequence: Synthetic oligonucleotide
  Antisense strand to SEQ ID NO: 975712
uccuucagcacggaagccc

SEQ ID NO: 975714 - RNA, 19 nt, Artificial Sequence
  Description of Artificial Sequence: Synthetic oligonucleotide
  Sense strand starting at position 3503 of SEQ ID NO: 914069
gcaugcgugugguaugcua

SEQ ID NO: 975715 - RNA, 19 nt, Artificial Sequence
  Description of Artificial Sequence: Synthetic oligonucleotide
  Antisense strand to SEQ ID NO: 975714
uagcauaccacacgcaugc

SEQ ID NO: 975716 - RNA, 19 nt, Artificial Sequence
  Description of Artificial Sequence: Synthetic oligonucleotide
  Sense strand starting at position 853 of SEQ ID NO: 914070
ggccuagaauaucucaaga

SEQ ID NO: 975717 - RNA, 19 nt, Artificial Sequence
  Description of Artificial Sequence: Synthetic oligonucleotide
  Antisense strand to SEQ ID NO: 975716
ucuugagauauucuaggcc

SEQ ID NO: 975718 - RNA, 19 nt, Artificial Sequence
  Description of Artificial Sequence: Synthetic oligonucleotide
  Sense strand starting at position 286 of SEQ ID NO: 914070
ucuugugagccgagauggu

SEQ ID NO: 975719 - RNA, 19 nt, Artificial Sequence
  Description of Artificial Sequence: Synthetic oligonucleotide
  Antisense strand to SEQ ID NO: 975718
accaucucggcucacaaga

SEQ ID NO: 975720 - RNA, 19 nt, Artificial Sequence
  Description of Artificial Sequence: Synthetic oligonucleotide
  Sense strand starting at position 3279 of SEQ ID NO: 914070
cagagugauucucuuagaa

SEQ ID NO: 975721 - RNA, 19 nt, Artificial Sequence
  Description of Artificial Sequence: Synthetic oligonucleotide
  Antisense strand to SEQ ID NO: 975720
uucuaagagaaucacucug

SEQ ID NO: 975722 - RNA, 19 nt, Artificial Sequence
  Description of Artificial Sequence: Synthetic oligonucleotide
  Sense strand starting at position 933 of SEQ ID NO: 914070
ccauuaagggcucaauggu

SEQ ID NO: 975723 - RNA, 19 nt, Artificial Sequence
  Description of Artificial Sequence: Synthetic oligonucleotide
  Antisense strand to SEQ ID NO: 975722
accauugagcccuuaaugg

SEQ ID NO: 975724 - RNA, 19 nt, Artificial Sequence
  Description of Artificial Sequence: Synthetic oligonucleotide
  Sense strand starting at position 3932 of SEQ ID NO: 914070
ugagguaaaugcucaauaa

SEQ ID NO: 975725 - RNA, 19 nt, Artificial Sequence
  Description of Artificial Sequence: Synthetic oligonucleotide
  Antisense strand to SEQ ID NO: 975724
uuauugagcauuuaccuca

SEQ ID NO: 975726 - RNA, 19 nt, Artificial Sequence
  Description of Artificial Sequence: Synthetic oligonucleotide
  Sense strand starting at position 1375 of SEQ ID NO: 914070
accuguaaggcucacauca

SEQ ID NO: 975727 - RNA, 19 nt, Artificial Sequence
  Description of Artificial Sequence: Synthetic oligonucleotide
  Antisense strand to SEQ ID NO: 975726
ugaugugagccuuacaggu

SEQ ID NO: 975728 - RNA, 19 nt, Artificial Sequence
  Description of Artificial Sequence: Synthetic oligonucleotide
  Sense strand starting at position 482 of SEQ ID NO: 914070
ugaagaaaucgucgaauaa

SEQ ID NO: 975729 - RNA, 19 nt, Artificial Sequence
  Description of Artificial Sequence: Synthetic oligonucleotide
  Antisense strand to SEQ ID NO: 975728
uuauucgacgauuucuuca

SEQ ID NO: 975730 - RNA, 19 nt, Artificial Sequence
  Description of Artificial Sequence: Synthetic oligonucleotide
  Sense strand starting at position 662 of SEQ ID NO: 914070
agguucuccaggugaggaa

SEQ ID NO: 975731 - RNA, 19 nt, Artificial Sequence
  Description of Artificial Sequence: Synthetic oligonucleotide
  Antisense strand to SEQ ID NO: 975730
uuccucaccuggagaaccu

SEQ ID NO: 975732 - RNA, 19 nt, Artificial Sequence
  Description of Artificial Sequence: Synthetic oligonucleotide
  Sense strand starting at position 1368 of SEQ ID NO: 914070
uuuaauuaccuguaaggcu

SEQ ID NO: 975733 - RNA, 19 nt, Artificial Sequence
  Description of Artificial Sequence: Synthetic oligonucleotide
  Antisense strand to SEQ ID NO: 975732
agccuuacagguaauuaaa

SEQ ID NO: 975734 - RNA, 19 nt, Artificial Sequence
  Description of Artificial Sequence: Synthetic oligonucleotide
  Sense strand starting at position 2909 of SEQ ID NO: 914070
cucaguauuggccauuaac

SEQ ID NO: 975735 - RNA, 19 nt, Artificial Sequence
  Description of Artificial Sequence: Synthetic oligonucleotide
  Antisense strand to SEQ ID NO: 975734
guuaauggccaauacugag

SEQ ID NO: 975736 - RNA, 19 nt, Artificial Sequence
  Description of Artificial Sequence: Synthetic oligonucleotide
  Sense strand starting at position 450 of SEQ ID NO: 914070
acacauuuguaggaucuaa

SEQ ID NO: 975737 - RNA, 19 nt, Artificial Sequence
  Description of Artificial Sequence: Synthetic oligonucleotide
  Antisense strand to SEQ ID NO: 975736
uuagauccuacaaaugugu

SEQ ID NO: 975738 - RNA, 19 nt, Artificial Sequence
  Description of Artificial Sequence: Synthetic oligonucleotide
  Sense strand starting at position 3953 of SEQ ID NO: 914070
guuuguugauaaucugaga

SEQ ID NO: 975739 - RNA, 19 nt, Artificial Sequence
  Description of Artificial Sequence: Synthetic oligonucleotide
  Antisense strand to SEQ ID NO: 975738
ucucagauuaucaacaaac

SEQ ID NO: 975740 - RNA, 19 nt, Artificial Sequence
  Description of Artificial Sequence: Synthetic oligonucleotide
  Sense strand starting at position 977 of SEQ ID NO: 914070
agagguuugcuccagcaaa

SEQ ID NO: 975741 - RNA, 19 nt, Artificial Sequence
  Description of Artificial Sequence: Synthetic oligonucleotide
  Antisense strand to SEQ ID NO: 975740
uuugcuggagcaaaccucu

SEQ ID NO: 975742 - RNA, 19 nt, Artificial Sequence
  Description of Artificial Sequence: Synthetic oligonucleotide
  Sense strand starting at position 2593 of SEQ ID NO: 914070
agguaccauuuguaaagaa

SEQ ID NO: 975743 - RNA, 19 nt, Artificial Sequence
  Description of Artificial Sequence: Synthetic oligonucleotide
  Antisense strand to SEQ ID NO: 975742
uucuuuacaaaugguaccu

SEQ ID NO: 975744 - RNA, 19 nt, Artificial Sequence
  Description of Artificial Sequence: Synthetic oligonucleotide
  Sense strand starting at position 3540 of SEQ ID NO: 914070
ucccucgaugcucaucaaa

SEQ ID NO: 975745 - RNA, 19 nt, Artificial Sequence
  Description of Artificial Sequence: Synthetic oligonucleotide
  Antisense strand to SEQ ID NO: 975744
uuugaugagcaucgaggga

SEQ ID NO: 975746 - RNA, 19 nt, Artificial Sequence
  Description of Artificial Sequence: Synthetic oligonucleotide
  Sense strand starting at position 2227 of SEQ ID NO: 914070
ccgucaucacaguaccuaa

SEQ ID NO: 975747 - RNA, 19 nt, Artificial Sequence
  Description of Artificial Sequence: Synthetic oligonucleotide
  Antisense strand to SEQ ID NO: 975746
uuagguacugugaugacgg

SEQ ID NO: 975748 - RNA, 19 nt, Artificial Sequence
  Description of Artificial Sequence: Synthetic oligonucleotide
  Sense strand starting at position 3015 of SEQ ID NO: 914070
uucuguauuugcucaguuu

SEQ ID NO: 975749 - RNA, 19 nt, Artificial Sequence
  Description of Artificial Sequence: Synthetic oligonucleotide
  Antisense strand to SEQ ID NO: 975748
aaacugagcaaauacagaa

SEQ ID NO: 975750 - RNA, 19 nt, Artificial Sequence
  Description of Artificial Sequence: Synthetic oligonucleotide
  Sense strand starting at position 1301 of SEQ ID NO: 914070
cuaaauguacuguauuguu

SEQ ID NO: 975751 - RNA, 19 nt, Artificial Sequence
  Description of Artificial Sequence: Synthetic oligonucleotide
  Antisense strand to SEQ ID NO: 975750
aacaauacaguacauuuag

SEQ ID NO: 975752 - RNA, 19 nt, Artificial Sequence
  Description of Artificial Sequence: Synthetic oligonucleotide
  Sense strand starting at position 2899 of SEQ ID NO: 914070
cucagaagugcucaguauu

SEQ ID NO: 975753 - RNA, 19 nt, Artificial Sequence
  Description of Artificial Sequence: Synthetic oligonucleotide
  Antisense strand to SEQ ID NO: 975752
aauacugagcacuucugag

SEQ ID NO: 975754 - RNA, 19 nt, Artificial Sequence
  Description of Artificial Sequence: Synthetic oligonucleotide
  Sense strand starting at position 3171 of SEQ ID NO: 914070
uguagcgugcuguucuauu

SEQ ID NO: 975755 - RNA, 19 nt, Artificial Sequence
  Description of Artificial Sequence: Synthetic oligonucleotide
  Antisense strand to SEQ ID NO: 975754
aauagaacagcacgcuaca

SEQ ID NO: 975756 - RNA, 19 nt, Artificial Sequence
  Description of Artificial Sequence: Synthetic oligonucleotide
  Sense strand starting at position 1937 of SEQ ID NO: 914070
ccuccuguuccagggacau

SEQ ID NO: 975757 - RNA, 19 nt, Artificial Sequence
  Description of Artificial Sequence: Synthetic oligonucleotide
  Antisense strand to SEQ ID NO: 975756
augucccuggaacaggagg

SEQ ID NO: 975758 - RNA, 19 nt, Artificial Sequence
  Description of Artificial Sequence: Synthetic oligonucleotide
  Sense strand starting at position 3130 of SEQ ID NO: 914070
acccuuaugccgcagaaau

SEQ ID NO: 975759 - RNA, 19 nt, Artificial Sequence
  Description of Artificial Sequence: Synthetic oligonucleotide
  Antisense strand to SEQ ID NO: 975758
auuucugcggcauaagggu

SEQ ID NO: 975760 - RNA, 19 nt, Artificial Sequence
  Description of Artificial Sequence: Synthetic oligonucleotide
  Sense strand starting at position 3571 of SEQ ID NO: 914070
guacaauuauuguccucau

SEQ ID NO: 975761 - RNA, 19 nt, Artificial Sequence
  Description of Artificial Sequence: Synthetic oligonucleotide
  Antisense strand to SEQ ID NO: 975760
augaggacaauaauuguac

SEQ ID NO: 975762 - RNA, 19 nt, Artificial Sequence
  Description of Artificial Sequence: Synthetic oligonucleotide
  Sense strand starting at position 3958 of SEQ ID NO: 914070
uugauaaucugagaaggaa

SEQ ID NO: 975763 - RNA, 19 nt, Artificial Sequence
  Description of Artificial Sequence: Synthetic oligonucleotide
  Antisense strand to SEQ ID NO: 975762
uuccuucucagauuaucaa

SEQ ID NO: 975764 - RNA, 19 nt, Artificial Sequence
  Description of Artificial Sequence: Synthetic oligonucleotide
  Sense strand starting at position 767 of SEQ ID NO: 914070
ucaaauugcccuugagggu

SEQ ID NO: 975765 - RNA, 19 nt, Artificial Sequence
  Description of Artificial Sequence: Synthetic oligonucleotide
  Antisense strand to SEQ ID NO: 975764
acccucaagggcaauuuga

SEQ ID NO: 975766 - RNA, 19 nt, Artificial Sequence
  Description of Artificial Sequence: Synthetic oligonucleotide
  Sense strand starting at position 3093 of SEQ ID NO: 914070
gacccuccgaguugaguaa

SEQ ID NO: 975767 - RNA, 19 nt, Artificial Sequence
  Description of Artificial Sequence: Synthetic oligonucleotide
  Antisense strand to SEQ ID NO: 975766
uuacucaacucggaggguc

SEQ ID NO: 975768 - RNA, 19 nt, Artificial Sequence
  Description of Artificial Sequence: Synthetic oligonucleotide
  Sense strand starting at position 1490 of SEQ ID NO: 914070
ccgaaaguggcugagcuua

SEQ ID NO: 975769 - RNA, 19 nt, Artificial Sequence
  Description of Artificial Sequence: Synthetic oligonucleotide
  Antisense strand to SEQ ID NO: 975768
uaagcucagccacuuucgg

SEQ ID NO: 975770 - RNA, 19 nt, Artificial Sequence
  Description of Artificial Sequence: Synthetic oligonucleotide
  Sense strand starting at position 1868 of SEQ ID NO: 914070
gcacguugggcucaaugaa

SEQ ID NO: 975771 - RNA, 19 nt, Artificial Sequence
  Description of Artificial Sequence: Synthetic oligonucleotide
  Antisense strand to SEQ ID NO: 975770
uucauugagcccaacgugc

SEQ ID NO: 975772 - RNA, 19 nt, Artificial Sequence
  Description of Artificial Sequence: Synthetic oligonucleotide
  Sense strand starting at position 3061 of SEQ ID NO: 914070
ggguuuaucuccucuucca

SEQ ID NO: 975773 - RNA, 19 nt, Artificial Sequence
  Description of Artificial Sequence: Synthetic oligonucleotide
  Antisense strand to SEQ ID NO: 975772
uggaagaggagauaaaccc

SEQ ID NO: 975774 - RNA, 19 nt, Artificial Sequence
  Description of Artificial Sequence: Synthetic oligonucleotide
  Sense strand starting at position 2755 of SEQ ID NO: 914070
acaucaucuaguuguguga

SEQ ID NO: 975775 - RNA, 19 nt, Artificial Sequence
  Description of Artificial Sequence: Synthetic oligonucleotide
  Antisense strand to SEQ ID NO: 975774
ucacacaacuagaugaugu

SEQ ID NO: 975776 - RNA, 19 nt, Artificial Sequence
  Description of Artificial Sequence: Synthetic oligonucleotide
  Sense strand starting at position 3480 of SEQ ID NO: 914070
cugcccucugccuagaagu

SEQ ID NO: 975777 - RNA, 19 nt, Artificial Sequence
  Description of Artificial Sequence: Synthetic oligonucleotide
  Antisense strand to SEQ ID NO: 975776
acuucuaggcagagggcag

SEQ ID NO: 975778 - RNA, 19 nt, Artificial Sequence
  Description of Artificial Sequence: Synthetic oligonucleotide
  Sense strand starting at position 737 of SEQ ID NO: 914070
ucagaagucugugcccuua

SEQ ID NO: 975779 - RNA, 19 nt, Artificial Sequence
  Description of Artificial Sequence: Synthetic oligonucleotide
  Antisense strand to SEQ ID NO: 975778
uaagggcacagacuucuga

SEQ ID NO: 975780 - RNA, 19 nt, Artificial Sequence
  Description of Artificial Sequence: Synthetic oligonucleotide
  Sense strand starting at position 1174 of SEQ ID NO: 914070
ccagaugugcugugaaggu

SEQ ID NO: 975781 - RNA, 19 nt, Artificial Sequence
  Description of Artificial Sequence: Synthetic oligonucleotide
  Antisense strand to SEQ ID NO: 975780
accuucacagcacaucugg

SEQ ID NO: 975782 - RNA, 19 nt, Artificial Sequence
  Description of Artificial Sequence: Synthetic oligonucleotide
  Sense strand starting at position 3886 of SEQ ID NO: 914070
gaguuccuugagugcggaa

SEQ ID NO: 975783 - RNA, 19 nt, Artificial Sequence
  Description of Artificial Sequence: Synthetic oligonucleotide
  Antisense strand to SEQ ID NO: 975782
uuccgcacucaaggaacuc

SEQ ID NO: 975784 - RNA, 19 nt, Artificial Sequence
  Description of Artificial Sequence: Synthetic oligonucleotide
  Sense strand starting at position 2907 of SEQ ID NO: 914070
ugcucaguauuggccauua

SEQ ID NO: 975785 - RNA, 19 nt, Artificial Sequence
  Description of Artificial Sequence: Synthetic oligonucleotide
  Antisense strand to SEQ ID NO: 975784
uaauggccaauacugagca

SEQ ID NO: 975786 - RNA, 19 nt, Artificial Sequence
  Description of Artificial Sequence: Synthetic oligonucleotide
  Sense strand starting at position 3956 of SEQ ID NO: 914070
uguugauaaucugagaagg

SEQ ID NO: 975787 - RNA, 19 nt, Artificial Sequence
  Description of Artificial Sequence: Synthetic oligonucleotide
  Antisense strand to SEQ ID NO: 975786
ccuucucagauuaucaaca

SEQ ID NO: 975788 - RNA, 19 nt, Artificial Sequence
  Description of Artificial Sequence: Synthetic oligonucleotide
  Sense strand starting at position 3003 of SEQ ID NO: 914070
guaugacucugcuucugua

SEQ ID NO: 975789 - RNA, 19 nt, Artificial Sequence
  Description of Artificial Sequence: Synthetic oligonucleotide
  Antisense strand to SEQ ID NO: 975788
uacagaagcagagucauac

SEQ ID NO: 975790 - RNA, 19 nt, Artificial Sequence
  Description of Artificial Sequence: Synthetic oligonucleotide
  Sense strand starting at position 284 of SEQ ID NO: 914070
guucuugugagccgagaug

SEQ ID NO: 975791 - RNA, 19 nt, Artificial Sequence
  Description of Artificial Sequence: Synthetic oligonucleotide
  Antisense strand to SEQ ID NO: 975790
caucucggcucacaagaac

SEQ ID NO: 975792 - RNA, 19 nt, Artificial Sequence
  Description of Artificial Sequence: Synthetic oligonucleotide
  Sense strand starting at position 2351 of SEQ ID NO: 914070
cacgaauuccagugugcau

SEQ ID NO: 975793 - RNA, 19 nt, Artificial Sequence
  Description of Artificial Sequence: Synthetic oligonucleotide
  Antisense strand to SEQ ID NO: 975792
augcacacuggaauucgug

SEQ ID NO: 975794 - RNA, 19 nt, Artificial Sequence
  Description of Artificial Sequence: Synthetic oligonucleotide
  Sense strand starting at position 606 of SEQ ID NO: 914070
gggucugugaucugccuuu

SEQ ID NO: 975795 - RNA, 19 nt, Artificial Sequence
  Description of Artificial Sequence: Synthetic oligonucleotide
  Antisense strand to SEQ ID NO: 975794
aaaggcagaucacagaccc

SEQ ID NO: 975796 - RNA, 19 nt, Artificial Sequence
  Description of Artificial Sequence: Synthetic oligonucleotide
  Sense strand starting at position 2432 of SEQ ID NO: 914071
ggaucauuccuaggaaacg

SEQ ID NO: 975797 - RNA, 19 nt, Artificial Sequence
  Description of Artificial Sequence: Synthetic oligonucleotide
  Antisense strand to SEQ ID NO: 975796
cguuuccuaggaaugaucc

SEQ ID NO: 975798 - RNA, 19 nt, Artificial Sequence
  Description of Artificial Sequence: Synthetic oligonucleotide
  Sense strand starting at position 571 of SEQ ID NO: 914071
auaaaugucaagggagcua

SEQ ID NO: 975799 - RNA, 19 nt, Artificial Sequence
  Description of Artificial Sequence: Synthetic oligonucleotide
  Antisense strand to SEQ ID NO: 975798
uagcucccuugacauuuau

SEQ ID NO: 975800 - RNA, 19 nt, Artificial Sequence
  Description of Artificial Sequence: Synthetic oligonucleotide
  Sense strand starting at position 3809 of SEQ ID NO: 914071
ugcucuucucaggaagauu

SEQ ID NO: 975801 - RNA, 19 nt, Artificial Sequence
  Description of Artificial Sequence: Synthetic oligonucleotide
  Antisense strand to SEQ ID NO: 975800
aaucuuccugagaagagca

SEQ ID NO: 975802 - RNA, 19 nt, Artificial Sequence
  Description of Artificial Sequence: Synthetic oligonucleotide
  Sense strand starting at position 2254 of SEQ ID NO: 914071
acaaucugggacgguaaau

SEQ ID NO: 975803 - RNA, 19 nt, Artificial Sequence
  Description of Artificial Sequence: Synthetic oligonucleotide
  Antisense strand to SEQ ID NO: 975802
auuuaccgucccagauugu

SEQ ID NO: 975804 - RNA, 19 nt, Artificial Sequence
  Description of Artificial Sequence: Synthetic oligonucleotide
  Sense strand starting at position 3578 of SEQ ID NO: 914071
ggaguccugcaauaugauu

SEQ ID NO: 975805 - RNA, 19 nt, Artificial Sequence
  Description of Artificial Sequence: Synthetic oligonucleotide
  Antisense strand to SEQ ID NO: 975804
aaucauauugcaggacucc

SEQ ID NO: 975806 - RNA, 19 nt, Artificial Sequence
  Description of Artificial Sequence: Synthetic oligonucleotide
  Sense strand starting at position 570 of SEQ ID NO: 914071
gauaaaugucaagggagcu

SEQ ID NO: 975807 - RNA, 19 nt, Artificial Sequence
  Description of Artificial Sequence: Synthetic oligonucleotide
  Antisense strand to SEQ ID NO: 975806
agcucccuugacauuuauc

SEQ ID NO: 975808 - RNA, 19 nt, Artificial Sequence
  Description of Artificial Sequence: Synthetic oligonucleotide
  Sense strand starting at position 2419 of SEQ ID NO: 914071
auuaaugcccaauggauca

SEQ ID NO: 975809 - RNA, 19 nt, Artificial Sequence
  Description of Artificial Sequence: Synthetic oligonucleotide
  Antisense strand to SEQ ID NO: 975808
ugauccauugggcauuaau

SEQ ID NO: 975810 - RNA, 19 nt, Artificial Sequence
  Description of Artificial Sequence: Synthetic oligonucleotide
  Sense strand starting at position 3188 of SEQ ID NO: 914071
cggcgaaaucgagacaaca

SEQ ID NO: 975811 - RNA, 19 nt, Artificial Sequence
  Description of Artificial Sequence: Synthetic oligonucleotide
  Antisense strand to SEQ ID NO: 975810
uguugucucgauuucgccg

SEQ ID NO: 975812 - RNA, 19 nt, Artificial Sequence
  Description of Artificial Sequence: Synthetic oligonucleotide
  Sense strand starting at position 3907 of SEQ ID NO: 914071
gaguaucuacugggagcaa

SEQ ID NO: 975813 - RNA, 19 nt, Artificial Sequence
  Description of Artificial Sequence: Synthetic oligonucleotide
  Antisense strand to SEQ ID NO: 975812
uugcucccaguagauacuc

SEQ ID NO: 975814 - RNA, 19 nt, Artificial Sequence
  Description of Artificial Sequence: Synthetic oligonucleotide
  Sense strand starting at position 3575 of SEQ ID NO: 914071
gguggaguccugcaauaug

SEQ ID NO: 975815 - RNA, 19 nt, Artificial Sequence
  Description of Artificial Sequence: Synthetic oligonucleotide
  Antisense strand to SEQ ID NO: 975814
cauauugcaggacuccacc

SEQ ID NO: 975816 - RNA, 19 nt, Artificial Sequence
  Description of Artificial Sequence: Synthetic oligonucleotide
  Sense strand starting at position 1939 of SEQ ID NO: 914071
gugcgaacgcuuucgacuu

SEQ ID NO: 975817 - RNA, 19 nt, Artificial Sequence
  Description of Artificial Sequence: Synthetic oligonucleotide
  Antisense strand to SEQ ID NO: 975816
aagucgaaagcguucgcac

SEQ ID NO: 975818 - RNA, 19 nt, Artificial Sequence
  Description of Artificial Sequence: Synthetic oligonucleotide
  Sense strand starting at position 1282 of SEQ ID NO: 914071
ggguggagccgugauugga

SEQ ID NO: 975819 - RNA, 19 nt, Artificial Sequence
  Description of Artificial Sequence: Synthetic oligonucleotide
  Antisense strand to SEQ ID NO: 975818
uccaaucacggcuccaccc

SEQ ID NO: 975820 - RNA, 19 nt, Artificial Sequence
  Description of Artificial Sequence: Synthetic oligonucleotide
  Sense strand starting at position 3950 of SEQ ID NO: 914071
acugguuauguuuaucagu

SEQ ID NO: 975821 - RNA, 19 nt, Artificial Sequence
  Description of Artificial Sequence: Synthetic oligonucleotide
  Antisense strand to SEQ ID NO: 975820
acugauaaacauaaccagu

SEQ ID NO: 975822 - RNA, 19 nt, Artificial Sequence
  Description of Artificial Sequence: Synthetic oligonucleotide
  Sense strand starting at position 3926 of SEQ ID NO: 914071
ggcucugugaaguauagua

SEQ ID NO: 975823 - RNA, 19 nt, Artificial Sequence
  Description of Artificial Sequence: Synthetic oligonucleotide
  Antisense strand to SEQ ID NO: 975822
uacuauacuucacagagcc

SEQ ID NO: 975824 - RNA, 19 nt, Artificial Sequence
  Description of Artificial Sequence: Synthetic oligonucleotide
  Sense strand starting at position 3323 of SEQ ID NO: 914071
ccugcagaggagugaugua

SEQ ID NO: 975825 - RNA, 19 nt, Artificial Sequence
  Description of Artificial Sequence: Synthetic oligonucleotide
  Antisense strand to SEQ ID NO: 975824
uacaucacuccucugcagg

SEQ ID NO: 975826 - RNA, 19 nt, Artificial Sequence
  Description of Artificial Sequence: Synthetic oligonucleotide
  Sense strand starting at position 3919 of SEQ ID NO: 914071
ggagcaaggcucugugaag

SEQ ID NO: 975827 - RNA, 19 nt, Artificial Sequence
  Description of Artificial Sequence: Synthetic oligonucleotide
  Antisense strand to SEQ ID NO: 975826
cuucacagagccuugcucc

SEQ ID NO: 975828 - RNA, 19 nt, Artificial Sequence
  Description of Artificial Sequence: Synthetic oligonucleotide
  Sense strand starting at position 3818 of SEQ ID NO: 914071
caggaagauuaggaaagua

SEQ ID NO: 975829 - RNA, 19 nt, Artificial Sequence
  Description of Artificial Sequence: Synthetic oligonucleotide
  Antisense strand to SEQ ID NO: 975828
uacuuuccuaaucuuccug

SEQ ID NO: 975830 - RNA, 19 nt, Artificial Sequence
  Description of Artificial Sequence: Synthetic oligonucleotide
  Sense strand starting at position 3934 of SEQ ID NO: 914071
gaaguauaguagcccuacu

SEQ ID NO: 975831 - RNA, 19 nt, Artificial Sequence
  Description of Artificial Sequence: Synthetic oligonucleotide
  Antisense strand to SEQ ID NO: 975830
aguagggcuacuauacuuc

SEQ ID NO: 975832 - RNA, 19 nt, Artificial Sequence
  Description of Artificial Sequence: Synthetic oligonucleotide
  Sense strand starting at position 3520 of SEQ ID NO: 914071
uuguuagaaaugcacguuu

SEQ ID NO: 975833 - RNA, 19 nt, Artificial Sequence
  Description of Artificial Sequence: Synthetic oligonucleotide
  Antisense strand to SEQ ID NO: 975832
aaacgugcauuucuaacaa

SEQ ID NO: 975834 - RNA, 19 nt, Artificial Sequence
  Description of Artificial Sequence: Synthetic oligonucleotide
  Sense strand starting at position 2430 of SEQ ID NO: 914071
auggaucauuccuaggaaa

SEQ ID NO: 975835 - RNA, 19 nt, Artificial Sequence
  Description of Artificial Sequence: Synthetic oligonucleotide
  Antisense strand to SEQ ID NO: 975834
uuuccuaggaaugauccau

SEQ ID NO: 975836 - RNA, 19 nt, Artificial Sequence
  Description of Artificial Sequence: Synthetic oligonucleotide
  Sense strand starting at position 3920 of SEQ ID NO: 914071
gagcaaggcucugugaagu

SEQ ID NO: 975837 - RNA, 19 nt, Artificial Sequence
  Description of Artificial Sequence: Synthetic oligonucleotide
  Antisense strand to SEQ ID NO: 975836
acuucacagagccuugcuc

SEQ ID NO: 975838 - RNA, 19 nt, Artificial Sequence
  Description of Artificial Sequence: Synthetic oligonucleotide
  Sense strand starting at position 2456 of SEQ ID NO: 914071
ccugacuauucggcccauu

SEQ ID NO: 975839 - RNA, 19 nt, Artificial Sequence
  Description of Artificial Sequence: Synthetic oligonucleotide
  Antisense strand to SEQ ID NO: 975838
aaugggccgaauagucagg

SEQ ID NO: 975840 - RNA, 19 nt, Artificial Sequence
  Description of Artificial Sequence: Synthetic oligonucleotide
  Sense strand starting at position 3959 of SEQ ID NO: 914071
guuuaucaguuugcaccua

SEQ ID NO: 975841 - RNA, 19 nt, Artificial Sequence
  Description of Artificial Sequence: Synthetic oligonucleotide
  Antisense strand to SEQ ID NO: 975840
uaggugcaaacugauaaac

SEQ ID NO: 975842 - RNA, 19 nt, Artificial Sequence
  Description of Artificial Sequence: Synthetic oligonucleotide
  Sense strand starting at position 650 of SEQ ID NO: 914071
cuugguuucguaagcgugu

SEQ ID NO: 975843 - RNA, 19 nt, Artificial Sequence
  Description of Artificial Sequence: Synthetic oligonucleotide
  Antisense strand to SEQ ID NO: 975842
acacgcuuacgaaaccaag

SEQ ID NO: 975844 - RNA, 19 nt, Artificial Sequence
  Description of Artificial Sequence: Synthetic oligonucleotide
  Sense strand starting at position 678 of SEQ ID NO: 914071
gucuguacuguuugaaggu

SEQ ID NO: 975845 - RNA, 19 nt, Artificial Sequence
  Description of Artificial Sequence: Synthetic oligonucleotide
  Antisense strand to SEQ ID NO: 975844
accuucaaacaguacagac

SEQ ID NO: 975846 - RNA, 19 nt, Artificial Sequence
  Description of Artificial Sequence: Synthetic oligonucleotide
  Sense strand starting at position 3817 of SEQ ID NO: 914071
ucaggaagauuaggaaagu

SEQ ID NO: 975847 - RNA, 19 nt, Artificial Sequence
  Description of Artificial Sequence: Synthetic oligonucleotide
  Antisense strand to SEQ ID NO: 975846
acuuuccuaaucuuccuga

SEQ ID NO: 975848 - RNA, 19 nt, Artificial Sequence
  Description of Artificial Sequence: Synthetic oligonucleotide
  Sense strand starting at position 671 of SEQ ID NO: 914071
cgcugaagucuguacuguu

SEQ ID NO: 975849 - RNA, 19 nt, Artificial Sequence
  Description of Artificial Sequence: Synthetic oligonucleotide
  Antisense strand to SEQ ID NO: 975848
aacaguacagacuucagcg

SEQ ID NO: 975850 - RNA, 19 nt, Artificial Sequence
  Description of Artificial Sequence: Synthetic oligonucleotide
  Sense strand starting at position 2718 of SEQ ID NO: 914071
gugcaagucgccugaagga

SEQ ID NO: 975851 - RNA, 19 nt, Artificial Sequence
  Description of Artificial Sequence: Synthetic oligonucleotide
  Antisense strand to SEQ ID NO: 975850
uccuucaggcgacuugcac

SEQ ID NO: 975852 - RNA, 19 nt, Artificial Sequence
  Description of Artificial Sequence: Synthetic oligonucleotide
  Sense strand starting at position 2251 of SEQ ID NO: 914071
uuuacaaucugggacggua

SEQ ID NO: 975853 - RNA, 19 nt, Artificial Sequence
  Description of Artificial Sequence: Synthetic oligonucleotide
  Antisense strand to SEQ ID NO: 975852
uaccgucccagauuguaaa

SEQ ID NO: 975854 - RNA, 19 nt, Artificial Sequence
  Description of Artificial Sequence: Synthetic oligonucleotide
  Sense strand starting at position 2406 of SEQ ID NO: 914071
ugcgacacuugggauuaau

SEQ ID NO: 975855 - RNA, 19 nt, Artificial Sequence
  Description of Artificial Sequence: Synthetic oligonucleotide
  Antisense strand to SEQ ID NO: 975854
auuaaucccaagugucgca

SEQ ID NO: 975856 - RNA, 19 nt, Artificial Sequence
  Description of Artificial Sequence: Synthetic oligonucleotide
  Sense strand starting at position 3423 of SEQ ID NO: 914071
ugcugagguucauagugaa

SEQ ID NO: 975857 - RNA, 19 nt, Artificial Sequence
  Description of Artificial Sequence: Synthetic oligonucleotide
  Antisense strand to SEQ ID NO: 975856
uucacuaugaaccucagca

SEQ ID NO: 975858 - RNA, 19 nt, Artificial Sequence
  Description of Artificial Sequence: Synthetic oligonucleotide
  Sense strand starting at position 651 of SEQ ID NO: 914071
uugguuucguaagcgugua

SEQ ID NO: 975859 - RNA, 19 nt, Artificial Sequence
  Description of Artificial Sequence: Synthetic oligonucleotide
  Antisense strand to SEQ ID NO: 975858
uacacgcuuacgaaaccaa

SEQ ID NO: 975860 - RNA, 19 nt, Artificial Sequence
  Description of Artificial Sequence: Synthetic oligonucleotide
  Sense strand starting at position 3808 of SEQ ID NO: 914071
cugcucuucucaggaagau

SEQ ID NO: 975861 - RNA, 19 nt, Artificial Sequence
  Description of Artificial Sequence: Synthetic oligonucleotide
  Antisense strand to SEQ ID NO: 975860
aucuuccugagaagagcag

SEQ ID NO: 975862 - RNA, 19 nt, Artificial Sequence
  Description of Artificial Sequence: Synthetic oligonucleotide
  Sense strand starting at position 2405 of SEQ ID NO: 914071
cugcgacacuugggauuaa

SEQ ID NO: 975863 - RNA, 19 nt, Artificial Sequence
  Description of Artificial Sequence: Synthetic oligonucleotide
  Antisense strand to SEQ ID NO: 975862
uuaaucccaagugucgcag

SEQ ID NO: 975864 - RNA, 19 nt, Artificial Sequence
  Description of Artificial Sequence: Synthetic oligonucleotide
  Sense strand starting at position 674 of SEQ ID NO: 914071
ugaagucuguacuguuuga

SEQ ID NO: 975865 - RNA, 19 nt, Artificial Sequence
  Description of Artificial Sequence: Synthetic oligonucleotide
  Antisense strand to SEQ ID NO: 975864
ucaaacaguacagacuuca

SEQ ID NO: 975866 - RNA, 19 nt, Artificial Sequence
  Description of Artificial Sequence: Synthetic oligonucleotide
  Sense strand starting at position 2354 of SEQ ID NO: 914071
gcacgaguuugcgaacuac

SEQ ID NO: 975867 - RNA, 19 nt, Artificial Sequence
  Description of Artificial Sequence: Synthetic oligonucleotide
  Antisense strand to SEQ ID NO: 975866
guaguucgcaaacucgugc

SEQ ID NO: 975868 - RNA, 19 nt, Artificial Sequence
  Description of Artificial Sequence: Synthetic oligonucleotide
  Sense strand starting at position 3260 of SEQ ID NO: 914071
ggaguccucuuccguuauc

SEQ ID NO: 975869 - RNA, 19 nt, Artificial Sequence
  Description of Artificial Sequence: Synthetic oligonucleotide
  Antisense strand to SEQ ID NO: 975868
gauaacggaagaggacucc

SEQ ID NO: 975870 - RNA, 19 nt, Artificial Sequence
  Description of Artificial Sequence: Synthetic oligonucleotide
  Sense strand starting at position 3097 of SEQ ID NO: 914072
cuaugaacagguuaucuuu

SEQ ID NO: 975871 - RNA, 19 nt, Artificial Sequence
  Description of Artificial Sequence: Synthetic oligonucleotide
  Antisense strand to SEQ ID NO: 975870
aaagauaaccuguucauag

SEQ ID NO: 975872 - RNA, 19 nt, Artificial Sequence
  Description of Artificial Sequence: Synthetic oligonucleotide
  Sense strand starting at position 1165 of SEQ ID NO: 914072
cuucuagagcuuuaaacug

SEQ ID NO: 975873 - RNA, 19 nt, Artificial Sequence
  Description of Artificial Sequence: Synthetic oligonucleotide
  Antisense strand to SEQ ID NO: 975872
caguuuaaagcucuagaag

SEQ ID NO: 975874 - RNA, 19 nt, Artificial Sequence
  Description of Artificial Sequence: Synthetic oligonucleotide
  Sense strand starting at position 2809 of SEQ ID NO: 914072
ggaaccaacuggucaguga

SEQ ID NO: 975875 - RNA, 19 nt, Artificial Sequence
  Description of Artificial Sequence: Synthetic oligonucleotide
  Antisense strand to SEQ ID NO: 975874
ucacugaccaguugguucc

SEQ ID NO: 975876 - RNA, 19 nt, Artificial Sequence
  Description of Artificial Sequence: Synthetic oligonucleotide
  Sense strand starting at position 2208 of SEQ ID NO: 914072
ccaaacugccuuggacaaa

SEQ ID NO: 975877 - RNA, 19 nt, Artificial Sequence
  Description of Artificial Sequence: Synthetic oligonucleotide
  Antisense strand to SEQ ID NO: 975876
uuuguccaaggcaguuugg

SEQ ID NO: 975878 - RNA, 19 nt, Artificial Sequence
  Description of Artificial Sequence: Synthetic oligonucleotide
  Sense strand starting at position 3283 of SEQ ID NO: 914072
augccuacucaucaagagu

SEQ ID NO: 975879 - RNA, 19 nt, Artificial Sequence
  Description of Artificial Sequence: Synthetic oligonucleotide
  Antisense strand to SEQ ID NO: 975878
acucuugaugaguaggcau

SEQ ID NO: 975880 - RNA, 19 nt, Artificial Sequence
  Description of Artificial Sequence: Synthetic oligonucleotide
  Sense strand starting at position 3629 of SEQ ID NO: 914072
cagaucaggugacucuuau

SEQ ID NO: 975881 - RNA, 19 nt, Artificial Sequence
  Description of Artificial Sequence: Synthetic oligonucleotide
  Antisense strand to SEQ ID NO: 975880
auaagagucaccugaucug

SEQ ID NO: 975882 - RNA, 19 nt, Artificial Sequence
  Description of Artificial Sequence: Synthetic oligonucleotide
  Sense strand starting at position 1042 of SEQ ID NO: 914072
ccaggaggaugucugcaaa

SEQ ID NO: 975883 - RNA, 19 nt, Artificial Sequence
  Description of Artificial Sequence: Synthetic oligonucleotide
  Antisense strand to SEQ ID NO: 975882
uuugcagacauccuccugg

SEQ ID NO: 975884 - RNA, 19 nt, Artificial Sequence
  Description of Artificial Sequence: Synthetic oligonucleotide
  Sense strand starting at position 3078 of SEQ ID NO: 914072
ugguuaaggcccugaaaga

SEQ ID NO: 975885 - RNA, 19 nt, Artificial Sequence
  Description of Artificial Sequence: Synthetic oligonucleotide
  Antisense strand to SEQ ID NO: 975884
ucuuucagggccuuaacca

SEQ ID NO: 975886 - RNA, 19 nt, Artificial Sequence
  Description of Artificial Sequence: Synthetic oligonucleotide
  Sense strand starting at position 2737 of SEQ ID NO: 914072
auagguuucccaugacuug

SEQ ID NO: 975887 - RNA, 19 nt, Artificial Sequence
  Description of Artificial Sequence: Synthetic oligonucleotide
  Antisense strand to SEQ ID NO: 975886
caagucaugggaaaccuau

SEQ ID NO: 975888 - RNA, 19 nt, Artificial Sequence
  Description of Artificial Sequence: Synthetic oligonucleotide
  Sense strand starting at position 971 of SEQ ID NO: 914072
gcaagcaucagaggugaaa

SEQ ID NO: 975889 - RNA, 19 nt, Artificial Sequence
  Description of Artificial Sequence: Synthetic oligonucleotide
  Antisense strand to SEQ ID NO: 975888
uuucaccucugaugcuugc

SEQ ID NO: 975890 - RNA, 19 nt, Artificial Sequence
  Description of Artificial Sequence: Synthetic oligonucleotide
  Sense strand starting at position 2738 of SEQ ID NO: 914072
uagguuucccaugacuugu

SEQ ID NO: 975891 - RNA, 19 nt, Artificial Sequence
  Description of Artificial Sequence: Synthetic oligonucleotide
  Antisense strand to SEQ ID NO: 975890
acaagucaugggaaaccua

SEQ ID NO: 975892 - RNA, 19 nt, Artificial Sequence
  Description of Artificial Sequence: Synthetic oligonucleotide
  Sense strand starting at position 2998 of SEQ ID NO: 914072
gugcuuucaggaugaaaug

SEQ ID NO: 975893 - RNA, 19 nt, Artificial Sequence
  Description of Artificial Sequence: Synthetic oligonucleotide
  Antisense strand to SEQ ID NO: 975892
cauuucauccugaaagcac

SEQ ID NO: 975894 - RNA, 19 nt, Artificial Sequence
  Description of Artificial Sequence: Synthetic oligonucleotide
  Sense strand starting at position 3565 of SEQ ID NO: 914072
uugcuuugccaagaacuau

SEQ ID NO: 975895 - RNA, 19 nt, Artificial Sequence
  Description of Artificial Sequence: Synthetic oligonucleotide
  Antisense strand to SEQ ID NO: 975894
auaguucuuggcaaagcaa

SEQ ID NO: 975896 - RNA, 19 nt, Artificial Sequence
  Description of Artificial Sequence: Synthetic oligonucleotide
  Sense strand starting at position 2980 of SEQ ID NO: 914072
cgucauuauccacauguag

SEQ ID NO: 975897 - RNA, 19 nt, Artificial Sequence
  Description of Artificial Sequence: Synthetic oligonucleotide
  Antisense strand to SEQ ID NO: 975896
cuacauguggauaaugacg

SEQ ID NO: 975898 - RNA, 19 nt, Artificial Sequence
  Description of Artificial Sequence: Synthetic oligonucleotide
  Sense strand starting at position 3617 of SEQ ID NO: 914072
gccugacuugcccagauca

SEQ ID NO: 975899 - RNA, 19 nt, Artificial Sequence
  Description of Artificial Sequence: Synthetic oligonucleotide
  Antisense strand to SEQ ID NO: 975898
ugaucugggcaagucaggc

SEQ ID NO: 975900 - RNA, 19 nt, Artificial Sequence
  Description of Artificial Sequence: Synthetic oligonucleotide
  Sense strand starting at position 1154 of SEQ ID NO: 914072
agguuuguuuacuucuaga

SEQ ID NO: 975901 - RNA, 19 nt, Artificial Sequence
  Description of Artificial Sequence: Synthetic oligonucleotide
  Antisense strand to SEQ ID NO: 975900
ucuagaaguaaacaaaccu

SEQ ID NO: 975902 - RNA, 19 nt, Artificial Sequence
  Description of Artificial Sequence: Synthetic oligonucleotide
  Sense strand starting at position 1149 of SEQ ID NO: 914072
gaaccagguuuguuuacuu

SEQ ID NO: 975903 - RNA, 19 nt, Artificial Sequence
  Description of Artificial Sequence: Synthetic oligonucleotide
  Antisense strand to SEQ ID NO: 975902
aaguaaacaaaccugguuc

SEQ ID NO: 975904 - RNA, 19 nt, Artificial Sequence
  Description of Artificial Sequence: Synthetic oligonucleotide
  Sense strand starting at position 1159 of SEQ ID NO: 914072
uguuuacuucuagagcuuu

SEQ ID NO: 975905 - RNA, 19 nt, Artificial Sequence
  Description of Artificial Sequence: Synthetic oligonucleotide
  Antisense strand to SEQ ID NO: 975904
aaagcucuagaaguaaaca

SEQ ID NO: 975906 - RNA, 19 nt, Artificial Sequence
  Description of Artificial Sequence: Synthetic oligonucleotide
  Sense strand starting at position 3515 of SEQ ID NO: 914072
ugcucauucuucccagaug

SEQ ID NO: 975907 - RNA, 19 nt, Artificial Sequence
  Description of Artificial Sequence: Synthetic oligonucleotide
  Antisense strand to SEQ ID NO: 975906
caucugggaagaaugagca

SEQ ID NO: 975908 - RNA, 19 nt, Artificial Sequence
  Description of Artificial Sequence: Synthetic oligonucleotide
  Sense strand starting at position 416 of SEQ ID NO: 914072
gugggaguuccaggcuaca

SEQ ID NO: 975909 - RNA, 19 nt, Artificial Sequence
  Description of Artificial Sequence: Synthetic oligonucleotide
  Antisense strand to SEQ ID NO: 975908
uguagccuggaacucccac

SEQ ID NO: 975910 - RNA, 19 nt, Artificial Sequence
  Description of Artificial Sequence: Synthetic oligonucleotide
  Sense strand starting at position 3561 of SEQ ID NO: 914072
auccuugcuuugccaagaa

SEQ ID NO: 975911 - RNA, 19 nt, Artificial Sequence
  Description of Artificial Sequence: Synthetic oligonucleotide
  Antisense strand to SEQ ID NO: 975910
uucuuggcaaagcaaggau

SEQ ID NO: 975912 - RNA, 19 nt, Artificial Sequence
  Description of Artificial Sequence: Synthetic oligonucleotide
  Sense strand starting at position 57 of SEQ ID NO: 914072
ggcauaccucucuguccaa

SEQ ID NO: 975913 - RNA, 19 nt, Artificial Sequence
  Description of Artificial Sequence: Synthetic oligonucleotide
  Antisense strand to SEQ ID NO: 975912
uuggacagagagguaugcc

SEQ ID NO: 975914 - RNA, 19 nt, Artificial Sequence
  Description of Artificial Sequence: Synthetic oligonucleotide
  Sense strand starting at position 2360 of SEQ ID NO: 914072
gucaguggugccugaagaa

SEQ ID NO: 975915 - RNA, 19 nt, Artificial Sequence
  Description of Artificial Sequence: Synthetic oligonucleotide
  Antisense strand to SEQ ID NO: 975914
uucuucaggcaccacugac

SEQ ID NO: 975916 - RNA, 19 nt, Artificial Sequence
  Description of Artificial Sequence: Synthetic oligonucleotide
  Sense strand starting at position 2751 of SEQ ID NO: 914072
acuuguccagguugucaua

SEQ ID NO: 975917 - RNA, 19 nt, Artificial Sequence
  Description of Artificial Sequence: Synthetic oligonucleotide
  Antisense strand to SEQ ID NO: 975916
uaugacaaccuggacaagu

SEQ ID NO: 975918 - RNA, 19 nt, Artificial Sequence
  Description of Artificial Sequence: Synthetic oligonucleotide
  Sense strand starting at position 3396 of SEQ ID NO: 914072
uccaucuccuuguuaguua

SEQ ID NO: 975919 - RNA, 19 nt, Artificial Sequence
  Description of Artificial Sequence: Synthetic oligonucleotide
  Antisense strand to SEQ ID NO: 975918
uaacuaacaaggagaugga

SEQ ID NO: 975920 - RNA, 19 nt, Artificial Sequence
  Description of Artificial Sequence: Synthetic oligonucleotide
  Sense strand starting at position 2764 of SEQ ID NO: 914072
gucauaacauugcuuuagu

SEQ ID NO: 975921 - RNA, 19 nt, Artificial Sequence
  Description of Artificial Sequence: Synthetic oligonucleotide
  Antisense strand to SEQ ID NO: 975920
acuaaagcaauguuaugac

SEQ ID NO: 975922 - RNA, 19 nt, Artificial Sequence
  Description of Artificial Sequence: Synthetic oligonucleotide
  Sense strand starting at position 438 of SEQ ID NO: 914072
agcuaugauuaugccugua

SEQ ID NO: 975923 - RNA, 19 nt, Artificial Sequence
  Description of Artificial Sequence: Synthetic oligonucleotide
  Antisense strand to SEQ ID NO: 975922
uacaggcauaaucauagcu

SEQ ID NO: 975924 - RNA, 19 nt, Artificial Sequence
  Description of Artificial Sequence: Synthetic oligonucleotide
  Sense strand starting at position 3727 of SEQ ID NO: 914072
ggaguuugugugggaguuu

SEQ ID NO: 975925 - RNA, 19 nt, Artificial Sequence
  Description of Artificial Sequence: Synthetic oligonucleotide
  Antisense strand to SEQ ID NO: 975924
aaacucccacacaaacucc

SEQ ID NO: 975926 - RNA, 19 nt, Artificial Sequence
  Description of Artificial Sequence: Synthetic oligonucleotide
  Sense strand starting at position 183 of SEQ ID NO: 914072
augauuaucugccugucga

SEQ ID NO: 975927 - RNA, 19 nt, Artificial Sequence
  Description of Artificial Sequence: Synthetic oligonucleotide
  Antisense strand to SEQ ID NO: 975926
ucgacaggcagauaaucau

SEQ ID NO: 975928 - RNA, 19 nt, Artificial Sequence
  Description of Artificial Sequence: Synthetic oligonucleotide
  Sense strand starting at position 3233 of SEQ ID NO: 914072
augcauucucaguguuuga

SEQ ID NO: 975929 - RNA, 19 nt, Artificial Sequence
  Description of Artificial Sequence: Synthetic oligonucleotide
  Antisense strand to SEQ ID NO: 975928
ucaaacacugagaaugcau

SEQ ID NO: 975930 - RNA, 19 nt, Artificial Sequence
  Description of Artificial Sequence: Synthetic oligonucleotide
  Sense strand starting at position 184 of SEQ ID NO: 914072
ugauuaucugccugucgag

SEQ ID NO: 975931 - RNA, 19 nt, Artificial Sequence
  Description of Artificial Sequence: Synthetic oligonucleotide
  Antisense strand to SEQ ID NO: 975930
cucgacaggcagauaauca

SEQ ID NO: 975932 - RNA, 19 nt, Artificial Sequence
  Description of Artificial Sequence: Synthetic oligonucleotide
  Sense strand starting at position 999 of SEQ ID NO: 914072
ugggauccuuuggacuaaa

SEQ ID NO: 975933 - RNA, 19 nt, Artificial Sequence
  Description of Artificial Sequence: Synthetic oligonucleotide
  Antisense strand to SEQ ID NO: 975932
uuuaguccaaaggauccca

SEQ ID NO: 975934 - RNA, 19 nt, Artificial Sequence
  Description of Artificial Sequence: Synthetic oligonucleotide
  Sense strand starting at position 3394 of SEQ ID NO: 914072
ucuccaucuccuuguuagu

SEQ ID NO: 975935 - RNA, 19 nt, Artificial Sequence
  Description of Artificial Sequence: Synthetic oligonucleotide
  Antisense strand to SEQ ID NO: 975934
acuaacaaggagauggaga

SEQ ID NO: 975936 - RNA, 19 nt, Artificial Sequence
  Description of Artificial Sequence: Synthetic oligonucleotide
  Sense strand starting at position 3232 of SEQ ID NO: 914072
caugcauucucaguguuug

SEQ ID NO: 975937 - RNA, 19 nt, Artificial Sequence
  Description of Artificial Sequence: Synthetic oligonucleotide
  Antisense strand to SEQ ID NO: 975936
caaacacugagaaugcaug

SEQ ID NO: 975938 - RNA, 19 nt, Artificial Sequence
  Description of Artificial Sequence: Synthetic oligonucleotide
  Sense strand starting at position 3725 of SEQ ID NO: 914072
guggaguuugugugggagu

SEQ ID NO: 975939 - RNA, 19 nt, Artificial Sequence
  Description of Artificial Sequence: Synthetic oligonucleotide
  Antisense strand to SEQ ID NO: 975938
acucccacacaaacuccac

SEQ ID NO: 975940 - RNA, 19 nt, Artificial Sequence
  Description of Artificial Sequence: Synthetic oligonucleotide
  Sense strand starting at position 142 of SEQ ID NO: 914072
gcaccaugcuagguguuua

SEQ ID NO: 975941 - RNA, 19 nt, Artificial Sequence
  Description of Artificial Sequence: Synthetic oligonucleotide
  Antisense strand to SEQ ID NO: 975940
uaaacaccuagcauggugc

SEQ ID NO: 975942 - RNA, 19 nt, Artificial Sequence
  Description of Artificial Sequence: Synthetic oligonucleotide
  Sense strand starting at position 1173 of SEQ ID NO: 914072
gcuuuaaacugucucgcca

SEQ ID NO: 975943 - RNA, 19 nt, Artificial Sequence
  Description of Artificial Sequence: Synthetic oligonucleotide
  Antisense strand to SEQ ID NO: 975942
uggcgagacaguuuaaagc

SEQ ID NO: 975944 - RNA, 19 nt, Artificial Sequence
  Description of Artificial Sequence: Synthetic oligonucleotide
  Sense strand starting at position 2254 of SEQ ID NO: 914072
ggagccuccugagagagua

SEQ ID NO: 975945 - RNA, 19 nt, Artificial Sequence
  Description of Artificial Sequence: Synthetic oligonucleotide
  Antisense strand to SEQ ID NO: 975944
uacucucucaggaggcucc

SEQ ID NO: 975946 - RNA, 19 nt, Artificial Sequence
  Description of Artificial Sequence: Synthetic oligonucleotide
  Sense strand starting at position 2142 of SEQ ID NO: 914072
cagugaaugucucaaccag

SEQ ID NO: 975947 - RNA, 19 nt, Artificial Sequence
  Description of Artificial Sequence: Synthetic oligonucleotide
  Antisense strand to SEQ ID NO: 975946
cugguugagacauucacug

SEQ ID NO: 975948 - RNA, 19 nt, Artificial Sequence
  Description of Artificial Sequence: Synthetic oligonucleotide
  Sense strand starting at position 998 of SEQ ID NO: 914072
cugggauccuuuggacuaa

SEQ ID NO: 975949 - RNA, 19 nt, Artificial Sequence
  Description of Artificial Sequence: Synthetic oligonucleotide
  Antisense strand to SEQ ID NO: 975948
uuaguccaaaggaucccag

SEQ ID NO: 975950 - RNA, 19 nt, Artificial Sequence
  Description of Artificial Sequence: Synthetic oligonucleotide
  Sense strand starting at position 2091 of SEQ ID NO: 914073
cugaaaucagcacauagua

SEQ ID NO: 975951 - RNA, 19 nt, Artificial Sequence
  Description of Artificial Sequence: Synthetic oligonucleotide
  Antisense strand to SEQ ID NO: 975950
uacuaugugcugauuucag

SEQ ID NO: 975952 - RNA, 19 nt, Artificial Sequence
  Description of Artificial Sequence: Synthetic oligonucleotide
  Sense strand starting at position 2683 of SEQ ID NO: 914073
cucaaaugaguuuaaugua

SEQ ID NO: 975953 - RNA, 19 nt, Artificial Sequence
  Description of Artificial Sequence: Synthetic oligonucleotide
  Antisense strand to SEQ ID NO: 975952
uacauuaaacucauuugag

SEQ ID NO: 975954 - RNA, 19 nt, Artificial Sequence
  Description of Artificial Sequence: Synthetic oligonucleotide
  Sense strand starting at position 2314 of SEQ ID NO: 914073
caaugaaaucagggagcuu

SEQ ID NO: 975955 - RNA, 19 nt, Artificial Sequence
  Description of Artificial Sequence: Synthetic oligonucleotide
  Antisense strand to SEQ ID NO: 975954
aagcucccugauuucauug

SEQ ID NO: 975956 - RNA, 19 nt, Artificial Sequence
  Description of Artificial Sequence: Synthetic oligonucleotide
  Sense strand starting at position 3325 of SEQ ID NO: 914073
caagcauguccagaugaug

SEQ ID NO: 975957 - RNA, 19 nt, Artificial Sequence
  Description of Artificial Sequence: Synthetic oligonucleotide
  Antisense strand to SEQ ID NO: 975956
caucaucuggacaugcuug

SEQ ID NO: 975958 - RNA, 19 nt, Artificial Sequence
  Description of Artificial Sequence: Synthetic oligonucleotide
  Sense strand starting at position 2106 of SEQ ID NO: 914073
aguaaugcuggauaaguga

SEQ ID NO: 975959 - RNA, 19 nt, Artificial Sequence
  Description of Artificial Sequence: Synthetic oligonucleotide
  Antisense strand to SEQ ID NO: 975958
ucacuuauccagcauuacu

SEQ ID NO: 975960 - RNA, 19 nt, Artificial Sequence
  Description of Artificial Sequence: Synthetic oligonucleotide
  Sense strand starting at position 1029 of SEQ ID NO: 914073
gguucuguaaacgagaaug

SEQ ID NO: 975961 - RNA, 19 nt, Artificial Sequence
  Description of Artificial Sequence: Synthetic oligonucleotide
  Antisense strand to SEQ ID NO: 975960
cauucucguuuacagaacc

SEQ ID NO: 975962 - RNA, 19 nt, Artificial Sequence
  Description of Artificial Sequence: Synthetic oligonucleotide
  Sense strand starting at position 1206 of SEQ ID NO: 914073
cgaggaauguucccagaaa

SEQ ID NO: 975963 - RNA, 19 nt, Artificial Sequence
  Description of Artificial Sequence: Synthetic oligonucleotide
  Antisense strand to SEQ ID NO: 975962
uuucugggaacauuccucg

SEQ ID NO: 975964 - RNA, 19 nt, Artificial Sequence
  Description of Artificial Sequence: Synthetic oligonucleotide
  Sense strand starting at position 3638 of SEQ ID NO: 914073
auaggauugacuggcacau

SEQ ID NO: 975965 - RNA, 19 nt, Artificial Sequence
  Description of Artificial Sequence: Synthetic oligonucleotide
  Antisense strand to SEQ ID NO: 975964
augugccagucaauccuau

SEQ ID NO: 975966 - RNA, 19 nt, Artificial Sequence
  Description of Artificial Sequence: Synthetic oligonucleotide
  Sense strand starting at position 3627 of SEQ ID NO: 914073
uguaccaguccauaggauu

SEQ ID NO: 975967 - RNA, 19 nt, Artificial Sequence
  Description of Artificial Sequence: Synthetic oligonucleotide
  Antisense strand to SEQ ID NO: 975966
aauccuauggacugguaca

SEQ ID NO: 975968 - RNA, 19 nt, Artificial Sequence
  Description of Artificial Sequence: Synthetic oligonucleotide
  Sense strand starting at position 991 of SEQ ID NO: 914073
guuccaaauguggaucuca

SEQ ID NO: 975969 - RNA, 19 nt, Artificial Sequence
  Description of Artificial Sequence: Synthetic oligonucleotide
  Antisense strand to SEQ ID NO: 975968
ugagauccacauuuggaac

SEQ ID NO: 975970 - RNA, 19 nt, Artificial Sequence
  Description of Artificial Sequence: Synthetic oligonucleotide
  Sense strand starting at position 2104 of SEQ ID NO: 914073
auaguaaugcuggauaagu

SEQ ID NO: 975971 - RNA, 19 nt, Artificial Sequence
  Description of Artificial Sequence: Synthetic oligonucleotide
  Antisense strand to SEQ ID NO: 975970
acuuauccagcauuacuau

SEQ ID NO: 975972 - RNA, 19 nt, Artificial Sequence
  Description of Artificial Sequence: Synthetic oligonucleotide
  Sense strand starting at position 2259 of SEQ ID NO: 914073
cuggaugaccuuggaugua

SEQ ID NO: 975973 - RNA, 19 nt, Artificial Sequence
  Description of Artificial Sequence: Synthetic oligonucleotide
  Antisense strand to SEQ ID NO: 975972
uacauccaaggucauccag

SEQ ID NO: 975974 - RNA, 19 nt, Artificial Sequence
  Description of Artificial Sequence: Synthetic oligonucleotide
  Sense strand starting at position 760 of SEQ ID NO: 914073
gugauagcacaauaagcau

SEQ ID NO: 975975 - RNA, 19 nt, Artificial Sequence
  Description of Artificial Sequence: Synthetic oligonucleotide
  Antisense strand to SEQ ID NO: 975974
augcuuauugugcuaucac

SEQ ID NO: 975976 - RNA, 19 nt, Artificial Sequence
  Description of Artificial Sequence: Synthetic oligonucleotide
  Sense strand starting at position 738 of SEQ ID NO: 914073
gacaacgaacuuugucaga

SEQ ID NO: 975977 - RNA, 19 nt, Artificial Sequence
  Description of Artificial Sequence: Synthetic oligonucleotide
  Antisense strand to SEQ ID NO: 975976
ucugacaaaguucguuguc

SEQ ID NO: 975978 - RNA, 19 nt, Artificial Sequence
  Description of Artificial Sequence: Synthetic oligonucleotide
  Sense strand starting at position 3441 of SEQ ID NO: 914073
acaggacuuuguucuggau

SEQ ID NO: 975979 - RNA, 19 nt, Artificial Sequence
  Description of Artificial Sequence: Synthetic oligonucleotide
  Antisense strand to SEQ ID NO: 975978
auccagaacaaaguccugu

SEQ ID NO: 975980 - RNA, 19 nt, Artificial Sequence
  Description of Artificial Sequence: Synthetic oligonucleotide
  Sense strand starting at position 2103 of SEQ ID NO: 914073
cauaguaaugcuggauaag

SEQ ID NO: 975981 - RNA, 19 nt, Artificial Sequence
  Description of Artificial Sequence: Synthetic oligonucleotide
  Antisense strand to SEQ ID NO: 975980
cuuauccagcauuacuaug

SEQ ID NO: 975982 - RNA, 19 nt, Artificial Sequence
  Description of Artificial Sequence: Synthetic oligonucleotide
  Sense strand starting at position 3290 of SEQ ID NO: 914073
gugagagccacucauguga

SEQ ID NO: 975983 - RNA, 19 nt, Artificial Sequence
  Description of Artificial Sequence: Synthetic oligonucleotide
  Antisense strand to SEQ ID NO: 975982
ucacaugaguggcucucac

SEQ ID NO: 975984 - RNA, 19 nt, Artificial Sequence
  Description of Artificial Sequence: Synthetic oligonucleotide
  Sense strand starting at position 2734 of SEQ ID NO: 914073
gugacaaaucucuguauaa

SEQ ID NO: 975985 - RNA, 19 nt, Artificial Sequence
  Description of Artificial Sequence: Synthetic oligonucleotide
  Antisense strand to SEQ ID NO: 975984
uuauacagagauuugucac

SEQ ID NO: 975986 - RNA, 19 nt, Artificial Sequence
  Description of Artificial Sequence: Synthetic oligonucleotide
  Sense strand starting at position 1831 of SEQ ID NO: 914073
guucuuucucaagacaguu

SEQ ID NO: 975987 - RNA, 19 nt, Artificial Sequence
  Description of Artificial Sequence: Synthetic oligonucleotide
  Antisense strand to SEQ ID NO: 975986
aacugucuugagaaagaac

SEQ ID NO: 975988 - RNA, 19 nt, Artificial Sequence
  Description of Artificial Sequence: Synthetic oligonucleotide
  Sense strand starting at position 1413 of SEQ ID NO: 914073
gaugccugucaaugagaca

SEQ ID NO: 975989 - RNA, 19 nt, Artificial Sequence
  Description of Artificial Sequence: Synthetic oligonucleotide
  Antisense strand to SEQ ID NO: 975988
ugucucauugacaggcauc

SEQ ID NO: 975990 - RNA, 19 nt, Artificial Sequence
  Description of Artificial Sequence: Synthetic oligonucleotide
  Sense strand starting at position 2797 of SEQ ID NO: 914073
agagucaucaugcaggcau

SEQ ID NO: 975991 - RNA, 19 nt, Artificial Sequence
  Description of Artificial Sequence: Synthetic oligonucleotide
  Antisense strand to SEQ ID NO: 975990
augccugcaugaugacucu

SEQ ID NO: 975992 - RNA, 19 nt, Artificial Sequence
  Description of Artificial Sequence: Synthetic oligonucleotide
  Sense strand starting at position 898 of SEQ ID NO: 914073
agaggagugauguguccag

SEQ ID NO: 975993 - RNA, 19 nt, Artificial Sequence
  Description of Artificial Sequence: Synthetic oligonucleotide
  Antisense strand to SEQ ID NO: 975992
cuggacacaucacuccucu

SEQ ID NO: 975994 - RNA, 19 nt, Artificial Sequence
  Description of Artificial Sequence: Synthetic oligonucleotide
  Sense strand starting at position 1028 of SEQ ID NO: 914073
agguucuguaaacgagaau

SEQ ID NO: 975995 - RNA, 19 nt, Artificial Sequence
  Description of Artificial Sequence: Synthetic oligonucleotide
  Antisense strand to SEQ ID NO: 975994
auucucguuuacagaaccu

SEQ ID NO: 975996 - RNA, 19 nt, Artificial Sequence
  Description of Artificial Sequence: Synthetic oligonucleotide
  Sense strand starting at position 3202 of SEQ ID NO: 914073
gcaagagcaucccugaaca

SEQ ID NO: 975997 - RNA, 19 nt, Artificial Sequence
  Description of Artificial Sequence: Synthetic oligonucleotide
  Antisense strand to SEQ ID NO: 975996
uguucagggaugcucuugc

SEQ ID NO: 975998 - RNA, 19 nt, Artificial Sequence
  Description of Artificial Sequence: Synthetic oligonucleotide
  Sense strand starting at position 2733 of SEQ ID NO: 914073
ugugacaaaucucuguaua

SEQ ID NO: 975999 - RNA, 19 nt, Artificial Sequence
  Description of Artificial Sequence: Synthetic oligonucleotide
  Antisense strand to SEQ ID NO: 975998
uauacagagauuugucaca

SEQ ID NO: 976000 - RNA, 19 nt, Artificial Sequence
  Description of Artificial Sequence: Synthetic oligonucleotide
  Sense strand starting at position 673 of SEQ ID NO: 914073
gaagucuugcugggacaua

SEQ ID NO: 976001 - RNA, 19 nt, Artificial Sequence
  Description of Artificial Sequence: Synthetic oligonucleotide
  Antisense strand to SEQ ID NO: 976000
uaugucccagcaagacuuc

SEQ ID NO: 976002 - RNA, 19 nt, Artificial Sequence
  Description of Artificial Sequence: Synthetic oligonucleotide
  Sense strand starting at position 885 of SEQ ID NO: 914073
augccaugugcucagagga

SEQ ID NO: 976003 - RNA, 19 nt, Artificial Sequence
  Description of Artificial Sequence: Synthetic oligonucleotide
  Antisense strand to SEQ ID NO: 976002
uccucugagcacauggcau

SEQ ID NO: 976004 - RNA, 19 nt, Artificial Sequence
  Description of Artificial Sequence: Synthetic oligonucleotide
  Sense strand starting at position 841 of SEQ ID NO: 914073
aucagaggguucuugccaa

SEQ ID NO: 976005 - RNA, 19 nt, Artificial Sequence
  Description of Artificial Sequence: Synthetic oligonucleotide
  Antisense strand to SEQ ID NO: 976004
uuggcaagaacccucugau

SEQ ID NO: 976006 - RNA, 19 nt, Artificial Sequence
  Description of Artificial Sequence: Synthetic oligonucleotide
  Sense strand starting at position 3881 of SEQ ID NO: 914073
cacgcaugccaaggagaaa

SEQ ID NO: 976007 - RNA, 19 nt, Artificial Sequence
  Description of Artificial Sequence: Synthetic oligonucleotide
  Antisense strand to SEQ ID NO: 976006
uuucuccuuggcaugcgug

SEQ ID NO: 976008 - RNA, 19 nt, Artificial Sequence
  Description of Artificial Sequence: Synthetic oligonucleotide
  Sense strand starting at position 2722 of SEQ ID NO: 914073
agaugucuaugugugacaa

SEQ ID NO: 976009 - RNA, 19 nt, Artificial Sequence
  Description of Artificial Sequence: Synthetic oligonucleotide
  Antisense strand to SEQ ID NO: 976008
uugucacacauagacaucu

SEQ ID NO: 976010 - RNA, 19 nt, Artificial Sequence
  Description of Artificial Sequence: Synthetic oligonucleotide
  Sense strand starting at position 1817 of SEQ ID NO: 914073
ugacucauucccgaguucu

SEQ ID NO: 976011 - RNA, 19 nt, Artificial Sequence
  Description of Artificial Sequence: Synthetic oligonucleotide
  Antisense strand to SEQ ID NO: 976010
agaacucgggaaugaguca

SEQ ID NO: 976012 - RNA, 19 nt, Artificial Sequence
  Description of Artificial Sequence: Synthetic oligonucleotide
  Sense strand starting at position 3249 of SEQ ID NO: 914073
gagucugucagguggauga

SEQ ID NO: 976013 - RNA, 19 nt, Artificial Sequence
  Description of Artificial Sequence: Synthetic oligonucleotide
  Antisense strand to SEQ ID NO: 976012
ucauccaccugacagacuc

SEQ ID NO: 976014 - RNA, 19 nt, Artificial Sequence
  Description of Artificial Sequence: Synthetic oligonucleotide
  Sense strand starting at position 2723 of SEQ ID NO: 914073
gaugucuaugugugacaaa

SEQ ID NO: 976015 - RNA, 19 nt, Artificial Sequence
  Description of Artificial Sequence: Synthetic oligonucleotide
  Antisense strand to SEQ ID NO: 976014
uuugucacacauagacauc

SEQ ID NO: 976016 - RNA, 19 nt, Artificial Sequence
  Description of Artificial Sequence: Synthetic oligonucleotide
  Sense strand starting at position 1308 of SEQ ID NO: 914073
ccacgucaugcucagggau

SEQ ID NO: 976017 - RNA, 19 nt, Artificial Sequence
  Description of Artificial Sequence: Synthetic oligonucleotide
  Antisense strand to SEQ ID NO: 976016
aucccugagcaugacgugg

SEQ ID NO: 976018 - RNA, 19 nt, Artificial Sequence
  Description of Artificial Sequence: Synthetic oligonucleotide
  Sense strand starting at position 672 of SEQ ID NO: 914073
ugaagucuugcugggacau

SEQ ID NO: 976019 - RNA, 19 nt, Artificial Sequence
  Description of Artificial Sequence: Synthetic oligonucleotide
  Antisense strand to SEQ ID NO: 976018
augucccagcaagacuuca

SEQ ID NO: 976020 - RNA, 19 nt, Artificial Sequence
  Description of Artificial Sequence: Synthetic oligonucleotide
  Sense strand starting at position 2717 of SEQ ID NO: 914073
aauguagaugucuaugugu

SEQ ID NO: 976021 - RNA, 19 nt, Artificial Sequence
  Description of Artificial Sequence: Synthetic oligonucleotide
  Antisense strand to SEQ ID NO: 976020
acacauagacaucuacauu

SEQ ID NO: 976022 - RNA, 19 nt, Artificial Sequence
  Description of Artificial Sequence: Synthetic oligonucleotide
  Sense strand starting at position 2166 of SEQ ID NO: 914073
ucacuuguuuaauuggagu

SEQ ID NO: 976023 - RNA, 19 nt, Artificial Sequence
  Description of Artificial Sequence: Synthetic oligonucleotide
  Antisense strand to SEQ ID NO: 976022
acuccaauuaaacaaguga

SEQ ID NO: 976024 - RNA, 19 nt, Artificial Sequence
  Description of Artificial Sequence: Synthetic oligonucleotide
  Sense strand starting at position 2258 of SEQ ID NO: 914073
gcuggaugaccuuggaugu

SEQ ID NO: 976025 - RNA, 19 nt, Artificial Sequence
  Description of Artificial Sequence: Synthetic oligonucleotide
  Antisense strand to SEQ ID NO: 976024
acauccaaggucauccagc

SEQ ID NO: 976026 - RNA, 19 nt, Artificial Sequence
  Description of Artificial Sequence: Synthetic oligonucleotide
  Sense strand starting at position 747 of SEQ ID NO: 914073
cuuugucagaaacgugaua

SEQ ID NO: 976027 - RNA, 19 nt, Artificial Sequence
  Description of Artificial Sequence: Synthetic oligonucleotide
  Antisense strand to SEQ ID NO: 976026
uaucacguuucugacaaag

SEQ ID NO: 976028 - RNA, 19 nt, Artificial Sequence
  Description of Artificial Sequence: Synthetic oligonucleotide
  Sense strand starting at position 1562 of SEQ ID NO: 914073
gggugacuuguccauggcu

SEQ ID NO: 976029 - RNA, 19 nt, Artificial Sequence
  Description of Artificial Sequence: Synthetic oligonucleotide
  Antisense strand to SEQ ID NO: 976028
agccauggacaagucaccc

SEQ ID NO: 976030 - RNA, 19 nt, Artificial Sequence
  Description of Artificial Sequence: Synthetic oligonucleotide
  Sense strand starting at position 408 of SEQ ID NO: 914074
caagcauguccagaugaug

SEQ ID NO: 976031 - RNA, 19 nt, Artificial Sequence
  Description of Artificial Sequence: Synthetic oligonucleotide
  Antisense strand to SEQ ID NO: 976030
caucaucuggacaugcuug

SEQ ID NO: 976032 - RNA, 19 nt, Artificial Sequence
  Description of Artificial Sequence: Synthetic oligonucleotide
  Sense strand starting at position 2663 of SEQ ID NO: 914074
gaucuuuagggugaaagcu

SEQ ID NO: 976033 - RNA, 19 nt, Artificial Sequence
  Description of Artificial Sequence: Synthetic oligonucleotide
  Antisense strand to SEQ ID NO: 976032
agcuuucacccuaaagauc

SEQ ID NO: 976034 - RNA, 19 nt, Artificial Sequence
  Description of Artificial Sequence: Synthetic oligonucleotide
  Sense strand starting at position 2483 of SEQ ID NO: 914074
gucguuguuaaucuuguuu

SEQ ID NO: 976035 - RNA, 19 nt, Artificial Sequence
  Description of Artificial Sequence: Synthetic oligonucleotide
  Antisense strand to SEQ ID NO: 976034
aaacaagauuaacaacgac

SEQ ID NO: 976036 - RNA, 19 nt, Artificial Sequence
  Description of Artificial Sequence: Synthetic oligonucleotide
  Sense strand starting at position 721 of SEQ ID NO: 914074
auaggauugacuggcacau

SEQ ID NO: 976037 - RNA, 19 nt, Artificial Sequence
  Description of Artificial Sequence: Synthetic oligonucleotide
  Antisense strand to SEQ ID NO: 976036
augugccagucaauccuau

SEQ ID NO: 976038 - RNA, 19 nt, Artificial Sequence
  Description of Artificial Sequence: Synthetic oligonucleotide
  Sense strand starting at position 710 of SEQ ID NO: 914074
uguaccaguccauaggauu

SEQ ID NO: 976039 - RNA, 19 nt, Artificial Sequence
  Description of Artificial Sequence: Synthetic oligonucleotide
  Antisense strand to SEQ ID NO: 976038
aauccuauggacugguaca

SEQ ID NO: 976040 - RNA, 19 nt, Artificial Sequence
  Description of Artificial Sequence: Synthetic oligonucleotide
  Sense strand starting at position 2839 of SEQ ID NO: 914074
uaugaaucuguugaugguu

SEQ ID NO: 976041 - RNA, 19 nt, Artificial Sequence
  Description of Artificial Sequence: Synthetic oligonucleotide
  Antisense strand to SEQ ID NO: 976040
aaccaucaacagauucaua

SEQ ID NO: 976042 - RNA, 19 nt, Artificial Sequence
  Description of Artificial Sequence: Synthetic oligonucleotide
  Sense strand starting at position 2093 of SEQ ID NO: 914074
ggcagacuugccuacuaaa

SEQ ID NO: 976043 - RNA, 19 nt, Artificial Sequence
  Description of Artificial Sequence: Synthetic oligonucleotide
  Antisense strand to SEQ ID NO: 976042
uuuaguaggcaagucugcc

SEQ ID NO: 976044 - RNA, 19 nt, Artificial Sequence
  Description of Artificial Sequence: Synthetic oligonucleotide
  Sense strand starting at position 2657 of SEQ ID NO: 914074
ugcugagaucuuuagggug

SEQ ID NO: 976045 - RNA, 19 nt, Artificial Sequence
  Description of Artificial Sequence: Synthetic oligonucleotide
  Antisense strand to SEQ ID NO: 976044
cacccuaaagaucucagca

SEQ ID NO: 976046 - RNA, 19 nt, Artificial Sequence
  Description of Artificial Sequence: Synthetic oligonucleotide
  Sense strand starting at position 524 of SEQ ID NO: 914074
acaggacuuuguucuggau

SEQ ID NO: 976047 - RNA, 19 nt, Artificial Sequence
  Description of Artificial Sequence: Synthetic oligonucleotide
  Antisense strand to SEQ ID NO: 976046
auccagaacaaaguccugu

SEQ ID NO: 976048 - RNA, 19 nt, Artificial Sequence
  Description of Artificial Sequence: Synthetic oligonucleotide
  Sense strand starting at position 2672 of SEQ ID NO: 914074
ggugaaagcucacccuaaa

SEQ ID NO: 976049 - RNA, 19 nt, Artificial Sequence
  Description of Artificial Sequence: Synthetic oligonucleotide
  Antisense strand to SEQ ID NO: 976048
uuuagggugagcuuucacc

SEQ ID NO: 976050 - RNA, 19 nt, Artificial Sequence
  Description of Artificial Sequence: Synthetic oligonucleotide
  Sense strand starting at position 373 of SEQ ID NO: 914074
gugagagccacucauguga

SEQ ID NO: 976051 - RNA, 19 nt, Artificial Sequence
  Description of Artificial Sequence: Synthetic oligonucleotide
  Antisense strand to SEQ ID NO: 976050
ucacaugaguggcucucac

SEQ ID NO: 976052 - RNA, 19 nt, Artificial Sequence
  Description of Artificial Sequence: Synthetic oligonucleotide
  Sense strand starting at position 2781 of SEQ ID NO: 914074
auggacaagucacuguauu

SEQ ID NO: 976053 - RNA, 19 nt, Artificial Sequence
  Description of Artificial Sequence: Synthetic oligonucleotide
  Antisense strand to SEQ ID NO: 976052
aauacagugacuuguccau

SEQ ID NO: 976054 - RNA, 19 nt, Artificial Sequence
  Description of Artificial Sequence: Synthetic oligonucleotide
  Sense strand starting at position 2687 of SEQ ID NO: 914074
uaaauaugugcucagagca

SEQ ID NO: 976055 - RNA, 19 nt, Artificial Sequence
  Description of Artificial Sequence: Synthetic oligonucleotide
  Antisense strand to SEQ ID NO: 976054
ugcucugagcacauauuua

SEQ ID NO: 976056 - RNA, 19 nt, Artificial Sequence
  Description of Artificial Sequence: Synthetic oligonucleotide
  Sense strand starting at position 2844 of SEQ ID NO: 914074
aucuguugaugguuugaaa

SEQ ID NO: 976057 - RNA, 19 nt, Artificial Sequence
  Description of Artificial Sequence: Synthetic oligonucleotide
  Antisense strand to SEQ ID NO: 976056
uuucaaaccaucaacagau

SEQ ID NO: 976058 - RNA, 19 nt, Artificial Sequence
  Description of Artificial Sequence: Synthetic oligonucleotide
  Sense strand starting at position 2782 of SEQ ID NO: 914074
uggacaagucacuguauug

SEQ ID NO: 976059 - RNA, 19 nt, Artificial Sequence
  Description of Artificial Sequence: Synthetic oligonucleotide
  Antisense strand to SEQ ID NO: 976058
caauacagugacuugucca

SEQ ID NO: 976060 - RNA, 19 nt, Artificial Sequence
  Description of Artificial Sequence: Synthetic oligonucleotide
  Sense strand starting at position 285 of SEQ ID NO: 914074
gcaagagcaucccugaaca

SEQ ID NO: 976061 - RNA, 19 nt, Artificial Sequence
  Description of Artificial Sequence: Synthetic oligonucleotide
  Antisense strand to SEQ ID NO: 976060
uguucagggaugcucuugc

SEQ ID NO: 976062 - RNA, 19 nt, Artificial Sequence
  Description of Artificial Sequence: Synthetic oligonucleotide
  Sense strand starting at position 1988 of SEQ ID NO: 914074
agugaucuguuaguggaag

SEQ ID NO: 976063 - RNA, 19 nt, Artificial Sequence
  Description of Artificial Sequence: Synthetic oligonucleotide
  Antisense strand to SEQ ID NO: 976062
cuuccacuaacagaucacu

SEQ ID NO: 976064 - RNA, 19 nt, Artificial Sequence
  Description of Artificial Sequence: Synthetic oligonucleotide
  Sense strand starting at position 2842 of SEQ ID NO: 914074
gaaucuguugaugguuuga

SEQ ID NO: 976065 - RNA, 19 nt, Artificial Sequence
  Description of Artificial Sequence: Synthetic oligonucleotide
  Antisense strand to SEQ ID NO: 976064
ucaaaccaucaacagauuc

SEQ ID NO: 976066 - RNA, 19 nt, Artificial Sequence
  Description of Artificial Sequence: Synthetic oligonucleotide
  Sense strand starting at position 1094 of SEQ ID NO: 914074
aauggugucuucccagaac

SEQ ID NO: 976067 - RNA, 19 nt, Artificial Sequence
  Description of Artificial Sequence: Synthetic oligonucleotide
  Antisense strand to SEQ ID NO: 976066
guucugggaagacaccauu

SEQ ID NO: 976068 - RNA, 19 nt, Artificial Sequence
  Description of Artificial Sequence: Synthetic oligonucleotide
  Sense strand starting at position 2504 of SEQ ID NO: 914074
ugcagaugccuggaguuga

SEQ ID NO: 976069 - RNA, 19 nt, Artificial Sequence
  Description of Artificial Sequence: Synthetic oligonucleotide
  Antisense strand to SEQ ID NO: 976068
ucaacuccaggcaucugca

SEQ ID NO: 976070 - RNA, 19 nt, Artificial Sequence
  Description of Artificial Sequence: Synthetic oligonucleotide
  Sense strand starting at position 964 of SEQ ID NO: 914074
cacgcaugccaaggagaaa

SEQ ID NO: 976071 - RNA, 19 nt, Artificial Sequence
  Description of Artificial Sequence: Synthetic oligonucleotide
  Antisense strand to SEQ ID NO: 976070
uuucuccuuggcaugcgug

SEQ ID NO: 976072 - RNA, 19 nt, Artificial Sequence
  Description of Artificial Sequence: Synthetic oligonucleotide
  Sense strand starting at position 332 of SEQ ID NO: 914074
gagucugucagguggauga

SEQ ID NO: 976073 - RNA, 19 nt, Artificial Sequence
  Description of Artificial Sequence: Synthetic oligonucleotide
  Antisense strand to SEQ ID NO: 976072
ucauccaccugacagacuc

SEQ ID NO: 976074 - RNA, 19 nt, Artificial Sequence
  Description of Artificial Sequence: Synthetic oligonucleotide
  Sense strand starting at position 2684 of SEQ ID NO: 914074
cccuaaauaugugcucaga

SEQ ID NO: 976075 - RNA, 19 nt, Artificial Sequence
  Description of Artificial Sequence: Synthetic oligonucleotide
  Antisense strand to SEQ ID NO: 976074
ucugagcacauauuuaggg

SEQ ID NO: 976076 - RNA, 19 nt, Artificial Sequence
  Description of Artificial Sequence: Synthetic oligonucleotide
  Sense strand starting at position 2091 of SEQ ID NO: 914074
gaggcagacuugccuacua

SEQ ID NO: 976077 - RNA, 19 nt, Artificial Sequence
  Description of Artificial Sequence: Synthetic oligonucleotide
  Antisense strand to SEQ ID NO: 976076
uaguaggcaagucugccuc

SEQ ID NO: 976078 - RNA, 19 nt, Artificial Sequence
  Description of Artificial Sequence: Synthetic oligonucleotide
  Sense strand starting at position 2250 of SEQ ID NO: 914074
cugagaugaugcguuuaaa

SEQ ID NO: 976079 - RNA, 19 nt, Artificial Sequence
  Description of Artificial Sequence: Synthetic oligonucleotide
  Antisense strand to SEQ ID NO: 976078
uuuaaacgcaucaucucag

SEQ ID NO: 976080 - RNA, 19 nt, Artificial Sequence
  Description of Artificial Sequence: Synthetic oligonucleotide
  Sense strand starting at position 1990 of SEQ ID NO: 914074
ugaucuguuaguggaaggu

SEQ ID NO: 976081 - RNA, 19 nt, Artificial Sequence
  Description of Artificial Sequence: Synthetic oligonucleotide
  Antisense strand to SEQ ID NO: 976080
accuuccacuaacagauca

SEQ ID NO: 976082 - RNA, 19 nt, Artificial Sequence
  Description of Artificial Sequence: Synthetic oligonucleotide
  Sense strand starting at position 2576 of SEQ ID NO: 914074
acuggaauggcgggauguu

SEQ ID NO: 976083 - RNA, 19 nt, Artificial Sequence
  Description of Artificial Sequence: Synthetic oligonucleotide
  Antisense strand to SEQ ID NO: 976082
aacaucccgccauuccagu

SEQ ID NO: 976084 - RNA, 19 nt, Artificial Sequence
  Description of Artificial Sequence: Synthetic oligonucleotide
  Sense strand starting at position 734 of SEQ ID NO: 914074
gcacaugacuuugcauaca

SEQ ID NO: 976085 - RNA, 19 nt, Artificial Sequence
  Description of Artificial Sequence: Synthetic oligonucleotide
  Antisense strand to SEQ ID NO: 976084
uguaugcaaagucaugugc

SEQ ID NO: 976086 - RNA, 19 nt, Artificial Sequence
  Description of Artificial Sequence: Synthetic oligonucleotide
  Sense strand starting at position 3109 of SEQ ID NO: 914074
aggcaauguccaggucaca

SEQ ID NO: 976087 - RNA, 19 nt, Artificial Sequence
  Description of Artificial Sequence: Synthetic oligonucleotide
  Antisense strand to SEQ ID NO: 976086
ugugaccuggacauugccu

SEQ ID NO: 976088 - RNA, 19 nt, Artificial Sequence
  Description of Artificial Sequence: Synthetic oligonucleotide
  Sense strand starting at position 2058 of SEQ ID NO: 914074
ugaucucuccucugcagau

SEQ ID NO: 976089 - RNA, 19 nt, Artificial Sequence
  Description of Artificial Sequence: Synthetic oligonucleotide
  Antisense strand to SEQ ID NO: 976088
aucugcagaggagagauca

SEQ ID NO: 976090 - RNA, 19 nt, Artificial Sequence
  Description of Artificial Sequence: Synthetic oligonucleotide
  Sense strand starting at position 627 of SEQ ID NO: 914074
gauugaguccugugccaag

SEQ ID NO: 976091 - RNA, 19 nt, Artificial Sequence
  Description of Artificial Sequence: Synthetic oligonucleotide
  Antisense strand to SEQ ID NO: 976090
cuuggcacaggacucaauc

SEQ ID NO: 976092 - RNA, 19 nt, Artificial Sequence
  Description of Artificial Sequence: Synthetic oligonucleotide
  Sense strand starting at position 272 of SEQ ID NO: 914074
aguacugcccuaugcaaga

SEQ ID NO: 976093 - RNA, 19 nt, Artificial Sequence
  Description of Artificial Sequence: Synthetic oligonucleotide
  Antisense strand to SEQ ID NO: 976092
ucuugcauagggcaguacu

SEQ ID NO: 976094 - RNA, 19 nt, Artificial Sequence
  Description of Artificial Sequence: Synthetic oligonucleotide
  Sense strand starting at position 564 of SEQ ID NO: 914074
gcacauaagccuugcaaac

SEQ ID NO: 976095 - RNA, 19 nt, Artificial Sequence
  Description of Artificial Sequence: Synthetic oligonucleotide
  Antisense strand to SEQ ID NO: 976094
guuugcaaggcuuaugugc

SEQ ID NO: 976096 - RNA, 19 nt, Artificial Sequence
  Description of Artificial Sequence: Synthetic oligonucleotide
  Sense strand starting at position 2296 of SEQ ID NO: 914074
uccuccuaucuguguuaca

SEQ ID NO: 976097 - RNA, 19 nt, Artificial Sequence
  Description of Artificial Sequence: Synthetic oligonucleotide
  Antisense strand to SEQ ID NO: 976096
uguaacacagauaggagga

SEQ ID NO: 976098 - RNA, 19 nt, Artificial Sequence
  Description of Artificial Sequence: Synthetic oligonucleotide
  Sense strand starting at position 2491 of SEQ ID NO: 914074
uaaucuuguuuguugcaga

SEQ ID NO: 976099 - RNA, 19 nt, Artificial Sequence
  Description of Artificial Sequence: Synthetic oligonucleotide
  Antisense strand to SEQ ID NO: 976098
ucugcaacaaacaagauua

SEQ ID NO: 976100 - RNA, 19 nt, Artificial Sequence
  Description of Artificial Sequence: Synthetic oligonucleotide
  Sense strand starting at position 508 of SEQ ID NO: 914074
ugugcucagcccugaaaca

SEQ ID NO: 976101 - RNA, 19 nt, Artificial Sequence
  Description of Artificial Sequence: Synthetic oligonucleotide
  Antisense strand to SEQ ID NO: 976100
uguuucagggcugagcaca

SEQ ID NO: 976102 - RNA, 19 nt, Artificial Sequence
  Description of Artificial Sequence: Synthetic oligonucleotide
  Sense strand starting at position 2620 of SEQ ID NO: 914074
cucucuuuggugugugaag

SEQ ID NO: 976103 - RNA, 19 nt, Artificial Sequence
  Description of Artificial Sequence: Synthetic oligonucleotide
  Antisense strand to SEQ ID NO: 976102
cuucacacaccaaagagag

SEQ ID NO: 976104 - RNA, 19 nt, Artificial Sequence
  Description of Artificial Sequence: Synthetic oligonucleotide
  Sense strand starting at position 2737 of SEQ ID NO: 914074
uauugaagcucagagaaag

SEQ ID NO: 976105 - RNA, 19 nt, Artificial Sequence
  Description of Artificial Sequence: Synthetic oligonucleotide
  Antisense strand to SEQ ID NO: 976104
cuuucucugagcuucaaua

SEQ ID NO: 976106 - RNA, 19 nt, Artificial Sequence
  Description of Artificial Sequence: Synthetic oligonucleotide
  Sense strand starting at position 2487 of SEQ ID NO: 914074
uuguuaaucuuguuuguug

SEQ ID NO: 976107 - RNA, 19 nt, Artificial Sequence
  Description of Artificial Sequence: Synthetic oligonucleotide
  Antisense strand to SEQ ID NO: 976106
caacaaacaagauuaacaa

SEQ ID NO: 976108 - RNA, 19 nt, Artificial Sequence
  Description of Artificial Sequence: Synthetic oligonucleotide
  Sense strand starting at position 2753 of SEQ ID NO: 914074
aaguaaguggcuugccuau

SEQ ID NO: 976109 - RNA, 19 nt, Artificial Sequence
  Description of Artificial Sequence: Synthetic oligonucleotide
  Antisense strand to SEQ ID NO: 976108
auaggcaagccacuuacuu

SEQ ID NO: 976110 - RNA, 19 nt, Artificial Sequence
  Description of Artificial Sequence: Synthetic oligonucleotide
  Sense strand starting at position 1624 of SEQ ID NO: 914075
gaggcuucccuggagauca

SEQ ID NO: 976111 - RNA, 19 nt, Artificial Sequence
  Description of Artificial Sequence: Synthetic oligonucleotide
  Antisense strand to SEQ ID NO: 976110
ugaucuccagggaagccuc

SEQ ID NO: 976112 - RNA, 19 nt, Artificial Sequence
  Description of Artificial Sequence: Synthetic oligonucleotide
  Sense strand starting at position 1137 of SEQ ID NO: 914075
gauggagcaucacuuaaga

SEQ ID NO: 976113 - RNA, 19 nt, Artificial Sequence
  Description of Artificial Sequence: Synthetic oligonucleotide
  Antisense strand to SEQ ID NO: 976112
ucuuaagugaugcuccauc

SEQ ID NO: 976114 - RNA, 19 nt, Artificial Sequence
  Description of Artificial Sequence: Synthetic oligonucleotide
  Sense strand starting at position 431 of SEQ ID NO: 914075
agggacaucuguccacaga

SEQ ID NO: 976115 - RNA, 19 nt, Artificial Sequence
  Description of Artificial Sequence: Synthetic oligonucleotide
  Antisense strand to SEQ ID NO: 976114
ucuguggacagaugucccu

SEQ ID NO: 976116 - RNA, 19 nt, Artificial Sequence
  Description of Artificial Sequence: Synthetic oligonucleotide
  Sense strand starting at position 3784 of SEQ ID NO: 914075
cucucugaugauggaucaa

SEQ ID NO: 976117 - RNA, 19 nt, Artificial Sequence
  Description of Artificial Sequence: Synthetic oligonucleotide
  Antisense strand to SEQ ID NO: 976116
uugauccaucaucagagag

SEQ ID NO: 976118 - RNA, 19 nt, Artificial Sequence
  Description of Artificial Sequence: Synthetic oligonucleotide
  Sense strand starting at position 3959 of SEQ ID NO: 914075
gguuuaguuugauuugggu

SEQ ID NO: 976119 - RNA, 19 nt, Artificial Sequence
  Description of Artificial Sequence: Synthetic oligonucleotide
  Antisense strand to SEQ ID NO: 976118
acccaaaucaaacuaaacc

SEQ ID NO: 976120 - RNA, 19 nt, Artificial Sequence
  Description of Artificial Sequence: Synthetic oligonucleotide
  Sense strand starting at position 1155 of SEQ ID NO: 914075
aggaaaugaacccgguuaa

SEQ ID NO: 976121 - RNA, 19 nt, Artificial Sequence
  Description of Artificial Sequence: Synthetic oligonucleotide
  Antisense strand to SEQ ID NO: 976120
uuaaccggguucauuuccu

SEQ ID NO: 976122 - RNA, 19 nt, Artificial Sequence
  Description of Artificial Sequence: Synthetic oligonucleotide
  Sense strand starting at position 1156 of SEQ ID NO: 914075
ggaaaugaacccgguuaag

SEQ ID NO: 976123 - RNA, 19 nt, Artificial Sequence
  Description of Artificial Sequence: Synthetic oligonucleotide
  Antisense strand to SEQ ID NO: 976122
cuuaaccggguucauuucc

SEQ ID NO: 976124 - RNA, 19 nt, Artificial Sequence
  Description of Artificial Sequence: Synthetic oligonucleotide
  Sense strand starting at position 3781 of SEQ ID NO: 914075
guccucucugaugauggau

SEQ ID NO: 976125 - RNA, 19 nt, Artificial Sequence
  Description of Artificial Sequence: Synthetic oligonucleotide
  Antisense strand to SEQ ID NO: 976124
auccaucaucagagaggac

SEQ ID NO: 976126 - RNA, 19 nt, Artificial Sequence
  Description of Artificial Sequence: Synthetic oligonucleotide
  Sense strand starting at position 3559 of SEQ ID NO: 914075
gagcuucuuggucagagaa

SEQ ID NO: 976127 - RNA, 19 nt, Artificial Sequence
  Description of Artificial Sequence: Synthetic oligonucleotide
  Antisense strand to SEQ ID NO: 976126
uucucugaccaagaagcuc

SEQ ID NO: 976128 - RNA, 19 nt, Artificial Sequence
  Description of Artificial Sequence: Synthetic oligonucleotide
  Sense strand starting at position 220 of SEQ ID NO: 914075
guguguccugcaucugcaa

SEQ ID NO: 976129 - RNA, 19 nt, Artificial Sequence
  Description of Artificial Sequence: Synthetic oligonucleotide
  Antisense strand to SEQ ID NO: 976128
uugcagaugcaggacacac

SEQ ID NO: 976130 - RNA, 19 nt, Artificial Sequence
  Description of Artificial Sequence: Synthetic oligonucleotide
  Sense strand starting at position 434 of SEQ ID NO: 914075
gacaucuguccacagagca

SEQ ID NO: 976131 - RNA, 19 nt, Artificial Sequence
  Description of Artificial Sequence: Synthetic oligonucleotide
  Antisense strand to SEQ ID NO: 976130
ugcucuguggacagauguc

SEQ ID NO: 976132 - RNA, 19 nt, Artificial Sequence
  Description of Artificial Sequence: Synthetic oligonucleotide
  Sense strand starting at position 511 of SEQ ID NO: 914075
aaaugcuugcuggaccaga

SEQ ID NO: 976133 - RNA, 19 nt, Artificial Sequence
  Description of Artificial Sequence: Synthetic oligonucleotide
  Antisense strand to SEQ ID NO: 976132
ucugguccagcaagcauuu

SEQ ID NO: 976134 - RNA, 19 nt, Artificial Sequence
  Description of Artificial Sequence: Synthetic oligonucleotide
  Sense strand starting at position 1237 of SEQ ID NO: 914075
uggcuuuaugagggaaauc

SEQ ID NO: 976135 - RNA, 19 nt, Artificial Sequence
  Description of Artificial Sequence: Synthetic oligonucleotide
  Antisense strand to SEQ ID NO: 976134
gauuucccucauaaagcca

SEQ ID NO: 976136 - RNA, 19 nt, Artificial Sequence
  Description of Artificial Sequence: Synthetic oligonucleotide
  Sense strand starting at position 2824 of SEQ ID NO: 914075
ggucauaaagggugaauuc

SEQ ID NO: 976137 - RNA, 19 nt, Artificial Sequence
  Description of Artificial Sequence: Synthetic oligonucleotide
  Antisense strand to SEQ ID NO: 976136
gaauucacccuuuaugacc

SEQ ID NO: 976138 - RNA, 19 nt, Artificial Sequence
  Description of Artificial Sequence: Synthetic oligonucleotide
  Sense strand starting at position 3680 of SEQ ID NO: 914075
cuccaugagcaaggauuau

SEQ ID NO: 976139 - RNA, 19 nt, Artificial Sequence
  Description of Artificial Sequence: Synthetic oligonucleotide
  Antisense strand to SEQ ID NO: 976138
auaauccuugcucauggag

SEQ ID NO: 976140 - RNA, 19 nt, Artificial Sequence
  Description of Artificial Sequence: Synthetic oligonucleotide
  Sense strand starting at position 3524 of SEQ ID NO: 914075
gggcucagacugugagaga

SEQ ID NO: 976141 - RNA, 19 nt, Artificial Sequence
  Description of Artificial Sequence: Synthetic oligonucleotide
  Antisense strand to SEQ ID NO: 976140
ucucucacagucugagccc

SEQ ID NO: 976142 - RNA, 19 nt, Artificial Sequence
  Description of Artificial Sequence: Synthetic oligonucleotide
  Sense strand starting at position 1623 of SEQ ID NO: 914075
agaggcuucccuggagauc

SEQ ID NO: 976143 - RNA, 19 nt, Artificial Sequence
  Description of Artificial Sequence: Synthetic oligonucleotide
  Antisense strand to SEQ ID NO: 976142
gaucuccagggaagccucu

SEQ ID NO: 976144 - RNA, 19 nt, Artificial Sequence
  Description of Artificial Sequence: Synthetic oligonucleotide
  Sense strand starting at position 3866 of SEQ ID NO: 914075
auggcaaagucuucuggaa

SEQ ID NO: 976145 - RNA, 19 nt, Artificial Sequence
  Description of Artificial Sequence: Synthetic oligonucleotide
  Antisense strand to SEQ ID NO: 976144
uuccagaagacuuugccau

SEQ ID NO: 976146 - RNA, 19 nt, Artificial Sequence
  Description of Artificial Sequence: Synthetic oligonucleotide
  Sense strand starting at position 3558 of SEQ ID NO: 914075
agagcuucuuggucagaga

SEQ ID NO: 976147 - RNA, 19 nt, Artificial Sequence
  Description of Artificial Sequence: Synthetic oligonucleotide
  Antisense strand to SEQ ID NO: 976146
ucucugaccaagaagcucu

SEQ ID NO: 976148 - RNA, 19 nt, Artificial Sequence
  Description of Artificial Sequence: Synthetic oligonucleotide
  Sense strand starting at position 842 of SEQ ID NO: 914075
uggaacugcuccucuaaau

SEQ ID NO: 976149 - RNA, 19 nt, Artificial Sequence
  Description of Artificial Sequence: Synthetic oligonucleotide
  Antisense strand to SEQ ID NO: 976148
auuuagaggagcaguucca

SEQ ID NO: 976150 - RNA, 19 nt, Artificial Sequence
  Description of Artificial Sequence: Synthetic oligonucleotide
  Sense strand starting at position 3588 of SEQ ID NO: 914075
aaccuuugugaauguugga

SEQ ID NO: 976151 - RNA, 19 nt, Artificial Sequence
  Description of Artificial Sequence: Synthetic oligonucleotide
  Antisense strand to SEQ ID NO: 976150
uccaacauucacaaagguu

SEQ ID NO: 976152 - RNA, 19 nt, Artificial Sequence
  Description of Artificial Sequence: Synthetic oligonucleotide
  Sense strand starting at position 3535 of SEQ ID NO: 914075
gugagagaucuuggcacca

SEQ ID NO: 976153 - RNA, 19 nt, Artificial Sequence
  Description of Artificial Sequence: Synthetic oligonucleotide
  Antisense strand to SEQ ID NO: 976152
uggugccaagaucucucac

SEQ ID NO: 976154 - RNA, 19 nt, Artificial Sequence
  Description of Artificial Sequence: Synthetic oligonucleotide
  Sense strand starting at position 3266 of SEQ ID NO: 914075
acaauaaagcuuugugacu

SEQ ID NO: 976155 - RNA, 19 nt, Artificial Sequence
  Description of Artificial Sequence: Synthetic oligonucleotide
  Antisense strand to SEQ ID NO: 976154
agucacaaagcuuuauugu

SEQ ID NO: 976156 - RNA, 19 nt, Artificial Sequence
  Description of Artificial Sequence: Synthetic oligonucleotide
  Sense strand starting at position 3143 of SEQ ID NO: 914075
ggagcacaguuacuacuua

SEQ ID NO: 976157 - RNA, 19 nt, Artificial Sequence
  Description of Artificial Sequence: Synthetic oligonucleotide
  Antisense strand to SEQ ID NO: 976156
uaaguaguaacugugcucc

SEQ ID NO: 976158 - RNA, 19 nt, Artificial Sequence
  Description of Artificial Sequence: Synthetic oligonucleotide
  Sense strand starting at position 647 of SEQ ID NO: 914075
uuugcucagcuguaaagaa

SEQ ID NO: 976159 - RNA, 19 nt, Artificial Sequence
  Description of Artificial Sequence: Synthetic oligonucleotide
  Antisense strand to SEQ ID NO: 976158
uucuuuacagcugagcaaa

SEQ ID NO: 976160 - RNA, 19 nt, Artificial Sequence
  Description of Artificial Sequence: Synthetic oligonucleotide
  Sense strand starting at position 3777 of SEQ ID NO: 914075
ccagguccucucugaugau

SEQ ID NO: 976161 - RNA, 19 nt, Artificial Sequence
  Description of Artificial Sequence: Synthetic oligonucleotide
  Antisense strand to SEQ ID NO: 976160
aucaucagagaggaccugg

SEQ ID NO: 976162 - RNA, 19 nt, Artificial Sequence
  Description of Artificial Sequence: Synthetic oligonucleotide
  Sense strand starting at position 823 of SEQ ID NO: 914075
agauuaaugcuuugagcac

SEQ ID NO: 976163 - RNA, 19 nt, Artificial Sequence
  Description of Artificial Sequence: Synthetic oligonucleotide
  Antisense strand to SEQ ID NO: 976162
gugcucaaagcauuaaucu

SEQ ID NO: 976164 - RNA, 19 nt, Artificial Sequence
  Description of Artificial Sequence: Synthetic oligonucleotide
  Sense strand starting at position 257 of SEQ ID NO: 914075
ggagcugaaaugugauguu

SEQ ID NO: 976165 - RNA, 19 nt, Artificial Sequence
  Description of Artificial Sequence: Synthetic oligonucleotide
  Antisense strand to SEQ ID NO: 976164
aacaucacauuucagcucc

SEQ ID NO: 976166 - RNA, 19 nt, Artificial Sequence
  Description of Artificial Sequence: Synthetic oligonucleotide
  Sense strand starting at position 3673 of SEQ ID NO: 914075
gcacuaccuccaugagcaa

SEQ ID NO: 976167 - RNA, 19 nt, Artificial Sequence
  Description of Artificial Sequence: Synthetic oligonucleotide
  Antisense strand to SEQ ID NO: 976166
uugcucauggagguagugc

SEQ ID NO: 976168 - RNA, 19 nt, Artificial Sequence
  Description of Artificial Sequence: Synthetic oligonucleotide
  Sense strand starting at position 830 of SEQ ID NO: 914075
ugcuuugagcacuggaacu

SEQ ID NO: 976169 - RNA, 19 nt, Artificial Sequence
  Description of Artificial Sequence: Synthetic oligonucleotide
  Antisense strand to SEQ ID NO: 976168
aguuccagugcucaaagca

SEQ ID NO: 976170 - RNA, 19 nt, Artificial Sequence
  Description of Artificial Sequence: Synthetic oligonucleotide
  Sense strand starting at position 3800 of SEQ ID NO: 914075
caagacagccugugaguuu

SEQ ID NO: 976171 - RNA, 19 nt, Artificial Sequence
  Description of Artificial Sequence: Synthetic oligonucleotide
  Antisense strand to SEQ ID NO: 976170
aaacucacaggcugucuug

SEQ ID NO: 976172 - RNA, 19 nt, Artificial Sequence
  Description of Artificial Sequence: Synthetic oligonucleotide
  Sense strand starting at position 3855 of SEQ ID NO: 914075
gucuucuguggauggcaaa

SEQ ID NO: 976173 - RNA, 19 nt, Artificial Sequence
  Description of Artificial Sequence: Synthetic oligonucleotide
  Antisense strand to SEQ ID NO: 976172
uuugccauccacagaagac

SEQ ID NO: 976174 - RNA, 19 nt, Artificial Sequence
  Description of Artificial Sequence: Synthetic oligonucleotide
  Sense strand starting at position 3634 of SEQ ID NO: 914075
gguaauguugcucagcuga

SEQ ID NO: 976175 - RNA, 19 nt, Artificial Sequence
  Description of Artificial Sequence: Synthetic oligonucleotide
  Antisense strand to SEQ ID NO: 976174
ucagcugagcaacauuacc

SEQ ID NO: 976176 - RNA, 19 nt, Artificial Sequence
  Description of Artificial Sequence: Synthetic oligonucleotide
  Sense strand starting at position 898 of SEQ ID NO: 914075
ggucucuucuaucucaagu

SEQ ID NO: 976177 - RNA, 19 nt, Artificial Sequence
  Description of Artificial Sequence: Synthetic oligonucleotide
  Antisense strand to SEQ ID NO: 976176
acuugagauagaagagacc

SEQ ID NO: 976178 - RNA, 19 nt, Artificial Sequence
  Description of Artificial Sequence: Synthetic oligonucleotide
  Sense strand starting at position 2930 of SEQ ID NO: 914075
cguuacagacucugcauaa

SEQ ID NO: 976179 - RNA, 19 nt, Artificial Sequence
  Description of Artificial Sequence: Synthetic oligonucleotide
  Antisense strand to SEQ ID NO: 976178
uuaugcagagucuguaacg

SEQ ID NO: 976180 - RNA, 19 nt, Artificial Sequence
  Description of Artificial Sequence: Synthetic oligonucleotide
  Sense strand starting at position 643 of SEQ ID NO: 914075
cgcauuugcucagcuguaa

SEQ ID NO: 976181 - RNA, 19 nt, Artificial Sequence
  Description of Artificial Sequence: Synthetic oligonucleotide
  Antisense strand to SEQ ID NO: 976180
uuacagcugagcaaaugcg

SEQ ID NO: 976182 - RNA, 19 nt, Artificial Sequence
  Description of Artificial Sequence: Synthetic oligonucleotide
  Sense strand starting at position 3359 of SEQ ID NO: 914075
cguucucuagacugucaga

SEQ ID NO: 976183 - RNA, 19 nt, Artificial Sequence
  Description of Artificial Sequence: Synthetic oligonucleotide
  Antisense strand to SEQ ID NO: 976182
ucugacagucuagagaacg

SEQ ID NO: 976184 - RNA, 19 nt, Artificial Sequence
  Description of Artificial Sequence: Synthetic oligonucleotide
  Sense strand starting at position 3874 of SEQ ID NO: 914075
gucuucuggaagugcuaau

SEQ ID NO: 976185 - RNA, 19 nt, Artificial Sequence
  Description of Artificial Sequence: Synthetic oligonucleotide
  Antisense strand to SEQ ID NO: 976184
auuagcacuuccagaagac

SEQ ID NO: 976186 - RNA, 19 nt, Artificial Sequence
  Description of Artificial Sequence: Synthetic oligonucleotide
  Sense strand starting at position 326 of SEQ ID NO: 914075
gugccaucuguugaaugca

SEQ ID NO: 976187 - RNA, 19 nt, Artificial Sequence
  Description of Artificial Sequence: Synthetic oligonucleotide
  Antisense strand to SEQ ID NO: 976186
ugcauucaacagauggcac

SEQ ID NO: 976188 - RNA, 19 nt, Artificial Sequence
  Description of Artificial Sequence: Synthetic oligonucleotide
  Sense strand starting at position 2897 of SEQ ID NO: 914075
guaacuacccugugcauca

SEQ ID NO: 976189 - RNA, 19 nt, Artificial Sequence
  Description of Artificial Sequence: Synthetic oligonucleotide
  Antisense strand to SEQ ID NO: 976188
ugaugcacaggguaguuac

SEQ ID NO: 976190 - RNA, 19 nt, Artificial Sequence
  Description of Artificial Sequence: Synthetic oligonucleotide
  Sense strand starting at position 2072 of SEQ ID NO: 914076
uuauuagaguuugccauuu

SEQ ID NO: 976191 - RNA, 19 nt, Artificial Sequence
  Description of Artificial Sequence: Synthetic oligonucleotide
  Antisense strand to SEQ ID NO: 976190
aaauggcaaacucuaauaa

SEQ ID NO: 976192 - RNA, 19 nt, Artificial Sequence
  Description of Artificial Sequence: Synthetic oligonucleotide
  Sense strand starting at position 339 of SEQ ID NO: 914076
ugacauguucacgcguuua

SEQ ID NO: 976193 - RNA, 19 nt, Artificial Sequence
  Description of Artificial Sequence: Synthetic oligonucleotide
  Antisense strand to SEQ ID NO: 976192
uaaacgcgugaacauguca

SEQ ID NO: 976194 - RNA, 19 nt, Artificial Sequence
  Description of Artificial Sequence: Synthetic oligonucleotide
  Sense strand starting at position 3481 of SEQ ID NO: 914076
gucaaaugugcagaaauaa

SEQ ID NO: 976195 - RNA, 19 nt, Artificial Sequence
  Description of Artificial Sequence: Synthetic oligonucleotide
  Antisense strand to SEQ ID NO: 976194
uuauuucugcacauuugac

SEQ ID NO: 976196 - RNA, 19 nt, Artificial Sequence
  Description of Artificial Sequence: Synthetic oligonucleotide
  Sense strand starting at position 251 of SEQ ID NO: 914076
aacugaugucaauggauua

SEQ ID NO: 976197 - RNA, 19 nt, Artificial Sequence
  Description of Artificial Sequence: Synthetic oligonucleotide
  Antisense strand to SEQ ID NO: 976196
uaauccauugacaucaguu

SEQ ID NO: 976198 - RNA, 19 nt, Artificial Sequence
  Description of Artificial Sequence: Synthetic oligonucleotide
  Sense strand starting at position 601 of SEQ ID NO: 914076
ggcucugauuugucaaccu

SEQ ID NO: 976199 - RNA, 19 nt, Artificial Sequence
  Description of Artificial Sequence: Synthetic oligonucleotide
  Antisense strand to SEQ ID NO: 976198
agguugacaaaucagagcc

SEQ ID NO: 976200 - RNA, 19 nt, Artificial Sequence
  Description of Artificial Sequence: Synthetic oligonucleotide
  Sense strand starting at position 3612 of SEQ ID NO: 914076
ccaggagagcucuaucuau

SEQ ID NO: 976201 - RNA, 19 nt, Artificial Sequence
  Description of Artificial Sequence: Synthetic oligonucleotide
  Antisense strand to SEQ ID NO: 976200
auagauagagcucuccugg

SEQ ID NO: 976202 - RNA, 19 nt, Artificial Sequence
  Description of Artificial Sequence: Synthetic oligonucleotide
  Sense strand starting at position 75 of SEQ ID NO: 914076
uuauaagaccaaugcugaa

SEQ ID NO: 976203 - RNA, 19 nt, Artificial Sequence
  Description of Artificial Sequence: Synthetic oligonucleotide
  Antisense strand to SEQ ID NO: 976202
uucagcauuggucuuauaa

SEQ ID NO: 976204 - RNA, 19 nt, Artificial Sequence
  Description of Artificial Sequence: Synthetic oligonucleotide
  Sense strand starting at position 2202 of SEQ ID NO: 914076
uaggaagauguaugaaugu

SEQ ID NO: 976205 - RNA, 19 nt, Artificial Sequence
  Description of Artificial Sequence: Synthetic oligonucleotide
  Antisense strand to SEQ ID NO: 976204
acauucauacaucuuccua

SEQ ID NO: 976206 - RNA, 19 nt, Artificial Sequence
  Description of Artificial Sequence: Synthetic oligonucleotide
  Sense strand starting at position 2425 of SEQ ID NO: 914076
aguaacuaacucugagauc

SEQ ID NO: 976207 - RNA, 19 nt, Artificial Sequence
  Description of Artificial Sequence: Synthetic oligonucleotide
  Antisense strand to SEQ ID NO: 976206
gaucucagaguuaguuacu

SEQ ID NO: 976208 - RNA, 19 nt, Artificial Sequence
  Description of Artificial Sequence: Synthetic oligonucleotide
  Sense strand starting at position 3879 of SEQ ID NO: 914076
gcaagauauguauacccua

SEQ ID NO: 976209 - RNA, 19 nt, Artificial Sequence
  Description of Artificial Sequence: Synthetic oligonucleotide
  Antisense strand to SEQ ID NO: 976208
uaggguauacauaucuugc

SEQ ID NO: 976210 - RNA, 19 nt, Artificial Sequence
  Description of Artificial Sequence: Synthetic oligonucleotide
  Sense strand starting at position 623 of SEQ ID NO: 914076
gugguaaauuagguagaaa

SEQ ID NO: 976211 - RNA, 19 nt, Artificial Sequence
  Description of Artificial Sequence: Synthetic oligonucleotide
  Antisense strand to SEQ ID NO: 976210
uuucuaccuaauuuaccac

SEQ ID NO: 976212 - RNA, 19 nt, Artificial Sequence
  Description of Artificial Sequence: Synthetic oligonucleotide
  Sense strand starting at position 3479 of SEQ ID NO: 914076
uggucaaaugugcagaaau

SEQ ID NO: 976213 - RNA, 19 nt, Artificial Sequence
  Description of Artificial Sequence: Synthetic oligonucleotide
  Antisense strand to SEQ ID NO: 976212
auuucugcacauuugacca

SEQ ID NO: 976214 - RNA, 19 nt, Artificial Sequence
  Description of Artificial Sequence: Synthetic oligonucleotide
  Sense strand starting at position 2576 of SEQ ID NO: 914076
agugguggugacgauagaa

SEQ ID NO: 976215 - RNA, 19 nt, Artificial Sequence
  Description of Artificial Sequence: Synthetic oligonucleotide
  Antisense strand to SEQ ID NO: 976214
uucuaucgucaccaccacu

SEQ ID NO: 976216 - RNA, 19 nt, Artificial Sequence
  Description of Artificial Sequence: Synthetic oligonucleotide
  Sense strand starting at position 2905 of SEQ ID NO: 914076
aggaaucaguccucccuaa

SEQ ID NO: 976217 - RNA, 19 nt, Artificial Sequence
  Description of Artificial Sequence: Synthetic oligonucleotide
  Antisense strand to SEQ ID NO: 976216
uuagggaggacugauuccu

SEQ ID NO: 976218 - RNA, 19 nt, Artificial Sequence
  Description of Artificial Sequence: Synthetic oligonucleotide
  Sense strand starting at position 258 of SEQ ID NO: 914076
gucaauggauuacuauauu

SEQ ID NO: 976219 - RNA, 19 nt, Artificial Sequence
  Description of Artificial Sequence: Synthetic oligonucleotide
  Antisense strand to SEQ ID NO: 976218
aauauaguaauccauugac

SEQ ID NO: 976220 - RNA, 19 nt, Artificial Sequence
  Description of Artificial Sequence: Synthetic oligonucleotide
  Sense strand starting at position 1990 of SEQ ID NO: 914076
ucauuagaguuccugaaau

SEQ ID NO: 976221 - RNA, 19 nt, Artificial Sequence
  Description of Artificial Sequence: Synthetic oligonucleotide
  Antisense strand to SEQ ID NO: 976220
auuucaggaacucuaauga

SEQ ID NO: 976222 - RNA, 19 nt, Artificial Sequence
  Description of Artificial Sequence: Synthetic oligonucleotide
  Sense strand starting at position 3321 of SEQ ID NO: 914076
cuaacuaguccuggauuaa

SEQ ID NO: 976223 - RNA, 19 nt, Artificial Sequence
  Description of Artificial Sequence: Synthetic oligonucleotide
  Antisense strand to SEQ ID NO: 976222
uuaauccaggacuaguuag

SEQ ID NO: 976224 - RNA, 19 nt, Artificial Sequence
  Description of Artificial Sequence: Synthetic oligonucleotide
  Sense strand starting at position 3032 of SEQ ID NO: 914076
uuaccugacuagcuuaaga

SEQ ID NO: 976225 - RNA, 19 nt, Artificial Sequence
  Description of Artificial Sequence: Synthetic oligonucleotide
  Antisense strand to SEQ ID NO: 976224
ucuuaagcuagucagguaa

SEQ ID NO: 976226 - RNA, 19 nt, Artificial Sequence
  Description of Artificial Sequence: Synthetic oligonucleotide
  Sense strand starting at position 2466 of SEQ ID NO: 914076
auuccaaauuagguaguau

SEQ ID NO: 976227 - RNA, 19 nt, Artificial Sequence
  Description of Artificial Sequence: Synthetic oligonucleotide
  Antisense strand to SEQ ID NO: 976226
auacuaccuaauuuggaau

SEQ ID NO: 976228 - RNA, 19 nt, Artificial Sequence
  Description of Artificial Sequence: Synthetic oligonucleotide
  Sense strand starting at position 2544 of SEQ ID NO: 914076
ggcggauagcuuuagauaa

SEQ ID NO: 976229 - RNA, 19 nt, Artificial Sequence
  Description of Artificial Sequence: Synthetic oligonucleotide
  Antisense strand to SEQ ID NO: 976228
uuaucuaaagcuauccgcc

SEQ ID NO: 976230 - RNA, 19 nt, Artificial Sequence
  Description of Artificial Sequence: Synthetic oligonucleotide
  Sense strand starting at position 2533 of SEQ ID NO: 914076
uacaauuaauuggcggaua

SEQ ID NO: 976231 - RNA, 19 nt, Artificial Sequence
  Description of Artificial Sequence: Synthetic oligonucleotide
  Antisense strand to SEQ ID NO: 976230
uauccgccaauuaauugua

SEQ ID NO: 976232 - RNA, 19 nt, Artificial Sequence
  Description of Artificial Sequence: Synthetic oligonucleotide
  Sense strand starting at position 3806 of SEQ ID NO: 914076
acaggcauugcuuaucaau

SEQ ID NO: 976233 - RNA, 19 nt, Artificial Sequence
  Description of Artificial Sequence: Synthetic oligonucleotide
  Antisense strand to SEQ ID NO: 976232
auugauaagcaaugccugu

SEQ ID NO: 976234 - RNA, 19 nt, Artificial Sequence
  Description of Artificial Sequence: Synthetic oligonucleotide
  Sense strand starting at position 3478 of SEQ ID NO: 914076
auggucaaaugugcagaaa

SEQ ID NO: 976235 - RNA, 19 nt, Artificial Sequence
  Description of Artificial Sequence: Synthetic oligonucleotide
  Antisense strand to SEQ ID NO: 976234
uuucugcacauuugaccau

SEQ ID NO: 976236 - RNA, 19 nt, Artificial Sequence
  Description of Artificial Sequence: Synthetic oligonucleotide
  Sense strand starting at position 416 of SEQ ID NO: 914076
acaaguuagcuuuauguga

SEQ ID NO: 976237 - RNA, 19 nt, Artificial Sequence
  Description of Artificial Sequence: Synthetic oligonucleotide
  Antisense strand to SEQ ID NO: 976236
ucacauaaagcuaacuugu

SEQ ID NO: 976238 - RNA, 19 nt, Artificial Sequence
  Description of Artificial Sequence: Synthetic oligonucleotide
  Sense strand starting at position 2536 of SEQ ID NO: 914076
aauuaauuggcggauagcu

SEQ ID NO: 976239 - RNA, 19 nt, Artificial Sequence
  Description of Artificial Sequence: Synthetic oligonucleotide
  Antisense strand to SEQ ID NO: 976238
agcuauccgccaauuaauu

SEQ ID NO: 976240 - RNA, 19 nt, Artificial Sequence
  Description of Artificial Sequence: Synthetic oligonucleotide
  Sense strand starting at position 822 of SEQ ID NO: 914076
uagguuugugugggaaaga

SEQ ID NO: 976241 - RNA, 19 nt, Artificial Sequence
  Description of Artificial Sequence: Synthetic oligonucleotide
  Antisense strand to SEQ ID NO: 976240
ucuuucccacacaaaccua

SEQ ID NO: 976242 - RNA, 19 nt, Artificial Sequence
  Description of Artificial Sequence: Synthetic oligonucleotide
  Sense strand starting at position 351 of SEQ ID NO: 914076
gcguuuauauucccuauuu

SEQ ID NO: 976243 - RNA, 19 nt, Artificial Sequence
  Description of Artificial Sequence: Synthetic oligonucleotide
  Antisense strand to SEQ ID NO: 976242
aaauagggaauauaaacgc

SEQ ID NO: 976244 - RNA, 19 nt, Artificial Sequence
  Description of Artificial Sequence: Synthetic oligonucleotide
  Sense strand starting at position 3166 of SEQ ID NO: 914076
cuuguaguuuaauuagaca

SEQ ID NO: 976245 - RNA, 19 nt, Artificial Sequence
  Description of Artificial Sequence: Synthetic oligonucleotide
  Antisense strand to SEQ ID NO: 976244
ugucuaauuaaacuacaag

SEQ ID NO: 976246 - RNA, 19 nt, Artificial Sequence
  Description of Artificial Sequence: Synthetic oligonucleotide
  Sense strand starting at position 2595 of SEQ ID NO: 914076
gagagagcagucuggcaaa

SEQ ID NO: 976247 - RNA, 19 nt, Artificial Sequence
  Description of Artificial Sequence: Synthetic oligonucleotide
  Antisense strand to SEQ ID NO: 976246
uuugccagacugcucucuc

SEQ ID NO: 976248 - RNA, 19 nt, Artificial Sequence
  Description of Artificial Sequence: Synthetic oligonucleotide
  Sense strand starting at position 2995 of SEQ ID NO: 914076
auuauuugguacuagggau

SEQ ID NO: 976249 - RNA, 19 nt, Artificial Sequence
  Description of Artificial Sequence: Synthetic oligonucleotide
  Antisense strand to SEQ ID NO: 976248
aucccuaguaccaaauaau

SEQ ID NO: 976250 - RNA, 19 nt, Artificial Sequence
  Description of Artificial Sequence: Synthetic oligonucleotide
  Sense strand starting at position 2775 of SEQ ID NO: 914076
guguauauucuagggacug

SEQ ID NO: 976251 - RNA, 19 nt, Artificial Sequence
  Description of Artificial Sequence: Synthetic oligonucleotide
  Antisense strand to SEQ ID NO: 976250
cagucccuagaauauacac

SEQ ID NO: 976252 - RNA, 19 nt, Artificial Sequence
  Description of Artificial Sequence: Synthetic oligonucleotide
  Sense strand starting at position 3548 of SEQ ID NO: 914076
guaugaacuuuacugguau

SEQ ID NO: 976253 - RNA, 19 nt, Artificial Sequence
  Description of Artificial Sequence: Synthetic oligonucleotide
  Antisense strand to SEQ ID NO: 976252
auaccaguaaaguucauac

SEQ ID NO: 976254 - RNA, 19 nt, Artificial Sequence
  Description of Artificial Sequence: Synthetic oligonucleotide
  Sense strand starting at position 2573 of SEQ ID NO: 914076
uucagugguggugacgaua

SEQ ID NO: 976255 - RNA, 19 nt, Artificial Sequence
  Description of Artificial Sequence: Synthetic oligonucleotide
  Antisense strand to SEQ ID NO: 976254
uaucgucaccaccacugaa

SEQ ID NO: 976256 - RNA, 19 nt, Artificial Sequence
  Description of Artificial Sequence: Synthetic oligonucleotide
  Sense strand starting at position 3143 of SEQ ID NO: 914076
augugaaccucucuguaua

SEQ ID NO: 976257 - RNA, 19 nt, Artificial Sequence
  Description of Artificial Sequence: Synthetic oligonucleotide
  Antisense strand to SEQ ID NO: 976256
uauacagagagguucacau

SEQ ID NO: 976258 - RNA, 19 nt, Artificial Sequence
  Description of Artificial Sequence: Synthetic oligonucleotide
  Sense strand starting at position 3145 of SEQ ID NO: 914076
gugaaccucucuguauaca

SEQ ID NO: 976259 - RNA, 19 nt, Artificial Sequence
  Description of Artificial Sequence: Synthetic oligonucleotide
  Antisense strand to SEQ ID NO: 976258
uguauacagagagguucac

SEQ ID NO: 976260 - RNA, 19 nt, Artificial Sequence
  Description of Artificial Sequence: Synthetic oligonucleotide
  Sense strand starting at position 3095 of SEQ ID NO: 914076
ugauaauguuaagugcuaa

SEQ ID NO: 976261 - RNA, 19 nt, Artificial Sequence
  Description of Artificial Sequence: Synthetic oligonucleotide
  Antisense strand to SEQ ID NO: 976260
uuagcacuuaacauuauca

SEQ ID NO: 976262 - RNA, 19 nt, Artificial Sequence
  Description of Artificial Sequence: Synthetic oligonucleotide
  Sense strand starting at position 3339 of SEQ ID NO: 914076
auggguuguguucaagcaa

SEQ ID NO: 976263 - RNA, 19 nt, Artificial Sequence
  Description of Artificial Sequence: Synthetic oligonucleotide
  Antisense strand to SEQ ID NO: 976262
uugcuugaacacaacccau

SEQ ID NO: 976264 - RNA, 19 nt, Artificial Sequence
  Description of Artificial Sequence: Synthetic oligonucleotide
  Sense strand starting at position 2211 of SEQ ID NO: 914076
guaugaauguaaguuacuu

SEQ ID NO: 976265 - RNA, 19 nt, Artificial Sequence
  Description of Artificial Sequence: Synthetic oligonucleotide
  Antisense strand to SEQ ID NO: 976264
aaguaacuuacauucauac

SEQ ID NO: 976266 - RNA, 19 nt, Artificial Sequence
  Description of Artificial Sequence: Synthetic oligonucleotide
  Sense strand starting at position 3114 of SEQ ID NO: 914076
ggauucugcuaauaauuua

SEQ ID NO: 976267 - RNA, 19 nt, Artificial Sequence
  Description of Artificial Sequence: Synthetic oligonucleotide
  Antisense strand to SEQ ID NO: 976266
uaaauuauuagcagaaucc

SEQ ID NO: 976268 - RNA, 19 nt, Artificial Sequence
  Description of Artificial Sequence: Synthetic oligonucleotide
  Sense strand starting at position 3771 of SEQ ID NO: 914076
acugaauaaugggaaauau

SEQ ID NO: 976269 - RNA, 19 nt, Artificial Sequence
  Description of Artificial Sequence: Synthetic oligonucleotide
  Antisense strand to SEQ ID NO: 976268
auauuucccauuauucagu

SEQ ID NO: 976270 - RNA, 19 nt, Artificial Sequence
  Description of Artificial Sequence: Synthetic oligonucleotide
  Sense strand starting at position 3450 of SEQ ID NO: 914077
gccagucaacaauacagau

SEQ ID NO: 976271 - RNA, 19 nt, Artificial Sequence
  Description of Artificial Sequence: Synthetic oligonucleotide
  Antisense strand to SEQ ID NO: 976270
aucuguauuguugacuggc

SEQ ID NO: 976272 - RNA, 19 nt, Artificial Sequence
  Description of Artificial Sequence: Synthetic oligonucleotide
  Sense strand starting at position 3250 of SEQ ID NO: 914077
aaacaacguguugaagauu

SEQ ID NO: 976273 - RNA, 19 nt, Artificial Sequence
  Description of Artificial Sequence: Synthetic oligonucleotide
  Antisense strand to SEQ ID NO: 976272
aaucuucaacacguuguuu

SEQ ID NO: 976274 - RNA, 19 nt, Artificial Sequence
  Description of Artificial Sequence: Synthetic oligonucleotide
  Sense strand starting at position 707 of SEQ ID NO: 914077
gcuggaggcaaauacuaua

SEQ ID NO: 976275 - RNA, 19 nt, Artificial Sequence
  Description of Artificial Sequence: Synthetic oligonucleotide
  Antisense strand to SEQ ID NO: 976274
uauaguauuugccuccagc

SEQ ID NO: 976276 - RNA, 19 nt, Artificial Sequence
  Description of Artificial Sequence: Synthetic oligonucleotide
  Sense strand starting at position 528 of SEQ ID NO: 914077
ugcugcauuuaguuacaaa

SEQ ID NO: 976277 - RNA, 19 nt, Artificial Sequence
  Description of Artificial Sequence: Synthetic oligonucleotide
  Antisense strand to SEQ ID NO: 976276
uuuguaacuaaaugcagca

SEQ ID NO: 976278 - RNA, 19 nt, Artificial Sequence
  Description of Artificial Sequence: Synthetic oligonucleotide
  Sense strand starting at position 386 of SEQ ID NO: 914077
uuacaaauuggaugcaaua

SEQ ID NO: 976279 - RNA, 19 nt, Artificial Sequence
  Description of Artificial Sequence: Synthetic oligonucleotide
  Antisense strand to SEQ ID NO: 976278
uauugcauccaauuuguaa

SEQ ID NO: 976280 - RNA, 19 nt, Artificial Sequence
  Description of Artificial Sequence: Synthetic oligonucleotide
  Sense strand starting at position 461 of SEQ ID NO: 914077
ggguaaagauuaguaagua

SEQ ID NO: 976281 - RNA, 19 nt, Artificial Sequence
  Description of Artificial Sequence: Synthetic oligonucleotide
  Antisense strand to SEQ ID NO: 976280
uacuuacuaaucuuuaccc

SEQ ID NO: 976282 - RNA, 19 nt, Artificial Sequence
  Description of Artificial Sequence: Synthetic oligonucleotide
  Sense strand starting at position 613 of SEQ ID NO: 914077
gucccucuugaguagaaac

SEQ ID NO: 976283 - RNA, 19 nt, Artificial Sequence
  Description of Artificial Sequence: Synthetic oligonucleotide
  Antisense strand to SEQ ID NO: 976282
guuucuacucaagagggac

SEQ ID NO: 976284 - RNA, 19 nt, Artificial Sequence
  Description of Artificial Sequence: Synthetic oligonucleotide
  Sense strand starting at position 3757 of SEQ ID NO: 914077
aauagaaugguuuguauca

SEQ ID NO: 976285 - RNA, 19 nt, Artificial Sequence
  Description of Artificial Sequence: Synthetic oligonucleotide
  Antisense strand to SEQ ID NO: 976284
ugauacaaaccauucuauu

SEQ ID NO: 976286 - RNA, 19 nt, Artificial Sequence
  Description of Artificial Sequence: Synthetic oligonucleotide
  Sense strand starting at position 637 of SEQ ID NO: 914077
gcacucgguaucuaagaaa

SEQ ID NO: 976287 - RNA, 19 nt, Artificial Sequence
  Description of Artificial Sequence: Synthetic oligonucleotide
  Antisense strand to SEQ ID NO: 976286
uuucuuagauaccgagugc

SEQ ID NO: 976288 - RNA, 19 nt, Artificial Sequence
  Description of Artificial Sequence: Synthetic oligonucleotide
  Sense strand starting at position 1272 of SEQ ID NO: 914077
gcuacaacucgcuucgcua

SEQ ID NO: 976289 - RNA, 19 nt, Artificial Sequence
  Description of Artificial Sequence: Synthetic oligonucleotide
  Antisense strand to SEQ ID NO: 976288
uagcgaagcgaguuguagc

SEQ ID NO: 976290 - RNA, 19 nt, Artificial Sequence
  Description of Artificial Sequence: Synthetic oligonucleotide
  Sense strand starting at position 3339 of SEQ ID NO: 914077
guaugcuugagucaagaac

SEQ ID NO: 976291 - RNA, 19 nt, Artificial Sequence
  Description of Artificial Sequence: Synthetic oligonucleotide
  Antisense strand to SEQ ID NO: 976290
guucuugacucaagcauac

SEQ ID NO: 976292 - RNA, 19 nt, Artificial Sequence
  Description of Artificial Sequence: Synthetic oligonucleotide
  Sense strand starting at position 2273 of SEQ ID NO: 914077
gaaguuacuguugaagcua

SEQ ID NO: 976293 - RNA, 19 nt, Artificial Sequence
  Description of Artificial Sequence: Synthetic oligonucleotide
  Antisense strand to SEQ ID NO: 976292
uagcuucaacaguaacuuc

SEQ ID NO: 976294 - RNA, 19 nt, Artificial Sequence
  Description of Artificial Sequence: Synthetic oligonucleotide
  Sense strand starting at position 280 of SEQ ID NO: 914077
ggcgaauggucauuugcau

SEQ ID NO: 976295 - RNA, 19 nt, Artificial Sequence
  Description of Artificial Sequence: Synthetic oligonucleotide
  Antisense strand to SEQ ID NO: 976294
augcaaaugaccauucgcc

SEQ ID NO: 976296 - RNA, 19 nt, Artificial Sequence
  Description of Artificial Sequence: Synthetic oligonucleotide
  Sense strand starting at position 2455 of SEQ ID NO: 914077
ccacacaucccauguuaga

SEQ ID NO: 976297 - RNA, 19 nt, Artificial Sequence
  Description of Artificial Sequence: Synthetic oligonucleotide
  Antisense strand to SEQ ID NO: 976296
ucuaacaugggaugugugg

SEQ ID NO: 976298 - RNA, 19 nt, Artificial Sequence
  Description of Artificial Sequence: Synthetic oligonucleotide
  Sense strand starting at position 917 of SEQ ID NO: 914077
gcucccgaaucgguauuua

SEQ ID NO: 976299 - RNA, 19 nt, Artificial Sequence
  Description of Artificial Sequence: Synthetic oligonucleotide
  Antisense strand to SEQ ID NO: 976298
uaaauaccgauucgggagc

SEQ ID NO: 976300 - RNA, 19 nt, Artificial Sequence
  Description of Artificial Sequence: Synthetic oligonucleotide
  Sense strand starting at position 3615 of SEQ ID NO: 914077
ggagauguguuuccagauu

SEQ ID NO: 976301 - RNA, 19 nt, Artificial Sequence
  Description of Artificial Sequence: Synthetic oligonucleotide
  Antisense strand to SEQ ID NO: 976300
aaucuggaaacacaucucc

SEQ ID NO: 976302 - RNA, 19 nt, Artificial Sequence
  Description of Artificial Sequence: Synthetic oligonucleotide
  Sense strand starting at position 3685 of SEQ ID NO: 914077
uuaugacaaucaguauguu

SEQ ID NO: 976303 - RNA, 19 nt, Artificial Sequence
  Description of Artificial Sequence: Synthetic oligonucleotide
  Antisense strand to SEQ ID NO: 976302
aacauacugauugucauaa

SEQ ID NO: 976304 - RNA, 19 nt, Artificial Sequence
  Description of Artificial Sequence: Synthetic oligonucleotide
  Sense strand starting at position 1051 of SEQ ID NO: 914077
uggagucauuacucuucca

SEQ ID NO: 976305 - RNA, 19 nt, Artificial Sequence
  Description of Artificial Sequence: Synthetic oligonucleotide
  Antisense strand to SEQ ID NO: 976304
uggaagaguaaugacucca

SEQ ID NO: 976306 - RNA, 19 nt, Artificial Sequence
  Description of Artificial Sequence: Synthetic oligonucleotide
  Sense strand starting at position 610 of SEQ ID NO: 914077
guagucccucuugaguaga

SEQ ID NO: 976307 - RNA, 19 nt, Artificial Sequence
  Description of Artificial Sequence: Synthetic oligonucleotide
  Antisense strand to SEQ ID NO: 976306
ucuacucaagagggacuac

SEQ ID NO: 976308 - RNA, 19 nt, Artificial Sequence
  Description of Artificial Sequence: Synthetic oligonucleotide
  Sense strand starting at position 3359 of SEQ ID NO: 914077
cuaagucaucuugguaaua

SEQ ID NO: 976309 - RNA, 19 nt, Artificial Sequence
  Description of Artificial Sequence: Synthetic oligonucleotide
  Antisense strand to SEQ ID NO: 976308
uauuaccaagaugacuuag

SEQ ID NO: 976310 - RNA, 19 nt, Artificial Sequence
  Description of Artificial Sequence: Synthetic oligonucleotide
  Sense strand starting at position 2753 of SEQ ID NO: 914077
gggacagagcgcugaaaug

SEQ ID NO: 976311 - RNA, 19 nt, Artificial Sequence
  Description of Artificial Sequence: Synthetic oligonucleotide
  Antisense strand to SEQ ID NO: 976310
cauuucagcgcucuguccc

SEQ ID NO: 976312 - RNA, 19 nt, Artificial Sequence
  Description of Artificial Sequence: Synthetic oligonucleotide
  Sense strand starting at position 1422 of SEQ ID NO: 914077
ggcccucgccaacgauuua

SEQ ID NO: 976313 - RNA, 19 nt, Artificial Sequence
  Description of Artificial Sequence: Synthetic oligonucleotide
  Antisense strand to SEQ ID NO: 976312
uaaaucguuggcgagggcc

SEQ ID NO: 976314 - RNA, 19 nt, Artificial Sequence
  Description of Artificial Sequence: Synthetic oligonucleotide
  Sense strand starting at position 3236 of SEQ ID NO: 914077
gucuacaguuucuuaaaca

SEQ ID NO: 976315 - RNA, 19 nt, Artificial Sequence
  Description of Artificial Sequence: Synthetic oligonucleotide
  Antisense strand to SEQ ID NO: 976314
uguuuaagaaacuguagac

SEQ ID NO: 976316 - RNA, 19 nt, Artificial Sequence
  Description of Artificial Sequence: Synthetic oligonucleotide
  Sense strand starting at position 2412 of SEQ ID NO: 914077
agggaugcaucuguaagua

SEQ ID NO: 976317 - RNA, 19 nt, Artificial Sequence
  Description of Artificial Sequence: Synthetic oligonucleotide
  Antisense strand to SEQ ID NO: 976316
uacuuacagaugcaucccu

SEQ ID NO: 976318 - RNA, 19 nt, Artificial Sequence
  Description of Artificial Sequence: Synthetic oligonucleotide
  Sense strand starting at position 3546 of SEQ ID NO: 914077
ugcuguuaauuacugaaau

SEQ ID NO: 976319 - RNA, 19 nt, Artificial Sequence
  Description of Artificial Sequence: Synthetic oligonucleotide
  Antisense strand to SEQ ID NO: 976318
auuucaguaauuaacagca

SEQ ID NO: 976320 - RNA, 19 nt, Artificial Sequence
  Description of Artificial Sequence: Synthetic oligonucleotide
  Sense strand starting at position 3235 of SEQ ID NO: 914077
ggucuacaguuucuuaaac

SEQ ID NO: 976321 - RNA, 19 nt, Artificial Sequence
  Description of Artificial Sequence: Synthetic oligonucleotide
  Antisense strand to SEQ ID NO: 976320
guuuaagaaacuguagacc

SEQ ID NO: 976322 - RNA, 19 nt, Artificial Sequence
  Description of Artificial Sequence: Synthetic oligonucleotide
  Sense strand starting at position 3959 of SEQ ID NO: 914077
ugugaagucuuucugacau

SEQ ID NO: 976323 - RNA, 19 nt, Artificial Sequence
  Description of Artificial Sequence: Synthetic oligonucleotide
  Antisense strand to SEQ ID NO: 976322
augucagaaagacuucaca

SEQ ID NO: 976324 - RNA, 19 nt, Artificial Sequence
  Description of Artificial Sequence: Synthetic oligonucleotide
  Sense strand starting at position 3369 of SEQ ID NO: 914077
uugguaauaccggguugga

SEQ ID NO: 976325 - RNA, 19 nt, Artificial Sequence
  Description of Artificial Sequence: Synthetic oligonucleotide
  Antisense strand to SEQ ID NO: 976324
uccaacccgguauuaccaa

SEQ ID NO: 976326 - RNA, 19 nt, Artificial Sequence
  Description of Artificial Sequence: Synthetic oligonucleotide
  Sense strand starting at position 633 of SEQ ID NO: 914077
agacgcacucgguaucuaa

SEQ ID NO: 976327 - RNA, 19 nt, Artificial Sequence
  Description of Artificial Sequence: Synthetic oligonucleotide
  Antisense strand to SEQ ID NO: 976326
uuagauaccgagugcgucu

SEQ ID NO: 976328 - RNA, 19 nt, Artificial Sequence
  Description of Artificial Sequence: Synthetic oligonucleotide
  Sense strand starting at position 3335 of SEQ ID NO: 914077
uucuguaugcuugagucaa

SEQ ID NO: 976329 - RNA, 19 nt, Artificial Sequence
  Description of Artificial Sequence: Synthetic oligonucleotide
  Antisense strand to SEQ ID NO: 976328
uugacucaagcauacagaa

SEQ ID NO: 976330 - RNA, 19 nt, Artificial Sequence
  Description of Artificial Sequence: Synthetic oligonucleotide
  Sense strand starting at position 662 of SEQ ID NO: 914077
cgaaauggcacagguguaa

SEQ ID NO: 976331 - RNA, 19 nt, Artificial Sequence
  Description of Artificial Sequence: Synthetic oligonucleotide
  Antisense strand to SEQ ID NO: 976330
uuacaccugugccauuucg

SEQ ID NO: 976332 - RNA, 19 nt, Artificial Sequence
  Description of Artificial Sequence: Synthetic oligonucleotide
  Sense strand starting at position 3182 of SEQ ID NO: 914077
uccuuugagucuuuguaag

SEQ ID NO: 976333 - RNA, 19 nt, Artificial Sequence
  Description of Artificial Sequence: Synthetic oligonucleotide
  Antisense strand to SEQ ID NO: 976332
cuuacaaagacucaaagga

SEQ ID NO: 976334 - RNA, 19 nt, Artificial Sequence
  Description of Artificial Sequence: Synthetic oligonucleotide
  Sense strand starting at position 3337 of SEQ ID NO: 914077
cuguaugcuugagucaaga

SEQ ID NO: 976335 - RNA, 19 nt, Artificial Sequence
  Description of Artificial Sequence: Synthetic oligonucleotide
  Antisense strand to SEQ ID NO: 976334
ucuugacucaagcauacag

SEQ ID NO: 976336 - RNA, 19 nt, Artificial Sequence
  Description of Artificial Sequence: Synthetic oligonucleotide
  Sense strand starting at position 2293 of SEQ ID NO: 914077
ggcggccauaacugauaau

SEQ ID NO: 976337 - RNA, 19 nt, Artificial Sequence
  Description of Artificial Sequence: Synthetic oligonucleotide
  Antisense strand to SEQ ID NO: 976336
auuaucaguuauggccgcc

SEQ ID NO: 976338 - RNA, 19 nt, Artificial Sequence
  Description of Artificial Sequence: Synthetic oligonucleotide
  Sense strand starting at position 2527 of SEQ ID NO: 914077
ugagacgucuggucacuua

SEQ ID NO: 976339 - RNA, 19 nt, Artificial Sequence
  Description of Artificial Sequence: Synthetic oligonucleotide
  Antisense strand to SEQ ID NO: 976338
uaagugaccagacgucuca

SEQ ID NO: 976340 - RNA, 19 nt, Artificial Sequence
  Description of Artificial Sequence: Synthetic oligonucleotide
  Sense strand starting at position 1039 of SEQ ID NO: 914077
aaguuaaugcuuuggaguc

SEQ ID NO: 976341 - RNA, 19 nt, Artificial Sequence
  Description of Artificial Sequence: Synthetic oligonucleotide
  Antisense strand to SEQ ID NO: 976340
gacuccaaagcauuaacuu

SEQ ID NO: 976342 - RNA, 19 nt, Artificial Sequence
  Description of Artificial Sequence: Synthetic oligonucleotide
  Sense strand starting at position 2560 of SEQ ID NO: 914077
aguuuagggcuccgaaauu

SEQ ID NO: 976343 - RNA, 19 nt, Artificial Sequence
  Description of Artificial Sequence: Synthetic oligonucleotide
  Antisense strand to SEQ ID NO: 976342
aauuucggagcccuaaacu

SEQ ID NO: 976344 - RNA, 19 nt, Artificial Sequence
  Description of Artificial Sequence: Synthetic oligonucleotide
  Sense strand starting at position 248 of SEQ ID NO: 914077
ggcuuaucauacucagucu

SEQ ID NO: 976345 - RNA, 19 nt, Artificial Sequence
  Description of Artificial Sequence: Synthetic oligonucleotide
  Antisense strand to SEQ ID NO: 976344
agacugaguaugauaagcc

SEQ ID NO: 976346 - RNA, 19 nt, Artificial Sequence
  Description of Artificial Sequence: Synthetic oligonucleotide
  Sense strand starting at position 3842 of SEQ ID NO: 914077
gaauauaucgggugucucu

SEQ ID NO: 976347 - RNA, 19 nt, Artificial Sequence
  Description of Artificial Sequence: Synthetic oligonucleotide
  Antisense strand to SEQ ID NO: 976346
agagacacccgauauauuc

SEQ ID NO: 976348 - RNA, 19 nt, Artificial Sequence
  Description of Artificial Sequence: Synthetic oligonucleotide
  Sense strand starting at position 3603 of SEQ ID NO: 914077
ucuguuacccguggagaug

SEQ ID NO: 976349 - RNA, 19 nt, Artificial Sequence
  Description of Artificial Sequence: Synthetic oligonucleotide
  Antisense strand to SEQ ID NO: 976348
caucuccacggguaacaga

SEQ ID NO: 976350 - RNA, 19 nt, Artificial Sequence
  Description of Artificial Sequence: Synthetic oligonucleotide
  Sense strand starting at position 332 of SEQ ID NO: 914078
auaaucuagcuagaaugua

SEQ ID NO: 976351 - RNA, 19 nt, Artificial Sequence
  Description of Artificial Sequence: Synthetic oligonucleotide
  Antisense strand to SEQ ID NO: 976350
uacauucuagcuagauuau

SEQ ID NO: 976352 - RNA, 19 nt, Artificial Sequence
  Description of Artificial Sequence: Synthetic oligonucleotide
  Sense strand starting at position 3284 of SEQ ID NO: 914078
guuuguugggucaguauga

SEQ ID NO: 976353 - RNA, 19 nt, Artificial Sequence
  Description of Artificial Sequence: Synthetic oligonucleotide
  Antisense strand to SEQ ID NO: 976352
ucauacugacccaacaaac

SEQ ID NO: 976354 - RNA, 19 nt, Artificial Sequence
  Description of Artificial Sequence: Synthetic oligonucleotide
  Sense strand starting at position 3649 of SEQ ID NO: 914078
uuucuaucuguuuaaagga

SEQ ID NO: 976355 - RNA, 19 nt, Artificial Sequence
  Description of Artificial Sequence: Synthetic oligonucleotide
  Antisense strand to SEQ ID NO: 976354
uccuuuaaacagauagaaa

SEQ ID NO: 976356 - RNA, 19 nt, Artificial Sequence
  Description of Artificial Sequence: Synthetic oligonucleotide
  Sense strand starting at position 2887 of SEQ ID NO: 914078
ccuugucuauauuuagcua

SEQ ID NO: 976357 - RNA, 19 nt, Artificial Sequence
  Description of Artificial Sequence: Synthetic oligonucleotide
  Antisense strand to SEQ ID NO: 976356
uagcuaaauauagacaagg

SEQ ID NO: 976358 - RNA, 19 nt, Artificial Sequence
  Description of Artificial Sequence: Synthetic oligonucleotide
  Sense strand starting at position 1349 of SEQ ID NO: 914078
acaccauuaccgcacaaga

SEQ ID NO: 976359 - RNA, 19 nt, Artificial Sequence
  Description of Artificial Sequence: Synthetic oligonucleotide
  Antisense strand to SEQ ID NO: 976358
ucuugugcgguaauggugu

SEQ ID NO: 976360 - RNA, 19 nt, Artificial Sequence
  Description of Artificial Sequence: Synthetic oligonucleotide
  Sense strand starting at position 3587 of SEQ ID NO: 914078
ccauauaacccaugguaga

SEQ ID NO: 976361 - RNA, 19 nt, Artificial Sequence
  Description of Artificial Sequence: Synthetic oligonucleotide
  Antisense strand to SEQ ID NO: 976360
ucuaccauggguuauaugg

SEQ ID NO: 976362 - RNA, 19 nt, Artificial Sequence
  Description of Artificial Sequence: Synthetic oligonucleotide
  Sense strand starting at position 2739 of SEQ ID NO: 914078
cguguagugcagccaaauu

SEQ ID NO: 976363 - RNA, 19 nt, Artificial Sequence
  Description of Artificial Sequence: Synthetic oligonucleotide
  Antisense strand to SEQ ID NO: 976362
aauuuggcugcacuacacg

SEQ ID NO: 976364 - RNA, 19 nt, Artificial Sequence
  Description of Artificial Sequence: Synthetic oligonucleotide
  Sense strand starting at position 3378 of SEQ ID NO: 914078
gugagcuaucuagccguuu

SEQ ID NO: 976365 - RNA, 19 nt, Artificial Sequence
  Description of Artificial Sequence: Synthetic oligonucleotide
  Antisense strand to SEQ ID NO: 976364
aaacggcuagauagcucac

SEQ ID NO: 976366 - RNA, 19 nt, Artificial Sequence
  Description of Artificial Sequence: Synthetic oligonucleotide
  Sense strand starting at position 3154 of SEQ ID NO: 914078
auauguccuccugggaaga

SEQ ID NO: 976367 - RNA, 19 nt, Artificial Sequence
  Description of Artificial Sequence: Synthetic oligonucleotide
  Antisense strand to SEQ ID NO: 976366
ucuucccaggaggacauau

SEQ ID NO: 976368 - RNA, 19 nt, Artificial Sequence
  Description of Artificial Sequence: Synthetic oligonucleotide
  Sense strand starting at position 3802 of SEQ ID NO: 914078
gaaauauaucgcuaagguc

SEQ ID NO: 976369 - RNA, 19 nt, Artificial Sequence
  Description of Artificial Sequence: Synthetic oligonucleotide
  Antisense strand to SEQ ID NO: 976368
gaccuuagcgauauauuuc

SEQ ID NO: 976370 - RNA, 19 nt, Artificial Sequence
  Description of Artificial Sequence: Synthetic oligonucleotide
  Sense strand starting at position 696 of SEQ ID NO: 914078
acucuaguaccugggacua

SEQ ID NO: 976371 - RNA, 19 nt, Artificial Sequence
  Description of Artificial Sequence: Synthetic oligonucleotide
  Antisense strand to SEQ ID NO: 976370
uagucccagguacuagagu

SEQ ID NO: 976372 - RNA, 19 nt, Artificial Sequence
  Description of Artificial Sequence: Synthetic oligonucleotide
  Sense strand starting at position 1436 of SEQ ID NO: 914078
gcauuacagaaugguaaug

SEQ ID NO: 976373 - RNA, 19 nt, Artificial Sequence
  Description of Artificial Sequence: Synthetic oligonucleotide
  Antisense strand to SEQ ID NO: 976372
cauuaccauucuguaaugc

SEQ ID NO: 976374 - RNA, 19 nt, Artificial Sequence
  Description of Artificial Sequence: Synthetic oligonucleotide
  Sense strand starting at position 1486 of SEQ ID NO: 914078
gcaagcugugacuauagaa

SEQ ID NO: 976375 - RNA, 19 nt, Artificial Sequence
  Description of Artificial Sequence: Synthetic oligonucleotide
  Antisense strand to SEQ ID NO: 976374
uucuauagucacagcuugc

SEQ ID NO: 976376 - RNA, 19 nt, Artificial Sequence
  Description of Artificial Sequence: Synthetic oligonucleotide
  Sense strand starting at position 2934 of SEQ ID NO: 914078
agacuuagcucccugaaau

SEQ ID NO: 976377 - RNA, 19 nt, Artificial Sequence
  Description of Artificial Sequence: Synthetic oligonucleotide
  Antisense strand to SEQ ID NO: 976376
auuucagggagcuaagucu

SEQ ID NO: 976378 - RNA, 19 nt, Artificial Sequence
  Description of Artificial Sequence: Synthetic oligonucleotide
  Sense strand starting at position 2945 of SEQ ID NO: 914078
ccugaaauacguuggauag

SEQ ID NO: 976379 - RNA, 19 nt, Artificial Sequence
  Description of Artificial Sequence: Synthetic oligonucleotide
  Antisense strand to SEQ ID NO: 976378
cuauccaacguauuucagg

SEQ ID NO: 976380 - RNA, 19 nt, Artificial Sequence
  Description of Artificial Sequence: Synthetic oligonucleotide
  Sense strand starting at position 1435 of SEQ ID NO: 914078
ugcauuacagaaugguaau

SEQ ID NO: 976381 - RNA, 19 nt, Artificial Sequence
  Description of Artificial Sequence: Synthetic oligonucleotide
  Antisense strand to SEQ ID NO: 976380
auuaccauucuguaaugca

SEQ ID NO: 976382 - RNA, 19 nt, Artificial Sequence
  Description of Artificial Sequence: Synthetic oligonucleotide
  Sense strand starting at position 382 of SEQ ID NO: 914078
acguguaauaaauggacau

SEQ ID NO: 976383 - RNA, 19 nt, Artificial Sequence
  Description of Artificial Sequence: Synthetic oligonucleotide
  Antisense strand to SEQ ID NO: 976382
auguccauuuauuacacgu

SEQ ID NO: 976384 - RNA, 19 nt, Artificial Sequence
  Description of Artificial Sequence: Synthetic oligonucleotide
  Sense strand starting at position 3662 of SEQ ID NO: 914078
aaaggaccucuacgaguuu

SEQ ID NO: 976385 - RNA, 19 nt, Artificial Sequence
  Description of Artificial Sequence: Synthetic oligonucleotide
  Antisense strand to SEQ ID NO: 976384
aaacucguagagguccuuu

SEQ ID NO: 976386 - RNA, 19 nt, Artificial Sequence
  Description of Artificial Sequence: Synthetic oligonucleotide
  Sense strand starting at position 2738 of SEQ ID NO: 914078
gcguguagugcagccaaau

SEQ ID NO: 976387 - RNA, 19 nt, Artificial Sequence
  Description of Artificial Sequence: Synthetic oligonucleotide
  Antisense strand to SEQ ID NO: 976386
auuuggcugcacuacacgc

SEQ ID NO: 976388 - RNA, 19 nt, Artificial Sequence
  Description of Artificial Sequence: Synthetic oligonucleotide
  Sense strand starting at position 3801 of SEQ ID NO: 914078
ggaaauauaucgcuaaggu

SEQ ID NO: 976389 - RNA, 19 nt, Artificial Sequence
  Description of Artificial Sequence: Synthetic oligonucleotide
  Antisense strand to SEQ ID NO: 976388
accuuagcgauauauuucc

SEQ ID NO: 976390 - RNA, 19 nt, Artificial Sequence
  Description of Artificial Sequence: Synthetic oligonucleotide
  Sense strand starting at position 383 of SEQ ID NO: 914078
cguguaauaaauggacauu

SEQ ID NO: 976391 - RNA, 19 nt, Artificial Sequence
  Description of Artificial Sequence: Synthetic oligonucleotide
  Antisense strand to SEQ ID NO: 976390
aauguccauuuauuacacg

SEQ ID NO: 976392 - RNA, 19 nt, Artificial Sequence
  Description of Artificial Sequence: Synthetic oligonucleotide
  Sense strand starting at position 375 of SEQ ID NO: 914078
ucgugaaacguguaauaaa

SEQ ID NO: 976393 - RNA, 19 nt, Artificial Sequence
  Description of Artificial Sequence: Synthetic oligonucleotide
  Antisense strand to SEQ ID NO: 976392
uuuauuacacguuucacga

SEQ ID NO: 976394 - RNA, 19 nt, Artificial Sequence
  Description of Artificial Sequence: Synthetic oligonucleotide
  Sense strand starting at position 3668 of SEQ ID NO: 914078
ccucuacgaguuuauggua

SEQ ID NO: 976395 - RNA, 19 nt, Artificial Sequence
  Description of Artificial Sequence: Synthetic oligonucleotide
  Antisense strand to SEQ ID NO: 976394
uaccauaaacucguagagg

SEQ ID NO: 976396 - RNA, 19 nt, Artificial Sequence
  Description of Artificial Sequence: Synthetic oligonucleotide
  Sense strand starting at position 2946 of SEQ ID NO: 914078
cugaaauacguuggauagu

SEQ ID NO: 976397 - RNA, 19 nt, Artificial Sequence
  Description of Artificial Sequence: Synthetic oligonucleotide
  Antisense strand to SEQ ID NO: 976396
acuauccaacguauuucag

SEQ ID NO: 976398 - RNA, 19 nt, Artificial Sequence
  Description of Artificial Sequence: Synthetic oligonucleotide
  Sense strand starting at position 1334 of SEQ ID NO: 914078
gcauguuuagcccaaacac

SEQ ID NO: 976399 - RNA, 19 nt, Artificial Sequence
  Description of Artificial Sequence: Synthetic oligonucleotide
  Antisense strand to SEQ ID NO: 976398
guguuugggcuaaacaugc

SEQ ID NO: 976400 - RNA, 19 nt, Artificial Sequence
  Description of Artificial Sequence: Synthetic oligonucleotide
  Sense strand starting at position 3648 of SEQ ID NO: 914078
guuucuaucuguuuaaagg

SEQ ID NO: 976401 - RNA, 19 nt, Artificial Sequence
  Description of Artificial Sequence: Synthetic oligonucleotide
  Antisense strand to SEQ ID NO: 976400
ccuuuaaacagauagaaac

SEQ ID NO: 976402 - RNA, 19 nt, Artificial Sequence
  Description of Artificial Sequence: Synthetic oligonucleotide
  Sense strand starting at position 1282 of SEQ ID NO: 914078
uuaugcuagaaguguuaag

SEQ ID NO: 976403 - RNA, 19 nt, Artificial Sequence
  Description of Artificial Sequence: Synthetic oligonucleotide
  Antisense strand to SEQ ID NO: 976402
cuuaacacuucuagcauaa

SEQ ID NO: 976404 - RNA, 19 nt, Artificial Sequence
  Description of Artificial Sequence: Synthetic oligonucleotide
  Sense strand starting at position 556 of SEQ ID NO: 914078
gcuugaaaucagggucucu

SEQ ID NO: 976405 - RNA, 19 nt, Artificial Sequence
  Description of Artificial Sequence: Synthetic oligonucleotide
  Antisense strand to SEQ ID NO: 976404
agagacccugauuucaagc

SEQ ID NO: 976406 - RNA, 19 nt, Artificial Sequence
  Description of Artificial Sequence: Synthetic oligonucleotide
  Sense strand starting at position 3336 of SEQ ID NO: 914078
acaucugcccuugguuaaa

SEQ ID NO: 976407 - RNA, 19 nt, Artificial Sequence
  Description of Artificial Sequence: Synthetic oligonucleotide
  Antisense strand to SEQ ID NO: 976406
uuuaaccaagggcagaugu

SEQ ID NO: 976408 - RNA, 19 nt, Artificial Sequence
  Description of Artificial Sequence: Synthetic oligonucleotide
  Sense strand starting at position 1365 of SEQ ID NO: 914078
agagcaagauuagaauaaa

SEQ ID NO: 976409 - RNA, 19 nt, Artificial Sequence
  Description of Artificial Sequence: Synthetic oligonucleotide
  Antisense strand to SEQ ID NO: 976408
uuuauucuaaucuugcucu

SEQ ID NO: 976410 - RNA, 19 nt, Artificial Sequence
  Description of Artificial Sequence: Synthetic oligonucleotide
  Sense strand starting at position 3114 of SEQ ID NO: 914078
ucacuuguagggugguaua

SEQ ID NO: 976411 - RNA, 19 nt, Artificial Sequence
  Description of Artificial Sequence: Synthetic oligonucleotide
  Antisense strand to SEQ ID NO: 976410
uauaccacccuacaaguga

SEQ ID NO: 976412 - RNA, 19 nt, Artificial Sequence
  Description of Artificial Sequence: Synthetic oligonucleotide
  Sense strand starting at position 709 of SEQ ID NO: 914078
ggacuaaaggugugcgaca

SEQ ID NO: 976413 - RNA, 19 nt, Artificial Sequence
  Description of Artificial Sequence: Synthetic oligonucleotide
  Antisense strand to SEQ ID NO: 976412
ugucgcacaccuuuagucc

SEQ ID NO: 976414 - RNA, 19 nt, Artificial Sequence
  Description of Artificial Sequence: Synthetic oligonucleotide
  Sense strand starting at position 2812 of SEQ ID NO: 914078
gccggaacagcucaaguuu

SEQ ID NO: 976415 - RNA, 19 nt, Artificial Sequence
  Description of Artificial Sequence: Synthetic oligonucleotide
  Antisense strand to SEQ ID NO: 976414
aaacuugagcuguuccggc

SEQ ID NO: 976416 - RNA, 19 nt, Artificial Sequence
  Description of Artificial Sequence: Synthetic oligonucleotide
  Sense strand starting at position 1296 of SEQ ID NO: 914078
uuaaguuugugucucaaua

SEQ ID NO: 976417 - RNA, 19 nt, Artificial Sequence
  Description of Artificial Sequence: Synthetic oligonucleotide
  Antisense strand to SEQ ID NO: 976416
uauugagacacaaacuuaa

SEQ ID NO: 976418 - RNA, 19 nt, Artificial Sequence
  Description of Artificial Sequence: Synthetic oligonucleotide
  Sense strand starting at position 545 of SEQ ID NO: 914078
ucaacuguguugcuugaaa

SEQ ID NO: 976419 - RNA, 19 nt, Artificial Sequence
  Description of Artificial Sequence: Synthetic oligonucleotide
  Antisense strand to SEQ ID NO: 976418
uuucaagcaacacaguuga

SEQ ID NO: 976420 - RNA, 19 nt, Artificial Sequence
  Description of Artificial Sequence: Synthetic oligonucleotide
  Sense strand starting at position 547 of SEQ ID NO: 914078
aacuguguugcuugaaauc

SEQ ID NO: 976421 - RNA, 19 nt, Artificial Sequence
  Description of Artificial Sequence: Synthetic oligonucleotide
  Antisense strand to SEQ ID NO: 976420
gauuucaagcaacacaguu

SEQ ID NO: 976422 - RNA, 19 nt, Artificial Sequence
  Description of Artificial Sequence: Synthetic oligonucleotide
  Sense strand starting at position 1464 of SEQ ID NO: 914078
acagccacguucuuuaaau

SEQ ID NO: 976423 - RNA, 19 nt, Artificial Sequence
  Description of Artificial Sequence: Synthetic oligonucleotide
  Antisense strand to SEQ ID NO: 976422
auuuaaagaacguggcugu

SEQ ID NO: 976424 - RNA, 19 nt, Artificial Sequence
  Description of Artificial Sequence: Synthetic oligonucleotide
  Sense strand starting at position 2850 of SEQ ID NO: 914078
ccacgucuuccugaagugu

SEQ ID NO: 976425 - RNA, 19 nt, Artificial Sequence
  Description of Artificial Sequence: Synthetic oligonucleotide
  Antisense strand to SEQ ID NO: 976424
acacuucaggaagacgugg

SEQ ID NO: 976426 - RNA, 19 nt, Artificial Sequence
  Description of Artificial Sequence: Synthetic oligonucleotide
  Sense strand starting at position 2976 of SEQ ID NO: 914078
guuaauaaguaggaagaga

SEQ ID NO: 976427 - RNA, 19 nt, Artificial Sequence
  Description of Artificial Sequence: Synthetic oligonucleotide
  Antisense strand to SEQ ID NO: 976426
ucucuuccuacuuauuaac

SEQ ID NO: 976428 - RNA, 19 nt, Artificial Sequence
  Description of Artificial Sequence: Synthetic oligonucleotide
  Sense strand starting at position 3727 of SEQ ID NO: 914078
aucaauuaccugcgugacu

SEQ ID NO: 976429 - RNA, 19 nt, Artificial Sequence
  Description of Artificial Sequence: Synthetic oligonucleotide
  Antisense strand to SEQ ID NO: 976428
agucacgcagguaauugau

SEQ ID NO: 976430 - RNA, 19 nt, Artificial Sequence
  Description of Artificial Sequence: Synthetic oligonucleotide
  Sense strand starting at position 2772 of SEQ ID NO: 914079
guuuguugggucaguauga

SEQ ID NO: 976431 - RNA, 19 nt, Artificial Sequence
  Description of Artificial Sequence: Synthetic oligonucleotide
  Antisense strand to SEQ ID NO: 976430
ucauacugacccaacaaac

SEQ ID NO: 976432 - RNA, 19 nt, Artificial Sequence
  Description of Artificial Sequence: Synthetic oligonucleotide
  Sense strand starting at position 3137 of SEQ ID NO: 914079
uuucuaucuguuuaaagga

SEQ ID NO: 976433 - RNA, 19 nt, Artificial Sequence
  Description of Artificial Sequence: Synthetic oligonucleotide
  Antisense strand to SEQ ID NO: 976432
uccuuuaaacagauagaaa

SEQ ID NO: 976434 - RNA, 19 nt, Artificial Sequence
  Description of Artificial Sequence: Synthetic oligonucleotide
  Sense strand starting at position 2375 of SEQ ID NO: 914079
ccuugucuauauuuagcua

SEQ ID NO: 976435 - RNA, 19 nt, Artificial Sequence
  Description of Artificial Sequence: Synthetic oligonucleotide
  Antisense strand to SEQ ID NO: 976434
uagcuaaauauagacaagg

SEQ ID NO: 976436 - RNA, 19 nt, Artificial Sequence
  Description of Artificial Sequence: Synthetic oligonucleotide
  Sense strand starting at position 837 of SEQ ID NO: 914079
acaccauuaccgcacaaga

SEQ ID NO: 976437 - RNA, 19 nt, Artificial Sequence
  Description of Artificial Sequence: Synthetic oligonucleotide
  Antisense strand to SEQ ID NO: 976436
ucuugugcgguaauggugu

SEQ ID NO: 976438 - RNA, 19 nt, Artificial Sequence
  Description of Artificial Sequence: Synthetic oligonucleotide
  Sense strand starting at position 3075 of SEQ ID NO: 914079
ccauauaacccaugguaga

SEQ ID NO: 976439 - RNA, 19 nt, Artificial Sequence
  Description of Artificial Sequence: Synthetic oligonucleotide
  Antisense strand to SEQ ID NO: 976438
ucuaccauggguuauaugg

SEQ ID NO: 976440 - RNA, 19 nt, Artificial Sequence
  Description of Artificial Sequence: Synthetic oligonucleotide
  Sense strand starting at position 2227 of SEQ ID NO: 914079
cguguagugcagccaaauu

SEQ ID NO: 976441 - RNA, 19 nt, Artificial Sequence
  Description of Artificial Sequence: Synthetic oligonucleotide
  Antisense strand to SEQ ID NO: 976440
aauuuggcugcacuacacg

SEQ ID NO: 976442 - RNA, 19 nt, Artificial Sequence
  Description of Artificial Sequence: Synthetic oligonucleotide
  Sense strand starting at position 2866 of SEQ ID NO: 914079
gugagcuaucuagccguuu

SEQ ID NO: 976443 - RNA, 19 nt, Artificial Sequence
  Description of Artificial Sequence: Synthetic oligonucleotide
  Antisense strand to SEQ ID NO: 976442
aaacggcuagauagcucac

SEQ ID NO: 976444 - RNA, 19 nt, Artificial Sequence
  Description of Artificial Sequence: Synthetic oligonucleotide
  Sense strand starting at position 2642 of SEQ ID NO: 914079
auauguccuccugggaaga

SEQ ID NO: 976445 - RNA, 19 nt, Artificial Sequence
  Description of Artificial Sequence: Synthetic oligonucleotide
  Antisense strand to SEQ ID NO: 976444
ucuucccaggaggacauau

SEQ ID NO: 976446 - RNA, 19 nt, Artificial Sequence
  Description of Artificial Sequence: Synthetic oligonucleotide
  Sense strand starting at position 3808 of SEQ ID NO: 914079
auggcucaccuauaaguau

SEQ ID NO: 976447 - RNA, 19 nt, Artificial Sequence
  Description of Artificial Sequence: Synthetic oligonucleotide
  Antisense strand to SEQ ID NO: 976446
auacuuauaggugagccau

SEQ ID NO: 976448 - RNA, 19 nt, Artificial Sequence
  Description of Artificial Sequence: Synthetic oligonucleotide
  Sense strand starting at position 3290 of SEQ ID NO: 914079
gaaauauaucgcuaagguc

SEQ ID NO: 976449 - RNA, 19 nt, Artificial Sequence
  Description of Artificial Sequence: Synthetic oligonucleotide
  Antisense strand to SEQ ID NO: 976448
gaccuuagcgauauauuuc

SEQ ID NO: 976450 - RNA, 19 nt, Artificial Sequence
  Description of Artificial Sequence: Synthetic oligonucleotide
  Sense strand starting at position 184 of SEQ ID NO: 914079
acucuaguaccugggacua

SEQ ID NO: 976451 - RNA, 19 nt, Artificial Sequence
  Description of Artificial Sequence: Synthetic oligonucleotide
  Antisense strand to SEQ ID NO: 976450
uagucccagguacuagagu

SEQ ID NO: 976452 - RNA, 19 nt, Artificial Sequence
  Description of Artificial Sequence: Synthetic oligonucleotide
  Sense strand starting at position 924 of SEQ ID NO: 914079
gcauuacagaaugguaaug

SEQ ID NO: 976453 - RNA, 19 nt, Artificial Sequence
  Description of Artificial Sequence: Synthetic oligonucleotide
  Antisense strand to SEQ ID NO: 976452
cauuaccauucuguaaugc

SEQ ID NO: 976454 - RNA, 19 nt, Artificial Sequence
  Description of Artificial Sequence: Synthetic oligonucleotide
  Sense strand starting at position 974 of SEQ ID NO: 914079
gcaagcugugacuauagaa

SEQ ID NO: 976455 - RNA, 19 nt, Artificial Sequence
  Description of Artificial Sequence: Synthetic oligonucleotide
  Antisense strand to SEQ ID NO: 976454
uucuauagucacagcuugc

SEQ ID NO: 976456 - RNA, 19 nt, Artificial Sequence
  Description of Artificial Sequence: Synthetic oligonucleotide
  Sense strand starting at position 2422 of SEQ ID NO: 914079
agacuuagcucccugaaau

SEQ ID NO: 976457 - RNA, 19 nt, Artificial Sequence
  Description of Artificial Sequence: Synthetic oligonucleotide
  Antisense strand to SEQ ID NO: 976456
auuucagggagcuaagucu

SEQ ID NO: 976458 - RNA, 19 nt, Artificial Sequence
  Description of Artificial Sequence: Synthetic oligonucleotide
  Sense strand starting at position 2433 of SEQ ID NO: 914079
ccugaaauacguuggauag

SEQ ID NO: 976459 - RNA, 19 nt, Artificial Sequence
  Description of Artificial Sequence: Synthetic oligonucleotide
  Antisense strand to SEQ ID NO: 976458
cuauccaacguauuucagg

SEQ ID NO: 976460 - RNA, 19 nt, Artificial Sequence
  Description of Artificial Sequence: Synthetic oligonucleotide
  Sense strand starting at position 923 of SEQ ID NO: 914079
ugcauuacagaaugguaau

SEQ ID NO: 976461 - RNA, 19 nt, Artificial Sequence
  Description of Artificial Sequence: Synthetic oligonucleotide
  Antisense strand to SEQ ID NO: 976460
auuaccauucuguaaugca

SEQ ID NO: 976462 - RNA, 19 nt, Artificial Sequence
  Description of Artificial Sequence: Synthetic oligonucleotide
  Sense strand starting at position 3150 of SEQ ID NO: 914079
aaaggaccucuacgaguuu

SEQ ID NO: 976463 - RNA, 19 nt, Artificial Sequence
  Description of Artificial Sequence: Synthetic oligonucleotide
  Antisense strand to SEQ ID NO: 976462
aaacucguagagguccuuu

SEQ ID NO: 976464 - RNA, 19 nt, Artificial Sequence
  Description of Artificial Sequence: Synthetic oligonucleotide
  Sense strand starting at position 2226 of SEQ ID NO: 914079
gcguguagugcagccaaau

SEQ ID NO: 976465 - RNA, 19 nt, Artificial Sequence
  Description of Artificial Sequence: Synthetic oligonucleotide
  Antisense strand to SEQ ID NO: 976464
auuuggcugcacuacacgc

SEQ ID NO: 976466 - RNA, 19 nt, Artificial Sequence
  Description of Artificial Sequence: Synthetic oligonucleotide
  Sense strand starting at position 3289 of SEQ ID NO: 914079
ggaaauauaucgcuaaggu

SEQ ID NO: 976467 - RNA, 19 nt, Artificial Sequence
  Description of Artificial Sequence: Synthetic oligonucleotide
  Antisense strand to SEQ ID NO: 976466
accuuagcgauauauuucc

SEQ ID NO: 976468 - RNA, 19 nt, Artificial Sequence
  Description of Artificial Sequence: Synthetic oligonucleotide
  Sense strand starting at position 3156 of SEQ ID NO: 914079
ccucuacgaguuuauggua

SEQ ID NO: 976469 - RNA, 19 nt, Artificial Sequence
  Description of Artificial Sequence: Synthetic oligonucleotide
  Antisense strand to SEQ ID NO: 976468
uaccauaaacucguagagg

SEQ ID NO: 976470 - RNA, 19 nt, Artificial Sequence
  Description of Artificial Sequence: Synthetic oligonucleotide
  Sense strand starting at position 2434 of SEQ ID NO: 914079
cugaaauacguuggauagu

SEQ ID NO: 976471 - RNA, 19 nt, Artificial Sequence
  Description of Artificial Sequence: Synthetic oligonucleotide
  Antisense strand to SEQ ID NO: 976470
acuauccaacguauuucag

SEQ ID NO: 976472 - RNA, 19 nt, Artificial Sequence
  Description of Artificial Sequence: Synthetic oligonucleotide
  Sense strand starting at position 822 of SEQ ID NO: 914079
gcauguuuagcccaaacac

SEQ ID NO: 976473 - RNA, 19 nt, Artificial Sequence
  Description of Artificial Sequence: Synthetic oligonucleotide
  Antisense strand to SEQ ID NO: 976472
guguuugggcuaaacaugc

SEQ ID NO: 976474 - RNA, 19 nt, Artificial Sequence
  Description of Artificial Sequence: Synthetic oligonucleotide
  Sense strand starting at position 3136 of SEQ ID NO: 914079
guuucuaucuguuuaaagg

SEQ ID NO: 976475 - RNA, 19 nt, Artificial Sequence
  Description of Artificial Sequence: Synthetic oligonucleotide
  Antisense strand to SEQ ID NO: 976474
ccuuuaaacagauagaaac

SEQ ID NO: 976476 - RNA, 19 nt, Artificial Sequence
  Description of Artificial Sequence: Synthetic oligonucleotide
  Sense strand starting at position 770 of SEQ ID NO: 914079
uuaugcuagaaguguuaag

SEQ ID NO: 976477 - RNA, 19 nt, Artificial Sequence
  Description of Artificial Sequence: Synthetic oligonucleotide
  Antisense strand to SEQ ID NO: 976476
cuuaacacuucuagcauaa

SEQ ID NO: 976478 - RNA, 19 nt, Artificial Sequence
  Description of Artificial Sequence: Synthetic oligonucleotide
  Sense strand starting at position 44 of SEQ ID NO: 914079
gcuugaaaucagggucucu

SEQ ID NO: 976479 - RNA, 19 nt, Artificial Sequence
  Description of Artificial Sequence: Synthetic oligonucleotide
  Antisense strand to SEQ ID NO: 976478
agagacccugauuucaagc

SEQ ID NO: 976480 - RNA, 19 nt, Artificial Sequence
  Description of Artificial Sequence: Synthetic oligonucleotide
  Sense strand starting at position 2824 of SEQ ID NO: 914079
acaucugcccuugguuaaa

SEQ ID NO: 976481 - RNA, 19 nt, Artificial Sequence
  Description of Artificial Sequence: Synthetic oligonucleotide
  Antisense strand to SEQ ID NO: 976480
uuuaaccaagggcagaugu

SEQ ID NO: 976482 - RNA, 19 nt, Artificial Sequence
  Description of Artificial Sequence: Synthetic oligonucleotide
  Sense strand starting at position 853 of SEQ ID NO: 914079
agagcaagauuagaauaaa

SEQ ID NO: 976483 - RNA, 19 nt, Artificial Sequence
  Description of Artificial Sequence: Synthetic oligonucleotide
  Antisense strand to SEQ ID NO: 976482
uuuauucuaaucuugcucu

SEQ ID NO: 976484 - RNA, 19 nt, Artificial Sequence
  Description of Artificial Sequence: Synthetic oligonucleotide
  Sense strand starting at position 2602 of SEQ ID NO: 914079
ucacuuguagggugguaua

SEQ ID NO: 976485 - RNA, 19 nt, Artificial Sequence
  Description of Artificial Sequence: Synthetic oligonucleotide
  Antisense strand to SEQ ID NO: 976484
uauaccacccuacaaguga

SEQ ID NO: 976486 - RNA, 19 nt, Artificial Sequence
  Description of Artificial Sequence: Synthetic oligonucleotide
  Sense strand starting at position 197 of SEQ ID NO: 914079
ggacuaaaggugugcgaca

SEQ ID NO: 976487 - RNA, 19 nt, Artificial Sequence
  Description of Artificial Sequence: Synthetic oligonucleotide
  Antisense strand to SEQ ID NO: 976486
ugucgcacaccuuuagucc

SEQ ID NO: 976488 - RNA, 19 nt, Artificial Sequence
  Description of Artificial Sequence: Synthetic oligonucleotide
  Sense strand starting at position 2300 of SEQ ID NO: 914079
gccggaacagcucaaguuu

SEQ ID NO: 976489 - RNA, 19 nt, Artificial Sequence
  Description of Artificial Sequence: Synthetic oligonucleotide
  Antisense strand to SEQ ID NO: 976488
aaacuugagcuguuccggc

SEQ ID NO: 976490 - RNA, 19 nt, Artificial Sequence
  Description of Artificial Sequence: Synthetic oligonucleotide
  Sense strand starting at position 784 of SEQ ID NO: 914079
uuaaguuugugucucaaua

SEQ ID NO: 976491 - RNA, 19 nt, Artificial Sequence
  Description of Artificial Sequence: Synthetic oligonucleotide
  Antisense strand to SEQ ID NO: 976490
uauugagacacaaacuuaa

SEQ ID NO: 976492 - RNA, 19 nt, Artificial Sequence
  Description of Artificial Sequence: Synthetic oligonucleotide
  Sense strand starting at position 33 of SEQ ID NO: 914079
ucaacuguguugcuugaaa

SEQ ID NO: 976493 - RNA, 19 nt, Artificial Sequence
  Description of Artificial Sequence: Synthetic oligonucleotide
  Antisense strand to SEQ ID NO: 976492
uuucaagcaacacaguuga

SEQ ID NO: 976494 - RNA, 19 nt, Artificial Sequence
  Description of Artificial Sequence: Synthetic oligonucleotide
  Sense strand starting at position 35 of SEQ ID NO: 914079
aacuguguugcuugaaauc

SEQ ID NO: 976495 - RNA, 19 nt, Artificial Sequence
  Description of Artificial Sequence: Synthetic oligonucleotide
  Antisense strand to SEQ ID NO: 976494
gauuucaagcaacacaguu

SEQ ID NO: 976496 - RNA, 19 nt, Artificial Sequence
  Description of Artificial Sequence: Synthetic oligonucleotide
  Sense strand starting at position 952 of SEQ ID NO: 914079
acagccacguucuuuaaau

SEQ ID NO: 976497 - RNA, 19 nt, Artificial Sequence
  Description of Artificial Sequence: Synthetic oligonucleotide
  Antisense strand to SEQ ID NO: 976496
auuuaaagaacguggcugu

SEQ ID NO: 976498 - RNA, 19 nt, Artificial Sequence
  Description of Artificial Sequence: Synthetic oligonucleotide
  Sense strand starting at position 2338 of SEQ ID NO: 914079
ccacgucuuccugaagugu

SEQ ID NO: 976499 - RNA, 19 nt, Artificial Sequence
  Description of Artificial Sequence: Synthetic oligonucleotide
  Antisense strand to SEQ ID NO: 976498
acacuucaggaagacgugg

SEQ ID NO: 976500 - RNA, 19 nt, Artificial Sequence
  Description of Artificial Sequence: Synthetic oligonucleotide
  Sense strand starting at position 2464 of SEQ ID NO: 914079
guuaauaaguaggaagaga

SEQ ID NO: 976501 - RNA, 19 nt, Artificial Sequence
  Description of Artificial Sequence: Synthetic oligonucleotide
  Antisense strand to SEQ ID NO: 976500
ucucuuccuacuuauuaac

SEQ ID NO: 976502 - RNA, 19 nt, Artificial Sequence
  Description of Artificial Sequence: Synthetic oligonucleotide
  Sense strand starting at position 3215 of SEQ ID NO: 914079
aucaauuaccugcgugacu

SEQ ID NO: 976503 - RNA, 19 nt, Artificial Sequence
  Description of Artificial Sequence: Synthetic oligonucleotide
  Antisense strand to SEQ ID NO: 976502
agucacgcagguaauugau

SEQ ID NO: 976504 - RNA, 19 nt, Artificial Sequence
  Description of Artificial Sequence: Synthetic oligonucleotide
  Sense strand starting at position 2383 of SEQ ID NO: 914079
auauuuagcuaaggguuaa

SEQ ID NO: 976505 - RNA, 19 nt, Artificial Sequence
  Description of Artificial Sequence: Synthetic oligonucleotide
  Antisense strand to SEQ ID NO: 976504
uuaacccuuagcuaaauau

SEQ ID NO: 976506 - RNA, 19 nt, Artificial Sequence
  Description of Artificial Sequence: Synthetic oligonucleotide
  Sense strand starting at position 2769 of SEQ ID NO: 914079
uggguuuguugggucagua

SEQ ID NO: 976507 - RNA, 19 nt, Artificial Sequence
  Description of Artificial Sequence: Synthetic oligonucleotide
  Antisense strand to SEQ ID NO: 976506
uacugacccaacaaaccca

SEQ ID NO: 976508 - RNA, 19 nt, Artificial Sequence
  Description of Artificial Sequence: Synthetic oligonucleotide
  Sense strand starting at position 3216 of SEQ ID NO: 914079
ucaauuaccugcgugacuu

SEQ ID NO: 976509 - RNA, 19 nt, Artificial Sequence
  Description of Artificial Sequence: Synthetic oligonucleotide
  Antisense strand to SEQ ID NO: 976508
aagucacgcagguaauuga

SEQ ID NO: 976510 - RNA, 19 nt, Artificial Sequence
  Description of Artificial Sequence: Synthetic oligonucleotide
  Sense strand starting at position 2037 of SEQ ID NO: 914080
ggaugagaguugagaggaa

SEQ ID NO: 976511 - RNA, 19 nt, Artificial Sequence
  Description of Artificial Sequence: Synthetic oligonucleotide
  Antisense strand to SEQ ID NO: 976510
uuccucucaacucucaucc

SEQ ID NO: 976512 - RNA, 19 nt, Artificial Sequence
  Description of Artificial Sequence: Synthetic oligonucleotide
  Sense strand starting at position 1117 of SEQ ID NO: 914080
ccaguucguagagaaacaa

SEQ ID NO: 976513 - RNA, 19 nt, Artificial Sequence
  Description of Artificial Sequence: Synthetic oligonucleotide
  Antisense strand to SEQ ID NO: 976512
uuguuucucuacgaacugg

SEQ ID NO: 976514 - RNA, 19 nt, Artificial Sequence
  Description of Artificial Sequence: Synthetic oligonucleotide
  Sense strand starting at position 858 of SEQ ID NO: 914080
gcagaauuaggauggacuu

SEQ ID NO: 976515 - RNA, 19 nt, Artificial Sequence
  Description of Artificial Sequence: Synthetic oligonucleotide
  Antisense strand to SEQ ID NO: 976514
aaguccauccuaauucugc

SEQ ID NO: 976516 - RNA, 19 nt, Artificial Sequence
  Description of Artificial Sequence: Synthetic oligonucleotide
  Sense strand starting at position 1997 of SEQ ID NO: 914080
caaauuuacugcguuauug

SEQ ID NO: 976517 - RNA, 19 nt, Artificial Sequence
  Description of Artificial Sequence: Synthetic oligonucleotide
  Antisense strand to SEQ ID NO: 976516
caauaacgcaguaaauuug

SEQ ID NO: 976518 - RNA, 19 nt, Artificial Sequence
  Description of Artificial Sequence: Synthetic oligonucleotide
  Sense strand starting at position 3251 of SEQ ID NO: 914080
ugcuguauuuccuucuaga

SEQ ID NO: 976519 - RNA, 19 nt, Artificial Sequence
  Description of Artificial Sequence: Synthetic oligonucleotide
  Antisense strand to SEQ ID NO: 976518
ucuagaaggaaauacagca

SEQ ID NO: 976520 - RNA, 19 nt, Artificial Sequence
  Description of Artificial Sequence: Synthetic oligonucleotide
  Sense strand starting at position 1999 of SEQ ID NO: 914080
aauuuacugcguuauugca

SEQ ID NO: 976521 - RNA, 19 nt, Artificial Sequence
  Description of Artificial Sequence: Synthetic oligonucleotide
  Antisense strand to SEQ ID NO: 976520
ugcaauaacgcaguaaauu

SEQ ID NO: 976522 - RNA, 19 nt, Artificial Sequence
  Description of Artificial Sequence: Synthetic oligonucleotide
  Sense strand starting at position 1627 of SEQ ID NO: 914080
aggagagggauucguauug

SEQ ID NO: 976523 - RNA, 19 nt, Artificial Sequence
  Description of Artificial Sequence: Synthetic oligonucleotide
  Antisense strand to SEQ ID NO: 976522
caauacgaaucccucuccu

SEQ ID NO: 976524 - RNA, 19 nt, Artificial Sequence
  Description of Artificial Sequence: Synthetic oligonucleotide
  Sense strand starting at position 3218 of SEQ ID NO: 914080
agaugucuuaaggguuaaa

SEQ ID NO: 976525 - RNA, 19 nt, Artificial Sequence
  Description of Artificial Sequence: Synthetic oligonucleotide
  Antisense strand to SEQ ID NO: 976524
uuuaacccuuaagacaucu

SEQ ID NO: 976526 - RNA, 19 nt, Artificial Sequence
  Description of Artificial Sequence: Synthetic oligonucleotide
  Sense strand starting at position 73 of SEQ ID NO: 914080
ccugauggucucuggaaag

SEQ ID NO: 976527 - RNA, 19 nt, Artificial Sequence
  Description of Artificial Sequence: Synthetic oligonucleotide
  Antisense strand to SEQ ID NO: 976526
cuuuccagagaccaucagg

SEQ ID NO: 976528 - RNA, 19 nt, Artificial Sequence
  Description of Artificial Sequence: Synthetic oligonucleotide
  Sense strand starting at position 617 of SEQ ID NO: 914080
guuaaaugccgauacaaac

SEQ ID NO: 976529 - RNA, 19 nt, Artificial Sequence
  Description of Artificial Sequence: Synthetic oligonucleotide
  Antisense strand to SEQ ID NO: 976528
guuuguaucggcauuuaac

SEQ ID NO: 976530 - RNA, 19 nt, Artificial Sequence
  Description of Artificial Sequence: Synthetic oligonucleotide
  Sense strand starting at position 3840 of SEQ ID NO: 914080
gcugaagaccucggaggaa

SEQ ID NO: 976531 - RNA, 19 nt, Artificial Sequence
  Description of Artificial Sequence: Synthetic oligonucleotide
  Antisense strand to SEQ ID NO: 976530
uuccuccgaggucuucagc

SEQ ID NO: 976532 - RNA, 19 nt, Artificial Sequence
  Description of Artificial Sequence: Synthetic oligonucleotide
  Sense strand starting at position 1529 of SEQ ID NO: 914080
ucucauggcuaucuggaaa

SEQ ID NO: 976533 - RNA, 19 nt, Artificial Sequence
  Description of Artificial Sequence: Synthetic oligonucleotide
  Antisense strand to SEQ ID NO: 976532
uuuccagauagccaugaga

SEQ ID NO: 976534 - RNA, 19 nt, Artificial Sequence
  Description of Artificial Sequence: Synthetic oligonucleotide
  Sense strand starting at position 2964 of SEQ ID NO: 914080
cagcgaauugugucgcuuu

SEQ ID NO: 976535 - RNA, 19 nt, Artificial Sequence
  Description of Artificial Sequence: Synthetic oligonucleotide
  Antisense strand to SEQ ID NO: 976534
aaagcgacacaauucgcug

SEQ ID NO: 976536 - RNA, 19 nt, Artificial Sequence
  Description of Artificial Sequence: Synthetic oligonucleotide
  Sense strand starting at position 1213 of SEQ ID NO: 914080
agggauucgcuuuacucua

SEQ ID NO: 976537 - RNA, 19 nt, Artificial Sequence
  Description of Artificial Sequence: Synthetic oligonucleotide
  Antisense strand to SEQ ID NO: 976536
uagaguaaagcgaaucccu

SEQ ID NO: 976538 - RNA, 19 nt, Artificial Sequence
  Description of Artificial Sequence: Synthetic oligonucleotide
  Sense strand starting at position 90 of SEQ ID NO: 914080
agggaauccucuucugguu

SEQ ID NO: 976539 - RNA, 19 nt, Artificial Sequence
  Description of Artificial Sequence: Synthetic oligonucleotide
  Antisense strand to SEQ ID NO: 976538
aaccagaagaggauucccu

SEQ ID NO: 976540 - RNA, 19 nt, Artificial Sequence
  Description of Artificial Sequence: Synthetic oligonucleotide
  Sense strand starting at position 2101 of SEQ ID NO: 914080
uuaagagcuccgcaaugga

SEQ ID NO: 976541 - RNA, 19 nt, Artificial Sequence
  Description of Artificial Sequence: Synthetic oligonucleotide
  Antisense strand to SEQ ID NO: 976540
uccauugcggagcucuuaa

SEQ ID NO: 976542 - RNA, 19 nt, Artificial Sequence
  Description of Artificial Sequence: Synthetic oligonucleotide
  Sense strand starting at position 1872 of SEQ ID NO: 914080
guuacagugacacauguuu

SEQ ID NO: 976543 - RNA, 19 nt, Artificial Sequence
  Description of Artificial Sequence: Synthetic oligonucleotide
  Antisense strand to SEQ ID NO: 976542
aaacaugugucacuguaac

SEQ ID NO: 976544 - RNA, 19 nt, Artificial Sequence
  Description of Artificial Sequence: Synthetic oligonucleotide
  Sense strand starting at position 1410 of SEQ ID NO: 914080
acaccagauuucgaacuca

SEQ ID NO: 976545 - RNA, 19 nt, Artificial Sequence
  Description of Artificial Sequence: Synthetic oligonucleotide
  Antisense strand to SEQ ID NO: 976544
ugaguucgaaaucuggugu

SEQ ID NO: 976546 - RNA, 19 nt, Artificial Sequence
  Description of Artificial Sequence: Synthetic oligonucleotide
  Sense strand starting at position 1996 of SEQ ID NO: 914080
gcaaauuuacugcguuauu

SEQ ID NO: 976547 - RNA, 19 nt, Artificial Sequence
  Description of Artificial Sequence: Synthetic oligonucleotide
  Antisense strand to SEQ ID NO: 976546
aauaacgcaguaaauuugc

SEQ ID NO: 976548 - RNA, 19 nt, Artificial Sequence
  Description of Artificial Sequence: Synthetic oligonucleotide
  Sense strand starting at position 1208 of SEQ ID NO: 914080
ugggaagggauucgcuuua

SEQ ID NO: 976549 - RNA, 19 nt, Artificial Sequence
  Description of Artificial Sequence: Synthetic oligonucleotide
  Antisense strand to SEQ ID NO: 976548
uaaagcgaaucccuuccca

SEQ ID NO: 976550 - RNA, 19 nt, Artificial Sequence
  Description of Artificial Sequence: Synthetic oligonucleotide
  Sense strand starting at position 3907 of SEQ ID NO: 914080
caacgcacacguuaugaga

SEQ ID NO: 976551 - RNA, 19 nt, Artificial Sequence
  Description of Artificial Sequence: Synthetic oligonucleotide
  Antisense strand to SEQ ID NO: 976550
ucucauaacgugugcguug

SEQ ID NO: 976552 - RNA, 19 nt, Artificial Sequence
  Description of Artificial Sequence: Synthetic oligonucleotide
  Sense strand starting at position 72 of SEQ ID NO: 914080
gccugauggucucuggaaa

SEQ ID NO: 976553 - RNA, 19 nt, Artificial Sequence
  Description of Artificial Sequence: Synthetic oligonucleotide
  Antisense strand to SEQ ID NO: 976552
uuuccagagaccaucaggc

SEQ ID NO: 976554 - RNA, 19 nt, Artificial Sequence
  Description of Artificial Sequence: Synthetic oligonucleotide
  Sense strand starting at position 1878 of SEQ ID NO: 914080
gugacacauguuuauguuu

SEQ ID NO: 976555 - RNA, 19 nt, Artificial Sequence
  Description of Artificial Sequence: Synthetic oligonucleotide
  Antisense strand to SEQ ID NO: 976554
aaacauaaacaugugucac

SEQ ID NO: 976556 - RNA, 19 nt, Artificial Sequence
  Description of Artificial Sequence: Synthetic oligonucleotide
  Sense strand starting at position 615 of SEQ ID NO: 914080
ccguuaaaugccgauacaa

SEQ ID NO: 976557 - RNA, 19 nt, Artificial Sequence
  Description of Artificial Sequence: Synthetic oligonucleotide
  Antisense strand to SEQ ID NO: 976556
uuguaucggcauuuaacgg

SEQ ID NO: 976558 - RNA, 19 nt, Artificial Sequence
  Description of Artificial Sequence: Synthetic oligonucleotide
  Sense strand starting at position 1087 of SEQ ID NO: 914080
agagaagguaaguguuugu

SEQ ID NO: 976559 - RNA, 19 nt, Artificial Sequence
  Description of Artificial Sequence: Synthetic oligonucleotide
  Antisense strand to SEQ ID NO: 976558
acaaacacuuaccuucucu

SEQ ID NO: 976560 - RNA, 19 nt, Artificial Sequence
  Description of Artificial Sequence: Synthetic oligonucleotide
  Sense strand starting at position 1724 of SEQ ID NO: 914080
ugccuucggcauuauauaa

SEQ ID NO: 976561 - RNA, 19 nt, Artificial Sequence
  Description of Artificial Sequence: Synthetic oligonucleotide
  Antisense strand to SEQ ID NO: 976560
uuauauaaugccgaaggca

SEQ ID NO: 976562 - RNA, 19 nt, Artificial Sequence
  Description of Artificial Sequence: Synthetic oligonucleotide
  Sense strand starting at position 7 of SEQ ID NO: 914080
gcugcucagccauacugaa

SEQ ID NO: 976563 - RNA, 19 nt, Artificial Sequence
  Description of Artificial Sequence: Synthetic oligonucleotide
  Antisense strand to SEQ ID NO: 976562
uucaguauggcugagcagc

SEQ ID NO: 976564 - RNA, 19 nt, Artificial Sequence
  Description of Artificial Sequence: Synthetic oligonucleotide
  Sense strand starting at position 1877 of SEQ ID NO: 914080
agugacacauguuuauguu

SEQ ID NO: 976565 - RNA, 19 nt, Artificial Sequence
  Description of Artificial Sequence: Synthetic oligonucleotide
  Antisense strand to SEQ ID NO: 976564
aacauaaacaugugucacu

SEQ ID NO: 976566 - RNA, 19 nt, Artificial Sequence
  Description of Artificial Sequence: Synthetic oligonucleotide
  Sense strand starting at position 149 of SEQ ID NO: 914080
ggagccaaucacugucuuu

SEQ ID NO: 976567 - RNA, 19 nt, Artificial Sequence
  Description of Artificial Sequence: Synthetic oligonucleotide
  Antisense strand to SEQ ID NO: 976566
aaagacagugauuggcucc

SEQ ID NO: 976568 - RNA, 19 nt, Artificial Sequence
  Description of Artificial Sequence: Synthetic oligonucleotide
  Sense strand starting at position 1574 of SEQ ID NO: 914080
caaguaucacguuacuguu

SEQ ID NO: 976569 - RNA, 19 nt, Artificial Sequence
  Description of Artificial Sequence: Synthetic oligonucleotide
  Antisense strand to SEQ ID NO: 976568
aacaguaacgugauacuug

SEQ ID NO: 976570 - RNA, 19 nt, Artificial Sequence
  Description of Artificial Sequence: Synthetic oligonucleotide
  Sense strand starting at position 1361 of SEQ ID NO: 914080
gcagaaguugcucaaugca

SEQ ID NO: 976571 - RNA, 19 nt, Artificial Sequence
  Description of Artificial Sequence: Synthetic oligonucleotide
  Antisense strand to SEQ ID NO: 976570
ugcauugagcaacuucugc

SEQ ID NO: 976572 - RNA, 19 nt, Artificial Sequence
  Description of Artificial Sequence: Synthetic oligonucleotide
  Sense strand starting at position 3332 of SEQ ID NO: 914080
cgagacuucucagccacuu

SEQ ID NO: 976573 - RNA, 19 nt, Artificial Sequence
  Description of Artificial Sequence: Synthetic oligonucleotide
  Antisense strand to SEQ ID NO: 976572
aaguggcugagaagucucg

SEQ ID NO: 976574 - RNA, 19 nt, Artificial Sequence
  Description of Artificial Sequence: Synthetic oligonucleotide
  Sense strand starting at position 3329 of SEQ ID NO: 914080
aagcgagacuucucagcca

SEQ ID NO: 976575 - RNA, 19 nt, Artificial Sequence
  Description of Artificial Sequence: Synthetic oligonucleotide
  Antisense strand to SEQ ID NO: 976574
uggcugagaagucucgcuu

SEQ ID NO: 976576 - RNA, 19 nt, Artificial Sequence
  Description of Artificial Sequence: Synthetic oligonucleotide
  Sense strand starting at position 1721 of SEQ ID NO: 914080
aagugccuucggcauuaua

SEQ ID NO: 976577 - RNA, 19 nt, Artificial Sequence
  Description of Artificial Sequence: Synthetic oligonucleotide
  Antisense strand to SEQ ID NO: 976576
uauaaugccgaaggcacuu

SEQ ID NO: 976578 - RNA, 19 nt, Artificial Sequence
  Description of Artificial Sequence: Synthetic oligonucleotide
  Sense strand starting at position 1090 of SEQ ID NO: 914080
gaagguaaguguuuguccu

SEQ ID NO: 976579 - RNA, 19 nt, Artificial Sequence
  Description of Artificial Sequence: Synthetic oligonucleotide
  Antisense strand to SEQ ID NO: 976578
aggacaaacacuuaccuuc

SEQ ID NO: 976580 - RNA, 19 nt, Artificial Sequence
  Description of Artificial Sequence: Synthetic oligonucleotide
  Sense strand starting at position 2605 of SEQ ID NO: 914080
ggaccuguugacugcgauu

SEQ ID NO: 976581 - RNA, 19 nt, Artificial Sequence
  Description of Artificial Sequence: Synthetic oligonucleotide
  Antisense strand to SEQ ID NO: 976580
aaucgcagucaacaggucc

SEQ ID NO: 976582 - RNA, 19 nt, Artificial Sequence
  Description of Artificial Sequence: Synthetic oligonucleotide
  Sense strand starting at position 938 of SEQ ID NO: 914080
caacgugcucugcaacuua

SEQ ID NO: 976583 - RNA, 19 nt, Artificial Sequence
  Description of Artificial Sequence: Synthetic oligonucleotide
  Antisense strand to SEQ ID NO: 976582
uaaguugcagagcacguug

SEQ ID NO: 976584 - RNA, 19 nt, Artificial Sequence
  Description of Artificial Sequence: Synthetic oligonucleotide
  Sense strand starting at position 234 of SEQ ID NO: 914080
guucgaauuuauggauaca

SEQ ID NO: 976585 - RNA, 19 nt, Artificial Sequence
  Description of Artificial Sequence: Synthetic oligonucleotide
  Antisense strand to SEQ ID NO: 976584
uguauccauaaauucgaac

SEQ ID NO: 976586 - RNA, 19 nt, Artificial Sequence
  Description of Artificial Sequence: Synthetic oligonucleotide
  Sense strand starting at position 2099 of SEQ ID NO: 914080
gguuaagagcuccgcaaug

SEQ ID NO: 976587 - RNA, 19 nt, Artificial Sequence
  Description of Artificial Sequence: Synthetic oligonucleotide
  Antisense strand to SEQ ID NO: 976586
cauugcggagcucuuaacc

SEQ ID NO: 976588 - RNA, 19 nt, Artificial Sequence
  Description of Artificial Sequence: Synthetic oligonucleotide
  Sense strand starting at position 1091 of SEQ ID NO: 914080
aagguaaguguuuguccuu

SEQ ID NO: 976589 - RNA, 19 nt, Artificial Sequence
  Description of Artificial Sequence: Synthetic oligonucleotide
  Antisense strand to SEQ ID NO: 976588
aaggacaaacacuuaccuu

SEQ ID NO: 976590 - RNA, 19 nt, Artificial Sequence
  Description of Artificial Sequence: Synthetic oligonucleotide
  Sense strand starting at position 907 of SEQ ID NO: 914081
aaaggagaguguuuaacca

SEQ ID NO: 976591 - RNA, 19 nt, Artificial Sequence
  Description of Artificial Sequence: Synthetic oligonucleotide
  Antisense strand to SEQ ID NO: 976590
ugguuaaacacucuccuuu

SEQ ID NO: 976592 - RNA, 19 nt, Artificial Sequence
  Description of Artificial Sequence: Synthetic oligonucleotide
  Sense strand starting at position 3936 of SEQ ID NO: 914081
aagugaugauuagugaaua

SEQ ID NO: 976593 - RNA, 19 nt, Artificial Sequence
  Description of Artificial Sequence: Synthetic oligonucleotide
  Antisense strand to SEQ ID NO: 976592
uauucacuaaucaucacuu

SEQ ID NO: 976594 - RNA, 19 nt, Artificial Sequence
  Description of Artificial Sequence: Synthetic oligonucleotide
  Sense strand starting at position 2348 of SEQ ID NO: 914081
agugcucggccuucgaaau

SEQ ID NO: 976595 - RNA, 19 nt, Artificial Sequence
  Description of Artificial Sequence: Synthetic oligonucleotide
  Antisense strand to SEQ ID NO: 976594
auuucgaaggccgagcacu

SEQ ID NO: 976596 - RNA, 19 nt, Artificial Sequence
  Description of Artificial Sequence: Synthetic oligonucleotide
  Sense strand starting at position 2347 of SEQ ID NO: 914081
cagugcucggccuucgaaa

SEQ ID NO: 976597 - RNA, 19 nt, Artificial Sequence
  Description of Artificial Sequence: Synthetic oligonucleotide
  Antisense strand to SEQ ID NO: 976596
uuucgaaggccgagcacug

SEQ ID NO: 976598 - RNA, 19 nt, Artificial Sequence
  Description of Artificial Sequence: Synthetic oligonucleotide
  Sense strand starting at position 2488 of SEQ ID NO: 914081
gagggacgucucgcgguua

SEQ ID NO: 976599 - RNA, 19 nt, Artificial Sequence
  Description of Artificial Sequence: Synthetic oligonucleotide
  Antisense strand to SEQ ID NO: 976598
uaaccgcgagacgucccuc

SEQ ID NO: 976600 - RNA, 19 nt, Artificial Sequence
  Description of Artificial Sequence: Synthetic oligonucleotide
  Sense strand starting at position 1588 of SEQ ID NO: 914081
caccgagaagucugcauuu

SEQ ID NO: 976601 - RNA, 19 nt, Artificial Sequence
  Description of Artificial Sequence: Synthetic oligonucleotide
  Antisense strand to SEQ ID NO: 976600
aaaugcagacuucucggug

SEQ ID NO: 976602 - RNA, 19 nt, Artificial Sequence
  Description of Artificial Sequence: Synthetic oligonucleotide
  Sense strand starting at position 29 of SEQ ID NO: 914081
gaucgaucauuaccauaga

SEQ ID NO: 976603 - RNA, 19 nt, Artificial Sequence
  Description of Artificial Sequence: Synthetic oligonucleotide
  Antisense strand to SEQ ID NO: 976602
ucuaugguaaugaucgauc

SEQ ID NO: 976604 - RNA, 19 nt, Artificial Sequence
  Description of Artificial Sequence: Synthetic oligonucleotide
  Sense strand starting at position 129 of SEQ ID NO: 914081
gggcauucaccugagaagu

SEQ ID NO: 976605 - RNA, 19 nt, Artificial Sequence
  Description of Artificial Sequence: Synthetic oligonucleotide
  Antisense strand to SEQ ID NO: 976604
acuucucaggugaaugccc

SEQ ID NO: 976606 - RNA, 19 nt, Artificial Sequence
  Description of Artificial Sequence: Synthetic oligonucleotide
  Sense strand starting at position 856 of SEQ ID NO: 914081
ccuagcucugagcaaagaa

SEQ ID NO: 976607 - RNA, 19 nt, Artificial Sequence
  Description of Artificial Sequence: Synthetic oligonucleotide
  Antisense strand to SEQ ID NO: 976606
uucuuugcucagagcuagg

SEQ ID NO: 976608 - RNA, 19 nt, Artificial Sequence
  Description of Artificial Sequence: Synthetic oligonucleotide
  Sense strand starting at position 381 of SEQ ID NO: 914081
aacugaguuaggugggaau

SEQ ID NO: 976609 - RNA, 19 nt, Artificial Sequence
  Description of Artificial Sequence: Synthetic oligonucleotide
  Antisense strand to SEQ ID NO: 976608
auucccaccuaacucaguu

SEQ ID NO: 976610 - RNA, 19 nt, Artificial Sequence
  Description of Artificial Sequence: Synthetic oligonucleotide
  Sense strand starting at position 3516 of SEQ ID NO: 914081
caugaucugcccgacaaag

SEQ ID NO: 976611 - RNA, 19 nt, Artificial Sequence
  Description of Artificial Sequence: Synthetic oligonucleotide
  Antisense strand to SEQ ID NO: 976610
cuuugucgggcagaucaug

SEQ ID NO: 976612 - RNA, 19 nt, Artificial Sequence
  Description of Artificial Sequence: Synthetic oligonucleotide
  Sense strand starting at position 1002 of SEQ ID NO: 914081
aucacuuugggaggcuaaa

SEQ ID NO: 976613 - RNA, 19 nt, Artificial Sequence
  Description of Artificial Sequence: Synthetic oligonucleotide
  Antisense strand to SEQ ID NO: 976612
uuuagccucccaaagugau

SEQ ID NO: 976614 - RNA, 19 nt, Artificial Sequence
  Description of Artificial Sequence: Synthetic oligonucleotide
  Sense strand starting at position 383 of SEQ ID NO: 914081
cugaguuaggugggaauga

SEQ ID NO: 976615 - RNA, 19 nt, Artificial Sequence
  Description of Artificial Sequence: Synthetic oligonucleotide
  Antisense strand to SEQ ID NO: 976614
ucauucccaccuaacucag

SEQ ID NO: 976616 - RNA, 19 nt, Artificial Sequence
  Description of Artificial Sequence: Synthetic oligonucleotide
  Sense strand starting at position 3645 of SEQ ID NO: 914081
gggauuucacuaugucgcu

SEQ ID NO: 976617 - RNA, 19 nt, Artificial Sequence
  Description of Artificial Sequence: Synthetic oligonucleotide
  Antisense strand to SEQ ID NO: 976616
agcgacauagugaaauccc

SEQ ID NO: 976618 - RNA, 19 nt, Artificial Sequence
  Description of Artificial Sequence: Synthetic oligonucleotide
  Sense strand starting at position 1570 of SEQ ID NO: 914081
gaaagauggucucuauucc

SEQ ID NO: 976619 - RNA, 19 nt, Artificial Sequence
  Description of Artificial Sequence: Synthetic oligonucleotide
  Antisense strand to SEQ ID NO: 976618
ggaauagagaccaucuuuc

SEQ ID NO: 976620 - RNA, 19 nt, Artificial Sequence
  Description of Artificial Sequence: Synthetic oligonucleotide
  Sense strand starting at position 2912 of SEQ ID NO: 914081
guaugaaaugagugaggug

SEQ ID NO: 976621 - RNA, 19 nt, Artificial Sequence
  Description of Artificial Sequence: Synthetic oligonucleotide
  Antisense strand to SEQ ID NO: 976620
caccucacucauuucauac

SEQ ID NO: 976622 - RNA, 19 nt, Artificial Sequence
  Description of Artificial Sequence: Synthetic oligonucleotide
  Sense strand starting at position 934 of SEQ ID NO: 914081
gcaggacucaccugacuag

SEQ ID NO: 976623 - RNA, 19 nt, Artificial Sequence
  Description of Artificial Sequence: Synthetic oligonucleotide
  Antisense strand to SEQ ID NO: 976622
cuagucaggugaguccugc

SEQ ID NO: 976624 - RNA, 19 nt, Artificial Sequence
  Description of Artificial Sequence: Synthetic oligonucleotide
  Sense strand starting at position 3233 of SEQ ID NO: 914081
gauuucgcuguaugucaaa

SEQ ID NO: 976625 - RNA, 19 nt, Artificial Sequence
  Description of Artificial Sequence: Synthetic oligonucleotide
  Antisense strand to SEQ ID NO: 976624
uuugacauacagcgaaauc

SEQ ID NO: 976626 - RNA, 19 nt, Artificial Sequence
  Description of Artificial Sequence: Synthetic oligonucleotide
  Sense strand starting at position 411 of SEQ ID NO: 914081
gauucuaguguugauucca

SEQ ID NO: 976627 - RNA, 19 nt, Artificial Sequence
  Description of Artificial Sequence: Synthetic oligonucleotide
  Antisense strand to SEQ ID NO: 976626
uggaaucaacacuagaauc

SEQ ID NO: 976628 - RNA, 19 nt, Artificial Sequence
  Description of Artificial Sequence: Synthetic oligonucleotide
  Sense strand starting at position 2896 of SEQ ID NO: 914081
cauguuguugcugcgagua

SEQ ID NO: 976629 - RNA, 19 nt, Artificial Sequence
  Description of Artificial Sequence: Synthetic oligonucleotide
  Antisense strand to SEQ ID NO: 976628
uacucgcagcaacaacaug

SEQ ID NO: 976630 - RNA, 19 nt, Artificial Sequence
  Description of Artificial Sequence: Synthetic oligonucleotide
  Sense strand starting at position 560 of SEQ ID NO: 914081
cuguaauuauaagugacua

SEQ ID NO: 976631 - RNA, 19 nt, Artificial Sequence
  Description of Artificial Sequence: Synthetic oligonucleotide
  Antisense strand to SEQ ID NO: 976630
uagucacuuauaauuacag

SEQ ID NO: 976632 - RNA, 19 nt, Artificial Sequence
  Description of Artificial Sequence: Synthetic oligonucleotide
  Sense strand starting at position 1292 of SEQ ID NO: 914081
agagguuuagaaugcugau

SEQ ID NO: 976633 - RNA, 19 nt, Artificial Sequence
  Description of Artificial Sequence: Synthetic oligonucleotide
  Antisense strand to SEQ ID NO: 976632
aucagcauucuaaaccucu

SEQ ID NO: 976634 - RNA, 19 nt, Artificial Sequence
  Description of Artificial Sequence: Synthetic oligonucleotide
  Sense strand starting at position 2821 of SEQ ID NO: 914081
aucucauaaccuugggcaa

SEQ ID NO: 976635 - RNA, 19 nt, Artificial Sequence
  Description of Artificial Sequence: Synthetic oligonucleotide
  Antisense strand to SEQ ID NO: 976634
uugcccaagguuaugagau

SEQ ID NO: 976636 - RNA, 19 nt, Artificial Sequence
  Description of Artificial Sequence: Synthetic oligonucleotide
  Sense strand starting at position 315 of SEQ ID NO: 914081
augugauuaggugaugcua

SEQ ID NO: 976637 - RNA, 19 nt, Artificial Sequence
  Description of Artificial Sequence: Synthetic oligonucleotide
  Antisense strand to SEQ ID NO: 976636
uagcaucaccuaaucacau

SEQ ID NO: 976638 - RNA, 19 nt, Artificial Sequence
  Description of Artificial Sequence: Synthetic oligonucleotide
  Sense strand starting at position 1501 of SEQ ID NO: 914081
aaauauuauugucugaggu

SEQ ID NO: 976639 - RNA, 19 nt, Artificial Sequence
  Description of Artificial Sequence: Synthetic oligonucleotide
  Antisense strand to SEQ ID NO: 976638
accucagacaauaauauuu

SEQ ID NO: 976640 - RNA, 19 nt, Artificial Sequence
  Description of Artificial Sequence: Synthetic oligonucleotide
  Sense strand starting at position 140 of SEQ ID NO: 914081
ugagaaguaucuguauauc

SEQ ID NO: 976641 - RNA, 19 nt, Artificial Sequence
  Description of Artificial Sequence: Synthetic oligonucleotide
  Antisense strand to SEQ ID NO: 976640
gauauacagauacuucuca

SEQ ID NO: 976642 - RNA, 19 nt, Artificial Sequence
  Description of Artificial Sequence: Synthetic oligonucleotide
  Sense strand starting at position 1579 of SEQ ID NO: 914081
ucucuauuccaccgagaag

SEQ ID NO: 976643 - RNA, 19 nt, Artificial Sequence
  Description of Artificial Sequence: Synthetic oligonucleotide
  Antisense strand to SEQ ID NO: 976642
cuucucgguggaauagaga

SEQ ID NO: 976644 - RNA, 19 nt, Artificial Sequence
  Description of Artificial Sequence: Synthetic oligonucleotide
  Sense strand starting at position 3231 of SEQ ID NO: 914081
gugauuucgcuguauguca

SEQ ID NO: 976645 - RNA, 19 nt, Artificial Sequence
  Description of Artificial Sequence: Synthetic oligonucleotide
  Antisense strand to SEQ ID NO: 976644
ugacauacagcgaaaucac

SEQ ID NO: 976646 - RNA, 19 nt, Artificial Sequence
  Description of Artificial Sequence: Synthetic oligonucleotide
  Sense strand starting at position 419 of SEQ ID NO: 914081
uguugauuccaucaccagu

SEQ ID NO: 976647 - RNA, 19 nt, Artificial Sequence
  Description of Artificial Sequence: Synthetic oligonucleotide
  Antisense strand to SEQ ID NO: 976646
acuggugauggaaucaaca

SEQ ID NO: 976648 - RNA, 19 nt, Artificial Sequence
  Description of Artificial Sequence: Synthetic oligonucleotide
  Sense strand starting at position 421 of SEQ ID NO: 914081
uugauuccaucaccaguua

SEQ ID NO: 976649 - RNA, 19 nt, Artificial Sequence
  Description of Artificial Sequence: Synthetic oligonucleotide
  Antisense strand to SEQ ID NO: 976648
uaacuggugauggaaucaa

SEQ ID NO: 976650 - RNA, 19 nt, Artificial Sequence
  Description of Artificial Sequence: Synthetic oligonucleotide
  Sense strand starting at position 26 of SEQ ID NO: 914081
ucugaucgaucauuaccau

SEQ ID NO: 976651 - RNA, 19 nt, Artificial Sequence
  Description of Artificial Sequence: Synthetic oligonucleotide
  Antisense strand to SEQ ID NO: 976650
augguaaugaucgaucaga

SEQ ID NO: 976652 - RNA, 19 nt, Artificial Sequence
  Description of Artificial Sequence: Synthetic oligonucleotide
  Sense strand starting at position 1502 of SEQ ID NO: 914081
aauauuauugucugaggug

SEQ ID NO: 976653 - RNA, 19 nt, Artificial Sequence
  Description of Artificial Sequence: Synthetic oligonucleotide
  Antisense strand to SEQ ID NO: 976652
caccucagacaauaauauu

SEQ ID NO: 976654 - RNA, 19 nt, Artificial Sequence
  Description of Artificial Sequence: Synthetic oligonucleotide
  Sense strand starting at position 324 of SEQ ID NO: 914081
ggugaugcuagucauauua

SEQ ID NO: 976655 - RNA, 19 nt, Artificial Sequence
  Description of Artificial Sequence: Synthetic oligonucleotide
  Antisense strand to SEQ ID NO: 976654
uaauaugacuagcaucacc

SEQ ID NO: 976656 - RNA, 19 nt, Artificial Sequence
  Description of Artificial Sequence: Synthetic oligonucleotide
  Sense strand starting at position 2492 of SEQ ID NO: 914081
gacgucucgcgguuaugua

SEQ ID NO: 976657 - RNA, 19 nt, Artificial Sequence
  Description of Artificial Sequence: Synthetic oligonucleotide
  Antisense strand to SEQ ID NO: 976656
uacauaaccgcgagacguc

SEQ ID NO: 976658 - RNA, 19 nt, Artificial Sequence
  Description of Artificial Sequence: Synthetic oligonucleotide
  Sense strand starting at position 2822 of SEQ ID NO: 914081
ucucauaaccuugggcaau

SEQ ID NO: 976659 - RNA, 19 nt, Artificial Sequence
  Description of Artificial Sequence: Synthetic oligonucleotide
  Antisense strand to SEQ ID NO: 976658
auugcccaagguuaugaga

SEQ ID NO: 976660 - RNA, 19 nt, Artificial Sequence
  Description of Artificial Sequence: Synthetic oligonucleotide
  Sense strand starting at position 511 of SEQ ID NO: 914081
uuuaguagauggucuccaa

SEQ ID NO: 976661 - RNA, 19 nt, Artificial Sequence
  Description of Artificial Sequence: Synthetic oligonucleotide
  Antisense strand to SEQ ID NO: 976660
uuggagaccaucuacuaaa

SEQ ID NO: 976662 - RNA, 19 nt, Artificial Sequence
  Description of Artificial Sequence: Synthetic oligonucleotide
  Sense strand starting at position 2491 of SEQ ID NO: 914081
ggacgucucgcgguuaugu

SEQ ID NO: 976663 - RNA, 19 nt, Artificial Sequence
  Description of Artificial Sequence: Synthetic oligonucleotide
  Antisense strand to SEQ ID NO: 976662
acauaaccgcgagacgucc

SEQ ID NO: 976664 - RNA, 19 nt, Artificial Sequence
  Description of Artificial Sequence: Synthetic oligonucleotide
  Sense strand starting at position 146 of SEQ ID NO: 914081
guaucuguauauccauaau

SEQ ID NO: 976665 - RNA, 19 nt, Artificial Sequence
  Description of Artificial Sequence: Synthetic oligonucleotide
  Antisense strand to SEQ ID NO: 976664
auuauggauauacagauac

SEQ ID NO: 976666 - RNA, 19 nt, Artificial Sequence
  Description of Artificial Sequence: Synthetic oligonucleotide
  Sense strand starting at position 1856 of SEQ ID NO: 914081
ccgcccuuccuugaaggau

SEQ ID NO: 976667 - RNA, 19 nt, Artificial Sequence
  Description of Artificial Sequence: Synthetic oligonucleotide
  Antisense strand to SEQ ID NO: 976666
auccuucaaggaagggcgg

SEQ ID NO: 976668 - RNA, 19 nt, Artificial Sequence
  Description of Artificial Sequence: Synthetic oligonucleotide
  Sense strand starting at position 3227 of SEQ ID NO: 914081
ccuggugauuucgcuguau

SEQ ID NO: 976669 - RNA, 19 nt, Artificial Sequence
  Description of Artificial Sequence: Synthetic oligonucleotide
  Antisense strand to SEQ ID NO: 976668
auacagcgaaaucaccagg

SEQ ID NO: 976670 - RNA, 19 nt, Artificial Sequence
  Description of Artificial Sequence: Synthetic oligonucleotide
  Sense strand starting at position 3393 of SEQ ID NO: 914082
cugauaauuuguguucuuu

SEQ ID NO: 976671 - RNA, 19 nt, Artificial Sequence
  Description of Artificial Sequence: Synthetic oligonucleotide
  Antisense strand to SEQ ID NO: 976670
aaagaacacaaauuaucag

SEQ ID NO: 976672 - RNA, 19 nt, Artificial Sequence
  Description of Artificial Sequence: Synthetic oligonucleotide
  Sense strand starting at position 556 of SEQ ID NO: 914082
uuuacagaauuugauggaa

SEQ ID NO: 976673 - RNA, 19 nt, Artificial Sequence
  Description of Artificial Sequence: Synthetic oligonucleotide
  Antisense strand to SEQ ID NO: 976672
uuccaucaaauucuguaaa

SEQ ID NO: 976674 - RNA, 19 nt, Artificial Sequence
  Description of Artificial Sequence: Synthetic oligonucleotide
  Sense strand starting at position 2577 of SEQ ID NO: 914082
guugaacugcacuaacaau

SEQ ID NO: 976675 - RNA, 19 nt, Artificial Sequence
  Description of Artificial Sequence: Synthetic oligonucleotide
  Antisense strand to SEQ ID NO: 976674
auuguuagugcaguucaac

SEQ ID NO: 976676 - RNA, 19 nt, Artificial Sequence
  Description of Artificial Sequence: Synthetic oligonucleotide
  Sense strand starting at position 93 of SEQ ID NO: 914082
uaugaaggauaccuguuau

SEQ ID NO: 976677 - RNA, 19 nt, Artificial Sequence
  Description of Artificial Sequence: Synthetic oligonucleotide
  Antisense strand to SEQ ID NO: 976676
auaacagguauccuucaua

SEQ ID NO: 976678 - RNA, 19 nt, Artificial Sequence
  Description of Artificial Sequence: Synthetic oligonucleotide
  Sense strand starting at position 3838 of SEQ ID NO: 914082
aggaaauugugccuggaaa

SEQ ID NO: 976679 - RNA, 19 nt, Artificial Sequence
  Description of Artificial Sequence: Synthetic oligonucleotide
  Antisense strand to SEQ ID NO: 976678
uuuccaggcacaauuuccu

SEQ ID NO: 976680 - RNA, 19 nt, Artificial Sequence
  Description of Artificial Sequence: Synthetic oligonucleotide
  Sense strand starting at position 3870 of SEQ ID NO: 914082
accaacugguuucugaaau

SEQ ID NO: 976681 - RNA, 19 nt, Artificial Sequence
  Description of Artificial Sequence: Synthetic oligonucleotide
  Antisense strand to SEQ ID NO: 976680
auuucagaaaccaguuggu

SEQ ID NO: 976682 - RNA, 19 nt, Artificial Sequence
  Description of Artificial Sequence: Synthetic oligonucleotide
  Sense strand starting at position 485 of SEQ ID NO: 914082
ccuaaaccugccugaagaa

SEQ ID NO: 976683 - RNA, 19 nt, Artificial Sequence
  Description of Artificial Sequence: Synthetic oligonucleotide
  Antisense strand to SEQ ID NO: 976682
uucuucaggcagguuuagg

SEQ ID NO: 976684 - RNA, 19 nt, Artificial Sequence
  Description of Artificial Sequence: Synthetic oligonucleotide
  Sense strand starting at position 3256 of SEQ ID NO: 914082
cuguacugucaacaccaua

SEQ ID NO: 976685 - RNA, 19 nt, Artificial Sequence
  Description of Artificial Sequence: Synthetic oligonucleotide
  Antisense strand to SEQ ID NO: 976684
uaugguguugacaguacag

SEQ ID NO: 976686 - RNA, 19 nt, Artificial Sequence
  Description of Artificial Sequence: Synthetic oligonucleotide
  Sense strand starting at position 733 of SEQ ID NO: 914082
agcguaaauccugacuaaa

SEQ ID NO: 976687 - RNA, 19 nt, Artificial Sequence
  Description of Artificial Sequence: Synthetic oligonucleotide
  Antisense strand to SEQ ID NO: 976686
uuuagucaggauuuacgcu

SEQ ID NO: 976688 - RNA, 19 nt, Artificial Sequence
  Description of Artificial Sequence: Synthetic oligonucleotide
  Sense strand starting at position 3338 of SEQ ID NO: 914082
cugguuuaugguuacucaa

SEQ ID NO: 976689 - RNA, 19 nt, Artificial Sequence
  Description of Artificial Sequence: Synthetic oligonucleotide
  Antisense strand to SEQ ID NO: 976688
uugaguaaccauaaaccag

SEQ ID NO: 976690 - RNA, 19 nt, Artificial Sequence
  Description of Artificial Sequence: Synthetic oligonucleotide
  Sense strand starting at position 278 of SEQ ID NO: 914082
ggcaaugauauggguacua

SEQ ID NO: 976691 - RNA, 19 nt, Artificial Sequence
  Description of Artificial Sequence: Synthetic oligonucleotide
  Antisense strand to SEQ ID NO: 976690
uaguacccauaucauugcc

SEQ ID NO: 976692 - RNA, 19 nt, Artificial Sequence
  Description of Artificial Sequence: Synthetic oligonucleotide
  Sense strand starting at position 3787 of SEQ ID NO: 914082
uugauuguugcucaaacca

SEQ ID NO: 976693 - RNA, 19 nt, Artificial Sequence
  Description of Artificial Sequence: Synthetic oligonucleotide
  Antisense strand to SEQ ID NO: 976692
ugguuugagcaacaaucaa

SEQ ID NO: 976694 - RNA, 19 nt, Artificial Sequence
  Description of Artificial Sequence: Synthetic oligonucleotide
  Sense strand starting at position 763 of SEQ ID NO: 914082
guuuguguuggauagacua

SEQ ID NO: 976695 - RNA, 19 nt, Artificial Sequence
  Description of Artificial Sequence: Synthetic oligonucleotide
  Antisense strand to SEQ ID NO: 976694
uagucuauccaacacaaac

SEQ ID NO: 976696 - RNA, 19 nt, Artificial Sequence
  Description of Artificial Sequence: Synthetic oligonucleotide
  Sense strand starting at position 3777 of SEQ ID NO: 914082
acauguuaucuugauuguu

SEQ ID NO: 976697 - RNA, 19 nt, Artificial Sequence
  Description of Artificial Sequence: Synthetic oligonucleotide
  Antisense strand to SEQ ID NO: 976696
aacaaucaagauaacaugu

SEQ ID NO: 976698 - RNA, 19 nt, Artificial Sequence
  Description of Artificial Sequence: Synthetic oligonucleotide
  Sense strand starting at position 2932 of SEQ ID NO: 914082
uguuuccuugucuaugaaa

SEQ ID NO: 976699 - RNA, 19 nt, Artificial Sequence
  Description of Artificial Sequence: Synthetic oligonucleotide
  Antisense strand to SEQ ID NO: 976698
uuucauagacaaggaaaca

SEQ ID NO: 976700 - RNA, 19 nt, Artificial Sequence
  Description of Artificial Sequence: Synthetic oligonucleotide
  Sense strand starting at position 735 of SEQ ID NO: 914082
cguaaauccugacuaaacu

SEQ ID NO: 976701 - RNA, 19 nt, Artificial Sequence
  Description of Artificial Sequence: Synthetic oligonucleotide
  Antisense strand to SEQ ID NO: 976700
aguuuagucaggauuuacg

SEQ ID NO: 976702 - RNA, 19 nt, Artificial Sequence
  Description of Artificial Sequence: Synthetic oligonucleotide
  Sense strand starting at position 2957 of SEQ ID NO: 914082
gaaucuugccuguaucaug

SEQ ID NO: 976703 - RNA, 19 nt, Artificial Sequence
  Description of Artificial Sequence: Synthetic oligonucleotide
  Antisense strand to SEQ ID NO: 976702
caugauacaggcaagauuc

SEQ ID NO: 976704 - RNA, 19 nt, Artificial Sequence
  Description of Artificial Sequence: Synthetic oligonucleotide
  Sense strand starting at position 3125 of SEQ ID NO: 914082
gagaaugaccacugcuagu

SEQ ID NO: 976705 - RNA, 19 nt, Artificial Sequence
  Description of Artificial Sequence: Synthetic oligonucleotide
  Antisense strand to SEQ ID NO: 976704
acuagcaguggucauucuc

SEQ ID NO: 976706 - RNA, 19 nt, Artificial Sequence
  Description of Artificial Sequence: Synthetic oligonucleotide
  Sense strand starting at position 3135 of SEQ ID NO: 914082
acugcuagucaauaguauu

SEQ ID NO: 976707 - RNA, 19 nt, Artificial Sequence
  Description of Artificial Sequence: Synthetic oligonucleotide
  Antisense strand to SEQ ID NO: 976706
aauacuauugacuagcagu

SEQ ID NO: 976708 - RNA, 19 nt, Artificial Sequence
  Description of Artificial Sequence: Synthetic oligonucleotide
  Sense strand starting at position 3733 of SEQ ID NO: 914082
uagaaagucugucuuugau

SEQ ID NO: 976709 - RNA, 19 nt, Artificial Sequence
  Description of Artificial Sequence: Synthetic oligonucleotide
  Antisense strand to SEQ ID NO: 976708
aucaaagacagacuuucua

SEQ ID NO: 976710 - RNA, 19 nt, Artificial Sequence
  Description of Artificial Sequence: Synthetic oligonucleotide
  Sense strand starting at position 1712 of SEQ ID NO: 914082
cggcuauuuauccgagcca

SEQ ID NO: 976711 - RNA, 19 nt, Artificial Sequence
  Description of Artificial Sequence: Synthetic oligonucleotide
  Antisense strand to SEQ ID NO: 976710
uggcucggauaaauagccg

SEQ ID NO: 976712 - RNA, 19 nt, Artificial Sequence
  Description of Artificial Sequence: Synthetic oligonucleotide
  Sense strand starting at position 2953 of SEQ ID NO: 914082
acaagaaucuugccuguau

SEQ ID NO: 976713 - RNA, 19 nt, Artificial Sequence
  Description of Artificial Sequence: Synthetic oligonucleotide
  Antisense strand to SEQ ID NO: 976712
auacaggcaagauucuugu

SEQ ID NO: 976714 - RNA, 19 nt, Artificial Sequence
  Description of Artificial Sequence: Synthetic oligonucleotide
  Sense strand starting at position 2606 of SEQ ID NO: 914082
gcaauacuaucuuugguaa

SEQ ID NO: 976715 - RNA, 19 nt, Artificial Sequence
  Description of Artificial Sequence: Synthetic oligonucleotide
  Antisense strand to SEQ ID NO: 976714
uuaccaaagauaguauugc

SEQ ID NO: 976716 - RNA, 19 nt, Artificial Sequence
  Description of Artificial Sequence: Synthetic oligonucleotide
  Sense strand starting at position 484 of SEQ ID NO: 914082
gccuaaaccugccugaaga

SEQ ID NO: 976717 - RNA, 19 nt, Artificial Sequence
  Description of Artificial Sequence: Synthetic oligonucleotide
  Antisense strand to SEQ ID NO: 976716
ucuucaggcagguuuaggc

SEQ ID NO: 976718 - RNA, 19 nt, Artificial Sequence
  Description of Artificial Sequence: Synthetic oligonucleotide
  Sense strand starting at position 271 of SEQ ID NO: 914082
gguuucuggcaaugauaug

SEQ ID NO: 976719 - RNA, 19 nt, Artificial Sequence
  Description of Artificial Sequence: Synthetic oligonucleotide
  Antisense strand to SEQ ID NO: 976718
cauaucauugccagaaacc

SEQ ID NO: 976720 - RNA, 19 nt, Artificial Sequence
  Description of Artificial Sequence: Synthetic oligonucleotide
  Sense strand starting at position 3773 of SEQ ID NO: 914082
gagcacauguuaucuugau

SEQ ID NO: 976721 - RNA, 19 nt, Artificial Sequence
  Description of Artificial Sequence: Synthetic oligonucleotide
  Antisense strand to SEQ ID NO: 976720
aucaagauaacaugugcuc

SEQ ID NO: 976722 - RNA, 19 nt, Artificial Sequence
  Description of Artificial Sequence: Synthetic oligonucleotide
  Sense strand starting at position 760 of SEQ ID NO: 914082
auaguuuguguuggauaga

SEQ ID NO: 976723 - RNA, 19 nt, Artificial Sequence
  Description of Artificial Sequence: Synthetic oligonucleotide
  Antisense strand to SEQ ID NO: 976722
ucuauccaacacaaacuau

SEQ ID NO: 976724 - RNA, 19 nt, Artificial Sequence
  Description of Artificial Sequence: Synthetic oligonucleotide
  Sense strand starting at position 77 of SEQ ID NO: 914082
augcucuuccuauggauau

SEQ ID NO: 976725 - RNA, 19 nt, Artificial Sequence
  Description of Artificial Sequence: Synthetic oligonucleotide
  Antisense strand to SEQ ID NO: 976724
auauccauaggaagagcau

SEQ ID NO: 976726 - RNA, 19 nt, Artificial Sequence
  Description of Artificial Sequence: Synthetic oligonucleotide
  Sense strand starting at position 2972 of SEQ ID NO: 914082
cauggaguuugugugagau

SEQ ID NO: 976727 - RNA, 19 nt, Artificial Sequence
  Description of Artificial Sequence: Synthetic oligonucleotide
  Antisense strand to SEQ ID NO: 976726
aucucacacaaacuccaug

SEQ ID NO: 976728 - RNA, 19 nt, Artificial Sequence
  Description of Artificial Sequence: Synthetic oligonucleotide
  Sense strand starting at position 1175 of SEQ ID NO: 914082
uucgguccucugggaaaug

SEQ ID NO: 976729 - RNA, 19 nt, Artificial Sequence
  Description of Artificial Sequence: Synthetic oligonucleotide
  Antisense strand to SEQ ID NO: 976728
cauuucccagaggaccgaa

SEQ ID NO: 976730 - RNA, 19 nt, Artificial Sequence
  Description of Artificial Sequence: Synthetic oligonucleotide
  Sense strand starting at position 2964 of SEQ ID NO: 914082
gccuguaucauggaguuug

SEQ ID NO: 976731 - RNA, 19 nt, Artificial Sequence
  Description of Artificial Sequence: Synthetic oligonucleotide
  Antisense strand to SEQ ID NO: 976730
caaacuccaugauacaggc

SEQ ID NO: 976732 - RNA, 19 nt, Artificial Sequence
  Description of Artificial Sequence: Synthetic oligonucleotide
  Sense strand starting at position 3735 of SEQ ID NO: 914082
gaaagucugucuuugauuc

SEQ ID NO: 976733 - RNA, 19 nt, Artificial Sequence
  Description of Artificial Sequence: Synthetic oligonucleotide
  Antisense strand to SEQ ID NO: 976732
gaaucaaagacagacuuuc

SEQ ID NO: 976734 - RNA, 19 nt, Artificial Sequence
  Description of Artificial Sequence: Synthetic oligonucleotide
  Sense strand starting at position 757 of SEQ ID NO: 914082
gggauaguuuguguuggau

SEQ ID NO: 976735 - RNA, 19 nt, Artificial Sequence
  Description of Artificial Sequence: Synthetic oligonucleotide
  Antisense strand to SEQ ID NO: 976734
auccaacacaaacuauccc

SEQ ID NO: 976736 - RNA, 19 nt, Artificial Sequence
  Description of Artificial Sequence: Synthetic oligonucleotide
  Sense strand starting at position 1243 of SEQ ID NO: 914082
ccuggaagcucucuggagu

SEQ ID NO: 976737 - RNA, 19 nt, Artificial Sequence
  Description of Artificial Sequence: Synthetic oligonucleotide
  Antisense strand to SEQ ID NO: 976736
acuccagagagcuuccagg

SEQ ID NO: 976738 - RNA, 19 nt, Artificial Sequence
  Description of Artificial Sequence: Synthetic oligonucleotide
  Sense strand starting at position 3774 of SEQ ID NO: 914082
agcacauguuaucuugauu

SEQ ID NO: 976739 - RNA, 19 nt, Artificial Sequence
  Description of Artificial Sequence: Synthetic oligonucleotide
  Antisense strand to SEQ ID NO: 976738
aaucaagauaacaugugcu

SEQ ID NO: 976740 - RNA, 19 nt, Artificial Sequence
  Description of Artificial Sequence: Synthetic oligonucleotide
  Sense strand starting at position 174 of SEQ ID NO: 914082
cugaaagucugaguuguug

SEQ ID NO: 976741 - RNA, 19 nt, Artificial Sequence
  Description of Artificial Sequence: Synthetic oligonucleotide
  Antisense strand to SEQ ID NO: 976740
caacaacucagacuuucag

SEQ ID NO: 976742 - RNA, 19 nt, Artificial Sequence
  Description of Artificial Sequence: Synthetic oligonucleotide
  Sense strand starting at position 3573 of SEQ ID NO: 914082
agcacuauaccuggcuaau

SEQ ID NO: 976743 - RNA, 19 nt, Artificial Sequence
  Description of Artificial Sequence: Synthetic oligonucleotide
  Antisense strand to SEQ ID NO: 976742
auuagccagguauagugcu

SEQ ID NO: 976744 - RNA, 19 nt, Artificial Sequence
  Description of Artificial Sequence: Synthetic oligonucleotide
  Sense strand starting at position 2442 of SEQ ID NO: 914082
caaguacaguccuuuguga

SEQ ID NO: 976745 - RNA, 19 nt, Artificial Sequence
  Description of Artificial Sequence: Synthetic oligonucleotide
  Antisense strand to SEQ ID NO: 976744
ucacaaaggacuguacuug

SEQ ID NO: 976746 - RNA, 19 nt, Artificial Sequence
  Description of Artificial Sequence: Synthetic oligonucleotide
  Sense strand starting at position 3337 of SEQ ID NO: 914082
ccugguuuaugguuacuca

SEQ ID NO: 976747 - RNA, 19 nt, Artificial Sequence
  Description of Artificial Sequence: Synthetic oligonucleotide
  Antisense strand to SEQ ID NO: 976746
ugaguaaccauaaaccagg

SEQ ID NO: 976748 - RNA, 19 nt, Artificial Sequence
  Description of Artificial Sequence: Synthetic oligonucleotide
  Sense strand starting at position 2444 of SEQ ID NO: 914082
aguacaguccuuugugaca

SEQ ID NO: 976749 - RNA, 19 nt, Artificial Sequence
  Description of Artificial Sequence: Synthetic oligonucleotide
  Antisense strand to SEQ ID NO: 976748
ugucacaaaggacuguacu

SEQ ID NO: 976750 - RNA, 19 nt, Artificial Sequence
  Description of Artificial Sequence: Synthetic oligonucleotide
  Sense strand starting at position 3761 of SEQ ID NO: 914083
acauucugaccugauagca

SEQ ID NO: 976751 - RNA, 19 nt, Artificial Sequence
  Description of Artificial Sequence: Synthetic oligonucleotide
  Antisense strand to SEQ ID NO: 976750
ugcuaucaggucagaaugu

SEQ ID NO: 976752 - RNA, 19 nt, Artificial Sequence
  Description of Artificial Sequence: Synthetic oligonucleotide
  Sense strand starting at position 832 of SEQ ID NO: 914083
ggaguaagggaucgaaacu

SEQ ID NO: 976753 - RNA, 19 nt, Artificial Sequence
  Description of Artificial Sequence: Synthetic oligonucleotide
  Antisense strand to SEQ ID NO: 976752
aguuucgaucccuuacucc

SEQ ID NO: 976754 - RNA, 19 nt, Artificial Sequence
  Description of Artificial Sequence: Synthetic oligonucleotide
  Sense strand starting at position 3242 of SEQ ID NO: 914083
acaggaugugcacaacuua

SEQ ID NO: 976755 - RNA, 19 nt, Artificial Sequence
  Description of Artificial Sequence: Synthetic oligonucleotide
  Antisense strand to SEQ ID NO: 976754
uaaguugugcacauccugu

SEQ ID NO: 976756 - RNA, 19 nt, Artificial Sequence
  Description of Artificial Sequence: Synthetic oligonucleotide
  Sense strand starting at position 3220 of SEQ ID NO: 914083
gaacaugggucuccaggau

SEQ ID NO: 976757 - RNA, 19 nt, Artificial Sequence
  Description of Artificial Sequence: Synthetic oligonucleotide
  Antisense strand to SEQ ID NO: 976756
auccuggagacccauguuc

SEQ ID NO: 976758 - RNA, 19 nt, Artificial Sequence
  Description of Artificial Sequence: Synthetic oligonucleotide
  Sense strand starting at position 2347 of SEQ ID NO: 914083
ccgugaggacgggaaugau

SEQ ID NO: 976759 - RNA, 19 nt, Artificial Sequence
  Description of Artificial Sequence: Synthetic oligonucleotide
  Antisense strand to SEQ ID NO: 976758
aucauucccguccucacgg

SEQ ID NO: 976760 - RNA, 19 nt, Artificial Sequence
  Description of Artificial Sequence: Synthetic oligonucleotide
  Sense strand starting at position 3758 of SEQ ID NO: 914083
cugacauucugaccugaua

SEQ ID NO: 976761 - RNA, 19 nt, Artificial Sequence
  Description of Artificial Sequence: Synthetic oligonucleotide
  Antisense strand to SEQ ID NO: 976760
uaucaggucagaaugucag

SEQ ID NO: 976762 - RNA, 19 nt, Artificial Sequence
  Description of Artificial Sequence: Synthetic oligonucleotide
  Sense strand starting at position 662 of SEQ ID NO: 914083
uguuaaugggccuaauuaa

SEQ ID NO: 976763 - RNA, 19 nt, Artificial Sequence
  Description of Artificial Sequence: Synthetic oligonucleotide
  Antisense strand to SEQ ID NO: 976762
uuaauuaggcccauuaaca

SEQ ID NO: 976764 - RNA, 19 nt, Artificial Sequence
  Description of Artificial Sequence: Synthetic oligonucleotide
  Sense strand starting at position 3769 of SEQ ID NO: 914083
accugauagcagcaucaua

SEQ ID NO: 976765 - RNA, 19 nt, Artificial Sequence
  Description of Artificial Sequence: Synthetic oligonucleotide
  Antisense strand to SEQ ID NO: 976764
uaugaugcugcuaucaggu

SEQ ID NO: 976766 - RNA, 19 nt, Artificial Sequence
  Description of Artificial Sequence: Synthetic oligonucleotide
  Sense strand starting at position 3902 of SEQ ID NO: 914083
agcacuauggccuauaaca

SEQ ID NO: 976767 - RNA, 19 nt, Artificial Sequence
  Description of Artificial Sequence: Synthetic oligonucleotide
  Antisense strand to SEQ ID NO: 976766
uguuauaggccauagugcu

SEQ ID NO: 976768 - RNA, 19 nt, Artificial Sequence
  Description of Artificial Sequence: Synthetic oligonucleotide
  Sense strand starting at position 2293 of SEQ ID NO: 914083
agcugcuuugaauaaauca

SEQ ID NO: 976769 - RNA, 19 nt, Artificial Sequence
  Description of Artificial Sequence: Synthetic oligonucleotide
  Antisense strand to SEQ ID NO: 976768
ugauuuauucaaagcagcu

SEQ ID NO: 976770 - RNA, 19 nt, Artificial Sequence
  Description of Artificial Sequence: Synthetic oligonucleotide
  Sense strand starting at position 3315 of SEQ ID NO: 914083
cagagagccguuuaagaug

SEQ ID NO: 976771 - RNA, 19 nt, Artificial Sequence
  Description of Artificial Sequence: Synthetic oligonucleotide
  Antisense strand to SEQ ID NO: 976770
caucuuaaacggcucucug

SEQ ID NO: 976772 - RNA, 19 nt, Artificial Sequence
  Description of Artificial Sequence: Synthetic oligonucleotide
  Sense strand starting at position 483 of SEQ ID NO: 914083
cugauaacuccucgagaug

SEQ ID NO: 976773 - RNA, 19 nt, Artificial Sequence
  Description of Artificial Sequence: Synthetic oligonucleotide
  Antisense strand to SEQ ID NO: 976772
caucucgaggaguuaucag

SEQ ID NO: 976774 - RNA, 19 nt, Artificial Sequence
  Description of Artificial Sequence: Synthetic oligonucleotide
  Sense strand starting at position 3195 of SEQ ID NO: 914083
augguugaauagguaagua

SEQ ID NO: 976775 - RNA, 19 nt, Artificial Sequence
  Description of Artificial Sequence: Synthetic oligonucleotide
  Antisense strand to SEQ ID NO: 976774
uacuuaccuauucaaccau

SEQ ID NO: 976776 - RNA, 19 nt, Artificial Sequence
  Description of Artificial Sequence: Synthetic oligonucleotide
  Sense strand starting at position 505 of SEQ ID NO: 914083
ccuaucagaugcucugaaa

SEQ ID NO: 976777 - RNA, 19 nt, Artificial Sequence
  Description of Artificial Sequence: Synthetic oligonucleotide
  Antisense strand to SEQ ID NO: 976776
uuucagagcaucugauagg

SEQ ID NO: 976778 - RNA, 19 nt, Artificial Sequence
  Description of Artificial Sequence: Synthetic oligonucleotide
  Sense strand starting at position 404 of SEQ ID NO: 914083
agcacauguguccaaugga

SEQ ID NO: 976779 - RNA, 19 nt, Artificial Sequence
  Description of Artificial Sequence: Synthetic oligonucleotide
  Antisense strand to SEQ ID NO: 976778
uccauuggacacaugugcu

SEQ ID NO: 976780 - RNA, 19 nt, Artificial Sequence
  Description of Artificial Sequence: Synthetic oligonucleotide
  Sense strand starting at position 482 of SEQ ID NO: 914083
ucugauaacuccucgagau

SEQ ID NO: 976781 - RNA, 19 nt, Artificial Sequence
  Description of Artificial Sequence: Synthetic oligonucleotide
  Antisense strand to SEQ ID NO: 976780
aucucgaggaguuaucaga

SEQ ID NO: 976782 - RNA, 19 nt, Artificial Sequence
  Description of Artificial Sequence: Synthetic oligonucleotide
  Sense strand starting at position 892 of SEQ ID NO: 914083
cgaguagcccaauaauuau

SEQ ID NO: 976783 - RNA, 19 nt, Artificial Sequence
  Description of Artificial Sequence: Synthetic oligonucleotide
  Antisense strand to SEQ ID NO: 976782
auaauuauugggcuacucg

SEQ ID NO: 976784 - RNA, 19 nt, Artificial Sequence
  Description of Artificial Sequence: Synthetic oligonucleotide
  Sense strand starting at position 3194 of SEQ ID NO: 914083
gaugguugaauagguaagu

SEQ ID NO: 976785 - RNA, 19 nt, Artificial Sequence
  Description of Artificial Sequence: Synthetic oligonucleotide
  Antisense strand to SEQ ID NO: 976784
acuuaccuauucaaccauc

SEQ ID NO: 976786 - RNA, 19 nt, Artificial Sequence
  Description of Artificial Sequence: Synthetic oligonucleotide
  Sense strand starting at position 3900 of SEQ ID NO: 914083
agagcacuauggccuauaa

SEQ ID NO: 976787 - RNA, 19 nt, Artificial Sequence
  Description of Artificial Sequence: Synthetic oligonucleotide
  Antisense strand to SEQ ID NO: 976786
uuauaggccauagugcucu

SEQ ID NO: 976788 - RNA, 19 nt, Artificial Sequence
  Description of Artificial Sequence: Synthetic oligonucleotide
  Sense strand starting at position 3957 of SEQ ID NO: 914083
auauguuugccuuacacau

SEQ ID NO: 976789 - RNA, 19 nt, Artificial Sequence
  Description of Artificial Sequence: Synthetic oligonucleotide
  Antisense strand to SEQ ID NO: 976788
auguguaaggcaaacauau

SEQ ID NO: 976790 - RNA, 19 nt, Artificial Sequence
  Description of Artificial Sequence: Synthetic oligonucleotide
  Sense strand starting at position 2921 of SEQ ID NO: 914083
acagaugcccucugacauc

SEQ ID NO: 976791 - RNA, 19 nt, Artificial Sequence
  Description of Artificial Sequence: Synthetic oligonucleotide
  Antisense strand to SEQ ID NO: 976790
gaugucagagggcaucugu

SEQ ID NO: 976792 - RNA, 19 nt, Artificial Sequence
  Description of Artificial Sequence: Synthetic oligonucleotide
  Sense strand starting at position 889 of SEQ ID NO: 914083
uuucgaguagcccaauaau

SEQ ID NO: 976793 - RNA, 19 nt, Artificial Sequence
  Description of Artificial Sequence: Synthetic oligonucleotide
  Antisense strand to SEQ ID NO: 976792
auuauugggcuacucgaaa

SEQ ID NO: 976794 - RNA, 19 nt, Artificial Sequence
  Description of Artificial Sequence: Synthetic oligonucleotide
  Sense strand starting at position 1014 of SEQ ID NO: 914083
acauaaguucugggucuua

SEQ ID NO: 976795 - RNA, 19 nt, Artificial Sequence
  Description of Artificial Sequence: Synthetic oligonucleotide
  Antisense strand to SEQ ID NO: 976794
uaagacccagaacuuaugu

SEQ ID NO: 976796 - RNA, 19 nt, Artificial Sequence
  Description of Artificial Sequence: Synthetic oligonucleotide
  Sense strand starting at position 3678 of SEQ ID NO: 914083
ugaauauguguugagcucu

SEQ ID NO: 976797 - RNA, 19 nt, Artificial Sequence
  Description of Artificial Sequence: Synthetic oligonucleotide
  Antisense strand to SEQ ID NO: 976796
agagcucaacacauauuca

SEQ ID NO: 976798 - RNA, 19 nt, Artificial Sequence
  Description of Artificial Sequence: Synthetic oligonucleotide
  Sense strand starting at position 761 of SEQ ID NO: 914083
uugcaaugguuccugaaau

SEQ ID NO: 976799 - RNA, 19 nt, Artificial Sequence
  Description of Artificial Sequence: Synthetic oligonucleotide
  Antisense strand to SEQ ID NO: 976798
auuucaggaaccauugcaa

SEQ ID NO: 976800 - RNA, 19 nt, Artificial Sequence
  Description of Artificial Sequence: Synthetic oligonucleotide
  Sense strand starting at position 2416 of SEQ ID NO: 914083
ggcuucccuuuccugaaga

SEQ ID NO: 976801 - RNA, 19 nt, Artificial Sequence
  Description of Artificial Sequence: Synthetic oligonucleotide
  Antisense strand to SEQ ID NO: 976800
ucuucaggaaagggaagcc

SEQ ID NO: 976802 - RNA, 19 nt, Artificial Sequence
  Description of Artificial Sequence: Synthetic oligonucleotide
  Sense strand starting at position 1136 of SEQ ID NO: 914083
aagcgaguucuccaacuuu

SEQ ID NO: 976803 - RNA, 19 nt, Artificial Sequence
  Description of Artificial Sequence: Synthetic oligonucleotide
  Antisense strand to SEQ ID NO: 976802
aaaguuggagaacucgcuu

SEQ ID NO: 976804 - RNA, 19 nt, Artificial Sequence
  Description of Artificial Sequence: Synthetic oligonucleotide
  Sense strand starting at position 407 of SEQ ID NO: 914083
acauguguccaauggagca

SEQ ID NO: 976805 - RNA, 19 nt, Artificial Sequence
  Description of Artificial Sequence: Synthetic oligonucleotide
  Antisense strand to SEQ ID NO: 976804
ugcuccauuggacacaugu

SEQ ID NO: 976806 - RNA, 19 nt, Artificial Sequence
  Description of Artificial Sequence: Synthetic oligonucleotide
  Sense strand starting at position 659 of SEQ ID NO: 914083
cucuguuaaugggccuaau

SEQ ID NO: 976807 - RNA, 19 nt, Artificial Sequence
  Description of Artificial Sequence: Synthetic oligonucleotide
  Antisense strand to SEQ ID NO: 976806
auuaggcccauuaacagag

SEQ ID NO: 976808 - RNA, 19 nt, Artificial Sequence
  Description of Artificial Sequence: Synthetic oligonucleotide
  Sense strand starting at position 3780 of SEQ ID NO: 914083
gcaucauagcagugaacac

SEQ ID NO: 976809 - RNA, 19 nt, Artificial Sequence
  Description of Artificial Sequence: Synthetic oligonucleotide
  Antisense strand to SEQ ID NO: 976808
guguucacugcuaugaugc

SEQ ID NO: 976810 - RNA, 19 nt, Artificial Sequence
  Description of Artificial Sequence: Synthetic oligonucleotide
  Sense strand starting at position 578 of SEQ ID NO: 914083
cagucuaaaugagucguga

SEQ ID NO: 976811 - RNA, 19 nt, Artificial Sequence
  Description of Artificial Sequence: Synthetic oligonucleotide
  Antisense strand to SEQ ID NO: 976810
ucacgacucauuuagacug

SEQ ID NO: 976812 - RNA, 19 nt, Artificial Sequence
  Description of Artificial Sequence: Synthetic oligonucleotide
  Sense strand starting at position 1134 of SEQ ID NO: 914083
caaagcgaguucuccaacu

SEQ ID NO: 976813 - RNA, 19 nt, Artificial Sequence
  Description of Artificial Sequence: Synthetic oligonucleotide
  Antisense strand to SEQ ID NO: 976812
aguuggagaacucgcuuug

SEQ ID NO: 976814 - RNA, 19 nt, Artificial Sequence
  Description of Artificial Sequence: Synthetic oligonucleotide
  Sense strand starting at position 1026 of SEQ ID NO: 914083
ggucuuaucggaugucaca

SEQ ID NO: 976815 - RNA, 19 nt, Artificial Sequence
  Description of Artificial Sequence: Synthetic oligonucleotide
  Antisense strand to SEQ ID NO: 976814
ugugacauccgauaagacc

SEQ ID NO: 976816 - RNA, 19 nt, Artificial Sequence
  Description of Artificial Sequence: Synthetic oligonucleotide
  Sense strand starting at position 2868 of SEQ ID NO: 914083
cuaagagccugccuuugau

SEQ ID NO: 976817 - RNA, 19 nt, Artificial Sequence
  Description of Artificial Sequence: Synthetic oligonucleotide
  Antisense strand to SEQ ID NO: 976816
aucaaaggcaggcucuuag

SEQ ID NO: 976818 - RNA, 19 nt, Artificial Sequence
  Description of Artificial Sequence: Synthetic oligonucleotide
  Sense strand starting at position 3311 of SEQ ID NO: 914083
auggcagagagccguuuaa

SEQ ID NO: 976819 - RNA, 19 nt, Artificial Sequence
  Description of Artificial Sequence: Synthetic oligonucleotide
  Antisense strand to SEQ ID NO: 976818
uuaaacggcucucugccau

SEQ ID NO: 976820 - RNA, 19 nt, Artificial Sequence
  Description of Artificial Sequence: Synthetic oligonucleotide
  Sense strand starting at position 580 of SEQ ID NO: 914083
gucuaaaugagucgugauu

SEQ ID NO: 976821 - RNA, 19 nt, Artificial Sequence
  Description of Artificial Sequence: Synthetic oligonucleotide
  Antisense strand to SEQ ID NO: 976820
aaucacgacucauuuagac

SEQ ID NO: 976822 - RNA, 19 nt, Artificial Sequence
  Description of Artificial Sequence: Synthetic oligonucleotide
  Sense strand starting at position 682 of SEQ ID NO: 914083
ggaccuggauuucgauuau

SEQ ID NO: 976823 - RNA, 19 nt, Artificial Sequence
  Description of Artificial Sequence: Synthetic oligonucleotide
  Antisense strand to SEQ ID NO: 976822
auaaucgaaauccaggucc

SEQ ID NO: 976824 - RNA, 19 nt, Artificial Sequence
  Description of Artificial Sequence: Synthetic oligonucleotide
  Sense strand starting at position 3507 of SEQ ID NO: 914083
cugguuauguauccucuuu

SEQ ID NO: 976825 - RNA, 19 nt, Artificial Sequence
  Description of Artificial Sequence: Synthetic oligonucleotide
  Antisense strand to SEQ ID NO: 976824
aaagaggauacauaaccag

SEQ ID NO: 976826 - RNA, 19 nt, Artificial Sequence
  Description of Artificial Sequence: Synthetic oligonucleotide
  Sense strand starting at position 2325 of SEQ ID NO: 914083
gccucagugucccugaaau

SEQ ID NO: 976827 - RNA, 19 nt, Artificial Sequence
  Description of Artificial Sequence: Synthetic oligonucleotide
  Antisense strand to SEQ ID NO: 976826
auuucagggacacugaggc

SEQ ID NO: 976828 - RNA, 19 nt, Artificial Sequence
  Description of Artificial Sequence: Synthetic oligonucleotide
  Sense strand starting at position 3037 of SEQ ID NO: 914083
gcagaagagugggcuuguu

SEQ ID NO: 976829 - RNA, 19 nt, Artificial Sequence
  Description of Artificial Sequence: Synthetic oligonucleotide
  Antisense strand to SEQ ID NO: 976828
aacaagcccacucuucugc

SEQ ID NO: 976830 - RNA, 19 nt, Artificial Sequence
  Description of Artificial Sequence: Synthetic oligonucleotide
  Sense strand starting at position 3365 of SEQ ID NO: 914084
aaaguaaagcagcauuaga

SEQ ID NO: 976831 - RNA, 19 nt, Artificial Sequence
  Description of Artificial Sequence: Synthetic oligonucleotide
  Antisense strand to SEQ ID NO: 976830
ucuaaugcugcuuuacuuu

SEQ ID NO: 976832 - RNA, 19 nt, Artificial Sequence
  Description of Artificial Sequence: Synthetic oligonucleotide
  Sense strand starting at position 3819 of SEQ ID NO: 914084
cugagauggcuguaggaug

SEQ ID NO: 976833 - RNA, 19 nt, Artificial Sequence
  Description of Artificial Sequence: Synthetic oligonucleotide
  Antisense strand to SEQ ID NO: 976832
cauccuacagccaucucag

SEQ ID NO: 976834 - RNA, 19 nt, Artificial Sequence
  Description of Artificial Sequence: Synthetic oligonucleotide
  Sense strand starting at position 3629 of SEQ ID NO: 914084
uguuguuaucguguguaga

SEQ ID NO: 976835 - RNA, 19 nt, Artificial Sequence
  Description of Artificial Sequence: Synthetic oligonucleotide
  Antisense strand to SEQ ID NO: 976834
ucuacacacgauaacaaca

SEQ ID NO: 976836 - RNA, 19 nt, Artificial Sequence
  Description of Artificial Sequence: Synthetic oligonucleotide
  Sense strand starting at position 3627 of SEQ ID NO: 914084
uauguuguuaucgugugua

SEQ ID NO: 976837 - RNA, 19 nt, Artificial Sequence
  Description of Artificial Sequence: Synthetic oligonucleotide
  Antisense strand to SEQ ID NO: 976836
uacacacgauaacaacaua

SEQ ID NO: 976838 - RNA, 19 nt, Artificial Sequence
  Description of Artificial Sequence: Synthetic oligonucleotide
  Sense strand starting at position 3503 of SEQ ID NO: 914084
agaguaccugcagggaauu

SEQ ID NO: 976839 - RNA, 19 nt, Artificial Sequence
  Description of Artificial Sequence: Synthetic oligonucleotide
  Antisense strand to SEQ ID NO: 976838
aauucccugcagguacucu

SEQ ID NO: 976840 - RNA, 19 nt, Artificial Sequence
  Description of Artificial Sequence: Synthetic oligonucleotide
  Sense strand starting at position 3450 of SEQ ID NO: 914084
ggucuuucgaggcagacaa

SEQ ID NO: 976841 - RNA, 19 nt, Artificial Sequence
  Description of Artificial Sequence: Synthetic oligonucleotide
  Antisense strand to SEQ ID NO: 976840
uugucugccucgaaagacc

SEQ ID NO: 976842 - RNA, 19 nt, Artificial Sequence
  Description of Artificial Sequence: Synthetic oligonucleotide
  Sense strand starting at position 3290 of SEQ ID NO: 914084
gauuguguuguugagauua

SEQ ID NO: 976843 - RNA, 19 nt, Artificial Sequence
  Description of Artificial Sequence: Synthetic oligonucleotide
  Antisense strand to SEQ ID NO: 976842
uaaucucaacaacacaauc

SEQ ID NO: 976844 - RNA, 19 nt, Artificial Sequence
  Description of Artificial Sequence: Synthetic oligonucleotide
  Sense strand starting at position 3490 of SEQ ID NO: 914084
ccacguacucauuagagua

SEQ ID NO: 976845 - RNA, 19 nt, Artificial Sequence
  Description of Artificial Sequence: Synthetic oligonucleotide
  Antisense strand to SEQ ID NO: 976844
uacucuaaugaguacgugg

SEQ ID NO: 976846 - RNA, 19 nt, Artificial Sequence
  Description of Artificial Sequence: Synthetic oligonucleotide
  Sense strand starting at position 3612 of SEQ ID NO: 914084
aguauaaggacuugcuaug

SEQ ID NO: 976847 - RNA, 19 nt, Artificial Sequence
  Description of Artificial Sequence: Synthetic oligonucleotide
  Antisense strand to SEQ ID NO: 976846
cauagcaaguccuuauacu

SEQ ID NO: 976848 - RNA, 19 nt, Artificial Sequence
  Description of Artificial Sequence: Synthetic oligonucleotide
  Sense strand starting at position 3798 of SEQ ID NO: 914084
uuggaaugucuccaucugu

SEQ ID NO: 976849 - RNA, 19 nt, Artificial Sequence
  Description of Artificial Sequence: Synthetic oligonucleotide
  Antisense strand to SEQ ID NO: 976848
acagauggagacauuccaa

SEQ ID NO: 976850 - RNA, 19 nt, Artificial Sequence
  Description of Artificial Sequence: Synthetic oligonucleotide
  Sense strand starting at position 3817 of SEQ ID NO: 914084
cccugagauggcuguagga

SEQ ID NO: 976851 - RNA, 19 nt, Artificial Sequence
  Description of Artificial Sequence: Synthetic oligonucleotide
  Antisense strand to SEQ ID NO: 976850
uccuacagccaucucaggg

SEQ ID NO: 976852 - RNA, 19 nt, Artificial Sequence
  Description of Artificial Sequence: Synthetic oligonucleotide
  Sense strand starting at position 3514 of SEQ ID NO: 914084
agggaauuacuuugccucu

SEQ ID NO: 976853 - RNA, 19 nt, Artificial Sequence
  Description of Artificial Sequence: Synthetic oligonucleotide
  Antisense strand to SEQ ID NO: 976852
agaggcaaaguaauucccu

SEQ ID NO: 976854 - RNA, 19 nt, Artificial Sequence
  Description of Artificial Sequence: Synthetic oligonucleotide
  Sense strand starting at position 3808 of SEQ ID NO: 914084
uccaucugucccugagaug

SEQ ID NO: 976855 - RNA, 19 nt, Artificial Sequence
  Description of Artificial Sequence: Synthetic oligonucleotide
  Antisense strand to SEQ ID NO: 976854
caucucagggacagaugga

SEQ ID NO: 976856 - RNA, 19 nt, Artificial Sequence
  Description of Artificial Sequence: Synthetic oligonucleotide
  Sense strand starting at position 3288 of SEQ ID NO: 914084
gggauuguguuguugagau

SEQ ID NO: 976857 - RNA, 19 nt, Artificial Sequence
  Description of Artificial Sequence: Synthetic oligonucleotide
  Antisense strand to SEQ ID NO: 976856
aucucaacaacacaauccc

SEQ ID NO: 976858 - RNA, 19 nt, Artificial Sequence
  Description of Artificial Sequence: Synthetic oligonucleotide
  Sense strand starting at position 2636 of SEQ ID NO: 914084
cagaauuucucggccgcga

SEQ ID NO: 976859 - RNA, 19 nt, Artificial Sequence
  Description of Artificial Sequence: Synthetic oligonucleotide
  Antisense strand to SEQ ID NO: 976858
ucgcggccgagaaauucug

SEQ ID NO: 976860 - RNA, 19 nt, Artificial Sequence
  Description of Artificial Sequence: Synthetic oligonucleotide
  Sense strand starting at position 2638 of SEQ ID NO: 914084
gaauuucucggccgcgaau

SEQ ID NO: 976861 - RNA, 19 nt, Artificial Sequence
  Description of Artificial Sequence: Synthetic oligonucleotide
  Antisense strand to SEQ ID NO: 976860
auucgcggccgagaaauuc

SEQ ID NO: 976862 - RNA, 19 nt, Artificial Sequence
  Description of Artificial Sequence: Synthetic oligonucleotide
  Sense strand starting at position 3632 of SEQ ID NO: 914084
uguuaucguguguagaaug

SEQ ID NO: 976863 - RNA, 19 nt, Artificial Sequence
  Description of Artificial Sequence: Synthetic oligonucleotide
  Antisense strand to SEQ ID NO: 976862
cauucuacacacgauaaca

SEQ ID NO: 976864 - RNA, 19 nt, Artificial Sequence
  Description of Artificial Sequence: Synthetic oligonucleotide
  Sense strand starting at position 3618 of SEQ ID NO: 914084
aggacuugcuauguuguua

SEQ ID NO: 976865 - RNA, 19 nt, Artificial Sequence
  Description of Artificial Sequence: Synthetic oligonucleotide
  Antisense strand to SEQ ID NO: 976864
uaacaacauagcaaguccu

SEQ ID NO: 976866 - RNA, 19 nt, Artificial Sequence
  Description of Artificial Sequence: Synthetic oligonucleotide
  Sense strand starting at position 3376 of SEQ ID NO: 914084
gcauuagacgcagaugcuu

SEQ ID NO: 976867 - RNA, 19 nt, Artificial Sequence
  Description of Artificial Sequence: Synthetic oligonucleotide
  Antisense strand to SEQ ID NO: 976866
aagcaucugcgucuaaugc

SEQ ID NO: 976868 - RNA, 19 nt, Artificial Sequence
  Description of Artificial Sequence: Synthetic oligonucleotide
  Sense strand starting at position 2185 of SEQ ID NO: 914084
aagggcucucgguguggaa

SEQ ID NO: 976869 - RNA, 19 nt, Artificial Sequence
  Description of Artificial Sequence: Synthetic oligonucleotide
  Antisense strand to SEQ ID NO: 976868
uuccacaccgagagcccuu

SEQ ID NO: 976870 - RNA, 19 nt, Artificial Sequence
  Description of Artificial Sequence: Synthetic oligonucleotide
  Sense strand starting at position 3540 of SEQ ID NO: 914084
ucaguuaguuucuuuguaa

SEQ ID NO: 976871 - RNA, 19 nt, Artificial Sequence
  Description of Artificial Sequence: Synthetic oligonucleotide
  Antisense strand to SEQ ID NO: 976870
uuacaaagaaacuaacuga

SEQ ID NO: 976872 - RNA, 19 nt, Artificial Sequence
  Description of Artificial Sequence: Synthetic oligonucleotide
  Sense strand starting at position 3539 of SEQ ID NO: 914084
cucaguuaguuucuuugua

SEQ ID NO: 976873 - RNA, 19 nt, Artificial Sequence
  Description of Artificial Sequence: Synthetic oligonucleotide
  Antisense strand to SEQ ID NO: 976872
uacaaagaaacuaacugag

SEQ ID NO: 976874 - RNA, 19 nt, Artificial Sequence
  Description of Artificial Sequence: Synthetic oligonucleotide
  Sense strand starting at position 3531 of SEQ ID NO: 914084
cucugucccucaguuaguu

SEQ ID NO: 976875 - RNA, 19 nt, Artificial Sequence
  Description of Artificial Sequence: Synthetic oligonucleotide
  Antisense strand to SEQ ID NO: 976874
aacuaacugagggacagag

SEQ ID NO: 976876 - RNA, 19 nt, Artificial Sequence
  Description of Artificial Sequence: Synthetic oligonucleotide
  Sense strand starting at position 3437 of SEQ ID NO: 914084
gugcaaagaguguggucuu

SEQ ID NO: 976877 - RNA, 19 nt, Artificial Sequence
  Description of Artificial Sequence: Synthetic oligonucleotide
  Antisense strand to SEQ ID NO: 976876
aagaccacacucuuugcac

SEQ ID NO: 976878 - RNA, 19 nt, Artificial Sequence
  Description of Artificial Sequence: Synthetic oligonucleotide
  Sense strand starting at position 3631 of SEQ ID NO: 914084
uuguuaucguguguagaau

SEQ ID NO: 976879 - RNA, 19 nt, Artificial Sequence
  Description of Artificial Sequence: Synthetic oligonucleotide
  Antisense strand to SEQ ID NO: 976878
auucuacacacgauaacaa

SEQ ID NO: 976880 - RNA, 19 nt, Artificial Sequence
  Description of Artificial Sequence: Synthetic oligonucleotide
  Sense strand starting at position 3384 of SEQ ID NO: 914084
cgcagaugcuucucccauu

SEQ ID NO: 976881 - RNA, 19 nt, Artificial Sequence
  Description of Artificial Sequence: Synthetic oligonucleotide
  Antisense strand to SEQ ID NO: 976880
aaugggagaagcaucugcg

SEQ ID NO: 976882 - RNA, 19 nt, Artificial Sequence
  Description of Artificial Sequence: Synthetic oligonucleotide
  Sense strand starting at position 3630 of SEQ ID NO: 914084
guuguuaucguguguagaa

SEQ ID NO: 976883 - RNA, 19 nt, Artificial Sequence
  Description of Artificial Sequence: Synthetic oligonucleotide
  Antisense strand to SEQ ID NO: 976882
uucuacacacgauaacaac

SEQ ID NO: 976884 - RNA, 19 nt, Artificial Sequence
  Description of Artificial Sequence: Synthetic oligonucleotide
  Sense strand starting at position 3447 of SEQ ID NO: 914084
uguggucuuucgaggcaga

SEQ ID NO: 976885 - RNA, 19 nt, Artificial Sequence
  Description of Artificial Sequence: Synthetic oligonucleotide
  Antisense strand to SEQ ID NO: 976884
ucugccucgaaagaccaca

SEQ ID NO: 976886 - RNA, 19 nt, Artificial Sequence
  Description of Artificial Sequence: Synthetic oligonucleotide
  Sense strand starting at position 3633 of SEQ ID NO: 914084
guuaucguguguagaaugu

SEQ ID NO: 976887 - RNA, 19 nt, Artificial Sequence
  Description of Artificial Sequence: Synthetic oligonucleotide
  Antisense strand to SEQ ID NO: 976886
acauucuacacacgauaac

SEQ ID NO: 976888 - RNA, 19 nt, Artificial Sequence
  Description of Artificial Sequence: Synthetic oligonucleotide
  Sense strand starting at position 3672 of SEQ ID NO: 914084
acuugugggucuugugaag

SEQ ID NO: 976889 - RNA, 19 nt, Artificial Sequence
  Description of Artificial Sequence: Synthetic oligonucleotide
  Antisense strand to SEQ ID NO: 976888
cuucacaagacccacaagu

SEQ ID NO: 976890 - RNA, 19 nt, Artificial Sequence
  Description of Artificial Sequence: Synthetic oligonucleotide
  Sense strand starting at position 3438 of SEQ ID NO: 914084
ugcaaagaguguggucuuu

SEQ ID NO: 976891 - RNA, 19 nt, Artificial Sequence
  Description of Artificial Sequence: Synthetic oligonucleotide
  Antisense strand to SEQ ID NO: 976890
aaagaccacacucuuugca

SEQ ID NO: 976892 - RNA, 19 nt, Artificial Sequence
  Description of Artificial Sequence: Synthetic oligonucleotide
  Sense strand starting at position 3642 of SEQ ID NO: 914084
uguagaaugugcgguuuau

SEQ ID NO: 976893 - RNA, 19 nt, Artificial Sequence
  Description of Artificial Sequence: Synthetic oligonucleotide
  Antisense strand to SEQ ID NO: 976892
auaaaccgcacauucuaca

SEQ ID NO: 976894 - RNA, 19 nt, Artificial Sequence
  Description of Artificial Sequence: Synthetic oligonucleotide
  Sense strand starting at position 2081 of SEQ ID NO: 914084
uuacgucgcucaugcuaau

SEQ ID NO: 976895 - RNA, 19 nt, Artificial Sequence
  Description of Artificial Sequence: Synthetic oligonucleotide
  Antisense strand to SEQ ID NO: 976894
auuagcaugagcgacguaa

SEQ ID NO: 976896 - RNA, 19 nt, Artificial Sequence
  Description of Artificial Sequence: Synthetic oligonucleotide
  Sense strand starting at position 3626 of SEQ ID NO: 914084
cuauguuguuaucgugugu

SEQ ID NO: 976897 - RNA, 19 nt, Artificial Sequence
  Description of Artificial Sequence: Synthetic oligonucleotide
  Antisense strand to SEQ ID NO: 976896
acacacgauaacaacauag

SEQ ID NO: 976898 - RNA, 19 nt, Artificial Sequence
  Description of Artificial Sequence: Synthetic oligonucleotide
  Sense strand starting at position 1455 of SEQ ID NO: 914085
uuauccagcccugaagaau

SEQ ID NO: 976899 - RNA, 19 nt, Artificial Sequence
  Description of Artificial Sequence: Synthetic oligonucleotide
  Antisense strand to SEQ ID NO: 976898
auucuucagggcuggauaa

SEQ ID NO: 976900 - RNA, 19 nt, Artificial Sequence
  Description of Artificial Sequence: Synthetic oligonucleotide
  Sense strand starting at position 1146 of SEQ ID NO: 914085
cuugaaggcccaggaaauu

SEQ ID NO: 976901 - RNA, 19 nt, Artificial Sequence
  Description of Artificial Sequence: Synthetic oligonucleotide
  Antisense strand to SEQ ID NO: 976900
aauuuccugggccuucaag

SEQ ID NO: 976902 - RNA, 19 nt, Artificial Sequence
  Description of Artificial Sequence: Synthetic oligonucleotide
  Sense strand starting at position 1624 of SEQ ID NO: 914085
agaguccaggaaugucaua

SEQ ID NO: 976903 - RNA, 19 nt, Artificial Sequence
  Description of Artificial Sequence: Synthetic oligonucleotide
  Antisense strand to SEQ ID NO: 976902
uaugacauuccuggacucu

SEQ ID NO: 976904 - RNA, 19 nt, Artificial Sequence
  Description of Artificial Sequence: Synthetic oligonucleotide
  Sense strand starting at position 3629 of SEQ ID NO: 914085
gucagagcuccucacugaa

SEQ ID NO: 976905 - RNA, 19 nt, Artificial Sequence
  Description of Artificial Sequence: Synthetic oligonucleotide
  Antisense strand to SEQ ID NO: 976904
uucagugaggagcucugac

SEQ ID NO: 976906 - RNA, 19 nt, Artificial Sequence
  Description of Artificial Sequence: Synthetic oligonucleotide
  Sense strand starting at position 1206 of SEQ ID NO: 914085
aauaauagggcuugucaag

SEQ ID NO: 976907 - RNA, 19 nt, Artificial Sequence
  Description of Artificial Sequence: Synthetic oligonucleotide
  Antisense strand to SEQ ID NO: 976906
cuugacaagcccuauuauu

SEQ ID NO: 976908 - RNA, 19 nt, Artificial Sequence
  Description of Artificial Sequence: Synthetic oligonucleotide
  Sense strand starting at position 1230 of SEQ ID NO: 914085
ugucacaguuuacuagaau

SEQ ID NO: 976909 - RNA, 19 nt, Artificial Sequence
  Description of Artificial Sequence: Synthetic oligonucleotide
  Antisense strand to SEQ ID NO: 976908
auucuaguaaacugugaca

SEQ ID NO: 976910 - RNA, 19 nt, Artificial Sequence
  Description of Artificial Sequence: Synthetic oligonucleotide
  Sense strand starting at position 1454 of SEQ ID NO: 914085
guuauccagcccugaagaa

SEQ ID NO: 976911 - RNA, 19 nt, Artificial Sequence
  Description of Artificial Sequence: Synthetic oligonucleotide
  Antisense strand to SEQ ID NO: 976910
uucuucagggcuggauaac

SEQ ID NO: 976912 - RNA, 19 nt, Artificial Sequence
  Description of Artificial Sequence: Synthetic oligonucleotide
  Sense strand starting at position 1542 of SEQ ID NO: 914085
ccuagcugucauuagucaa

SEQ ID NO: 976913 - RNA, 19 nt, Artificial Sequence
  Description of Artificial Sequence: Synthetic oligonucleotide
  Antisense strand to SEQ ID NO: 976912
uugacuaaugacagcuagg

SEQ ID NO: 976914 - RNA, 19 nt, Artificial Sequence
  Description of Artificial Sequence: Synthetic oligonucleotide
  Sense strand starting at position 1158 of SEQ ID NO: 914085
ggaaauuccuaagagacaa

SEQ ID NO: 976915 - RNA, 19 nt, Artificial Sequence
  Description of Artificial Sequence: Synthetic oligonucleotide
  Antisense strand to SEQ ID NO: 976914
uugucucuuaggaauuucc

SEQ ID NO: 976916 - RNA, 19 nt, Artificial Sequence
  Description of Artificial Sequence: Synthetic oligonucleotide
  Sense strand starting at position 3093 of SEQ ID NO: 914085
caacguauuggucaaggcu

SEQ ID NO: 976917 - RNA, 19 nt, Artificial Sequence
  Description of Artificial Sequence: Synthetic oligonucleotide
  Antisense strand to SEQ ID NO: 976916
agccuugaccaauacguug

SEQ ID NO: 976918 - RNA, 19 nt, Artificial Sequence
  Description of Artificial Sequence: Synthetic oligonucleotide
  Sense strand starting at position 1268 of SEQ ID NO: 914085
uguagacaguuugcacaau

SEQ ID NO: 976919 - RNA, 19 nt, Artificial Sequence
  Description of Artificial Sequence: Synthetic oligonucleotide
  Antisense strand to SEQ ID NO: 976918
auugugcaaacugucuaca

SEQ ID NO: 976920 - RNA, 19 nt, Artificial Sequence
  Description of Artificial Sequence: Synthetic oligonucleotide
  Sense strand starting at position 307 of SEQ ID NO: 914085
ugcugugucacagaguuga

SEQ ID NO: 976921 - RNA, 19 nt, Artificial Sequence
  Description of Artificial Sequence: Synthetic oligonucleotide
  Antisense strand to SEQ ID NO: 976920
ucaacucugugacacagca

SEQ ID NO: 976922 - RNA, 19 nt, Artificial Sequence
  Description of Artificial Sequence: Synthetic oligonucleotide
  Sense strand starting at position 3032 of SEQ ID NO: 914085
auuauaggcgugcaauacu

SEQ ID NO: 976923 - RNA, 19 nt, Artificial Sequence
  Description of Artificial Sequence: Synthetic oligonucleotide
  Antisense strand to SEQ ID NO: 976922
aguauugcacgccuauaau

SEQ ID NO: 976924 - RNA, 19 nt, Artificial Sequence
  Description of Artificial Sequence: Synthetic oligonucleotide
  Sense strand starting at position 1155 of SEQ ID NO: 914085
ccaggaaauuccuaagaga

SEQ ID NO: 976925 - RNA, 19 nt, Artificial Sequence
  Description of Artificial Sequence: Synthetic oligonucleotide
  Antisense strand to SEQ ID NO: 976924
ucucuuaggaauuuccugg

SEQ ID NO: 976926 - RNA, 19 nt, Artificial Sequence
  Description of Artificial Sequence: Synthetic oligonucleotide
  Sense strand starting at position 2827 of SEQ ID NO: 914085
uuagaaagcucucuccugu

SEQ ID NO: 976927 - RNA, 19 nt, Artificial Sequence
  Description of Artificial Sequence: Synthetic oligonucleotide
  Antisense strand to SEQ ID NO: 976926
acaggagagagcuuucuaa

SEQ ID NO: 976928 - RNA, 19 nt, Artificial Sequence
  Description of Artificial Sequence: Synthetic oligonucleotide
  Sense strand starting at position 3030 of SEQ ID NO: 914085
ggauuauaggcgugcaaua

SEQ ID NO: 976929 - RNA, 19 nt, Artificial Sequence
  Description of Artificial Sequence: Synthetic oligonucleotide
  Antisense strand to SEQ ID NO: 976928
uauugcacgccuauaaucc

SEQ ID NO: 976930 - RNA, 19 nt, Artificial Sequence
  Description of Artificial Sequence: Synthetic oligonucleotide
  Sense strand starting at position 1557 of SEQ ID NO: 914085
ucaagugauuacuagaaag

SEQ ID NO: 976931 - RNA, 19 nt, Artificial Sequence
  Description of Artificial Sequence: Synthetic oligonucleotide
  Antisense strand to SEQ ID NO: 976930
cuuucuaguaaucacuuga

SEQ ID NO: 976932 - RNA, 19 nt, Artificial Sequence
  Description of Artificial Sequence: Synthetic oligonucleotide
  Sense strand starting at position 1218 of SEQ ID NO: 914085
ugucaaguacugugucaca

SEQ ID NO: 976933 - RNA, 19 nt, Artificial Sequence
  Description of Artificial Sequence: Synthetic oligonucleotide
  Antisense strand to SEQ ID NO: 976932
ugugacacaguacuugaca

SEQ ID NO: 976934 - RNA, 19 nt, Artificial Sequence
  Description of Artificial Sequence: Synthetic oligonucleotide
  Sense strand starting at position 1594 of SEQ ID NO: 914085
gcagacaucuaacagaaca

SEQ ID NO: 976935 - RNA, 19 nt, Artificial Sequence
  Description of Artificial Sequence: Synthetic oligonucleotide
  Antisense strand to SEQ ID NO: 976934
uguucuguuagaugucugc

SEQ ID NO: 976936 - RNA, 19 nt, Artificial Sequence
  Description of Artificial Sequence: Synthetic oligonucleotide
  Sense strand starting at position 3616 of SEQ ID NO: 914085
ucagcucugccuugucaga

SEQ ID NO: 976937 - RNA, 19 nt, Artificial Sequence
  Description of Artificial Sequence: Synthetic oligonucleotide
  Antisense strand to SEQ ID NO: 976936
ucugacaaggcagagcuga

SEQ ID NO: 976938 - RNA, 19 nt, Artificial Sequence
  Description of Artificial Sequence: Synthetic oligonucleotide
  Sense strand starting at position 1747 of SEQ ID NO: 914085
aguagaagucucugcgggu

SEQ ID NO: 976939 - RNA, 19 nt, Artificial Sequence
  Description of Artificial Sequence: Synthetic oligonucleotide
  Antisense strand to SEQ ID NO: 976938
acccgcagagacuucuacu

SEQ ID NO: 976940 - RNA, 19 nt, Artificial Sequence
  Description of Artificial Sequence: Synthetic oligonucleotide
  Sense strand starting at position 2843 of SEQ ID NO: 914085
ugucucgucccuugaccua

SEQ ID NO: 976941 - RNA, 19 nt, Artificial Sequence
  Description of Artificial Sequence: Synthetic oligonucleotide
  Antisense strand to SEQ ID NO: 976940
uaggucaagggacgagaca

SEQ ID NO: 976942 - RNA, 19 nt, Artificial Sequence
  Description of Artificial Sequence: Synthetic oligonucleotide
  Sense strand starting at position 1748 of SEQ ID NO: 914085
guagaagucucugcggguu

SEQ ID NO: 976943 - RNA, 19 nt, Artificial Sequence
  Description of Artificial Sequence: Synthetic oligonucleotide
  Antisense strand to SEQ ID NO: 976942
aacccgcagagacuucuac

SEQ ID NO: 976944 - RNA, 19 nt, Artificial Sequence
  Description of Artificial Sequence: Synthetic oligonucleotide
  Sense strand starting at position 2180 of SEQ ID NO: 914085
gugagauggucccauuaaa

SEQ ID NO: 976945 - RNA, 19 nt, Artificial Sequence
  Description of Artificial Sequence: Synthetic oligonucleotide
  Antisense strand to SEQ ID NO: 976944
uuuaaugggaccaucucac

SEQ ID NO: 976946 - RNA, 19 nt, Artificial Sequence
  Description of Artificial Sequence: Synthetic oligonucleotide
  Sense strand starting at position 684 of SEQ ID NO: 914085
gcgauuguaugcuccaucu

SEQ ID NO: 976947 - RNA, 19 nt, Artificial Sequence
  Description of Artificial Sequence: Synthetic oligonucleotide
  Antisense strand to SEQ ID NO: 976946
agauggagcauacaaucgc

SEQ ID NO: 976948 - RNA, 19 nt, Artificial Sequence
  Description of Artificial Sequence: Synthetic oligonucleotide
  Sense strand starting at position 791 of SEQ ID NO: 914085
augcauaucuaagagcaca

SEQ ID NO: 976949 - RNA, 19 nt, Artificial Sequence
  Description of Artificial Sequence: Synthetic oligonucleotide
  Antisense strand to SEQ ID NO: 976948
ugugcucuuagauaugcau

SEQ ID NO: 976950 - RNA, 19 nt, Artificial Sequence
  Description of Artificial Sequence: Synthetic oligonucleotide
  Sense strand starting at position 682 of SEQ ID NO: 914085
acgcgauuguaugcuccau

SEQ ID NO: 976951 - RNA, 19 nt, Artificial Sequence
  Description of Artificial Sequence: Synthetic oligonucleotide
  Antisense strand to SEQ ID NO: 976950
auggagcauacaaucgcgu

SEQ ID NO: 976952 - RNA, 19 nt, Artificial Sequence
  Description of Artificial Sequence: Synthetic oligonucleotide
  Sense strand starting at position 1231 of SEQ ID NO: 914085
gucacaguuuacuagaauc

SEQ ID NO: 976953 - RNA, 19 nt, Artificial Sequence
  Description of Artificial Sequence: Synthetic oligonucleotide
  Antisense strand to SEQ ID NO: 976952
gauucuaguaaacugugac

SEQ ID NO: 976954 - RNA, 19 nt, Artificial Sequence
  Description of Artificial Sequence: Synthetic oligonucleotide
  Sense strand starting at position 1269 of SEQ ID NO: 914085
guagacaguuugcacaauu

SEQ ID NO: 976955 - RNA, 19 nt, Artificial Sequence
  Description of Artificial Sequence: Synthetic oligonucleotide
  Antisense strand to SEQ ID NO: 976954
aauugugcaaacugucuac

SEQ ID NO: 976956 - RNA, 19 nt, Artificial Sequence
  Description of Artificial Sequence: Synthetic oligonucleotide
  Sense strand starting at position 1223 of SEQ ID NO: 914085
aguacugugucacaguuua

SEQ ID NO: 976957 - RNA, 19 nt, Artificial Sequence
  Description of Artificial Sequence: Synthetic oligonucleotide
  Antisense strand to SEQ ID NO: 976956
uaaacugugacacaguacu

SEQ ID NO: 976958 - RNA, 19 nt, Artificial Sequence
  Description of Artificial Sequence: Synthetic oligonucleotide
  Sense strand starting at position 1221 of SEQ ID NO: 914085
caaguacugugucacaguu

SEQ ID NO: 976959 - RNA, 19 nt, Artificial Sequence
  Description of Artificial Sequence: Synthetic oligonucleotide
  Antisense strand to SEQ ID NO: 976958
aacugugacacaguacuug

SEQ ID NO: 976960 - RNA, 19 nt, Artificial Sequence
  Description of Artificial Sequence: Synthetic oligonucleotide
  Sense strand starting at position 3089 of SEQ ID NO: 914085
uuuccaacguauuggucaa

SEQ ID NO: 976961 - RNA, 19 nt, Artificial Sequence
  Description of Artificial Sequence: Synthetic oligonucleotide
  Antisense strand to SEQ ID NO: 976960
uugaccaauacguuggaaa

SEQ ID NO: 976962 - RNA, 19 nt, Artificial Sequence
  Description of Artificial Sequence: Synthetic oligonucleotide
  Sense strand starting at position 305 of SEQ ID NO: 914085
ugugcugugucacagaguu

SEQ ID NO: 976963 - RNA, 19 nt, Artificial Sequence
  Description of Artificial Sequence: Synthetic oligonucleotide
  Antisense strand to SEQ ID NO: 976962
aacucugugacacagcaca

SEQ ID NO: 976964 - RNA, 19 nt, Artificial Sequence
  Description of Artificial Sequence: Synthetic oligonucleotide
  Sense strand starting at position 3903 of SEQ ID NO: 914085
gccugugggugccaguaau

SEQ ID NO: 976965 - RNA, 19 nt, Artificial Sequence
  Description of Artificial Sequence: Synthetic oligonucleotide
  Antisense strand to SEQ ID NO: 976964
auuacuggcacccacaggc

SEQ ID NO: 976966 - RNA, 19 nt, Artificial Sequence
  Description of Artificial Sequence: Synthetic oligonucleotide
  Sense strand starting at position 1131 of SEQ ID NO: 914086
ccgucaguaagggaagaua

SEQ ID NO: 976967 - RNA, 19 nt, Artificial Sequence
  Description of Artificial Sequence: Synthetic oligonucleotide
  Antisense strand to SEQ ID NO: 976966
uaucuucccuuacugacgg

SEQ ID NO: 976968 - RNA, 19 nt, Artificial Sequence
  Description of Artificial Sequence: Synthetic oligonucleotide
  Sense strand starting at position 3407 of SEQ ID NO: 914086
ggucgcgaccguuuggaaa

SEQ ID NO: 976969 - RNA, 19 nt, Artificial Sequence
  Description of Artificial Sequence: Synthetic oligonucleotide
  Antisense strand to SEQ ID NO: 976968
uuuccaaacggucgcgacc

SEQ ID NO: 976970 - RNA, 19 nt, Artificial Sequence
  Description of Artificial Sequence: Synthetic oligonucleotide
  Sense strand starting at position 2801 of SEQ ID NO: 914086
gaguaaacccaacaagugu

SEQ ID NO: 976971 - RNA, 19 nt, Artificial Sequence
  Description of Artificial Sequence: Synthetic oligonucleotide
  Antisense strand to SEQ ID NO: 976970
acacuuguuggguuuacuc

SEQ ID NO: 976972 - RNA, 19 nt, Artificial Sequence
  Description of Artificial Sequence: Synthetic oligonucleotide
  Sense strand starting at position 2812 of SEQ ID NO: 914086
acaaguguugaaugaauga

SEQ ID NO: 976973 - RNA, 19 nt, Artificial Sequence
  Description of Artificial Sequence: Synthetic oligonucleotide
  Antisense strand to SEQ ID NO: 976972
ucauucauucaacacuugu

SEQ ID NO: 976974 - RNA, 19 nt, Artificial Sequence
  Description of Artificial Sequence: Synthetic oligonucleotide
  Sense strand starting at position 2901 of SEQ ID NO: 914086
cgaaaugggcgggaugauu

SEQ ID NO: 976975 - RNA, 19 nt, Artificial Sequence
  Description of Artificial Sequence: Synthetic oligonucleotide
  Antisense strand to SEQ ID NO: 976974
aaucaucccgcccauuucg

SEQ ID NO: 976976 - RNA, 19 nt, Artificial Sequence
  Description of Artificial Sequence: Synthetic oligonucleotide
  Sense strand starting at position 1390 of SEQ ID NO: 914086
gguuccugacugggaucaa

SEQ ID NO: 976977 - RNA, 19 nt, Artificial Sequence
  Description of Artificial Sequence: Synthetic oligonucleotide
  Antisense strand to SEQ ID NO: 976976
uugaucccagucaggaacc

SEQ ID NO: 976978 - RNA, 19 nt, Artificial Sequence
  Description of Artificial Sequence: Synthetic oligonucleotide
  Sense strand starting at position 1319 of SEQ ID NO: 914086
agggcuuuggcugacagau

SEQ ID NO: 976979 - RNA, 19 nt, Artificial Sequence
  Description of Artificial Sequence: Synthetic oligonucleotide
  Antisense strand to SEQ ID NO: 976978
aucugucagccaaagcccu

SEQ ID NO: 976980 - RNA, 19 nt, Artificial Sequence
  Description of Artificial Sequence: Synthetic oligonucleotide
  Sense strand starting at position 1083 of SEQ ID NO: 914086
auguaaguccuuuaucuag

SEQ ID NO: 976981 - RNA, 19 nt, Artificial Sequence
  Description of Artificial Sequence: Synthetic oligonucleotide
  Antisense strand to SEQ ID NO: 976980
cuagauaaaggacuuacau

SEQ ID NO: 976982 - RNA, 19 nt, Artificial Sequence
  Description of Artificial Sequence: Synthetic oligonucleotide
  Sense strand starting at position 2089 of SEQ ID NO: 914086
uagcgaagucgccugucau

SEQ ID NO: 976983 - RNA, 19 nt, Artificial Sequence
  Description of Artificial Sequence: Synthetic oligonucleotide
  Antisense strand to SEQ ID NO: 976982
augacaggcgacuucgcua

SEQ ID NO: 976984 - RNA, 19 nt, Artificial Sequence
  Description of Artificial Sequence: Synthetic oligonucleotide
  Sense strand starting at position 17 of SEQ ID NO: 914086
uuggauauacggcauuauu

SEQ ID NO: 976985 - RNA, 19 nt, Artificial Sequence
  Description of Artificial Sequence: Synthetic oligonucleotide
  Antisense strand to SEQ ID NO: 976984
aauaaugccguauauccaa

SEQ ID NO: 976986 - RNA, 19 nt, Artificial Sequence
  Description of Artificial Sequence: Synthetic oligonucleotide
  Sense strand starting at position 432 of SEQ ID NO: 914086
cuuuccugauuugaagaga

SEQ ID NO: 976987 - RNA, 19 nt, Artificial Sequence
  Description of Artificial Sequence: Synthetic oligonucleotide
  Antisense strand to SEQ ID NO: 976986
ucucuucaaaucaggaaag

SEQ ID NO: 976988 - RNA, 19 nt, Artificial Sequence
  Description of Artificial Sequence: Synthetic oligonucleotide
  Sense strand starting at position 2488 of SEQ ID NO: 914086
ucccgugcgcuccucaaau

SEQ ID NO: 976989 - RNA, 19 nt, Artificial Sequence
  Description of Artificial Sequence: Synthetic oligonucleotide
  Antisense strand to SEQ ID NO: 976988
auuugaggagcgcacggga

SEQ ID NO: 976990 - RNA, 19 nt, Artificial Sequence
  Description of Artificial Sequence: Synthetic oligonucleotide
  Sense strand starting at position 2789 of SEQ ID NO: 914086
uccacauucgcagaguaaa

SEQ ID NO: 976991 - RNA, 19 nt, Artificial Sequence
  Description of Artificial Sequence: Synthetic oligonucleotide
  Antisense strand to SEQ ID NO: 976990
uuuacucugcgaaugugga

SEQ ID NO: 976992 - RNA, 19 nt, Artificial Sequence
  Description of Artificial Sequence: Synthetic oligonucleotide
  Sense strand starting at position 2173 of SEQ ID NO: 914086
uuguuuauuggucacugau

SEQ ID NO: 976993 - RNA, 19 nt, Artificial Sequence
  Description of Artificial Sequence: Synthetic oligonucleotide
  Antisense strand to SEQ ID NO: 976992
aucagugaccaauaaacaa

SEQ ID NO: 976994 - RNA, 19 nt, Artificial Sequence
  Description of Artificial Sequence: Synthetic oligonucleotide
  Sense strand starting at position 1387 of SEQ ID NO: 914086
ccugguuccugacugggau

SEQ ID NO: 976995 - RNA, 19 nt, Artificial Sequence
  Description of Artificial Sequence: Synthetic oligonucleotide
  Antisense strand to SEQ ID NO: 976994
aucccagucaggaaccagg

SEQ ID NO: 976996 - RNA, 19 nt, Artificial Sequence
  Description of Artificial Sequence: Synthetic oligonucleotide
  Sense strand starting at position 1090 of SEQ ID NO: 914086
uccuuuaucuagcugagag

SEQ ID NO: 976997 - RNA, 19 nt, Artificial Sequence
  Description of Artificial Sequence: Synthetic oligonucleotide
  Antisense strand to SEQ ID NO: 976996
cucucagcuagauaaagga

SEQ ID NO: 976998 - RNA, 19 nt, Artificial Sequence
  Description of Artificial Sequence: Synthetic oligonucleotide
  Sense strand starting at position 1012 of SEQ ID NO: 914086
uuacuuccagucuggaauu

SEQ ID NO: 976999 - RNA, 19 nt, Artificial Sequence
  Description of Artificial Sequence: Synthetic oligonucleotide
  Antisense strand to SEQ ID NO: 976998
aauuccagacuggaaguaa

SEQ ID NO: 977000 - RNA, 19 nt, Artificial Sequence
  Description of Artificial Sequence: Synthetic oligonucleotide
  Sense strand starting at position 26 of SEQ ID NO: 914086
cggcauuauuaacucacaa

SEQ ID NO: 977001 - RNA, 19 nt, Artificial Sequence
  Description of Artificial Sequence: Synthetic oligonucleotide
  Antisense strand to SEQ ID NO: 977000
uugugaguuaauaaugccg

SEQ ID NO: 977002 - RNA, 19 nt, Artificial Sequence
  Description of Artificial Sequence: Synthetic oligonucleotide
  Sense strand starting at position 2900 of SEQ ID NO: 914086
ucgaaaugggcgggaugau

SEQ ID NO: 977003 - RNA, 19 nt, Artificial Sequence
  Description of Artificial Sequence: Synthetic oligonucleotide
  Antisense strand to SEQ ID NO: 977002
aucaucccgcccauuucga

SEQ ID NO: 977004 - RNA, 19 nt, Artificial Sequence
  Description of Artificial Sequence: Synthetic oligonucleotide
  Sense strand starting at position 1378 of SEQ ID NO: 914086
gaaauagguccugguuccu

SEQ ID NO: 977005 - RNA, 19 nt, Artificial Sequence
  Description of Artificial Sequence: Synthetic oligonucleotide
  Antisense strand to SEQ ID NO: 977004
aggaaccaggaccuauuuc

SEQ ID NO: 977006 - RNA, 19 nt, Artificial Sequence
  Description of Artificial Sequence: Synthetic oligonucleotide
  Sense strand starting at position 2185 of SEQ ID NO: 914086
cacugauuggccgacaugu

SEQ ID NO: 977007 - RNA, 19 nt, Artificial Sequence
  Description of Artificial Sequence: Synthetic oligonucleotide
  Antisense strand to SEQ ID NO: 977006
acaugucggccaaucagug

SEQ ID NO: 977008 - RNA, 19 nt, Artificial Sequence
  Description of Artificial Sequence: Synthetic oligonucleotide
  Sense strand starting at position 1318 of SEQ ID NO: 914086
cagggcuuuggcugacaga

SEQ ID NO: 977009 - RNA, 19 nt, Artificial Sequence
  Description of Artificial Sequence: Synthetic oligonucleotide
  Antisense strand to SEQ ID NO: 977008
ucugucagccaaagcccug

SEQ ID NO: 977010 - RNA, 19 nt, Artificial Sequence
  Description of Artificial Sequence: Synthetic oligonucleotide
  Sense strand starting at position 2550 of SEQ ID NO: 914086
agccguguucccgcgggau

SEQ ID NO: 977011 - RNA, 19 nt, Artificial Sequence
  Description of Artificial Sequence: Synthetic oligonucleotide
  Antisense strand to SEQ ID NO: 977010
aucccgcgggaacacggcu

SEQ ID NO: 977012 - RNA, 19 nt, Artificial Sequence
  Description of Artificial Sequence: Synthetic oligonucleotide
  Sense strand starting at position 3547 of SEQ ID NO: 914086
guccauuaaccugguuaac

SEQ ID NO: 977013 - RNA, 19 nt, Artificial Sequence
  Description of Artificial Sequence: Synthetic oligonucleotide
  Antisense strand to SEQ ID NO: 977012
guuaaccagguuaauggac

SEQ ID NO: 977014 - RNA, 19 nt, Artificial Sequence
  Description of Artificial Sequence: Synthetic oligonucleotide
  Sense strand starting at position 68 of SEQ ID NO: 914086
auauaaugugugcaucuuu

SEQ ID NO: 977015 - RNA, 19 nt, Artificial Sequence
  Description of Artificial Sequence: Synthetic oligonucleotide
  Antisense strand to SEQ ID NO: 977014
aaagaugcacacauuauau

SEQ ID NO: 977016 - RNA, 19 nt, Artificial Sequence
  Description of Artificial Sequence: Synthetic oligonucleotide
  Sense strand starting at position 471 of SEQ ID NO: 914086
ccaggucacuguuugacua

SEQ ID NO: 977017 - RNA, 19 nt, Artificial Sequence
  Description of Artificial Sequence: Synthetic oligonucleotide
  Antisense strand to SEQ ID NO: 977016
uagucaaacagugaccugg

SEQ ID NO: 977018 - RNA, 19 nt, Artificial Sequence
  Description of Artificial Sequence: Synthetic oligonucleotide
  Sense strand starting at position 472 of SEQ ID NO: 914086
caggucacuguuugacuau

SEQ ID NO: 977019 - RNA, 19 nt, Artificial Sequence
  Description of Artificial Sequence: Synthetic oligonucleotide
  Antisense strand to SEQ ID NO: 977018
auagucaaacagugaccug

SEQ ID NO: 977020 - RNA, 19 nt, Artificial Sequence
  Description of Artificial Sequence: Synthetic oligonucleotide
  Sense strand starting at position 2175 of SEQ ID NO: 914086
guuuauuggucacugauug

SEQ ID NO: 977021 - RNA, 19 nt, Artificial Sequence
  Description of Artificial Sequence: Synthetic oligonucleotide
  Antisense strand to SEQ ID NO: 977020
caaucagugaccaauaaac

SEQ ID NO: 977022 - RNA, 19 nt, Artificial Sequence
  Description of Artificial Sequence: Synthetic oligonucleotide
  Sense strand starting at position 1081 of SEQ ID NO: 914086
acauguaaguccuuuaucu

SEQ ID NO: 977023 - RNA, 19 nt, Artificial Sequence
  Description of Artificial Sequence: Synthetic oligonucleotide
  Antisense strand to SEQ ID NO: 977022
agauaaaggacuuacaugu

SEQ ID NO: 977024 - RNA, 19 nt, Artificial Sequence
  Description of Artificial Sequence: Synthetic oligonucleotide
  Sense strand starting at position 1259 of SEQ ID NO: 914086
uuaccugagcuucgggaua

SEQ ID NO: 977025 - RNA, 19 nt, Artificial Sequence
  Description of Artificial Sequence: Synthetic oligonucleotide
  Antisense strand to SEQ ID NO: 977024
uaucccgaagcucagguaa

SEQ ID NO: 977026 - RNA, 19 nt, Artificial Sequence
  Description of Artificial Sequence: Synthetic oligonucleotide
  Sense strand starting at position 505 of SEQ ID NO: 914086
aaaggaggcaucggucuuu

SEQ ID NO: 977027 - RNA, 19 nt, Artificial Sequence
  Description of Artificial Sequence: Synthetic oligonucleotide
  Antisense strand to SEQ ID NO: 977026
aaagaccgaugccuccuuu

SEQ ID NO: 977028 - RNA, 19 nt, Artificial Sequence
  Description of Artificial Sequence: Synthetic oligonucleotide
  Sense strand starting at position 2172 of SEQ ID NO: 914086
cuuguuuauuggucacuga

SEQ ID NO: 977029 - RNA, 19 nt, Artificial Sequence
  Description of Artificial Sequence: Synthetic oligonucleotide
  Antisense strand to SEQ ID NO: 977028
ucagugaccaauaaacaag

SEQ ID NO: 977030 - RNA, 19 nt, Artificial Sequence
  Description of Artificial Sequence: Synthetic oligonucleotide
  Sense strand starting at position 888 of SEQ ID NO: 914086
ugaugugcucccugaacau

SEQ ID NO: 977031 - RNA, 19 nt, Artificial Sequence
  Description of Artificial Sequence: Synthetic oligonucleotide
  Antisense strand to SEQ ID NO: 977030
auguucagggagcacauca

SEQ ID NO: 977032 - RNA, 19 nt, Artificial Sequence
  Description of Artificial Sequence: Synthetic oligonucleotide
  Sense strand starting at position 399 of SEQ ID NO: 914086
aguugauucucuccuccuu

SEQ ID NO: 977033 - RNA, 19 nt, Artificial Sequence
  Description of Artificial Sequence: Synthetic oligonucleotide
  Antisense strand to SEQ ID NO: 977032
aaggaggagagaaucaacu

SEQ ID NO: 977034 - RNA, 19 nt, Artificial Sequence
  Description of Artificial Sequence: Synthetic oligonucleotide
  Sense strand starting at position 743 of SEQ ID NO: 914086
ucuuguugaucucuuucca

SEQ ID NO: 977035 - RNA, 19 nt, Artificial Sequence
  Description of Artificial Sequence: Synthetic oligonucleotide
  Antisense strand to SEQ ID NO: 977034
uggaaagagaucaacaaga

SEQ ID NO: 977036 - RNA, 19 nt, Artificial Sequence
  Description of Artificial Sequence: Synthetic oligonucleotide
  Sense strand starting at position 2161 of SEQ ID NO: 914086
cuuagaagcuucuuguuua

SEQ ID NO: 977037 - RNA, 19 nt, Artificial Sequence
  Description of Artificial Sequence: Synthetic oligonucleotide
  Antisense strand to SEQ ID NO: 977036
uaaacaagaagcuucuaag

SEQ ID NO: 977038 - RNA, 19 nt, Artificial Sequence
  Description of Artificial Sequence: Synthetic oligonucleotide
  Sense strand starting at position 2183 of SEQ ID NO: 914086
gucacugauuggccgacau

SEQ ID NO: 977039 - RNA, 19 nt, Artificial Sequence
  Description of Artificial Sequence: Synthetic oligonucleotide
  Antisense strand to SEQ ID NO: 977038
augucggccaaucagugac

SEQ ID NO: 977040 - RNA, 19 nt, Artificial Sequence
  Description of Artificial Sequence: Synthetic oligonucleotide
  Sense strand starting at position 697 of SEQ ID NO: 914086
cuugguugugaaugcaauu

SEQ ID NO: 977041 - RNA, 19 nt, Artificial Sequence
  Description of Artificial Sequence: Synthetic oligonucleotide
  Antisense strand to SEQ ID NO: 977040
aauugcauucacaaccaag

SEQ ID NO: 977042 - RNA, 19 nt, Artificial Sequence
  Description of Artificial Sequence: Synthetic oligonucleotide
  Sense strand starting at position 3295 of SEQ ID NO: 914086
uuccuuggauaggaaagau

SEQ ID NO: 977043 - RNA, 19 nt, Artificial Sequence
  Description of Artificial Sequence: Synthetic oligonucleotide
  Antisense strand to SEQ ID NO: 977042
aucuuuccuauccaaggaa

SEQ ID NO: 977044 - RNA, 19 nt, Artificial Sequence
  Description of Artificial Sequence: Synthetic oligonucleotide
  Sense strand starting at position 1431 of SEQ ID NO: 914086
aauggagugucgguucgaa

SEQ ID NO: 977045 - RNA, 19 nt, Artificial Sequence
  Description of Artificial Sequence: Synthetic oligonucleotide
  Antisense strand to SEQ ID NO: 977044
uucgaaccgacacuccauu

SEQ ID NO: 977046 - RNA, 19 nt, Artificial Sequence
  Description of Artificial Sequence: Synthetic oligonucleotide
  Sense strand starting at position 3426 of SEQ ID NO: 914087
uuacaagcugagggauaau

SEQ ID NO: 977047 - RNA, 19 nt, Artificial Sequence
  Description of Artificial Sequence: Synthetic oligonucleotide
  Antisense strand to SEQ ID NO: 977046
auuaucccucagcuuguaa

SEQ ID NO: 977048 - RNA, 19 nt, Artificial Sequence
  Description of Artificial Sequence: Synthetic oligonucleotide
  Sense strand starting at position 8 of SEQ ID NO: 914087
ggaauuaggcagggcagaa

SEQ ID NO: 977049 - RNA, 19 nt, Artificial Sequence
  Description of Artificial Sequence: Synthetic oligonucleotide
  Antisense strand to SEQ ID NO: 977048
uucugcccugccuaauucc

SEQ ID NO: 977050 - RNA, 19 nt, Artificial Sequence
  Description of Artificial Sequence: Synthetic oligonucleotide
  Sense strand starting at position 3893 of SEQ ID NO: 914087
gggacaaagccguaggauu

SEQ ID NO: 977051 - RNA, 19 nt, Artificial Sequence
  Description of Artificial Sequence: Synthetic oligonucleotide
  Antisense strand to SEQ ID NO: 977050
aauccuacggcuuuguccc

SEQ ID NO: 977052 - RNA, 19 nt, Artificial Sequence
  Description of Artificial Sequence: Synthetic oligonucleotide
  Sense strand starting at position 3904 of SEQ ID NO: 914087
guaggauucagugagggca

SEQ ID NO: 977053 - RNA, 19 nt, Artificial Sequence
  Description of Artificial Sequence: Synthetic oligonucleotide
  Antisense strand to SEQ ID NO: 977052
ugcccucacugaauccuac

SEQ ID NO: 977054 - RNA, 19 nt, Artificial Sequence
  Description of Artificial Sequence: Synthetic oligonucleotide
  Sense strand starting at position 1576 of SEQ ID NO: 914087
cggcuuugcgguguaaaca

SEQ ID NO: 977055 - RNA, 19 nt, Artificial Sequence
  Description of Artificial Sequence: Synthetic oligonucleotide
  Antisense strand to SEQ ID NO: 977054
uguuuacaccgcaaagccg

SEQ ID NO: 977056 - RNA, 19 nt, Artificial Sequence
  Description of Artificial Sequence: Synthetic oligonucleotide
  Sense strand starting at position 1574 of SEQ ID NO: 914087
accggcuuugcgguguaaa

SEQ ID NO: 977057 - RNA, 19 nt, Artificial Sequence
  Description of Artificial Sequence: Synthetic oligonucleotide
  Antisense strand to SEQ ID NO: 977056
uuuacaccgcaaagccggu

SEQ ID NO: 977058 - RNA, 19 nt, Artificial Sequence
  Description of Artificial Sequence: Synthetic oligonucleotide
  Sense strand starting at position 76 of SEQ ID NO: 914087
ugcuaugucccacaaauag

SEQ ID NO: 977059 - RNA, 19 nt, Artificial Sequence
  Description of Artificial Sequence: Synthetic oligonucleotide
  Antisense strand to SEQ ID NO: 977058
cuauuugugggacauagca

SEQ ID NO: 977060 - RNA, 19 nt, Artificial Sequence
  Description of Artificial Sequence: Synthetic oligonucleotide
  Sense strand starting at position 2956 of SEQ ID NO: 914087
ccugaagaucugugaccau

SEQ ID NO: 977061 - RNA, 19 nt, Artificial Sequence
  Description of Artificial Sequence: Synthetic oligonucleotide
  Antisense strand to SEQ ID NO: 977060
auggucacagaucuucagg

SEQ ID NO: 977062 - RNA, 19 nt, Artificial Sequence
  Description of Artificial Sequence: Synthetic oligonucleotide
  Sense strand starting at position 141 of SEQ ID NO: 914087
aaggucugugccuaacaga

SEQ ID NO: 977063 - RNA, 19 nt, Artificial Sequence
  Description of Artificial Sequence: Synthetic oligonucleotide
  Antisense strand to SEQ ID NO: 977062
ucuguuaggcacagaccuu

SEQ ID NO: 977064 - RNA, 19 nt, Artificial Sequence
  Description of Artificial Sequence: Synthetic oligonucleotide
  Sense strand starting at position 3702 of SEQ ID NO: 914087
cccaguacccagugaaaug

SEQ ID NO: 977065 - RNA, 19 nt, Artificial Sequence
  Description of Artificial Sequence: Synthetic oligonucleotide
  Antisense strand to SEQ ID NO: 977064
cauuucacuggguacuggg

SEQ ID NO: 977066 - RNA, 19 nt, Artificial Sequence
  Description of Artificial Sequence: Synthetic oligonucleotide
  Sense strand starting at position 3798 of SEQ ID NO: 914087
cagugauggaguggcagaa

SEQ ID NO: 977067 - RNA, 19 nt, Artificial Sequence
  Description of Artificial Sequence: Synthetic oligonucleotide
  Antisense strand to SEQ ID NO: 977066
uucugccacuccaucacug

SEQ ID NO: 977068 - RNA, 19 nt, Artificial Sequence
  Description of Artificial Sequence: Synthetic oligonucleotide
  Sense strand starting at position 2963 of SEQ ID NO: 914087
aucugugaccauggauagu

SEQ ID NO: 977069 - RNA, 19 nt, Artificial Sequence
  Description of Artificial Sequence: Synthetic oligonucleotide
  Antisense strand to SEQ ID NO: 977068
acuauccauggucacagau

SEQ ID NO: 977070 - RNA, 19 nt, Artificial Sequence
  Description of Artificial Sequence: Synthetic oligonucleotide
  Sense strand starting at position 1097 of SEQ ID NO: 914087
ccuagcgucuauuugucaa

SEQ ID NO: 977071 - RNA, 19 nt, Artificial Sequence
  Description of Artificial Sequence: Synthetic oligonucleotide
  Antisense strand to SEQ ID NO: 977070
uugacaaauagacgcuagg

SEQ ID NO: 977072 - RNA, 19 nt, Artificial Sequence
  Description of Artificial Sequence: Synthetic oligonucleotide
  Sense strand starting at position 115 of SEQ ID NO: 914087
acuuaaguccagugaucac

SEQ ID NO: 977073 - RNA, 19 nt, Artificial Sequence
  Description of Artificial Sequence: Synthetic oligonucleotide
  Antisense strand to SEQ ID NO: 977072
gugaucacuggacuuaagu

SEQ ID NO: 977074 - RNA, 19 nt, Artificial Sequence
  Description of Artificial Sequence: Synthetic oligonucleotide
  Sense strand starting at position 2955 of SEQ ID NO: 914087
gccugaagaucugugacca

SEQ ID NO: 977075 - RNA, 19 nt, Artificial Sequence
  Description of Artificial Sequence: Synthetic oligonucleotide
  Antisense strand to SEQ ID NO: 977074
uggucacagaucuucaggc

SEQ ID NO: 977076 - RNA, 19 nt, Artificial Sequence
  Description of Artificial Sequence: Synthetic oligonucleotide
  Sense strand starting at position 3578 of SEQ ID NO: 914087
ugugauaguguauauguua

SEQ ID NO: 977077 - RNA, 19 nt, Artificial Sequence
  Description of Artificial Sequence: Synthetic oligonucleotide
  Antisense strand to SEQ ID NO: 977076
uaacauauacacuaucaca

SEQ ID NO: 977078 - RNA, 19 nt, Artificial Sequence
  Description of Artificial Sequence: Synthetic oligonucleotide
  Sense strand starting at position 3669 of SEQ ID NO: 914087
ugaacagucucccauuuga

SEQ ID NO: 977079 - RNA, 19 nt, Artificial Sequence
  Description of Artificial Sequence: Synthetic oligonucleotide
  Antisense strand to SEQ ID NO: 977078
ucaaaugggagacuguuca

SEQ ID NO: 977080 - RNA, 19 nt, Artificial Sequence
  Description of Artificial Sequence: Synthetic oligonucleotide
  Sense strand starting at position 148 of SEQ ID NO: 914087
gugccuaacagaggucaca

SEQ ID NO: 977081 - RNA, 19 nt, Artificial Sequence
  Description of Artificial Sequence: Synthetic oligonucleotide
  Antisense strand to SEQ ID NO: 977080
ugugaccucuguuaggcac

SEQ ID NO: 977082 - RNA, 19 nt, Artificial Sequence
  Description of Artificial Sequence: Synthetic oligonucleotide
  Sense strand starting at position 2976 of SEQ ID NO: 914087
gauaguaaauucuugcagu

SEQ ID NO: 977083 - RNA, 19 nt, Artificial Sequence
  Description of Artificial Sequence: Synthetic oligonucleotide
  Antisense strand to SEQ ID NO: 977082
acugcaagaauuuacuauc

SEQ ID NO: 977084 - RNA, 19 nt, Artificial Sequence
  Description of Artificial Sequence: Synthetic oligonucleotide
  Sense strand starting at position 829 of SEQ ID NO: 914087
ccagauccaugagaaacaa

SEQ ID NO: 977085 - RNA, 19 nt, Artificial Sequence
  Description of Artificial Sequence: Synthetic oligonucleotide
  Antisense strand to SEQ ID NO: 977084
uuguuucucauggaucugg

SEQ ID NO: 977086 - RNA, 19 nt, Artificial Sequence
  Description of Artificial Sequence: Synthetic oligonucleotide
  Sense strand starting at position 3591 of SEQ ID NO: 914087
auguuaguuuagucaucag

SEQ ID NO: 977087 - RNA, 19 nt, Artificial Sequence
  Description of Artificial Sequence: Synthetic oligonucleotide
  Antisense strand to SEQ ID NO: 977086
cugaugacuaaacuaacau

SEQ ID NO: 977088 - RNA, 19 nt, Artificial Sequence
  Description of Artificial Sequence: Synthetic oligonucleotide
  Sense strand starting at position 1189 of SEQ ID NO: 914087
agcaaagucuuauuagucu

SEQ ID NO: 977089 - RNA, 19 nt, Artificial Sequence
  Description of Artificial Sequence: Synthetic oligonucleotide
  Antisense strand to SEQ ID NO: 977088
agacuaauaagacuuugcu

SEQ ID NO: 977090 - RNA, 19 nt, Artificial Sequence
  Description of Artificial Sequence: Synthetic oligonucleotide
  Sense strand starting at position 904 of SEQ ID NO: 914087
guaacaagcucacuuguua

SEQ ID NO: 977091 - RNA, 19 nt, Artificial Sequence
  Description of Artificial Sequence: Synthetic oligonucleotide
  Antisense strand to SEQ ID NO: 977090
uaacaagugagcuuguuac

SEQ ID NO: 977092 - RNA, 19 nt, Artificial Sequence
  Description of Artificial Sequence: Synthetic oligonucleotide
  Sense strand starting at position 2522 of SEQ ID NO: 914087
agccauagcguguaacaca

SEQ ID NO: 977093 - RNA, 19 nt, Artificial Sequence
  Description of Artificial Sequence: Synthetic oligonucleotide
  Antisense strand to SEQ ID NO: 977092
uguguuacacgcuauggcu

SEQ ID NO: 977094 - RNA, 19 nt, Artificial Sequence
  Description of Artificial Sequence: Synthetic oligonucleotide
  Sense strand starting at position 458 of SEQ ID NO: 914087
ugucaauguuugcugaaug

SEQ ID NO: 977095 - RNA, 19 nt, Artificial Sequence
  Description of Artificial Sequence: Synthetic oligonucleotide
  Antisense strand to SEQ ID NO: 977094
cauucagcaaacauugaca

SEQ ID NO: 977096 - RNA, 19 nt, Artificial Sequence
  Description of Artificial Sequence: Synthetic oligonucleotide
  Sense strand starting at position 993 of SEQ ID NO: 914087
gcaagugguucuuuccaga

SEQ ID NO: 977097 - RNA, 19 nt, Artificial Sequence
  Description of Artificial Sequence: Synthetic oligonucleotide
  Antisense strand to SEQ ID NO: 977096
ucuggaaagaaccacuugc

SEQ ID NO: 977098 - RNA, 19 nt, Artificial Sequence
  Description of Artificial Sequence: Synthetic oligonucleotide
  Sense strand starting at position 3581 of SEQ ID NO: 914087
gauaguguauauguuaguu

SEQ ID NO: 977099 - RNA, 19 nt, Artificial Sequence
  Description of Artificial Sequence: Synthetic oligonucleotide
  Antisense strand to SEQ ID NO: 977098
aacuaacauauacacuauc

SEQ ID NO: 977100 - RNA, 19 nt, Artificial Sequence
  Description of Artificial Sequence: Synthetic oligonucleotide
  Sense strand starting at position 3920 of SEQ ID NO: 914087
gcagcagaucagggcuauu

SEQ ID NO: 977101 - RNA, 19 nt, Artificial Sequence
  Description of Artificial Sequence: Synthetic oligonucleotide
  Antisense strand to SEQ ID NO: 977100
aauagcccugaucugcugc

SEQ ID NO: 977102 - RNA, 19 nt, Artificial Sequence
  Description of Artificial Sequence: Synthetic oligonucleotide
  Sense strand starting at position 3961 of SEQ ID NO: 914087
gacccaugucugugaagcu

SEQ ID NO: 977103 - RNA, 19 nt, Artificial Sequence
  Description of Artificial Sequence: Synthetic oligonucleotide
  Antisense strand to SEQ ID NO: 977102
agcuucacagacauggguc

SEQ ID NO: 977104 - RNA, 19 nt, Artificial Sequence
  Description of Artificial Sequence: Synthetic oligonucleotide
  Sense strand starting at position 457 of SEQ ID NO: 914087
uugucaauguuugcugaau

SEQ ID NO: 977105 - RNA, 19 nt, Artificial Sequence
  Description of Artificial Sequence: Synthetic oligonucleotide
  Antisense strand to SEQ ID NO: 977104
auucagcaaacauugacaa

SEQ ID NO: 977106 - RNA, 19 nt, Artificial Sequence
  Description of Artificial Sequence: Synthetic oligonucleotide
  Sense strand starting at position 456 of SEQ ID NO: 914087
cuugucaauguuugcugaa

SEQ ID NO: 977107 - RNA, 19 nt, Artificial Sequence
  Description of Artificial Sequence: Synthetic oligonucleotide
  Antisense strand to SEQ ID NO: 977106
uucagcaaacauugacaag

SEQ ID NO: 977108 - RNA, 19 nt, Artificial Sequence
  Description of Artificial Sequence: Synthetic oligonucleotide
  Sense strand starting at position 2547 of SEQ ID NO: 914087
ccgcguguucuuuaagaaa

SEQ ID NO: 977109 - RNA, 19 nt, Artificial Sequence
  Description of Artificial Sequence: Synthetic oligonucleotide
  Antisense strand to SEQ ID NO: 977108
uuucuuaaagaacacgcgg

SEQ ID NO: 977110 - RNA, 19 nt, Artificial Sequence
  Description of Artificial Sequence: Synthetic oligonucleotide
  Sense strand starting at position 264 of SEQ ID NO: 914087
ucacauaacuaguagauga

SEQ ID NO: 977111 - RNA, 19 nt, Artificial Sequence
  Description of Artificial Sequence: Synthetic oligonucleotide
  Antisense strand to SEQ ID NO: 977110
ucaucuacuaguuauguga

SEQ ID NO: 977112 - RNA, 19 nt, Artificial Sequence
  Description of Artificial Sequence: Synthetic oligonucleotide
  Sense strand starting at position 3369 of SEQ ID NO: 914087
acccuaaauugucagaaag

SEQ ID NO: 977113 - RNA, 19 nt, Artificial Sequence
  Description of Artificial Sequence: Synthetic oligonucleotide
  Antisense strand to SEQ ID NO: 977112
cuuucugacaauuuagggu

SEQ ID NO: 977114 - RNA, 19 nt, Artificial Sequence
  Description of Artificial Sequence: Synthetic oligonucleotide
  Sense strand starting at position 3586 of SEQ ID NO: 914087
uguauauguuaguuuaguc

SEQ ID NO: 977115 - RNA, 19 nt, Artificial Sequence
  Description of Artificial Sequence: Synthetic oligonucleotide
  Antisense strand to SEQ ID NO: 977114
gacuaaacuaacauauaca

SEQ ID NO: 977116 - RNA, 19 nt, Artificial Sequence
  Description of Artificial Sequence: Synthetic oligonucleotide
  Sense strand starting at position 3982 of SEQ ID NO: 914087
ggugcuuugucacuugauu

SEQ ID NO: 977117 - RNA, 19 nt, Artificial Sequence
  Description of Artificial Sequence: Synthetic oligonucleotide
  Antisense strand to SEQ ID NO: 977116
aaucaagugacaaagcacc

SEQ ID NO: 977118 - RNA, 19 nt, Artificial Sequence
  Description of Artificial Sequence: Synthetic oligonucleotide
  Sense strand starting at position 3047 of SEQ ID NO: 914087
uggacagguucucagaaca

SEQ ID NO: 977119 - RNA, 19 nt, Artificial Sequence
  Description of Artificial Sequence: Synthetic oligonucleotide
  Antisense strand to SEQ ID NO: 977118
uguucugagaaccugucca

SEQ ID NO: 977120 - RNA, 19 nt, Artificial Sequence
  Description of Artificial Sequence: Synthetic oligonucleotide
  Sense strand starting at position 1121 of SEQ ID NO: 914087
gacugagcuucugaagaag

SEQ ID NO: 977121 - RNA, 19 nt, Artificial Sequence
  Description of Artificial Sequence: Synthetic oligonucleotide
  Antisense strand to SEQ ID NO: 977120
cuucuucagaagcucaguc

SEQ ID NO: 977122 - RNA, 19 nt, Artificial Sequence
  Description of Artificial Sequence: Synthetic oligonucleotide
  Sense strand starting at position 137 of SEQ ID NO: 914087
ugccaaggucugugccuaa

SEQ ID NO: 977123 - RNA, 19 nt, Artificial Sequence
  Description of Artificial Sequence: Synthetic oligonucleotide
  Antisense strand to SEQ ID NO: 977122
uuaggcacagaccuuggca

SEQ ID NO: 977124 - RNA, 19 nt, Artificial Sequence
  Description of Artificial Sequence: Synthetic oligonucleotide
  Sense strand starting at position 3585 of SEQ ID NO: 914087
guguauauguuaguuuagu

SEQ ID NO: 977125 - RNA, 19 nt, Artificial Sequence
  Description of Artificial Sequence: Synthetic oligonucleotide
  Antisense strand to SEQ ID NO: 977124
acuaaacuaacauauacac

SEQ ID NO: 977126 - RNA, 19 nt, Artificial Sequence
  Description of Artificial Sequence: Synthetic oligonucleotide
  Sense strand starting at position 3278 of SEQ ID NO: 914088
gacaaauggucaccugaau

SEQ ID NO: 977127 - RNA, 19 nt, Artificial Sequence
  Description of Artificial Sequence: Synthetic oligonucleotide
  Antisense strand to SEQ ID NO: 977126
auucaggugaccauuuguc

SEQ ID NO: 977128 - RNA, 19 nt, Artificial Sequence
  Description of Artificial Sequence: Synthetic oligonucleotide
  Sense strand starting at position 3101 of SEQ ID NO: 914088
agcauaauaucaccuggaa

SEQ ID NO: 977129 - RNA, 19 nt, Artificial Sequence
  Description of Artificial Sequence: Synthetic oligonucleotide
  Antisense strand to SEQ ID NO: 977128
uuccaggugauauuaugcu

SEQ ID NO: 977130 - RNA, 19 nt, Artificial Sequence
  Description of Artificial Sequence: Synthetic oligonucleotide
  Sense strand starting at position 213 of SEQ ID NO: 914088
auguaagacauauggguaa

SEQ ID NO: 977131 - RNA, 19 nt, Artificial Sequence
  Description of Artificial Sequence: Synthetic oligonucleotide
  Antisense strand to SEQ ID NO: 977130
uuacccauaugucuuacau

SEQ ID NO: 977132 - RNA, 19 nt, Artificial Sequence
  Description of Artificial Sequence: Synthetic oligonucleotide
  Sense strand starting at position 215 of SEQ ID NO: 914088
guaagacauauggguaaca

SEQ ID NO: 977133 - RNA, 19 nt, Artificial Sequence
  Description of Artificial Sequence: Synthetic oligonucleotide
  Antisense strand to SEQ ID NO: 977132
uguuacccauaugucuuac

SEQ ID NO: 977134 - RNA, 19 nt, Artificial Sequence
  Description of Artificial Sequence: Synthetic oligonucleotide
  Sense strand starting at position 2793 of SEQ ID NO: 914088
gcuuuauauguggaagaac

SEQ ID NO: 977135 - RNA, 19 nt, Artificial Sequence
  Description of Artificial Sequence: Synthetic oligonucleotide
  Antisense strand to SEQ ID NO: 977134
guucuuccacauauaaagc

SEQ ID NO: 977136 - RNA, 19 nt, Artificial Sequence
  Description of Artificial Sequence: Synthetic oligonucleotide
  Sense strand starting at position 510 of SEQ ID NO: 914088
agaguuugcauggacugau

SEQ ID NO: 977137 - RNA, 19 nt, Artificial Sequence
  Description of Artificial Sequence: Synthetic oligonucleotide
  Antisense strand to SEQ ID NO: 977136
aucaguccaugcaaacucu

SEQ ID NO: 977138 - RNA, 19 nt, Artificial Sequence
  Description of Artificial Sequence: Synthetic oligonucleotide
  Sense strand starting at position 382 of SEQ ID NO: 914088
gguagaaacuuucuuugaa

SEQ ID NO: 977139 - RNA, 19 nt, Artificial Sequence
  Description of Artificial Sequence: Synthetic oligonucleotide
  Antisense strand to SEQ ID NO: 977138
uucaaagaaaguuucuacc

SEQ ID NO: 977140 - RNA, 19 nt, Artificial Sequence
  Description of Artificial Sequence: Synthetic oligonucleotide
  Sense strand starting at position 383 of SEQ ID NO: 914088
guagaaacuuucuuugaag

SEQ ID NO: 977141 - RNA, 19 nt, Artificial Sequence
  Description of Artificial Sequence: Synthetic oligonucleotide
  Antisense strand to SEQ ID NO: 977140
cuucaaagaaaguuucuac

SEQ ID NO: 977142 - RNA, 19 nt, Artificial Sequence
  Description of Artificial Sequence: Synthetic oligonucleotide
  Sense strand starting at position 2527 of SEQ ID NO: 914088
aagaaagaauuagugugua

SEQ ID NO: 977143 - RNA, 19 nt, Artificial Sequence
  Description of Artificial Sequence: Synthetic oligonucleotide
  Antisense strand to SEQ ID NO: 977142
uacacacuaauucuuucuu

SEQ ID NO: 977144 - RNA, 19 nt, Artificial Sequence
  Description of Artificial Sequence: Synthetic oligonucleotide
  Sense strand starting at position 2653 of SEQ ID NO: 914088
auggaaauauccuaauuug

SEQ ID NO: 977145 - RNA, 19 nt, Artificial Sequence
  Description of Artificial Sequence: Synthetic oligonucleotide
  Antisense strand to SEQ ID NO: 977144
caaauuaggauauuuccau

SEQ ID NO: 977146 - RNA, 19 nt, Artificial Sequence
  Description of Artificial Sequence: Synthetic oligonucleotide
  Sense strand starting at position 3611 of SEQ ID NO: 914088
cucaaauaucugggaaguc

SEQ ID NO: 977147 - RNA, 19 nt, Artificial Sequence
  Description of Artificial Sequence: Synthetic oligonucleotide
  Antisense strand to SEQ ID NO: 977146
gacuucccagauauuugag

SEQ ID NO: 977148 - RNA, 19 nt, Artificial Sequence
  Description of Artificial Sequence: Synthetic oligonucleotide
  Sense strand starting at position 2909 of SEQ ID NO: 914088
cauagugauccacagcuga

SEQ ID NO: 977149 - RNA, 19 nt, Artificial Sequence
  Description of Artificial Sequence: Synthetic oligonucleotide
  Antisense strand to SEQ ID NO: 977148
ucagcuguggaucacuaug

SEQ ID NO: 977150 - RNA, 19 nt, Artificial Sequence
  Description of Artificial Sequence: Synthetic oligonucleotide
  Sense strand starting at position 374 of SEQ ID NO: 914088
gucuuacugguagaaacuu

SEQ ID NO: 977151 - RNA, 19 nt, Artificial Sequence
  Description of Artificial Sequence: Synthetic oligonucleotide
  Antisense strand to SEQ ID NO: 977150
aaguuucuaccaguaagac

SEQ ID NO: 977152 - RNA, 19 nt, Artificial Sequence
  Description of Artificial Sequence: Synthetic oligonucleotide
  Sense strand starting at position 3834 of SEQ ID NO: 914088
uggguacuacaccaguuau

SEQ ID NO: 977153 - RNA, 19 nt, Artificial Sequence
  Description of Artificial Sequence: Synthetic oligonucleotide
  Antisense strand to SEQ ID NO: 977152
auaacugguguaguaccca

SEQ ID NO: 977154 - RNA, 19 nt, Artificial Sequence
  Description of Artificial Sequence: Synthetic oligonucleotide
  Sense strand starting at position 2668 of SEQ ID NO: 914088
uuuggccagauguaagauu

SEQ ID NO: 977155 - RNA, 19 nt, Artificial Sequence
  Description of Artificial Sequence: Synthetic oligonucleotide
  Antisense strand to SEQ ID NO: 977154
aaucuuacaucuggccaaa

SEQ ID NO: 977156 - RNA, 19 nt, Artificial Sequence
  Description of Artificial Sequence: Synthetic oligonucleotide
  Sense strand starting at position 3151 of SEQ ID NO: 914088
aaacuagggucagcauaua

SEQ ID NO: 977157 - RNA, 19 nt, Artificial Sequence
  Description of Artificial Sequence: Synthetic oligonucleotide
  Antisense strand to SEQ ID NO: 977156
uauaugcugacccuaguuu

SEQ ID NO: 977158 - RNA, 19 nt, Artificial Sequence
  Description of Artificial Sequence: Synthetic oligonucleotide
  Sense strand starting at position 2405 of SEQ ID NO: 914088
cuuuaaauggucuaggguu

SEQ ID NO: 977159 - RNA, 19 nt, Artificial Sequence
  Description of Artificial Sequence: Synthetic oligonucleotide
  Antisense strand to SEQ ID NO: 977158
aacccuagaccauuuaaag

SEQ ID NO: 977160 - RNA, 19 nt, Artificial Sequence
  Description of Artificial Sequence: Synthetic oligonucleotide
  Sense strand starting at position 2825 of SEQ ID NO: 914088
ggaugaacguaucuaaacu

SEQ ID NO: 977161 - RNA, 19 nt, Artificial Sequence
  Description of Artificial Sequence: Synthetic oligonucleotide
  Antisense strand to SEQ ID NO: 977160
aguuuagauacguucaucc

SEQ ID NO: 977162 - RNA, 19 nt, Artificial Sequence
  Description of Artificial Sequence: Synthetic oligonucleotide
  Sense strand starting at position 385 of SEQ ID NO: 914088
agaaacuuucuuugaaguu

SEQ ID NO: 977163 - RNA, 19 nt, Artificial Sequence
  Description of Artificial Sequence: Synthetic oligonucleotide
  Antisense strand to SEQ ID NO: 977162
aacuucaaagaaaguuucu

SEQ ID NO: 977164 - RNA, 19 nt, Artificial Sequence
  Description of Artificial Sequence: Synthetic oligonucleotide
  Sense strand starting at position 142 of SEQ ID NO: 914088
ccacacugucccugaagaa

SEQ ID NO: 977165 - RNA, 19 nt, Artificial Sequence
  Description of Artificial Sequence: Synthetic oligonucleotide
  Antisense strand to SEQ ID NO: 977164
uucuucagggacagugugg

SEQ ID NO: 977166 - RNA, 19 nt, Artificial Sequence
  Description of Artificial Sequence: Synthetic oligonucleotide
  Sense strand starting at position 658 of SEQ ID NO: 914088
ugaucacaagucugaucau

SEQ ID NO: 977167 - RNA, 19 nt, Artificial Sequence
  Description of Artificial Sequence: Synthetic oligonucleotide
  Antisense strand to SEQ ID NO: 977166
augaucagacuugugauca

SEQ ID NO: 977168 - RNA, 19 nt, Artificial Sequence
  Description of Artificial Sequence: Synthetic oligonucleotide
  Sense strand starting at position 2721 of SEQ ID NO: 914088
uauucuuuggcccaggauu

SEQ ID NO: 977169 - RNA, 19 nt, Artificial Sequence
  Description of Artificial Sequence: Synthetic oligonucleotide
  Antisense strand to SEQ ID NO: 977168
aauccugggccaaagaaua

SEQ ID NO: 977170 - RNA, 19 nt, Artificial Sequence
  Description of Artificial Sequence: Synthetic oligonucleotide
  Sense strand starting at position 3599 of SEQ ID NO: 914088
ccaggaagcuuccucaaau

SEQ ID NO: 977171 - RNA, 19 nt, Artificial Sequence
  Description of Artificial Sequence: Synthetic oligonucleotide
  Antisense strand to SEQ ID NO: 977170
auuugaggaagcuuccugg

SEQ ID NO: 977172 - RNA, 19 nt, Artificial Sequence
  Description of Artificial Sequence: Synthetic oligonucleotide
  Sense strand starting at position 918 of SEQ ID NO: 914088
cgacuucuaagaggaaugu

SEQ ID NO: 977173 - RNA, 19 nt, Artificial Sequence
  Description of Artificial Sequence: Synthetic oligonucleotide
  Antisense strand to SEQ ID NO: 977172
acauuccucuuagaagucg

SEQ ID NO: 977174 - RNA, 19 nt, Artificial Sequence
  Description of Artificial Sequence: Synthetic oligonucleotide
  Sense strand starting at position 509 of SEQ ID NO: 914088
aagaguuugcauggacuga

SEQ ID NO: 977175 - RNA, 19 nt, Artificial Sequence
  Description of Artificial Sequence: Synthetic oligonucleotide
  Antisense strand to SEQ ID NO: 977174
ucaguccaugcaaacucuu

SEQ ID NO: 977176 - RNA, 19 nt, Artificial Sequence
  Description of Artificial Sequence: Synthetic oligonucleotide
  Sense strand starting at position 3561 of SEQ ID NO: 914088
gaugguaagggugguagau

SEQ ID NO: 977177 - RNA, 19 nt, Artificial Sequence
  Description of Artificial Sequence: Synthetic oligonucleotide
  Antisense strand to SEQ ID NO: 977176
aucuaccacccuuaccauc

SEQ ID NO: 977178 - RNA, 19 nt, Artificial Sequence
  Description of Artificial Sequence: Synthetic oligonucleotide
  Sense strand starting at position 3061 of SEQ ID NO: 914088
cagaguaguuauguaaaua

SEQ ID NO: 977179 - RNA, 19 nt, Artificial Sequence
  Description of Artificial Sequence: Synthetic oligonucleotide
  Antisense strand to SEQ ID NO: 977178
uauuuacauaacuacucug

SEQ ID NO: 977180 - RNA, 19 nt, Artificial Sequence
  Description of Artificial Sequence: Synthetic oligonucleotide
  Sense strand starting at position 3026 of SEQ ID NO: 914088
uuuaauagcgaucaaguau

SEQ ID NO: 977181 - RNA, 19 nt, Artificial Sequence
  Description of Artificial Sequence: Synthetic oligonucleotide
  Antisense strand to SEQ ID NO: 977180
auacuugaucgcuauuaaa

SEQ ID NO: 977182 - RNA, 19 nt, Artificial Sequence
  Description of Artificial Sequence: Synthetic oligonucleotide
  Sense strand starting at position 194 of SEQ ID NO: 914088
cuguuaaggucauccaaga

SEQ ID NO: 977183 - RNA, 19 nt, Artificial Sequence
  Description of Artificial Sequence: Synthetic oligonucleotide
  Antisense strand to SEQ ID NO: 977182
ucuuggaugaccuuaacag

SEQ ID NO: 977184 - RNA, 19 nt, Artificial Sequence
  Description of Artificial Sequence: Synthetic oligonucleotide
  Sense strand starting at position 708 of SEQ ID NO: 914088
agaauagucuuccuagagu

SEQ ID NO: 977185 - RNA, 19 nt, Artificial Sequence
  Description of Artificial Sequence: Synthetic oligonucleotide
  Antisense strand to SEQ ID NO: 977184
acucuaggaagacuauucu

SEQ ID NO: 977186 - RNA, 19 nt, Artificial Sequence
  Description of Artificial Sequence: Synthetic oligonucleotide
  Sense strand starting at position 3848 of SEQ ID NO: 914088
guuauuaaagguggugaga

SEQ ID NO: 977187 - RNA, 19 nt, Artificial Sequence
  Description of Artificial Sequence: Synthetic oligonucleotide
  Antisense strand to SEQ ID NO: 977186
ucucaccaccuuuaauaac

SEQ ID NO: 977188 - RNA, 19 nt, Artificial Sequence
  Description of Artificial Sequence: Synthetic oligonucleotide
  Sense strand starting at position 2881 of SEQ ID NO: 914088
gaaguuugccuuuacucag

SEQ ID NO: 977189 - RNA, 19 nt, Artificial Sequence
  Description of Artificial Sequence: Synthetic oligonucleotide
  Antisense strand to SEQ ID NO: 977188
cugaguaaaggcaaacuuc

SEQ ID NO: 977190 - RNA, 19 nt, Artificial Sequence
  Description of Artificial Sequence: Synthetic oligonucleotide
  Sense strand starting at position 2611 of SEQ ID NO: 914088
agaguaggcaugcauuauu

SEQ ID NO: 977191 - RNA, 19 nt, Artificial Sequence
  Description of Artificial Sequence: Synthetic oligonucleotide
  Antisense strand to SEQ ID NO: 977190
aauaaugcaugccuacucu

SEQ ID NO: 977192 - RNA, 19 nt, Artificial Sequence
  Description of Artificial Sequence: Synthetic oligonucleotide
  Sense strand starting at position 192 of SEQ ID NO: 914088
gucuguuaaggucauccaa

SEQ ID NO: 977193 - RNA, 19 nt, Artificial Sequence
  Description of Artificial Sequence: Synthetic oligonucleotide
  Antisense strand to SEQ ID NO: 977192
uuggaugaccuuaacagac

SEQ ID NO: 977194 - RNA, 19 nt, Artificial Sequence
  Description of Artificial Sequence: Synthetic oligonucleotide
  Sense strand starting at position 2810 of SEQ ID NO: 914088
acagucucugugcaaggau

SEQ ID NO: 977195 - RNA, 19 nt, Artificial Sequence
  Description of Artificial Sequence: Synthetic oligonucleotide
  Antisense strand to SEQ ID NO: 977194
auccuugcacagagacugu

SEQ ID NO: 977196 - RNA, 19 nt, Artificial Sequence
  Description of Artificial Sequence: Synthetic oligonucleotide
  Sense strand starting at position 505 of SEQ ID NO: 914088
cuuuaagaguuugcaugga

SEQ ID NO: 977197 - RNA, 19 nt, Artificial Sequence
  Description of Artificial Sequence: Synthetic oligonucleotide
  Antisense strand to SEQ ID NO: 977196
uccaugcaaacucuuaaag

SEQ ID NO: 977198 - RNA, 19 nt, Artificial Sequence
  Description of Artificial Sequence: Synthetic oligonucleotide
  Sense strand starting at position 36 of SEQ ID NO: 914088
aggcuccacuaguuugaga

SEQ ID NO: 977199 - RNA, 19 nt, Artificial Sequence
  Description of Artificial Sequence: Synthetic oligonucleotide
  Antisense strand to SEQ ID NO: 977198
ucucaaacuaguggagccu

SEQ ID NO: 977200 - RNA, 19 nt, Artificial Sequence
  Description of Artificial Sequence: Synthetic oligonucleotide
  Sense strand starting at position 922 of SEQ ID NO: 914088
uucuaagaggaaugugcuu

SEQ ID NO: 977201 - RNA, 19 nt, Artificial Sequence
  Description of Artificial Sequence: Synthetic oligonucleotide
  Antisense strand to SEQ ID NO: 977200
aagcacauuccucuuagaa

SEQ ID NO: 977202 - RNA, 19 nt, Artificial Sequence
  Description of Artificial Sequence: Synthetic oligonucleotide
  Sense strand starting at position 2791 of SEQ ID NO: 914088
uugcuuuauauguggaaga

SEQ ID NO: 977203 - RNA, 19 nt, Artificial Sequence
  Description of Artificial Sequence: Synthetic oligonucleotide
  Antisense strand to SEQ ID NO: 977202
ucuuccacauauaaagcaa

SEQ ID NO: 977204 - RNA, 19 nt, Artificial Sequence
  Description of Artificial Sequence: Synthetic oligonucleotide
  Sense strand starting at position 2614 of SEQ ID NO: 914088
guaggcaugcauuauugau

SEQ ID NO: 977205 - RNA, 19 nt, Artificial Sequence
  Description of Artificial Sequence: Synthetic oligonucleotide
  Antisense strand to SEQ ID NO: 977204
aucaauaaugcaugccuac

SEQ ID NO: 977206 - RNA, 19 nt, Artificial Sequence
  Description of Artificial Sequence: Synthetic oligonucleotide
  Sense strand starting at position 910 of SEQ ID NO: 914089
ggugguacaaguuauagga

SEQ ID NO: 977207 - RNA, 19 nt, Artificial Sequence
  Description of Artificial Sequence: Synthetic oligonucleotide
  Antisense strand to SEQ ID NO: 977206
uccuauaacuuguaccacc

SEQ ID NO: 977208 - RNA, 19 nt, Artificial Sequence
  Description of Artificial Sequence: Synthetic oligonucleotide
  Sense strand starting at position 1532 of SEQ ID NO: 914089
ucacucaguggugacuaaa

SEQ ID NO: 977209 - RNA, 19 nt, Artificial Sequence
  Description of Artificial Sequence: Synthetic oligonucleotide
  Antisense strand to SEQ ID NO: 977208
uuuagucaccacugaguga

SEQ ID NO: 977210 - RNA, 19 nt, Artificial Sequence
  Description of Artificial Sequence: Synthetic oligonucleotide
  Sense strand starting at position 3848 of SEQ ID NO: 914089
caguaacacggauggaaau

SEQ ID NO: 977211 - RNA, 19 nt, Artificial Sequence
  Description of Artificial Sequence: Synthetic oligonucleotide
  Antisense strand to SEQ ID NO: 977210
auuuccauccguguuacug

SEQ ID NO: 977212 - RNA, 19 nt, Artificial Sequence
  Description of Artificial Sequence: Synthetic oligonucleotide
  Sense strand starting at position 135 of SEQ ID NO: 914089
gcugauuugcuguauccca

SEQ ID NO: 977213 - RNA, 19 nt, Artificial Sequence
  Description of Artificial Sequence: Synthetic oligonucleotide
  Antisense strand to SEQ ID NO: 977212
ugggauacagcaaaucagc

SEQ ID NO: 977214 - RNA, 19 nt, Artificial Sequence
  Description of Artificial Sequence: Synthetic oligonucleotide
  Sense strand starting at position 885 of SEQ ID NO: 914089
acguaaguuucuccauuua

SEQ ID NO: 977215 - RNA, 19 nt, Artificial Sequence
  Description of Artificial Sequence: Synthetic oligonucleotide
  Antisense strand to SEQ ID NO: 977214
uaaauggagaaacuuacgu

SEQ ID NO: 977216 - RNA, 19 nt, Artificial Sequence
  Description of Artificial Sequence: Synthetic oligonucleotide
  Sense strand starting at position 2270 of SEQ ID NO: 914089
aagauaggcucuuuggaac

SEQ ID NO: 977217 - RNA, 19 nt, Artificial Sequence
  Description of Artificial Sequence: Synthetic oligonucleotide
  Antisense strand to SEQ ID NO: 977216
guuccaaagagccuaucuu

SEQ ID NO: 977218 - RNA, 19 nt, Artificial Sequence
  Description of Artificial Sequence: Synthetic oligonucleotide
  Sense strand starting at position 723 of SEQ ID NO: 914089
uggcuaagcugauuugcaa

SEQ ID NO: 977219 - RNA, 19 nt, Artificial Sequence
  Description of Artificial Sequence: Synthetic oligonucleotide
  Antisense strand to SEQ ID NO: 977218
uugcaaaucagcuuagcca

SEQ ID NO: 977220 - RNA, 19 nt, Artificial Sequence
  Description of Artificial Sequence: Synthetic oligonucleotide
  Sense strand starting at position 2389 of SEQ ID NO: 914089
cagggauguagguagcaua

SEQ ID NO: 977221 - RNA, 19 nt, Artificial Sequence
  Description of Artificial Sequence: Synthetic oligonucleotide
  Antisense strand to SEQ ID NO: 977220
uaugcuaccuacaucccug

SEQ ID NO: 977222 - RNA, 19 nt, Artificial Sequence
  Description of Artificial Sequence: Synthetic oligonucleotide
  Sense strand starting at position 2379 of SEQ ID NO: 914089
aaauucuuaccagggaugu

SEQ ID NO: 977223 - RNA, 19 nt, Artificial Sequence
  Description of Artificial Sequence: Synthetic oligonucleotide
  Antisense strand to SEQ ID NO: 977222
acaucccugguaagaauuu

SEQ ID NO: 977224 - RNA, 19 nt, Artificial Sequence
  Description of Artificial Sequence: Synthetic oligonucleotide
  Sense strand starting at position 2380 of SEQ ID NO: 914089
aauucuuaccagggaugua

SEQ ID NO: 977225 - RNA, 19 nt, Artificial Sequence
  Description of Artificial Sequence: Synthetic oligonucleotide
  Antisense strand to SEQ ID NO: 977224
uacaucccugguaagaauu

SEQ ID NO: 977226 - RNA, 19 nt, Artificial Sequence
  Description of Artificial Sequence: Synthetic oligonucleotide
  Sense strand starting at position 131 of SEQ ID NO: 914089
gaaugcugauuugcuguau

SEQ ID NO: 977227 - RNA, 19 nt, Artificial Sequence
  Description of Artificial Sequence: Synthetic oligonucleotide
  Antisense strand to SEQ ID NO: 977226
auacagcaaaucagcauuc

SEQ ID NO: 977228 - RNA, 19 nt, Artificial Sequence
  Description of Artificial Sequence: Synthetic oligonucleotide
  Sense strand starting at position 1663 of SEQ ID NO: 914089
cagagaugagcugguaaau

SEQ ID NO: 977229 - RNA, 19 nt, Artificial Sequence
  Description of Artificial Sequence: Synthetic oligonucleotide
  Antisense strand to SEQ ID NO: 977228
auuuaccagcucaucucug

SEQ ID NO: 977230 - RNA, 19 nt, Artificial Sequence
  Description of Artificial Sequence: Synthetic oligonucleotide
  Sense strand starting at position 3106 of SEQ ID NO: 914089
guggcuagugccagugaga

SEQ ID NO: 977231 - RNA, 19 nt, Artificial Sequence
  Description of Artificial Sequence: Synthetic oligonucleotide
  Antisense strand to SEQ ID NO: 977230
ucucacuggcacuagccac

SEQ ID NO: 977232 - RNA, 19 nt, Artificial Sequence
  Description of Artificial Sequence: Synthetic oligonucleotide
  Sense strand starting at position 1028 of SEQ ID NO: 914089
acaucauguugaguuuaaa

SEQ ID NO: 977233 - RNA, 19 nt, Artificial Sequence
  Description of Artificial Sequence: Synthetic oligonucleotide
  Antisense strand to SEQ ID NO: 977232
uuuaaacucaacaugaugu

SEQ ID NO: 977234 - RNA, 19 nt, Artificial Sequence
  Description of Artificial Sequence: Synthetic oligonucleotide
  Sense strand starting at position 183 of SEQ ID NO: 914089
ugcucaauugcauauugga

SEQ ID NO: 977235 - RNA, 19 nt, Artificial Sequence
  Description of Artificial Sequence: Synthetic oligonucleotide
  Antisense strand to SEQ ID NO: 977234
uccaauaugcaauugagca

SEQ ID NO: 977236 - RNA, 19 nt, Artificial Sequence
  Description of Artificial Sequence: Synthetic oligonucleotide
  Sense strand starting at position 1750 of SEQ ID NO: 914089
guuguuauguuagcaauuu

SEQ ID NO: 977237 - RNA, 19 nt, Artificial Sequence
  Description of Artificial Sequence: Synthetic oligonucleotide
  Antisense strand to SEQ ID NO: 977236
aaauugcuaacauaacaac

SEQ ID NO: 977238 - RNA, 19 nt, Artificial Sequence
  Description of Artificial Sequence: Synthetic oligonucleotide
  Sense strand starting at position 2215 of SEQ ID NO: 914089
ccaguugauucuguaauaa

SEQ ID NO: 977239 - RNA, 19 nt, Artificial Sequence
  Description of Artificial Sequence: Synthetic oligonucleotide
  Antisense strand to SEQ ID NO: 977238
uuauuacagaaucaacugg

SEQ ID NO: 977240 - RNA, 19 nt, Artificial Sequence
  Description of Artificial Sequence: Synthetic oligonucleotide
  Sense strand starting at position 1678 of SEQ ID NO: 914089
aaaugacugugggcuagua

SEQ ID NO: 977241 - RNA, 19 nt, Artificial Sequence
  Description of Artificial Sequence: Synthetic oligonucleotide
  Antisense strand to SEQ ID NO: 977240
uacuagcccacagucauuu

SEQ ID NO: 977242 - RNA, 19 nt, Artificial Sequence
  Description of Artificial Sequence: Synthetic oligonucleotide
  Sense strand starting at position 711 of SEQ ID NO: 914089
ucauuaauuggguggcuaa

SEQ ID NO: 977243 - RNA, 19 nt, Artificial Sequence
  Description of Artificial Sequence: Synthetic oligonucleotide
  Antisense strand to SEQ ID NO: 977242
uuagccacccaauuaauga

SEQ ID NO: 977244 - RNA, 19 nt, Artificial Sequence
  Description of Artificial Sequence: Synthetic oligonucleotide
  Sense strand starting at position 741 of SEQ ID NO: 914089
augacaagcuguuucuaca

SEQ ID NO: 977245 - RNA, 19 nt, Artificial Sequence
  Description of Artificial Sequence: Synthetic oligonucleotide
  Antisense strand to SEQ ID NO: 977244
uguagaaacagcuugucau

SEQ ID NO: 977246 - RNA, 19 nt, Artificial Sequence
  Description of Artificial Sequence: Synthetic oligonucleotide
  Sense strand starting at position 171 of SEQ ID NO: 914089
accagaaugcauugcucaa

SEQ ID NO: 977247 - RNA, 19 nt, Artificial Sequence
  Description of Artificial Sequence: Synthetic oligonucleotide
  Antisense strand to SEQ ID NO: 977246
uugagcaaugcauucuggu

SEQ ID NO: 977248 - RNA, 19 nt, Artificial Sequence
  Description of Artificial Sequence: Synthetic oligonucleotide
  Sense strand starting at position 2021 of SEQ ID NO: 914089
gaacuuucugucugguaga

SEQ ID NO: 977249 - RNA, 19 nt, Artificial Sequence
  Description of Artificial Sequence: Synthetic oligonucleotide
  Antisense strand to SEQ ID NO: 977248
ucuaccagacagaaaguuc

SEQ ID NO: 977250 - RNA, 19 nt, Artificial Sequence
  Description of Artificial Sequence: Synthetic oligonucleotide
  Sense strand starting at position 2018 of SEQ ID NO: 914089
ggagaacuuucugucuggu

SEQ ID NO: 977251 - RNA, 19 nt, Artificial Sequence
  Description of Artificial Sequence: Synthetic oligonucleotide
  Antisense strand to SEQ ID NO: 977250
accagacagaaaguucucc

SEQ ID NO: 977252 - RNA, 19 nt, Artificial Sequence
  Description of Artificial Sequence: Synthetic oligonucleotide
  Sense strand starting at position 1675 of SEQ ID NO: 914089
gguaaaugacugugggcua

SEQ ID NO: 977253 - RNA, 19 nt, Artificial Sequence
  Description of Artificial Sequence: Synthetic oligonucleotide
  Antisense strand to SEQ ID NO: 977252
uagcccacagucauuuacc

SEQ ID NO: 977254 - RNA, 19 nt, Artificial Sequence
  Description of Artificial Sequence: Synthetic oligonucleotide
  Sense strand starting at position 2049 of SEQ ID NO: 914089
uaaucaaaucagugugguu

SEQ ID NO: 977255 - RNA, 19 nt, Artificial Sequence
  Description of Artificial Sequence: Synthetic oligonucleotide
  Antisense strand to SEQ ID NO: 977254
aaccacacugauuugauua

SEQ ID NO: 977256 - RNA, 19 nt, Artificial Sequence
  Description of Artificial Sequence: Synthetic oligonucleotide
  Sense strand starting at position 804 of SEQ ID NO: 914089
gcaccauggcuguagacuu

SEQ ID NO: 977257 - RNA, 19 nt, Artificial Sequence
  Description of Artificial Sequence: Synthetic oligonucleotide
  Antisense strand to SEQ ID NO: 977256
aagucuacagccauggugc

SEQ ID NO: 977258 - RNA, 19 nt, Artificial Sequence
  Description of Artificial Sequence: Synthetic oligonucleotide
  Sense strand starting at position 872 of SEQ ID NO: 914089
uaaacauagcgucacguaa

SEQ ID NO: 977259 - RNA, 19 nt, Artificial Sequence
  Description of Artificial Sequence: Synthetic oligonucleotide
  Antisense strand to SEQ ID NO: 977258
uuacgugacgcuauguuua

SEQ ID NO: 977260 - RNA, 19 nt, Artificial Sequence
  Description of Artificial Sequence: Synthetic oligonucleotide
  Sense strand starting at position 3074 of SEQ ID NO: 914089
cuaggugcuccggauaggu

SEQ ID NO: 977261 - RNA, 19 nt, Artificial Sequence
  Description of Artificial Sequence: Synthetic oligonucleotide
  Antisense strand to SEQ ID NO: 977260
accuauccggagcaccuag

SEQ ID NO: 977262 - RNA, 19 nt, Artificial Sequence
  Description of Artificial Sequence: Synthetic oligonucleotide
  Sense strand starting at position 2714 of SEQ ID NO: 914089
ggauauuccugagagaaug

SEQ ID NO: 977263 - RNA, 19 nt, Artificial Sequence
  Description of Artificial Sequence: Synthetic oligonucleotide
  Antisense strand to SEQ ID NO: 977262
cauucucucaggaauaucc

SEQ ID NO: 977264 - RNA, 19 nt, Artificial Sequence
  Description of Artificial Sequence: Synthetic oligonucleotide
  Sense strand starting at position 642 of SEQ ID NO: 914089
aggaauuucugugguaaag

SEQ ID NO: 977265 - RNA, 19 nt, Artificial Sequence
  Description of Artificial Sequence: Synthetic oligonucleotide
  Antisense strand to SEQ ID NO: 977264
cuuuaccacagaaauuccu

SEQ ID NO: 977266 - RNA, 19 nt, Artificial Sequence
  Description of Artificial Sequence: Synthetic oligonucleotide
  Sense strand starting at position 1742 of SEQ ID NO: 914089
acuuuaagguuguuauguu

SEQ ID NO: 977267 - RNA, 19 nt, Artificial Sequence
  Description of Artificial Sequence: Synthetic oligonucleotide
  Antisense strand to SEQ ID NO: 977266
aacauaacaaccuuaaagu

SEQ ID NO: 977268 - RNA, 19 nt, Artificial Sequence
  Description of Artificial Sequence: Synthetic oligonucleotide
  Sense strand starting at position 1602 of SEQ ID NO: 914089
cuuucuguugauggcuuaa

SEQ ID NO: 977269 - RNA, 19 nt, Artificial Sequence
  Description of Artificial Sequence: Synthetic oligonucleotide
  Antisense strand to SEQ ID NO: 977268
uuaagccaucaacagaaag

SEQ ID NO: 977270 - RNA, 19 nt, Artificial Sequence
  Description of Artificial Sequence: Synthetic oligonucleotide
  Sense strand starting at position 22 of SEQ ID NO: 914089
aaaguucgcgcucacaaau

SEQ ID NO: 977271 - RNA, 19 nt, Artificial Sequence
  Description of Artificial Sequence: Synthetic oligonucleotide
  Antisense strand to SEQ ID NO: 977270
auuugugagcgcgaacuuu

SEQ ID NO: 977272 - RNA, 19 nt, Artificial Sequence
  Description of Artificial Sequence: Synthetic oligonucleotide
  Sense strand starting at position 1746 of SEQ ID NO: 914089
uaagguuguuauguuagca

SEQ ID NO: 977273 - RNA, 19 nt, Artificial Sequence
  Description of Artificial Sequence: Synthetic oligonucleotide
  Antisense strand to SEQ ID NO: 977272
ugcuaacauaacaaccuua

SEQ ID NO: 977274 - RNA, 19 nt, Artificial Sequence
  Description of Artificial Sequence: Synthetic oligonucleotide
  Sense strand starting at position 2333 of SEQ ID NO: 914089
uucguaaugagaugcuuuc

SEQ ID NO: 977275 - RNA, 19 nt, Artificial Sequence
  Description of Artificial Sequence: Synthetic oligonucleotide
  Antisense strand to SEQ ID NO: 977274
gaaagcaucucauuacgaa

SEQ ID NO: 977276 - RNA, 19 nt, Artificial Sequence
  Description of Artificial Sequence: Synthetic oligonucleotide
  Sense strand starting at position 2377 of SEQ ID NO: 914089
ugaaauucuuaccagggau

SEQ ID NO: 977277 - RNA, 19 nt, Artificial Sequence
  Description of Artificial Sequence: Synthetic oligonucleotide
  Antisense strand to SEQ ID NO: 977276
aucccugguaagaauuuca

SEQ ID NO: 977278 - RNA, 19 nt, Artificial Sequence
  Description of Artificial Sequence: Synthetic oligonucleotide
  Sense strand starting at position 3244 of SEQ ID NO: 914089
aacguuugugucuagcuaa

SEQ ID NO: 977279 - RNA, 19 nt, Artificial Sequence
  Description of Artificial Sequence: Synthetic oligonucleotide
  Antisense strand to SEQ ID NO: 977278
uuagcuagacacaaacguu

SEQ ID NO: 977280 - RNA, 19 nt, Artificial Sequence
  Description of Artificial Sequence: Synthetic oligonucleotide
  Sense strand starting at position 883 of SEQ ID NO: 914089
ucacguaaguuucuccauu

SEQ ID NO: 977281 - RNA, 19 nt, Artificial Sequence
  Description of Artificial Sequence: Synthetic oligonucleotide
  Antisense strand to SEQ ID NO: 977280
aauggagaaacuuacguga

SEQ ID NO: 977282 - RNA, 19 nt, Artificial Sequence
  Description of Artificial Sequence: Synthetic oligonucleotide
  Sense strand starting at position 2725 of SEQ ID NO: 914089
agagaaugcuaguaaugag

SEQ ID NO: 977283 - RNA, 19 nt, Artificial Sequence
  Description of Artificial Sequence: Synthetic oligonucleotide
  Antisense strand to SEQ ID NO: 977282
cucauuacuagcauucucu

SEQ ID NO: 977284 - RNA, 19 nt, Artificial Sequence
  Description of Artificial Sequence: Synthetic oligonucleotide
  Sense strand starting at position 2024 of SEQ ID NO: 914089
cuuucugucugguagauuu

SEQ ID NO: 977285 - RNA, 19 nt, Artificial Sequence
  Description of Artificial Sequence: Synthetic oligonucleotide
  Antisense strand to SEQ ID NO: 977284
aaaucuaccagacagaaag

SEQ ID NO: 977286 - RNA, 19 nt, Artificial Sequence
  Description of Artificial Sequence: Synthetic oligonucleotide
  Sense strand starting at position 2757 of SEQ ID NO: 914090
ggaugagaauggcucugau

SEQ ID NO: 977287 - RNA, 19 nt, Artificial Sequence
  Description of Artificial Sequence: Synthetic oligonucleotide
  Antisense strand to SEQ ID NO: 977286
aucagagccauucucaucc

SEQ ID NO: 977288 - RNA, 19 nt, Artificial Sequence
  Description of Artificial Sequence: Synthetic oligonucleotide
  Sense strand starting at position 1569 of SEQ ID NO: 914090
agguauauucuugggaaug

SEQ ID NO: 977289 - RNA, 19 nt, Artificial Sequence
  Description of Artificial Sequence: Synthetic oligonucleotide
  Antisense strand to SEQ ID NO: 977288
cauucccaagaauauaccu

SEQ ID NO: 977290 - RNA, 19 nt, Artificial Sequence
  Description of Artificial Sequence: Synthetic oligonucleotide
  Sense strand starting at position 708 of SEQ ID NO: 914090
ggaucaaguuuccucaaga

SEQ ID NO: 977291 - RNA, 19 nt, Artificial Sequence
  Description of Artificial Sequence: Synthetic oligonucleotide
  Antisense strand to SEQ ID NO: 977290
ucuugaggaaacuugaucc

SEQ ID NO: 977292 - RNA, 19 nt, Artificial Sequence
  Description of Artificial Sequence: Synthetic oligonucleotide
  Sense strand starting at position 2764 of SEQ ID NO: 914090
aauggcucugauuggaaca

SEQ ID NO: 977293 - RNA, 19 nt, Artificial Sequence
  Description of Artificial Sequence: Synthetic oligonucleotide
  Antisense strand to SEQ ID NO: 977292
uguuccaaucagagccauu

SEQ ID NO: 977294 - RNA, 19 nt, Artificial Sequence
  Description of Artificial Sequence: Synthetic oligonucleotide
  Sense strand starting at position 250 of SEQ ID NO: 914090
cagagucugauucgggaga

SEQ ID NO: 977295 - RNA, 19 nt, Artificial Sequence
  Description of Artificial Sequence: Synthetic oligonucleotide
  Antisense strand to SEQ ID NO: 977294
ucucccgaaucagacucug

SEQ ID NO: 977296 - RNA, 19 nt, Artificial Sequence
  Description of Artificial Sequence: Synthetic oligonucleotide
  Sense strand starting at position 775 of SEQ ID NO: 914090
acuugucauggucaauauc

SEQ ID NO: 977297 - RNA, 19 nt, Artificial Sequence
  Description of Artificial Sequence: Synthetic oligonucleotide
  Antisense strand to SEQ ID NO: 977296
gauauugaccaugacaagu

SEQ ID NO: 977298 - RNA, 19 nt, Artificial Sequence
  Description of Artificial Sequence: Synthetic oligonucleotide
  Sense strand starting at position 1567 of SEQ ID NO: 914090
cgagguauauucuugggaa

SEQ ID NO: 977299 - RNA, 19 nt, Artificial Sequence
  Description of Artificial Sequence: Synthetic oligonucleotide
  Antisense strand to SEQ ID NO: 977298
uucccaagaauauaccucg

SEQ ID NO: 977300 - RNA, 19 nt, Artificial Sequence
  Description of Artificial Sequence: Synthetic oligonucleotide
  Sense strand starting at position 1557 of SEQ ID NO: 914090
cucgguguuccgagguaua

SEQ ID NO: 977301 - RNA, 19 nt, Artificial Sequence
  Description of Artificial Sequence: Synthetic oligonucleotide
  Antisense strand to SEQ ID NO: 977300
uauaccucggaacaccgag

SEQ ID NO: 977302 - RNA, 19 nt, Artificial Sequence
  Description of Artificial Sequence: Synthetic oligonucleotide
  Sense strand starting at position 394 of SEQ ID NO: 914090
aggaguagguagguuucaa

SEQ ID NO: 977303 - RNA, 19 nt, Artificial Sequence
  Description of Artificial Sequence: Synthetic oligonucleotide
  Antisense strand to SEQ ID NO: 977302
uugaaaccuaccuacuccu

SEQ ID NO: 977304 - RNA, 19 nt, Artificial Sequence
  Description of Artificial Sequence: Synthetic oligonucleotide
  Sense strand starting at position 621 of SEQ ID NO: 914090
guauaaaggucuguaaaua

SEQ ID NO: 977305 - RNA, 19 nt, Artificial Sequence
  Description of Artificial Sequence: Synthetic oligonucleotide
  Antisense strand to SEQ ID NO: 977304
uauuuacagaccuuuauac

SEQ ID NO: 977306 - RNA, 19 nt, Artificial Sequence
  Description of Artificial Sequence: Synthetic oligonucleotide
  Sense strand starting at position 620 of SEQ ID NO: 914090
aguauaaaggucuguaaau

SEQ ID NO: 977307 - RNA, 19 nt, Artificial Sequence
  Description of Artificial Sequence: Synthetic oligonucleotide
  Antisense strand to SEQ ID NO: 977306
auuuacagaccuuuauacu

SEQ ID NO: 977308 - RNA, 19 nt, Artificial Sequence
  Description of Artificial Sequence: Synthetic oligonucleotide
  Sense strand starting at position 778 of SEQ ID NO: 914090
ugucauggucaauaucuuu

SEQ ID NO: 977309 - RNA, 19 nt, Artificial Sequence
  Description of Artificial Sequence: Synthetic oligonucleotide
  Antisense strand to SEQ ID NO: 977308
aaagauauugaccaugaca

SEQ ID NO: 977310 - RNA, 19 nt, Artificial Sequence
  Description of Artificial Sequence: Synthetic oligonucleotide
  Sense strand starting at position 3921 of SEQ ID NO: 914090
ugaagaugucuccagccuu

SEQ ID NO: 977311 - RNA, 19 nt, Artificial Sequence
  Description of Artificial Sequence: Synthetic oligonucleotide
  Antisense strand to SEQ ID NO: 977310
aaggcuggagacaucuuca

SEQ ID NO: 977312 - RNA, 19 nt, Artificial Sequence
  Description of Artificial Sequence: Synthetic oligonucleotide
  Sense strand starting at position 589 of SEQ ID NO: 914090
acacauucugcaggagagu

SEQ ID NO: 977313 - RNA, 19 nt, Artificial Sequence
  Description of Artificial Sequence: Synthetic oligonucleotide
  Antisense strand to SEQ ID NO: 977312
acucuccugcagaaugugu

SEQ ID NO: 977314 - RNA, 19 nt, Artificial Sequence
  Description of Artificial Sequence: Synthetic oligonucleotide
  Sense strand starting at position 3569 of SEQ ID NO: 914090
uggguucuugagcauaagu

SEQ ID NO: 977315 - RNA, 19 nt, Artificial Sequence
  Description of Artificial Sequence: Synthetic oligonucleotide
  Antisense strand to SEQ ID NO: 977314
acuuaugcucaagaaccca

SEQ ID NO: 977316 - RNA, 19 nt, Artificial Sequence
  Description of Artificial Sequence: Synthetic oligonucleotide
  Sense strand starting at position 2128 of SEQ ID NO: 914090
gcagucauccaucaaucga

SEQ ID NO: 977317 - RNA, 19 nt, Artificial Sequence
  Description of Artificial Sequence: Synthetic oligonucleotide
  Antisense strand to SEQ ID NO: 977316
ucgauugauggaugacugc

SEQ ID NO: 977318 - RNA, 19 nt, Artificial Sequence
  Description of Artificial Sequence: Synthetic oligonucleotide
  Sense strand starting at position 323 of SEQ ID NO: 914090
gugcucgaaaguuaucaaa

SEQ ID NO: 977319 - RNA, 19 nt, Artificial Sequence
  Description of Artificial Sequence: Synthetic oligonucleotide
  Antisense strand to SEQ ID NO: 977318
uuugauaacuuucgagcac

SEQ ID NO: 977320 - RNA, 19 nt, Artificial Sequence
  Description of Artificial Sequence: Synthetic oligonucleotide
  Sense strand starting at position 2560 of SEQ ID NO: 914090
ugucaauucuugguuaagg

SEQ ID NO: 977321 - RNA, 19 nt, Artificial Sequence
  Description of Artificial Sequence: Synthetic oligonucleotide
  Antisense strand to SEQ ID NO: 977320
ccuuaaccaagaauugaca

SEQ ID NO: 977322 - RNA, 19 nt, Artificial Sequence
  Description of Artificial Sequence: Synthetic oligonucleotide
  Sense strand starting at position 3571 of SEQ ID NO: 914090
gguucuugagcauaaguuc

SEQ ID NO: 977323 - RNA, 19 nt, Artificial Sequence
  Description of Artificial Sequence: Synthetic oligonucleotide
  Antisense strand to SEQ ID NO: 977322
gaacuuaugcucaagaacc

SEQ ID NO: 977324 - RNA, 19 nt, Artificial Sequence
  Description of Artificial Sequence: Synthetic oligonucleotide
  Sense strand starting at position 772 of SEQ ID NO: 914090
auuacuugucauggucaau

SEQ ID NO: 977325 - RNA, 19 nt, Artificial Sequence
  Description of Artificial Sequence: Synthetic oligonucleotide
  Antisense strand to SEQ ID NO: 977324
auugaccaugacaaguaau

SEQ ID NO: 977326 - RNA, 19 nt, Artificial Sequence
  Description of Artificial Sequence: Synthetic oligonucleotide
  Sense strand starting at position 681 of SEQ ID NO: 914090
cuagcuuacugggucuaga

SEQ ID NO: 977327 - RNA, 19 nt, Artificial Sequence
  Description of Artificial Sequence: Synthetic oligonucleotide
  Antisense strand to SEQ ID NO: 977326
ucuagacccaguaagcuag

SEQ ID NO: 977328 - RNA, 19 nt, Artificial Sequence
  Description of Artificial Sequence: Synthetic oligonucleotide
  Sense strand starting at position 3466 of SEQ ID NO: 914090
gucauagcacaguauguua

SEQ ID NO: 977329 - RNA, 19 nt, Artificial Sequence
  Description of Artificial Sequence: Synthetic oligonucleotide
  Antisense strand to SEQ ID NO: 977328
uaacauacugugcuaugac

SEQ ID NO: 977330 - RNA, 19 nt, Artificial Sequence
  Description of Artificial Sequence: Synthetic oligonucleotide
  Sense strand starting at position 822 of SEQ ID NO: 914090
ccugacuucuuggcauuau

SEQ ID NO: 977331 - RNA, 19 nt, Artificial Sequence
  Description of Artificial Sequence: Synthetic oligonucleotide
  Antisense strand to SEQ ID NO: 977330
auaaugccaagaagucagg

SEQ ID NO: 977332 - RNA, 19 nt, Artificial Sequence
  Description of Artificial Sequence: Synthetic oligonucleotide
  Sense strand starting at position 146 of SEQ ID NO: 914090
uugcaucuagauugcaaau

SEQ ID NO: 977333 - RNA, 19 nt, Artificial Sequence
  Description of Artificial Sequence: Synthetic oligonucleotide
  Antisense strand to SEQ ID NO: 977332
auuugcaaucuagaugcaa

SEQ ID NO: 977334 - RNA, 19 nt, Artificial Sequence
  Description of Artificial Sequence: Synthetic oligonucleotide
  Sense strand starting at position 3568 of SEQ ID NO: 914090
guggguucuugagcauaag

SEQ ID NO: 977335 - RNA, 19 nt, Artificial Sequence
  Description of Artificial Sequence: Synthetic oligonucleotide
  Antisense strand to SEQ ID NO: 977334
cuuaugcucaagaacccac

SEQ ID NO: 977336 - RNA, 19 nt, Artificial Sequence
  Description of Artificial Sequence: Synthetic oligonucleotide
  Sense strand starting at position 821 of SEQ ID NO: 914090
uccugacuucuuggcauua

SEQ ID NO: 977337 - RNA, 19 nt, Artificial Sequence
  Description of Artificial Sequence: Synthetic oligonucleotide
  Antisense strand to SEQ ID NO: 977336
uaaugccaagaagucagga

SEQ ID NO: 977338 - RNA, 19 nt, Artificial Sequence
  Description of Artificial Sequence: Synthetic oligonucleotide
  Sense strand starting at position 1560 of SEQ ID NO: 914090
gguguuccgagguauauuc

SEQ ID NO: 977339 - RNA, 19 nt, Artificial Sequence
  Description of Artificial Sequence: Synthetic oligonucleotide
  Antisense strand to SEQ ID NO: 977338
gaauauaccucggaacacc

SEQ ID NO: 977340 - RNA, 19 nt, Artificial Sequence
  Description of Artificial Sequence: Synthetic oligonucleotide
  Sense strand starting at position 1058 of SEQ ID NO: 914090
ccagaaacuucgccuccau

SEQ ID NO: 977341 - RNA, 19 nt, Artificial Sequence
  Description of Artificial Sequence: Synthetic oligonucleotide
  Antisense strand to SEQ ID NO: 977340
auggaggcgaaguuucugg

SEQ ID NO: 977342 - RNA, 19 nt, Artificial Sequence
  Description of Artificial Sequence: Synthetic oligonucleotide
  Sense strand starting at position 2559 of SEQ ID NO: 914090
gugucaauucuugguuaag

SEQ ID NO: 977343 - RNA, 19 nt, Artificial Sequence
  Description of Artificial Sequence: Synthetic oligonucleotide
  Antisense strand to SEQ ID NO: 977342
cuuaaccaagaauugacac

SEQ ID NO: 977344 - RNA, 19 nt, Artificial Sequence
  Description of Artificial Sequence: Synthetic oligonucleotide
  Sense strand starting at position 3749 of SEQ ID NO: 914090
gcagccucagagugacauu

SEQ ID NO: 977345 - RNA, 19 nt, Artificial Sequence
  Description of Artificial Sequence: Synthetic oligonucleotide
  Antisense strand to SEQ ID NO: 977344
aaugucacucugaggcugc

SEQ ID NO: 977346 - RNA, 19 nt, Artificial Sequence
  Description of Artificial Sequence: Synthetic oligonucleotide
  Sense strand starting at position 3564 of SEQ ID NO: 914090
guaaguggguucuugagca

SEQ ID NO: 977347 - RNA, 19 nt, Artificial Sequence
  Description of Artificial Sequence: Synthetic oligonucleotide
  Antisense strand to SEQ ID NO: 977346
ugcucaagaacccacuuac

SEQ ID NO: 977348 - RNA, 19 nt, Artificial Sequence
  Description of Artificial Sequence: Synthetic oligonucleotide
  Sense strand starting at position 2557 of SEQ ID NO: 914090
cugugucaauucuugguua

SEQ ID NO: 977349 - RNA, 19 nt, Artificial Sequence
  Description of Artificial Sequence: Synthetic oligonucleotide
  Antisense strand to SEQ ID NO: 977348
uaaccaagaauugacacag

SEQ ID NO: 977350 - RNA, 19 nt, Artificial Sequence
  Description of Artificial Sequence: Synthetic oligonucleotide
  Sense strand starting at position 1170 of SEQ ID NO: 914090
gagacauugugcuuggcga

SEQ ID NO: 977351 - RNA, 19 nt, Artificial Sequence
  Description of Artificial Sequence: Synthetic oligonucleotide
  Antisense strand to SEQ ID NO: 977350
ucgccaagcacaaugucuc

SEQ ID NO: 977352 - RNA, 19 nt, Artificial Sequence
  Description of Artificial Sequence: Synthetic oligonucleotide
  Sense strand starting at position 216 of SEQ ID NO: 914090
gcaaaugugugcucacuaa

SEQ ID NO: 977353 - RNA, 19 nt, Artificial Sequence
  Description of Artificial Sequence: Synthetic oligonucleotide
  Antisense strand to SEQ ID NO: 977352
uuagugagcacacauuugc

SEQ ID NO: 977354 - RNA, 19 nt, Artificial Sequence
  Description of Artificial Sequence: Synthetic oligonucleotide
  Sense strand starting at position 878 of SEQ ID NO: 914090
ucgggugcugaauguuaca

SEQ ID NO: 977355 - RNA, 19 nt, Artificial Sequence
  Description of Artificial Sequence: Synthetic oligonucleotide
  Antisense strand to SEQ ID NO: 977354
uguaacauucagcacccga

SEQ ID NO: 977356 - RNA, 19 nt, Artificial Sequence
  Description of Artificial Sequence: Synthetic oligonucleotide
  Sense strand starting at position 819 of SEQ ID NO: 914090
gcuccugacuucuuggcau

SEQ ID NO: 977357 - RNA, 19 nt, Artificial Sequence
  Description of Artificial Sequence: Synthetic oligonucleotide
  Antisense strand to SEQ ID NO: 977356
augccaagaagucaggagc

SEQ ID NO: 977358 - RNA, 19 nt, Artificial Sequence
  Description of Artificial Sequence: Synthetic oligonucleotide
  Sense strand starting at position 834 of SEQ ID NO: 914090
gcauuauccaccggguucu

SEQ ID NO: 977359 - RNA, 19 nt, Artificial Sequence
  Description of Artificial Sequence: Synthetic oligonucleotide
  Antisense strand to SEQ ID NO: 977358
agaacccgguggauaaugc

SEQ ID NO: 977360 - RNA, 19 nt, Artificial Sequence
  Description of Artificial Sequence: Synthetic oligonucleotide
  Sense strand starting at position 214 of SEQ ID NO: 914090
gggcaaaugugugcucacu

SEQ ID NO: 977361 - RNA, 19 nt, Artificial Sequence
  Description of Artificial Sequence: Synthetic oligonucleotide
  Antisense strand to SEQ ID NO: 977360
agugagcacacauuugccc

SEQ ID NO: 977362 - RNA, 19 nt, Artificial Sequence
  Description of Artificial Sequence: Synthetic oligonucleotide
  Sense strand starting at position 3622 of SEQ ID NO: 914090
gccuguguggugggauauu

SEQ ID NO: 977363 - RNA, 19 nt, Artificial Sequence
  Description of Artificial Sequence: Synthetic oligonucleotide
  Antisense strand to SEQ ID NO: 977362
aauaucccaccacacaggc

SEQ ID NO: 977364 - RNA, 19 nt, Artificial Sequence
  Description of Artificial Sequence: Synthetic oligonucleotide
  Sense strand starting at position 2761 of SEQ ID NO: 914090
gagaauggcucugauugga

SEQ ID NO: 977365 - RNA, 19 nt, Artificial Sequence
  Description of Artificial Sequence: Synthetic oligonucleotide
  Antisense strand to SEQ ID NO: 977364
uccaaucagagccauucuc

SEQ ID NO: 977366 - RNA, 19 nt, Artificial Sequence
  Description of Artificial Sequence: Synthetic oligonucleotide
  Sense strand starting at position 3117 of SEQ ID NO: 914091
gaagguugugaaugagaca

SEQ ID NO: 977367 - RNA, 19 nt, Artificial Sequence
  Description of Artificial Sequence: Synthetic oligonucleotide
  Antisense strand to SEQ ID NO: 977366
ugucucauucacaaccuuc

SEQ ID NO: 977368 - RNA, 19 nt, Artificial Sequence
  Description of Artificial Sequence: Synthetic oligonucleotide
  Sense strand starting at position 2779 of SEQ ID NO: 914091
ugacgauuguuucucauuu

SEQ ID NO: 977369 - RNA, 19 nt, Artificial Sequence
  Description of Artificial Sequence: Synthetic oligonucleotide
  Antisense strand to SEQ ID NO: 977368
aaaugagaaacaaucguca

SEQ ID NO: 977370 - RNA, 19 nt, Artificial Sequence
  Description of Artificial Sequence: Synthetic oligonucleotide
  Sense strand starting at position 1447 of SEQ ID NO: 914091
gaaugcagucaguagacaa

SEQ ID NO: 977371 - RNA, 19 nt, Artificial Sequence
  Description of Artificial Sequence: Synthetic oligonucleotide
  Antisense strand to SEQ ID NO: 977370
uugucuacugacugcauuc

SEQ ID NO: 977372 - RNA, 19 nt, Artificial Sequence
  Description of Artificial Sequence: Synthetic oligonucleotide
  Sense strand starting at position 3925 of SEQ ID NO: 914091
gagacaauguauguauaua

SEQ ID NO: 977373 - RNA, 19 nt, Artificial Sequence
  Description of Artificial Sequence: Synthetic oligonucleotide
  Antisense strand to SEQ ID NO: 977372
uauauacauacauugucuc

SEQ ID NO: 977374 - RNA, 19 nt, Artificial Sequence
  Description of Artificial Sequence: Synthetic oligonucleotide
  Sense strand starting at position 1372 of SEQ ID NO: 914091
guauuagcucuagauacaa

SEQ ID NO: 977375 - RNA, 19 nt, Artificial Sequence
  Description of Artificial Sequence: Synthetic oligonucleotide
  Antisense strand to SEQ ID NO: 977374
uuguaucuagagcuaauac

SEQ ID NO: 977376 - RNA, 19 nt, Artificial Sequence
  Description of Artificial Sequence: Synthetic oligonucleotide
  Sense strand starting at position 3924 of SEQ ID NO: 914091
agagacaauguauguauau

SEQ ID NO: 977377 - RNA, 19 nt, Artificial Sequence
  Description of Artificial Sequence: Synthetic oligonucleotide
  Antisense strand to SEQ ID NO: 977376
auauacauacauugucucu

SEQ ID NO: 977378 - RNA, 19 nt, Artificial Sequence
  Description of Artificial Sequence: Synthetic oligonucleotide
  Sense strand starting at position 1555 of SEQ ID NO: 914091
uccuuugaaguuugaaaga

SEQ ID NO: 977379 - RNA, 19 nt, Artificial Sequence
  Description of Artificial Sequence: Synthetic oligonucleotide
  Antisense strand to SEQ ID NO: 977378
ucuuucaaacuucaaagga

SEQ ID NO: 977380 - RNA, 19 nt, Artificial Sequence
  Description of Artificial Sequence: Synthetic oligonucleotide
  Sense strand starting at position 2749 of SEQ ID NO: 914091
gugugauggacgcauuugu

SEQ ID NO: 977381 - RNA, 19 nt, Artificial Sequence
  Description of Artificial Sequence: Synthetic oligonucleotide
  Antisense strand to SEQ ID NO: 977380
acaaaugcguccaucacac

SEQ ID NO: 977382 - RNA, 19 nt, Artificial Sequence
  Description of Artificial Sequence: Synthetic oligonucleotide
  Sense strand starting at position 418 of SEQ ID NO: 914091
uguaauggugcuuagaaag

SEQ ID NO: 977383 - RNA, 19 nt, Artificial Sequence
  Description of Artificial Sequence: Synthetic oligonucleotide
  Antisense strand to SEQ ID NO: 977382
cuuucuaagcaccauuaca

SEQ ID NO: 977384 - RNA, 19 nt, Artificial Sequence
  Description of Artificial Sequence: Synthetic oligonucleotide
  Sense strand starting at position 2674 of SEQ ID NO: 914091
gcgcuacgucccucagacu

SEQ ID NO: 977385 - RNA, 19 nt, Artificial Sequence
  Description of Artificial Sequence: Synthetic oligonucleotide
  Antisense strand to SEQ ID NO: 977384
agucugagggacguagcgc

SEQ ID NO: 977386 - RNA, 19 nt, Artificial Sequence
  Description of Artificial Sequence: Synthetic oligonucleotide
  Sense strand starting at position 838 of SEQ ID NO: 914091
agacucaugugacugugaa

SEQ ID NO: 977387 - RNA, 19 nt, Artificial Sequence
  Description of Artificial Sequence: Synthetic oligonucleotide
  Antisense strand to SEQ ID NO: 977386
uucacagucacaugagucu

SEQ ID NO: 977388 - RNA, 19 nt, Artificial Sequence
  Description of Artificial Sequence: Synthetic oligonucleotide
  Sense strand starting at position 2747 of SEQ ID NO: 914091
uggugugauggacgcauuu

SEQ ID NO: 977389 - RNA, 19 nt, Artificial Sequence
  Description of Artificial Sequence: Synthetic oligonucleotide
  Antisense strand to SEQ ID NO: 977388
aaaugcguccaucacacca

SEQ ID NO: 977390 - RNA, 19 nt, Artificial Sequence
  Description of Artificial Sequence: Synthetic oligonucleotide
  Sense strand starting at position 3111 of SEQ ID NO: 914091
cuaccagaagguugugaau

SEQ ID NO: 977391 - RNA, 19 nt, Artificial Sequence
  Description of Artificial Sequence: Synthetic oligonucleotide
  Antisense strand to SEQ ID NO: 977390
auucacaaccuucugguag

SEQ ID NO: 977392 - RNA, 19 nt, Artificial Sequence
  Description of Artificial Sequence: Synthetic oligonucleotide
  Sense strand starting at position 1370 of SEQ ID NO: 914091
cuguauuagcucuagauac

SEQ ID NO: 977393 - RNA, 19 nt, Artificial Sequence
  Description of Artificial Sequence: Synthetic oligonucleotide
  Antisense strand to SEQ ID NO: 977392
guaucuagagcuaauacag

SEQ ID NO: 977394 - RNA, 19 nt, Artificial Sequence
  Description of Artificial Sequence: Synthetic oligonucleotide
  Sense strand starting at position 839 of SEQ ID NO: 914091
gacucaugugacugugaac

SEQ ID NO: 977395 - RNA, 19 nt, Artificial Sequence
  Description of Artificial Sequence: Synthetic oligonucleotide
  Antisense strand to SEQ ID NO: 977394
guucacagucacaugaguc

SEQ ID NO: 977396 - RNA, 19 nt, Artificial Sequence
  Description of Artificial Sequence: Synthetic oligonucleotide
  Sense strand starting at position 2863 of SEQ ID NO: 914091
guugauugugcuagcggau

SEQ ID NO: 977397 - RNA, 19 nt, Artificial Sequence
  Description of Artificial Sequence: Synthetic oligonucleotide
  Antisense strand to SEQ ID NO: 977396
auccgcuagcacaaucaac

SEQ ID NO: 977398 - RNA, 19 nt, Artificial Sequence
  Description of Artificial Sequence: Synthetic oligonucleotide
  Sense strand starting at position 294 of SEQ ID NO: 914091
cuauaauagccaugugaac

SEQ ID NO: 977399 - RNA, 19 nt, Artificial Sequence
  Description of Artificial Sequence: Synthetic oligonucleotide
  Antisense strand to SEQ ID NO: 977398
guucacauggcuauuauag

SEQ ID NO: 977400 - RNA, 19 nt, Artificial Sequence
  Description of Artificial Sequence: Synthetic oligonucleotide
  Sense strand starting at position 308 of SEQ ID NO: 914091
ugaacaacguguucugaaa

SEQ ID NO: 977401 - RNA, 19 nt, Artificial Sequence
  Description of Artificial Sequence: Synthetic oligonucleotide
  Antisense strand to SEQ ID NO: 977400
uuucagaacacguuguuca

SEQ ID NO: 977402 - RNA, 19 nt, Artificial Sequence
  Description of Artificial Sequence: Synthetic oligonucleotide
  Sense strand starting at position 765 of SEQ ID NO: 914091
ucuaccagugacuguuaaa

SEQ ID NO: 977403 - RNA, 19 nt, Artificial Sequence
  Description of Artificial Sequence: Synthetic oligonucleotide
  Antisense strand to SEQ ID NO: 977402
uuuaacagucacugguaga

SEQ ID NO: 977404 - RNA, 19 nt, Artificial Sequence
  Description of Artificial Sequence: Synthetic oligonucleotide
  Sense strand starting at position 3844 of SEQ ID NO: 914091
ccaaguacccggcaacauu

SEQ ID NO: 977405 - RNA, 19 nt, Artificial Sequence
  Description of Artificial Sequence: Synthetic oligonucleotide
  Antisense strand to SEQ ID NO: 977404
aauguugccggguacuugg

SEQ ID NO: 977406 - RNA, 19 nt, Artificial Sequence
  Description of Artificial Sequence: Synthetic oligonucleotide
  Sense strand starting at position 3587 of SEQ ID NO: 914091
aacugaugacugcgacacu

SEQ ID NO: 977407 - RNA, 19 nt, Artificial Sequence
  Description of Artificial Sequence: Synthetic oligonucleotide
  Antisense strand to SEQ ID NO: 977406
agugucgcagucaucaguu

SEQ ID NO: 977408 - RNA, 19 nt, Artificial Sequence
  Description of Artificial Sequence: Synthetic oligonucleotide
  Sense strand starting at position 1669 of SEQ ID NO: 914091
cuuggaugaucagccaagu

SEQ ID NO: 977409 - RNA, 19 nt, Artificial Sequence
  Description of Artificial Sequence: Synthetic oligonucleotide
  Antisense strand to SEQ ID NO: 977408
acuuggcugaucauccaag

SEQ ID NO: 977410 - RNA, 19 nt, Artificial Sequence
  Description of Artificial Sequence: Synthetic oligonucleotide
  Sense strand starting at position 1660 of SEQ ID NO: 914091
uagcuacuccuuggaugau

SEQ ID NO: 977411 - RNA, 19 nt, Artificial Sequence
  Description of Artificial Sequence: Synthetic oligonucleotide
  Antisense strand to SEQ ID NO: 977410
aucauccaaggaguagcua

SEQ ID NO: 977412 - RNA, 19 nt, Artificial Sequence
  Description of Artificial Sequence: Synthetic oligonucleotide
  Sense strand starting at position 1659 of SEQ ID NO: 914091
uuagcuacuccuuggauga

SEQ ID NO: 977413 - RNA, 19 nt, Artificial Sequence
  Description of Artificial Sequence: Synthetic oligonucleotide
  Antisense strand to SEQ ID NO: 977412
ucauccaaggaguagcuaa

SEQ ID NO: 977414 - RNA, 19 nt, Artificial Sequence
  Description of Artificial Sequence: Synthetic oligonucleotide
  Sense strand starting at position 3016 of SEQ ID NO: 914091
gagcuugagcuuuggagag

SEQ ID NO: 977415 - RNA, 19 nt, Artificial Sequence
  Description of Artificial Sequence: Synthetic oligonucleotide
  Antisense strand to SEQ ID NO: 977414
cucuccaaagcucaagcuc

SEQ ID NO: 977416 - RNA, 19 nt, Artificial Sequence
  Description of Artificial Sequence: Synthetic oligonucleotide
  Sense strand starting at position 3072 of SEQ ID NO: 914091
cucgguuuccucgccguaa

SEQ ID NO: 977417 - RNA, 19 nt, Artificial Sequence
  Description of Artificial Sequence: Synthetic oligonucleotide
  Antisense strand to SEQ ID NO: 977416
uuacggcgaggaaaccgag

SEQ ID NO: 977418 - RNA, 19 nt, Artificial Sequence
  Description of Artificial Sequence: Synthetic oligonucleotide
  Sense strand starting at position 835 of SEQ ID NO: 914091
cugagacucaugugacugu

SEQ ID NO: 977419 - RNA, 19 nt, Artificial Sequence
  Description of Artificial Sequence: Synthetic oligonucleotide
  Antisense strand to SEQ ID NO: 977418
acagucacaugagucucag

SEQ ID NO: 977420 - RNA, 19 nt, Artificial Sequence
  Description of Artificial Sequence: Synthetic oligonucleotide
  Sense strand starting at position 1360 of SEQ ID NO: 914091
ccaacuaguucuguauuag

SEQ ID NO: 977421 - RNA, 19 nt, Artificial Sequence
  Description of Artificial Sequence: Synthetic oligonucleotide
  Antisense strand to SEQ ID NO: 977420
cuaauacagaacuaguugg

SEQ ID NO: 977422 - RNA, 19 nt, Artificial Sequence
  Description of Artificial Sequence: Synthetic oligonucleotide
  Sense strand starting at position 930 of SEQ ID NO: 914091
gccaaauuauuugaaagua

SEQ ID NO: 977423 - RNA, 19 nt, Artificial Sequence
  Description of Artificial Sequence: Synthetic oligonucleotide
  Antisense strand to SEQ ID NO: 977422
uacuuucaaauaauuuggc

SEQ ID NO: 977424 - RNA, 19 nt, Artificial Sequence
  Description of Artificial Sequence: Synthetic oligonucleotide
  Sense strand starting at position 3642 of SEQ ID NO: 914091
aacuguaaaccugguguca

SEQ ID NO: 977425 - RNA, 19 nt, Artificial Sequence
  Description of Artificial Sequence: Synthetic oligonucleotide
  Antisense strand to SEQ ID NO: 977424
ugacaccagguuuacaguu

SEQ ID NO: 977426 - RNA, 19 nt, Artificial Sequence
  Description of Artificial Sequence: Synthetic oligonucleotide
  Sense strand starting at position 822 of SEQ ID NO: 914091
guucaagucuaggcugaga

SEQ ID NO: 977427 - RNA, 19 nt, Artificial Sequence
  Description of Artificial Sequence: Synthetic oligonucleotide
  Antisense strand to SEQ ID NO: 977426
ucucagccuagacuugaac

SEQ ID NO: 977428 - RNA, 19 nt, Artificial Sequence
  Description of Artificial Sequence: Synthetic oligonucleotide
  Sense strand starting at position 3854 of SEQ ID NO: 914091
ggcaacauuccuggcauau

SEQ ID NO: 977429 - RNA, 19 nt, Artificial Sequence
  Description of Artificial Sequence: Synthetic oligonucleotide
  Antisense strand to SEQ ID NO: 977428
auaugccaggaauguugcc

SEQ ID NO: 977430 - RNA, 19 nt, Artificial Sequence
  Description of Artificial Sequence: Synthetic oligonucleotide
  Sense strand starting at position 2850 of SEQ ID NO: 914091
gugggacgacccuguugau

SEQ ID NO: 977431 - RNA, 19 nt, Artificial Sequence
  Description of Artificial Sequence: Synthetic oligonucleotide
  Antisense strand to SEQ ID NO: 977430
aucaacagggucgucccac

SEQ ID NO: 977432 - RNA, 19 nt, Artificial Sequence
  Description of Artificial Sequence: Synthetic oligonucleotide
  Sense strand starting at position 417 of SEQ ID NO: 914091
guguaauggugcuuagaaa

SEQ ID NO: 977433 - RNA, 19 nt, Artificial Sequence
  Description of Artificial Sequence: Synthetic oligonucleotide
  Antisense strand to SEQ ID NO: 977432
uuucuaagcaccauuacac

SEQ ID NO: 977434 - RNA, 19 nt, Artificial Sequence
  Description of Artificial Sequence: Synthetic oligonucleotide
  Sense strand starting at position 196 of SEQ ID NO: 914091
acgcuaaggcagugaauga

SEQ ID NO: 977435 - RNA, 19 nt, Artificial Sequence
  Description of Artificial Sequence: Synthetic oligonucleotide
  Antisense strand to SEQ ID NO: 977434
ucauucacugccuuagcgu

SEQ ID NO: 977436 - RNA, 19 nt, Artificial Sequence
  Description of Artificial Sequence: Synthetic oligonucleotide
  Sense strand starting at position 758 of SEQ ID NO: 914091
ucucauuucuaccagugac

SEQ ID NO: 977437 - RNA, 19 nt, Artificial Sequence
  Description of Artificial Sequence: Synthetic oligonucleotide
  Antisense strand to SEQ ID NO: 977436
gucacugguagaaaugaga

SEQ ID NO: 977438 - RNA, 19 nt, Artificial Sequence
  Description of Artificial Sequence: Synthetic oligonucleotide
  Sense strand starting at position 1028 of SEQ ID NO: 914091
ccuaaacgcugucucauaa

SEQ ID NO: 977439 - RNA, 19 nt, Artificial Sequence
  Description of Artificial Sequence: Synthetic oligonucleotide
  Antisense strand to SEQ ID NO: 977438
uuaugagacagcguuuagg

SEQ ID NO: 977440 - RNA, 19 nt, Artificial Sequence
  Description of Artificial Sequence: Synthetic oligonucleotide
  Sense strand starting at position 3167 of SEQ ID NO: 914091
cccguaaacgcucaaucuu

SEQ ID NO: 977441 - RNA, 19 nt, Artificial Sequence
  Description of Artificial Sequence: Synthetic oligonucleotide
  Antisense strand to SEQ ID NO: 977440
aagauugagcguuuacggg

SEQ ID NO: 977442 - RNA, 19 nt, Artificial Sequence
  Description of Artificial Sequence: Synthetic oligonucleotide
  Sense strand starting at position 3654 of SEQ ID NO: 914091
ggugucacucuuggugacu

SEQ ID NO: 977443 - RNA, 19 nt, Artificial Sequence
  Description of Artificial Sequence: Synthetic oligonucleotide
  Antisense strand to SEQ ID NO: 977442
agucaccaagagugacacc

SEQ ID NO: 977444 - RNA, 19 nt, Artificial Sequence
  Description of Artificial Sequence: Synthetic oligonucleotide
  Sense strand starting at position 3010 of SEQ ID NO: 914091
gguugugagcuugagcuuu

SEQ ID NO: 977445 - RNA, 19 nt, Artificial Sequence
  Description of Artificial Sequence: Synthetic oligonucleotide
  Antisense strand to SEQ ID NO: 977444
aaagcucaagcucacaacc

SEQ ID NO: 977446 - RNA, 19 nt, Artificial Sequence
  Description of Artificial Sequence: Synthetic oligonucleotide
  Sense strand starting at position 522 of SEQ ID NO: 914092
ucaucagugcaauaagaca

SEQ ID NO: 977447 - RNA, 19 nt, Artificial Sequence
  Description of Artificial Sequence: Synthetic oligonucleotide
  Antisense strand to SEQ ID NO: 977446
ugucuuauugcacugauga

SEQ ID NO: 977448 - RNA, 19 nt, Artificial Sequence
  Description of Artificial Sequence: Synthetic oligonucleotide
  Sense strand starting at position 2537 of SEQ ID NO: 914092
gggauuugucaaugcucga

SEQ ID NO: 977449 - RNA, 19 nt, Artificial Sequence
  Description of Artificial Sequence: Synthetic oligonucleotide
  Antisense strand to SEQ ID NO: 977448
ucgagcauugacaaauccc

SEQ ID NO: 977450 - RNA, 19 nt, Artificial Sequence
  Description of Artificial Sequence: Synthetic oligonucleotide
  Sense strand starting at position 2812 of SEQ ID NO: 914092
aaauuacuugcugggaaga

SEQ ID NO: 977451 - RNA, 19 nt, Artificial Sequence
  Description of Artificial Sequence: Synthetic oligonucleotide
  Antisense strand to SEQ ID NO: 977450
ucuucccagcaaguaauuu

SEQ ID NO: 977452 - RNA, 19 nt, Artificial Sequence
  Description of Artificial Sequence: Synthetic oligonucleotide
  Sense strand starting at position 443 of SEQ ID NO: 914092
auacaaggcuaccuagaua

SEQ ID NO: 977453 - RNA, 19 nt, Artificial Sequence
  Description of Artificial Sequence: Synthetic oligonucleotide
  Antisense strand to SEQ ID NO: 977452
uaucuagguagccuuguau

SEQ ID NO: 977454 - RNA, 19 nt, Artificial Sequence
  Description of Artificial Sequence: Synthetic oligonucleotide
  Sense strand starting at position 645 of SEQ ID NO: 914092
uauaaauaugaccgaguaa

SEQ ID NO: 977455 - RNA, 19 nt, Artificial Sequence
  Description of Artificial Sequence: Synthetic oligonucleotide
  Antisense strand to SEQ ID NO: 977454
uuacucggucauauuuaua

SEQ ID NO: 977456 - RNA, 19 nt, Artificial Sequence
  Description of Artificial Sequence: Synthetic oligonucleotide
  Sense strand starting at position 2342 of SEQ ID NO: 914092
ugauuccgcgcuguuuaaa

SEQ ID NO: 977457 - RNA, 19 nt, Artificial Sequence
  Description of Artificial Sequence: Synthetic oligonucleotide
  Antisense strand to SEQ ID NO: 977456
uuuaaacagcgcggaauca

SEQ ID NO: 977458 - RNA, 19 nt, Artificial Sequence
  Description of Artificial Sequence: Synthetic oligonucleotide
  Sense strand starting at position 2810 of SEQ ID NO: 914092
ugaaauuacuugcugggaa

SEQ ID NO: 977459 - RNA, 19 nt, Artificial Sequence
  Description of Artificial Sequence: Synthetic oligonucleotide
  Antisense strand to SEQ ID NO: 977458
uucccagcaaguaauuuca

SEQ ID NO: 977460 - RNA, 19 nt, Artificial Sequence
  Description of Artificial Sequence: Synthetic oligonucleotide
  Sense strand starting at position 2953 of SEQ ID NO: 914092
aggguaucucccuaggagu

SEQ ID NO: 977461 - RNA, 19 nt, Artificial Sequence
  Description of Artificial Sequence: Synthetic oligonucleotide
  Antisense strand to SEQ ID NO: 977460
acuccuagggagauacccu

SEQ ID NO: 977462 - RNA, 19 nt, Artificial Sequence
  Description of Artificial Sequence: Synthetic oligonucleotide
  Sense strand starting at position 3821 of SEQ ID NO: 914092
ucuaaauaugauggaguuu

SEQ ID NO: 977463 - RNA, 19 nt, Artificial Sequence
  Description of Artificial Sequence: Synthetic oligonucleotide
  Antisense strand to SEQ ID NO: 977462
aaacuccaucauauuuaga

SEQ ID NO: 977464 - RNA, 19 nt, Artificial Sequence
  Description of Artificial Sequence: Synthetic oligonucleotide
  Sense strand starting at position 2626 of SEQ ID NO: 914092
uaggcagaucuguacaauu

SEQ ID NO: 977465 - RNA, 19 nt, Artificial Sequence
  Description of Artificial Sequence: Synthetic oligonucleotide
  Antisense strand to SEQ ID NO: 977464
aauuguacagaucugccua

SEQ ID NO: 977466 - RNA, 19 nt, Artificial Sequence
  Description of Artificial Sequence: Synthetic oligonucleotide
  Sense strand starting at position 2617 of SEQ ID NO: 914092
cuauaaaucuaggcagauc

SEQ ID NO: 977467 - RNA, 19 nt, Artificial Sequence
  Description of Artificial Sequence: Synthetic oligonucleotide
  Antisense strand to SEQ ID NO: 977466
gaucugccuagauuuauag

SEQ ID NO: 977468 - RNA, 19 nt, Artificial Sequence
  Description of Artificial Sequence: Synthetic oligonucleotide
  Sense strand starting at position 644 of SEQ ID NO: 914092
cuauaaauaugaccgagua

SEQ ID NO: 977469 - RNA, 19 nt, Artificial Sequence
  Description of Artificial Sequence: Synthetic oligonucleotide
  Antisense strand to SEQ ID NO: 977468
uacucggucauauuuauag

SEQ ID NO: 977470 - RNA, 19 nt, Artificial Sequence
  Description of Artificial Sequence: Synthetic oligonucleotide
  Sense strand starting at position 742 of SEQ ID NO: 914092
ccuggauaaucaccuagua

SEQ ID NO: 977471 - RNA, 19 nt, Artificial Sequence
  Description of Artificial Sequence: Synthetic oligonucleotide
  Antisense strand to SEQ ID NO: 977470
uacuaggugauuauccagg

SEQ ID NO: 977472 - RNA, 19 nt, Artificial Sequence
  Description of Artificial Sequence: Synthetic oligonucleotide
  Sense strand starting at position 275 of SEQ ID NO: 914092
auggucuguccuuagagac

SEQ ID NO: 977473 - RNA, 19 nt, Artificial Sequence
  Description of Artificial Sequence: Synthetic oligonucleotide
  Antisense strand to SEQ ID NO: 977472
gucucuaaggacagaccau

SEQ ID NO: 977474 - RNA, 19 nt, Artificial Sequence
  Description of Artificial Sequence: Synthetic oligonucleotide
  Sense strand starting at position 3779 of SEQ ID NO: 914092
caacguggcagauaggauu

SEQ ID NO: 977475 - RNA, 19 nt, Artificial Sequence
  Description of Artificial Sequence: Synthetic oligonucleotide
  Antisense strand to SEQ ID NO: 977474
aauccuaucugccacguug

SEQ ID NO: 977476 - RNA, 19 nt, Artificial Sequence
  Description of Artificial Sequence: Synthetic oligonucleotide
  Sense strand starting at position 2883 of SEQ ID NO: 914092
agacaauucuggcccuaau

SEQ ID NO: 977477 - RNA, 19 nt, Artificial Sequence
  Description of Artificial Sequence: Synthetic oligonucleotide
  Antisense strand to SEQ ID NO: 977476
auuagggccagaauugucu

SEQ ID NO: 977478 - RNA, 19 nt, Artificial Sequence
  Description of Artificial Sequence: Synthetic oligonucleotide
  Sense strand starting at position 208 of SEQ ID NO: 914092
cccuauaacugggauuuga

SEQ ID NO: 977479 - RNA, 19 nt, Artificial Sequence
  Description of Artificial Sequence: Synthetic oligonucleotide
  Antisense strand to SEQ ID NO: 977478
ucaaaucccaguuauaggg

SEQ ID NO: 977480 - RNA, 19 nt, Artificial Sequence
  Description of Artificial Sequence: Synthetic oligonucleotide
  Sense strand starting at position 2205 of SEQ ID NO: 914092
aaucuaugaccguaggguu

SEQ ID NO: 977481 - RNA, 19 nt, Artificial Sequence
  Description of Artificial Sequence: Synthetic oligonucleotide
  Antisense strand to SEQ ID NO: 977480
aacccuacggucauagauu

SEQ ID NO: 977482 - RNA, 19 nt, Artificial Sequence
  Description of Artificial Sequence: Synthetic oligonucleotide
  Sense strand starting at position 66 of SEQ ID NO: 914092
guuguuauacuaggauaca

SEQ ID NO: 977483 - RNA, 19 nt, Artificial Sequence
  Description of Artificial Sequence: Synthetic oligonucleotide
  Antisense strand to SEQ ID NO: 977482
uguauccuaguauaacaac

SEQ ID NO: 977484 - RNA, 19 nt, Artificial Sequence
  Description of Artificial Sequence: Synthetic oligonucleotide
  Sense strand starting at position 477 of SEQ ID NO: 914092
augagugucuuauccaaac

SEQ ID NO: 977485 - RNA, 19 nt, Artificial Sequence
  Description of Artificial Sequence: Synthetic oligonucleotide
  Antisense strand to SEQ ID NO: 977484
guuuggauaagacacucau

SEQ ID NO: 977486 - RNA, 19 nt, Artificial Sequence
  Description of Artificial Sequence: Synthetic oligonucleotide
  Sense strand starting at position 2625 of SEQ ID NO: 914092
cuaggcagaucuguacaau

SEQ ID NO: 977487 - RNA, 19 nt, Artificial Sequence
  Description of Artificial Sequence: Synthetic oligonucleotide
  Antisense strand to SEQ ID NO: 977486
auuguacagaucugccuag

SEQ ID NO: 977488 - RNA, 19 nt, Artificial Sequence
  Description of Artificial Sequence: Synthetic oligonucleotide
  Sense strand starting at position 2616 of SEQ ID NO: 914092
gcuauaaaucuaggcagau

SEQ ID NO: 977489 - RNA, 19 nt, Artificial Sequence
  Description of Artificial Sequence: Synthetic oligonucleotide
  Antisense strand to SEQ ID NO: 977488
aucugccuagauuuauagc

SEQ ID NO: 977490 - RNA, 19 nt, Artificial Sequence
  Description of Artificial Sequence: Synthetic oligonucleotide
  Sense strand starting at position 2752 of SEQ ID NO: 914092
cuugucagucuugggagaa

SEQ ID NO: 977491 - RNA, 19 nt, Artificial Sequence
  Description of Artificial Sequence: Synthetic oligonucleotide
  Antisense strand to SEQ ID NO: 977490
uucucccaagacugacaag

SEQ ID NO: 977492 - RNA, 19 nt, Artificial Sequence
  Description of Artificial Sequence: Synthetic oligonucleotide
  Sense strand starting at position 470 of SEQ ID NO: 914092
auaacuuaugagugucuua

SEQ ID NO: 977493 - RNA, 19 nt, Artificial Sequence
  Description of Artificial Sequence: Synthetic oligonucleotide
  Antisense strand to SEQ ID NO: 977492
uaagacacucauaaguuau

SEQ ID NO: 977494 - RNA, 19 nt, Artificial Sequence
  Description of Artificial Sequence: Synthetic oligonucleotide
  Sense strand starting at position 469 of SEQ ID NO: 914092
gauaacuuaugagugucuu

SEQ ID NO: 977495 - RNA, 19 nt, Artificial Sequence
  Description of Artificial Sequence: Synthetic oligonucleotide
  Antisense strand to SEQ ID NO: 977494
aagacacucauaaguuauc

SEQ ID NO: 977496 - RNA, 19 nt, Artificial Sequence
  Description of Artificial Sequence: Synthetic oligonucleotide
  Sense strand starting at position 274 of SEQ ID NO: 914092
cauggucuguccuuagaga

SEQ ID NO: 977497 - RNA, 19 nt, Artificial Sequence
  Description of Artificial Sequence: Synthetic oligonucleotide
  Antisense strand to SEQ ID NO: 977496
ucucuaaggacagaccaug

SEQ ID NO: 977498 - RNA, 19 nt, Artificial Sequence
  Description of Artificial Sequence: Synthetic oligonucleotide
  Sense strand starting at position 323 of SEQ ID NO: 914092
ggcaucuacuuugugaaua

SEQ ID NO: 977499 - RNA, 19 nt, Artificial Sequence
  Description of Artificial Sequence: Synthetic oligonucleotide
  Antisense strand to SEQ ID NO: 977498
uauucacaaaguagaugcc

SEQ ID NO: 977500 - RNA, 19 nt, Artificial Sequence
  Description of Artificial Sequence: Synthetic oligonucleotide
  Sense strand starting at position 345 of SEQ ID NO: 914092
auugucugucucugaaaua

SEQ ID NO: 977501 - RNA, 19 nt, Artificial Sequence
  Description of Artificial Sequence: Synthetic oligonucleotide
  Antisense strand to SEQ ID NO: 977500
uauuucagagacagacaau

SEQ ID NO: 977502 - RNA, 19 nt, Artificial Sequence
  Description of Artificial Sequence: Synthetic oligonucleotide
  Sense strand starting at position 2576 of SEQ ID NO: 914092
augauuaauuccgucggga

SEQ ID NO: 977503 - RNA, 19 nt, Artificial Sequence
  Description of Artificial Sequence: Synthetic oligonucleotide
  Antisense strand to SEQ ID NO: 977502
ucccgacggaauuaaucau

SEQ ID NO: 977504 - RNA, 19 nt, Artificial Sequence
  Description of Artificial Sequence: Synthetic oligonucleotide
  Sense strand starting at position 2454 of SEQ ID NO: 914092
guuaucgcucuccauagga

SEQ ID NO: 977505 - RNA, 19 nt, Artificial Sequence
  Description of Artificial Sequence: Synthetic oligonucleotide
  Antisense strand to SEQ ID NO: 977504
uccuauggagagcgauaac

SEQ ID NO: 977506 - RNA, 19 nt, Artificial Sequence
  Description of Artificial Sequence: Synthetic oligonucleotide
  Sense strand starting at position 3808 of SEQ ID NO: 914092
uccuguuuguaauucuaaa

SEQ ID NO: 977507 - RNA, 19 nt, Artificial Sequence
  Description of Artificial Sequence: Synthetic oligonucleotide
  Antisense strand to SEQ ID NO: 977506
uuuagaauuacaaacagga

SEQ ID NO: 977508 - RNA, 19 nt, Artificial Sequence
  Description of Artificial Sequence: Synthetic oligonucleotide
  Sense strand starting at position 2578 of SEQ ID NO: 914092
gauuaauuccgucgggaac

SEQ ID NO: 977509 - RNA, 19 nt, Artificial Sequence
  Description of Artificial Sequence: Synthetic oligonucleotide
  Antisense strand to SEQ ID NO: 977508
guucccgacggaauuaauc

SEQ ID NO: 977510 - RNA, 19 nt, Artificial Sequence
  Description of Artificial Sequence: Synthetic oligonucleotide
  Sense strand starting at position 3803 of SEQ ID NO: 914092
auacauccuguuuguaauu

SEQ ID NO: 977511 - RNA, 19 nt, Artificial Sequence
  Description of Artificial Sequence: Synthetic oligonucleotide
  Antisense strand to SEQ ID NO: 977510
aauuacaaacaggauguau

SEQ ID NO: 977512 - RNA, 19 nt, Artificial Sequence
  Description of Artificial Sequence: Synthetic oligonucleotide
  Sense strand starting at position 234 of SEQ ID NO: 914092
ucuguuaugcuccaaaguu

SEQ ID NO: 977513 - RNA, 19 nt, Artificial Sequence
  Description of Artificial Sequence: Synthetic oligonucleotide
  Antisense strand to SEQ ID NO: 977512
aacuuuggagcauaacaga

SEQ ID NO: 977514 - RNA, 19 nt, Artificial Sequence
  Description of Artificial Sequence: Synthetic oligonucleotide
  Sense strand starting at position 322 of SEQ ID NO: 914092
uggcaucuacuuugugaau

SEQ ID NO: 977515 - RNA, 19 nt, Artificial Sequence
  Description of Artificial Sequence: Synthetic oligonucleotide
  Antisense strand to SEQ ID NO: 977514
auucacaaaguagaugcca

SEQ ID NO: 977516 - RNA, 19 nt, Artificial Sequence
  Description of Artificial Sequence: Synthetic oligonucleotide
  Sense strand starting at position 2579 of SEQ ID NO: 914092
auuaauuccgucgggaacu

SEQ ID NO: 977517 - RNA, 19 nt, Artificial Sequence
  Description of Artificial Sequence: Synthetic oligonucleotide
  Antisense strand to SEQ ID NO: 977516
aguucccgacggaauuaau

SEQ ID NO: 977518 - RNA, 19 nt, Artificial Sequence
  Description of Artificial Sequence: Synthetic oligonucleotide
  Sense strand starting at position 2339 of SEQ ID NO: 914092
acgugauuccgcgcuguuu

SEQ ID NO: 977519 - RNA, 19 nt, Artificial Sequence
  Description of Artificial Sequence: Synthetic oligonucleotide
  Antisense strand to SEQ ID NO: 977518
aaacagcgcggaaucacgu

SEQ ID NO: 977520 - RNA, 19 nt, Artificial Sequence
  Description of Artificial Sequence: Synthetic oligonucleotide
  Sense strand starting at position 2340 of SEQ ID NO: 914092
cgugauuccgcgcuguuua

SEQ ID NO: 977521 - RNA, 19 nt, Artificial Sequence
  Description of Artificial Sequence: Synthetic oligonucleotide
  Antisense strand to SEQ ID NO: 977520
uaaacagcgcggaaucacg

SEQ ID NO: 977522 - RNA, 19 nt, Artificial Sequence
  Description of Artificial Sequence: Synthetic oligonucleotide
  Sense strand starting at position 2652 of SEQ ID NO: 914092
agauuuagguaaggcugaa

SEQ ID NO: 977523 - RNA, 19 nt, Artificial Sequence
  Description of Artificial Sequence: Synthetic oligonucleotide
  Antisense strand to SEQ ID NO: 977522
uucagccuuaccuaaaucu

SEQ ID NO: 977524 - RNA, 19 nt, Artificial Sequence
  Description of Artificial Sequence: Synthetic oligonucleotide
  Sense strand starting at position 320 of SEQ ID NO: 914092
ccuggcaucuacuuuguga

SEQ ID NO: 977525 - RNA, 19 nt, Artificial Sequence
  Description of Artificial Sequence: Synthetic oligonucleotide
  Antisense strand to SEQ ID NO: 977524
ucacaaaguagaugccagg

SEQ ID NO: 977526 - RNA, 19 nt, Artificial Sequence
  Description of Artificial Sequence: Synthetic oligonucleotide
  Sense strand starting at position 1167 of SEQ ID NO: 914093
aauauuuaucggugcauua

SEQ ID NO: 977527 - RNA, 19 nt, Artificial Sequence
  Description of Artificial Sequence: Synthetic oligonucleotide
  Antisense strand to SEQ ID NO: 977526
uaaugcaccgauaaauauu

SEQ ID NO: 977528 - RNA, 19 nt, Artificial Sequence
  Description of Artificial Sequence: Synthetic oligonucleotide
  Sense strand starting at position 3358 of SEQ ID NO: 914093
accuguauagauggaaacu

SEQ ID NO: 977529 - RNA, 19 nt, Artificial Sequence
  Description of Artificial Sequence: Synthetic oligonucleotide
  Antisense strand to SEQ ID NO: 977528
aguuuccaucuauacaggu

SEQ ID NO: 977530 - RNA, 19 nt, Artificial Sequence
  Description of Artificial Sequence: Synthetic oligonucleotide
  Sense strand starting at position 1161 of SEQ ID NO: 914093
cgcuuaaauauuuaucggu

SEQ ID NO: 977531 - RNA, 19 nt, Artificial Sequence
  Description of Artificial Sequence: Synthetic oligonucleotide
  Antisense strand to SEQ ID NO: 977530
accgauaaauauuuaagcg

SEQ ID NO: 977532 - RNA, 19 nt, Artificial Sequence
  Description of Artificial Sequence: Synthetic oligonucleotide
  Sense strand starting at position 3856 of SEQ ID NO: 914093
ugcgguguugcuccagaca

SEQ ID NO: 977533 - RNA, 19 nt, Artificial Sequence
  Description of Artificial Sequence: Synthetic oligonucleotide
  Antisense strand to SEQ ID NO: 977532
ugucuggagcaacaccgca

SEQ ID NO: 977534 - RNA, 19 nt, Artificial Sequence
  Description of Artificial Sequence: Synthetic oligonucleotide
  Sense strand starting at position 1152 of SEQ ID NO: 914093
ucgcccagucgcuuaaaua

SEQ ID NO: 977535 - RNA, 19 nt, Artificial Sequence
  Description of Artificial Sequence: Synthetic oligonucleotide
  Antisense strand to SEQ ID NO: 977534
uauuuaagcgacugggcga

SEQ ID NO: 977536 - RNA, 19 nt, Artificial Sequence
  Description of Artificial Sequence: Synthetic oligonucleotide
  Sense strand starting at position 2615 of SEQ ID NO: 914093
gggaacaacguccaaguua

SEQ ID NO: 977537 - RNA, 19 nt, Artificial Sequence
  Description of Artificial Sequence: Synthetic oligonucleotide
  Antisense strand to SEQ ID NO: 977536
uaacuuggacguuguuccc

SEQ ID NO: 977538 - RNA, 19 nt, Artificial Sequence
  Description of Artificial Sequence: Synthetic oligonucleotide
  Sense strand starting at position 1087 of SEQ ID NO: 914093
cgaucuuuacuugaacuau

SEQ ID NO: 977539 - RNA, 19 nt, Artificial Sequence
  Description of Artificial Sequence: Synthetic oligonucleotide
  Antisense strand to SEQ ID NO: 977538
auaguucaaguaaagaucg

SEQ ID NO: 977540 - RNA, 19 nt, Artificial Sequence
  Description of Artificial Sequence: Synthetic oligonucleotide
  Sense strand starting at position 2251 of SEQ ID NO: 914093
uuaauaagcucaccagaug

SEQ ID NO: 977541 - RNA, 19 nt, Artificial Sequence
  Description of Artificial Sequence: Synthetic oligonucleotide
  Antisense strand to SEQ ID NO: 977540
caucuggugagcuuauuaa

SEQ ID NO: 977542 - RNA, 19 nt, Artificial Sequence
  Description of Artificial Sequence: Synthetic oligonucleotide
  Sense strand starting at position 250 of SEQ ID NO: 914093
cugacagacuuggaaauuu

SEQ ID NO: 977543 - RNA, 19 nt, Artificial Sequence
  Description of Artificial Sequence: Synthetic oligonucleotide
  Antisense strand to SEQ ID NO: 977542
aaauuuccaagucugucag

SEQ ID NO: 977544 - RNA, 19 nt, Artificial Sequence
  Description of Artificial Sequence: Synthetic oligonucleotide
  Sense strand starting at position 384 of SEQ ID NO: 914093
aagcaaugguaccuacaga

SEQ ID NO: 977545 - RNA, 19 nt, Artificial Sequence
  Description of Artificial Sequence: Synthetic oligonucleotide
  Antisense strand to SEQ ID NO: 977544
ucuguagguaccauugcuu

SEQ ID NO: 977546 - RNA, 19 nt, Artificial Sequence
  Description of Artificial Sequence: Synthetic oligonucleotide
  Sense strand starting at position 2627 of SEQ ID NO: 914093
caaguuagucuagaauggu

SEQ ID NO: 977547 - RNA, 19 nt, Artificial Sequence
  Description of Artificial Sequence: Synthetic oligonucleotide
  Antisense strand to SEQ ID NO: 977546
accauucuagacuaacuug

SEQ ID NO: 977548 - RNA, 19 nt, Artificial Sequence
  Description of Artificial Sequence: Synthetic oligonucleotide
  Sense strand starting at position 494 of SEQ ID NO: 914093
aguacaauugucuacccau

SEQ ID NO: 977549 - RNA, 19 nt, Artificial Sequence
  Description of Artificial Sequence: Synthetic oligonucleotide
  Antisense strand to SEQ ID NO: 977548
auggguagacaauuguacu

SEQ ID NO: 977550 - RNA, 19 nt, Artificial Sequence
  Description of Artificial Sequence: Synthetic oligonucleotide
  Sense strand starting at position 931 of SEQ ID NO: 914093
cugaauucggcucaauaau

SEQ ID NO: 977551 - RNA, 19 nt, Artificial Sequence
  Description of Artificial Sequence: Synthetic oligonucleotide
  Antisense strand to SEQ ID NO: 977550
auuauugagccgaauucag

SEQ ID NO: 977552 - RNA, 19 nt, Artificial Sequence
  Description of Artificial Sequence: Synthetic oligonucleotide
  Sense strand starting at position 3509 of SEQ ID NO: 914093
uagagaacuucuguuauug

SEQ ID NO: 977553 - RNA, 19 nt, Artificial Sequence
  Description of Artificial Sequence: Synthetic oligonucleotide
  Antisense strand to SEQ ID NO: 977552
caauaacagaaguucucua

SEQ ID NO: 977554 - RNA, 19 nt, Artificial Sequence
  Description of Artificial Sequence: Synthetic oligonucleotide
  Sense strand starting at position 1303 of SEQ ID NO: 914093
gaugguuuauaagcaaaug

SEQ ID NO: 977555 - RNA, 19 nt, Artificial Sequence
  Description of Artificial Sequence: Synthetic oligonucleotide
  Antisense strand to SEQ ID NO: 977554
cauuugcuuauaaaccauc

SEQ ID NO: 977556 - RNA, 19 nt, Artificial Sequence
  Description of Artificial Sequence: Synthetic oligonucleotide
  Sense strand starting at position 2861 of SEQ ID NO: 914093
gcaauaaaggccugagaca

SEQ ID NO: 977557 - RNA, 19 nt, Artificial Sequence
  Description of Artificial Sequence: Synthetic oligonucleotide
  Antisense strand to SEQ ID NO: 977556
ugucucaggccuuuauugc

SEQ ID NO: 977558 - RNA, 19 nt, Artificial Sequence
  Description of Artificial Sequence: Synthetic oligonucleotide
  Sense strand starting at position 3340 of SEQ ID NO: 914093
cuugcagugagucagauaa

SEQ ID NO: 977559 - RNA, 19 nt, Artificial Sequence
  Description of Artificial Sequence: Synthetic oligonucleotide
  Antisense strand to SEQ ID NO: 977558
uuaucugacucacugcaag

SEQ ID NO: 977560 - RNA, 19 nt, Artificial Sequence
  Description of Artificial Sequence: Synthetic oligonucleotide
  Sense strand starting at position 3347 of SEQ ID NO: 914093
ugagucagauaaccuguau

SEQ ID NO: 977561 - RNA, 19 nt, Artificial Sequence
  Description of Artificial Sequence: Synthetic oligonucleotide
  Antisense strand to SEQ ID NO: 977560
auacagguuaucugacuca

SEQ ID NO: 977562 - RNA, 19 nt, Artificial Sequence
  Description of Artificial Sequence: Synthetic oligonucleotide
  Sense strand starting at position 2476 of SEQ ID NO: 914093
ugauacaagccuuaguagu

SEQ ID NO: 977563 - RNA, 19 nt, Artificial Sequence
  Description of Artificial Sequence: Synthetic oligonucleotide
  Antisense strand to SEQ ID NO: 977562
acuacuaaggcuuguauca

SEQ ID NO: 977564 - RNA, 19 nt, Artificial Sequence
  Description of Artificial Sequence: Synthetic oligonucleotide
  Sense strand starting at position 1084 of SEQ ID NO: 914093
cuacgaucuuuacuugaac

SEQ ID NO: 977565 - RNA, 19 nt, Artificial Sequence
  Description of Artificial Sequence: Synthetic oligonucleotide
  Antisense strand to SEQ ID NO: 977564
guucaaguaaagaucguag

SEQ ID NO: 977566 - RNA, 19 nt, Artificial Sequence
  Description of Artificial Sequence: Synthetic oligonucleotide
  Sense strand starting at position 2630 of SEQ ID NO: 914093
guuagucuagaaugguaaa

SEQ ID NO: 977567 - RNA, 19 nt, Artificial Sequence
  Description of Artificial Sequence: Synthetic oligonucleotide
  Antisense strand to SEQ ID NO: 977566
uuuaccauucuagacuaac

SEQ ID NO: 977568 - RNA, 19 nt, Artificial Sequence
  Description of Artificial Sequence: Synthetic oligonucleotide
  Sense strand starting at position 2007 of SEQ ID NO: 914093
gaagucucgcgagaaauac

SEQ ID NO: 977569 - RNA, 19 nt, Artificial Sequence
  Description of Artificial Sequence: Synthetic oligonucleotide
  Antisense strand to SEQ ID NO: 977568
guauuucucgcgagacuuc

SEQ ID NO: 977570 - RNA, 19 nt, Artificial Sequence
  Description of Artificial Sequence: Synthetic oligonucleotide
  Sense strand starting at position 2906 of SEQ ID NO: 914093
caaccuuuccugggagguu

SEQ ID NO: 977571 - RNA, 19 nt, Artificial Sequence
  Description of Artificial Sequence: Synthetic oligonucleotide
  Antisense strand to SEQ ID NO: 977570
aaccucccaggaaagguug

SEQ ID NO: 977572 - RNA, 19 nt, Artificial Sequence
  Description of Artificial Sequence: Synthetic oligonucleotide
  Sense strand starting at position 968 of SEQ ID NO: 914093
aagcacuacucuguuggaa

SEQ ID NO: 977573 - RNA, 19 nt, Artificial Sequence
  Description of Artificial Sequence: Synthetic oligonucleotide
  Antisense strand to SEQ ID NO: 977572
uuccaacagaguagugcuu

SEQ ID NO: 977574 - RNA, 19 nt, Artificial Sequence
  Description of Artificial Sequence: Synthetic oligonucleotide
  Sense strand starting at position 3783 of SEQ ID NO: 914093
gaaauaacaguuuguaugu

SEQ ID NO: 977575 - RNA, 19 nt, Artificial Sequence
  Description of Artificial Sequence: Synthetic oligonucleotide
  Antisense strand to SEQ ID NO: 977574
acauacaaacuguuauuuc

SEQ ID NO: 977576 - RNA, 19 nt, Artificial Sequence
  Description of Artificial Sequence: Synthetic oligonucleotide
  Sense strand starting at position 2182 of SEQ ID NO: 914093
cuuggaauuuauuggaaau

SEQ ID NO: 977577 - RNA, 19 nt, Artificial Sequence
  Description of Artificial Sequence: Synthetic oligonucleotide
  Antisense strand to SEQ ID NO: 977576
auuuccaauaaauuccaag

SEQ ID NO: 977578 - RNA, 19 nt, Artificial Sequence
  Description of Artificial Sequence: Synthetic oligonucleotide
  Sense strand starting at position 2478 of SEQ ID NO: 914093
auacaagccuuaguaguaa

SEQ ID NO: 977579 - RNA, 19 nt, Artificial Sequence
  Description of Artificial Sequence: Synthetic oligonucleotide
  Antisense strand to SEQ ID NO: 977578
uuacuacuaaggcuuguau

SEQ ID NO: 977580 - RNA, 19 nt, Artificial Sequence
  Description of Artificial Sequence: Synthetic oligonucleotide
  Sense strand starting at position 777 of SEQ ID NO: 914093
ccuuuacucucaguuuaga

SEQ ID NO: 977581 - RNA, 19 nt, Artificial Sequence
  Description of Artificial Sequence: Synthetic oligonucleotide
  Antisense strand to SEQ ID NO: 977580
ucuaaacugagaguaaagg

SEQ ID NO: 977582 - RNA, 19 nt, Artificial Sequence
  Description of Artificial Sequence: Synthetic oligonucleotide
  Sense strand starting at position 1465 of SEQ ID NO: 914093
aucauucggacguggaaau

SEQ ID NO: 977583 - RNA, 19 nt, Artificial Sequence
  Description of Artificial Sequence: Synthetic oligonucleotide
  Antisense strand to SEQ ID NO: 977582
auuuccacguccgaaugau

SEQ ID NO: 977584 - RNA, 19 nt, Artificial Sequence
  Description of Artificial Sequence: Synthetic oligonucleotide
  Sense strand starting at position 941 of SEQ ID NO: 914093
cucaauaaucaguguuauc

SEQ ID NO: 977585 - RNA, 19 nt, Artificial Sequence
  Description of Artificial Sequence: Synthetic oligonucleotide
  Antisense strand to SEQ ID NO: 977584
gauaacacugauuauugag

SEQ ID NO: 977586 - RNA, 19 nt, Artificial Sequence
  Description of Artificial Sequence: Synthetic oligonucleotide
  Sense strand starting at position 2715 of SEQ ID NO: 914093
auacgcuuucuggacggau

SEQ ID NO: 977587 - RNA, 19 nt, Artificial Sequence
  Description of Artificial Sequence: Synthetic oligonucleotide
  Antisense strand to SEQ ID NO: 977586
auccguccagaaagcguau

SEQ ID NO: 977588 - RNA, 19 nt, Artificial Sequence
  Description of Artificial Sequence: Synthetic oligonucleotide
  Sense strand starting at position 706 of SEQ ID NO: 914093
cccugucugccugaauuac

SEQ ID NO: 977589 - RNA, 19 nt, Artificial Sequence
  Description of Artificial Sequence: Synthetic oligonucleotide
  Antisense strand to SEQ ID NO: 977588
guaauucaggcagacaggg

SEQ ID NO: 977590 - RNA, 19 nt, Artificial Sequence
  Description of Artificial Sequence: Synthetic oligonucleotide
  Sense strand starting at position 2158 of SEQ ID NO: 914093
cagguuaucuuccuggagu

SEQ ID NO: 977591 - RNA, 19 nt, Artificial Sequence
  Description of Artificial Sequence: Synthetic oligonucleotide
  Antisense strand to SEQ ID NO: 977590
acuccaggaagauaaccug

SEQ ID NO: 977592 - RNA, 19 nt, Artificial Sequence
  Description of Artificial Sequence: Synthetic oligonucleotide
  Sense strand starting at position 1642 of SEQ ID NO: 914093
cucagcucuggcugagaga

SEQ ID NO: 977593 - RNA, 19 nt, Artificial Sequence
  Description of Artificial Sequence: Synthetic oligonucleotide
  Antisense strand to SEQ ID NO: 977592
ucucucagccagagcugag

SEQ ID NO: 977594 - RNA, 19 nt, Artificial Sequence
  Description of Artificial Sequence: Synthetic oligonucleotide
  Sense strand starting at position 1452 of SEQ ID NO: 914093
ccgccacaacucgaucauu

SEQ ID NO: 977595 - RNA, 19 nt, Artificial Sequence
  Description of Artificial Sequence: Synthetic oligonucleotide
  Antisense strand to SEQ ID NO: 977594
aaugaucgaguuguggcgg

SEQ ID NO: 977596 - RNA, 19 nt, Artificial Sequence
  Description of Artificial Sequence: Synthetic oligonucleotide
  Sense strand starting at position 217 of SEQ ID NO: 914093
ugugaaguuacauguaccu

SEQ ID NO: 977597 - RNA, 19 nt, Artificial Sequence
  Description of Artificial Sequence: Synthetic oligonucleotide
  Antisense strand to SEQ ID NO: 977596
agguacauguaacuucaca

SEQ ID NO: 977598 - RNA, 19 nt, Artificial Sequence
  Description of Artificial Sequence: Synthetic oligonucleotide
  Sense strand starting at position 940 of SEQ ID NO: 914093
gcucaauaaucaguguuau

SEQ ID NO: 977599 - RNA, 19 nt, Artificial Sequence
  Description of Artificial Sequence: Synthetic oligonucleotide
  Antisense strand to SEQ ID NO: 977598
auaacacugauuauugagc

SEQ ID NO: 977600 - RNA, 19 nt, Artificial Sequence
  Description of Artificial Sequence: Synthetic oligonucleotide
  Sense strand starting at position 1842 of SEQ ID NO: 914093
aaaugagcccagugguagu

SEQ ID NO: 977601 - RNA, 19 nt, Artificial Sequence
  Description of Artificial Sequence: Synthetic oligonucleotide
  Antisense strand to SEQ ID NO: 977600
acuaccacugggcucauuu

SEQ ID NO: 977602 - RNA, 19 nt, Artificial Sequence
  Description of Artificial Sequence: Synthetic oligonucleotide
  Sense strand starting at position 2160 of SEQ ID NO: 914093
gguuaucuuccuggaguuc

SEQ ID NO: 977603 - RNA, 19 nt, Artificial Sequence
  Description of Artificial Sequence: Synthetic oligonucleotide
  Antisense strand to SEQ ID NO: 977602
gaacuccaggaagauaacc

SEQ ID NO: 977604 - RNA, 19 nt, Artificial Sequence
  Description of Artificial Sequence: Synthetic oligonucleotide
  Sense strand starting at position 1336 of SEQ ID NO: 914093
ggacccuucuccuucguaa

SEQ ID NO: 977605 - RNA, 19 nt, Artificial Sequence
  Description of Artificial Sequence: Synthetic oligonucleotide
  Antisense strand to SEQ ID NO: 977604
uuacgaaggagaagggucc

SEQ ID NO: 977606 - RNA, 19 nt, Artificial Sequence
  Description of Artificial Sequence: Synthetic oligonucleotide
  Sense strand starting at position 154 of SEQ ID NO: 914094
acuuuccuugucuaugaga

SEQ ID NO: 977607 - RNA, 19 nt, Artificial Sequence
  Description of Artificial Sequence: Synthetic oligonucleotide
  Antisense strand to SEQ ID NO: 977606
ucucauagacaaggaaagu

SEQ ID NO: 977608 - RNA, 19 nt, Artificial Sequence
  Description of Artificial Sequence: Synthetic oligonucleotide
  Sense strand starting at position 3251 of SEQ ID NO: 914094
ugugaaaugggcuaauagu

SEQ ID NO: 977609 - RNA, 19 nt, Artificial Sequence
  Description of Artificial Sequence: Synthetic oligonucleotide
  Antisense strand to SEQ ID NO: 977608
acuauuagcccauuucaca

SEQ ID NO: 977610 - RNA, 19 nt, Artificial Sequence
  Description of Artificial Sequence: Synthetic oligonucleotide
  Sense strand starting at position 3333 of SEQ ID NO: 914094
cuaagaauugcagggaguu

SEQ ID NO: 977611 - RNA, 19 nt, Artificial Sequence
  Description of Artificial Sequence: Synthetic oligonucleotide
  Antisense strand to SEQ ID NO: 977610
aacucccugcaauucuuag

SEQ ID NO: 977612 - RNA, 19 nt, Artificial Sequence
  Description of Artificial Sequence: Synthetic oligonucleotide
  Sense strand starting at position 3936 of SEQ ID NO: 914094
aggagcaggaucugaguuu

SEQ ID NO: 977613 - RNA, 19 nt, Artificial Sequence
  Description of Artificial Sequence: Synthetic oligonucleotide
  Antisense strand to SEQ ID NO: 977612
aaacucagauccugcuccu

SEQ ID NO: 977614 - RNA, 19 nt, Artificial Sequence
  Description of Artificial Sequence: Synthetic oligonucleotide
  Sense strand starting at position 3241 of SEQ ID NO: 914094
gggucccaucugugaaaug

SEQ ID NO: 977615 - RNA, 19 nt, Artificial Sequence
  Description of Artificial Sequence: Synthetic oligonucleotide
  Antisense strand to SEQ ID NO: 977614
cauuucacagaugggaccc

SEQ ID NO: 977616 - RNA, 19 nt, Artificial Sequence
  Description of Artificial Sequence: Synthetic oligonucleotide
  Sense strand starting at position 3695 of SEQ ID NO: 914094
ccaacauucuauguguaca

SEQ ID NO: 977617 - RNA, 19 nt, Artificial Sequence
  Description of Artificial Sequence: Synthetic oligonucleotide
  Antisense strand to SEQ ID NO: 977616
uguacacauagaauguugg

SEQ ID NO: 977618 - RNA, 19 nt, Artificial Sequence
  Description of Artificial Sequence: Synthetic oligonucleotide
  Sense strand starting at position 3246 of SEQ ID NO: 914094
ccaucugugaaaugggcua

SEQ ID NO: 977619 - RNA, 19 nt, Artificial Sequence
  Description of Artificial Sequence: Synthetic oligonucleotide
  Antisense strand to SEQ ID NO: 977618
uagcccauuucacagaugg

SEQ ID NO: 977620 - RNA, 19 nt, Artificial Sequence
  Description of Artificial Sequence: Synthetic oligonucleotide
  Sense strand starting at position 1639 of SEQ ID NO: 914094
guaaggucuggcgaaggua

SEQ ID NO: 977621 - RNA, 19 nt, Artificial Sequence
  Description of Artificial Sequence: Synthetic oligonucleotide
  Antisense strand to SEQ ID NO: 977620
uaccuucgccagaccuuac

SEQ ID NO: 977622 - RNA, 19 nt, Artificial Sequence
  Description of Artificial Sequence: Synthetic oligonucleotide
  Sense strand starting at position 152 of SEQ ID NO: 914094
ucacuuuccuugucuauga

SEQ ID NO: 977623 - RNA, 19 nt, Artificial Sequence
  Description of Artificial Sequence: Synthetic oligonucleotide
  Antisense strand to SEQ ID NO: 977622
ucauagacaaggaaaguga

SEQ ID NO: 977624 - RNA, 19 nt, Artificial Sequence
  Description of Artificial Sequence: Synthetic oligonucleotide
  Sense strand starting at position 1635 of SEQ ID NO: 914094
gggaguaaggucuggcgaa

SEQ ID NO: 977625 - RNA, 19 nt, Artificial Sequence
  Description of Artificial Sequence: Synthetic oligonucleotide
  Antisense strand to SEQ ID NO: 977624
uucgccagaccuuacuccc

SEQ ID NO: 977626 - RNA, 19 nt, Artificial Sequence
  Description of Artificial Sequence: Synthetic oligonucleotide
  Sense strand starting at position 3343 of SEQ ID NO: 914094
cagggaguucccugucgga

SEQ ID NO: 977627 - RNA, 19 nt, Artificial Sequence
  Description of Artificial Sequence: Synthetic oligonucleotide
  Antisense strand to SEQ ID NO: 977626
uccgacagggaacucccug

SEQ ID NO: 977628 - RNA, 19 nt, Artificial Sequence
  Description of Artificial Sequence: Synthetic oligonucleotide
  Sense strand starting at position 2873 of SEQ ID NO: 914094
cuuuguuguccucguauuu

SEQ ID NO: 977629 - RNA, 19 nt, Artificial Sequence
  Description of Artificial Sequence: Synthetic oligonucleotide
  Antisense strand to SEQ ID NO: 977628
aaauacgaggacaacaaag

SEQ ID NO: 977630 - RNA, 19 nt, Artificial Sequence
  Description of Artificial Sequence: Synthetic oligonucleotide
  Sense strand starting at position 1218 of SEQ ID NO: 914094
gagucauuggcuugaccuc

SEQ ID NO: 977631 - RNA, 19 nt, Artificial Sequence
  Description of Artificial Sequence: Synthetic oligonucleotide
  Antisense strand to SEQ ID NO: 977630
gaggucaagccaaugacuc

SEQ ID NO: 977632 - RNA, 19 nt, Artificial Sequence
  Description of Artificial Sequence: Synthetic oligonucleotide
  Sense strand starting at position 1212 of SEQ ID NO: 914094
agagcugagucauuggcuu

SEQ ID NO: 977633 - RNA, 19 nt, Artificial Sequence
  Description of Artificial Sequence: Synthetic oligonucleotide
  Antisense strand to SEQ ID NO: 977632
aagccaaugacucagcucu

SEQ ID NO: 977634 - RNA, 19 nt, Artificial Sequence
  Description of Artificial Sequence: Synthetic oligonucleotide
  Sense strand starting at position 1214 of SEQ ID NO: 914094
agcugagucauuggcuuga

SEQ ID NO: 977635 - RNA, 19 nt, Artificial Sequence
  Description of Artificial Sequence: Synthetic oligonucleotide
  Antisense strand to SEQ ID NO: 977634
ucaagccaaugacucagcu

SEQ ID NO: 977636 - RNA, 19 nt, Artificial Sequence
  Description of Artificial Sequence: Synthetic oligonucleotide
  Sense strand starting at position 1050 of SEQ ID NO: 914094
uccugcugugucuggaaga

SEQ ID NO: 977637 - RNA, 19 nt, Artificial Sequence
  Description of Artificial Sequence: Synthetic oligonucleotide
  Antisense strand to SEQ ID NO: 977636
ucuuccagacacagcagga

SEQ ID NO: 977638 - RNA, 19 nt, Artificial Sequence
  Description of Artificial Sequence: Synthetic oligonucleotide
  Sense strand starting at position 3969 of SEQ ID NO: 914094
uagugaacucucugcagca

SEQ ID NO: 977639 - RNA, 19 nt, Artificial Sequence
  Description of Artificial Sequence: Synthetic oligonucleotide
  Antisense strand to SEQ ID NO: 977638
ugcugcagagaguucacua

SEQ ID NO: 977640 - RNA, 19 nt, Artificial Sequence
  Description of Artificial Sequence: Synthetic oligonucleotide
  Sense strand starting at position 149 of SEQ ID NO: 914094
gccucacuuuccuugucua

SEQ ID NO: 977641 - RNA, 19 nt, Artificial Sequence
  Description of Artificial Sequence: Synthetic oligonucleotide
  Antisense strand to SEQ ID NO: 977640
uagacaaggaaagugaggc

SEQ ID NO: 977642 - RNA, 19 nt, Artificial Sequence
  Description of Artificial Sequence: Synthetic oligonucleotide
  Sense strand starting at position 3738 of SEQ ID NO: 914094
agguguugggccuguaagu

SEQ ID NO: 977643 - RNA, 19 nt, Artificial Sequence
  Description of Artificial Sequence: Synthetic oligonucleotide
  Antisense strand to SEQ ID NO: 977642
acuuacaggcccaacaccu

SEQ ID NO: 977644 - RNA, 19 nt, Artificial Sequence
  Description of Artificial Sequence: Synthetic oligonucleotide
  Sense strand starting at position 2986 of SEQ ID NO: 914094
ccaagaugauccugagcuu

SEQ ID NO: 977645 - RNA, 19 nt, Artificial Sequence
  Description of Artificial Sequence: Synthetic oligonucleotide
  Antisense strand to SEQ ID NO: 977644
aagcucaggaucaucuugg

SEQ ID NO: 977646 - RNA, 19 nt, Artificial Sequence
  Description of Artificial Sequence: Synthetic oligonucleotide
  Sense strand starting at position 3313 of SEQ ID NO: 914094
cuggguguuucaggaucca

SEQ ID NO: 977647 - RNA, 19 nt, Artificial Sequence
  Description of Artificial Sequence: Synthetic oligonucleotide
  Antisense strand to SEQ ID NO: 977646
uggauccugaaacacccag

SEQ ID NO: 977648 - RNA, 19 nt, Artificial Sequence
  Description of Artificial Sequence: Synthetic oligonucleotide
  Sense strand starting at position 1636 of SEQ ID NO: 914094
ggaguaaggucuggcgaag

SEQ ID NO: 977649 - RNA, 19 nt, Artificial Sequence
  Description of Artificial Sequence: Synthetic oligonucleotide
  Antisense strand to SEQ ID NO: 977648
cuucgccagaccuuacucc

SEQ ID NO: 977650 - RNA, 19 nt, Artificial Sequence
  Description of Artificial Sequence: Synthetic oligonucleotide
  Sense strand starting at position 1051 of SEQ ID NO: 914094
ccugcugugucuggaagaa

SEQ ID NO: 977651 - RNA, 19 nt, Artificial Sequence
  Description of Artificial Sequence: Synthetic oligonucleotide
  Antisense strand to SEQ ID NO: 977650
uucuuccagacacagcagg

SEQ ID NO: 977652 - RNA, 19 nt, Artificial Sequence
  Description of Artificial Sequence: Synthetic oligonucleotide
  Sense strand starting at position 3281 of SEQ ID NO: 914094
ggccaucugugaggcugaa

SEQ ID NO: 977653 - RNA, 19 nt, Artificial Sequence
  Description of Artificial Sequence: Synthetic oligonucleotide
  Antisense strand to SEQ ID NO: 977652
uucagccucacagauggcc

SEQ ID NO: 977654 - RNA, 19 nt, Artificial Sequence
  Description of Artificial Sequence: Synthetic oligonucleotide
  Sense strand starting at position 3268 of SEQ ID NO: 914094
guaucuaucucugggccau

SEQ ID NO: 977655 - RNA, 19 nt, Artificial Sequence
  Description of Artificial Sequence: Synthetic oligonucleotide
  Antisense strand to SEQ ID NO: 977654
auggcccagagauagauac

SEQ ID NO: 977656 - RNA, 19 nt, Artificial Sequence
  Description of Artificial Sequence: Synthetic oligonucleotide
  Sense strand starting at position 2929 of SEQ ID NO: 914094
cuagcaguuucuggagcua

SEQ ID NO: 977657 - RNA, 19 nt, Artificial Sequence
  Description of Artificial Sequence: Synthetic oligonucleotide
  Antisense strand to SEQ ID NO: 977656
uagcuccagaaacugcuag

SEQ ID NO: 977658 - RNA, 19 nt, Artificial Sequence
  Description of Artificial Sequence: Synthetic oligonucleotide
  Sense strand starting at position 1507 of SEQ ID NO: 914095
acucuacuagccuagauga

SEQ ID NO: 977659 - RNA, 19 nt, Artificial Sequence
  Description of Artificial Sequence: Synthetic oligonucleotide
  Antisense strand to SEQ ID NO: 977658
ucaucuaggcuaguagagu

SEQ ID NO: 977660 - RNA, 19 nt, Artificial Sequence
  Description of Artificial Sequence: Synthetic oligonucleotide
  Sense strand starting at position 2354 of SEQ ID NO: 914095
acaaacugauuugagaacu

SEQ ID NO: 977661 - RNA, 19 nt, Artificial Sequence
  Description of Artificial Sequence: Synthetic oligonucleotide
  Antisense strand to SEQ ID NO: 977660
aguucucaaaucaguuugu

SEQ ID NO: 977662 - RNA, 19 nt, Artificial Sequence
  Description of Artificial Sequence: Synthetic oligonucleotide
  Sense strand starting at position 2051 of SEQ ID NO: 914095
gauaaaucccaaugguuag

SEQ ID NO: 977663 - RNA, 19 nt, Artificial Sequence
  Description of Artificial Sequence: Synthetic oligonucleotide
  Antisense strand to SEQ ID NO: 977662
cuaaccauugggauuuauc

SEQ ID NO: 977664 - RNA, 19 nt, Artificial Sequence
  Description of Artificial Sequence: Synthetic oligonucleotide
  Sense strand starting at position 306 of SEQ ID NO: 914095
agcuuuaggcuacagagaa

SEQ ID NO: 977665 - RNA, 19 nt, Artificial Sequence
  Description of Artificial Sequence: Synthetic oligonucleotide
  Antisense strand to SEQ ID NO: 977664
uucucuguagccuaaagcu

SEQ ID NO: 977666 - RNA, 19 nt, Artificial Sequence
  Description of Artificial Sequence: Synthetic oligonucleotide
  Sense strand starting at position 1780 of SEQ ID NO: 914095
aggugaugagagugaugau

SEQ ID NO: 977667 - RNA, 19 nt, Artificial Sequence
  Description of Artificial Sequence: Synthetic oligonucleotide
  Antisense strand to SEQ ID NO: 977666
aucaucacucucaucaccu

SEQ ID NO: 977668 - RNA, 19 nt, Artificial Sequence
  Description of Artificial Sequence: Synthetic oligonucleotide
  Sense strand starting at position 250 of SEQ ID NO: 914095
ugaugccaagaguaguaaa

SEQ ID NO: 977669 - RNA, 19 nt, Artificial Sequence
  Description of Artificial Sequence: Synthetic oligonucleotide
  Antisense strand to SEQ ID NO: 977668
uuuacuacucuuggcauca

SEQ ID NO: 977670 - RNA, 19 nt, Artificial Sequence
  Description of Artificial Sequence: Synthetic oligonucleotide
  Sense strand starting at position 3148 of SEQ ID NO: 914095
cagguaauaugagugauag

SEQ ID NO: 977671 - RNA, 19 nt, Artificial Sequence
  Description of Artificial Sequence: Synthetic oligonucleotide
  Antisense strand to SEQ ID NO: 977670
cuaucacucauauuaccug

SEQ ID NO: 977672 - RNA, 19 nt, Artificial Sequence
  Description of Artificial Sequence: Synthetic oligonucleotide
  Sense strand starting at position 100 of SEQ ID NO: 914095
ggucaaaggcuccagaauu

SEQ ID NO: 977673 - RNA, 19 nt, Artificial Sequence
  Description of Artificial Sequence: Synthetic oligonucleotide
  Antisense strand to SEQ ID NO: 977672
aauucuggagccuuugacc

SEQ ID NO: 977674 - RNA, 19 nt, Artificial Sequence
  Description of Artificial Sequence: Synthetic oligonucleotide
  Sense strand starting at position 2971 of SEQ ID NO: 914095
gguaucauaguacagguaa

SEQ ID NO: 977675 - RNA, 19 nt, Artificial Sequence
  Description of Artificial Sequence: Synthetic oligonucleotide
  Antisense strand to SEQ ID NO: 977674
uuaccuguacuaugauacc

SEQ ID NO: 977676 - RNA, 19 nt, Artificial Sequence
  Description of Artificial Sequence: Synthetic oligonucleotide
  Sense strand starting at position 3906 of SEQ ID NO: 914095
ucgggauauguagaaccuu

SEQ ID NO: 977677 - RNA, 19 nt, Artificial Sequence
  Description of Artificial Sequence: Synthetic oligonucleotide
  Antisense strand to SEQ ID NO: 977676
aagguucuacauaucccga

SEQ ID NO: 977678 - RNA, 19 nt, Artificial Sequence
  Description of Artificial Sequence: Synthetic oligonucleotide
  Sense strand starting at position 1326 of SEQ ID NO: 914095
ccaauucuggguuggaaag

SEQ ID NO: 977679 - RNA, 19 nt, Artificial Sequence
  Description of Artificial Sequence: Synthetic oligonucleotide
  Antisense strand to SEQ ID NO: 977678
cuuuccaacccagaauugg

SEQ ID NO: 977680 - RNA, 19 nt, Artificial Sequence
  Description of Artificial Sequence: Synthetic oligonucleotide
  Sense strand starting at position 3002 of SEQ ID NO: 914095
ggcuucucucguuuagcau

SEQ ID NO: 977681 - RNA, 19 nt, Artificial Sequence
  Description of Artificial Sequence: Synthetic oligonucleotide
  Antisense strand to SEQ ID NO: 977680
augcuaaacgagagaagcc

SEQ ID NO: 977682 - RNA, 19 nt, Artificial Sequence
  Description of Artificial Sequence: Synthetic oligonucleotide
  Sense strand starting at position 2401 of SEQ ID NO: 914095
gcuuacuaugcacaaggaa

SEQ ID NO: 977683 - RNA, 19 nt, Artificial Sequence
  Description of Artificial Sequence: Synthetic oligonucleotide
  Antisense strand to SEQ ID NO: 977682
uuccuugugcauaguaagc

SEQ ID NO: 977684 - RNA, 19 nt, Artificial Sequence
  Description of Artificial Sequence: Synthetic oligonucleotide
  Sense strand starting at position 1881 of SEQ ID NO: 914095
gugggaaaucuggguaaac

SEQ ID NO: 977685 - RNA, 19 nt, Artificial Sequence
  Description of Artificial Sequence: Synthetic oligonucleotide
  Antisense strand to SEQ ID NO: 977684
guuuacccagauuucccac

SEQ ID NO: 977686 - RNA, 19 nt, Artificial Sequence
  Description of Artificial Sequence: Synthetic oligonucleotide
  Sense strand starting at position 1585 of SEQ ID NO: 914095
ugcagucacccagauuaag

SEQ ID NO: 977687 - RNA, 19 nt, Artificial Sequence
  Description of Artificial Sequence: Synthetic oligonucleotide
  Antisense strand to SEQ ID NO: 977686
cuuaaucugggugacugca

SEQ ID NO: 977688 - RNA, 19 nt, Artificial Sequence
  Description of Artificial Sequence: Synthetic oligonucleotide
  Sense strand starting at position 1600 of SEQ ID NO: 914095
uaagaaaugccaugaaggu

SEQ ID NO: 977689 - RNA, 19 nt, Artificial Sequence
  Description of Artificial Sequence: Synthetic oligonucleotide
  Antisense strand to SEQ ID NO: 977688
accuucauggcauuucuua

SEQ ID NO: 977690 - RNA, 19 nt, Artificial Sequence
  Description of Artificial Sequence: Synthetic oligonucleotide
  Sense strand starting at position 1615 of SEQ ID NO: 914095
agguguaacacauauguca

SEQ ID NO: 977691 - RNA, 19 nt, Artificial Sequence
  Description of Artificial Sequence: Synthetic oligonucleotide
  Antisense strand to SEQ ID NO: 977690
ugacauauguguuacaccu

SEQ ID NO: 977692 - RNA, 19 nt, Artificial Sequence
  Description of Artificial Sequence: Synthetic oligonucleotide
  Sense strand starting at position 1497 of SEQ ID NO: 914095
ggagcaaacuacucuacua

SEQ ID NO: 977693 - RNA, 19 nt, Artificial Sequence
  Description of Artificial Sequence: Synthetic oligonucleotide
  Antisense strand to SEQ ID NO: 977692
uaguagaguaguuugcucc

SEQ ID NO: 977694 - RNA, 19 nt, Artificial Sequence
  Description of Artificial Sequence: Synthetic oligonucleotide
  Sense strand starting at position 1171 of SEQ ID NO: 914095
cacgaaauacggcaggauu

SEQ ID NO: 977695 - RNA, 19 nt, Artificial Sequence
  Description of Artificial Sequence: Synthetic oligonucleotide
  Antisense strand to SEQ ID NO: 977694
aauccugccguauuucgug

SEQ ID NO: 977696 - RNA, 19 nt, Artificial Sequence
  Description of Artificial Sequence: Synthetic oligonucleotide
  Sense strand starting at position 3837 of SEQ ID NO: 914095
uguacauaccucgacuaau

SEQ ID NO: 977697 - RNA, 19 nt, Artificial Sequence
  Description of Artificial Sequence: Synthetic oligonucleotide
  Antisense strand to SEQ ID NO: 977696
auuagucgagguauguaca

SEQ ID NO: 977698 - RNA, 19 nt, Artificial Sequence
  Description of Artificial Sequence: Synthetic oligonucleotide
  Sense strand starting at position 2144 of SEQ ID NO: 914095
uguggucacccacauauua

SEQ ID NO: 977699 - RNA, 19 nt, Artificial Sequence
  Description of Artificial Sequence: Synthetic oligonucleotide
  Antisense strand to SEQ ID NO: 977698
uaauaugugggugaccaca

SEQ ID NO: 977700 - RNA, 19 nt, Artificial Sequence
  Description of Artificial Sequence: Synthetic oligonucleotide
  Sense strand starting at position 3896 of SEQ ID NO: 914095
aaacaaguccucgggauau

SEQ ID NO: 977701 - RNA, 19 nt, Artificial Sequence
  Description of Artificial Sequence: Synthetic oligonucleotide
  Antisense strand to SEQ ID NO: 977700
auaucccgaggacuuguuu

SEQ ID NO: 977702 - RNA, 19 nt, Artificial Sequence
  Description of Artificial Sequence: Synthetic oligonucleotide
  Sense strand starting at position 2632 of SEQ ID NO: 914095
ggaaccaaucccugauguu

SEQ ID NO: 977703 - RNA, 19 nt, Artificial Sequence
  Description of Artificial Sequence: Synthetic oligonucleotide
  Antisense strand to SEQ ID NO: 977702
aacaucagggauugguucc

SEQ ID NO: 977704 - RNA, 19 nt, Artificial Sequence
  Description of Artificial Sequence: Synthetic oligonucleotide
  Sense strand starting at position 1618 of SEQ ID NO: 914095
uguaacacauaugucaaau

SEQ ID NO: 977705 - RNA, 19 nt, Artificial Sequence
  Description of Artificial Sequence: Synthetic oligonucleotide
  Antisense strand to SEQ ID NO: 977704
auuugacauauguguuaca

SEQ ID NO: 977706 - RNA, 19 nt, Artificial Sequence
  Description of Artificial Sequence: Synthetic oligonucleotide
  Sense strand starting at position 1324 of SEQ ID NO: 914095
cuccaauucuggguuggaa

SEQ ID NO: 977707 - RNA, 19 nt, Artificial Sequence
  Description of Artificial Sequence: Synthetic oligonucleotide
  Antisense strand to SEQ ID NO: 977706
uuccaacccagaauuggag

SEQ ID NO: 977708 - RNA, 19 nt, Artificial Sequence
  Description of Artificial Sequence: Synthetic oligonucleotide
  Sense strand starting at position 3750 of SEQ ID NO: 914095
ucaugaguaugaccuaucu

SEQ ID NO: 977709 - RNA, 19 nt, Artificial Sequence
  Description of Artificial Sequence: Synthetic oligonucleotide
  Antisense strand to SEQ ID NO: 977708
agauaggucauacucauga

SEQ ID NO: 977710 - RNA, 19 nt, Artificial Sequence
  Description of Artificial Sequence: Synthetic oligonucleotide
  Sense strand starting at position 3898 of SEQ ID NO: 914095
acaaguccucgggauaugu

SEQ ID NO: 977711 - RNA, 19 nt, Artificial Sequence
  Description of Artificial Sequence: Synthetic oligonucleotide
  Antisense strand to SEQ ID NO: 977710
acauaucccgaggacuugu

SEQ ID NO: 977712 - RNA, 19 nt, Artificial Sequence
  Description of Artificial Sequence: Synthetic oligonucleotide
  Sense strand starting at position 1657 of SEQ ID NO: 914095
aaauaucugugguuuauag

SEQ ID NO: 977713 - RNA, 19 nt, Artificial Sequence
  Description of Artificial Sequence: Synthetic oligonucleotide
  Antisense strand to SEQ ID NO: 977712
cuauaaaccacagauauuu

SEQ ID NO: 977714 - RNA, 19 nt, Artificial Sequence
  Description of Artificial Sequence: Synthetic oligonucleotide
  Sense strand starting at position 2226 of SEQ ID NO: 914095
gauguuauccgacaucccu

SEQ ID NO: 977715 - RNA, 19 nt, Artificial Sequence
  Description of Artificial Sequence: Synthetic oligonucleotide
  Antisense strand to SEQ ID NO: 977714
agggaugucggauaacauc

SEQ ID NO: 977716 - RNA, 19 nt, Artificial Sequence
  Description of Artificial Sequence: Synthetic oligonucleotide
  Sense strand starting at position 3045 of SEQ ID NO: 914095
agauauggcugggucaauu

SEQ ID NO: 977717 - RNA, 19 nt, Artificial Sequence
  Description of Artificial Sequence: Synthetic oligonucleotide
  Antisense strand to SEQ ID NO: 977716
aauugacccagccauaucu

SEQ ID NO: 977718 - RNA, 19 nt, Artificial Sequence
  Description of Artificial Sequence: Synthetic oligonucleotide
  Sense strand starting at position 1659 of SEQ ID NO: 914095
auaucugugguuuauagua

SEQ ID NO: 977719 - RNA, 19 nt, Artificial Sequence
  Description of Artificial Sequence: Synthetic oligonucleotide
  Antisense strand to SEQ ID NO: 977718
uacuauaaaccacagauau

SEQ ID NO: 977720 - RNA, 19 nt, Artificial Sequence
  Description of Artificial Sequence: Synthetic oligonucleotide
  Sense strand starting at position 1311 of SEQ ID NO: 914095
ggaaacuucucugcuccaa

SEQ ID NO: 977721 - RNA, 19 nt, Artificial Sequence
  Description of Artificial Sequence: Synthetic oligonucleotide
  Antisense strand to SEQ ID NO: 977720
uuggagcagagaaguuucc

SEQ ID NO: 977722 - RNA, 19 nt, Artificial Sequence
  Description of Artificial Sequence: Synthetic oligonucleotide
  Sense strand starting at position 1544 of SEQ ID NO: 914095
ucacauccuugggcaauua

SEQ ID NO: 977723 - RNA, 19 nt, Artificial Sequence
  Description of Artificial Sequence: Synthetic oligonucleotide
  Antisense strand to SEQ ID NO: 977722
uaauugcccaaggauguga

SEQ ID NO: 977724 - RNA, 19 nt, Artificial Sequence
  Description of Artificial Sequence: Synthetic oligonucleotide
  Sense strand starting at position 247 of SEQ ID NO: 914095
ccuugaugccaagaguagu

SEQ ID NO: 977725 - RNA, 19 nt, Artificial Sequence
  Description of Artificial Sequence: Synthetic oligonucleotide
  Antisense strand to SEQ ID NO: 977724
acuacucuuggcaucaagg

SEQ ID NO: 977726 - RNA, 19 nt, Artificial Sequence
  Description of Artificial Sequence: Synthetic oligonucleotide
  Sense strand starting at position 2057 of SEQ ID NO: 914095
ucccaaugguuaguauuaa

SEQ ID NO: 977727 - RNA, 19 nt, Artificial Sequence
  Description of Artificial Sequence: Synthetic oligonucleotide
  Antisense strand to SEQ ID NO: 977726
uuaauacuaaccauuggga

SEQ ID NO: 977728 - RNA, 19 nt, Artificial Sequence
  Description of Artificial Sequence: Synthetic oligonucleotide
  Sense strand starting at position 3043 of SEQ ID NO: 914095
uuagauauggcugggucaa

SEQ ID NO: 977729 - RNA, 19 nt, Artificial Sequence
  Description of Artificial Sequence: Synthetic oligonucleotide
  Antisense strand to SEQ ID NO: 977728
uugacccagccauaucuaa

SEQ ID NO: 977730 - RNA, 19 nt, Artificial Sequence
  Description of Artificial Sequence: Synthetic oligonucleotide
  Sense strand starting at position 3044 of SEQ ID NO: 914095
uagauauggcugggucaau

SEQ ID NO: 977731 - RNA, 19 nt, Artificial Sequence
  Description of Artificial Sequence: Synthetic oligonucleotide
  Antisense strand to SEQ ID NO: 977730
auugacccagccauaucua

SEQ ID NO: 977732 - RNA, 19 nt, Artificial Sequence
  Description of Artificial Sequence: Synthetic oligonucleotide
  Sense strand starting at position 1991 of SEQ ID NO: 914095
cugaacugcucuguagaaa

SEQ ID NO: 977733 - RNA, 19 nt, Artificial Sequence
  Description of Artificial Sequence: Synthetic oligonucleotide
  Antisense strand to SEQ ID NO: 977732
uuucuacagagcaguucag

SEQ ID NO: 977734 - RNA, 19 nt, Artificial Sequence
  Description of Artificial Sequence: Synthetic oligonucleotide
  Sense strand starting at position 1554 of SEQ ID NO: 914095
gggcaauuauggccaauca

SEQ ID NO: 977735 - RNA, 19 nt, Artificial Sequence
  Description of Artificial Sequence: Synthetic oligonucleotide
  Antisense strand to SEQ ID NO: 977734
ugauuggccauaauugccc

SEQ ID NO: 977736 - RNA, 19 nt, Artificial Sequence
  Description of Artificial Sequence: Synthetic oligonucleotide
  Sense strand starting at position 1058 of SEQ ID NO: 914095
ccuuccuaggucugaacua

SEQ ID NO: 977737 - RNA, 19 nt, Artificial Sequence
  Description of Artificial Sequence: Synthetic oligonucleotide
  Antisense strand to SEQ ID NO: 977736
uaguucagaccuaggaagg

SEQ ID NO: 977738 - RNA, 19 nt, Artificial Sequence
  Description of Artificial Sequence: Synthetic oligonucleotide
  Sense strand starting at position 3264 of SEQ ID NO: 914096
ucggaaacucaucagcaaa

SEQ ID NO: 977739 - RNA, 19 nt, Artificial Sequence
  Description of Artificial Sequence: Synthetic oligonucleotide
  Antisense strand to SEQ ID NO: 977738
uuugcugaugaguuuccga

SEQ ID NO: 977740 - RNA, 19 nt, Artificial Sequence
  Description of Artificial Sequence: Synthetic oligonucleotide
  Sense strand starting at position 3715 of SEQ ID NO: 914096
uagagagacuaguuacuua

SEQ ID NO: 977741 - RNA, 19 nt, Artificial Sequence
  Description of Artificial Sequence: Synthetic oligonucleotide
  Antisense strand to SEQ ID NO: 977740
uaaguaacuagucucucua

SEQ ID NO: 977742 - RNA, 19 nt, Artificial Sequence
  Description of Artificial Sequence: Synthetic oligonucleotide
  Sense strand starting at position 3683 of SEQ ID NO: 914096
ugagguuauccacagaggu

SEQ ID NO: 977743 - RNA, 19 nt, Artificial Sequence
  Description of Artificial Sequence: Synthetic oligonucleotide
  Antisense strand to SEQ ID NO: 977742
accucuguggauaaccuca

SEQ ID NO: 977744 - RNA, 19 nt, Artificial Sequence
  Description of Artificial Sequence: Synthetic oligonucleotide
  Sense strand starting at position 3515 of SEQ ID NO: 914096
ccacaaucuguguaagaca

SEQ ID NO: 977745 - RNA, 19 nt, Artificial Sequence
  Description of Artificial Sequence: Synthetic oligonucleotide
  Antisense strand to SEQ ID NO: 977744
ugucuuacacagauugugg

SEQ ID NO: 977746 - RNA, 19 nt, Artificial Sequence
  Description of Artificial Sequence: Synthetic oligonucleotide
  Sense strand starting at position 2483 of SEQ ID NO: 914096
aaacguuugcuguugucau

SEQ ID NO: 977747 - RNA, 19 nt, Artificial Sequence
  Description of Artificial Sequence: Synthetic oligonucleotide
  Antisense strand to SEQ ID NO: 977746
augacaacagcaaacguuu

SEQ ID NO: 977748 - RNA, 19 nt, Artificial Sequence
  Description of Artificial Sequence: Synthetic oligonucleotide
  Sense strand starting at position 3875 of SEQ ID NO: 914096
ugaagagguuuauugacac

SEQ ID NO: 977749 - RNA, 19 nt, Artificial Sequence
  Description of Artificial Sequence: Synthetic oligonucleotide
  Antisense strand to SEQ ID NO: 977748
gugucaauaaaccucuuca

SEQ ID NO: 977750 - RNA, 19 nt, Artificial Sequence
  Description of Artificial Sequence: Synthetic oligonucleotide
  Sense strand starting at position 3568 of SEQ ID NO: 914096
guauuuauugagcacgucu

SEQ ID NO: 977751 - RNA, 19 nt, Artificial Sequence
  Description of Artificial Sequence: Synthetic oligonucleotide
  Antisense strand to SEQ ID NO: 977750
agacgugcucaauaaauac

SEQ ID NO: 977752 - RNA, 19 nt, Artificial Sequence
  Description of Artificial Sequence: Synthetic oligonucleotide
  Sense strand starting at position 2559 of SEQ ID NO: 914096
uccucuuagccugauaaga

SEQ ID NO: 977753 - RNA, 19 nt, Artificial Sequence
  Description of Artificial Sequence: Synthetic oligonucleotide
  Antisense strand to SEQ ID NO: 977752
ucuuaucaggcuaagagga

SEQ ID NO: 977754 - RNA, 19 nt, Artificial Sequence
  Description of Artificial Sequence: Synthetic oligonucleotide
  Sense strand starting at position 3700 of SEQ ID NO: 914096
guguauaacaaaggguaga

SEQ ID NO: 977755 - RNA, 19 nt, Artificial Sequence
  Description of Artificial Sequence: Synthetic oligonucleotide
  Antisense strand to SEQ ID NO: 977754
ucuacccuuuguuauacac

SEQ ID NO: 977756 - RNA, 19 nt, Artificial Sequence
  Description of Artificial Sequence: Synthetic oligonucleotide
  Sense strand starting at position 3680 of SEQ ID NO: 914096
uccugagguuauccacaga

SEQ ID NO: 977757 - RNA, 19 nt, Artificial Sequence
  Description of Artificial Sequence: Synthetic oligonucleotide
  Antisense strand to SEQ ID NO: 977756
ucuguggauaaccucagga

SEQ ID NO: 977758 - RNA, 19 nt, Artificial Sequence
  Description of Artificial Sequence: Synthetic oligonucleotide
  Sense strand starting at position 3252 of SEQ ID NO: 914096
ugcacagacugaucggaaa

SEQ ID NO: 977759 - RNA, 19 nt, Artificial Sequence
  Description of Artificial Sequence: Synthetic oligonucleotide
  Antisense strand to SEQ ID NO: 977758
uuuccgaucagucugugca

SEQ ID NO: 977760 - RNA, 19 nt, Artificial Sequence
  Description of Artificial Sequence: Synthetic oligonucleotide
  Sense strand starting at position 27 of SEQ ID NO: 914096
ggguaucguccacaagaug

SEQ ID NO: 977761 - RNA, 19 nt, Artificial Sequence
  Description of Artificial Sequence: Synthetic oligonucleotide
  Antisense strand to SEQ ID NO: 977760
caucuuguggacgauaccc

SEQ ID NO: 977762 - RNA, 19 nt, Artificial Sequence
  Description of Artificial Sequence: Synthetic oligonucleotide
  Sense strand starting at position 438 of SEQ ID NO: 914096
uguagauauguccaucauc

SEQ ID NO: 977763 - RNA, 19 nt, Artificial Sequence
  Description of Artificial Sequence: Synthetic oligonucleotide
  Antisense strand to SEQ ID NO: 977762
gaugauggacauaucuaca

SEQ ID NO: 977764 - RNA, 19 nt, Artificial Sequence
  Description of Artificial Sequence: Synthetic oligonucleotide
  Sense strand starting at position 441 of SEQ ID NO: 914096
agauauguccaucaucugu

SEQ ID NO: 977765 - RNA, 19 nt, Artificial Sequence
  Description of Artificial Sequence: Synthetic oligonucleotide
  Antisense strand to SEQ ID NO: 977764
acagaugauggacauaucu

SEQ ID NO: 977766 - RNA, 19 nt, Artificial Sequence
  Description of Artificial Sequence: Synthetic oligonucleotide
  Sense strand starting at position 3537 of SEQ ID NO: 914096
cucucugggcuauaaagua

SEQ ID NO: 977767 - RNA, 19 nt, Artificial Sequence
  Description of Artificial Sequence: Synthetic oligonucleotide
  Antisense strand to SEQ ID NO: 977766
uacuuuauagcccagagag

SEQ ID NO: 977768 - RNA, 19 nt, Artificial Sequence
  Description of Artificial Sequence: Synthetic oligonucleotide
  Sense strand starting at position 2709 of SEQ ID NO: 914096
gaacccaggcucugagauu

SEQ ID NO: 977769 - RNA, 19 nt, Artificial Sequence
  Description of Artificial Sequence: Synthetic oligonucleotide
  Antisense strand to SEQ ID NO: 977768
aaucucagagccuggguuc

SEQ ID NO: 977770 - RNA, 19 nt, Artificial Sequence
  Description of Artificial Sequence: Synthetic oligonucleotide
  Sense strand starting at position 3263 of SEQ ID NO: 914096
aucggaaacucaucagcaa

SEQ ID NO: 977771 - RNA, 19 nt, Artificial Sequence
  Description of Artificial Sequence: Synthetic oligonucleotide
  Antisense strand to SEQ ID NO: 977770
uugcugaugaguuuccgau

SEQ ID NO: 977772 - RNA, 19 nt, Artificial Sequence
  Description of Artificial Sequence: Synthetic oligonucleotide
  Sense strand starting at position 141 of SEQ ID NO: 914096
ggcccuccagcugagaaau

SEQ ID NO: 977773 - RNA, 19 nt, Artificial Sequence
  Description of Artificial Sequence: Synthetic oligonucleotide
  Antisense strand to SEQ ID NO: 977772
auuucucagcuggagggcc

SEQ ID NO: 977774 - RNA, 19 nt, Artificial Sequence
  Description of Artificial Sequence: Synthetic oligonucleotide
  Sense strand starting at position 100 of SEQ ID NO: 914096
gcuaauucccugcagggaa

SEQ ID NO: 977775 - RNA, 19 nt, Artificial Sequence
  Description of Artificial Sequence: Synthetic oligonucleotide
  Antisense strand to SEQ ID NO: 977774
uucccugcagggaauuagc

SEQ ID NO: 977776 - RNA, 19 nt, Artificial Sequence
  Description of Artificial Sequence: Synthetic oligonucleotide
  Sense strand starting at position 3376 of SEQ ID NO: 914096
cuggaagcuuacucuauaa

SEQ ID NO: 977777 - RNA, 19 nt, Artificial Sequence
  Description of Artificial Sequence: Synthetic oligonucleotide
  Antisense strand to SEQ ID NO: 977776
uuauagaguaagcuuccag

SEQ ID NO: 977778 - RNA, 19 nt, Artificial Sequence
  Description of Artificial Sequence: Synthetic oligonucleotide
  Sense strand starting at position 3330 of SEQ ID NO: 914096
guguccucugcuguguauu

SEQ ID NO: 977779 - RNA, 19 nt, Artificial Sequence
  Description of Artificial Sequence: Synthetic oligonucleotide
  Antisense strand to SEQ ID NO: 977778
aauacacagcagaggacac

SEQ ID NO: 977780 - RNA, 19 nt, Artificial Sequence
  Description of Artificial Sequence: Synthetic oligonucleotide
  Sense strand starting at position 3810 of SEQ ID NO: 914096
gagugcauugguuaauaau

SEQ ID NO: 977781 - RNA, 19 nt, Artificial Sequence
  Description of Artificial Sequence: Synthetic oligonucleotide
  Antisense strand to SEQ ID NO: 977780
auuauuaaccaaugcacuc

SEQ ID NO: 977782 - RNA, 19 nt, Artificial Sequence
  Description of Artificial Sequence: Synthetic oligonucleotide
  Sense strand starting at position 428 of SEQ ID NO: 914096
gucugaaggcuguagauau

SEQ ID NO: 977783 - RNA, 19 nt, Artificial Sequence
  Description of Artificial Sequence: Synthetic oligonucleotide
  Antisense strand to SEQ ID NO: 977782
auaucuacagccuucagac

SEQ ID NO: 977784 - RNA, 19 nt, Artificial Sequence
  Description of Artificial Sequence: Synthetic oligonucleotide
  Sense strand starting at position 1020 of SEQ ID NO: 914096
ugcagaauucgacagcaca

SEQ ID NO: 977785 - RNA, 19 nt, Artificial Sequence
  Description of Artificial Sequence: Synthetic oligonucleotide
  Antisense strand to SEQ ID NO: 977784
ugugcugucgaauucugca

SEQ ID NO: 977786 - RNA, 19 nt, Artificial Sequence
  Description of Artificial Sequence: Synthetic oligonucleotide
  Sense strand starting at position 3230 of SEQ ID NO: 914096
gguaaagacuggccuugau

SEQ ID NO: 977787 - RNA, 19 nt, Artificial Sequence
  Description of Artificial Sequence: Synthetic oligonucleotide
  Antisense strand to SEQ ID NO: 977786
aucaaggccagucuuuacc

SEQ ID NO: 977788 - RNA, 19 nt, Artificial Sequence
  Description of Artificial Sequence: Synthetic oligonucleotide
  Sense strand starting at position 2497 of SEQ ID NO: 914096
gucauucgugugcucugua

SEQ ID NO: 977789 - RNA, 19 nt, Artificial Sequence
  Description of Artificial Sequence: Synthetic oligonucleotide
  Antisense strand to SEQ ID NO: 977788
uacagagcacacgaaugac

SEQ ID NO: 977790 - RNA, 19 nt, Artificial Sequence
  Description of Artificial Sequence: Synthetic oligonucleotide
  Sense strand starting at position 3375 of SEQ ID NO: 914096
ucuggaagcuuacucuaua

SEQ ID NO: 977791 - RNA, 19 nt, Artificial Sequence
  Description of Artificial Sequence: Synthetic oligonucleotide
  Antisense strand to SEQ ID NO: 977790
uauagaguaagcuuccaga

SEQ ID NO: 977792 - RNA, 19 nt, Artificial Sequence
  Description of Artificial Sequence: Synthetic oligonucleotide
  Sense strand starting at position 3070 of SEQ ID NO: 914096
caaguacuggucuggaacu

SEQ ID NO: 977793 - RNA, 19 nt, Artificial Sequence
  Description of Artificial Sequence: Synthetic oligonucleotide
  Antisense strand to SEQ ID NO: 977792
aguuccagaccaguacuug

SEQ ID NO: 977794 - RNA, 19 nt, Artificial Sequence
  Description of Artificial Sequence: Synthetic oligonucleotide
  Sense strand starting at position 3514 of SEQ ID NO: 914096
uccacaaucuguguaagac

SEQ ID NO: 977795 - RNA, 19 nt, Artificial Sequence
  Description of Artificial Sequence: Synthetic oligonucleotide
  Antisense strand to SEQ ID NO: 977794
gucuuacacagauugugga

SEQ ID NO: 977796 - RNA, 19 nt, Artificial Sequence
  Description of Artificial Sequence: Synthetic oligonucleotide
  Sense strand starting at position 2558 of SEQ ID NO: 914096
auccucuuagccugauaag

SEQ ID NO: 977797 - RNA, 19 nt, Artificial Sequence
  Description of Artificial Sequence: Synthetic oligonucleotide
  Antisense strand to SEQ ID NO: 977796
cuuaucaggcuaagaggau

SEQ ID NO: 977798 - RNA, 19 nt, Artificial Sequence
  Description of Artificial Sequence: Synthetic oligonucleotide
  Sense strand starting at position 3513 of SEQ ID NO: 914096
cuccacaaucuguguaaga

SEQ ID NO: 977799 - RNA, 19 nt, Artificial Sequence
  Description of Artificial Sequence: Synthetic oligonucleotide
  Antisense strand to SEQ ID NO: 977798
ucuuacacagauuguggag

SEQ ID NO: 977800 - RNA, 19 nt, Artificial Sequence
  Description of Artificial Sequence: Synthetic oligonucleotide
  Sense strand starting at position 3197 of SEQ ID NO: 914096
gcacauucucagugaacag

SEQ ID NO: 977801 - RNA, 19 nt, Artificial Sequence
  Description of Artificial Sequence: Synthetic oligonucleotide
  Antisense strand to SEQ ID NO: 977800
cuguucacugagaaugugc

SEQ ID NO: 977802 - RNA, 19 nt, Artificial Sequence
  Description of Artificial Sequence: Synthetic oligonucleotide
  Sense strand starting at position 965 of SEQ ID NO: 914096
gaaagcaugcacuggugaa

SEQ ID NO: 977803 - RNA, 19 nt, Artificial Sequence
  Description of Artificial Sequence: Synthetic oligonucleotide
  Antisense strand to SEQ ID NO: 977802
uucaccagugcaugcuuuc

SEQ ID NO: 977804 - RNA, 19 nt, Artificial Sequence
  Description of Artificial Sequence: Synthetic oligonucleotide
  Sense strand starting at position 140 of SEQ ID NO: 914096
gggcccuccagcugagaaa

SEQ ID NO: 977805 - RNA, 19 nt, Artificial Sequence
  Description of Artificial Sequence: Synthetic oligonucleotide
  Antisense strand to SEQ ID NO: 977804
uuucucagcuggagggccc

SEQ ID NO: 977806 - RNA, 19 nt, Artificial Sequence
  Description of Artificial Sequence: Synthetic oligonucleotide
  Sense strand starting at position 2556 of SEQ ID NO: 914096
ugauccucuuagccugaua

SEQ ID NO: 977807 - RNA, 19 nt, Artificial Sequence
  Description of Artificial Sequence: Synthetic oligonucleotide
  Antisense strand to SEQ ID NO: 977806
uaucaggcuaagaggauca

SEQ ID NO: 977808 - RNA, 19 nt, Artificial Sequence
  Description of Artificial Sequence: Synthetic oligonucleotide
  Sense strand starting at position 720 of SEQ ID NO: 914096
guuccaugaugucucuaga

SEQ ID NO: 977809 - RNA, 19 nt, Artificial Sequence
  Description of Artificial Sequence: Synthetic oligonucleotide
  Antisense strand to SEQ ID NO: 977808
ucuagagacaucauggaac

SEQ ID NO: 977810 - RNA, 19 nt, Artificial Sequence
  Description of Artificial Sequence: Synthetic oligonucleotide
  Sense strand starting at position 2899 of SEQ ID NO: 914096
caacaaggucauugcaagu

SEQ ID NO: 977811 - RNA, 19 nt, Artificial Sequence
  Description of Artificial Sequence: Synthetic oligonucleotide
  Antisense strand to SEQ ID NO: 977810
acuugcaaugaccuuguug

SEQ ID NO: 977812 - RNA, 19 nt, Artificial Sequence
  Description of Artificial Sequence: Synthetic oligonucleotide
  Sense strand starting at position 950 of SEQ ID NO: 914096
ucuugucugccuggagaaa

SEQ ID NO: 977813 - RNA, 19 nt, Artificial Sequence
  Description of Artificial Sequence: Synthetic oligonucleotide
  Antisense strand to SEQ ID NO: 977812
uuucuccaggcagacaaga

SEQ ID NO: 977814 - RNA, 19 nt, Artificial Sequence
  Description of Artificial Sequence: Synthetic oligonucleotide
  Sense strand starting at position 3687 of SEQ ID NO: 914096
guuauccacagagguguau

SEQ ID NO: 977815 - RNA, 19 nt, Artificial Sequence
  Description of Artificial Sequence: Synthetic oligonucleotide
  Antisense strand to SEQ ID NO: 977814
auacaccucuguggauaac

SEQ ID NO: 977816 - RNA, 19 nt, Artificial Sequence
  Description of Artificial Sequence: Synthetic oligonucleotide
  Sense strand starting at position 3623 of SEQ ID NO: 914096
cuuuacaugcguuaacuca

SEQ ID NO: 977817 - RNA, 19 nt, Artificial Sequence
  Description of Artificial Sequence: Synthetic oligonucleotide
  Antisense strand to SEQ ID NO: 977816
ugaguuaacgcauguaaag

SEQ ID NO: 977818 - RNA, 19 nt, Artificial Sequence
  Description of Artificial Sequence: Synthetic oligonucleotide
  Sense strand starting at position 3561 of SEQ ID NO: 914097
aguaauacagagugauaau

SEQ ID NO: 977819 - RNA, 19 nt, Artificial Sequence
  Description of Artificial Sequence: Synthetic oligonucleotide
  Antisense strand to SEQ ID NO: 977818
auuaucacucuguauuacu

SEQ ID NO: 977820 - RNA, 19 nt, Artificial Sequence
  Description of Artificial Sequence: Synthetic oligonucleotide
  Sense strand starting at position 3775 of SEQ ID NO: 914097
uuugucguuaaagaagaaa

SEQ ID NO: 977821 - RNA, 19 nt, Artificial Sequence
  Description of Artificial Sequence: Synthetic oligonucleotide
  Antisense strand to SEQ ID NO: 977820
uuucuucuuuaacgacaaa

SEQ ID NO: 977822 - RNA, 19 nt, Artificial Sequence
  Description of Artificial Sequence: Synthetic oligonucleotide
  Sense strand starting at position 549 of SEQ ID NO: 914097
uugucacugggauauaucu

SEQ ID NO: 977823 - RNA, 19 nt, Artificial Sequence
  Description of Artificial Sequence: Synthetic oligonucleotide
  Antisense strand to SEQ ID NO: 977822
agauauaucccagugacaa

SEQ ID NO: 977824 - RNA, 19 nt, Artificial Sequence
  Description of Artificial Sequence: Synthetic oligonucleotide
  Sense strand starting at position 2782 of SEQ ID NO: 914097
acugcaaacucauugagga

SEQ ID NO: 977825 - RNA, 19 nt, Artificial Sequence
  Description of Artificial Sequence: Synthetic oligonucleotide
  Antisense strand to SEQ ID NO: 977824
uccucaaugaguuugcagu

SEQ ID NO: 977826 - RNA, 19 nt, Artificial Sequence
  Description of Artificial Sequence: Synthetic oligonucleotide
  Sense strand starting at position 3351 of SEQ ID NO: 914097
ucagauuucuuugcagucu

SEQ ID NO: 977827 - RNA, 19 nt, Artificial Sequence
  Description of Artificial Sequence: Synthetic oligonucleotide
  Antisense strand to SEQ ID NO: 977826
agacugcaaagaaaucuga

SEQ ID NO: 977828 - RNA, 19 nt, Artificial Sequence
  Description of Artificial Sequence: Synthetic oligonucleotide
  Sense strand starting at position 3035 of SEQ ID NO: 914097
cuuugagaucccuaauagc

SEQ ID NO: 977829 - RNA, 19 nt, Artificial Sequence
  Description of Artificial Sequence: Synthetic oligonucleotide
  Antisense strand to SEQ ID NO: 977828
gcuauuagggaucucaaag

SEQ ID NO: 977830 - RNA, 19 nt, Artificial Sequence
  Description of Artificial Sequence: Synthetic oligonucleotide
  Sense strand starting at position 2649 of SEQ ID NO: 914097
cgcuuagauuucucuccua

SEQ ID NO: 977831 - RNA, 19 nt, Artificial Sequence
  Description of Artificial Sequence: Synthetic oligonucleotide
  Antisense strand to SEQ ID NO: 977830
uaggagagaaaucuaagcg

SEQ ID NO: 977832 - RNA, 19 nt, Artificial Sequence
  Description of Artificial Sequence: Synthetic oligonucleotide
  Sense strand starting at position 558 of SEQ ID NO: 914097
ggauauaucugaucuuccu

SEQ ID NO: 977833 - RNA, 19 nt, Artificial Sequence
  Description of Artificial Sequence: Synthetic oligonucleotide
  Antisense strand to SEQ ID NO: 977832
aggaagaucagauauaucc

SEQ ID NO: 977834 - RNA, 19 nt, Artificial Sequence
  Description of Artificial Sequence: Synthetic oligonucleotide
  Sense strand starting at position 332 of SEQ ID NO: 914097
aggaauagcucccucagau

SEQ ID NO: 977835 - RNA, 19 nt, Artificial Sequence
  Description of Artificial Sequence: Synthetic oligonucleotide
  Antisense strand to SEQ ID NO: 977834
aucugagggagcuauuccu

SEQ ID NO: 977836 - RNA, 19 nt, Artificial Sequence
  Description of Artificial Sequence: Synthetic oligonucleotide
  Sense strand starting at position 479 of SEQ ID NO: 914097
agggaauguuaagucuuua

SEQ ID NO: 977837 - RNA, 19 nt, Artificial Sequence
  Description of Artificial Sequence: Synthetic oligonucleotide
  Antisense strand to SEQ ID NO: 977836
uaaagacuuaacauucccu

SEQ ID NO: 977838 - RNA, 19 nt, Artificial Sequence
  Description of Artificial Sequence: Synthetic oligonucleotide
  Sense strand starting at position 645 of SEQ ID NO: 914097
cgcuuagcgcuguuagaag

SEQ ID NO: 977839 - RNA, 19 nt, Artificial Sequence
  Description of Artificial Sequence: Synthetic oligonucleotide
  Antisense strand to SEQ ID NO: 977838
cuucuaacagcgcuaagcg

SEQ ID NO: 977840 - RNA, 19 nt, Artificial Sequence
  Description of Artificial Sequence: Synthetic oligonucleotide
  Sense strand starting at position 3527 of SEQ ID NO: 914097
cuguauaccguguuugcga

SEQ ID NO: 977841 - RNA, 19 nt, Artificial Sequence
  Description of Artificial Sequence: Synthetic oligonucleotide
  Antisense strand to SEQ ID NO: 977840
ucgcaaacacgguauacag

SEQ ID NO: 977842 - RNA, 19 nt, Artificial Sequence
  Description of Artificial Sequence: Synthetic oligonucleotide
  Sense strand starting at position 3967 of SEQ ID NO: 914097
agagcuuugcaggaucauu

SEQ ID NO: 977843 - RNA, 19 nt, Artificial Sequence
  Description of Artificial Sequence: Synthetic oligonucleotide
  Antisense strand to SEQ ID NO: 977842
aaugauccugcaaagcucu

SEQ ID NO: 977844 - RNA, 19 nt, Artificial Sequence
  Description of Artificial Sequence: Synthetic oligonucleotide
  Sense strand starting at position 827 of SEQ ID NO: 914097
auauaugggucuucuuaau

SEQ ID NO: 977845 - RNA, 19 nt, Artificial Sequence
  Description of Artificial Sequence: Synthetic oligonucleotide
  Antisense strand to SEQ ID NO: 977844
auuaagaagacccauauau

SEQ ID NO: 977846 - RNA, 19 nt, Artificial Sequence
  Description of Artificial Sequence: Synthetic oligonucleotide
  Sense strand starting at position 118 of SEQ ID NO: 914097
guaaauugugcauauuaca

SEQ ID NO: 977847 - RNA, 19 nt, Artificial Sequence
  Description of Artificial Sequence: Synthetic oligonucleotide
  Antisense strand to SEQ ID NO: 977846
uguaauaugcacaauuuac

SEQ ID NO: 977848 - RNA, 19 nt, Artificial Sequence
  Description of Artificial Sequence: Synthetic oligonucleotide
  Sense strand starting at position 2546 of SEQ ID NO: 914097
gcagcagagagugauguaa

SEQ ID NO: 977849 - RNA, 19 nt, Artificial Sequence
  Description of Artificial Sequence: Synthetic oligonucleotide
  Antisense strand to SEQ ID NO: 977848
uuacaucacucucugcugc

SEQ ID NO: 977850 - RNA, 19 nt, Artificial Sequence
  Description of Artificial Sequence: Synthetic oligonucleotide
  Sense strand starting at position 147 of SEQ ID NO: 914097
ucucaauuaccugguugaa

SEQ ID NO: 977851 - RNA, 19 nt, Artificial Sequence
  Description of Artificial Sequence: Synthetic oligonucleotide
  Antisense strand to SEQ ID NO: 977850
uucaaccagguaauugaga

SEQ ID NO: 977852 - RNA, 19 nt, Artificial Sequence
  Description of Artificial Sequence: Synthetic oligonucleotide
  Sense strand starting at position 696 of SEQ ID NO: 914097
ccacuuggucccuaaagca

SEQ ID NO: 977853 - RNA, 19 nt, Artificial Sequence
  Description of Artificial Sequence: Synthetic oligonucleotide
  Antisense strand to SEQ ID NO: 977852
ugcuuuagggaccaagugg

SEQ ID NO: 977854 - RNA, 19 nt, Artificial Sequence
  Description of Artificial Sequence: Synthetic oligonucleotide
  Sense strand starting at position 644 of SEQ ID NO: 914097
ucgcuuagcgcuguuagaa

SEQ ID NO: 977855 - RNA, 19 nt, Artificial Sequence
  Description of Artificial Sequence: Synthetic oligonucleotide
  Antisense strand to SEQ ID NO: 977854
uucuaacagcgcuaagcga

SEQ ID NO: 977856 - RNA, 19 nt, Artificial Sequence
  Description of Artificial Sequence: Synthetic oligonucleotide
  Sense strand starting at position 223 of SEQ ID NO: 914097
ugucuaugucuggagaagu

SEQ ID NO: 977857 - RNA, 19 nt, Artificial Sequence
  Description of Artificial Sequence: Synthetic oligonucleotide
  Antisense strand to SEQ ID NO: 977856
acuucuccagacauagaca

SEQ ID NO: 977858 - RNA, 19 nt, Artificial Sequence
  Description of Artificial Sequence: Synthetic oligonucleotide
  Sense strand starting at position 3384 of SEQ ID NO: 914097
uucucuuagguacauguua

SEQ ID NO: 977859 - RNA, 19 nt, Artificial Sequence
  Description of Artificial Sequence: Synthetic oligonucleotide
  Antisense strand to SEQ ID NO: 977858
uaacauguaccuaagagaa

SEQ ID NO: 977860 - RNA, 19 nt, Artificial Sequence
  Description of Artificial Sequence: Synthetic oligonucleotide
  Sense strand starting at position 780 of SEQ ID NO: 914097
uuaggagcuccgcaugaaa

SEQ ID NO: 977861 - RNA, 19 nt, Artificial Sequence
  Description of Artificial Sequence: Synthetic oligonucleotide
  Antisense strand to SEQ ID NO: 977860
uuucaugcggagcuccuaa

SEQ ID NO: 977862 - RNA, 19 nt, Artificial Sequence
  Description of Artificial Sequence: Synthetic oligonucleotide
  Sense strand starting at position 783 of SEQ ID NO: 914097
ggagcuccgcaugaaauua

SEQ ID NO: 977863 - RNA, 19 nt, Artificial Sequence
  Description of Artificial Sequence: Synthetic oligonucleotide
  Antisense strand to SEQ ID NO: 977862
uaauuucaugcggagcucc

SEQ ID NO: 977864 - RNA, 19 nt, Artificial Sequence
  Description of Artificial Sequence: Synthetic oligonucleotide
  Sense strand starting at position 3391 of SEQ ID NO: 914097
agguacauguuauuacauu

SEQ ID NO: 977865 - RNA, 19 nt, Artificial Sequence
  Description of Artificial Sequence: Synthetic oligonucleotide
  Antisense strand to SEQ ID NO: 977864
aauguaauaacauguaccu

SEQ ID NO: 977866 - RNA, 19 nt, Artificial Sequence
  Description of Artificial Sequence: Synthetic oligonucleotide
  Sense strand starting at position 3329 of SEQ ID NO: 914097
gcuucuaaggguugaaaug

SEQ ID NO: 977867 - RNA, 19 nt, Artificial Sequence
  Description of Artificial Sequence: Synthetic oligonucleotide
  Antisense strand to SEQ ID NO: 977866
cauuucaacccuuagaagc

SEQ ID NO: 977868 - RNA, 19 nt, Artificial Sequence
  Description of Artificial Sequence: Synthetic oligonucleotide
  Sense strand starting at position 1019 of SEQ ID NO: 914097
uuugacuccucaguuugaa

SEQ ID NO: 977869 - RNA, 19 nt, Artificial Sequence
  Description of Artificial Sequence: Synthetic oligonucleotide
  Antisense strand to SEQ ID NO: 977868
uucaaacugaggagucaaa

SEQ ID NO: 977870 - RNA, 19 nt, Artificial Sequence
  Description of Artificial Sequence: Synthetic oligonucleotide
  Sense strand starting at position 1095 of SEQ ID NO: 914097
cuccuaguaggugauguua

SEQ ID NO: 977871 - RNA, 19 nt, Artificial Sequence
  Description of Artificial Sequence: Synthetic oligonucleotide
  Antisense strand to SEQ ID NO: 977870
uaacaucaccuacuaggag

SEQ ID NO: 977872 - RNA, 19 nt, Artificial Sequence
  Description of Artificial Sequence: Synthetic oligonucleotide
  Sense strand starting at position 3639 of SEQ ID NO: 914097
aauccagagagguguugua

SEQ ID NO: 977873 - RNA, 19 nt, Artificial Sequence
  Description of Artificial Sequence: Synthetic oligonucleotide
  Antisense strand to SEQ ID NO: 977872
uacaacaccucucuggauu

SEQ ID NO: 977874 - RNA, 19 nt, Artificial Sequence
  Description of Artificial Sequence: Synthetic oligonucleotide
  Sense strand starting at position 3249 of SEQ ID NO: 914097
gaagauuuauagcagguga

SEQ ID NO: 977875 - RNA, 19 nt, Artificial Sequence
  Description of Artificial Sequence: Synthetic oligonucleotide
  Antisense strand to SEQ ID NO: 977874
ucaccugcuauaaaucuuc

SEQ ID NO: 977876 - RNA, 19 nt, Artificial Sequence
  Description of Artificial Sequence: Synthetic oligonucleotide
  Sense strand starting at position 670 of SEQ ID NO: 914097
gagaguuccugcccugaaa

SEQ ID NO: 977877 - RNA, 19 nt, Artificial Sequence
  Description of Artificial Sequence: Synthetic oligonucleotide
  Antisense strand to SEQ ID NO: 977876
uuucagggcaggaacucuc

SEQ ID NO: 977878 - RNA, 19 nt, Artificial Sequence
  Description of Artificial Sequence: Synthetic oligonucleotide
  Sense strand starting at position 221 of SEQ ID NO: 914097
cuugucuaugucuggagaa

SEQ ID NO: 977879 - RNA, 19 nt, Artificial Sequence
  Description of Artificial Sequence: Synthetic oligonucleotide
  Antisense strand to SEQ ID NO: 977878
uucuccagacauagacaag

SEQ ID NO: 977880 - RNA, 19 nt, Artificial Sequence
  Description of Artificial Sequence: Synthetic oligonucleotide
  Sense strand starting at position 3319 of SEQ ID NO: 914097
uagacaguuugcuucuaag

SEQ ID NO: 977881 - RNA, 19 nt, Artificial Sequence
  Description of Artificial Sequence: Synthetic oligonucleotide
  Antisense strand to SEQ ID NO: 977880
cuuagaagcaaacugucua

SEQ ID NO: 977882 - RNA, 19 nt, Artificial Sequence
  Description of Artificial Sequence: Synthetic oligonucleotide
  Sense strand starting at position 49 of SEQ ID NO: 914097
ggcacuucucugggaaggu

SEQ ID NO: 977883 - RNA, 19 nt, Artificial Sequence
  Description of Artificial Sequence: Synthetic oligonucleotide
  Antisense strand to SEQ ID NO: 977882
accuucccagagaagugcc

SEQ ID NO: 977884 - RNA, 19 nt, Artificial Sequence
  Description of Artificial Sequence: Synthetic oligonucleotide
  Sense strand starting at position 47 of SEQ ID NO: 914097
guggcacuucucugggaag

SEQ ID NO: 977885 - RNA, 19 nt, Artificial Sequence
  Description of Artificial Sequence: Synthetic oligonucleotide
  Antisense strand to SEQ ID NO: 977884
cuucccagagaagugccac

SEQ ID NO: 977886 - RNA, 19 nt, Artificial Sequence
  Description of Artificial Sequence: Synthetic oligonucleotide
  Sense strand starting at position 3966 of SEQ ID NO: 914097
uagagcuuugcaggaucau

SEQ ID NO: 977887 - RNA, 19 nt, Artificial Sequence
  Description of Artificial Sequence: Synthetic oligonucleotide
  Antisense strand to SEQ ID NO: 977886
augauccugcaaagcucua

SEQ ID NO: 977888 - RNA, 19 nt, Artificial Sequence
  Description of Artificial Sequence: Synthetic oligonucleotide
  Sense strand starting at position 220 of SEQ ID NO: 914097
ucuugucuaugucuggaga

SEQ ID NO: 977889 - RNA, 19 nt, Artificial Sequence
  Description of Artificial Sequence: Synthetic oligonucleotide
  Antisense strand to SEQ ID NO: 977888
ucuccagacauagacaaga

SEQ ID NO: 977890 - RNA, 19 nt, Artificial Sequence
  Description of Artificial Sequence: Synthetic oligonucleotide
  Sense strand starting at position 3326 of SEQ ID NO: 914097
uuugcuucuaaggguugaa

SEQ ID NO: 977891 - RNA, 19 nt, Artificial Sequence
  Description of Artificial Sequence: Synthetic oligonucleotide
  Antisense strand to SEQ ID NO: 977890
uucaacccuuagaagcaaa

SEQ ID NO: 977892 - RNA, 19 nt, Artificial Sequence
  Description of Artificial Sequence: Synthetic oligonucleotide
  Sense strand starting at position 3771 of SEQ ID NO: 914097
ccuguuugucguuaaagaa

SEQ ID NO: 977893 - RNA, 19 nt, Artificial Sequence
  Description of Artificial Sequence: Synthetic oligonucleotide
  Antisense strand to SEQ ID NO: 977892
uucuuuaacgacaaacagg

SEQ ID NO: 977894 - RNA, 19 nt, Artificial Sequence
  Description of Artificial Sequence: Synthetic oligonucleotide
  Sense strand starting at position 73 of SEQ ID NO: 914097
ggaauuacaucacaacaga

SEQ ID NO: 977895 - RNA, 19 nt, Artificial Sequence
  Description of Artificial Sequence: Synthetic oligonucleotide
  Antisense strand to SEQ ID NO: 977894
ucuguugugauguaauucc

SEQ ID NO: 977896 - RNA, 19 nt, Artificial Sequence
  Description of Artificial Sequence: Synthetic oligonucleotide
  Sense strand starting at position 833 of SEQ ID NO: 914097
gggucuucuuaaucuucuu

SEQ ID NO: 977897 - RNA, 19 nt, Artificial Sequence
  Description of Artificial Sequence: Synthetic oligonucleotide
  Antisense strand to SEQ ID NO: 977896
aagaagauuaagaagaccc

SEQ ID NO: 977898 - RNA, 19 nt, Artificial Sequence
  Description of Artificial Sequence: Synthetic oligonucleotide
  Sense strand starting at position 3559 of SEQ ID NO: 914098
ucucuagaagaugguuaaa

SEQ ID NO: 977899 - RNA, 19 nt, Artificial Sequence
  Description of Artificial Sequence: Synthetic oligonucleotide
  Antisense strand to SEQ ID NO: 977898
uuuaaccaucuucuagaga

SEQ ID NO: 977900 - RNA, 19 nt, Artificial Sequence
  Description of Artificial Sequence: Synthetic oligonucleotide
  Sense strand starting at position 1989 of SEQ ID NO: 914098
uccagagggugauuccaaa

SEQ ID NO: 977901 - RNA, 19 nt, Artificial Sequence
  Description of Artificial Sequence: Synthetic oligonucleotide
  Antisense strand to SEQ ID NO: 977900
uuuggaaucacccucugga

SEQ ID NO: 977902 - RNA, 19 nt, Artificial Sequence
  Description of Artificial Sequence: Synthetic oligonucleotide
  Sense strand starting at position 3561 of SEQ ID NO: 914098
ucuagaagaugguuaaagu

SEQ ID NO: 977903 - RNA, 19 nt, Artificial Sequence
  Description of Artificial Sequence: Synthetic oligonucleotide
  Antisense strand to SEQ ID NO: 977902
acuuuaaccaucuucuaga

SEQ ID NO: 977904 - RNA, 19 nt, Artificial Sequence
  Description of Artificial Sequence: Synthetic oligonucleotide
  Sense strand starting at position 2370 of SEQ ID NO: 914098
ucgcguucuagagccgaga

SEQ ID NO: 977905 - RNA, 19 nt, Artificial Sequence
  Description of Artificial Sequence: Synthetic oligonucleotide
  Antisense strand to SEQ ID NO: 977904
ucucggcucuagaacgcga

SEQ ID NO: 977906 - RNA, 19 nt, Artificial Sequence
  Description of Artificial Sequence: Synthetic oligonucleotide
  Sense strand starting at position 3050 of SEQ ID NO: 914098
gagagaguagucgagaugu

SEQ ID NO: 977907 - RNA, 19 nt, Artificial Sequence
  Description of Artificial Sequence: Synthetic oligonucleotide
  Antisense strand to SEQ ID NO: 977906
acaucucgacuacucucuc

SEQ ID NO: 977908 - RNA, 19 nt, Artificial Sequence
  Description of Artificial Sequence: Synthetic oligonucleotide
  Sense strand starting at position 265 of SEQ ID NO: 914098
cauccuuguccaggagaac

SEQ ID NO: 977909 - RNA, 19 nt, Artificial Sequence
  Description of Artificial Sequence: Synthetic oligonucleotide
  Antisense strand to SEQ ID NO: 977908
guucuccuggacaaggaug

SEQ ID NO: 977910 - RNA, 19 nt, Artificial Sequence
  Description of Artificial Sequence: Synthetic oligonucleotide
  Sense strand starting at position 371 of SEQ ID NO: 914098
aauggugaagucgagaguu

SEQ ID NO: 977911 - RNA, 19 nt, Artificial Sequence
  Description of Artificial Sequence: Synthetic oligonucleotide
  Antisense strand to SEQ ID NO: 977910
aacucucgacuucaccauu

SEQ ID NO: 977912 - RNA, 19 nt, Artificial Sequence
  Description of Artificial Sequence: Synthetic oligonucleotide
  Sense strand starting at position 3069 of SEQ ID NO: 914098
cuguucuuccagggaggau

SEQ ID NO: 977913 - RNA, 19 nt, Artificial Sequence
  Description of Artificial Sequence: Synthetic oligonucleotide
  Antisense strand to SEQ ID NO: 977912
auccucccuggaagaacag

SEQ ID NO: 977914 - RNA, 19 nt, Artificial Sequence
  Description of Artificial Sequence: Synthetic oligonucleotide
  Sense strand starting at position 3068 of SEQ ID NO: 914098
ucuguucuuccagggagga

SEQ ID NO: 977915 - RNA, 19 nt, Artificial Sequence
  Description of Artificial Sequence: Synthetic oligonucleotide
  Antisense strand to SEQ ID NO: 977914
uccucccuggaagaacaga

SEQ ID NO: 977916 - RNA, 19 nt, Artificial Sequence
  Description of Artificial Sequence: Synthetic oligonucleotide
  Sense strand starting at position 3958 of SEQ ID NO: 914098
aucuguggguuuccaaaga

SEQ ID NO: 977917 - RNA, 19 nt, Artificial Sequence
  Description of Artificial Sequence: Synthetic oligonucleotide
  Antisense strand to SEQ ID NO: 977916
ucuuuggaaacccacagau

SEQ ID NO: 977918 - RNA, 19 nt, Artificial Sequence
  Description of Artificial Sequence: Synthetic oligonucleotide
  Sense strand starting at position 1010 of SEQ ID NO: 914098
acaaaccuguuaucucgaa

SEQ ID NO: 977919 - RNA, 19 nt, Artificial Sequence
  Description of Artificial Sequence: Synthetic oligonucleotide
  Antisense strand to SEQ ID NO: 977918
uucgagauaacagguuugu

SEQ ID NO: 977920 - RNA, 19 nt, Artificial Sequence
  Description of Artificial Sequence: Synthetic oligonucleotide
  Sense strand starting at position 3052 of SEQ ID NO: 914098
gagaguagucgagaugucu

SEQ ID NO: 977921 - RNA, 19 nt, Artificial Sequence
  Description of Artificial Sequence: Synthetic oligonucleotide
  Antisense strand to SEQ ID NO: 977920
agacaucucgacuacucuc

SEQ ID NO: 977922 - RNA, 19 nt, Artificial Sequence
  Description of Artificial Sequence: Synthetic oligonucleotide
  Sense strand starting at position 2995 of SEQ ID NO: 914098
gaucuucucgguugaggga

SEQ ID NO: 977923 - RNA, 19 nt, Artificial Sequence
  Description of Artificial Sequence: Synthetic oligonucleotide
  Antisense strand to SEQ ID NO: 977922
ucccucaaccgagaagauc

SEQ ID NO: 977924 - RNA, 19 nt, Artificial Sequence
  Description of Artificial Sequence: Synthetic oligonucleotide
  Sense strand starting at position 261 of SEQ ID NO: 914098
gguacauccuuguccagga

SEQ ID NO: 977925 - RNA, 19 nt, Artificial Sequence
  Description of Artificial Sequence: Synthetic oligonucleotide
  Antisense strand to SEQ ID NO: 977924
uccuggacaaggauguacc

SEQ ID NO: 977926 - RNA, 19 nt, Artificial Sequence
  Description of Artificial Sequence: Synthetic oligonucleotide
  Sense strand starting at position 2917 of SEQ ID NO: 914098
gcgguuagaaccugauaaa

SEQ ID NO: 977927 - RNA, 19 nt, Artificial Sequence
  Description of Artificial Sequence: Synthetic oligonucleotide
  Antisense strand to SEQ ID NO: 977926
uuuaucagguucuaaccgc

SEQ ID NO: 977928 - RNA, 19 nt, Artificial Sequence
  Description of Artificial Sequence: Synthetic oligonucleotide
  Sense strand starting at position 1984 of SEQ ID NO: 914098
ucuuguccagagggugauu

SEQ ID NO: 977929 - RNA, 19 nt, Artificial Sequence
  Description of Artificial Sequence: Synthetic oligonucleotide
  Antisense strand to SEQ ID NO: 977928
aaucacccucuggacaaga

SEQ ID NO: 977930 - RNA, 19 nt, Artificial Sequence
  Description of Artificial Sequence: Synthetic oligonucleotide
  Sense strand starting at position 450 of SEQ ID NO: 914098
gcuggauggguguggaauu

SEQ ID NO: 977931 - RNA, 19 nt, Artificial Sequence
  Description of Artificial Sequence: Synthetic oligonucleotide
  Antisense strand to SEQ ID NO: 977930
aauuccacacccauccagc

SEQ ID NO: 977932 - RNA, 19 nt, Artificial Sequence
  Description of Artificial Sequence: Synthetic oligonucleotide
  Sense strand starting at position 3276 of SEQ ID NO: 914098
gagauccuucgugaccgua

SEQ ID NO: 977933 - RNA, 19 nt, Artificial Sequence
  Description of Artificial Sequence: Synthetic oligonucleotide
  Antisense strand to SEQ ID NO: 977932
uacggucacgaaggaucuc

SEQ ID NO: 977934 - RNA, 19 nt, Artificial Sequence
  Description of Artificial Sequence: Synthetic oligonucleotide
  Sense strand starting at position 928 of SEQ ID NO: 914098
agccuagggucuccaguaa

SEQ ID NO: 977935 - RNA, 19 nt, Artificial Sequence
  Description of Artificial Sequence: Synthetic oligonucleotide
  Antisense strand to SEQ ID NO: 977934
uuacuggagacccuaggcu

SEQ ID NO: 977936 - RNA, 19 nt, Artificial Sequence
  Description of Artificial Sequence: Synthetic oligonucleotide
  Sense strand starting at position 3457 of SEQ ID NO: 914098
aggagcuauuaagaaagga

SEQ ID NO: 977937 - RNA, 19 nt, Artificial Sequence
  Description of Artificial Sequence: Synthetic oligonucleotide
  Antisense strand to SEQ ID NO: 977936
uccuuucuuaauagcuccu

SEQ ID NO: 977938 - RNA, 19 nt, Artificial Sequence
  Description of Artificial Sequence: Synthetic oligonucleotide
  Sense strand starting at position 23 of SEQ ID NO: 914098
uuccaaaucuggcucuagu

SEQ ID NO: 977939 - RNA, 19 nt, Artificial Sequence
  Description of Artificial Sequence: Synthetic oligonucleotide
  Antisense strand to SEQ ID NO: 977938
acuagagccagauuuggaa

SEQ ID NO: 977940 - RNA, 19 nt, Artificial Sequence
  Description of Artificial Sequence: Synthetic oligonucleotide
  Sense strand starting at position 3048 of SEQ ID NO: 914098
gcgagagaguagucgagau

SEQ ID NO: 977941 - RNA, 19 nt, Artificial Sequence
  Description of Artificial Sequence: Synthetic oligonucleotide
  Antisense strand to SEQ ID NO: 977940
aucucgacuacucucucgc

SEQ ID NO: 977942 - RNA, 19 nt, Artificial Sequence
  Description of Artificial Sequence: Synthetic oligonucleotide
  Sense strand starting at position 2341 of SEQ ID NO: 914098
ggaggaguugugugcucaa

SEQ ID NO: 977943 - RNA, 19 nt, Artificial Sequence
  Description of Artificial Sequence: Synthetic oligonucleotide
  Antisense strand to SEQ ID NO: 977942
uugagcacacaacuccucc

SEQ ID NO: 977944 - RNA, 19 nt, Artificial Sequence
  Description of Artificial Sequence: Synthetic oligonucleotide
  Sense strand starting at position 2189 of SEQ ID NO: 914098
ucccgagucucuccgaaau

SEQ ID NO: 977945 - RNA, 19 nt, Artificial Sequence
  Description of Artificial Sequence: Synthetic oligonucleotide
  Antisense strand to SEQ ID NO: 977944
auuucggagagacucggga

SEQ ID NO: 977946 - RNA, 19 nt, Artificial Sequence
  Description of Artificial Sequence: Synthetic oligonucleotide
  Sense strand starting at position 3061 of SEQ ID NO: 914098
cgagaugucuguucuucca

SEQ ID NO: 977947 - RNA, 19 nt, Artificial Sequence
  Description of Artificial Sequence: Synthetic oligonucleotide
  Antisense strand to SEQ ID NO: 977946
uggaagaacagacaucucg

SEQ ID NO: 977948 - RNA, 19 nt, Artificial Sequence
  Description of Artificial Sequence: Synthetic oligonucleotide
  Sense strand starting at position 2818 of SEQ ID NO: 914098
gccugcgaguggucaaaga

SEQ ID NO: 977949 - RNA, 19 nt, Artificial Sequence
  Description of Artificial Sequence: Synthetic oligonucleotide
  Antisense strand to SEQ ID NO: 977948
ucuuugaccacucgcaggc

SEQ ID NO: 977950 - RNA, 19 nt, Artificial Sequence
  Description of Artificial Sequence: Synthetic oligonucleotide
  Sense strand starting at position 3058 of SEQ ID NO: 914098
agucgagaugucuguucuu

SEQ ID NO: 977951 - RNA, 19 nt, Artificial Sequence
  Description of Artificial Sequence: Synthetic oligonucleotide
  Antisense strand to SEQ ID NO: 977950
aagaacagacaucucgacu

SEQ ID NO: 977952 - RNA, 19 nt, Artificial Sequence
  Description of Artificial Sequence: Synthetic oligonucleotide
  Sense strand starting at position 2816 of SEQ ID NO: 914098
gagccugcgaguggucaaa

SEQ ID NO: 977953 - RNA, 19 nt, Artificial Sequence
  Description of Artificial Sequence: Synthetic oligonucleotide
  Antisense strand to SEQ ID NO: 977952
uuugaccacucgcaggcuc

SEQ ID NO: 977954 - RNA, 19 nt, Artificial Sequence
  Description of Artificial Sequence: Synthetic oligonucleotide
  Sense strand starting at position 2033 of SEQ ID NO: 914098
uucggugcuuucuuucuua

SEQ ID NO: 977955 - RNA, 19 nt, Artificial Sequence
  Description of Artificial Sequence: Synthetic oligonucleotide
  Antisense strand to SEQ ID NO: 977954
uaagaaagaaagcaccgaa

SEQ ID NO: 977956 - RNA, 19 nt, Artificial Sequence
  Description of Artificial Sequence: Synthetic oligonucleotide
  Sense strand starting at position 2704 of SEQ ID NO: 914098
cgagcaugugugcacguua

SEQ ID NO: 977957 - RNA, 19 nt, Artificial Sequence
  Description of Artificial Sequence: Synthetic oligonucleotide
  Antisense strand to SEQ ID NO: 977956
uaacgugcacacaugcucg

SEQ ID NO: 977958 - RNA, 19 nt, Artificial Sequence
  Description of Artificial Sequence: Synthetic oligonucleotide
  Sense strand starting at position 2991 of SEQ ID NO: 914098
gccagaucuucucgguuga

SEQ ID NO: 977959 - RNA, 19 nt, Artificial Sequence
  Description of Artificial Sequence: Synthetic oligonucleotide
  Antisense strand to SEQ ID NO: 977958
ucaaccgagaagaucuggc

SEQ ID NO: 977960 - RNA, 19 nt, Artificial Sequence
  Description of Artificial Sequence: Synthetic oligonucleotide
  Sense strand starting at position 2715 of SEQ ID NO: 914098
gcacguuagugugagcgau

SEQ ID NO: 977961 - RNA, 19 nt, Artificial Sequence
  Description of Artificial Sequence: Synthetic oligonucleotide
  Antisense strand to SEQ ID NO: 977960
aucgcucacacuaacgugc

SEQ ID NO: 977962 - RNA, 19 nt, Artificial Sequence
  Description of Artificial Sequence: Synthetic oligonucleotide
  Sense strand starting at position 2361 of SEQ ID NO: 914098
gccaacuguucgcguucua

SEQ ID NO: 977963 - RNA, 19 nt, Artificial Sequence
  Description of Artificial Sequence: Synthetic oligonucleotide
  Antisense strand to SEQ ID NO: 977962
uagaacgcgaacaguuggc

SEQ ID NO: 977964 - RNA, 19 nt, Artificial Sequence
  Description of Artificial Sequence: Synthetic oligonucleotide
  Sense strand starting at position 3195 of SEQ ID NO: 914099
guguuuagucgggucccua

SEQ ID NO: 977965 - RNA, 19 nt, Artificial Sequence
  Description of Artificial Sequence: Synthetic oligonucleotide
  Antisense strand to SEQ ID NO: 977964
uagggacccgacuaaacac

SEQ ID NO: 977966 - RNA, 19 nt, Artificial Sequence
  Description of Artificial Sequence: Synthetic oligonucleotide
  Sense strand starting at position 2446 of SEQ ID NO: 914099
gauuuaggaauccguguuu

SEQ ID NO: 977967 - RNA, 19 nt, Artificial Sequence
  Description of Artificial Sequence: Synthetic oligonucleotide
  Antisense strand to SEQ ID NO: 977966
aaacacggauuccuaaauc

SEQ ID NO: 977968 - RNA, 19 nt, Artificial Sequence
  Description of Artificial Sequence: Synthetic oligonucleotide
  Sense strand starting at position 3857 of SEQ ID NO: 914099
ggagaaauguauguaacac

SEQ ID NO: 977969 - RNA, 19 nt, Artificial Sequence
  Description of Artificial Sequence: Synthetic oligonucleotide
  Antisense strand to SEQ ID NO: 977968
guguuacauacauuucucc

SEQ ID NO: 977970 - RNA, 19 nt, Artificial Sequence
  Description of Artificial Sequence: Synthetic oligonucleotide
  Sense strand starting at position 3877 of SEQ ID NO: 914099
gagugauuacaauaugcau

SEQ ID NO: 977971 - RNA, 19 nt, Artificial Sequence
  Description of Artificial Sequence: Synthetic oligonucleotide
  Antisense strand to SEQ ID NO: 977970
augcauauuguaaucacuc

SEQ ID NO: 977972 - RNA, 19 nt, Artificial Sequence
  Description of Artificial Sequence: Synthetic oligonucleotide
  Sense strand starting at position 2717 of SEQ ID NO: 914099
aaauuuaggcuucguuaug

SEQ ID NO: 977973 - RNA, 19 nt, Artificial Sequence
  Description of Artificial Sequence: Synthetic oligonucleotide
  Antisense strand to SEQ ID NO: 977972
cauaacgaagccuaaauuu

SEQ ID NO: 977974 - RNA, 19 nt, Artificial Sequence
  Description of Artificial Sequence: Synthetic oligonucleotide
  Sense strand starting at position 3856 of SEQ ID NO: 914099
uggagaaauguauguaaca

SEQ ID NO: 977975 - RNA, 19 nt, Artificial Sequence
  Description of Artificial Sequence: Synthetic oligonucleotide
  Antisense strand to SEQ ID NO: 977974
uguuacauacauuucucca

SEQ ID NO: 977976 - RNA, 19 nt, Artificial Sequence
  Description of Artificial Sequence: Synthetic oligonucleotide
  Sense strand starting at position 358 of SEQ ID NO: 914099
uggauacgcacggaauaaa

SEQ ID NO: 977977 - RNA, 19 nt, Artificial Sequence
  Description of Artificial Sequence: Synthetic oligonucleotide
  Antisense strand to SEQ ID NO: 977976
uuuauuccgugcguaucca

SEQ ID NO: 977978 - RNA, 19 nt, Artificial Sequence
  Description of Artificial Sequence: Synthetic oligonucleotide
  Sense strand starting at position 2507 of SEQ ID NO: 914099
aagauuccuggaggagcau

SEQ ID NO: 977979 - RNA, 19 nt, Artificial Sequence
  Description of Artificial Sequence: Synthetic oligonucleotide
  Antisense strand to SEQ ID NO: 977978
augcuccuccaggaaucuu

SEQ ID NO: 977980 - RNA, 19 nt, Artificial Sequence
  Description of Artificial Sequence: Synthetic oligonucleotide
  Sense strand starting at position 3865 of SEQ ID NO: 914099
guauguaacacagagugau

SEQ ID NO: 977981 - RNA, 19 nt, Artificial Sequence
  Description of Artificial Sequence: Synthetic oligonucleotide
  Antisense strand to SEQ ID NO: 977980
aucacucuguguuacauac

SEQ ID NO: 977982 - RNA, 19 nt, Artificial Sequence
  Description of Artificial Sequence: Synthetic oligonucleotide
  Sense strand starting at position 3331 of SEQ ID NO: 914099
augggaauauguccuuuaa

SEQ ID NO: 977983 - RNA, 19 nt, Artificial Sequence
  Description of Artificial Sequence: Synthetic oligonucleotide
  Antisense strand to SEQ ID NO: 977982
uuaaaggacauauucccau

SEQ ID NO: 977984 - RNA, 19 nt, Artificial Sequence
  Description of Artificial Sequence: Synthetic oligonucleotide
  Sense strand starting at position 3579 of SEQ ID NO: 914099
guguuaagagcucaauaga

SEQ ID NO: 977985 - RNA, 19 nt, Artificial Sequence
  Description of Artificial Sequence: Synthetic oligonucleotide
  Antisense strand to SEQ ID NO: 977984
ucuauugagcucuuaacac

SEQ ID NO: 977986 - RNA, 19 nt, Artificial Sequence
  Description of Artificial Sequence: Synthetic oligonucleotide
  Sense strand starting at position 3791 of SEQ ID NO: 914099
auuaaagaagcuugaucuu

SEQ ID NO: 977987 - RNA, 19 nt, Artificial Sequence
  Description of Artificial Sequence: Synthetic oligonucleotide
  Antisense strand to SEQ ID NO: 977986
aagaucaagcuucuuuaau

SEQ ID NO: 977988 - RNA, 19 nt, Artificial Sequence
  Description of Artificial Sequence: Synthetic oligonucleotide
  Sense strand starting at position 73 of SEQ ID NO: 914099
gucuguguuagucugugua

SEQ ID NO: 977989 - RNA, 19 nt, Artificial Sequence
  Description of Artificial Sequence: Synthetic oligonucleotide
  Antisense strand to SEQ ID NO: 977988
uacacagacuaacacagac

SEQ ID NO: 977990 - RNA, 19 nt, Artificial Sequence
  Description of Artificial Sequence: Synthetic oligonucleotide
  Sense strand starting at position 3070 of SEQ ID NO: 914099
uggaaugaguccucuauau

SEQ ID NO: 977991 - RNA, 19 nt, Artificial Sequence
  Description of Artificial Sequence: Synthetic oligonucleotide
  Antisense strand to SEQ ID NO: 977990
auauagaggacucauucca

SEQ ID NO: 977992 - RNA, 19 nt, Artificial Sequence
  Description of Artificial Sequence: Synthetic oligonucleotide
  Sense strand starting at position 1262 of SEQ ID NO: 914099
ggaagucgaaggugaucaa

SEQ ID NO: 977993 - RNA, 19 nt, Artificial Sequence
  Description of Artificial Sequence: Synthetic oligonucleotide
  Antisense strand to SEQ ID NO: 977992
uugaucaccuucgacuucc

SEQ ID NO: 977994 - RNA, 19 nt, Artificial Sequence
  Description of Artificial Sequence: Synthetic oligonucleotide
  Sense strand starting at position 588 of SEQ ID NO: 914099
augcguuuagaagauuaua

SEQ ID NO: 977995 - RNA, 19 nt, Artificial Sequence
  Description of Artificial Sequence: Synthetic oligonucleotide
  Antisense strand to SEQ ID NO: 977994
uauaaucuucuaaacgcau

SEQ ID NO: 977996 - RNA, 19 nt, Artificial Sequence
  Description of Artificial Sequence: Synthetic oligonucleotide
  Sense strand starting at position 3439 of SEQ ID NO: 914099
uuccuuguugaaugaugaa

SEQ ID NO: 977997 - RNA, 19 nt, Artificial Sequence
  Description of Artificial Sequence: Synthetic oligonucleotide
  Antisense strand to SEQ ID NO: 977996
uucaucauucaacaaggaa

SEQ ID NO: 977998 - RNA, 19 nt, Artificial Sequence
  Description of Artificial Sequence: Synthetic oligonucleotide
  Sense strand starting at position 3263 of SEQ ID NO: 914099
cagugauggccacaaucuu

SEQ ID NO: 977999 - RNA, 19 nt, Artificial Sequence
  Description of Artificial Sequence: Synthetic oligonucleotide
  Antisense strand to SEQ ID NO: 977998
aagauuguggccaucacug

SEQ ID NO: 978000 - RNA, 19 nt, Artificial Sequence
  Description of Artificial Sequence: Synthetic oligonucleotide
  Sense strand starting at position 3436 of SEQ ID NO: 914099
caguuccuuguugaaugau

SEQ ID NO: 978001 - RNA, 19 nt, Artificial Sequence
  Description of Artificial Sequence: Synthetic oligonucleotide
  Antisense strand to SEQ ID NO: 978000
aucauucaacaaggaacug

SEQ ID NO: 978002 - RNA, 19 nt, Artificial Sequence
  Description of Artificial Sequence: Synthetic oligonucleotide
  Sense strand starting at position 2957 of SEQ ID NO: 914099
ccagaugucaaguggauac

SEQ ID NO: 978003 - RNA, 19 nt, Artificial Sequence
  Description of Artificial Sequence: Synthetic oligonucleotide
  Antisense strand to SEQ ID NO: 978002
guauccacuugacaucugg

SEQ ID NO: 978004 - RNA, 19 nt, Artificial Sequence
  Description of Artificial Sequence: Synthetic oligonucleotide
  Sense strand starting at position 3184 of SEQ ID NO: 914099
gaagaauaaguguguuuag

SEQ ID NO: 978005 - RNA, 19 nt, Artificial Sequence
  Description of Artificial Sequence: Synthetic oligonucleotide
  Antisense strand to SEQ ID NO: 978004
cuaaacacacuuauucuuc

SEQ ID NO: 978006 - RNA, 19 nt, Artificial Sequence
  Description of Artificial Sequence: Synthetic oligonucleotide
  Sense strand starting at position 1086 of SEQ ID NO: 914099
cucucacaucugcaagagu

SEQ ID NO: 978007 - RNA, 19 nt, Artificial Sequence
  Description of Artificial Sequence: Synthetic oligonucleotide
  Antisense strand to SEQ ID NO: 978006
acucuugcagaugugagag

SEQ ID NO: 978008 - RNA, 19 nt, Artificial Sequence
  Description of Artificial Sequence: Synthetic oligonucleotide
  Sense strand starting at position 1320 of SEQ ID NO: 914099
gucucauuaggguagaguc

SEQ ID NO: 978009 - RNA, 19 nt, Artificial Sequence
  Description of Artificial Sequence: Synthetic oligonucleotide
  Antisense strand to SEQ ID NO: 978008
gacucuacccuaaugagac

SEQ ID NO: 978010 - RNA, 19 nt, Artificial Sequence
  Description of Artificial Sequence: Synthetic oligonucleotide
  Sense strand starting at position 2913 of SEQ ID NO: 914099
aguugucaacuuuaaaugu

SEQ ID NO: 978011 - RNA, 19 nt, Artificial Sequence
  Description of Artificial Sequence: Synthetic oligonucleotide
  Antisense strand to SEQ ID NO: 978010
acauuuaaaguugacaacu

SEQ ID NO: 978012 - RNA, 19 nt, Artificial Sequence
  Description of Artificial Sequence: Synthetic oligonucleotide
  Sense strand starting at position 2718 of SEQ ID NO: 914099
aauuuaggcuucguuaugu

SEQ ID NO: 978013 - RNA, 19 nt, Artificial Sequence
  Description of Artificial Sequence: Synthetic oligonucleotide
  Antisense strand to SEQ ID NO: 978012
acauaacgaagccuaaauu

SEQ ID NO: 978014 - RNA, 19 nt, Artificial Sequence
  Description of Artificial Sequence: Synthetic oligonucleotide
  Sense strand starting at position 2180 of SEQ ID NO: 914099
gucggagcuccuuacaaag

SEQ ID NO: 978015 - RNA, 19 nt, Artificial Sequence
  Description of Artificial Sequence: Synthetic oligonucleotide
  Antisense strand to SEQ ID NO: 978014
cuuuguaaggagcuccgac

SEQ ID NO: 978016 - RNA, 19 nt, Artificial Sequence
  Description of Artificial Sequence: Synthetic oligonucleotide
  Sense strand starting at position 2845 of SEQ ID NO: 914099
ugaaguacuuagucuauua

SEQ ID NO: 978017 - RNA, 19 nt, Artificial Sequence
  Description of Artificial Sequence: Synthetic oligonucleotide
  Antisense strand to SEQ ID NO: 978016
uaauagacuaaguacuuca

SEQ ID NO: 978018 - RNA, 19 nt, Artificial Sequence
  Description of Artificial Sequence: Synthetic oligonucleotide
  Sense strand starting at position 1154 of SEQ ID NO: 914099
gucucuaccuacuuggaau

SEQ ID NO: 978019 - RNA, 19 nt, Artificial Sequence
  Description of Artificial Sequence: Synthetic oligonucleotide
  Antisense strand to SEQ ID NO: 978018
auuccaaguagguagagac

SEQ ID NO: 978020 - RNA, 19 nt, Artificial Sequence
  Description of Artificial Sequence: Synthetic oligonucleotide
  Sense strand starting at position 3060 of SEQ ID NO: 914099
guucuauauuuggaaugag

SEQ ID NO: 978021 - RNA, 19 nt, Artificial Sequence
  Description of Artificial Sequence: Synthetic oligonucleotide
  Antisense strand to SEQ ID NO: 978020
cucauuccaaauauagaac

SEQ ID NO: 978022 - RNA, 19 nt, Artificial Sequence
  Description of Artificial Sequence: Synthetic oligonucleotide
  Sense strand starting at position 3356 of SEQ ID NO: 914099
aguuaugcguucccauuua

SEQ ID NO: 978023 - RNA, 19 nt, Artificial Sequence
  Description of Artificial Sequence: Synthetic oligonucleotide
  Antisense strand to SEQ ID NO: 978022
uaaaugggaacgcauaacu

SEQ ID NO: 978024 - RNA, 19 nt, Artificial Sequence
  Description of Artificial Sequence: Synthetic oligonucleotide
  Sense strand starting at position 1023 of SEQ ID NO: 914099
cucuuaucaguuuauguua

SEQ ID NO: 978025 - RNA, 19 nt, Artificial Sequence
  Description of Artificial Sequence: Synthetic oligonucleotide
  Antisense strand to SEQ ID NO: 978024
uaacauaaacugauaagag

SEQ ID NO: 978026 - RNA, 19 nt, Artificial Sequence
  Description of Artificial Sequence: Synthetic oligonucleotide
  Sense strand starting at position 542 of SEQ ID NO: 914099
uguauuaucccuuacaguu

SEQ ID NO: 978027 - RNA, 19 nt, Artificial Sequence
  Description of Artificial Sequence: Synthetic oligonucleotide
  Antisense strand to SEQ ID NO: 978026
aacuguaagggauaauaca

SEQ ID NO: 978028 - RNA, 19 nt, Artificial Sequence
  Description of Artificial Sequence: Synthetic oligonucleotide
  Sense strand starting at position 1231 of SEQ ID NO: 914099
cgucuaaaccacuggaauu

SEQ ID NO: 978029 - RNA, 19 nt, Artificial Sequence
  Description of Artificial Sequence: Synthetic oligonucleotide
  Antisense strand to SEQ ID NO: 978028
aauuccagugguuuagacg

SEQ ID NO: 978030 - RNA, 19 nt, Artificial Sequence
  Description of Artificial Sequence: Synthetic oligonucleotide
  Sense strand starting at position 3684 of SEQ ID NO: 914099
uacuuuagagucugaguau

SEQ ID NO: 978031 - RNA, 19 nt, Artificial Sequence
  Description of Artificial Sequence: Synthetic oligonucleotide
  Antisense strand to SEQ ID NO: 978030
auacucagacucuaaagua

SEQ ID NO: 978032 - RNA, 19 nt, Artificial Sequence
  Description of Artificial Sequence: Synthetic oligonucleotide
  Sense strand starting at position 540 of SEQ ID NO: 914099
ucuguauuaucccuuacag

SEQ ID NO: 978033 - RNA, 19 nt, Artificial Sequence
  Description of Artificial Sequence: Synthetic oligonucleotide
  Antisense strand to SEQ ID NO: 978032
cuguaagggauaauacaga

SEQ ID NO: 978034 - RNA, 19 nt, Artificial Sequence
  Description of Artificial Sequence: Synthetic oligonucleotide
  Sense strand starting at position 3640 of SEQ ID NO: 914099
gcuacuaaguucuuugaaa

SEQ ID NO: 978035 - RNA, 19 nt, Artificial Sequence
  Description of Artificial Sequence: Synthetic oligonucleotide
  Antisense strand to SEQ ID NO: 978034
uuucaaagaacuuaguagc

SEQ ID NO: 978036 - RNA, 19 nt, Artificial Sequence
  Description of Artificial Sequence: Synthetic oligonucleotide
  Sense strand starting at position 2726 of SEQ ID NO: 914099
cuucguuauguugaugaau

SEQ ID NO: 978037 - RNA, 19 nt, Artificial Sequence
  Description of Artificial Sequence: Synthetic oligonucleotide
  Antisense strand to SEQ ID NO: 978036
auucaucaacauaacgaag

SEQ ID NO: 978038 - RNA, 19 nt, Artificial Sequence
  Description of Artificial Sequence: Synthetic oligonucleotide
  Sense strand starting at position 242 of SEQ ID NO: 914099
agagauuagugguugucca

SEQ ID NO: 978039 - RNA, 19 nt, Artificial Sequence
  Description of Artificial Sequence: Synthetic oligonucleotide
  Antisense strand to SEQ ID NO: 978038
uggacaaccacuaaucucu

SEQ ID NO: 978040 - RNA, 19 nt, Artificial Sequence
  Description of Artificial Sequence: Synthetic oligonucleotide
  Sense strand starting at position 2331 of SEQ ID NO: 914099
uucgacggucccgagaaau

SEQ ID NO: 978041 - RNA, 19 nt, Artificial Sequence
  Description of Artificial Sequence: Synthetic oligonucleotide
  Antisense strand to SEQ ID NO: 978040
auuucucgggaccgucgaa

SEQ ID NO: 978042 - RNA, 19 nt, Artificial Sequence
  Description of Artificial Sequence: Synthetic oligonucleotide
  Sense strand starting at position 322 of SEQ ID NO: 914099
caaugaaaguguucuguau

SEQ ID NO: 978043 - RNA, 19 nt, Artificial Sequence
  Description of Artificial Sequence: Synthetic oligonucleotide
  Antisense strand to SEQ ID NO: 978042
auacagaacacuuucauug

SEQ ID NO: 978044 - RNA, 19 nt, Artificial Sequence
  Description of Artificial Sequence: Synthetic oligonucleotide
  Sense strand starting at position 1433 of SEQ ID NO: 914100
agugggucgcggcugaaau

SEQ ID NO: 978045 - RNA, 19 nt, Artificial Sequence
  Description of Artificial Sequence: Synthetic oligonucleotide
  Antisense strand to SEQ ID NO: 978044
auuucagccgcgacccacu

SEQ ID NO: 978046 - RNA, 19 nt, Artificial Sequence
  Description of Artificial Sequence: Synthetic oligonucleotide
  Sense strand starting at position 2902 of SEQ ID NO: 914100
uggauucuugagcaauuac

SEQ ID NO: 978047 - RNA, 19 nt, Artificial Sequence
  Description of Artificial Sequence: Synthetic oligonucleotide
  Antisense strand to SEQ ID NO: 978046
guaauugcucaagaaucca

SEQ ID NO: 978048 - RNA, 19 nt, Artificial Sequence
  Description of Artificial Sequence: Synthetic oligonucleotide
  Sense strand starting at position 1943 of SEQ ID NO: 914100
cgaguuauggcucuaccgu

SEQ ID NO: 978049 - RNA, 19 nt, Artificial Sequence
  Description of Artificial Sequence: Synthetic oligonucleotide
  Antisense strand to SEQ ID NO: 978048
acgguagagccauaacucg

SEQ ID NO: 978050 - RNA, 19 nt, Artificial Sequence
  Description of Artificial Sequence: Synthetic oligonucleotide
  Sense strand starting at position 1116 of SEQ ID NO: 914100
agcgguuccagugcuugau

SEQ ID NO: 978051 - RNA, 19 nt, Artificial Sequence
  Description of Artificial Sequence: Synthetic oligonucleotide
  Antisense strand to SEQ ID NO: 978050
aucaagcacuggaaccgcu

SEQ ID NO: 978052 - RNA, 19 nt, Artificial Sequence
  Description of Artificial Sequence: Synthetic oligonucleotide
  Sense strand starting at position 3538 of SEQ ID NO: 914100
guaggaaauggccaauagu

SEQ ID NO: 978053 - RNA, 19 nt, Artificial Sequence
  Description of Artificial Sequence: Synthetic oligonucleotide
  Antisense strand to SEQ ID NO: 978052
acuauuggccauuuccuac

SEQ ID NO: 978054 - RNA, 19 nt, Artificial Sequence
  Description of Artificial Sequence: Synthetic oligonucleotide
  Sense strand starting at position 1566 of SEQ ID NO: 914100
guuugacaucaucauaccu

SEQ ID NO: 978055 - RNA, 19 nt, Artificial Sequence
  Description of Artificial Sequence: Synthetic oligonucleotide
  Antisense strand to SEQ ID NO: 978054
agguaugaugaugucaaac

SEQ ID NO: 978056 - RNA, 19 nt, Artificial Sequence
  Description of Artificial Sequence: Synthetic oligonucleotide
  Sense strand starting at position 3470 of SEQ ID NO: 914100
uagugaagccaauaguaau

SEQ ID NO: 978057 - RNA, 19 nt, Artificial Sequence
  Description of Artificial Sequence: Synthetic oligonucleotide
  Antisense strand to SEQ ID NO: 978056
auuacuauuggcuucacua

SEQ ID NO: 978058 - RNA, 19 nt, Artificial Sequence
  Description of Artificial Sequence: Synthetic oligonucleotide
  Sense strand starting at position 2208 of SEQ ID NO: 914100
aggcauauuugcuuauggu

SEQ ID NO: 978059 - RNA, 19 nt, Artificial Sequence
  Description of Artificial Sequence: Synthetic oligonucleotide
  Antisense strand to SEQ ID NO: 978058
accauaagcaaauaugccu

SEQ ID NO: 978060 - RNA, 19 nt, Artificial Sequence
  Description of Artificial Sequence: Synthetic oligonucleotide
  Sense strand starting at position 2737 of SEQ ID NO: 914100
uccuuugcuguuggauuua

SEQ ID NO: 978061 - RNA, 19 nt, Artificial Sequence
  Description of Artificial Sequence: Synthetic oligonucleotide
  Antisense strand to SEQ ID NO: 978060
uaaauccaacagcaaagga

SEQ ID NO: 978062 - RNA, 19 nt, Artificial Sequence
  Description of Artificial Sequence: Synthetic oligonucleotide
  Sense strand starting at position 3486 of SEQ ID NO: 914100
aaugcuauuuaggaagaag

SEQ ID NO: 978063 - RNA, 19 nt, Artificial Sequence
  Description of Artificial Sequence: Synthetic oligonucleotide
  Antisense strand to SEQ ID NO: 978062
cuucuuccuaaauagcauu

SEQ ID NO: 978064 - RNA, 19 nt, Artificial Sequence
  Description of Artificial Sequence: Synthetic oligonucleotide
  Sense strand starting at position 3301 of SEQ ID NO: 914100
ugucaagaugcccaucaau

SEQ ID NO: 978065 - RNA, 19 nt, Artificial Sequence
  Description of Artificial Sequence: Synthetic oligonucleotide
  Antisense strand to SEQ ID NO: 978064
auugaugggcaucuugaca

SEQ ID NO: 978066 - RNA, 19 nt, Artificial Sequence
  Description of Artificial Sequence: Synthetic oligonucleotide
  Sense strand starting at position 2856 of SEQ ID NO: 914100
cggcuugcugucguggaga

SEQ ID NO: 978067 - RNA, 19 nt, Artificial Sequence
  Description of Artificial Sequence: Synthetic oligonucleotide
  Antisense strand to SEQ ID NO: 978066
ucuccacgacagcaagccg

SEQ ID NO: 978068 - RNA, 19 nt, Artificial Sequence
  Description of Artificial Sequence: Synthetic oligonucleotide
  Sense strand starting at position 2987 of SEQ ID NO: 914100
cauacuaagugggcauaau

SEQ ID NO: 978069 - RNA, 19 nt, Artificial Sequence
  Description of Artificial Sequence: Synthetic oligonucleotide
  Antisense strand to SEQ ID NO: 978068
auuaugcccacuuaguaug

SEQ ID NO: 978070 - RNA, 19 nt, Artificial Sequence
  Description of Artificial Sequence: Synthetic oligonucleotide
  Sense strand starting at position 3180 of SEQ ID NO: 914100
gcuauauaucucuaaggca

SEQ ID NO: 978071 - RNA, 19 nt, Artificial Sequence
  Description of Artificial Sequence: Synthetic oligonucleotide
  Antisense strand to SEQ ID NO: 978070
ugccuuagagauauauagc

SEQ ID NO: 978072 - RNA, 19 nt, Artificial Sequence
  Description of Artificial Sequence: Synthetic oligonucleotide
  Sense strand starting at position 2901 of SEQ ID NO: 914100
cuggauucuugagcaauua

SEQ ID NO: 978073 - RNA, 19 nt, Artificial Sequence
  Description of Artificial Sequence: Synthetic oligonucleotide
  Antisense strand to SEQ ID NO: 978072
uaauugcucaagaauccag

SEQ ID NO: 978074 - RNA, 19 nt, Artificial Sequence
  Description of Artificial Sequence: Synthetic oligonucleotide
  Sense strand starting at position 1446 of SEQ ID NO: 914100
ugaaaugugaccugguuag

SEQ ID NO: 978075 - RNA, 19 nt, Artificial Sequence
  Description of Artificial Sequence: Synthetic oligonucleotide
  Antisense strand to SEQ ID NO: 978074
cuaaccaggucacauuuca

SEQ ID NO: 978076 - RNA, 19 nt, Artificial Sequence
  Description of Artificial Sequence: Synthetic oligonucleotide
  Sense strand starting at position 3437 of SEQ ID NO: 914100
gucgaaagcuaaucaacaa

SEQ ID NO: 978077 - RNA, 19 nt, Artificial Sequence
  Description of Artificial Sequence: Synthetic oligonucleotide
  Antisense strand to SEQ ID NO: 978076
uuguugauuagcuuucgac

SEQ ID NO: 978078 - RNA, 19 nt, Artificial Sequence
  Description of Artificial Sequence: Synthetic oligonucleotide
  Sense strand starting at position 3264 of SEQ ID NO: 914100
uuaccaaaguugcugaaua

SEQ ID NO: 978079 - RNA, 19 nt, Artificial Sequence
  Description of Artificial Sequence: Synthetic oligonucleotide
  Antisense strand to SEQ ID NO: 978078
uauucagcaacuuugguaa

SEQ ID NO: 978080 - RNA, 19 nt, Artificial Sequence
  Description of Artificial Sequence: Synthetic oligonucleotide
  Sense strand starting at position 3255 of SEQ ID NO: 914100
cuuccagaguuaccaaagu

SEQ ID NO: 978081 - RNA, 19 nt, Artificial Sequence
  Description of Artificial Sequence: Synthetic oligonucleotide
  Antisense strand to SEQ ID NO: 978080
acuuugguaacucuggaag

SEQ ID NO: 978082 - RNA, 19 nt, Artificial Sequence
  Description of Artificial Sequence: Synthetic oligonucleotide
  Sense strand starting at position 1463 of SEQ ID NO: 914100
aggagaugcacuugucuga

SEQ ID NO: 978083 - RNA, 19 nt, Artificial Sequence
  Description of Artificial Sequence: Synthetic oligonucleotide
  Antisense strand to SEQ ID NO: 978082
ucagacaagugcaucuccu

SEQ ID NO: 978084 - RNA, 19 nt, Artificial Sequence
  Description of Artificial Sequence: Synthetic oligonucleotide
  Sense strand starting at position 3322 of SEQ ID NO: 914100
gacaauagcugucuccaga

SEQ ID NO: 978085 - RNA, 19 nt, Artificial Sequence
  Description of Artificial Sequence: Synthetic oligonucleotide
  Antisense strand to SEQ ID NO: 978084
ucuggagacagcuauuguc

SEQ ID NO: 978086 - RNA, 19 nt, Artificial Sequence
  Description of Artificial Sequence: Synthetic oligonucleotide
  Sense strand starting at position 3434 of SEQ ID NO: 914100
ugugucgaaagcuaaucaa

SEQ ID NO: 978087 - RNA, 19 nt, Artificial Sequence
  Description of Artificial Sequence: Synthetic oligonucleotide
  Antisense strand to SEQ ID NO: 978086
uugauuagcuuucgacaca

SEQ ID NO: 978088 - RNA, 19 nt, Artificial Sequence
  Description of Artificial Sequence: Synthetic oligonucleotide
  Sense strand starting at position 3028 of SEQ ID NO: 914100
ucuuuccucugguugggaa

SEQ ID NO: 978089 - RNA, 19 nt, Artificial Sequence
  Description of Artificial Sequence: Synthetic oligonucleotide
  Antisense strand to SEQ ID NO: 978088
uucccaaccagaggaaaga

SEQ ID NO: 978090 - RNA, 19 nt, Artificial Sequence
  Description of Artificial Sequence: Synthetic oligonucleotide
  Sense strand starting at position 3513 of SEQ ID NO: 914100
uuuccagaugacuggugua

SEQ ID NO: 978091 - RNA, 19 nt, Artificial Sequence
  Description of Artificial Sequence: Synthetic oligonucleotide
  Antisense strand to SEQ ID NO: 978090
uacaccagucaucuggaaa

SEQ ID NO: 978092 - RNA, 19 nt, Artificial Sequence
  Description of Artificial Sequence: Synthetic oligonucleotide
  Sense strand starting at position 431 of SEQ ID NO: 914100
cugaaauguugguccggga

SEQ ID NO: 978093 - RNA, 19 nt, Artificial Sequence
  Description of Artificial Sequence: Synthetic oligonucleotide
  Antisense strand to SEQ ID NO: 978092
ucccggaccaacauuucag

SEQ ID NO: 978094 - RNA, 19 nt, Artificial Sequence
  Description of Artificial Sequence: Synthetic oligonucleotide
  Sense strand starting at position 2058 of SEQ ID NO: 914100
cacugaguggcuggugaaa

SEQ ID NO: 978095 - RNA, 19 nt, Artificial Sequence
  Description of Artificial Sequence: Synthetic oligonucleotide
  Antisense strand to SEQ ID NO: 978094
uuucaccagccacucagug

SEQ ID NO: 978096 - RNA, 19 nt, Artificial Sequence
  Description of Artificial Sequence: Synthetic oligonucleotide
  Sense strand starting at position 1323 of SEQ ID NO: 914100
ucuugacuucugcaguauu

SEQ ID NO: 978097 - RNA, 19 nt, Artificial Sequence
  Description of Artificial Sequence: Synthetic oligonucleotide
  Antisense strand to SEQ ID NO: 978096
aauacugcagaagucaaga

SEQ ID NO: 978098 - RNA, 19 nt, Artificial Sequence
  Description of Artificial Sequence: Synthetic oligonucleotide
  Sense strand starting at position 972 of SEQ ID NO: 914100
uuacuuuccguguaauuag

SEQ ID NO: 978099 - RNA, 19 nt, Artificial Sequence
  Description of Artificial Sequence: Synthetic oligonucleotide
  Antisense strand to SEQ ID NO: 978098
cuaauuacacggaaaguaa

SEQ ID NO: 978100 - RNA, 19 nt, Artificial Sequence
  Description of Artificial Sequence: Synthetic oligonucleotide
  Sense strand starting at position 1168 of SEQ ID NO: 914100
uugcucguccuccaugaaa

SEQ ID NO: 978101 - RNA, 19 nt, Artificial Sequence
  Description of Artificial Sequence: Synthetic oligonucleotide
  Antisense strand to SEQ ID NO: 978100
uuucauggaggacgagcaa

SEQ ID NO: 978102 - RNA, 19 nt, Artificial Sequence
  Description of Artificial Sequence: Synthetic oligonucleotide
  Sense strand starting at position 2621 of SEQ ID NO: 914100
gguuccuugucacccugaa

SEQ ID NO: 978103 - RNA, 19 nt, Artificial Sequence
  Description of Artificial Sequence: Synthetic oligonucleotide
  Antisense strand to SEQ ID NO: 978102
uucagggugacaaggaacc

SEQ ID NO: 978104 - RNA, 19 nt, Artificial Sequence
  Description of Artificial Sequence: Synthetic oligonucleotide
  Sense strand starting at position 3058 of SEQ ID NO: 914100
ggugucccauaguucugaa

SEQ ID NO: 978105 - RNA, 19 nt, Artificial Sequence
  Description of Artificial Sequence: Synthetic oligonucleotide
  Antisense strand to SEQ ID NO: 978104
uucagaacuaugggacacc

SEQ ID NO: 978106 - RNA, 19 nt, Artificial Sequence
  Description of Artificial Sequence: Synthetic oligonucleotide
  Sense strand starting at position 1444 of SEQ ID NO: 914100
gcugaaaugugaccugguu

SEQ ID NO: 978107 - RNA, 19 nt, Artificial Sequence
  Description of Artificial Sequence: Synthetic oligonucleotide
  Antisense strand to SEQ ID NO: 978106
aaccaggucacauuucagc

SEQ ID NO: 978108 - RNA, 19 nt, Artificial Sequence
  Description of Artificial Sequence: Synthetic oligonucleotide
  Sense strand starting at position 1630 of SEQ ID NO: 914100
aagcgcucccucgaugaga

SEQ ID NO: 978109 - RNA, 19 nt, Artificial Sequence
  Description of Artificial Sequence: Synthetic oligonucleotide
  Antisense strand to SEQ ID NO: 978108
ucucaucgagggagcgcuu

SEQ ID NO: 978110 - RNA, 19 nt, Artificial Sequence
  Description of Artificial Sequence: Synthetic oligonucleotide
  Sense strand starting at position 2458 of SEQ ID NO: 914100
gaaacaucaucugauggga

SEQ ID NO: 978111 - RNA, 19 nt, Artificial Sequence
  Description of Artificial Sequence: Synthetic oligonucleotide
  Antisense strand to SEQ ID NO: 978110
ucccaucagaugauguuuc

SEQ ID NO: 978112 - RNA, 19 nt, Artificial Sequence
  Description of Artificial Sequence: Synthetic oligonucleotide
  Sense strand starting at position 1944 of SEQ ID NO: 914100
gaguuauggcucuaccgua

SEQ ID NO: 978113 - RNA, 19 nt, Artificial Sequence
  Description of Artificial Sequence: Synthetic oligonucleotide
  Antisense strand to SEQ ID NO: 978112
uacgguagagccauaacuc

SEQ ID NO: 978114 - RNA, 19 nt, Artificial Sequence
  Description of Artificial Sequence: Synthetic oligonucleotide
  Sense strand starting at position 2338 of SEQ ID NO: 914100
ccuccuuauuggcuguaga

SEQ ID NO: 978115 - RNA, 19 nt, Artificial Sequence
  Description of Artificial Sequence: Synthetic oligonucleotide
  Antisense strand to SEQ ID NO: 978114
ucuacagccaauaaggagg

SEQ ID NO: 978116 - RNA, 19 nt, Artificial Sequence
  Description of Artificial Sequence: Synthetic oligonucleotide
  Sense strand starting at position 2859 of SEQ ID NO: 914100
cuugcugucguggagacua

SEQ ID NO: 978117 - RNA, 19 nt, Artificial Sequence
  Description of Artificial Sequence: Synthetic oligonucleotide
  Antisense strand to SEQ ID NO: 978116
uagucuccacgacagcaag

SEQ ID NO: 978118 - RNA, 19 nt, Artificial Sequence
  Description of Artificial Sequence: Synthetic oligonucleotide
  Sense strand starting at position 2339 of SEQ ID NO: 914100
cuccuuauuggcuguagau

SEQ ID NO: 978119 - RNA, 19 nt, Artificial Sequence
  Description of Artificial Sequence: Synthetic oligonucleotide
  Antisense strand to SEQ ID NO: 978118
aucuacagccaauaaggag

SEQ ID NO: 978120 - RNA, 19 nt, Artificial Sequence
  Description of Artificial Sequence: Synthetic oligonucleotide
  Sense strand starting at position 2681 of SEQ ID NO: 914100
ccggagucucguugggaaa

SEQ ID NO: 978121 - RNA, 19 nt, Artificial Sequence
  Description of Artificial Sequence: Synthetic oligonucleotide
  Antisense strand to SEQ ID NO: 978120
uuucccaacgagacuccgg

SEQ ID NO: 978122 - RNA, 19 nt, Artificial Sequence
  Description of Artificial Sequence: Synthetic oligonucleotide
  Sense strand starting at position 1963 of SEQ ID NO: 914100
auggguggcuucguuaaga

SEQ ID NO: 978123 - RNA, 19 nt, Artificial Sequence
  Description of Artificial Sequence: Synthetic oligonucleotide
  Antisense strand to SEQ ID NO: 978122
ucuuaacgaagccacccau

SEQ ID NO: 978124 - RNA, 19 nt, Artificial Sequence
  Description of Artificial Sequence: Synthetic oligonucleotide
  Sense strand starting at position 1692 of SEQ ID NO: 914101
agugggucgcggcugaaau

SEQ ID NO: 978125 - RNA, 19 nt, Artificial Sequence
  Description of Artificial Sequence: Synthetic oligonucleotide
  Antisense strand to SEQ ID NO: 978124
auuucagccgcgacccacu

SEQ ID NO: 978126 - RNA, 19 nt, Artificial Sequence
  Description of Artificial Sequence: Synthetic oligonucleotide
  Sense strand starting at position 3161 of SEQ ID NO: 914101
uggauucuugagcaauuac

SEQ ID NO: 978127 - RNA, 19 nt, Artificial Sequence
  Description of Artificial Sequence: Synthetic oligonucleotide
  Antisense strand to SEQ ID NO: 978126
guaauugcucaagaaucca

SEQ ID NO: 978128 - RNA, 19 nt, Artificial Sequence
  Description of Artificial Sequence: Synthetic oligonucleotide
  Sense strand starting at position 2202 of SEQ ID NO: 914101
cgaguuauggcucuaccgu

SEQ ID NO: 978129 - RNA, 19 nt, Artificial Sequence
  Description of Artificial Sequence: Synthetic oligonucleotide
  Antisense strand to SEQ ID NO: 978128
acgguagagccauaacucg

SEQ ID NO: 978130 - RNA, 19 nt, Artificial Sequence
  Description of Artificial Sequence: Synthetic oligonucleotide
  Sense strand starting at position 1375 of SEQ ID NO: 914101
agcgguuccagugcuugau

SEQ ID NO: 978131 - RNA, 19 nt, Artificial Sequence
  Description of Artificial Sequence: Synthetic oligonucleotide
  Antisense strand to SEQ ID NO: 978130
aucaagcacuggaaccgcu

SEQ ID NO: 978132 - RNA, 19 nt, Artificial Sequence
  Description of Artificial Sequence: Synthetic oligonucleotide
  Sense strand starting at position 3797 of SEQ ID NO: 914101
guaggaaauggccaauagu

SEQ ID NO: 978133 - RNA, 19 nt, Artificial Sequence
  Description of Artificial Sequence: Synthetic oligonucleotide
  Antisense strand to SEQ ID NO: 978132
acuauuggccauuuccuac

SEQ ID NO: 978134 - RNA, 19 nt, Artificial Sequence
  Description of Artificial Sequence: Synthetic oligonucleotide
  Sense strand starting at position 1825 of SEQ ID NO: 914101
guuugacaucaucauaccu

SEQ ID NO: 978135 - RNA, 19 nt, Artificial Sequence
  Description of Artificial Sequence: Synthetic oligonucleotide
  Antisense strand to SEQ ID NO: 978134
agguaugaugaugucaaac

SEQ ID NO: 978136 - RNA, 19 nt, Artificial Sequence
  Description of Artificial Sequence: Synthetic oligonucleotide
  Sense strand starting at position 3729 of SEQ ID NO: 914101
uagugaagccaauaguaau

SEQ ID NO: 978137 - RNA, 19 nt, Artificial Sequence
  Description of Artificial Sequence: Synthetic oligonucleotide
  Antisense strand to SEQ ID NO: 978136
auuacuauuggcuucacua

SEQ ID NO: 978138 - RNA, 19 nt, Artificial Sequence
  Description of Artificial Sequence: Synthetic oligonucleotide
  Sense strand starting at position 2467 of SEQ ID NO: 914101
aggcauauuugcuuauggu

SEQ ID NO: 978139 - RNA, 19 nt, Artificial Sequence
  Description of Artificial Sequence: Synthetic oligonucleotide
  Antisense strand to SEQ ID NO: 978138
accauaagcaaauaugccu

SEQ ID NO: 978140 - RNA, 19 nt, Artificial Sequence
  Description of Artificial Sequence: Synthetic oligonucleotide
  Sense strand starting at position 2996 of SEQ ID NO: 914101
uccuuugcuguuggauuua

SEQ ID NO: 978141 - RNA, 19 nt, Artificial Sequence
  Description of Artificial Sequence: Synthetic oligonucleotide
  Antisense strand to SEQ ID NO: 978140
uaaauccaacagcaaagga

SEQ ID NO: 978142 - RNA, 19 nt, Artificial Sequence
  Description of Artificial Sequence: Synthetic oligonucleotide
  Sense strand starting at position 3745 of SEQ ID NO: 914101
aaugcuauuuaggaagaag

SEQ ID NO: 978143 - RNA, 19 nt, Artificial Sequence
  Description of Artificial Sequence: Synthetic oligonucleotide
  Antisense strand to SEQ ID NO: 978142
cuucuuccuaaauagcauu

SEQ ID NO: 978144 - RNA, 19 nt, Artificial Sequence
  Description of Artificial Sequence: Synthetic oligonucleotide
  Sense strand starting at position 3560 of SEQ ID NO: 914101
ugucaagaugcccaucaau

SEQ ID NO: 978145 - RNA, 19 nt, Artificial Sequence
  Description of Artificial Sequence: Synthetic oligonucleotide
  Antisense strand to SEQ ID NO: 978144
auugaugggcaucuugaca

SEQ ID NO: 978146 - RNA, 19 nt, Artificial Sequence
  Description of Artificial Sequence: Synthetic oligonucleotide
  Sense strand starting at position 3115 of SEQ ID NO: 914101
cggcuugcugucguggaga

SEQ ID NO: 978147 - RNA, 19 nt, Artificial Sequence
  Description of Artificial Sequence: Synthetic oligonucleotide
  Antisense strand to SEQ ID NO: 978146
ucuccacgacagcaagccg

SEQ ID NO: 978148 - RNA, 19 nt, Artificial Sequence
  Description of Artificial Sequence: Synthetic oligonucleotide
  Sense strand starting at position 36 of SEQ ID NO: 914101
cuugucugacgguaacaaa

SEQ ID NO: 978149 - RNA, 19 nt, Artificial Sequence
  Description of Artificial Sequence: Synthetic oligonucleotide
  Antisense strand to SEQ ID NO: 978148
uuuguuaccgucagacaag

SEQ ID NO: 978150 - RNA, 19 nt, Artificial Sequence
  Description of Artificial Sequence: Synthetic oligonucleotide
  Sense strand starting at position 3246 of SEQ ID NO: 914101
cauacuaagugggcauaau

SEQ ID NO: 978151 - RNA, 19 nt, Artificial Sequence
  Description of Artificial Sequence: Synthetic oligonucleotide
  Antisense strand to SEQ ID NO: 978150
auuaugcccacuuaguaug

SEQ ID NO: 978152 - RNA, 19 nt, Artificial Sequence
  Description of Artificial Sequence: Synthetic oligonucleotide
  Sense strand starting at position 3439 of SEQ ID NO: 914101
gcuauauaucucuaaggca

SEQ ID NO: 978153 - RNA, 19 nt, Artificial Sequence
  Description of Artificial Sequence: Synthetic oligonucleotide
  Antisense strand to SEQ ID NO: 978152
ugccuuagagauauauagc

SEQ ID NO: 978154 - RNA, 19 nt, Artificial Sequence
  Description of Artificial Sequence: Synthetic oligonucleotide
  Sense strand starting at position 3160 of SEQ ID NO: 914101
cuggauucuugagcaauua

SEQ ID NO: 978155 - RNA, 19 nt, Artificial Sequence
  Description of Artificial Sequence: Synthetic oligonucleotide
  Antisense strand to SEQ ID NO: 978154
uaauugcucaagaauccag

SEQ ID NO: 978156 - RNA, 19 nt, Artificial Sequence
  Description of Artificial Sequence: Synthetic oligonucleotide
  Sense strand starting at position 1705 of SEQ ID NO: 914101
ugaaaugugaccugguuag

SEQ ID NO: 978157 - RNA, 19 nt, Artificial Sequence
  Description of Artificial Sequence: Synthetic oligonucleotide
  Antisense strand to SEQ ID NO: 978156
cuaaccaggucacauuuca

SEQ ID NO: 978158 - RNA, 19 nt, Artificial Sequence
  Description of Artificial Sequence: Synthetic oligonucleotide
  Sense strand starting at position 24 of SEQ ID NO: 914101
gagaaacagucacuugucu

SEQ ID NO: 978159 - RNA, 19 nt, Artificial Sequence
  Description of Artificial Sequence: Synthetic oligonucleotide
  Antisense strand to SEQ ID NO: 978158
agacaagugacuguuucuc

SEQ ID NO: 978160 - RNA, 19 nt, Artificial Sequence
  Description of Artificial Sequence: Synthetic oligonucleotide
  Sense strand starting at position 3696 of SEQ ID NO: 914101
gucgaaagcuaaucaacaa

SEQ ID NO: 978161 - RNA, 19 nt, Artificial Sequence
  Description of Artificial Sequence: Synthetic oligonucleotide
  Antisense strand to SEQ ID NO: 978160
uuguugauuagcuuucgac

SEQ ID NO: 978162 - RNA, 19 nt, Artificial Sequence
  Description of Artificial Sequence: Synthetic oligonucleotide
  Sense strand starting at position 3523 of SEQ ID NO: 914101
uuaccaaaguugcugaaua

SEQ ID NO: 978163 - RNA, 19 nt, Artificial Sequence
  Description of Artificial Sequence: Synthetic oligonucleotide
  Antisense strand to SEQ ID NO: 978162
uauucagcaacuuugguaa

SEQ ID NO: 978164 - RNA, 19 nt, Artificial Sequence
  Description of Artificial Sequence: Synthetic oligonucleotide
  Sense strand starting at position 3514 of SEQ ID NO: 914101
cuuccagaguuaccaaagu

SEQ ID NO: 978165 - RNA, 19 nt, Artificial Sequence
  Description of Artificial Sequence: Synthetic oligonucleotide
  Antisense strand to SEQ ID NO: 978164
acuuugguaacucuggaag

SEQ ID NO: 978166 - RNA, 19 nt, Artificial Sequence
  Description of Artificial Sequence: Synthetic oligonucleotide
  Sense strand starting at position 1722 of SEQ ID NO: 914101
aggagaugcacuugucuga

SEQ ID NO: 978167 - RNA, 19 nt, Artificial Sequence
  Description of Artificial Sequence: Synthetic oligonucleotide
  Antisense strand to SEQ ID NO: 978166
ucagacaagugcaucuccu

SEQ ID NO: 978168 - RNA, 19 nt, Artificial Sequence
  Description of Artificial Sequence: Synthetic oligonucleotide
  Sense strand starting at position 3581 of SEQ ID NO: 914101
gacaauagcugucuccaga

SEQ ID NO: 978169 - RNA, 19 nt, Artificial Sequence
  Description of Artificial Sequence: Synthetic oligonucleotide
  Antisense strand to SEQ ID NO: 978168
ucuggagacagcuauuguc

SEQ ID NO: 978170 - RNA, 19 nt, Artificial Sequence
  Description of Artificial Sequence: Synthetic oligonucleotide
  Sense strand starting at position 77 of SEQ ID NO: 914101
cccaucacuuggcuggaua

SEQ ID NO: 978171 - RNA, 19 nt, Artificial Sequence
  Description of Artificial Sequence: Synthetic oligonucleotide
  Antisense strand to SEQ ID NO: 978170
uauccagccaagugauggg

SEQ ID NO: 978172 - RNA, 19 nt, Artificial Sequence
  Description of Artificial Sequence: Synthetic oligonucleotide
  Sense strand starting at position 89 of SEQ ID NO: 914101
cuggauagccuaugaagca

SEQ ID NO: 978173 - RNA, 19 nt, Artificial Sequence
  Description of Artificial Sequence: Synthetic oligonucleotide
  Antisense strand to SEQ ID NO: 978172
ugcuucauaggcuauccag

SEQ ID NO: 978174 - RNA, 19 nt, Artificial Sequence
  Description of Artificial Sequence: Synthetic oligonucleotide
  Sense strand starting at position 3693 of SEQ ID NO: 914101
ugugucgaaagcuaaucaa

SEQ ID NO: 978175 - RNA, 19 nt, Artificial Sequence
  Description of Artificial Sequence: Synthetic oligonucleotide
  Antisense strand to SEQ ID NO: 978174
uugauuagcuuucgacaca

SEQ ID NO: 978176 - RNA, 19 nt, Artificial Sequence
  Description of Artificial Sequence: Synthetic oligonucleotide
  Sense strand starting at position 3287 of SEQ ID NO: 914101
ucuuuccucugguugggaa

SEQ ID NO: 978177 - RNA, 19 nt, Artificial Sequence
  Description of Artificial Sequence: Synthetic oligonucleotide
  Antisense strand to SEQ ID NO: 978176
uucccaaccagaggaaaga

SEQ ID NO: 978178 - RNA, 19 nt, Artificial Sequence
  Description of Artificial Sequence: Synthetic oligonucleotide
  Sense strand starting at position 3772 of SEQ ID NO: 914101
uuuccagaugacuggugua

SEQ ID NO: 978179 - RNA, 19 nt, Artificial Sequence
  Description of Artificial Sequence: Synthetic oligonucleotide
  Antisense strand to SEQ ID NO: 978178
uacaccagucaucuggaaa

SEQ ID NO: 978180 - RNA, 19 nt, Artificial Sequence
  Description of Artificial Sequence: Synthetic oligonucleotide
  Sense strand starting at position 690 of SEQ ID NO: 914101
cugaaauguugguccggga

SEQ ID NO: 978181 - RNA, 19 nt, Artificial Sequence
  Description of Artificial Sequence: Synthetic oligonucleotide
  Antisense strand to SEQ ID NO: 978180
ucccggaccaacauuucag

SEQ ID NO: 978182 - RNA, 19 nt, Artificial Sequence
  Description of Artificial Sequence: Synthetic oligonucleotide
  Sense strand starting at position 2317 of SEQ ID NO: 914101
cacugaguggcuggugaaa

SEQ ID NO: 978183 - RNA, 19 nt, Artificial Sequence
  Description of Artificial Sequence: Synthetic oligonucleotide
  Antisense strand to SEQ ID NO: 978182
uuucaccagccacucagug

SEQ ID NO: 978184 - RNA, 19 nt, Artificial Sequence
  Description of Artificial Sequence: Synthetic oligonucleotide
  Sense strand starting at position 1582 of SEQ ID NO: 914101
ucuugacuucugcaguauu

SEQ ID NO: 978185 - RNA, 19 nt, Artificial Sequence
  Description of Artificial Sequence: Synthetic oligonucleotide
  Antisense strand to SEQ ID NO: 978184
aauacugcagaagucaaga

SEQ ID NO: 978186 - RNA, 19 nt, Artificial Sequence
  Description of Artificial Sequence: Synthetic oligonucleotide
  Sense strand starting at position 1231 of SEQ ID NO: 914101
uuacuuuccguguaauuag

SEQ ID NO: 978187 - RNA, 19 nt, Artificial Sequence
  Description of Artificial Sequence: Synthetic oligonucleotide
  Antisense strand to SEQ ID NO: 978186
cuaauuacacggaaaguaa

SEQ ID NO: 978188 - RNA, 19 nt, Artificial Sequence
  Description of Artificial Sequence: Synthetic oligonucleotide
  Sense strand starting at position 1427 of SEQ ID NO: 914101
uugcucguccuccaugaaa

SEQ ID NO: 978189 - RNA, 19 nt, Artificial Sequence
  Description of Artificial Sequence: Synthetic oligonucleotide
  Antisense strand to SEQ ID NO: 978188
uuucauggaggacgagcaa

SEQ ID NO: 978190 - RNA, 19 nt, Artificial Sequence
  Description of Artificial Sequence: Synthetic oligonucleotide
  Sense strand starting at position 2880 of SEQ ID NO: 914101
gguuccuugucacccugaa

SEQ ID NO: 978191 - RNA, 19 nt, Artificial Sequence
  Description of Artificial Sequence: Synthetic oligonucleotide
  Antisense strand to SEQ ID NO: 978190
uucagggugacaaggaacc

SEQ ID NO: 978192 - RNA, 19 nt, Artificial Sequence
  Description of Artificial Sequence: Synthetic oligonucleotide
  Sense strand starting at position 3317 of SEQ ID NO: 914101
ggugucccauaguucugaa

SEQ ID NO: 978193 - RNA, 19 nt, Artificial Sequence
  Description of Artificial Sequence: Synthetic oligonucleotide
  Antisense strand to SEQ ID NO: 978192
uucagaacuaugggacacc

SEQ ID NO: 978194 - RNA, 19 nt, Artificial Sequence
  Description of Artificial Sequence: Synthetic oligonucleotide
  Sense strand starting at position 1703 of SEQ ID NO: 914101
gcugaaaugugaccugguu

SEQ ID NO: 978195 - RNA, 19 nt, Artificial Sequence
  Description of Artificial Sequence: Synthetic oligonucleotide
  Antisense strand to SEQ ID NO: 978194
aaccaggucacauuucagc

SEQ ID NO: 978196 - RNA, 19 nt, Artificial Sequence
  Description of Artificial Sequence: Synthetic oligonucleotide
  Sense strand starting at position 1889 of SEQ ID NO: 914101
aagcgcucccucgaugaga

SEQ ID NO: 978197 - RNA, 19 nt, Artificial Sequence
  Description of Artificial Sequence: Synthetic oligonucleotide
  Antisense strand to SEQ ID NO: 978196
ucucaucgagggagcgcuu

SEQ ID NO: 978198 - RNA, 19 nt, Artificial Sequence
  Description of Artificial Sequence: Synthetic oligonucleotide
  Sense strand starting at position 2717 of SEQ ID NO: 914101
gaaacaucaucugauggga

SEQ ID NO: 978199 - RNA, 19 nt, Artificial Sequence
  Description of Artificial Sequence: Synthetic oligonucleotide
  Antisense strand to SEQ ID NO: 978198
ucccaucagaugauguuuc

SEQ ID NO: 978200 - RNA, 19 nt, Artificial Sequence
  Description of Artificial Sequence: Synthetic oligonucleotide
  Sense strand starting at position 2203 of SEQ ID NO: 914101
gaguuauggcucuaccgua

SEQ ID NO: 978201 - RNA, 19 nt, Artificial Sequence
  Description of Artificial Sequence: Synthetic oligonucleotide
  Antisense strand to SEQ ID NO: 978200
uacgguagagccauaacuc

SEQ ID NO: 978202 - RNA, 19 nt, Artificial Sequence
  Description of Artificial Sequence: Synthetic oligonucleotide
  Sense strand starting at position 2597 of SEQ ID NO: 914101
ccuccuuauuggcuguaga

SEQ ID NO: 978203 - RNA, 19 nt, Artificial Sequence
  Description of Artificial Sequence: Synthetic oligonucleotide
  Antisense strand to SEQ ID NO: 978202
ucuacagccaauaaggagg

SEQ ID NO: 978204 - RNA, 19 nt, Artificial Sequence
  Description of Artificial Sequence: Synthetic oligonucleotide
  Sense strand starting at position 2657 of SEQ ID NO: 914102
agugaagaaauacguucua

SEQ ID NO: 978205 - RNA, 19 nt, Artificial Sequence
  Description of Artificial Sequence: Synthetic oligonucleotide
  Antisense strand to SEQ ID NO: 978204
uagaacguauuucuucacu

SEQ ID NO: 978206 - RNA, 19 nt, Artificial Sequence
  Description of Artificial Sequence: Synthetic oligonucleotide
  Sense strand starting at position 2662 of SEQ ID NO: 914102
agaaauacguucuaucuuc

SEQ ID NO: 978207 - RNA, 19 nt, Artificial Sequence
  Description of Artificial Sequence: Synthetic oligonucleotide
  Antisense strand to SEQ ID NO: 978206
gaagauagaacguauuucu

SEQ ID NO: 978208 - RNA, 19 nt, Artificial Sequence
  Description of Artificial Sequence: Synthetic oligonucleotide
  Sense strand starting at position 2669 of SEQ ID NO: 914102
cguucuaucuucuaacuug

SEQ ID NO: 978209 - RNA, 19 nt, Artificial Sequence
  Description of Artificial Sequence: Synthetic oligonucleotide
  Antisense strand to SEQ ID NO: 978208
caaguuagaagauagaacg

SEQ ID NO: 978210 - RNA, 19 nt, Artificial Sequence
  Description of Artificial Sequence: Synthetic oligonucleotide
  Sense strand starting at position 526 of SEQ ID NO: 914103
ugaaucuuagugggaaauu

SEQ ID NO: 978211 - RNA, 19 nt, Artificial Sequence
  Description of Artificial Sequence: Synthetic oligonucleotide
  Antisense strand to SEQ ID NO: 978210
aauuucccacuaagauuca

SEQ ID NO: 978212 - RNA, 19 nt, Artificial Sequence
  Description of Artificial Sequence: Synthetic oligonucleotide
  Sense strand starting at position 2902 of SEQ ID NO: 914103
uuacaaagacugugguaaa

SEQ ID NO: 978213 - RNA, 19 nt, Artificial Sequence
  Description of Artificial Sequence: Synthetic oligonucleotide
  Antisense strand to SEQ ID NO: 978212
uuuaccacagucuuuguaa

SEQ ID NO: 978214 - RNA, 19 nt, Artificial Sequence
  Description of Artificial Sequence: Synthetic oligonucleotide
  Sense strand starting at position 699 of SEQ ID NO: 914103
agcugaagauauucccuaa

SEQ ID NO: 978215 - RNA, 19 nt, Artificial Sequence
  Description of Artificial Sequence: Synthetic oligonucleotide
  Antisense strand to SEQ ID NO: 978214
uuagggaauaucuucagcu

SEQ ID NO: 978216 - RNA, 19 nt, Artificial Sequence
  Description of Artificial Sequence: Synthetic oligonucleotide
  Sense strand starting at position 1764 of SEQ ID NO: 914103
ugaauauaaugacuugcau

SEQ ID NO: 978217 - RNA, 19 nt, Artificial Sequence
  Description of Artificial Sequence: Synthetic oligonucleotide
  Antisense strand to SEQ ID NO: 978216
augcaagucauuauauuca

SEQ ID NO: 978218 - RNA, 19 nt, Artificial Sequence
  Description of Artificial Sequence: Synthetic oligonucleotide
  Sense strand starting at position 635 of SEQ ID NO: 914103
aaguaugggccucauuacu

SEQ ID NO: 978219 - RNA, 19 nt, Artificial Sequence
  Description of Artificial Sequence: Synthetic oligonucleotide
  Antisense strand to SEQ ID NO: 978218
aguaaugaggcccauacuu

SEQ ID NO: 978220 - RNA, 19 nt, Artificial Sequence
  Description of Artificial Sequence: Synthetic oligonucleotide
  Sense strand starting at position 1203 of SEQ ID NO: 914103
gaagauauuuccgaauaug

SEQ ID NO: 978221 - RNA, 19 nt, Artificial Sequence
  Description of Artificial Sequence: Synthetic oligonucleotide
  Antisense strand to SEQ ID NO: 978220
cauauucggaaauaucuuc

SEQ ID NO: 978222 - RNA, 19 nt, Artificial Sequence
  Description of Artificial Sequence: Synthetic oligonucleotide
  Sense strand starting at position 818 of SEQ ID NO: 914103
gcauuagcauaacuagaag

SEQ ID NO: 978223 - RNA, 19 nt, Artificial Sequence
  Description of Artificial Sequence: Synthetic oligonucleotide
  Antisense strand to SEQ ID NO: 978222
cuucuaguuaugcuaaugc

SEQ ID NO: 978224 - RNA, 19 nt, Artificial Sequence
  Description of Artificial Sequence: Synthetic oligonucleotide
  Sense strand starting at position 673 of SEQ ID NO: 914103
uuggcuauucgggaauuau

SEQ ID NO: 978225 - RNA, 19 nt, Artificial Sequence
  Description of Artificial Sequence: Synthetic oligonucleotide
  Antisense strand to SEQ ID NO: 978224
auaauucccgaauagccaa

SEQ ID NO: 978226 - RNA, 19 nt, Artificial Sequence
  Description of Artificial Sequence: Synthetic oligonucleotide
  Sense strand starting at position 3040 of SEQ ID NO: 914103
ggccuugaauaagccagaa

SEQ ID NO: 978227 - RNA, 19 nt, Artificial Sequence
  Description of Artificial Sequence: Synthetic oligonucleotide
  Antisense strand to SEQ ID NO: 978226
uucuggcuuauucaaggcc

SEQ ID NO: 978228 - RNA, 19 nt, Artificial Sequence
  Description of Artificial Sequence: Synthetic oligonucleotide
  Sense strand starting at position 3070 of SEQ ID NO: 914103
gggagagguuguccucaca

SEQ ID NO: 978229 - RNA, 19 nt, Artificial Sequence
  Description of Artificial Sequence: Synthetic oligonucleotide
  Antisense strand to SEQ ID NO: 978228
ugugaggacaaccucuccc

SEQ ID NO: 978230 - RNA, 19 nt, Artificial Sequence
  Description of Artificial Sequence: Synthetic oligonucleotide
  Sense strand starting at position 1827 of SEQ ID NO: 914103
ugagucuuaccuugaacug

SEQ ID NO: 978231 - RNA, 19 nt, Artificial Sequence
  Description of Artificial Sequence: Synthetic oligonucleotide
  Antisense strand to SEQ ID NO: 978230
caguucaagguaagacuca

SEQ ID NO: 978232 - RNA, 19 nt, Artificial Sequence
  Description of Artificial Sequence: Synthetic oligonucleotide
  Sense strand starting at position 2465 of SEQ ID NO: 914103
aagaaugaguugucggauu

SEQ ID NO: 978233 - RNA, 19 nt, Artificial Sequence
  Description of Artificial Sequence: Synthetic oligonucleotide
  Antisense strand to SEQ ID NO: 978232
aauccgacaacucauucuu

SEQ ID NO: 978234 - RNA, 19 nt, Artificial Sequence
  Description of Artificial Sequence: Synthetic oligonucleotide
  Sense strand starting at position 1300 of SEQ ID NO: 914103
gucuaaccauaauugaguu

SEQ ID NO: 978235 - RNA, 19 nt, Artificial Sequence
  Description of Artificial Sequence: Synthetic oligonucleotide
  Antisense strand to SEQ ID NO: 978234
aacucaauuaugguuagac

SEQ ID NO: 978236 - RNA, 19 nt, Artificial Sequence
  Description of Artificial Sequence: Synthetic oligonucleotide
  Sense strand starting at position 1824 of SEQ ID NO: 914103
uccugagucuuaccuugaa

SEQ ID NO: 978237 - RNA, 19 nt, Artificial Sequence
  Description of Artificial Sequence: Synthetic oligonucleotide
  Antisense strand to SEQ ID NO: 978236
uucaagguaagacucagga

SEQ ID NO: 978238 - RNA, 19 nt, Artificial Sequence
  Description of Artificial Sequence: Synthetic oligonucleotide
  Sense strand starting at position 2463 of SEQ ID NO: 914103
ucaagaaugaguugucgga

SEQ ID NO: 978239 - RNA, 19 nt, Artificial Sequence
  Description of Artificial Sequence: Synthetic oligonucleotide
  Antisense strand to SEQ ID NO: 978238
uccgacaacucauucuuga

SEQ ID NO: 978240 - RNA, 19 nt, Artificial Sequence
  Description of Artificial Sequence: Synthetic oligonucleotide
  Sense strand starting at position 1191 of SEQ ID NO: 914103
agauaaaccuaggaagaua

SEQ ID NO: 978241 - RNA, 19 nt, Artificial Sequence
  Description of Artificial Sequence: Synthetic oligonucleotide
  Antisense strand to SEQ ID NO: 978240
uaucuuccuagguuuaucu

SEQ ID NO: 978242 - RNA, 19 nt, Artificial Sequence
  Description of Artificial Sequence: Synthetic oligonucleotide
  Sense strand starting at position 732 of SEQ ID NO: 914103
gccuguucccuacaauuga

SEQ ID NO: 978243 - RNA, 19 nt, Artificial Sequence
  Description of Artificial Sequence: Synthetic oligonucleotide
  Antisense strand to SEQ ID NO: 978242
ucaauuguagggaacaggc

SEQ ID NO: 978244 - RNA, 19 nt, Artificial Sequence
  Description of Artificial Sequence: Synthetic oligonucleotide
  Sense strand starting at position 931 of SEQ ID NO: 914103
agucgcuuugacgaaacaa

SEQ ID NO: 978245 - RNA, 19 nt, Artificial Sequence
  Description of Artificial Sequence: Synthetic oligonucleotide
  Antisense strand to SEQ ID NO: 978244
uuguuucgucaaagcgacu

SEQ ID NO: 978246 - RNA, 19 nt, Artificial Sequence
  Description of Artificial Sequence: Synthetic oligonucleotide
  Sense strand starting at position 877 of SEQ ID NO: 914103
ugcgaucaucuguaagauu

SEQ ID NO: 978247 - RNA, 19 nt, Artificial Sequence
  Description of Artificial Sequence: Synthetic oligonucleotide
  Antisense strand to SEQ ID NO: 978246
aaucuuacagaugaucgca

SEQ ID NO: 978248 - RNA, 19 nt, Artificial Sequence
  Description of Artificial Sequence: Synthetic oligonucleotide
  Sense strand starting at position 2960 of SEQ ID NO: 914103
agcauuucuuaagauggau

SEQ ID NO: 978249 - RNA, 19 nt, Artificial Sequence
  Description of Artificial Sequence: Synthetic oligonucleotide
  Antisense strand to SEQ ID NO: 978248
auccaucuuaagaaaugcu

SEQ ID NO: 978250 - RNA, 19 nt, Artificial Sequence
  Description of Artificial Sequence: Synthetic oligonucleotide
  Sense strand starting at position 3718 of SEQ ID NO: 914103
ggaggaguuucccuucccu

SEQ ID NO: 978251 - RNA, 19 nt, Artificial Sequence
  Description of Artificial Sequence: Synthetic oligonucleotide
  Antisense strand to SEQ ID NO: 978250
agggaagggaaacuccucc

SEQ ID NO: 978252 - RNA, 19 nt, Artificial Sequence
  Description of Artificial Sequence: Synthetic oligonucleotide
  Sense strand starting at position 1133 of SEQ ID NO: 914103
ugucuuagucauuacaggu

SEQ ID NO: 978253 - RNA, 19 nt, Artificial Sequence
  Description of Artificial Sequence: Synthetic oligonucleotide
  Antisense strand to SEQ ID NO: 978252
accuguaaugacuaagaca

SEQ ID NO: 978254 - RNA, 19 nt, Artificial Sequence
  Description of Artificial Sequence: Synthetic oligonucleotide
  Sense strand starting at position 669 of SEQ ID NO: 914103
ccacuuggcuauucgggaa

SEQ ID NO: 978255 - RNA, 19 nt, Artificial Sequence
  Description of Artificial Sequence: Synthetic oligonucleotide
  Antisense strand to SEQ ID NO: 978254
uucccgaauagccaagugg

SEQ ID NO: 978256 - RNA, 19 nt, Artificial Sequence
  Description of Artificial Sequence: Synthetic oligonucleotide
  Sense strand starting at position 1202 of SEQ ID NO: 914103
ggaagauauuuccgaauau

SEQ ID NO: 978257 - RNA, 19 nt, Artificial Sequence
  Description of Artificial Sequence: Synthetic oligonucleotide
  Antisense strand to SEQ ID NO: 978256
auauucggaaauaucuucc

SEQ ID NO: 978258 - RNA, 19 nt, Artificial Sequence
  Description of Artificial Sequence: Synthetic oligonucleotide
  Sense strand starting at position 2957 of SEQ ID NO: 914103
uugagcauuucuuaagaug

SEQ ID NO: 978259 - RNA, 19 nt, Artificial Sequence
  Description of Artificial Sequence: Synthetic oligonucleotide
  Antisense strand to SEQ ID NO: 978258
caucuuaagaaaugcucaa

SEQ ID NO: 978260 - RNA, 19 nt, Artificial Sequence
  Description of Artificial Sequence: Synthetic oligonucleotide
  Sense strand starting at position 544 of SEQ ID NO: 914103
ucauguuucugggaaauuu

SEQ ID NO: 978261 - RNA, 19 nt, Artificial Sequence
  Description of Artificial Sequence: Synthetic oligonucleotide
  Antisense strand to SEQ ID NO: 978260
aaauuucccagaaacauga

SEQ ID NO: 978262 - RNA, 19 nt, Artificial Sequence
  Description of Artificial Sequence: Synthetic oligonucleotide
  Sense strand starting at position 3946 of SEQ ID NO: 914103
ugagaaaugucgguuucug

SEQ ID NO: 978263 - RNA, 19 nt, Artificial Sequence
  Description of Artificial Sequence: Synthetic oligonucleotide
  Antisense strand to SEQ ID NO: 978262
cagaaaccgacauuucuca

SEQ ID NO: 978264 - RNA, 19 nt, Artificial Sequence
  Description of Artificial Sequence: Synthetic oligonucleotide
  Sense strand starting at position 864 of SEQ ID NO: 914103
aaaugaaugucucugcgau

SEQ ID NO: 978265 - RNA, 19 nt, Artificial Sequence
  Description of Artificial Sequence: Synthetic oligonucleotide
  Antisense strand to SEQ ID NO: 978264
aucgcagagacauucauuu

SEQ ID NO: 978266 - RNA, 19 nt, Artificial Sequence
  Description of Artificial Sequence: Synthetic oligonucleotide
  Sense strand starting at position 2185 of SEQ ID NO: 914103
gccacuugccugcaagaca

SEQ ID NO: 978267 - RNA, 19 nt, Artificial Sequence
  Description of Artificial Sequence: Synthetic oligonucleotide
  Antisense strand to SEQ ID NO: 978266
ugucuugcaggcaaguggc

SEQ ID NO: 978268 - RNA, 19 nt, Artificial Sequence
  Description of Artificial Sequence: Synthetic oligonucleotide
  Sense strand starting at position 3866 of SEQ ID NO: 914103
agaaguguguccuccaacu

SEQ ID NO: 978269 - RNA, 19 nt, Artificial Sequence
  Description of Artificial Sequence: Synthetic oligonucleotide
  Antisense strand to SEQ ID NO: 978268
aguuggaggacacacuucu

SEQ ID NO: 978270 - RNA, 19 nt, Artificial Sequence
  Description of Artificial Sequence: Synthetic oligonucleotide
  Sense strand starting at position 3864 of SEQ ID NO: 914103
ccagaaguguguccuccaa

SEQ ID NO: 978271 - RNA, 19 nt, Artificial Sequence
  Description of Artificial Sequence: Synthetic oligonucleotide
  Antisense strand to SEQ ID NO: 978270
uuggaggacacacuucugg

SEQ ID NO: 978272 - RNA, 19 nt, Artificial Sequence
  Description of Artificial Sequence: Synthetic oligonucleotide
  Sense strand starting at position 963 of SEQ ID NO: 914103
gugucauugugacucaaca

SEQ ID NO: 978273 - RNA, 19 nt, Artificial Sequence
  Description of Artificial Sequence: Synthetic oligonucleotide
  Antisense strand to SEQ ID NO: 978272
uguugagucacaaugacac

SEQ ID NO: 978274 - RNA, 19 nt, Artificial Sequence
  Description of Artificial Sequence: Synthetic oligonucleotide
  Sense strand starting at position 3033 of SEQ ID NO: 914103
guccucuggccuugaauaa

SEQ ID NO: 978275 - RNA, 19 nt, Artificial Sequence
  Description of Artificial Sequence: Synthetic oligonucleotide
  Antisense strand to SEQ ID NO: 978274
uuauucaaggccagaggac

SEQ ID NO: 978276 - RNA, 19 nt, Artificial Sequence
  Description of Artificial Sequence: Synthetic oligonucleotide
  Sense strand starting at position 2845 of SEQ ID NO: 914103
aguuucuugcauuggauca

SEQ ID NO: 978277 - RNA, 19 nt, Artificial Sequence
  Description of Artificial Sequence: Synthetic oligonucleotide
  Antisense strand to SEQ ID NO: 978276
ugauccaaugcaagaaacu

SEQ ID NO: 978278 - RNA, 19 nt, Artificial Sequence
  Description of Artificial Sequence: Synthetic oligonucleotide
  Sense strand starting at position 3566 of SEQ ID NO: 914103
gcccuuguggcauauacau

SEQ ID NO: 978279 - RNA, 19 nt, Artificial Sequence
  Description of Artificial Sequence: Synthetic oligonucleotide
  Antisense strand to SEQ ID NO: 978278
auguauaugccacaagggc

SEQ ID NO: 978280 - RNA, 19 nt, Artificial Sequence
  Description of Artificial Sequence: Synthetic oligonucleotide
  Sense strand starting at position 952 of SEQ ID NO: 914103
cuaggacaugugugucauu

SEQ ID NO: 978281 - RNA, 19 nt, Artificial Sequence
  Description of Artificial Sequence: Synthetic oligonucleotide
  Antisense strand to SEQ ID NO: 978280
aaugacacacauguccuag

SEQ ID NO: 978282 - RNA, 19 nt, Artificial Sequence
  Description of Artificial Sequence: Synthetic oligonucleotide
  Sense strand starting at position 3945 of SEQ ID NO: 914103
cugagaaaugucgguuucu

SEQ ID NO: 978283 - RNA, 19 nt, Artificial Sequence
  Description of Artificial Sequence: Synthetic oligonucleotide
  Antisense strand to SEQ ID NO: 978282
agaaaccgacauuucucag

SEQ ID NO: 978284 - RNA, 19 nt, Artificial Sequence
  Description of Artificial Sequence: Synthetic oligonucleotide
  Sense strand starting at position 1218 of SEQ ID NO: 914103
uaugaugcuucucugagca

SEQ ID NO: 978285 - RNA, 19 nt, Artificial Sequence
  Description of Artificial Sequence: Synthetic oligonucleotide
  Antisense strand to SEQ ID NO: 978284
ugcucagagaagcaucaua

SEQ ID NO: 978286 - RNA, 19 nt, Artificial Sequence
  Description of Artificial Sequence: Synthetic oligonucleotide
  Sense strand starting at position 3921 of SEQ ID NO: 914103
ugcacuggcccggaaaguu

SEQ ID NO: 978287 - RNA, 19 nt, Artificial Sequence
  Description of Artificial Sequence: Synthetic oligonucleotide
  Antisense strand to SEQ ID NO: 978286
aacuuuccgggccagugca

SEQ ID NO: 978288 - RNA, 19 nt, Artificial Sequence
  Description of Artificial Sequence: Synthetic oligonucleotide
  Sense strand starting at position 876 of SEQ ID NO: 914103
cugcgaucaucuguaagau

SEQ ID NO: 978289 - RNA, 19 nt, Artificial Sequence
  Description of Artificial Sequence: Synthetic oligonucleotide
  Antisense strand to SEQ ID NO: 978288
aucuuacagaugaucgcag

SEQ ID NO: 978290 - RNA, 19 nt, Artificial Sequence
  Description of Artificial Sequence: Synthetic oligonucleotide
  Sense strand starting at position 3486 of SEQ ID NO: 914104
ggcagcuuucugccaagca

SEQ ID NO: 978291 - RNA, 19 nt, Artificial Sequence
  Description of Artificial Sequence: Synthetic oligonucleotide
  Antisense strand to SEQ ID NO: 978290
ugcuuggcagaaagcugcc

SEQ ID NO: 978292 - RNA, 19 nt, Artificial Sequence
  Description of Artificial Sequence: Synthetic oligonucleotide
  Sense strand starting at position 273 of SEQ ID NO: 914104
cugacaaugugacuuagaa

SEQ ID NO: 978293 - RNA, 19 nt, Artificial Sequence
  Description of Artificial Sequence: Synthetic oligonucleotide
  Antisense strand to SEQ ID NO: 978292
uucuaagucacauugucag

SEQ ID NO: 978294 - RNA, 19 nt, Artificial Sequence
  Description of Artificial Sequence: Synthetic oligonucleotide
  Sense strand starting at position 2385 of SEQ ID NO: 914104
gcucaacuccgugcugauu

SEQ ID NO: 978295 - RNA, 19 nt, Artificial Sequence
  Description of Artificial Sequence: Synthetic oligonucleotide
  Antisense strand to SEQ ID NO: 978294
aaucagcacggaguugagc

SEQ ID NO: 978296 - RNA, 19 nt, Artificial Sequence
  Description of Artificial Sequence: Synthetic oligonucleotide
  Sense strand starting at position 3664 of SEQ ID NO: 914104
guuaguaucucauuuacga

SEQ ID NO: 978297 - RNA, 19 nt, Artificial Sequence
  Description of Artificial Sequence: Synthetic oligonucleotide
  Antisense strand to SEQ ID NO: 978296
ucguaaaugagauacuaac

SEQ ID NO: 978298 - RNA, 19 nt, Artificial Sequence
  Description of Artificial Sequence: Synthetic oligonucleotide
  Sense strand starting at position 552 of SEQ ID NO: 914104
cagguauaggucuaggauu

SEQ ID NO: 978299 - RNA, 19 nt, Artificial Sequence
  Description of Artificial Sequence: Synthetic oligonucleotide
  Antisense strand to SEQ ID NO: 978298
aauccuagaccuauaccug

SEQ ID NO: 978300 - RNA, 19 nt, Artificial Sequence
  Description of Artificial Sequence: Synthetic oligonucleotide
  Sense strand starting at position 3642 of SEQ ID NO: 914104
aaccacggucuagaucaua

SEQ ID NO: 978301 - RNA, 19 nt, Artificial Sequence
  Description of Artificial Sequence: Synthetic oligonucleotide
  Antisense strand to SEQ ID NO: 978300
uaugaucuagaccgugguu

SEQ ID NO: 978302 - RNA, 19 nt, Artificial Sequence
  Description of Artificial Sequence: Synthetic oligonucleotide
  Sense strand starting at position 679 of SEQ ID NO: 914104
gaauauggucucugagagg

SEQ ID NO: 978303 - RNA, 19 nt, Artificial Sequence
  Description of Artificial Sequence: Synthetic oligonucleotide
  Antisense strand to SEQ ID NO: 978302
ccucucagagaccauauuc

SEQ ID NO: 978304 - RNA, 19 nt, Artificial Sequence
  Description of Artificial Sequence: Synthetic oligonucleotide
  Sense strand starting at position 3454 of SEQ ID NO: 914104
cugcucugugcaguguaaa

SEQ ID NO: 978305 - RNA, 19 nt, Artificial Sequence
  Description of Artificial Sequence: Synthetic oligonucleotide
  Antisense strand to SEQ ID NO: 978304
uuuacacugcacagagcag

SEQ ID NO: 978306 - RNA, 19 nt, Artificial Sequence
  Description of Artificial Sequence: Synthetic oligonucleotide
  Sense strand starting at position 3007 of SEQ ID NO: 914104
uacauuaggcuguaaugaa

SEQ ID NO: 978307 - RNA, 19 nt, Artificial Sequence
  Description of Artificial Sequence: Synthetic oligonucleotide
  Antisense strand to SEQ ID NO: 978306
uucauuacagccuaaugua

SEQ ID NO: 978308 - RNA, 19 nt, Artificial Sequence
  Description of Artificial Sequence: Synthetic oligonucleotide
  Sense strand starting at position 678 of SEQ ID NO: 914104
ugaauauggucucugagag

SEQ ID NO: 978309 - RNA, 19 nt, Artificial Sequence
  Description of Artificial Sequence: Synthetic oligonucleotide
  Antisense strand to SEQ ID NO: 978308
cucucagagaccauauuca

SEQ ID NO: 978310 - RNA, 19 nt, Artificial Sequence
  Description of Artificial Sequence: Synthetic oligonucleotide
  Sense strand starting at position 3924 of SEQ ID NO: 914104
uugggaguaccuugauaag

SEQ ID NO: 978311 - RNA, 19 nt, Artificial Sequence
  Description of Artificial Sequence: Synthetic oligonucleotide
  Antisense strand to SEQ ID NO: 978310
cuuaucaagguacucccaa

SEQ ID NO: 978312 - RNA, 19 nt, Artificial Sequence
  Description of Artificial Sequence: Synthetic oligonucleotide
  Sense strand starting at position 544 of SEQ ID NO: 914104
uguaaugacagguauaggu

SEQ ID NO: 978313 - RNA, 19 nt, Artificial Sequence
  Description of Artificial Sequence: Synthetic oligonucleotide
  Antisense strand to SEQ ID NO: 978312
accuauaccugucauuaca

SEQ ID NO: 978314 - RNA, 19 nt, Artificial Sequence
  Description of Artificial Sequence: Synthetic oligonucleotide
  Sense strand starting at position 2842 of SEQ ID NO: 914104
ggcagaauugaguagugau

SEQ ID NO: 978315 - RNA, 19 nt, Artificial Sequence
  Description of Artificial Sequence: Synthetic oligonucleotide
  Antisense strand to SEQ ID NO: 978314
aucacuacucaauucugcc

SEQ ID NO: 978316 - RNA, 19 nt, Artificial Sequence
  Description of Artificial Sequence: Synthetic oligonucleotide
  Sense strand starting at position 262 of SEQ ID NO: 914104
cgaggaagcaacugacaau

SEQ ID NO: 978317 - RNA, 19 nt, Artificial Sequence
  Description of Artificial Sequence: Synthetic oligonucleotide
  Antisense strand to SEQ ID NO: 978316
auugucaguugcuuccucg

SEQ ID NO: 978318 - RNA, 19 nt, Artificial Sequence
  Description of Artificial Sequence: Synthetic oligonucleotide
  Sense strand starting at position 3654 of SEQ ID NO: 914104
gaucauauugguuaguauc

SEQ ID NO: 978319 - RNA, 19 nt, Artificial Sequence
  Description of Artificial Sequence: Synthetic oligonucleotide
  Antisense strand to SEQ ID NO: 978318
gauacuaaccaauaugauc

SEQ ID NO: 978320 - RNA, 19 nt, Artificial Sequence
  Description of Artificial Sequence: Synthetic oligonucleotide
  Sense strand starting at position 338 of SEQ ID NO: 914104
guccaucuuggguaauuaa

SEQ ID NO: 978321 - RNA, 19 nt, Artificial Sequence
  Description of Artificial Sequence: Synthetic oligonucleotide
  Antisense strand to SEQ ID NO: 978320
uuaauuacccaagauggac

SEQ ID NO: 978322 - RNA, 19 nt, Artificial Sequence
  Description of Artificial Sequence: Synthetic oligonucleotide
  Sense strand starting at position 3402 of SEQ ID NO: 914104
ggaauuaguucccucauaa

SEQ ID NO: 978323 - RNA, 19 nt, Artificial Sequence
  Description of Artificial Sequence: Synthetic oligonucleotide
  Antisense strand to SEQ ID NO: 978322
uuaugagggaacuaauucc

SEQ ID NO: 978324 - RNA, 19 nt, Artificial Sequence
  Description of Artificial Sequence: Synthetic oligonucleotide
  Sense strand starting at position 3697 of SEQ ID NO: 914104
gcaggagagugauccaaug

SEQ ID NO: 978325 - RNA, 19 nt, Artificial Sequence
  Description of Artificial Sequence: Synthetic oligonucleotide
  Antisense strand to SEQ ID NO: 978324
cauuggaucacucuccugc

SEQ ID NO: 978326 - RNA, 19 nt, Artificial Sequence
  Description of Artificial Sequence: Synthetic oligonucleotide
  Sense strand starting at position 2745 of SEQ ID NO: 914104
cugccuguauuugcaaaua

SEQ ID NO: 978327 - RNA, 19 nt, Artificial Sequence
  Description of Artificial Sequence: Synthetic oligonucleotide
  Antisense strand to SEQ ID NO: 978326
uauuugcaaauacaggcag

SEQ ID NO: 978328 - RNA, 19 nt, Artificial Sequence
  Description of Artificial Sequence: Synthetic oligonucleotide
  Sense strand starting at position 2714 of SEQ ID NO: 914104
gcacauuacuaccuggaga

SEQ ID NO: 978329 - RNA, 19 nt, Artificial Sequence
  Description of Artificial Sequence: Synthetic oligonucleotide
  Antisense strand to SEQ ID NO: 978328
ucuccagguaguaaugugc

SEQ ID NO: 978330 - RNA, 19 nt, Artificial Sequence
  Description of Artificial Sequence: Synthetic oligonucleotide
  Sense strand starting at position 2857 of SEQ ID NO: 914104
ugaugacagagguggcaua

SEQ ID NO: 978331 - RNA, 19 nt, Artificial Sequence
  Description of Artificial Sequence: Synthetic oligonucleotide
  Antisense strand to SEQ ID NO: 978330
uaugccaccucugucauca

SEQ ID NO: 978332 - RNA, 19 nt, Artificial Sequence
  Description of Artificial Sequence: Synthetic oligonucleotide
  Sense strand starting at position 3401 of SEQ ID NO: 914104
uggaauuaguucccucaua

SEQ ID NO: 978333 - RNA, 19 nt, Artificial Sequence
  Description of Artificial Sequence: Synthetic oligonucleotide
  Antisense strand to SEQ ID NO: 978332
uaugagggaacuaauucca

SEQ ID NO: 978334 - RNA, 19 nt, Artificial Sequence
  Description of Artificial Sequence: Synthetic oligonucleotide
  Sense strand starting at position 3653 of SEQ ID NO: 914104
agaucauauugguuaguau

SEQ ID NO: 978335 - RNA, 19 nt, Artificial Sequence
  Description of Artificial Sequence: Synthetic oligonucleotide
  Antisense strand to SEQ ID NO: 978334
auacuaaccaauaugaucu

SEQ ID NO: 978336 - RNA, 19 nt, Artificial Sequence
  Description of Artificial Sequence: Synthetic oligonucleotide
  Sense strand starting at position 3652 of SEQ ID NO: 914104
uagaucauauugguuagua

SEQ ID NO: 978337 - RNA, 19 nt, Artificial Sequence
  Description of Artificial Sequence: Synthetic oligonucleotide
  Antisense strand to SEQ ID NO: 978336
uacuaaccaauaugaucua

SEQ ID NO: 978338 - RNA, 19 nt, Artificial Sequence
  Description of Artificial Sequence: Synthetic oligonucleotide
  Sense strand starting at position 675 of SEQ ID NO: 914104
ccuugaauauggucucuga

SEQ ID NO: 978339 - RNA, 19 nt, Artificial Sequence
  Description of Artificial Sequence: Synthetic oligonucleotide
  Antisense strand to SEQ ID NO: 978338
ucagagaccauauucaagg

SEQ ID NO: 978340 - RNA, 19 nt, Artificial Sequence
  Description of Artificial Sequence: Synthetic oligonucleotide
  Sense strand starting at position 2600 of SEQ ID NO: 914104
ggaauugcuggguggauca

SEQ ID NO: 978341 - RNA, 19 nt, Artificial Sequence
  Description of Artificial Sequence: Synthetic oligonucleotide
  Antisense strand to SEQ ID NO: 978340
ugauccacccagcaauucc

SEQ ID NO: 978342 - RNA, 19 nt, Artificial Sequence
  Description of Artificial Sequence: Synthetic oligonucleotide
  Sense strand starting at position 299 of SEQ ID NO: 914104
aguacauacucuuugacuu

SEQ ID NO: 978343 - RNA, 19 nt, Artificial Sequence
  Description of Artificial Sequence: Synthetic oligonucleotide
  Antisense strand to SEQ ID NO: 978342
aagucaaagaguauguacu

SEQ ID NO: 978344 - RNA, 19 nt, Artificial Sequence
  Description of Artificial Sequence: Synthetic oligonucleotide
  Sense strand starting at position 193 of SEQ ID NO: 914104
ucauaauagcaaugcuaag

SEQ ID NO: 978345 - RNA, 19 nt, Artificial Sequence
  Description of Artificial Sequence: Synthetic oligonucleotide
  Antisense strand to SEQ ID NO: 978344
cuuagcauugcuauuauga

SEQ ID NO: 978346 - RNA, 19 nt, Artificial Sequence
  Description of Artificial Sequence: Synthetic oligonucleotide
  Sense strand starting at position 2398 of SEQ ID NO: 914104
cugauugggcuccaaguuu

SEQ ID NO: 978347 - RNA, 19 nt, Artificial Sequence
  Description of Artificial Sequence: Synthetic oligonucleotide
  Antisense strand to SEQ ID NO: 978346
aaacuuggagcccaaucag

SEQ ID NO: 978348 - RNA, 19 nt, Artificial Sequence
  Description of Artificial Sequence: Synthetic oligonucleotide
  Sense strand starting at position 300 of SEQ ID NO: 914104
guacauacucuuugacuua

SEQ ID NO: 978349 - RNA, 19 nt, Artificial Sequence
  Description of Artificial Sequence: Synthetic oligonucleotide
  Antisense strand to SEQ ID NO: 978348
uaagucaaagaguauguac

SEQ ID NO: 978350 - RNA, 19 nt, Artificial Sequence
  Description of Artificial Sequence: Synthetic oligonucleotide
  Sense strand starting at position 3223 of SEQ ID NO: 914104
cgaauaaacugugcuaaau

SEQ ID NO: 978351 - RNA, 19 nt, Artificial Sequence
  Description of Artificial Sequence: Synthetic oligonucleotide
  Antisense strand to SEQ ID NO: 978350
auuuagcacaguuuauucg

SEQ ID NO: 978352 - RNA, 19 nt, Artificial Sequence
  Description of Artificial Sequence: Synthetic oligonucleotide
  Sense strand starting at position 3222 of SEQ ID NO: 914104
ucgaauaaacugugcuaaa

SEQ ID NO: 978353 - RNA, 19 nt, Artificial Sequence
  Description of Artificial Sequence: Synthetic oligonucleotide
  Antisense strand to SEQ ID NO: 978352
uuuagcacaguuuauucga

SEQ ID NO: 978354 - RNA, 19 nt, Artificial Sequence
  Description of Artificial Sequence: Synthetic oligonucleotide
  Sense strand starting at position 3390 of SEQ ID NO: 914104
aggcuuccugguggaauua

SEQ ID NO: 978355 - RNA, 19 nt, Artificial Sequence
  Description of Artificial Sequence: Synthetic oligonucleotide
  Antisense strand to SEQ ID NO: 978354
uaauuccaccaggaagccu

SEQ ID NO: 978356 - RNA, 19 nt, Artificial Sequence
  Description of Artificial Sequence: Synthetic oligonucleotide
  Sense strand starting at position 2799 of SEQ ID NO: 914104
auuaucagugacugcauau

SEQ ID NO: 978357 - RNA, 19 nt, Artificial Sequence
  Description of Artificial Sequence: Synthetic oligonucleotide
  Antisense strand to SEQ ID NO: 978356
auaugcagucacugauaau

SEQ ID NO: 978358 - RNA, 19 nt, Artificial Sequence
  Description of Artificial Sequence: Synthetic oligonucleotide
  Sense strand starting at position 753 of SEQ ID NO: 914104
ugcacaaagcuguauuacu

SEQ ID NO: 978359 - RNA, 19 nt, Artificial Sequence
  Description of Artificial Sequence: Synthetic oligonucleotide
  Antisense strand to SEQ ID NO: 978358
aguaauacagcuuugugca

SEQ ID NO: 978360 - RNA, 19 nt, Artificial Sequence
  Description of Artificial Sequence: Synthetic oligonucleotide
  Sense strand starting at position 337 of SEQ ID NO: 914104
uguccaucuuggguaauua

SEQ ID NO: 978361 - RNA, 19 nt, Artificial Sequence
  Description of Artificial Sequence: Synthetic oligonucleotide
  Antisense strand to SEQ ID NO: 978360
uaauuacccaagauggaca

SEQ ID NO: 978362 - RNA, 19 nt, Artificial Sequence
  Description of Artificial Sequence: Synthetic oligonucleotide
  Sense strand starting at position 3827 of SEQ ID NO: 914104
auuccauugugguuauaug

SEQ ID NO: 978363 - RNA, 19 nt, Artificial Sequence
  Description of Artificial Sequence: Synthetic oligonucleotide
  Antisense strand to SEQ ID NO: 978362
cauauaaccacaauggaau

SEQ ID NO: 978364 - RNA, 19 nt, Artificial Sequence
  Description of Artificial Sequence: Synthetic oligonucleotide
  Sense strand starting at position 2794 of SEQ ID NO: 914104
uuuguauuaucagugacug

SEQ ID NO: 978365 - RNA, 19 nt, Artificial Sequence
  Description of Artificial Sequence: Synthetic oligonucleotide
  Antisense strand to SEQ ID NO: 978364
cagucacugauaauacaaa

SEQ ID NO: 978366 - RNA, 19 nt, Artificial Sequence
  Description of Artificial Sequence: Synthetic oligonucleotide
  Sense strand starting at position 2818 of SEQ ID NO: 914104
ggcuguaugaucuagggcu

SEQ ID NO: 978367 - RNA, 19 nt, Artificial Sequence
  Description of Artificial Sequence: Synthetic oligonucleotide
  Antisense strand to SEQ ID NO: 978366
agcccuagaucauacagcc

SEQ ID NO: 978368 - RNA, 19 nt, Artificial Sequence
  Description of Artificial Sequence: Synthetic oligonucleotide
  Sense strand starting at position 3542 of SEQ ID NO: 914104
cacugaucuuggguuucuu

SEQ ID NO: 978369 - RNA, 19 nt, Artificial Sequence
  Description of Artificial Sequence: Synthetic oligonucleotide
  Antisense strand to SEQ ID NO: 978368
aagaaacccaagaucagug

SEQ ID NO: 978370 - RNA, 19 nt, Artificial Sequence
  Description of Artificial Sequence: Synthetic oligonucleotide
  Sense strand starting at position 3544 of SEQ ID NO: 914105
cacauugagugauuggaca

SEQ ID NO: 978371 - RNA, 19 nt, Artificial Sequence
  Description of Artificial Sequence: Synthetic oligonucleotide
  Antisense strand to SEQ ID NO: 978370
uguccaaucacucaaugug

SEQ ID NO: 978372 - RNA, 19 nt, Artificial Sequence
  Description of Artificial Sequence: Synthetic oligonucleotide
  Sense strand starting at position 3611 of SEQ ID NO: 914105
gaauaauaggguugugagg

SEQ ID NO: 978373 - RNA, 19 nt, Artificial Sequence
  Description of Artificial Sequence: Synthetic oligonucleotide
  Antisense strand to SEQ ID NO: 978372
ccucacaacccuauuauuc

SEQ ID NO: 978374 - RNA, 19 nt, Artificial Sequence
  Description of Artificial Sequence: Synthetic oligonucleotide
  Sense strand starting at position 165 of SEQ ID NO: 914105
guagaauauaaaggugauu

SEQ ID NO: 978375 - RNA, 19 nt, Artificial Sequence
  Description of Artificial Sequence: Synthetic oligonucleotide
  Antisense strand to SEQ ID NO: 978374
aaucaccuuuauauucuac

SEQ ID NO: 978376 - RNA, 19 nt, Artificial Sequence
  Description of Artificial Sequence: Synthetic oligonucleotide
  Sense strand starting at position 170 of SEQ ID NO: 914105
auauaaaggugauugggua

SEQ ID NO: 978377 - RNA, 19 nt, Artificial Sequence
  Description of Artificial Sequence: Synthetic oligonucleotide
  Antisense strand to SEQ ID NO: 978376
uacccaaucaccuuuauau

SEQ ID NO: 978378 - RNA, 19 nt, Artificial Sequence
  Description of Artificial Sequence: Synthetic oligonucleotide
  Sense strand starting at position 726 of SEQ ID NO: 914105
ugcucuaaggaagaguuua

SEQ ID NO: 978379 - RNA, 19 nt, Artificial Sequence
  Description of Artificial Sequence: Synthetic oligonucleotide
  Antisense strand to SEQ ID NO: 978378
uaaacucuuccuuagagca

SEQ ID NO: 978380 - RNA, 19 nt, Artificial Sequence
  Description of Artificial Sequence: Synthetic oligonucleotide
  Sense strand starting at position 2800 of SEQ ID NO: 914105
gagcaucuacuagagaugu

SEQ ID NO: 978381 - RNA, 19 nt, Artificial Sequence
  Description of Artificial Sequence: Synthetic oligonucleotide
  Antisense strand to SEQ ID NO: 978380
acaucucuaguagaugcuc

SEQ ID NO: 978382 - RNA, 19 nt, Artificial Sequence
  Description of Artificial Sequence: Synthetic oligonucleotide
  Sense strand starting at position 2831 of SEQ ID NO: 914105
ggaacaaacuuaguaagca

SEQ ID NO: 978383 - RNA, 19 nt, Artificial Sequence
  Description of Artificial Sequence: Synthetic oligonucleotide
  Antisense strand to SEQ ID NO: 978382
ugcuuacuaaguuuguucc

SEQ ID NO: 978384 - RNA, 19 nt, Artificial Sequence
  Description of Artificial Sequence: Synthetic oligonucleotide
  Sense strand starting at position 641 of SEQ ID NO: 914105
augauuucaccgugagcug

SEQ ID NO: 978385 - RNA, 19 nt, Artificial Sequence
  Description of Artificial Sequence: Synthetic oligonucleotide
  Antisense strand to SEQ ID NO: 978384
cagcucacggugaaaucau

SEQ ID NO: 978386 - RNA, 19 nt, Artificial Sequence
  Description of Artificial Sequence: Synthetic oligonucleotide
  Sense strand starting at position 2291 of SEQ ID NO: 914105
ucgcucucucgguuaucau

SEQ ID NO: 978387 - RNA, 19 nt, Artificial Sequence
  Description of Artificial Sequence: Synthetic oligonucleotide
  Antisense strand to SEQ ID NO: 978386
augauaaccgagagagcga

SEQ ID NO: 978388 - RNA, 19 nt, Artificial Sequence
  Description of Artificial Sequence: Synthetic oligonucleotide
  Sense strand starting at position 1351 of SEQ ID NO: 914105
uuauuugucuaggcaagca

SEQ ID NO: 978389 - RNA, 19 nt, Artificial Sequence
  Description of Artificial Sequence: Synthetic oligonucleotide
  Antisense strand to SEQ ID NO: 978388
ugcuugccuagacaaauaa

SEQ ID NO: 978390 - RNA, 19 nt, Artificial Sequence
  Description of Artificial Sequence: Synthetic oligonucleotide
  Sense strand starting at position 3589 of SEQ ID NO: 914105
uuuccucauguguaagaaa

SEQ ID NO: 978391 - RNA, 19 nt, Artificial Sequence
  Description of Artificial Sequence: Synthetic oligonucleotide
  Antisense strand to SEQ ID NO: 978390
uuucuuacacaugaggaaa

SEQ ID NO: 978392 - RNA, 19 nt, Artificial Sequence
  Description of Artificial Sequence: Synthetic oligonucleotide
  Sense strand starting at position 3339 of SEQ ID NO: 914105
ucacauacuguuggaugaa

SEQ ID NO: 978393 - RNA, 19 nt, Artificial Sequence
  Description of Artificial Sequence: Synthetic oligonucleotide
  Antisense strand to SEQ ID NO: 978392
uucauccaacaguauguga

SEQ ID NO: 978394 - RNA, 19 nt, Artificial Sequence
  Description of Artificial Sequence: Synthetic oligonucleotide
  Sense strand starting at position 3384 of SEQ ID NO: 914105
gggaaauauuuggaagcau

SEQ ID NO: 978395 - RNA, 19 nt, Artificial Sequence
  Description of Artificial Sequence: Synthetic oligonucleotide
  Antisense strand to SEQ ID NO: 978394
augcuuccaaauauuuccc

SEQ ID NO: 978396 - RNA, 19 nt, Artificial Sequence
  Description of Artificial Sequence: Synthetic oligonucleotide
  Sense strand starting at position 3358 of SEQ ID NO: 914105
guguaaauacuguauaauc

SEQ ID NO: 978397 - RNA, 19 nt, Artificial Sequence
  Description of Artificial Sequence: Synthetic oligonucleotide
  Antisense strand to SEQ ID NO: 978396
gauuauacaguauuuacac

SEQ ID NO: 978398 - RNA, 19 nt, Artificial Sequence
  Description of Artificial Sequence: Synthetic oligonucleotide
  Sense strand starting at position 2023 of SEQ ID NO: 914105
uggcgcugccugucucaaa

SEQ ID NO: 978399 - RNA, 19 nt, Artificial Sequence
  Description of Artificial Sequence: Synthetic oligonucleotide
  Antisense strand to SEQ ID NO: 978398
uuugagacaggcagcgcca

SEQ ID NO: 978400 - RNA, 19 nt, Artificial Sequence
  Description of Artificial Sequence: Synthetic oligonucleotide
  Sense strand starting at position 2404 of SEQ ID NO: 914105
ggaugaagucaugggagcu

SEQ ID NO: 978401 - RNA, 19 nt, Artificial Sequence
  Description of Artificial Sequence: Synthetic oligonucleotide
  Antisense strand to SEQ ID NO: 978400
agcucccaugacuucaucc

SEQ ID NO: 978402 - RNA, 19 nt, Artificial Sequence
  Description of Artificial Sequence: Synthetic oligonucleotide
  Sense strand starting at position 1029 of SEQ ID NO: 914105
uugacaucaucaguaccua

SEQ ID NO: 978403 - RNA, 19 nt, Artificial Sequence
  Description of Artificial Sequence: Synthetic oligonucleotide
  Antisense strand to SEQ ID NO: 978402
uagguacugaugaugucaa

SEQ ID NO: 978404 - RNA, 19 nt, Artificial Sequence
  Description of Artificial Sequence: Synthetic oligonucleotide
  Sense strand starting at position 2777 of SEQ ID NO: 914105
cugugugauggagaaguuu

SEQ ID NO: 978405 - RNA, 19 nt, Artificial Sequence
  Description of Artificial Sequence: Synthetic oligonucleotide
  Antisense strand to SEQ ID NO: 978404
aaacuucuccaucacacag

SEQ ID NO: 978406 - RNA, 19 nt, Artificial Sequence
  Description of Artificial Sequence: Synthetic oligonucleotide
  Sense strand starting at position 2775 of SEQ ID NO: 914105
cucugugugauggagaagu

SEQ ID NO: 978407 - RNA, 19 nt, Artificial Sequence
  Description of Artificial Sequence: Synthetic oligonucleotide
  Antisense strand to SEQ ID NO: 978406
acuucuccaucacacagag

SEQ ID NO: 978408 - RNA, 19 nt, Artificial Sequence
  Description of Artificial Sequence: Synthetic oligonucleotide
  Sense strand starting at position 3694 of SEQ ID NO: 914105
aguguaacugaucacugua

SEQ ID NO: 978409 - RNA, 19 nt, Artificial Sequence
  Description of Artificial Sequence: Synthetic oligonucleotide
  Antisense strand to SEQ ID NO: 978408
uacagugaucaguuacacu

SEQ ID NO: 978410 - RNA, 19 nt, Artificial Sequence
  Description of Artificial Sequence: Synthetic oligonucleotide
  Sense strand starting at position 1192 of SEQ ID NO: 914105
guuucagucguugccaagu

SEQ ID NO: 978411 - RNA, 19 nt, Artificial Sequence
  Description of Artificial Sequence: Synthetic oligonucleotide
  Antisense strand to SEQ ID NO: 978410
acuuggcaacgacugaaac

SEQ ID NO: 978412 - RNA, 19 nt, Artificial Sequence
  Description of Artificial Sequence: Synthetic oligonucleotide
  Sense strand starting at position 2896 of SEQ ID NO: 914105
aaauguagcguggaaacua

SEQ ID NO: 978413 - RNA, 19 nt, Artificial Sequence
  Description of Artificial Sequence: Synthetic oligonucleotide
  Antisense strand to SEQ ID NO: 978412
uaguuuccacgcuacauuu

SEQ ID NO: 978414 - RNA, 19 nt, Artificial Sequence
  Description of Artificial Sequence: Synthetic oligonucleotide
  Sense strand starting at position 1238 of SEQ ID NO: 914105
uugagagucuacccuuaac

SEQ ID NO: 978415 - RNA, 19 nt, Artificial Sequence
  Description of Artificial Sequence: Synthetic oligonucleotide
  Antisense strand to SEQ ID NO: 978414
guuaaggguagacucucaa

SEQ ID NO: 978416 - RNA, 19 nt, Artificial Sequence
  Description of Artificial Sequence: Synthetic oligonucleotide
  Sense strand starting at position 2688 of SEQ ID NO: 914105
aaaguugaucagugaguga

SEQ ID NO: 978417 - RNA, 19 nt, Artificial Sequence
  Description of Artificial Sequence: Synthetic oligonucleotide
  Antisense strand to SEQ ID NO: 978416
ucacucacugaucaacuuu

SEQ ID NO: 978418 - RNA, 19 nt, Artificial Sequence
  Description of Artificial Sequence: Synthetic oligonucleotide
  Sense strand starting at position 101 of SEQ ID NO: 914105
uaggaacggguuugacauu

SEQ ID NO: 978419 - RNA, 19 nt, Artificial Sequence
  Description of Artificial Sequence: Synthetic oligonucleotide
  Antisense strand to SEQ ID NO: 978418
aaugucaaacccguuccua

SEQ ID NO: 978420 - RNA, 19 nt, Artificial Sequence
  Description of Artificial Sequence: Synthetic oligonucleotide
  Sense strand starting at position 2392 of SEQ ID NO: 914105
acaaacuugcucggaugaa

SEQ ID NO: 978421 - RNA, 19 nt, Artificial Sequence
  Description of Artificial Sequence: Synthetic oligonucleotide
  Antisense strand to SEQ ID NO: 978420
uucauccgagcaaguuugu

SEQ ID NO: 978422 - RNA, 19 nt, Artificial Sequence
  Description of Artificial Sequence: Synthetic oligonucleotide
  Sense strand starting at position 3444 of SEQ ID NO: 914105
ucggcaaauuaauccuaaa

SEQ ID NO: 978423 - RNA, 19 nt, Artificial Sequence
  Description of Artificial Sequence: Synthetic oligonucleotide
  Antisense strand to SEQ ID NO: 978422
uuuaggauuaauuugccga

SEQ ID NO: 978424 - RNA, 19 nt, Artificial Sequence
  Description of Artificial Sequence: Synthetic oligonucleotide
  Sense strand starting at position 542 of SEQ ID NO: 914105
gcaggcccucuagacauau

SEQ ID NO: 978425 - RNA, 19 nt, Artificial Sequence
  Description of Artificial Sequence: Synthetic oligonucleotide
  Antisense strand to SEQ ID NO: 978424
auaugucuagagggccugc

SEQ ID NO: 978426 - RNA, 19 nt, Artificial Sequence
  Description of Artificial Sequence: Synthetic oligonucleotide
  Sense strand starting at position 2391 of SEQ ID NO: 914105
gacaaacuugcucggauga

SEQ ID NO: 978427 - RNA, 19 nt, Artificial Sequence
  Description of Artificial Sequence: Synthetic oligonucleotide
  Antisense strand to SEQ ID NO: 978426
ucauccgagcaaguuuguc

SEQ ID NO: 978428 - RNA, 19 nt, Artificial Sequence
  Description of Artificial Sequence: Synthetic oligonucleotide
  Sense strand starting at position 3696 of SEQ ID NO: 914105
uguaacugaucacuguaau

SEQ ID NO: 978429 - RNA, 19 nt, Artificial Sequence
  Description of Artificial Sequence: Synthetic oligonucleotide
  Antisense strand to SEQ ID NO: 978428
auuacagugaucaguuaca

SEQ ID NO: 978430 - RNA, 19 nt, Artificial Sequence
  Description of Artificial Sequence: Synthetic oligonucleotide
  Sense strand starting at position 3715 of SEQ ID NO: 914105
uuacacuggucaguuaaau

SEQ ID NO: 978431 - RNA, 19 nt, Artificial Sequence
  Description of Artificial Sequence: Synthetic oligonucleotide
  Antisense strand to SEQ ID NO: 978430
auuuaacugaccaguguaa

SEQ ID NO: 978432 - RNA, 19 nt, Artificial Sequence
  Description of Artificial Sequence: Synthetic oligonucleotide
  Sense strand starting at position 431 of SEQ ID NO: 914105
uauaaucggugaucuccaa

SEQ ID NO: 978433 - RNA, 19 nt, Artificial Sequence
  Description of Artificial Sequence: Synthetic oligonucleotide
  Antisense strand to SEQ ID NO: 978432
uuggagaucaccgauuaua

SEQ ID NO: 978434 - RNA, 19 nt, Artificial Sequence
  Description of Artificial Sequence: Synthetic oligonucleotide
  Sense strand starting at position 3383 of SEQ ID NO: 914105
agggaaauauuuggaagca

SEQ ID NO: 978435 - RNA, 19 nt, Artificial Sequence
  Description of Artificial Sequence: Synthetic oligonucleotide
  Antisense strand to SEQ ID NO: 978434
ugcuuccaaauauuucccu

SEQ ID NO: 978436 - RNA, 19 nt, Artificial Sequence
  Description of Artificial Sequence: Synthetic oligonucleotide
  Sense strand starting at position 435 of SEQ ID NO: 914105
aucggugaucuccaagguu

SEQ ID NO: 978437 - RNA, 19 nt, Artificial Sequence
  Description of Artificial Sequence: Synthetic oligonucleotide
  Antisense strand to SEQ ID NO: 978436
aaccuuggagaucaccgau

SEQ ID NO: 978438 - RNA, 19 nt, Artificial Sequence
  Description of Artificial Sequence: Synthetic oligonucleotide
  Sense strand starting at position 424 of SEQ ID NO: 914105
cauuaaguauaaucgguga

SEQ ID NO: 978439 - RNA, 19 nt, Artificial Sequence
  Description of Artificial Sequence: Synthetic oligonucleotide
  Antisense strand to SEQ ID NO: 978438
ucaccgauuauacuuaaug

SEQ ID NO: 978440 - RNA, 19 nt, Artificial Sequence
  Description of Artificial Sequence: Synthetic oligonucleotide
  Sense strand starting at position 3697 of SEQ ID NO: 914105
guaacugaucacuguaauu

SEQ ID NO: 978441 - RNA, 19 nt, Artificial Sequence
  Description of Artificial Sequence: Synthetic oligonucleotide
  Antisense strand to SEQ ID NO: 978440
aauuacagugaucaguuac

SEQ ID NO: 978442 - RNA, 19 nt, Artificial Sequence
  Description of Artificial Sequence: Synthetic oligonucleotide
  Sense strand starting at position 2947 of SEQ ID NO: 914105
guaaucaaagagugcuuaa

SEQ ID NO: 978443 - RNA, 19 nt, Artificial Sequence
  Description of Artificial Sequence: Synthetic oligonucleotide
  Antisense strand to SEQ ID NO: 978442
uuaagcacucuuugauuac

SEQ ID NO: 978444 - RNA, 19 nt, Artificial Sequence
  Description of Artificial Sequence: Synthetic oligonucleotide
  Sense strand starting at position 2853 of SEQ ID NO: 914105
cuuguacguaaauggaaau

SEQ ID NO: 978445 - RNA, 19 nt, Artificial Sequence
  Description of Artificial Sequence: Synthetic oligonucleotide
  Antisense strand to SEQ ID NO: 978444
auuuccauuuacguacaag

SEQ ID NO: 978446 - RNA, 19 nt, Artificial Sequence
  Description of Artificial Sequence: Synthetic oligonucleotide
  Sense strand starting at position 1227 of SEQ ID NO: 914105
uccuaacauguuugagagu

SEQ ID NO: 978447 - RNA, 19 nt, Artificial Sequence
  Description of Artificial Sequence: Synthetic oligonucleotide
  Antisense strand to SEQ ID NO: 978446
acucucaaacauguuagga

SEQ ID NO: 978448 - RNA, 19 nt, Artificial Sequence
  Description of Artificial Sequence: Synthetic oligonucleotide
  Sense strand starting at position 3904 of SEQ ID NO: 914105
acaugauugucucugagug

SEQ ID NO: 978449 - RNA, 19 nt, Artificial Sequence
  Description of Artificial Sequence: Synthetic oligonucleotide
  Antisense strand to SEQ ID NO: 978448
cacucagagacaaucaugu

SEQ ID NO: 978450 - RNA, 19 nt, Artificial Sequence
  Description of Artificial Sequence: Synthetic oligonucleotide
  Sense strand starting at position 3263 of SEQ ID NO: 914106
augguaggcauuugaguuu

SEQ ID NO: 978451 - RNA, 19 nt, Artificial Sequence
  Description of Artificial Sequence: Synthetic oligonucleotide
  Antisense strand to SEQ ID NO: 978450
aaacucaaaugccuaccau

SEQ ID NO: 978452 - RNA, 19 nt, Artificial Sequence
  Description of Artificial Sequence: Synthetic oligonucleotide
  Sense strand starting at position 3247 of SEQ ID NO: 914106
acugacauuugagaauaug

SEQ ID NO: 978453 - RNA, 19 nt, Artificial Sequence
  Description of Artificial Sequence: Synthetic oligonucleotide
  Antisense strand to SEQ ID NO: 978452
cauauucucaaaugucagu

SEQ ID NO: 978454 - RNA, 19 nt, Artificial Sequence
  Description of Artificial Sequence: Synthetic oligonucleotide
  Sense strand starting at position 3171 of SEQ ID NO: 914106
gcaggugucgccuuuagac

SEQ ID NO: 978455 - RNA, 19 nt, Artificial Sequence
  Description of Artificial Sequence: Synthetic oligonucleotide
  Antisense strand to SEQ ID NO: 978454
gucuaaaggcgacaccugc

SEQ ID NO: 978456 - RNA, 19 nt, Artificial Sequence
  Description of Artificial Sequence: Synthetic oligonucleotide
  Sense strand starting at position 2705 of SEQ ID NO: 914106
agguucuauuaacugauaa

SEQ ID NO: 978457 - RNA, 19 nt, Artificial Sequence
  Description of Artificial Sequence: Synthetic oligonucleotide
  Antisense strand to SEQ ID NO: 978456
uuaucaguuaauagaaccu

SEQ ID NO: 978458 - RNA, 19 nt, Artificial Sequence
  Description of Artificial Sequence: Synthetic oligonucleotide
  Sense strand starting at position 662 of SEQ ID NO: 914106
gucaguaaugagcaagaug

SEQ ID NO: 978459 - RNA, 19 nt, Artificial Sequence
  Description of Artificial Sequence: Synthetic oligonucleotide
  Antisense strand to SEQ ID NO: 978458
caucuugcucauuacugac

SEQ ID NO: 978460 - RNA, 19 nt, Artificial Sequence
  Description of Artificial Sequence: Synthetic oligonucleotide
  Sense strand starting at position 3393 of SEQ ID NO: 914106
acguauuuagaguggucau

SEQ ID NO: 978461 - RNA, 19 nt, Artificial Sequence
  Description of Artificial Sequence: Synthetic oligonucleotide
  Antisense strand to SEQ ID NO: 978460
augaccacucuaaauacgu

SEQ ID NO: 978462 - RNA, 19 nt, Artificial Sequence
  Description of Artificial Sequence: Synthetic oligonucleotide
  Sense strand starting at position 671 of SEQ ID NO: 914106
gagcaagauguuuggaaag

SEQ ID NO: 978463 - RNA, 19 nt, Artificial Sequence
  Description of Artificial Sequence: Synthetic oligonucleotide
  Antisense strand to SEQ ID NO: 978462
cuuuccaaacaucuugcuc

SEQ ID NO: 978464 - RNA, 19 nt, Artificial Sequence
  Description of Artificial Sequence: Synthetic oligonucleotide
  Sense strand starting at position 2628 of SEQ ID NO: 914106
guuacucaccuagaaagca

SEQ ID NO: 978465 - RNA, 19 nt, Artificial Sequence
  Description of Artificial Sequence: Synthetic oligonucleotide
  Antisense strand to SEQ ID NO: 978464
ugcuuucuaggugaguaac

SEQ ID NO: 978466 - RNA, 19 nt, Artificial Sequence
  Description of Artificial Sequence: Synthetic oligonucleotide
  Sense strand starting at position 3668 of SEQ ID NO: 914106
uguccuaagugagcuauuu

SEQ ID NO: 978467 - RNA, 19 nt, Artificial Sequence
  Description of Artificial Sequence: Synthetic oligonucleotide
  Antisense strand to SEQ ID NO: 978466
aaauagcucacuuaggaca

SEQ ID NO: 978468 - RNA, 19 nt, Artificial Sequence
  Description of Artificial Sequence: Synthetic oligonucleotide
  Sense strand starting at position 47 of SEQ ID NO: 914106
cuuacuuuauaggugagga

SEQ ID NO: 978469 - RNA, 19 nt, Artificial Sequence
  Description of Artificial Sequence: Synthetic oligonucleotide
  Antisense strand to SEQ ID NO: 978468
uccucaccuauaaaguaag

SEQ ID NO: 978470 - RNA, 19 nt, Artificial Sequence
  Description of Artificial Sequence: Synthetic oligonucleotide
  Sense strand starting at position 670 of SEQ ID NO: 914106
ugagcaagauguuuggaaa

SEQ ID NO: 978471 - RNA, 19 nt, Artificial Sequence
  Description of Artificial Sequence: Synthetic oligonucleotide
  Antisense strand to SEQ ID NO: 978470
uuuccaaacaucuugcuca

SEQ ID NO: 978472 - RNA, 19 nt, Artificial Sequence
  Description of Artificial Sequence: Synthetic oligonucleotide
  Sense strand starting at position 228 of SEQ ID NO: 914106
uaugccuuugaauggagaa

SEQ ID NO: 978473 - RNA, 19 nt, Artificial Sequence
  Description of Artificial Sequence: Synthetic oligonucleotide
  Antisense strand to SEQ ID NO: 978472
uucuccauucaaaggcaua

SEQ ID NO: 978474 - RNA, 19 nt, Artificial Sequence
  Description of Artificial Sequence: Synthetic oligonucleotide
  Sense strand starting at position 3528 of SEQ ID NO: 914106
cagagacuccuguacaguu

SEQ ID NO: 978475 - RNA, 19 nt, Artificial Sequence
  Description of Artificial Sequence: Synthetic oligonucleotide
  Antisense strand to SEQ ID NO: 978474
aacuguacaggagucucug

SEQ ID NO: 978476 - RNA, 19 nt, Artificial Sequence
  Description of Artificial Sequence: Synthetic oligonucleotide
  Sense strand starting at position 3530 of SEQ ID NO: 914106
gagacuccuguacaguuau

SEQ ID NO: 978477 - RNA, 19 nt, Artificial Sequence
  Description of Artificial Sequence: Synthetic oligonucleotide
  Antisense strand to SEQ ID NO: 978476
auaacuguacaggagucuc

SEQ ID NO: 978478 - RNA, 19 nt, Artificial Sequence
  Description of Artificial Sequence: Synthetic oligonucleotide
  Sense strand starting at position 665 of SEQ ID NO: 914106
aguaaugagcaagauguuu

SEQ ID NO: 978479 - RNA, 19 nt, Artificial Sequence
  Description of Artificial Sequence: Synthetic oligonucleotide
  Antisense strand to SEQ ID NO: 978478
aaacaucuugcucauuacu

SEQ ID NO: 978480 - RNA, 19 nt, Artificial Sequence
  Description of Artificial Sequence: Synthetic oligonucleotide
  Sense strand starting at position 353 of SEQ ID NO: 914106
aauccaguggcagaguaua

SEQ ID NO: 978481 - RNA, 19 nt, Artificial Sequence
  Description of Artificial Sequence: Synthetic oligonucleotide
  Antisense strand to SEQ ID NO: 978480
uauacucugccacuggauu

SEQ ID NO: 978482 - RNA, 19 nt, Artificial Sequence
  Description of Artificial Sequence: Synthetic oligonucleotide
  Sense strand starting at position 48 of SEQ ID NO: 914106
uuacuuuauaggugaggau

SEQ ID NO: 978483 - RNA, 19 nt, Artificial Sequence
  Description of Artificial Sequence: Synthetic oligonucleotide
  Antisense strand to SEQ ID NO: 978482
auccucaccuauaaaguaa

SEQ ID NO: 978484 - RNA, 19 nt, Artificial Sequence
  Description of Artificial Sequence: Synthetic oligonucleotide
  Sense strand starting at position 3343 of SEQ ID NO: 914106
gaagguuagccagauuccu

SEQ ID NO: 978485 - RNA, 19 nt, Artificial Sequence
  Description of Artificial Sequence: Synthetic oligonucleotide
  Antisense strand to SEQ ID NO: 978484
aggaaucuggcuaaccuuc

SEQ ID NO: 978486 - RNA, 19 nt, Artificial Sequence
  Description of Artificial Sequence: Synthetic oligonucleotide
  Sense strand starting at position 2624 of SEQ ID NO: 914106
ccagguuacucaccuagaa

SEQ ID NO: 978487 - RNA, 19 nt, Artificial Sequence
  Description of Artificial Sequence: Synthetic oligonucleotide
  Antisense strand to SEQ ID NO: 978486
uucuaggugaguaaccugg

SEQ ID NO: 978488 - RNA, 19 nt, Artificial Sequence
  Description of Artificial Sequence: Synthetic oligonucleotide
  Sense strand starting at position 153 of SEQ ID NO: 914106
ggcaauuugcuguaucugu

SEQ ID NO: 978489 - RNA, 19 nt, Artificial Sequence
  Description of Artificial Sequence: Synthetic oligonucleotide
  Antisense strand to SEQ ID NO: 978488
acagauacagcaaauugcc

SEQ ID NO: 978490 - RNA, 19 nt, Artificial Sequence
  Description of Artificial Sequence: Synthetic oligonucleotide
  Sense strand starting at position 956 of SEQ ID NO: 914106
auuccauuucuuugugcau

SEQ ID NO: 978491 - RNA, 19 nt, Artificial Sequence
  Description of Artificial Sequence: Synthetic oligonucleotide
  Antisense strand to SEQ ID NO: 978490
augcacaaagaaauggaau

SEQ ID NO: 978492 - RNA, 19 nt, Artificial Sequence
  Description of Artificial Sequence: Synthetic oligonucleotide
  Sense strand starting at position 3394 of SEQ ID NO: 914106
cguauuuagaguggucauu

SEQ ID NO: 978493 - RNA, 19 nt, Artificial Sequence
  Description of Artificial Sequence: Synthetic oligonucleotide
  Antisense strand to SEQ ID NO: 978492
aaugaccacucuaaauacg

SEQ ID NO: 978494 - RNA, 19 nt, Artificial Sequence
  Description of Artificial Sequence: Synthetic oligonucleotide
  Sense strand starting at position 1285 of SEQ ID NO: 914106
ccucccuaucaaggugaaa

SEQ ID NO: 978495 - RNA, 19 nt, Artificial Sequence
  Description of Artificial Sequence: Synthetic oligonucleotide
  Antisense strand to SEQ ID NO: 978494
uuucaccuugauagggagg

SEQ ID NO: 978496 - RNA, 19 nt, Artificial Sequence
  Description of Artificial Sequence: Synthetic oligonucleotide
  Sense strand starting at position 3340 of SEQ ID NO: 914106
uaagaagguuagccagauu

SEQ ID NO: 978497 - RNA, 19 nt, Artificial Sequence
  Description of Artificial Sequence: Synthetic oligonucleotide
  Antisense strand to SEQ ID NO: 978496
aaucuggcuaaccuucuua

SEQ ID NO: 978498 - RNA, 19 nt, Artificial Sequence
  Description of Artificial Sequence: Synthetic oligonucleotide
  Sense strand starting at position 3339 of SEQ ID NO: 914106
uuaagaagguuagccagau

SEQ ID NO: 978499 - RNA, 19 nt, Artificial Sequence
  Description of Artificial Sequence: Synthetic oligonucleotide
  Antisense strand to SEQ ID NO: 978498
aucuggcuaaccuucuuaa

SEQ ID NO: 978500 - RNA, 19 nt, Artificial Sequence
  Description of Artificial Sequence: Synthetic oligonucleotide
  Sense strand starting at position 3049 of SEQ ID NO: 914106
guuccaaauguugaaguua

SEQ ID NO: 978501 - RNA, 19 nt, Artificial Sequence
  Description of Artificial Sequence: Synthetic oligonucleotide
  Antisense strand to SEQ ID NO: 978500
uaacuucaacauuuggaac

SEQ ID NO: 978502 - RNA, 19 nt, Artificial Sequence
  Description of Artificial Sequence: Synthetic oligonucleotide
  Sense strand starting at position 544 of SEQ ID NO: 914106
gaacaaaucuacguuauug

SEQ ID NO: 978503 - RNA, 19 nt, Artificial Sequence
  Description of Artificial Sequence: Synthetic oligonucleotide
  Antisense strand to SEQ ID NO: 978502
caauaacguagauuuguuc

SEQ ID NO: 978504 - RNA, 19 nt, Artificial Sequence
  Description of Artificial Sequence: Synthetic oligonucleotide
  Sense strand starting at position 655 of SEQ ID NO: 914106
uguuauugucaguaaugag

SEQ ID NO: 978505 - RNA, 19 nt, Artificial Sequence
  Description of Artificial Sequence: Synthetic oligonucleotide
  Antisense strand to SEQ ID NO: 978504
cucauuacugacaauaaca

SEQ ID NO: 978506 - RNA, 19 nt, Artificial Sequence
  Description of Artificial Sequence: Synthetic oligonucleotide
  Sense strand starting at position 3629 of SEQ ID NO: 914106
acaguagugccagagguaa

SEQ ID NO: 978507 - RNA, 19 nt, Artificial Sequence
  Description of Artificial Sequence: Synthetic oligonucleotide
  Antisense strand to SEQ ID NO: 978506
uuaccucuggcacuacugu

SEQ ID NO: 978508 - RNA, 19 nt, Artificial Sequence
  Description of Artificial Sequence: Synthetic oligonucleotide
  Sense strand starting at position 3269 of SEQ ID NO: 914106
ggcauuugaguuugcagua

SEQ ID NO: 978509 - RNA, 19 nt, Artificial Sequence
  Description of Artificial Sequence: Synthetic oligonucleotide
  Antisense strand to SEQ ID NO: 978508
uacugcaaacucaaaugcc

SEQ ID NO: 978510 - RNA, 19 nt, Artificial Sequence
  Description of Artificial Sequence: Synthetic oligonucleotide
  Sense strand starting at position 543 of SEQ ID NO: 914106
ggaacaaaucuacguuauu

SEQ ID NO: 978511 - RNA, 19 nt, Artificial Sequence
  Description of Artificial Sequence: Synthetic oligonucleotide
  Antisense strand to SEQ ID NO: 978510
aauaacguagauuuguucc

SEQ ID NO: 978512 - RNA, 19 nt, Artificial Sequence
  Description of Artificial Sequence: Synthetic oligonucleotide
  Sense strand starting at position 348 of SEQ ID NO: 914106
acuacaauccaguggcaga

SEQ ID NO: 978513 - RNA, 19 nt, Artificial Sequence
  Description of Artificial Sequence: Synthetic oligonucleotide
  Antisense strand to SEQ ID NO: 978512
ucugccacuggauuguagu

SEQ ID NO: 978514 - RNA, 19 nt, Artificial Sequence
  Description of Artificial Sequence: Synthetic oligonucleotide
  Sense strand starting at position 3270 of SEQ ID NO: 914106
gcauuugaguuugcaguau

SEQ ID NO: 978515 - RNA, 19 nt, Artificial Sequence
  Description of Artificial Sequence: Synthetic oligonucleotide
  Antisense strand to SEQ ID NO: 978514
auacugcaaacucaaaugc

SEQ ID NO: 978516 - RNA, 19 nt, Artificial Sequence
  Description of Artificial Sequence: Synthetic oligonucleotide
  Sense strand starting at position 3387 of SEQ ID NO: 914106
ccacguacguauuuagagu

SEQ ID NO: 978517 - RNA, 19 nt, Artificial Sequence
  Description of Artificial Sequence: Synthetic oligonucleotide
  Antisense strand to SEQ ID NO: 978516
acucuaaauacguacgugg

SEQ ID NO: 978518 - RNA, 19 nt, Artificial Sequence
  Description of Artificial Sequence: Synthetic oligonucleotide
  Sense strand starting at position 3844 of SEQ ID NO: 914106
cguugugaccaagaacucu

SEQ ID NO: 978519 - RNA, 19 nt, Artificial Sequence
  Description of Artificial Sequence: Synthetic oligonucleotide
  Antisense strand to SEQ ID NO: 978518
agaguucuuggucacaacg

SEQ ID NO: 978520 - RNA, 19 nt, Artificial Sequence
  Description of Artificial Sequence: Synthetic oligonucleotide
  Sense strand starting at position 452 of SEQ ID NO: 914106
guggcuuaauuucugugua

SEQ ID NO: 978521 - RNA, 19 nt, Artificial Sequence
  Description of Artificial Sequence: Synthetic oligonucleotide
  Antisense strand to SEQ ID NO: 978520
uacacagaaauuaagccac

SEQ ID NO: 978522 - RNA, 19 nt, Artificial Sequence
  Description of Artificial Sequence: Synthetic oligonucleotide
  Sense strand starting at position 3400 of SEQ ID NO: 914106
uagaguggucauugaucau

SEQ ID NO: 978523 - RNA, 19 nt, Artificial Sequence
  Description of Artificial Sequence: Synthetic oligonucleotide
  Antisense strand to SEQ ID NO: 978522
augaucaaugaccacucua

SEQ ID NO: 978524 - RNA, 19 nt, Artificial Sequence
  Description of Artificial Sequence: Synthetic oligonucleotide
  Sense strand starting at position 3274 of SEQ ID NO: 914106
uugaguuugcaguauugaa

SEQ ID NO: 978525 - RNA, 19 nt, Artificial Sequence
  Description of Artificial Sequence: Synthetic oligonucleotide
  Antisense strand to SEQ ID NO: 978524
uucaauacugcaaacucaa

SEQ ID NO: 978526 - RNA, 19 nt, Artificial Sequence
  Description of Artificial Sequence: Synthetic oligonucleotide
  Sense strand starting at position 16 of SEQ ID NO: 914106
gguuaucugccuuauaauu

SEQ ID NO: 978527 - RNA, 19 nt, Artificial Sequence
  Description of Artificial Sequence: Synthetic oligonucleotide
  Antisense strand to SEQ ID NO: 978526
aauuauaaggcagauaacc

SEQ ID NO: 978528 - RNA, 19 nt, Artificial Sequence
  Description of Artificial Sequence: Synthetic oligonucleotide
  Sense strand starting at position 2643 of SEQ ID NO: 914106
agcaguagaagcugaaauu

SEQ ID NO: 978529 - RNA, 19 nt, Artificial Sequence
  Description of Artificial Sequence: Synthetic oligonucleotide
  Antisense strand to SEQ ID NO: 978528
aauuucagcuucuacugcu

SEQ ID NO: 978530 - RNA, 19 nt, Artificial Sequence
  Description of Artificial Sequence: Synthetic oligonucleotide
  Sense strand starting at position 131 of SEQ ID NO: 914107
agggaagucuacccuacaa

SEQ ID NO: 978531 - RNA, 19 nt, Artificial Sequence
  Description of Artificial Sequence: Synthetic oligonucleotide
  Antisense strand to SEQ ID NO: 978530
uuguaggguagacuucccu

SEQ ID NO: 978532 - RNA, 19 nt, Artificial Sequence
  Description of Artificial Sequence: Synthetic oligonucleotide
  Sense strand starting at position 3970 of SEQ ID NO: 914107
gaaagcugacucugaagau

SEQ ID NO: 978533 - RNA, 19 nt, Artificial Sequence
  Description of Artificial Sequence: Synthetic oligonucleotide
  Antisense strand to SEQ ID NO: 978532
aucuucagagucagcuuuc

SEQ ID NO: 978534 - RNA, 19 nt, Artificial Sequence
  Description of Artificial Sequence: Synthetic oligonucleotide
  Sense strand starting at position 582 of SEQ ID NO: 914107
gucguauuacuguaauuuc

SEQ ID NO: 978535 - RNA, 19 nt, Artificial Sequence
  Description of Artificial Sequence: Synthetic oligonucleotide
  Antisense strand to SEQ ID NO: 978534
gaaauuacaguaauacgac

SEQ ID NO: 978536 - RNA, 19 nt, Artificial Sequence
  Description of Artificial Sequence: Synthetic oligonucleotide
  Sense strand starting at position 408 of SEQ ID NO: 914107
gugaguucugcugucccga

SEQ ID NO: 978537 - RNA, 19 nt, Artificial Sequence
  Description of Artificial Sequence: Synthetic oligonucleotide
  Antisense strand to SEQ ID NO: 978536
ucgggacagcagaacucac

SEQ ID NO: 978538 - RNA, 19 nt, Artificial Sequence
  Description of Artificial Sequence: Synthetic oligonucleotide
  Sense strand starting at position 20 of SEQ ID NO: 914107
gugaaagaauucccaaguc

SEQ ID NO: 978539 - RNA, 19 nt, Artificial Sequence
  Description of Artificial Sequence: Synthetic oligonucleotide
  Antisense strand to SEQ ID NO: 978538
gacuugggaauucuuucac

SEQ ID NO: 978540 - RNA, 19 nt, Artificial Sequence
  Description of Artificial Sequence: Synthetic oligonucleotide
  Sense strand starting at position 2978 of SEQ ID NO: 914107
gcuguuugacuuuaggaag

SEQ ID NO: 978541 - RNA, 19 nt, Artificial Sequence
  Description of Artificial Sequence: Synthetic oligonucleotide
  Antisense strand to SEQ ID NO: 978540
cuuccuaaagucaaacagc

SEQ ID NO: 978542 - RNA, 19 nt, Artificial Sequence
  Description of Artificial Sequence: Synthetic oligonucleotide
  Sense strand starting at position 3967 of SEQ ID NO: 914107
guagaaagcugacucugaa

SEQ ID NO: 978543 - RNA, 19 nt, Artificial Sequence
  Description of Artificial Sequence: Synthetic oligonucleotide
  Antisense strand to SEQ ID NO: 978542
uucagagucagcuuucuac

SEQ ID NO: 978544 - RNA, 19 nt, Artificial Sequence
  Description of Artificial Sequence: Synthetic oligonucleotide
  Sense strand starting at position 3456 of SEQ ID NO: 914107
uacugagauuuagagggua

SEQ ID NO: 978545 - RNA, 19 nt, Artificial Sequence
  Description of Artificial Sequence: Synthetic oligonucleotide
  Antisense strand to SEQ ID NO: 978544
uacccucuaaaucucagua

SEQ ID NO: 978546 - RNA, 19 nt, Artificial Sequence
  Description of Artificial Sequence: Synthetic oligonucleotide
  Sense strand starting at position 95 of SEQ ID NO: 914107
ccuugaauucugugacaua

SEQ ID NO: 978547 - RNA, 19 nt, Artificial Sequence
  Description of Artificial Sequence: Synthetic oligonucleotide
  Antisense strand to SEQ ID NO: 978546
uaugucacagaauucaagg

SEQ ID NO: 978548 - RNA, 19 nt, Artificial Sequence
  Description of Artificial Sequence: Synthetic oligonucleotide
  Sense strand starting at position 863 of SEQ ID NO: 914107
cucccugcaggugauaauu

SEQ ID NO: 978549 - RNA, 19 nt, Artificial Sequence
  Description of Artificial Sequence: Synthetic oligonucleotide
  Antisense strand to SEQ ID NO: 978548
aauuaucaccugcagggag

SEQ ID NO: 978550 - RNA, 19 nt, Artificial Sequence
  Description of Artificial Sequence: Synthetic oligonucleotide
  Sense strand starting at position 1019 of SEQ ID NO: 914107
cggcuuuaucuacaggacu

SEQ ID NO: 978551 - RNA, 19 nt, Artificial Sequence
  Description of Artificial Sequence: Synthetic oligonucleotide
  Antisense strand to SEQ ID NO: 978550
aguccuguagauaaagccg

SEQ ID NO: 978552 - RNA, 19 nt, Artificial Sequence
  Description of Artificial Sequence: Synthetic oligonucleotide
  Sense strand starting at position 3482 of SEQ ID NO: 914107
ggcagcauaaccuagguua

SEQ ID NO: 978553 - RNA, 19 nt, Artificial Sequence
  Description of Artificial Sequence: Synthetic oligonucleotide
  Antisense strand to SEQ ID NO: 978552
uaaccuagguuaugcugcc

SEQ ID NO: 978554 - RNA, 19 nt, Artificial Sequence
  Description of Artificial Sequence: Synthetic oligonucleotide
  Sense strand starting at position 688 of SEQ ID NO: 914107
gcacgcuaucuauaaauga

SEQ ID NO: 978555 - RNA, 19 nt, Artificial Sequence
  Description of Artificial Sequence: Synthetic oligonucleotide
  Antisense strand to SEQ ID NO: 978554
ucauuuauagauagcgugc

SEQ ID NO: 978556 - RNA, 19 nt, Artificial Sequence
  Description of Artificial Sequence: Synthetic oligonucleotide
  Sense strand starting at position 86 of SEQ ID NO: 914107
ucuagugauccuugaauuc

SEQ ID NO: 978557 - RNA, 19 nt, Artificial Sequence
  Description of Artificial Sequence: Synthetic oligonucleotide
  Antisense strand to SEQ ID NO: 978556
gaauucaaggaucacuaga

SEQ ID NO: 978558 - RNA, 19 nt, Artificial Sequence
  Description of Artificial Sequence: Synthetic oligonucleotide
  Sense strand starting at position 2887 of SEQ ID NO: 914107
cuuggagugcccuggagaa

SEQ ID NO: 978559 - RNA, 19 nt, Artificial Sequence
  Description of Artificial Sequence: Synthetic oligonucleotide
  Antisense strand to SEQ ID NO: 978558
uucuccagggcacuccaag

SEQ ID NO: 978560 - RNA, 19 nt, Artificial Sequence
  Description of Artificial Sequence: Synthetic oligonucleotide
  Sense strand starting at position 1017 of SEQ ID NO: 914107
ggcggcuuuaucuacagga

SEQ ID NO: 978561 - RNA, 19 nt, Artificial Sequence
  Description of Artificial Sequence: Synthetic oligonucleotide
  Antisense strand to SEQ ID NO: 978560
uccuguagauaaagccgcc

SEQ ID NO: 978562 - RNA, 19 nt, Artificial Sequence
  Description of Artificial Sequence: Synthetic oligonucleotide
  Sense strand starting at position 82 of SEQ ID NO: 914107
ccuuucuagugauccuuga

SEQ ID NO: 978563 - RNA, 19 nt, Artificial Sequence
  Description of Artificial Sequence: Synthetic oligonucleotide
  Antisense strand to SEQ ID NO: 978562
ucaaggaucacuagaaagg

SEQ ID NO: 978564 - RNA, 19 nt, Artificial Sequence
  Description of Artificial Sequence: Synthetic oligonucleotide
  Sense strand starting at position 346 of SEQ ID NO: 914107
gggcuuucuuuacuuugaa

SEQ ID NO: 978565 - RNA, 19 nt, Artificial Sequence
  Description of Artificial Sequence: Synthetic oligonucleotide
  Antisense strand to SEQ ID NO: 978564
uucaaaguaaagaaagccc

SEQ ID NO: 978566 - RNA, 19 nt, Artificial Sequence
  Description of Artificial Sequence: Synthetic oligonucleotide
  Sense strand starting at position 749 of SEQ ID NO: 914107
ugaaaugugucaucaaugu

SEQ ID NO: 978567 - RNA, 19 nt, Artificial Sequence
  Description of Artificial Sequence: Synthetic oligonucleotide
  Antisense strand to SEQ ID NO: 978566
acauugaugacacauuuca

SEQ ID NO: 978568 - RNA, 19 nt, Artificial Sequence
  Description of Artificial Sequence: Synthetic oligonucleotide
  Sense strand starting at position 755 of SEQ ID NO: 914107
gugucaucaauguacgauu

SEQ ID NO: 978569 - RNA, 19 nt, Artificial Sequence
  Description of Artificial Sequence: Synthetic oligonucleotide
  Antisense strand to SEQ ID NO: 978568
aaucguacauugaugacac

SEQ ID NO: 978570 - RNA, 19 nt, Artificial Sequence
  Description of Artificial Sequence: Synthetic oligonucleotide
  Sense strand starting at position 347 of SEQ ID NO: 914107
ggcuuucuuuacuuugaau

SEQ ID NO: 978571 - RNA, 19 nt, Artificial Sequence
  Description of Artificial Sequence: Synthetic oligonucleotide
  Antisense strand to SEQ ID NO: 978570
auucaaaguaaagaaagcc

SEQ ID NO: 978572 - RNA, 19 nt, Artificial Sequence
  Description of Artificial Sequence: Synthetic oligonucleotide
  Sense strand starting at position 308 of SEQ ID NO: 914107
aggcaaaucugccuccuga

SEQ ID NO: 978573 - RNA, 19 nt, Artificial Sequence
  Description of Artificial Sequence: Synthetic oligonucleotide
  Antisense strand to SEQ ID NO: 978572
ucaggaggcagauuugccu

SEQ ID NO: 978574 - RNA, 19 nt, Artificial Sequence
  Description of Artificial Sequence: Synthetic oligonucleotide
  Sense strand starting at position 2943 of SEQ ID NO: 914107
gcgcuugucacugaagaau

SEQ ID NO: 978575 - RNA, 19 nt, Artificial Sequence
  Description of Artificial Sequence: Synthetic oligonucleotide
  Antisense strand to SEQ ID NO: 978574
auucuucagugacaagcgc

SEQ ID NO: 978576 - RNA, 19 nt, Artificial Sequence
  Description of Artificial Sequence: Synthetic oligonucleotide
  Sense strand starting at position 1060 of SEQ ID NO: 914107
agggcaggucuuugcacaa

SEQ ID NO: 978577 - RNA, 19 nt, Artificial Sequence
  Description of Artificial Sequence: Synthetic oligonucleotide
  Antisense strand to SEQ ID NO: 978576
uugugcaaagaccugcccu

SEQ ID NO: 978578 - RNA, 19 nt, Artificial Sequence
  Description of Artificial Sequence: Synthetic oligonucleotide
  Sense strand starting at position 3047 of SEQ ID NO: 914107
ucuuccuccucggugaaau

SEQ ID NO: 978579 - RNA, 19 nt, Artificial Sequence
  Description of Artificial Sequence: Synthetic oligonucleotide
  Antisense strand to SEQ ID NO: 978578
auuucaccgaggaggaaga

SEQ ID NO: 978580 - RNA, 19 nt, Artificial Sequence
  Description of Artificial Sequence: Synthetic oligonucleotide
  Sense strand starting at position 3046 of SEQ ID NO: 914107
cucuuccuccucggugaaa

SEQ ID NO: 978581 - RNA, 19 nt, Artificial Sequence
  Description of Artificial Sequence: Synthetic oligonucleotide
  Antisense strand to SEQ ID NO: 978580
uuucaccgaggaggaagag

SEQ ID NO: 978582 - RNA, 19 nt, Artificial Sequence
  Description of Artificial Sequence: Synthetic oligonucleotide
  Sense strand starting at position 3048 of SEQ ID NO: 914107
cuuccuccucggugaaauc

SEQ ID NO: 978583 - RNA, 19 nt, Artificial Sequence
  Description of Artificial Sequence: Synthetic oligonucleotide
  Antisense strand to SEQ ID NO: 978582
gauuucaccgaggaggaag

SEQ ID NO: 978584 - RNA, 19 nt, Artificial Sequence
  Description of Artificial Sequence: Synthetic oligonucleotide
  Sense strand starting at position 753 of SEQ ID NO: 914107
augugucaucaauguacga

SEQ ID NO: 978585 - RNA, 19 nt, Artificial Sequence
  Description of Artificial Sequence: Synthetic oligonucleotide
  Antisense strand to SEQ ID NO: 978584
ucguacauugaugacacau

SEQ ID NO: 978586 - RNA, 19 nt, Artificial Sequence
  Description of Artificial Sequence: Synthetic oligonucleotide
  Sense strand starting at position 3244 of SEQ ID NO: 914107
ccgccugaugcaugaaaug

SEQ ID NO: 978587 - RNA, 19 nt, Artificial Sequence
  Description of Artificial Sequence: Synthetic oligonucleotide
  Antisense strand to SEQ ID NO: 978586
cauuucaugcaucaggcgg

SEQ ID NO: 978588 - RNA, 19 nt, Artificial Sequence
  Description of Artificial Sequence: Synthetic oligonucleotide
  Sense strand starting at position 579 of SEQ ID NO: 914107
gaggucguauuacuguaau

SEQ ID NO: 978589 - RNA, 19 nt, Artificial Sequence
  Description of Artificial Sequence: Synthetic oligonucleotide
  Antisense strand to SEQ ID NO: 978588
auuacaguaauacgaccuc

SEQ ID NO: 978590 - RNA, 19 nt, Artificial Sequence
  Description of Artificial Sequence: Synthetic oligonucleotide
  Sense strand starting at position 782 of SEQ ID NO: 914107
uuugcauguuaccuguaga

SEQ ID NO: 978591 - RNA, 19 nt, Artificial Sequence
  Description of Artificial Sequence: Synthetic oligonucleotide
  Antisense strand to SEQ ID NO: 978590
ucuacagguaacaugcaaa

SEQ ID NO: 978592 - RNA, 19 nt, Artificial Sequence
  Description of Artificial Sequence: Synthetic oligonucleotide
  Sense strand starting at position 685 of SEQ ID NO: 914107
ucugcacgcuaucuauaaa

SEQ ID NO: 978593 - RNA, 19 nt, Artificial Sequence
  Description of Artificial Sequence: Synthetic oligonucleotide
  Antisense strand to SEQ ID NO: 978592
uuuauagauagcgugcaga

SEQ ID NO: 978594 - RNA, 19 nt, Artificial Sequence
  Description of Artificial Sequence: Synthetic oligonucleotide
  Sense strand starting at position 814 of SEQ ID NO: 914107
ucugcaugugacuguauua

SEQ ID NO: 978595 - RNA, 19 nt, Artificial Sequence
  Description of Artificial Sequence: Synthetic oligonucleotide
  Antisense strand to SEQ ID NO: 978594
uaauacagucacaugcaga

SEQ ID NO: 978596 - RNA, 19 nt, Artificial Sequence
  Description of Artificial Sequence: Synthetic oligonucleotide
  Sense strand starting at position 2526 of SEQ ID NO: 914107
cgggaaucugccgggcaga

SEQ ID NO: 978597 - RNA, 19 nt, Artificial Sequence
  Description of Artificial Sequence: Synthetic oligonucleotide
  Antisense strand to SEQ ID NO: 978596
ucugcccggcagauucccg

SEQ ID NO: 978598 - RNA, 19 nt, Artificial Sequence
  Description of Artificial Sequence: Synthetic oligonucleotide
  Sense strand starting at position 1601 of SEQ ID NO: 914107
uccuccuugucgucaaaca

SEQ ID NO: 978599 - RNA, 19 nt, Artificial Sequence
  Description of Artificial Sequence: Synthetic oligonucleotide
  Antisense strand to SEQ ID NO: 978598
uguuugacgacaaggagga

SEQ ID NO: 978600 - RNA, 19 nt, Artificial Sequence
  Description of Artificial Sequence: Synthetic oligonucleotide
  Sense strand starting at position 2942 of SEQ ID NO: 914107
ggcgcuugucacugaagaa

SEQ ID NO: 978601 - RNA, 19 nt, Artificial Sequence
  Description of Artificial Sequence: Synthetic oligonucleotide
  Antisense strand to SEQ ID NO: 978600
uucuucagugacaagcgcc

SEQ ID NO: 978602 - RNA, 19 nt, Artificial Sequence
  Description of Artificial Sequence: Synthetic oligonucleotide
  Sense strand starting at position 98 of SEQ ID NO: 914107
ugaauucugugacauaaca

SEQ ID NO: 978603 - RNA, 19 nt, Artificial Sequence
  Description of Artificial Sequence: Synthetic oligonucleotide
  Antisense strand to SEQ ID NO: 978602
uguuaugucacagaauuca

SEQ ID NO: 978604 - RNA, 19 nt, Artificial Sequence
  Description of Artificial Sequence: Synthetic oligonucleotide
  Sense strand starting at position 2403 of SEQ ID NO: 914107
cccugccuucuucgugaaa

SEQ ID NO: 978605 - RNA, 19 nt, Artificial Sequence
  Description of Artificial Sequence: Synthetic oligonucleotide
  Antisense strand to SEQ ID NO: 978604
uuucacgaagaaggcaggg

SEQ ID NO: 978606 - RNA, 19 nt, Artificial Sequence
  Description of Artificial Sequence: Synthetic oligonucleotide
  Sense strand starting at position 254 of SEQ ID NO: 914107
ugcuaaaccagaugcguuu

SEQ ID NO: 978607 - RNA, 19 nt, Artificial Sequence
  Description of Artificial Sequence: Synthetic oligonucleotide
  Antisense strand to SEQ ID NO: 978606
aaacgcaucugguuuagca

SEQ ID NO: 978608 - RNA, 19 nt, Artificial Sequence
  Description of Artificial Sequence: Synthetic oligonucleotide
  Sense strand starting at position 813 of SEQ ID NO: 914107
gucugcaugugacuguauu

SEQ ID NO: 978609 - RNA, 19 nt, Artificial Sequence
  Description of Artificial Sequence: Synthetic oligonucleotide
  Antisense strand to SEQ ID NO: 978608
aauacagucacaugcagac

SEQ ID NO: 978610 - RNA, 19 nt, Artificial Sequence
  Description of Artificial Sequence: Synthetic oligonucleotide
  Sense strand starting at position 3253 of SEQ ID NO: 914108
ugaugcguggcgguagaau

SEQ ID NO: 978611 - RNA, 19 nt, Artificial Sequence
  Description of Artificial Sequence: Synthetic oligonucleotide
  Antisense strand to SEQ ID NO: 978610
auucuaccgccacgcauca

SEQ ID NO: 978612 - RNA, 19 nt, Artificial Sequence
  Description of Artificial Sequence: Synthetic oligonucleotide
  Sense strand starting at position 3700 of SEQ ID NO: 914108
gaggaagggcauuaugcuu

SEQ ID NO: 978613 - RNA, 19 nt, Artificial Sequence
  Description of Artificial Sequence: Synthetic oligonucleotide
  Antisense strand to SEQ ID NO: 978612
aagcauaaugcccuuccuc

SEQ ID NO: 978614 - RNA, 19 nt, Artificial Sequence
  Description of Artificial Sequence: Synthetic oligonucleotide
  Sense strand starting at position 457 of SEQ ID NO: 914108
gugacuugucaacacacca

SEQ ID NO: 978615 - RNA, 19 nt, Artificial Sequence
  Description of Artificial Sequence: Synthetic oligonucleotide
  Antisense strand to SEQ ID NO: 978614
ugguguguugacaagucac

SEQ ID NO: 978616 - RNA, 19 nt, Artificial Sequence
  Description of Artificial Sequence: Synthetic oligonucleotide
  Sense strand starting at position 2673 of SEQ ID NO: 914108
uucucugggccucagaaau

SEQ ID NO: 978617 - RNA, 19 nt, Artificial Sequence
  Description of Artificial Sequence: Synthetic oligonucleotide
  Antisense strand to SEQ ID NO: 978616
auuucugaggcccagagaa

SEQ ID NO: 978618 - RNA, 19 nt, Artificial Sequence
  Description of Artificial Sequence: Synthetic oligonucleotide
  Sense strand starting at position 997 of SEQ ID NO: 914108
ggcuuuaagaguugaggaa

SEQ ID NO: 978619 - RNA, 19 nt, Artificial Sequence
  Description of Artificial Sequence: Synthetic oligonucleotide
  Antisense strand to SEQ ID NO: 978618
uuccucaacucuuaaagcc

SEQ ID NO: 978620 - RNA, 19 nt, Artificial Sequence
  Description of Artificial Sequence: Synthetic oligonucleotide
  Sense strand starting at position 519 of SEQ ID NO: 914108
gguuguuacagggagcuga

SEQ ID NO: 978621 - RNA, 19 nt, Artificial Sequence
  Description of Artificial Sequence: Synthetic oligonucleotide
  Antisense strand to SEQ ID NO: 978620
ucagcucccuguaacaacc

SEQ ID NO: 978622 - RNA, 19 nt, Artificial Sequence
  Description of Artificial Sequence: Synthetic oligonucleotide
  Sense strand starting at position 2446 of SEQ ID NO: 914108
gcaggaaaccuagguuuga

SEQ ID NO: 978623 - RNA, 19 nt, Artificial Sequence
  Description of Artificial Sequence: Synthetic oligonucleotide
  Antisense strand to SEQ ID NO: 978622
ucaaaccuagguuuccugc

SEQ ID NO: 978624 - RNA, 19 nt, Artificial Sequence
  Description of Artificial Sequence: Synthetic oligonucleotide
  Sense strand starting at position 3051 of SEQ ID NO: 914108
auccaugacuuucugaagu

SEQ ID NO: 978625 - RNA, 19 nt, Artificial Sequence
  Description of Artificial Sequence: Synthetic oligonucleotide
  Antisense strand to SEQ ID NO: 978624
acuucagaaagucauggau

SEQ ID NO: 978626 - RNA, 19 nt, Artificial Sequence
  Description of Artificial Sequence: Synthetic oligonucleotide
  Sense strand starting at position 389 of SEQ ID NO: 914108
gaggaugauuuauggacua

SEQ ID NO: 978627 - RNA, 19 nt, Artificial Sequence
  Description of Artificial Sequence: Synthetic oligonucleotide
  Antisense strand to SEQ ID NO: 978626
uaguccauaaaucauccuc

SEQ ID NO: 978628 - RNA, 19 nt, Artificial Sequence
  Description of Artificial Sequence: Synthetic oligonucleotide
  Sense strand starting at position 3855 of SEQ ID NO: 914108
guaagcacgcaauaaauga

SEQ ID NO: 978629 - RNA, 19 nt, Artificial Sequence
  Description of Artificial Sequence: Synthetic oligonucleotide
  Antisense strand to SEQ ID NO: 978628
ucauuuauugcgugcuuac

SEQ ID NO: 978630 - RNA, 19 nt, Artificial Sequence
  Description of Artificial Sequence: Synthetic oligonucleotide
  Sense strand starting at position 3186 of SEQ ID NO: 914108
cuggguuagauguggacau

SEQ ID NO: 978631 - RNA, 19 nt, Artificial Sequence
  Description of Artificial Sequence: Synthetic oligonucleotide
  Antisense strand to SEQ ID NO: 978630
auguccacaucuaacccag

SEQ ID NO: 978632 - RNA, 19 nt, Artificial Sequence
  Description of Artificial Sequence: Synthetic oligonucleotide
  Sense strand starting at position 2476 of SEQ ID NO: 914108
gcgccuaagcuaguuguuu

SEQ ID NO: 978633 - RNA, 19 nt, Artificial Sequence
  Description of Artificial Sequence: Synthetic oligonucleotide
  Antisense strand to SEQ ID NO: 978632
aaacaacuagcuuaggcgc

SEQ ID NO: 978634 - RNA, 19 nt, Artificial Sequence
  Description of Artificial Sequence: Synthetic oligonucleotide
  Sense strand starting at position 589 of SEQ ID NO: 914108
ugguuuaguuucucaaaug

SEQ ID NO: 978635 - RNA, 19 nt, Artificial Sequence
  Description of Artificial Sequence: Synthetic oligonucleotide
  Antisense strand to SEQ ID NO: 978634
cauuugagaaacuaaacca

SEQ ID NO: 978636 - RNA, 19 nt, Artificial Sequence
  Description of Artificial Sequence: Synthetic oligonucleotide
  Sense strand starting at position 859 of SEQ ID NO: 914108
uaugguaaacucuggccau

SEQ ID NO: 978637 - RNA, 19 nt, Artificial Sequence
  Description of Artificial Sequence: Synthetic oligonucleotide
  Antisense strand to SEQ ID NO: 978636
auggccagaguuuaccaua

SEQ ID NO: 978638 - RNA, 19 nt, Artificial Sequence
  Description of Artificial Sequence: Synthetic oligonucleotide
  Sense strand starting at position 2110 of SEQ ID NO: 914108
gagcgcucuggaggagaau

SEQ ID NO: 978639 - RNA, 19 nt, Artificial Sequence
  Description of Artificial Sequence: Synthetic oligonucleotide
  Antisense strand to SEQ ID NO: 978638
auucuccuccagagcgcuc

SEQ ID NO: 978640 - RNA, 19 nt, Artificial Sequence
  Description of Artificial Sequence: Synthetic oligonucleotide
  Sense strand starting at position 849 of SEQ ID NO: 914108
agcugccagauaugguaaa

SEQ ID NO: 978641 - RNA, 19 nt, Artificial Sequence
  Description of Artificial Sequence: Synthetic oligonucleotide
  Antisense strand to SEQ ID NO: 978640
uuuaccauaucuggcagcu

SEQ ID NO: 978642 - RNA, 19 nt, Artificial Sequence
  Description of Artificial Sequence: Synthetic oligonucleotide
  Sense strand starting at position 2561 of SEQ ID NO: 914108
cacugaguucugggcucaa

SEQ ID NO: 978643 - RNA, 19 nt, Artificial Sequence
  Description of Artificial Sequence: Synthetic oligonucleotide
  Antisense strand to SEQ ID NO: 978642
uugagcccagaacucagug

SEQ ID NO: 978644 - RNA, 19 nt, Artificial Sequence
  Description of Artificial Sequence: Synthetic oligonucleotide
  Sense strand starting at position 3177 of SEQ ID NO: 914108
gauucugcccuggguuaga

SEQ ID NO: 978645 - RNA, 19 nt, Artificial Sequence
  Description of Artificial Sequence: Synthetic oligonucleotide
  Antisense strand to SEQ ID NO: 978644
ucuaacccagggcagaauc

SEQ ID NO: 978646 - RNA, 19 nt, Artificial Sequence
  Description of Artificial Sequence: Synthetic oligonucleotide
  Sense strand starting at position 3175 of SEQ ID NO: 914108
aggauucugcccuggguua

SEQ ID NO: 978647 - RNA, 19 nt, Artificial Sequence
  Description of Artificial Sequence: Synthetic oligonucleotide
  Antisense strand to SEQ ID NO: 978646
uaacccagggcagaauccu

SEQ ID NO: 978648 - RNA, 19 nt, Artificial Sequence
  Description of Artificial Sequence: Synthetic oligonucleotide
  Sense strand starting at position 3164 of SEQ ID NO: 914108
ggugauaucguaggauucu

SEQ ID NO: 978649 - RNA, 19 nt, Artificial Sequence
  Description of Artificial Sequence: Synthetic oligonucleotide
  Antisense strand to SEQ ID NO: 978648
agaauccuacgauaucacc

SEQ ID NO: 978650 - RNA, 19 nt, Artificial Sequence
  Description of Artificial Sequence: Synthetic oligonucleotide
  Sense strand starting at position 2565 of SEQ ID NO: 914108
gaguucugggcucaagcga

SEQ ID NO: 978651 - RNA, 19 nt, Artificial Sequence
  Description of Artificial Sequence: Synthetic oligonucleotide
  Antisense strand to SEQ ID NO: 978650
ucgcuugagcccagaacuc

SEQ ID NO: 978652 - RNA, 19 nt, Artificial Sequence
  Description of Artificial Sequence: Synthetic oligonucleotide
  Sense strand starting at position 203 of SEQ ID NO: 914108
ccguauuagccagacuggu

SEQ ID NO: 978653 - RNA, 19 nt, Artificial Sequence
  Description of Artificial Sequence: Synthetic oligonucleotide
  Antisense strand to SEQ ID NO: 978652
accagucuggcuaauacgg

SEQ ID NO: 978654 - RNA, 19 nt, Artificial Sequence
  Description of Artificial Sequence: Synthetic oligonucleotide
  Sense strand starting at position 968 of SEQ ID NO: 914108
agcagaaaguuccuucugu

SEQ ID NO: 978655 - RNA, 19 nt, Artificial Sequence
  Description of Artificial Sequence: Synthetic oligonucleotide
  Antisense strand to SEQ ID NO: 978654
acagaaggaacuuucugcu

SEQ ID NO: 978656 - RNA, 19 nt, Artificial Sequence
  Description of Artificial Sequence: Synthetic oligonucleotide
  Sense strand starting at position 588 of SEQ ID NO: 914108
gugguuuaguuucucaaau

SEQ ID NO: 978657 - RNA, 19 nt, Artificial Sequence
  Description of Artificial Sequence: Synthetic oligonucleotide
  Antisense strand to SEQ ID NO: 978656
auuugagaaacuaaaccac

SEQ ID NO: 978658 - RNA, 19 nt, Artificial Sequence
  Description of Artificial Sequence: Synthetic oligonucleotide
  Sense strand starting at position 637 of SEQ ID NO: 914108
gcugcuguugucuaacaaa

SEQ ID NO: 978659 - RNA, 19 nt, Artificial Sequence
  Description of Artificial Sequence: Synthetic oligonucleotide
  Antisense strand to SEQ ID NO: 978658
uuuguuagacaacagcagc

SEQ ID NO: 978660 - RNA, 19 nt, Artificial Sequence
  Description of Artificial Sequence: Synthetic oligonucleotide
  Sense strand starting at position 969 of SEQ ID NO: 914108
gcagaaaguuccuucugug

SEQ ID NO: 978661 - RNA, 19 nt, Artificial Sequence
  Description of Artificial Sequence: Synthetic oligonucleotide
  Antisense strand to SEQ ID NO: 978660
cacagaaggaacuuucugc

SEQ ID NO: 978662 - RNA, 19 nt, Artificial Sequence
  Description of Artificial Sequence: Synthetic oligonucleotide
  Sense strand starting at position 3268 of SEQ ID NO: 914108
gaaugugaccugugccuca

SEQ ID NO: 978663 - RNA, 19 nt, Artificial Sequence
  Description of Artificial Sequence: Synthetic oligonucleotide
  Antisense strand to SEQ ID NO: 978662
ugaggcacaggucacauuc

SEQ ID NO: 978664 - RNA, 19 nt, Artificial Sequence
  Description of Artificial Sequence: Synthetic oligonucleotide
  Sense strand starting at position 3173 of SEQ ID NO: 914108
guaggauucugcccugggu

SEQ ID NO: 978665 - RNA, 19 nt, Artificial Sequence
  Description of Artificial Sequence: Synthetic oligonucleotide
  Antisense strand to SEQ ID NO: 978664
acccagggcagaauccuac

SEQ ID NO: 978666 - RNA, 19 nt, Artificial Sequence
  Description of Artificial Sequence: Synthetic oligonucleotide
  Sense strand starting at position 3044 of SEQ ID NO: 914108
cggccucauccaugacuuu

SEQ ID NO: 978667 - RNA, 19 nt, Artificial Sequence
  Description of Artificial Sequence: Synthetic oligonucleotide
  Antisense strand to SEQ ID NO: 978666
aaagucauggaugaggccg

SEQ ID NO: 978668 - RNA, 19 nt, Artificial Sequence
  Description of Artificial Sequence: Synthetic oligonucleotide
  Sense strand starting at position 3708 of SEQ ID NO: 914108
gcauuaugcuugguaccag

SEQ ID NO: 978669 - RNA, 19 nt, Artificial Sequence
  Description of Artificial Sequence: Synthetic oligonucleotide
  Antisense strand to SEQ ID NO: 978668
cugguaccaagcauaaugc

SEQ ID NO: 978670 - RNA, 19 nt, Artificial Sequence
  Description of Artificial Sequence: Synthetic oligonucleotide
  Sense strand starting at position 3707 of SEQ ID NO: 914108
ggcauuaugcuugguacca

SEQ ID NO: 978671 - RNA, 19 nt, Artificial Sequence
  Description of Artificial Sequence: Synthetic oligonucleotide
  Antisense strand to SEQ ID NO: 978670
ugguaccaagcauaaugcc

SEQ ID NO: 978672 - RNA, 19 nt, Artificial Sequence
  Description of Artificial Sequence: Synthetic oligonucleotide
  Sense strand starting at position 548 of SEQ ID NO: 914108
uggguuuagugcccagagu

SEQ ID NO: 978673 - RNA, 19 nt, Artificial Sequence
  Description of Artificial Sequence: Synthetic oligonucleotide
  Antisense strand to SEQ ID NO: 978672
acucugggcacuaaaccca

SEQ ID NO: 978674 - RNA, 19 nt, Artificial Sequence
  Description of Artificial Sequence: Synthetic oligonucleotide
  Sense strand starting at position 3862 of SEQ ID NO: 914108
cgcaauaaaugauagauaa

SEQ ID NO: 978675 - RNA, 19 nt, Artificial Sequence
  Description of Artificial Sequence: Synthetic oligonucleotide
  Antisense strand to SEQ ID NO: 978674
uuaucuaucauuuauugcg

SEQ ID NO: 978676 - RNA, 19 nt, Artificial Sequence
  Description of Artificial Sequence: Synthetic oligonucleotide
  Sense strand starting at position 636 of SEQ ID NO: 914108
agcugcuguugucuaacaa

SEQ ID NO: 978677 - RNA, 19 nt, Artificial Sequence
  Description of Artificial Sequence: Synthetic oligonucleotide
  Antisense strand to SEQ ID NO: 978676
uuguuagacaacagcagcu

SEQ ID NO: 978678 - RNA, 19 nt, Artificial Sequence
  Description of Artificial Sequence: Synthetic oligonucleotide
  Sense strand starting at position 2485 of SEQ ID NO: 914108
cuaguuguuuguuucuauu

SEQ ID NO: 978679 - RNA, 19 nt, Artificial Sequence
  Description of Artificial Sequence: Synthetic oligonucleotide
  Antisense strand to SEQ ID NO: 978678
aauagaaacaaacaacuag

SEQ ID NO: 978680 - RNA, 19 nt, Artificial Sequence
  Description of Artificial Sequence: Synthetic oligonucleotide
  Sense strand starting at position 2469 of SEQ ID NO: 914108
caguucugcgccuaagcua

SEQ ID NO: 978681 - RNA, 19 nt, Artificial Sequence
  Description of Artificial Sequence: Synthetic oligonucleotide
  Antisense strand to SEQ ID NO: 978680
uagcuuaggcgcagaacug

SEQ ID NO: 978682 - RNA, 19 nt, Artificial Sequence
  Description of Artificial Sequence: Synthetic oligonucleotide
  Sense strand starting at position 418 of SEQ ID NO: 914108
guuccuugguaagaaugaa

SEQ ID NO: 978683 - RNA, 19 nt, Artificial Sequence
  Description of Artificial Sequence: Synthetic oligonucleotide
  Antisense strand to SEQ ID NO: 978682
uucauucuuaccaaggaac

SEQ ID NO: 978684 - RNA, 19 nt, Artificial Sequence
  Description of Artificial Sequence: Synthetic oligonucleotide
  Sense strand starting at position 2484 of SEQ ID NO: 914108
gcuaguuguuuguuucuau

SEQ ID NO: 978685 - RNA, 19 nt, Artificial Sequence
  Description of Artificial Sequence: Synthetic oligonucleotide
  Antisense strand to SEQ ID NO: 978684
auagaaacaaacaacuagc

SEQ ID NO: 978686 - RNA, 19 nt, Artificial Sequence
  Description of Artificial Sequence: Synthetic oligonucleotide
  Sense strand starting at position 3662 of SEQ ID NO: 914108
aagacucccucucgggaaa

SEQ ID NO: 978687 - RNA, 19 nt, Artificial Sequence
  Description of Artificial Sequence: Synthetic oligonucleotide
  Antisense strand to SEQ ID NO: 978686
uuucccgagagggagucuu

SEQ ID NO: 978688 - RNA, 19 nt, Artificial Sequence
  Description of Artificial Sequence: Synthetic oligonucleotide
  Sense strand starting at position 3712 of SEQ ID NO: 914108
uaugcuugguaccagaaca

SEQ ID NO: 978689 - RNA, 19 nt, Artificial Sequence
  Description of Artificial Sequence: Synthetic oligonucleotide
  Antisense strand to SEQ ID NO: 978688
uguucugguaccaagcaua

SEQ ID NO: 978690 - RNA, 19 nt, Artificial Sequence
  Description of Artificial Sequence: Synthetic oligonucleotide
  Sense strand starting at position 1625 of SEQ ID NO: 914109
auaccaguacuugacgaua

SEQ ID NO: 978691 - RNA, 19 nt, Artificial Sequence
  Description of Artificial Sequence: Synthetic oligonucleotide
  Antisense strand to SEQ ID NO: 978690
uaucgucaaguacugguau

SEQ ID NO: 978692 - RNA, 19 nt, Artificial Sequence
  Description of Artificial Sequence: Synthetic oligonucleotide
  Sense strand starting at position 2750 of SEQ ID NO: 914109
gaauauguccucucgcgua

SEQ ID NO: 978693 - RNA, 19 nt, Artificial Sequence
  Description of Artificial Sequence: Synthetic oligonucleotide
  Antisense strand to SEQ ID NO: 978692
uacgcgagaggacauauuc

SEQ ID NO: 978694 - RNA, 19 nt, Artificial Sequence
  Description of Artificial Sequence: Synthetic oligonucleotide
  Sense strand starting at position 1620 of SEQ ID NO: 914109
agagcauaccaguacuuga

SEQ ID NO: 978695 - RNA, 19 nt, Artificial Sequence
  Description of Artificial Sequence: Synthetic oligonucleotide
  Antisense strand to SEQ ID NO: 978694
ucaaguacugguaugcucu

SEQ ID NO: 978696 - RNA, 19 nt, Artificial Sequence
  Description of Artificial Sequence: Synthetic oligonucleotide
  Sense strand starting at position 2749 of SEQ ID NO: 914109
ggaauauguccucucgcgu

SEQ ID NO: 978697 - RNA, 19 nt, Artificial Sequence
  Description of Artificial Sequence: Synthetic oligonucleotide
  Antisense strand to SEQ ID NO: 978696
acgcgagaggacauauucc

SEQ ID NO: 978698 - RNA, 19 nt, Artificial Sequence
  Description of Artificial Sequence: Synthetic oligonucleotide
  Sense strand starting at position 2514 of SEQ ID NO: 914109
gugucaauucuagcucguu

SEQ ID NO: 978699 - RNA, 19 nt, Artificial Sequence
  Description of Artificial Sequence: Synthetic oligonucleotide
  Antisense strand to SEQ ID NO: 978698
aacgagcuagaauugacac

SEQ ID NO: 978700 - RNA, 19 nt, Artificial Sequence
  Description of Artificial Sequence: Synthetic oligonucleotide
  Sense strand starting at position 1054 of SEQ ID NO: 914109
ugagcuaaucgggaaggua

SEQ ID NO: 978701 - RNA, 19 nt, Artificial Sequence
  Description of Artificial Sequence: Synthetic oligonucleotide
  Antisense strand to SEQ ID NO: 978700
uaccuucccgauuagcuca

SEQ ID NO: 978702 - RNA, 19 nt, Artificial Sequence
  Description of Artificial Sequence: Synthetic oligonucleotide
  Sense strand starting at position 2809 of SEQ ID NO: 914109
aggagauguuuauuaaagu

SEQ ID NO: 978703 - RNA, 19 nt, Artificial Sequence
  Description of Artificial Sequence: Synthetic oligonucleotide
  Antisense strand to SEQ ID NO: 978702
acuuuaauaaacaucuccu

SEQ ID NO: 978704 - RNA, 19 nt, Artificial Sequence
  Description of Artificial Sequence: Synthetic oligonucleotide
  Sense strand starting at position 3052 of SEQ ID NO: 914109
ggcuguuuaaucuagggag

SEQ ID NO: 978705 - RNA, 19 nt, Artificial Sequence
  Description of Artificial Sequence: Synthetic oligonucleotide
  Antisense strand to SEQ ID NO: 978704
cucccuagauuaaacagcc

SEQ ID NO: 978706 - RNA, 19 nt, Artificial Sequence
  Description of Artificial Sequence: Synthetic oligonucleotide
  Sense strand starting at position 2281 of SEQ ID NO: 914109
cgcugcuaacuaggauuua

SEQ ID NO: 978707 - RNA, 19 nt, Artificial Sequence
  Description of Artificial Sequence: Synthetic oligonucleotide
  Antisense strand to SEQ ID NO: 978706
uaaauccuaguuagcagcg

SEQ ID NO: 978708 - RNA, 19 nt, Artificial Sequence
  Description of Artificial Sequence: Synthetic oligonucleotide
  Sense strand starting at position 3364 of SEQ ID NO: 914109
gugaguugcgucuuuccua

SEQ ID NO: 978709 - RNA, 19 nt, Artificial Sequence
  Description of Artificial Sequence: Synthetic oligonucleotide
  Antisense strand to SEQ ID NO: 978708
uaggaaagacgcaacucac

SEQ ID NO: 978710 - RNA, 19 nt, Artificial Sequence
  Description of Artificial Sequence: Synthetic oligonucleotide
  Sense strand starting at position 3054 of SEQ ID NO: 914109
cuguuuaaucuagggagac

SEQ ID NO: 978711 - RNA, 19 nt, Artificial Sequence
  Description of Artificial Sequence: Synthetic oligonucleotide
  Antisense strand to SEQ ID NO: 978710
gucucccuagauuaaacag

SEQ ID NO: 978712 - RNA, 19 nt, Artificial Sequence
  Description of Artificial Sequence: Synthetic oligonucleotide
  Sense strand starting at position 107 of SEQ ID NO: 914109
gcacaaugagaauggguca

SEQ ID NO: 978713 - RNA, 19 nt, Artificial Sequence
  Description of Artificial Sequence: Synthetic oligonucleotide
  Antisense strand to SEQ ID NO: 978712
ugacccauucucauugugc

SEQ ID NO: 978714 - RNA, 19 nt, Artificial Sequence
  Description of Artificial Sequence: Synthetic oligonucleotide
  Sense strand starting at position 542 of SEQ ID NO: 914109
acacaaugccugcaugaau

SEQ ID NO: 978715 - RNA, 19 nt, Artificial Sequence
  Description of Artificial Sequence: Synthetic oligonucleotide
  Antisense strand to SEQ ID NO: 978714
auucaugcaggcauugugu

SEQ ID NO: 978716 - RNA, 19 nt, Artificial Sequence
  Description of Artificial Sequence: Synthetic oligonucleotide
  Sense strand starting at position 3072 of SEQ ID NO: 914109
ccacaaaucccaggguacu

SEQ ID NO: 978717 - RNA, 19 nt, Artificial Sequence
  Description of Artificial Sequence: Synthetic oligonucleotide
  Antisense strand to SEQ ID NO: 978716
aguacccugggauuugugg

SEQ ID NO: 978718 - RNA, 19 nt, Artificial Sequence
  Description of Artificial Sequence: Synthetic oligonucleotide
  Sense strand starting at position 3298 of SEQ ID NO: 914109
aggagagauuccucugcca

SEQ ID NO: 978719 - RNA, 19 nt, Artificial Sequence
  Description of Artificial Sequence: Synthetic oligonucleotide
  Antisense strand to SEQ ID NO: 978718
uggcagaggaaucucuccu

SEQ ID NO: 978720 - RNA, 19 nt, Artificial Sequence
  Description of Artificial Sequence: Synthetic oligonucleotide
  Sense strand starting at position 2625 of SEQ ID NO: 914109
caaucuucggaucaauguu

SEQ ID NO: 978721 - RNA, 19 nt, Artificial Sequence
  Description of Artificial Sequence: Synthetic oligonucleotide
  Antisense strand to SEQ ID NO: 978720
aacauugauccgaagauug

SEQ ID NO: 978722 - RNA, 19 nt, Artificial Sequence
  Description of Artificial Sequence: Synthetic oligonucleotide
  Sense strand starting at position 3583 of SEQ ID NO: 914109
agaguuauaguccaagcca

SEQ ID NO: 978723 - RNA, 19 nt, Artificial Sequence
  Description of Artificial Sequence: Synthetic oligonucleotide
  Antisense strand to SEQ ID NO: 978722
uggcuuggacuauaacucu

SEQ ID NO: 978724 - RNA, 19 nt, Artificial Sequence
  Description of Artificial Sequence: Synthetic oligonucleotide
  Sense strand starting at position 114 of SEQ ID NO: 914109
gagaaugggucauuaagcu

SEQ ID NO: 978725 - RNA, 19 nt, Artificial Sequence
  Description of Artificial Sequence: Synthetic oligonucleotide
  Antisense strand to SEQ ID NO: 978724
agcuuaaugacccauucuc

SEQ ID NO: 978726 - RNA, 19 nt, Artificial Sequence
  Description of Artificial Sequence: Synthetic oligonucleotide
  Sense strand starting at position 120 of SEQ ID NO: 914109
gggucauuaagcuagcaag

SEQ ID NO: 978727 - RNA, 19 nt, Artificial Sequence
  Description of Artificial Sequence: Synthetic oligonucleotide
  Antisense strand to SEQ ID NO: 978726
cuugcuagcuuaaugaccc

SEQ ID NO: 978728 - RNA, 19 nt, Artificial Sequence
  Description of Artificial Sequence: Synthetic oligonucleotide
  Sense strand starting at position 3557 of SEQ ID NO: 914109
ggagaacucuggaguggau

SEQ ID NO: 978729 - RNA, 19 nt, Artificial Sequence
  Description of Artificial Sequence: Synthetic oligonucleotide
  Antisense strand to SEQ ID NO: 978728
auccacuccagaguucucc

SEQ ID NO: 978730 - RNA, 19 nt, Artificial Sequence
  Description of Artificial Sequence: Synthetic oligonucleotide
  Sense strand starting at position 253 of SEQ ID NO: 914109
gaggcuguucccuacaauc

SEQ ID NO: 978731 - RNA, 19 nt, Artificial Sequence
  Description of Artificial Sequence: Synthetic oligonucleotide
  Antisense strand to SEQ ID NO: 978730
gauuguagggaacagccuc

SEQ ID NO: 978732 - RNA, 19 nt, Artificial Sequence
  Description of Artificial Sequence: Synthetic oligonucleotide
  Sense strand starting at position 2545 of SEQ ID NO: 914109
gagauacucgagcaguuuc

SEQ ID NO: 978733 - RNA, 19 nt, Artificial Sequence
  Description of Artificial Sequence: Synthetic oligonucleotide
  Antisense strand to SEQ ID NO: 978732
gaaacugcucgaguaucuc

SEQ ID NO: 978734 - RNA, 19 nt, Artificial Sequence
  Description of Artificial Sequence: Synthetic oligonucleotide
  Sense strand starting at position 2520 of SEQ ID NO: 914109
auucuagcucguuaugaaa

SEQ ID NO: 978735 - RNA, 19 nt, Artificial Sequence
  Description of Artificial Sequence: Synthetic oligonucleotide
  Antisense strand to SEQ ID NO: 978734
uuucauaacgagcuagaau

SEQ ID NO: 978736 - RNA, 19 nt, Artificial Sequence
  Description of Artificial Sequence: Synthetic oligonucleotide
  Sense strand starting at position 1511 of SEQ ID NO: 914109
uucugagugcuuuaaccau

SEQ ID NO: 978737 - RNA, 19 nt, Artificial Sequence
  Description of Artificial Sequence: Synthetic oligonucleotide
  Antisense strand to SEQ ID NO: 978736
augguuaaagcacucagaa

SEQ ID NO: 978738 - RNA, 19 nt, Artificial Sequence
  Description of Artificial Sequence: Synthetic oligonucleotide
  Sense strand starting at position 947 of SEQ ID NO: 914109
gaagcucugcacggagaaa

SEQ ID NO: 978739 - RNA, 19 nt, Artificial Sequence
  Description of Artificial Sequence: Synthetic oligonucleotide
  Antisense strand to SEQ ID NO: 978738
uuucuccgugcagagcuuc

SEQ ID NO: 978740 - RNA, 19 nt, Artificial Sequence
  Description of Artificial Sequence: Synthetic oligonucleotide
  Sense strand starting at position 2503 of SEQ ID NO: 914109
cucaaccaucagugucaau

SEQ ID NO: 978741 - RNA, 19 nt, Artificial Sequence
  Description of Artificial Sequence: Synthetic oligonucleotide
  Antisense strand to SEQ ID NO: 978740
auugacacugaugguugag

SEQ ID NO: 978742 - RNA, 19 nt, Artificial Sequence
  Description of Artificial Sequence: Synthetic oligonucleotide
  Sense strand starting at position 946 of SEQ ID NO: 914109
ggaagcucugcacggagaa

SEQ ID NO: 978743 - RNA, 19 nt, Artificial Sequence
  Description of Artificial Sequence: Synthetic oligonucleotide
  Antisense strand to SEQ ID NO: 978742
uucuccgugcagagcuucc

SEQ ID NO: 978744 - RNA, 19 nt, Artificial Sequence
  Description of Artificial Sequence: Synthetic oligonucleotide
  Sense strand starting at position 255 of SEQ ID NO: 914109
ggcuguucccuacaauccu

SEQ ID NO: 978745 - RNA, 19 nt, Artificial Sequence
  Description of Artificial Sequence: Synthetic oligonucleotide
  Antisense strand to SEQ ID NO: 978744
aggauuguagggaacagcc

SEQ ID NO: 978746 - RNA, 19 nt, Artificial Sequence
  Description of Artificial Sequence: Synthetic oligonucleotide
  Sense strand starting at position 1031 of SEQ ID NO: 914109
aagcuuugcccugauacga

SEQ ID NO: 978747 - RNA, 19 nt, Artificial Sequence
  Description of Artificial Sequence: Synthetic oligonucleotide
  Antisense strand to SEQ ID NO: 978746
ucguaucagggcaaagcuu

SEQ ID NO: 978748 - RNA, 19 nt, Artificial Sequence
  Description of Artificial Sequence: Synthetic oligonucleotide
  Sense strand starting at position 252 of SEQ ID NO: 914109
ggaggcuguucccuacaau

SEQ ID NO: 978749 - RNA, 19 nt, Artificial Sequence
  Description of Artificial Sequence: Synthetic oligonucleotide
  Antisense strand to SEQ ID NO: 978748
auuguagggaacagccucc

SEQ ID NO: 978750 - RNA, 19 nt, Artificial Sequence
  Description of Artificial Sequence: Synthetic oligonucleotide
  Sense strand starting at position 557 of SEQ ID NO: 914109
gaaugugguccuggacagu

SEQ ID NO: 978751 - RNA, 19 nt, Artificial Sequence
  Description of Artificial Sequence: Synthetic oligonucleotide
  Antisense strand to SEQ ID NO: 978750
acuguccaggaccacauuc

SEQ ID NO: 978752 - RNA, 19 nt, Artificial Sequence
  Description of Artificial Sequence: Synthetic oligonucleotide
  Sense strand starting at position 2737 of SEQ ID NO: 914109
uccuuuguuguaggaauau

SEQ ID NO: 978753 - RNA, 19 nt, Artificial Sequence
  Description of Artificial Sequence: Synthetic oligonucleotide
  Antisense strand to SEQ ID NO: 978752
auauuccuacaacaaagga

SEQ ID NO: 978754 - RNA, 19 nt, Artificial Sequence
  Description of Artificial Sequence: Synthetic oligonucleotide
  Sense strand starting at position 2238 of SEQ ID NO: 914109
cgagaagugcgccaacaaa

SEQ ID NO: 978755 - RNA, 19 nt, Artificial Sequence
  Description of Artificial Sequence: Synthetic oligonucleotide
  Antisense strand to SEQ ID NO: 978754
uuuguuggcgcacuucucg

SEQ ID NO: 978756 - RNA, 19 nt, Artificial Sequence
  Description of Artificial Sequence: Synthetic oligonucleotide
  Sense strand starting at position 2763 of SEQ ID NO: 914109
cgcguacguguguuaacau

SEQ ID NO: 978757 - RNA, 19 nt, Artificial Sequence
  Description of Artificial Sequence: Synthetic oligonucleotide
  Antisense strand to SEQ ID NO: 978756
auguuaacacacguacgcg

SEQ ID NO: 978758 - RNA, 19 nt, Artificial Sequence
  Description of Artificial Sequence: Synthetic oligonucleotide
  Sense strand starting at position 3700 of SEQ ID NO: 914109
uguccaucuuagccaauga

SEQ ID NO: 978759 - RNA, 19 nt, Artificial Sequence
  Description of Artificial Sequence: Synthetic oligonucleotide
  Antisense strand to SEQ ID NO: 978758
ucauuggcuaagauggaca

SEQ ID NO: 978760 - RNA, 19 nt, Artificial Sequence
  Description of Artificial Sequence: Synthetic oligonucleotide
  Sense strand starting at position 775 of SEQ ID NO: 914109
ccgagaagcuccucuuaau

SEQ ID NO: 978761 - RNA, 19 nt, Artificial Sequence
  Description of Artificial Sequence: Synthetic oligonucleotide
  Antisense strand to SEQ ID NO: 978760
auuaagaggagcuucucgg

SEQ ID NO: 978762 - RNA, 19 nt, Artificial Sequence
  Description of Artificial Sequence: Synthetic oligonucleotide
  Sense strand starting at position 553 of SEQ ID NO: 914109
gcaugaaugugguccugga

SEQ ID NO: 978763 - RNA, 19 nt, Artificial Sequence
  Description of Artificial Sequence: Synthetic oligonucleotide
  Antisense strand to SEQ ID NO: 978762
uccaggaccacauucaugc

SEQ ID NO: 978764 - RNA, 19 nt, Artificial Sequence
  Description of Artificial Sequence: Synthetic oligonucleotide
  Sense strand starting at position 2301 of SEQ ID NO: 914109
acauaaaucugacaaugga

SEQ ID NO: 978765 - RNA, 19 nt, Artificial Sequence
  Description of Artificial Sequence: Synthetic oligonucleotide
  Antisense strand to SEQ ID NO: 978764
uccauugucagauuuaugu

SEQ ID NO: 978766 - RNA, 19 nt, Artificial Sequence
  Description of Artificial Sequence: Synthetic oligonucleotide
  Sense strand starting at position 3318 of SEQ ID NO: 914109
ggaguccuacgaugugauc

SEQ ID NO: 978767 - RNA, 19 nt, Artificial Sequence
  Description of Artificial Sequence: Synthetic oligonucleotide
  Antisense strand to SEQ ID NO: 978766
gaucacaucguaggacucc

SEQ ID NO: 978768 - RNA, 19 nt, Artificial Sequence
  Description of Artificial Sequence: Synthetic oligonucleotide
  Sense strand starting at position 2803 of SEQ ID NO: 914109
ggugcuaggagauguuuau

SEQ ID NO: 978769 - RNA, 19 nt, Artificial Sequence
  Description of Artificial Sequence: Synthetic oligonucleotide
  Antisense strand to SEQ ID NO: 978768
auaaacaucuccuagcacc

SEQ ID NO: 978770 - RNA, 19 nt, Artificial Sequence
  Description of Artificial Sequence: Synthetic oligonucleotide
  Sense strand starting at position 2617 of SEQ ID NO: 914110
uccauugcauuuguugaau

SEQ ID NO: 978771 - RNA, 19 nt, Artificial Sequence
  Description of Artificial Sequence: Synthetic oligonucleotide
  Antisense strand to SEQ ID NO: 978770
auucaacaaaugcaaugga

SEQ ID NO: 978772 - RNA, 19 nt, Artificial Sequence
  Description of Artificial Sequence: Synthetic oligonucleotide
  Sense strand starting at position 898 of SEQ ID NO: 914110
guuucauauggucagagga

SEQ ID NO: 978773 - RNA, 19 nt, Artificial Sequence
  Description of Artificial Sequence: Synthetic oligonucleotide
  Antisense strand to SEQ ID NO: 978772
uccucugaccauaugaaac

SEQ ID NO: 978774 - RNA, 19 nt, Artificial Sequence
  Description of Artificial Sequence: Synthetic oligonucleotide
  Sense strand starting at position 3326 of SEQ ID NO: 914110
aaauucuagucaguggaaa

SEQ ID NO: 978775 - RNA, 19 nt, Artificial Sequence
  Description of Artificial Sequence: Synthetic oligonucleotide
  Antisense strand to SEQ ID NO: 978774
uuuccacugacuagaauuu

SEQ ID NO: 978776 - RNA, 19 nt, Artificial Sequence
  Description of Artificial Sequence: Synthetic oligonucleotide
  Sense strand starting at position 3098 of SEQ ID NO: 914110
uugccacgugccuuugauu

SEQ ID NO: 978777 - RNA, 19 nt, Artificial Sequence
  Description of Artificial Sequence: Synthetic oligonucleotide
  Antisense strand to SEQ ID NO: 978776
aaucaaaggcacguggcaa

SEQ ID NO: 978778 - RNA, 19 nt, Artificial Sequence
  Description of Artificial Sequence: Synthetic oligonucleotide
  Sense strand starting at position 736 of SEQ ID NO: 914110
ccaucacauguuuagugaa

SEQ ID NO: 978779 - RNA, 19 nt, Artificial Sequence
  Description of Artificial Sequence: Synthetic oligonucleotide
  Antisense strand to SEQ ID NO: 978778
uucacuaaacaugugaugg

SEQ ID NO: 978780 - RNA, 19 nt, Artificial Sequence
  Description of Artificial Sequence: Synthetic oligonucleotide
  Sense strand starting at position 3401 of SEQ ID NO: 914110
agaguuaacgcagaccuaa

SEQ ID NO: 978781 - RNA, 19 nt, Artificial Sequence
  Description of Artificial Sequence: Synthetic oligonucleotide
  Antisense strand to SEQ ID NO: 978780
uuaggucugcguuaacucu

SEQ ID NO: 978782 - RNA, 19 nt, Artificial Sequence
  Description of Artificial Sequence: Synthetic oligonucleotide
  Sense strand starting at position 3779 of SEQ ID NO: 914110
gacaacaauuuagagguau

SEQ ID NO: 978783 - RNA, 19 nt, Artificial Sequence
  Description of Artificial Sequence: Synthetic oligonucleotide
  Antisense strand to SEQ ID NO: 978782
auaccucuaaauuguuguc

SEQ ID NO: 978784 - RNA, 19 nt, Artificial Sequence
  Description of Artificial Sequence: Synthetic oligonucleotide
  Sense strand starting at position 1444 of SEQ ID NO: 914110
ggcguuaagaauuaaucag

SEQ ID NO: 978785 - RNA, 19 nt, Artificial Sequence
  Description of Artificial Sequence: Synthetic oligonucleotide
  Antisense strand to SEQ ID NO: 978784
cugauuaauucuuaacgcc

SEQ ID NO: 978786 - RNA, 19 nt, Artificial Sequence
  Description of Artificial Sequence: Synthetic oligonucleotide
  Sense strand starting at position 3583 of SEQ ID NO: 914110
gagaccauguauguggaau

SEQ ID NO: 978787 - RNA, 19 nt, Artificial Sequence
  Description of Artificial Sequence: Synthetic oligonucleotide
  Antisense strand to SEQ ID NO: 978786
auuccacauacauggucuc

SEQ ID NO: 978788 - RNA, 19 nt, Artificial Sequence
  Description of Artificial Sequence: Synthetic oligonucleotide
  Sense strand starting at position 3638 of SEQ ID NO: 914110
gugacuaaauaugcuagaa

SEQ ID NO: 978789 - RNA, 19 nt, Artificial Sequence
  Description of Artificial Sequence: Synthetic oligonucleotide
  Antisense strand to SEQ ID NO: 978788
uucuagcauauuuagucac

SEQ ID NO: 978790 - RNA, 19 nt, Artificial Sequence
  Description of Artificial Sequence: Synthetic oligonucleotide
  Sense strand starting at position 2451 of SEQ ID NO: 914110
ucagaaauguugcuaagaa

SEQ ID NO: 978791 - RNA, 19 nt, Artificial Sequence
  Description of Artificial Sequence: Synthetic oligonucleotide
  Antisense strand to SEQ ID NO: 978790
uucuuagcaacauuucuga

SEQ ID NO: 978792 - RNA, 19 nt, Artificial Sequence
  Description of Artificial Sequence: Synthetic oligonucleotide
  Sense strand starting at position 3324 of SEQ ID NO: 914110
guaaauucuagucagugga

SEQ ID NO: 978793 - RNA, 19 nt, Artificial Sequence
  Description of Artificial Sequence: Synthetic oligonucleotide
  Antisense strand to SEQ ID NO: 978792
uccacugacuagaauuuac

SEQ ID NO: 978794 - RNA, 19 nt, Artificial Sequence
  Description of Artificial Sequence: Synthetic oligonucleotide
  Sense strand starting at position 738 of SEQ ID NO: 914110
aucacauguuuagugaaag

SEQ ID NO: 978795 - RNA, 19 nt, Artificial Sequence
  Description of Artificial Sequence: Synthetic oligonucleotide
  Antisense strand to SEQ ID NO: 978794
cuuucacuaaacaugugau

SEQ ID NO: 978796 - RNA, 19 nt, Artificial Sequence
  Description of Artificial Sequence: Synthetic oligonucleotide
  Sense strand starting at position 3334 of SEQ ID NO: 914110
gucaguggaaacgauguaa

SEQ ID NO: 978797 - RNA, 19 nt, Artificial Sequence
  Description of Artificial Sequence: Synthetic oligonucleotide
  Antisense strand to SEQ ID NO: 978796
uuacaucguuuccacugac

SEQ ID NO: 978798 - RNA, 19 nt, Artificial Sequence
  Description of Artificial Sequence: Synthetic oligonucleotide
  Sense strand starting at position 850 of SEQ ID NO: 914110
ccuccuauuccuggagaca

SEQ ID NO: 978799 - RNA, 19 nt, Artificial Sequence
  Description of Artificial Sequence: Synthetic oligonucleotide
  Antisense strand to SEQ ID NO: 978798
ugucuccaggaauaggagg

SEQ ID NO: 978800 - RNA, 19 nt, Artificial Sequence
  Description of Artificial Sequence: Synthetic oligonucleotide
  Sense strand starting at position 686 of SEQ ID NO: 914110
cuugcuuaacacuggaaga

SEQ ID NO: 978801 - RNA, 19 nt, Artificial Sequence
  Description of Artificial Sequence: Synthetic oligonucleotide
  Antisense strand to SEQ ID NO: 978800
ucuuccaguguuaagcaag

SEQ ID NO: 978802 - RNA, 19 nt, Artificial Sequence
  Description of Artificial Sequence: Synthetic oligonucleotide
  Sense strand starting at position 3327 of SEQ ID NO: 914110
aauucuagucaguggaaac

SEQ ID NO: 978803 - RNA, 19 nt, Artificial Sequence
  Description of Artificial Sequence: Synthetic oligonucleotide
  Antisense strand to SEQ ID NO: 978802
guuuccacugacuagaauu

SEQ ID NO: 978804 - RNA, 19 nt, Artificial Sequence
  Description of Artificial Sequence: Synthetic oligonucleotide
  Sense strand starting at position 2247 of SEQ ID NO: 914110
aaacuaguacuuugguaag

SEQ ID NO: 978805 - RNA, 19 nt, Artificial Sequence
  Description of Artificial Sequence: Synthetic oligonucleotide
  Antisense strand to SEQ ID NO: 978804
cuuaccaaaguacuaguuu

SEQ ID NO: 978806 - RNA, 19 nt, Artificial Sequence
  Description of Artificial Sequence: Synthetic oligonucleotide
  Sense strand starting at position 3193 of SEQ ID NO: 914110
guaagaacaguacacguua

SEQ ID NO: 978807 - RNA, 19 nt, Artificial Sequence
  Description of Artificial Sequence: Synthetic oligonucleotide
  Antisense strand to SEQ ID NO: 978806
uaacguguacuguucuuac

SEQ ID NO: 978808 - RNA, 19 nt, Artificial Sequence
  Description of Artificial Sequence: Synthetic oligonucleotide
  Sense strand starting at position 939 of SEQ ID NO: 914110
ucccgaaacucaccuugaa

SEQ ID NO: 978809 - RNA, 19 nt, Artificial Sequence
  Description of Artificial Sequence: Synthetic oligonucleotide
  Antisense strand to SEQ ID NO: 978808
uucaaggugaguuucggga

SEQ ID NO: 978810 - RNA, 19 nt, Artificial Sequence
  Description of Artificial Sequence: Synthetic oligonucleotide
  Sense strand starting at position 1437 of SEQ ID NO: 914110
gggacgaggcguuaagaau

SEQ ID NO: 978811 - RNA, 19 nt, Artificial Sequence
  Description of Artificial Sequence: Synthetic oligonucleotide
  Antisense strand to SEQ ID NO: 978810
auucuuaacgccucguccc

SEQ ID NO: 978812 - RNA, 19 nt, Artificial Sequence
  Description of Artificial Sequence: Synthetic oligonucleotide
  Sense strand starting at position 322 of SEQ ID NO: 914110
uugaaugucuucuccaaga

SEQ ID NO: 978813 - RNA, 19 nt, Artificial Sequence
  Description of Artificial Sequence: Synthetic oligonucleotide
  Antisense strand to SEQ ID NO: 978812
ucuuggagaagacauucaa

SEQ ID NO: 978814 - RNA, 19 nt, Artificial Sequence
  Description of Artificial Sequence: Synthetic oligonucleotide
  Sense strand starting at position 827 of SEQ ID NO: 914110
gcuuguugaagugagacau

SEQ ID NO: 978815 - RNA, 19 nt, Artificial Sequence
  Description of Artificial Sequence: Synthetic oligonucleotide
  Antisense strand to SEQ ID NO: 978814
augucucacuucaacaagc

SEQ ID NO: 978816 - RNA, 19 nt, Artificial Sequence
  Description of Artificial Sequence: Synthetic oligonucleotide
  Sense strand starting at position 1375 of SEQ ID NO: 914110
ccaacacaugagugucuaa

SEQ ID NO: 978817 - RNA, 19 nt, Artificial Sequence
  Description of Artificial Sequence: Synthetic oligonucleotide
  Antisense strand to SEQ ID NO: 978816
uuagacacucauguguugg

SEQ ID NO: 978818 - RNA, 19 nt, Artificial Sequence
  Description of Artificial Sequence: Synthetic oligonucleotide
  Sense strand starting at position 3630 of SEQ ID NO: 914110
uguagugagugacuaaaua

SEQ ID NO: 978819 - RNA, 19 nt, Artificial Sequence
  Description of Artificial Sequence: Synthetic oligonucleotide
  Antisense strand to SEQ ID NO: 978818
uauuuagucacucacuaca

SEQ ID NO: 978820 - RNA, 19 nt, Artificial Sequence
  Description of Artificial Sequence: Synthetic oligonucleotide
  Sense strand starting at position 3791 of SEQ ID NO: 914110
gagguauuauugucaccag

SEQ ID NO: 978821 - RNA, 19 nt, Artificial Sequence
  Description of Artificial Sequence: Synthetic oligonucleotide
  Antisense strand to SEQ ID NO: 978820
cuggugacaauaauaccuc

SEQ ID NO: 978822 - RNA, 19 nt, Artificial Sequence
  Description of Artificial Sequence: Synthetic oligonucleotide
  Sense strand starting at position 3062 of SEQ ID NO: 914110
acaauacuguaugucuaau

SEQ ID NO: 978823 - RNA, 19 nt, Artificial Sequence
  Description of Artificial Sequence: Synthetic oligonucleotide
  Antisense strand to SEQ ID NO: 978822
auuagacauacaguauugu

SEQ ID NO: 978824 - RNA, 19 nt, Artificial Sequence
  Description of Artificial Sequence: Synthetic oligonucleotide
  Sense strand starting at position 569 of SEQ ID NO: 914110
ggcucagaaccaugaguca

SEQ ID NO: 978825 - RNA, 19 nt, Artificial Sequence
  Description of Artificial Sequence: Synthetic oligonucleotide
  Antisense strand to SEQ ID NO: 978824
ugacucaugguucugagcc

SEQ ID NO: 978826 - RNA, 19 nt, Artificial Sequence
  Description of Artificial Sequence: Synthetic oligonucleotide
  Sense strand starting at position 750 of SEQ ID NO: 914110
gugaaaguacuguacuucu

SEQ ID NO: 978827 - RNA, 19 nt, Artificial Sequence
  Description of Artificial Sequence: Synthetic oligonucleotide
  Antisense strand to SEQ ID NO: 978826
agaaguacaguacuuucac

SEQ ID NO: 978828 - RNA, 19 nt, Artificial Sequence
  Description of Artificial Sequence: Synthetic oligonucleotide
  Sense strand starting at position 3627 of SEQ ID NO: 914110
uaauguagugagugacuaa

SEQ ID NO: 978829 - RNA, 19 nt, Artificial Sequence
  Description of Artificial Sequence: Synthetic oligonucleotide
  Antisense strand to SEQ ID NO: 978828
uuagucacucacuacauua

SEQ ID NO: 978830 - RNA, 19 nt, Artificial Sequence
  Description of Artificial Sequence: Synthetic oligonucleotide
  Sense strand starting at position 2420 of SEQ ID NO: 914110
uaacguuagcgauaauaac

SEQ ID NO: 978831 - RNA, 19 nt, Artificial Sequence
  Description of Artificial Sequence: Synthetic oligonucleotide
  Antisense strand to SEQ ID NO: 978830
guuauuaucgcuaacguua

SEQ ID NO: 978832 - RNA, 19 nt, Artificial Sequence
  Description of Artificial Sequence: Synthetic oligonucleotide
  Sense strand starting at position 3719 of SEQ ID NO: 914110
acguuuaauacguaacuga

SEQ ID NO: 978833 - RNA, 19 nt, Artificial Sequence
  Description of Artificial Sequence: Synthetic oligonucleotide
  Antisense strand to SEQ ID NO: 978832
ucaguuacguauuaaacgu

SEQ ID NO: 978834 - RNA, 19 nt, Artificial Sequence
  Description of Artificial Sequence: Synthetic oligonucleotide
  Sense strand starting at position 3564 of SEQ ID NO: 914110
cugugucugaguuaugaug

SEQ ID NO: 978835 - RNA, 19 nt, Artificial Sequence
  Description of Artificial Sequence: Synthetic oligonucleotide
  Antisense strand to SEQ ID NO: 978834
caucauaacucagacacag

SEQ ID NO: 978836 - RNA, 19 nt, Artificial Sequence
  Description of Artificial Sequence: Synthetic oligonucleotide
  Sense strand starting at position 2414 of SEQ ID NO: 914110
auaugauaacguuagcgau

SEQ ID NO: 978837 - RNA, 19 nt, Artificial Sequence
  Description of Artificial Sequence: Synthetic oligonucleotide
  Antisense strand to SEQ ID NO: 978836
aucgcuaacguuaucauau

SEQ ID NO: 978838 - RNA, 19 nt, Artificial Sequence
  Description of Artificial Sequence: Synthetic oligonucleotide
  Sense strand starting at position 2034 of SEQ ID NO: 914110
acgccugaccguuaaggaa

SEQ ID NO: 978839 - RNA, 19 nt, Artificial Sequence
  Description of Artificial Sequence: Synthetic oligonucleotide
  Antisense strand to SEQ ID NO: 978838
uuccuuaacggucaggcgu

SEQ ID NO: 978840 - RNA, 19 nt, Artificial Sequence
  Description of Artificial Sequence: Synthetic oligonucleotide
  Sense strand starting at position 735 of SEQ ID NO: 914110
uccaucacauguuuaguga

SEQ ID NO: 978841 - RNA, 19 nt, Artificial Sequence
  Description of Artificial Sequence: Synthetic oligonucleotide
  Antisense strand to SEQ ID NO: 978840
ucacuaaacaugugaugga

SEQ ID NO: 978842 - RNA, 19 nt, Artificial Sequence
  Description of Artificial Sequence: Synthetic oligonucleotide
  Sense strand starting at position 2111 of SEQ ID NO: 914110
uagagauaauucucguucu

SEQ ID NO: 978843 - RNA, 19 nt, Artificial Sequence
  Description of Artificial Sequence: Synthetic oligonucleotide
  Antisense strand to SEQ ID NO: 978842
agaacgagaauuaucucua

SEQ ID NO: 978844 - RNA, 19 nt, Artificial Sequence
  Description of Artificial Sequence: Synthetic oligonucleotide
  Sense strand starting at position 2283 of SEQ ID NO: 914110
gugggugagcagugagaga

SEQ ID NO: 978845 - RNA, 19 nt, Artificial Sequence
  Description of Artificial Sequence: Synthetic oligonucleotide
  Antisense strand to SEQ ID NO: 978844
ucucucacugcucacccac

SEQ ID NO: 978846 - RNA, 19 nt, Artificial Sequence
  Description of Artificial Sequence: Synthetic oligonucleotide
  Sense strand starting at position 3037 of SEQ ID NO: 914110
cuugaaggaacguguuaug

SEQ ID NO: 978847 - RNA, 19 nt, Artificial Sequence
  Description of Artificial Sequence: Synthetic oligonucleotide
  Antisense strand to SEQ ID NO: 978846
cauaacacguuccuucaag

SEQ ID NO: 978848 - RNA, 19 nt, Artificial Sequence
  Description of Artificial Sequence: Synthetic oligonucleotide
  Sense strand starting at position 3148 of SEQ ID NO: 914110
aggagacaguccuuugcuu

SEQ ID NO: 978849 - RNA, 19 nt, Artificial Sequence
  Description of Artificial Sequence: Synthetic oligonucleotide
  Antisense strand to SEQ ID NO: 978848
aagcaaaggacugucuccu

SEQ ID NO: 978850 - RNA, 19 nt, Artificial Sequence
  Description of Artificial Sequence: Synthetic oligonucleotide
  Sense strand starting at position 1006 of SEQ ID NO: 914111
cccugacauucuccaagga

SEQ ID NO: 978851 - RNA, 19 nt, Artificial Sequence
  Description of Artificial Sequence: Synthetic oligonucleotide
  Antisense strand to SEQ ID NO: 978850
uccuuggagaaugucaggg

SEQ ID NO: 978852 - RNA, 19 nt, Artificial Sequence
  Description of Artificial Sequence: Synthetic oligonucleotide
  Sense strand starting at position 499 of SEQ ID NO: 914111
gucagaaacccuuaagcau

SEQ ID NO: 978853 - RNA, 19 nt, Artificial Sequence
  Description of Artificial Sequence: Synthetic oligonucleotide
  Antisense strand to SEQ ID NO: 978852
augcuuaaggguuucugac

SEQ ID NO: 978854 - RNA, 19 nt, Artificial Sequence
  Description of Artificial Sequence: Synthetic oligonucleotide
  Sense strand starting at position 2590 of SEQ ID NO: 914111
gggagcuggacuuggaauu

SEQ ID NO: 978855 - RNA, 19 nt, Artificial Sequence
  Description of Artificial Sequence: Synthetic oligonucleotide
  Antisense strand to SEQ ID NO: 978854
aauuccaaguccagcuccc

SEQ ID NO: 978856 - RNA, 19 nt, Artificial Sequence
  Description of Artificial Sequence: Synthetic oligonucleotide
  Sense strand starting at position 3400 of SEQ ID NO: 914111
ucagacauguuucuaagau

SEQ ID NO: 978857 - RNA, 19 nt, Artificial Sequence
  Description of Artificial Sequence: Synthetic oligonucleotide
  Antisense strand to SEQ ID NO: 978856
aucuuagaaacaugucuga

SEQ ID NO: 978858 - RNA, 19 nt, Artificial Sequence
  Description of Artificial Sequence: Synthetic oligonucleotide
  Sense strand starting at position 738 of SEQ ID NO: 914111
aaaggagguuccucuuauc

SEQ ID NO: 978859 - RNA, 19 nt, Artificial Sequence
  Description of Artificial Sequence: Synthetic oligonucleotide
  Antisense strand to SEQ ID NO: 978858
gauaagaggaaccuccuuu

SEQ ID NO: 978860 - RNA, 19 nt, Artificial Sequence
  Description of Artificial Sequence: Synthetic oligonucleotide
  Sense strand starting at position 2803 of SEQ ID NO: 914111
aggagaaggacacguuagu

SEQ ID NO: 978861 - RNA, 19 nt, Artificial Sequence
  Description of Artificial Sequence: Synthetic oligonucleotide
  Antisense strand to SEQ ID NO: 978860
acuaacguguccuucuccu

SEQ ID NO: 978862 - RNA, 19 nt, Artificial Sequence
  Description of Artificial Sequence: Synthetic oligonucleotide
  Sense strand starting at position 167 of SEQ ID NO: 914111
ggaacaaacuuguuguuag

SEQ ID NO: 978863 - RNA, 19 nt, Artificial Sequence
  Description of Artificial Sequence: Synthetic oligonucleotide
  Antisense strand to SEQ ID NO: 978862
cuaacaacaaguuuguucc

SEQ ID NO: 978864 - RNA, 19 nt, Artificial Sequence
  Description of Artificial Sequence: Synthetic oligonucleotide
  Sense strand starting at position 2689 of SEQ ID NO: 914111
ugggcucaacuuuaaugua

SEQ ID NO: 978865 - RNA, 19 nt, Artificial Sequence
  Description of Artificial Sequence: Synthetic oligonucleotide
  Antisense strand to SEQ ID NO: 978864
uacauuaaaguugagccca

SEQ ID NO: 978866 - RNA, 19 nt, Artificial Sequence
  Description of Artificial Sequence: Synthetic oligonucleotide
  Sense strand starting at position 1236 of SEQ ID NO: 914111
gggugaaagaguuaccgua

SEQ ID NO: 978867 - RNA, 19 nt, Artificial Sequence
  Description of Artificial Sequence: Synthetic oligonucleotide
  Antisense strand to SEQ ID NO: 978866
uacgguaacucuuucaccc

SEQ ID NO: 978868 - RNA, 19 nt, Artificial Sequence
  Description of Artificial Sequence: Synthetic oligonucleotide
  Sense strand starting at position 178 of SEQ ID NO: 914111
guuguuagggcuaguguca

SEQ ID NO: 978869 - RNA, 19 nt, Artificial Sequence
  Description of Artificial Sequence: Synthetic oligonucleotide
  Antisense strand to SEQ ID NO: 978868
ugacacuagcccuaacaac

SEQ ID NO: 978870 - RNA, 19 nt, Artificial Sequence
  Description of Artificial Sequence: Synthetic oligonucleotide
  Sense strand starting at position 3526 of SEQ ID NO: 914111
uuagucuaucuaggauuau

SEQ ID NO: 978871 - RNA, 19 nt, Artificial Sequence
  Description of Artificial Sequence: Synthetic oligonucleotide
  Antisense strand to SEQ ID NO: 978870
auaauccuagauagacuaa

SEQ ID NO: 978872 - RNA, 19 nt, Artificial Sequence
  Description of Artificial Sequence: Synthetic oligonucleotide
  Sense strand starting at position 3885 of SEQ ID NO: 914111
uuagguguugcacaaacau

SEQ ID NO: 978873 - RNA, 19 nt, Artificial Sequence
  Description of Artificial Sequence: Synthetic oligonucleotide
  Antisense strand to SEQ ID NO: 978872
auguuugugcaacaccuaa

SEQ ID NO: 978874 - RNA, 19 nt, Artificial Sequence
  Description of Artificial Sequence: Synthetic oligonucleotide
  Sense strand starting at position 916 of SEQ ID NO: 914111
gacagucuccaguaaugca

SEQ ID NO: 978875 - RNA, 19 nt, Artificial Sequence
  Description of Artificial Sequence: Synthetic oligonucleotide
  Antisense strand to SEQ ID NO: 978874
ugcauuacuggagacuguc

SEQ ID NO: 978876 - RNA, 19 nt, Artificial Sequence
  Description of Artificial Sequence: Synthetic oligonucleotide
  Sense strand starting at position 75 of SEQ ID NO: 914111
aauugcguuccagaagauu

SEQ ID NO: 978877 - RNA, 19 nt, Artificial Sequence
  Description of Artificial Sequence: Synthetic oligonucleotide
  Antisense strand to SEQ ID NO: 978876
aaucuucuggaacgcaauu

SEQ ID NO: 978878 - RNA, 19 nt, Artificial Sequence
  Description of Artificial Sequence: Synthetic oligonucleotide
  Sense strand starting at position 406 of SEQ ID NO: 914111
gagguaauuucagggaagg

SEQ ID NO: 978879 - RNA, 19 nt, Artificial Sequence
  Description of Artificial Sequence: Synthetic oligonucleotide
  Antisense strand to SEQ ID NO: 978878
ccuucccugaaauuaccuc

SEQ ID NO: 978880 - RNA, 19 nt, Artificial Sequence
  Description of Artificial Sequence: Synthetic oligonucleotide
  Sense strand starting at position 3515 of SEQ ID NO: 914111
cccuuuaaggcuuagucua

SEQ ID NO: 978881 - RNA, 19 nt, Artificial Sequence
  Description of Artificial Sequence: Synthetic oligonucleotide
  Antisense strand to SEQ ID NO: 978880
uagacuaagccuuaaaggg

SEQ ID NO: 978882 - RNA, 19 nt, Artificial Sequence
  Description of Artificial Sequence: Synthetic oligonucleotide
  Sense strand starting at position 913 of SEQ ID NO: 914111
cucgacagucuccaguaau

SEQ ID NO: 978883 - RNA, 19 nt, Artificial Sequence
  Description of Artificial Sequence: Synthetic oligonucleotide
  Antisense strand to SEQ ID NO: 978882
auuacuggagacugucgag

SEQ ID NO: 978884 - RNA, 19 nt, Artificial Sequence
  Description of Artificial Sequence: Synthetic oligonucleotide
  Sense strand starting at position 3404 of SEQ ID NO: 914111
acauguuucuaagauuuga

SEQ ID NO: 978885 - RNA, 19 nt, Artificial Sequence
  Description of Artificial Sequence: Synthetic oligonucleotide
  Antisense strand to SEQ ID NO: 978884
ucaaaucuuagaaacaugu

SEQ ID NO: 978886 - RNA, 19 nt, Artificial Sequence
  Description of Artificial Sequence: Synthetic oligonucleotide
  Sense strand starting at position 1238 of SEQ ID NO: 914111
gugaaagaguuaccguaag

SEQ ID NO: 978887 - RNA, 19 nt, Artificial Sequence
  Description of Artificial Sequence: Synthetic oligonucleotide
  Antisense strand to SEQ ID NO: 978886
cuuacgguaacucuuucac

SEQ ID NO: 978888 - RNA, 19 nt, Artificial Sequence
  Description of Artificial Sequence: Synthetic oligonucleotide
  Sense strand starting at position 3874 of SEQ ID NO: 914111
gacauaugcccuuaggugu

SEQ ID NO: 978889 - RNA, 19 nt, Artificial Sequence
  Description of Artificial Sequence: Synthetic oligonucleotide
  Antisense strand to SEQ ID NO: 978888
acaccuaagggcauauguc

SEQ ID NO: 978890 - RNA, 19 nt, Artificial Sequence
  Description of Artificial Sequence: Synthetic oligonucleotide
  Sense strand starting at position 364 of SEQ ID NO: 914111
uugguagcucuccaaggua

SEQ ID NO: 978891 - RNA, 19 nt, Artificial Sequence
  Description of Artificial Sequence: Synthetic oligonucleotide
  Antisense strand to SEQ ID NO: 978890
uaccuuggagagcuaccaa

SEQ ID NO: 978892 - RNA, 19 nt, Artificial Sequence
  Description of Artificial Sequence: Synthetic oligonucleotide
  Sense strand starting at position 427 of SEQ ID NO: 914111
gaacacuuguuaguggcaa

SEQ ID NO: 978893 - RNA, 19 nt, Artificial Sequence
  Description of Artificial Sequence: Synthetic oligonucleotide
  Antisense strand to SEQ ID NO: 978892
uugccacuaacaaguguuc

SEQ ID NO: 978894 - RNA, 19 nt, Artificial Sequence
  Description of Artificial Sequence: Synthetic oligonucleotide
  Sense strand starting at position 3523 of SEQ ID NO: 914111
ggcuuagucuaucuaggau

SEQ ID NO: 978895 - RNA, 19 nt, Artificial Sequence
  Description of Artificial Sequence: Synthetic oligonucleotide
  Antisense strand to SEQ ID NO: 978894
auccuagauagacuaagcc

SEQ ID NO: 978896 - RNA, 19 nt, Artificial Sequence
  Description of Artificial Sequence: Synthetic oligonucleotide
  Sense strand starting at position 3836 of SEQ ID NO: 914111
gccugaauuccaggcuaga

SEQ ID NO: 978897 - RNA, 19 nt, Artificial Sequence
  Description of Artificial Sequence: Synthetic oligonucleotide
  Antisense strand to SEQ ID NO: 978896
ucuagccuggaauucaggc

SEQ ID NO: 978898 - RNA, 19 nt, Artificial Sequence
  Description of Artificial Sequence: Synthetic oligonucleotide
  Sense strand starting at position 702 of SEQ ID NO: 914111
uuguguuaagcugaccuca

SEQ ID NO: 978899 - RNA, 19 nt, Artificial Sequence
  Description of Artificial Sequence: Synthetic oligonucleotide
  Antisense strand to SEQ ID NO: 978898
ugaggucagcuuaacacaa

SEQ ID NO: 978900 - RNA, 19 nt, Artificial Sequence
  Description of Artificial Sequence: Synthetic oligonucleotide
  Sense strand starting at position 3594 of SEQ ID NO: 914111
uuaccucuccuguauguuu

SEQ ID NO: 978901 - RNA, 19 nt, Artificial Sequence
  Description of Artificial Sequence: Synthetic oligonucleotide
  Antisense strand to SEQ ID NO: 978900
aaacauacaggagagguaa

SEQ ID NO: 978902 - RNA, 19 nt, Artificial Sequence
  Description of Artificial Sequence: Synthetic oligonucleotide
  Sense strand starting at position 2888 of SEQ ID NO: 914111
ugacgcugcauccaugauu

SEQ ID NO: 978903 - RNA, 19 nt, Artificial Sequence
  Description of Artificial Sequence: Synthetic oligonucleotide
  Antisense strand to SEQ ID NO: 978902
aaucauggaugcagcguca

SEQ ID NO: 978904 - RNA, 19 nt, Artificial Sequence
  Description of Artificial Sequence: Synthetic oligonucleotide
  Sense strand starting at position 912 of SEQ ID NO: 914111
ucucgacagucuccaguaa

SEQ ID NO: 978905 - RNA, 19 nt, Artificial Sequence
  Description of Artificial Sequence: Synthetic oligonucleotide
  Antisense strand to SEQ ID NO: 978904
uuacuggagacugucgaga

SEQ ID NO: 978906 - RNA, 19 nt, Artificial Sequence
  Description of Artificial Sequence: Synthetic oligonucleotide
  Sense strand starting at position 878 of SEQ ID NO: 914111
cugcaaacacgugguuaaa

SEQ ID NO: 978907 - RNA, 19 nt, Artificial Sequence
  Description of Artificial Sequence: Synthetic oligonucleotide
  Antisense strand to SEQ ID NO: 978906
uuuaaccacguguuugcag

SEQ ID NO: 978908 - RNA, 19 nt, Artificial Sequence
  Description of Artificial Sequence: Synthetic oligonucleotide
  Sense strand starting at position 877 of SEQ ID NO: 914111
acugcaaacacgugguuaa

SEQ ID NO: 978909 - RNA, 19 nt, Artificial Sequence
  Description of Artificial Sequence: Synthetic oligonucleotide
  Antisense strand to SEQ ID NO: 978908
uuaaccacguguuugcagu

SEQ ID NO: 978910 - RNA, 19 nt, Artificial Sequence
  Description of Artificial Sequence: Synthetic oligonucleotide
  Sense strand starting at position 3853 of SEQ ID NO: 914111
gaauauccacagugcguaa

SEQ ID NO: 978911 - RNA, 19 nt, Artificial Sequence
  Description of Artificial Sequence: Synthetic oligonucleotide
  Antisense strand to SEQ ID NO: 978910
uuacgcacuguggauauuc

SEQ ID NO: 978912 - RNA, 19 nt, Artificial Sequence
  Description of Artificial Sequence: Synthetic oligonucleotide
  Sense strand starting at position 106 of SEQ ID NO: 914111
uucuguaagcagcauguua

SEQ ID NO: 978913 - RNA, 19 nt, Artificial Sequence
  Description of Artificial Sequence: Synthetic oligonucleotide
  Antisense strand to SEQ ID NO: 978912
uaacaugcugcuuacagaa

SEQ ID NO: 978914 - RNA, 19 nt, Artificial Sequence
  Description of Artificial Sequence: Synthetic oligonucleotide
  Sense strand starting at position 3419 of SEQ ID NO: 914111
uugaguccuuaguaaauuu

SEQ ID NO: 978915 - RNA, 19 nt, Artificial Sequence
  Description of Artificial Sequence: Synthetic oligonucleotide
  Antisense strand to SEQ ID NO: 978914
aaauuuacuaaggacucaa

SEQ ID NO: 978916 - RNA, 19 nt, Artificial Sequence
  Description of Artificial Sequence: Synthetic oligonucleotide
  Sense strand starting at position 603 of SEQ ID NO: 914111
gaggcugauuggcuuugua

SEQ ID NO: 978917 - RNA, 19 nt, Artificial Sequence
  Description of Artificial Sequence: Synthetic oligonucleotide
  Antisense strand to SEQ ID NO: 978916
uacaaagccaaucagccuc

SEQ ID NO: 978918 - RNA, 19 nt, Artificial Sequence
  Description of Artificial Sequence: Synthetic oligonucleotide
  Sense strand starting at position 379 of SEQ ID NO: 914111
gguaguugcgaucaccuuu

SEQ ID NO: 978919 - RNA, 19 nt, Artificial Sequence
  Description of Artificial Sequence: Synthetic oligonucleotide
  Antisense strand to SEQ ID NO: 978918
aaaggugaucgcaacuacc

SEQ ID NO: 978920 - RNA, 19 nt, Artificial Sequence
  Description of Artificial Sequence: Synthetic oligonucleotide
  Sense strand starting at position 704 of SEQ ID NO: 914111
guguuaagcugaccucauu

SEQ ID NO: 978921 - RNA, 19 nt, Artificial Sequence
  Description of Artificial Sequence: Synthetic oligonucleotide
  Antisense strand to SEQ ID NO: 978920
aaugaggucagcuuaacac

SEQ ID NO: 978922 - RNA, 19 nt, Artificial Sequence
  Description of Artificial Sequence: Synthetic oligonucleotide
  Sense strand starting at position 251 of SEQ ID NO: 914111
cgagcuaugugacuuuagu

SEQ ID NO: 978923 - RNA, 19 nt, Artificial Sequence
  Description of Artificial Sequence: Synthetic oligonucleotide
  Antisense strand to SEQ ID NO: 978922
acuaaagucacauagcucg

SEQ ID NO: 978924 - RNA, 19 nt, Artificial Sequence
  Description of Artificial Sequence: Synthetic oligonucleotide
  Sense strand starting at position 2891 of SEQ ID NO: 914111
cgcugcauccaugauuguu

SEQ ID NO: 978925 - RNA, 19 nt, Artificial Sequence
  Description of Artificial Sequence: Synthetic oligonucleotide
  Antisense strand to SEQ ID NO: 978924
aacaaucauggaugcagcg

SEQ ID NO: 978926 - RNA, 19 nt, Artificial Sequence
  Description of Artificial Sequence: Synthetic oligonucleotide
  Sense strand starting at position 1291 of SEQ ID NO: 914111
gcgauucuccaacgaggca

SEQ ID NO: 978927 - RNA, 19 nt, Artificial Sequence
  Description of Artificial Sequence: Synthetic oligonucleotide
  Antisense strand to SEQ ID NO: 978926
ugccucguuggagaaucgc

SEQ ID NO: 978928 - RNA, 19 nt, Artificial Sequence
  Description of Artificial Sequence: Synthetic oligonucleotide
  Sense strand starting at position 367 of SEQ ID NO: 914111
guagcucuccaagguaguu

SEQ ID NO: 978929 - RNA, 19 nt, Artificial Sequence
  Description of Artificial Sequence: Synthetic oligonucleotide
  Antisense strand to SEQ ID NO: 978928
aacuaccuuggagagcuac

SEQ ID NO: 978930 - RNA, 19 nt, Artificial Sequence
  Description of Artificial Sequence: Synthetic oligonucleotide
  Sense strand starting at position 1089 of SEQ ID NO: 914112
cccugacauucuccaagga

SEQ ID NO: 978931 - RNA, 19 nt, Artificial Sequence
  Description of Artificial Sequence: Synthetic oligonucleotide
  Antisense strand to SEQ ID NO: 978930
uccuuggagaaugucaggg

SEQ ID NO: 978932 - RNA, 19 nt, Artificial Sequence
  Description of Artificial Sequence: Synthetic oligonucleotide
  Sense strand starting at position 582 of SEQ ID NO: 914112
gucagaaacccuuaagcau

SEQ ID NO: 978933 - RNA, 19 nt, Artificial Sequence
  Description of Artificial Sequence: Synthetic oligonucleotide
  Antisense strand to SEQ ID NO: 978932
augcuuaaggguuucugac

SEQ ID NO: 978934 - RNA, 19 nt, Artificial Sequence
  Description of Artificial Sequence: Synthetic oligonucleotide
  Sense strand starting at position 2673 of SEQ ID NO: 914112
gggagcuggacuuggaauu

SEQ ID NO: 978935 - RNA, 19 nt, Artificial Sequence
  Description of Artificial Sequence: Synthetic oligonucleotide
  Antisense strand to SEQ ID NO: 978934
aauuccaaguccagcuccc

SEQ ID NO: 978936 - RNA, 19 nt, Artificial Sequence
  Description of Artificial Sequence: Synthetic oligonucleotide
  Sense strand starting at position 3483 of SEQ ID NO: 914112
ucagacauguuucuaagau

SEQ ID NO: 978937 - RNA, 19 nt, Artificial Sequence
  Description of Artificial Sequence: Synthetic oligonucleotide
  Antisense strand to SEQ ID NO: 978936
aucuuagaaacaugucuga

SEQ ID NO: 978938 - RNA, 19 nt, Artificial Sequence
  Description of Artificial Sequence: Synthetic oligonucleotide
  Sense strand starting at position 821 of SEQ ID NO: 914112
aaaggagguuccucuuauc

SEQ ID NO: 978939 - RNA, 19 nt, Artificial Sequence
  Description of Artificial Sequence: Synthetic oligonucleotide
  Antisense strand to SEQ ID NO: 978938
gauaagaggaaccuccuuu

SEQ ID NO: 978940 - RNA, 19 nt, Artificial Sequence
  Description of Artificial Sequence: Synthetic oligonucleotide
  Sense strand starting at position 2886 of SEQ ID NO: 914112
aggagaaggacacguuagu

SEQ ID NO: 978941 - RNA, 19 nt, Artificial Sequence
  Description of Artificial Sequence: Synthetic oligonucleotide
  Antisense strand to SEQ ID NO: 978940
acuaacguguccuucuccu

SEQ ID NO: 978942 - RNA, 19 nt, Artificial Sequence
  Description of Artificial Sequence: Synthetic oligonucleotide
  Sense strand starting at position 250 of SEQ ID NO: 914112
ggaacaaacuuguuguuag

SEQ ID NO: 978943 - RNA, 19 nt, Artificial Sequence
  Description of Artificial Sequence: Synthetic oligonucleotide
  Antisense strand to SEQ ID NO: 978942
cuaacaacaaguuuguucc

SEQ ID NO: 978944 - RNA, 19 nt, Artificial Sequence
  Description of Artificial Sequence: Synthetic oligonucleotide
  Sense strand starting at position 2772 of SEQ ID NO: 914112
ugggcucaacuuuaaugua

SEQ ID NO: 978945 - RNA, 19 nt, Artificial Sequence
  Description of Artificial Sequence: Synthetic oligonucleotide
  Antisense strand to SEQ ID NO: 978944
uacauuaaaguugagccca

SEQ ID NO: 978946 - RNA, 19 nt, Artificial Sequence
  Description of Artificial Sequence: Synthetic oligonucleotide
  Sense strand starting at position 1319 of SEQ ID NO: 914112
gggugaaagaguuaccgua

SEQ ID NO: 978947 - RNA, 19 nt, Artificial Sequence
  Description of Artificial Sequence: Synthetic oligonucleotide
  Antisense strand to SEQ ID NO: 978946
uacgguaacucuuucaccc

SEQ ID NO: 978948 - RNA, 19 nt, Artificial Sequence
  Description of Artificial Sequence: Synthetic oligonucleotide
  Sense strand starting at position 261 of SEQ ID NO: 914112
guuguuagggcuaguguca

SEQ ID NO: 978949 - RNA, 19 nt, Artificial Sequence
  Description of Artificial Sequence: Synthetic oligonucleotide
  Antisense strand to SEQ ID NO: 978948
ugacacuagcccuaacaac

SEQ ID NO: 978950 - RNA, 19 nt, Artificial Sequence
  Description of Artificial Sequence: Synthetic oligonucleotide
  Sense strand starting at position 3609 of SEQ ID NO: 914112
uuagucuaucuaggauuau

SEQ ID NO: 978951 - RNA, 19 nt, Artificial Sequence
  Description of Artificial Sequence: Synthetic oligonucleotide
  Antisense strand to SEQ ID NO: 978950
auaauccuagauagacuaa

SEQ ID NO: 978952 - RNA, 19 nt, Artificial Sequence
  Description of Artificial Sequence: Synthetic oligonucleotide
  Sense strand starting at position 3968 of SEQ ID NO: 914112
uuagguguugcacaaacau

SEQ ID NO: 978953 - RNA, 19 nt, Artificial Sequence
  Description of Artificial Sequence: Synthetic oligonucleotide
  Antisense strand to SEQ ID NO: 978952
auguuugugcaacaccuaa

SEQ ID NO: 978954 - RNA, 19 nt, Artificial Sequence
  Description of Artificial Sequence: Synthetic oligonucleotide
  Sense strand starting at position 999 of SEQ ID NO: 914112
gacagucuccaguaaugca

SEQ ID NO: 978955 - RNA, 19 nt, Artificial Sequence
  Description of Artificial Sequence: Synthetic oligonucleotide
  Antisense strand to SEQ ID NO: 978954
ugcauuacuggagacuguc

SEQ ID NO: 978956 - RNA, 19 nt, Artificial Sequence
  Description of Artificial Sequence: Synthetic oligonucleotide
  Sense strand starting at position 158 of SEQ ID NO: 914112
aauugcguuccagaagauu

SEQ ID NO: 978957 - RNA, 19 nt, Artificial Sequence
  Description of Artificial Sequence: Synthetic oligonucleotide
  Antisense strand to SEQ ID NO: 978956
aaucuucuggaacgcaauu

SEQ ID NO: 978958 - RNA, 19 nt, Artificial Sequence
  Description of Artificial Sequence: Synthetic oligonucleotide
  Sense strand starting at position 489 of SEQ ID NO: 914112
gagguaauuucagggaagg

SEQ ID NO: 978959 - RNA, 19 nt, Artificial Sequence
  Description of Artificial Sequence: Synthetic oligonucleotide
  Antisense strand to SEQ ID NO: 978958
ccuucccugaaauuaccuc

SEQ ID NO: 978960 - RNA, 19 nt, Artificial Sequence
  Description of Artificial Sequence: Synthetic oligonucleotide
  Sense strand starting at position 3598 of SEQ ID NO: 914112
cccuuuaaggcuuagucua

SEQ ID NO: 978961 - RNA, 19 nt, Artificial Sequence
  Description of Artificial Sequence: Synthetic oligonucleotide
  Antisense strand to SEQ ID NO: 978960
uagacuaagccuuaaaggg

SEQ ID NO: 978962 - RNA, 19 nt, Artificial Sequence
  Description of Artificial Sequence: Synthetic oligonucleotide
  Sense strand starting at position 996 of SEQ ID NO: 914112
cucgacagucuccaguaau

SEQ ID NO: 978963 - RNA, 19 nt, Artificial Sequence
  Description of Artificial Sequence: Synthetic oligonucleotide
  Antisense strand to SEQ ID NO: 978962
auuacuggagacugucgag

SEQ ID NO: 978964 - RNA, 19 nt, Artificial Sequence
  Description of Artificial Sequence: Synthetic oligonucleotide
  Sense strand starting at position 3487 of SEQ ID NO: 914112
acauguuucuaagauuuga

SEQ ID NO: 978965 - RNA, 19 nt, Artificial Sequence
  Description of Artificial Sequence: Synthetic oligonucleotide
  Antisense strand to SEQ ID NO: 978964
ucaaaucuuagaaacaugu

SEQ ID NO: 978966 - RNA, 19 nt, Artificial Sequence
  Description of Artificial Sequence: Synthetic oligonucleotide
  Sense strand starting at position 1321 of SEQ ID NO: 914112
gugaaagaguuaccguaag

SEQ ID NO: 978967 - RNA, 19 nt, Artificial Sequence
  Description of Artificial Sequence: Synthetic oligonucleotide
  Antisense strand to SEQ ID NO: 978966
cuuacgguaacucuuucac

SEQ ID NO: 978968 - RNA, 19 nt, Artificial Sequence
  Description of Artificial Sequence: Synthetic oligonucleotide
  Sense strand starting at position 3957 of SEQ ID NO: 914112
gacauaugcccuuaggugu

SEQ ID NO: 978969 - RNA, 19 nt, Artificial Sequence
  Description of Artificial Sequence: Synthetic oligonucleotide
  Antisense strand to SEQ ID NO: 978968
acaccuaagggcauauguc

SEQ ID NO: 978970 - RNA, 19 nt, Artificial Sequence
  Description of Artificial Sequence: Synthetic oligonucleotide
  Sense strand starting at position 447 of SEQ ID NO: 914112
uugguagcucuccaaggua

SEQ ID NO: 978971 - RNA, 19 nt, Artificial Sequence
  Description of Artificial Sequence: Synthetic oligonucleotide
  Antisense strand to SEQ ID NO: 978970
uaccuuggagagcuaccaa

SEQ ID NO: 978972 - RNA, 19 nt, Artificial Sequence
  Description of Artificial Sequence: Synthetic oligonucleotide
  Sense strand starting at position 510 of SEQ ID NO: 914112
gaacacuuguuaguggcaa

SEQ ID NO: 978973 - RNA, 19 nt, Artificial Sequence
  Description of Artificial Sequence: Synthetic oligonucleotide
  Antisense strand to SEQ ID NO: 978972
uugccacuaacaaguguuc

SEQ ID NO: 978974 - RNA, 19 nt, Artificial Sequence
  Description of Artificial Sequence: Synthetic oligonucleotide
  Sense strand starting at position 3606 of SEQ ID NO: 914112
ggcuuagucuaucuaggau

SEQ ID NO: 978975 - RNA, 19 nt, Artificial Sequence
  Description of Artificial Sequence: Synthetic oligonucleotide
  Antisense strand to SEQ ID NO: 978974
auccuagauagacuaagcc

SEQ ID NO: 978976 - RNA, 19 nt, Artificial Sequence
  Description of Artificial Sequence: Synthetic oligonucleotide
  Sense strand starting at position 3919 of SEQ ID NO: 914112
gccugaauuccaggcuaga

SEQ ID NO: 978977 - RNA, 19 nt, Artificial Sequence
  Description of Artificial Sequence: Synthetic oligonucleotide
  Antisense strand to SEQ ID NO: 978976
ucuagccuggaauucaggc

SEQ ID NO: 978978 - RNA, 19 nt, Artificial Sequence
  Description of Artificial Sequence: Synthetic oligonucleotide
  Sense strand starting at position 785 of SEQ ID NO: 914112
uuguguuaagcugaccuca

SEQ ID NO: 978979 - RNA, 19 nt, Artificial Sequence
  Description of Artificial Sequence: Synthetic oligonucleotide
  Antisense strand to SEQ ID NO: 978978
ugaggucagcuuaacacaa

SEQ ID NO: 978980 - RNA, 19 nt, Artificial Sequence
  Description of Artificial Sequence: Synthetic oligonucleotide
  Sense strand starting at position 3677 of SEQ ID NO: 914112
uuaccucuccuguauguuu

SEQ ID NO: 978981 - RNA, 19 nt, Artificial Sequence
  Description of Artificial Sequence: Synthetic oligonucleotide
  Antisense strand to SEQ ID NO: 978980
aaacauacaggagagguaa

SEQ ID NO: 978982 - RNA, 19 nt, Artificial Sequence
  Description of Artificial Sequence: Synthetic oligonucleotide
  Sense strand starting at position 2971 of SEQ ID NO: 914112
ugacgcugcauccaugauu

SEQ ID NO: 978983 - RNA, 19 nt, Artificial Sequence
  Description of Artificial Sequence: Synthetic oligonucleotide
  Antisense strand to SEQ ID NO: 978982
aaucauggaugcagcguca

SEQ ID NO: 978984 - RNA, 19 nt, Artificial Sequence
  Description of Artificial Sequence: Synthetic oligonucleotide
  Sense strand starting at position 995 of SEQ ID NO: 914112
ucucgacagucuccaguaa

SEQ ID NO: 978985 - RNA, 19 nt, Artificial Sequence
  Description of Artificial Sequence: Synthetic oligonucleotide
  Antisense strand to SEQ ID NO: 978984
uuacuggagacugucgaga

SEQ ID NO: 978986 - RNA, 19 nt, Artificial Sequence
  Description of Artificial Sequence: Synthetic oligonucleotide
  Sense strand starting at position 961 of SEQ ID NO: 914112
cugcaaacacgugguuaaa

SEQ ID NO: 978987 - RNA, 19 nt, Artificial Sequence
  Description of Artificial Sequence: Synthetic oligonucleotide
  Antisense strand to SEQ ID NO: 978986
uuuaaccacguguuugcag

SEQ ID NO: 978988 - RNA, 19 nt, Artificial Sequence
  Description of Artificial Sequence: Synthetic oligonucleotide
  Sense strand starting at position 960 of SEQ ID NO: 914112
acugcaaacacgugguuaa

SEQ ID NO: 978989 - RNA, 19 nt, Artificial Sequence
  Description of Artificial Sequence: Synthetic oligonucleotide
  Antisense strand to SEQ ID NO: 978988
uuaaccacguguuugcagu

SEQ ID NO: 978990 - RNA, 19 nt, Artificial Sequence
  Description of Artificial Sequence: Synthetic oligonucleotide
  Sense strand starting at position 3936 of SEQ ID NO: 914112
gaauauccacagugcguaa

SEQ ID NO: 978991 - RNA, 19 nt, Artificial Sequence
  Description of Artificial Sequence: Synthetic oligonucleotide
  Antisense strand to SEQ ID NO: 978990
uuacgcacuguggauauuc

SEQ ID NO: 978992 - RNA, 19 nt, Artificial Sequence
  Description of Artificial Sequence: Synthetic oligonucleotide
  Sense strand starting at position 189 of SEQ ID NO: 914112
uucuguaagcagcauguua

SEQ ID NO: 978993 - RNA, 19 nt, Artificial Sequence
  Description of Artificial Sequence: Synthetic oligonucleotide
  Antisense strand to SEQ ID NO: 978992
uaacaugcugcuuacagaa

SEQ ID NO: 978994 - RNA, 19 nt, Artificial Sequence
  Description of Artificial Sequence: Synthetic oligonucleotide
  Sense strand starting at position 3502 of SEQ ID NO: 914112
uugaguccuuaguaaauuu

SEQ ID NO: 978995 - RNA, 19 nt, Artificial Sequence
  Description of Artificial Sequence: Synthetic oligonucleotide
  Antisense strand to SEQ ID NO: 978994
aaauuuacuaaggacucaa

SEQ ID NO: 978996 - RNA, 19 nt, Artificial Sequence
  Description of Artificial Sequence: Synthetic oligonucleotide
  Sense strand starting at position 686 of SEQ ID NO: 914112
gaggcugauuggcuuugua

SEQ ID NO: 978997 - RNA, 19 nt, Artificial Sequence
  Description of Artificial Sequence: Synthetic oligonucleotide
  Antisense strand to SEQ ID NO: 978996
uacaaagccaaucagccuc

SEQ ID NO: 978998 - RNA, 19 nt, Artificial Sequence
  Description of Artificial Sequence: Synthetic oligonucleotide
  Sense strand starting at position 462 of SEQ ID NO: 914112
gguaguugcgaucaccuuu

SEQ ID NO: 978999 - RNA, 19 nt, Artificial Sequence
  Description of Artificial Sequence: Synthetic oligonucleotide
  Antisense strand to SEQ ID NO: 978998
aaaggugaucgcaacuacc

SEQ ID NO: 979000 - RNA, 19 nt, Artificial Sequence
  Description of Artificial Sequence: Synthetic oligonucleotide
  Sense strand starting at position 787 of SEQ ID NO: 914112
guguuaagcugaccucauu

SEQ ID NO: 979001 - RNA, 19 nt, Artificial Sequence
  Description of Artificial Sequence: Synthetic oligonucleotide
  Antisense strand to SEQ ID NO: 979000
aaugaggucagcuuaacac

SEQ ID NO: 979002 - RNA, 19 nt, Artificial Sequence
  Description of Artificial Sequence: Synthetic oligonucleotide
  Sense strand starting at position 334 of SEQ ID NO: 914112
cgagcuaugugacuuuagu

SEQ ID NO: 979003 - RNA, 19 nt, Artificial Sequence
  Description of Artificial Sequence: Synthetic oligonucleotide
  Antisense strand to SEQ ID NO: 979002
acuaaagucacauagcucg

SEQ ID NO: 979004 - RNA, 19 nt, Artificial Sequence
  Description of Artificial Sequence: Synthetic oligonucleotide
  Sense strand starting at position 2974 of SEQ ID NO: 914112
cgcugcauccaugauuguu

SEQ ID NO: 979005 - RNA, 19 nt, Artificial Sequence
  Description of Artificial Sequence: Synthetic oligonucleotide
  Antisense strand to SEQ ID NO: 979004
aacaaucauggaugcagcg

SEQ ID NO: 979006 - RNA, 19 nt, Artificial Sequence
  Description of Artificial Sequence: Synthetic oligonucleotide
  Sense strand starting at position 1374 of SEQ ID NO: 914112
gcgauucuccaacgaggca

SEQ ID NO: 979007 - RNA, 19 nt, Artificial Sequence
  Description of Artificial Sequence: Synthetic oligonucleotide
  Antisense strand to SEQ ID NO: 979006
ugccucguuggagaaucgc

SEQ ID NO: 979008 - RNA, 19 nt, Artificial Sequence
  Description of Artificial Sequence: Synthetic oligonucleotide
  Sense strand starting at position 450 of SEQ ID NO: 914112
guagcucuccaagguaguu

SEQ ID NO: 979009 - RNA, 19 nt, Artificial Sequence
  Description of Artificial Sequence: Synthetic oligonucleotide
  Antisense strand to SEQ ID NO: 979008
aacuaccuuggagagcuac

SEQ ID NO: 979010 - RNA, 19 nt, Artificial Sequence
  Description of Artificial Sequence: Synthetic oligonucleotide
  Sense strand starting at position 18 of SEQ ID NO: 914113
gugaauaaacuccaguuau

SEQ ID NO: 979011 - RNA, 19 nt, Artificial Sequence
  Description of Artificial Sequence: Synthetic oligonucleotide
  Antisense strand to SEQ ID NO: 979010
auaacuggaguuuauucac

SEQ ID NO: 979012 - RNA, 19 nt, Artificial Sequence
  Description of Artificial Sequence: Synthetic oligonucleotide
  Sense strand starting at position 1123 of SEQ ID NO: 914113
cccugacauucuccaagga

SEQ ID NO: 979013 - RNA, 19 nt, Artificial Sequence
  Description of Artificial Sequence: Synthetic oligonucleotide
  Antisense strand to SEQ ID NO: 979012
uccuuggagaaugucaggg

SEQ ID NO: 979014 - RNA, 19 nt, Artificial Sequence
  Description of Artificial Sequence: Synthetic oligonucleotide
  Sense strand starting at position 616 of SEQ ID NO: 914113
gucagaaacccuuaagcau

SEQ ID NO: 979015 - RNA, 19 nt, Artificial Sequence
  Description of Artificial Sequence: Synthetic oligonucleotide
  Antisense strand to SEQ ID NO: 979014
augcuuaaggguuucugac

SEQ ID NO: 979016 - RNA, 19 nt, Artificial Sequence
  Description of Artificial Sequence: Synthetic oligonucleotide
  Sense strand starting at position 2707 of SEQ ID NO: 914113
gggagcuggacuuggaauu

SEQ ID NO: 979017 - RNA, 19 nt, Artificial Sequence
  Description of Artificial Sequence: Synthetic oligonucleotide
  Antisense strand to SEQ ID NO: 979016
aauuccaaguccagcuccc

SEQ ID NO: 979018 - RNA, 19 nt, Artificial Sequence
  Description of Artificial Sequence: Synthetic oligonucleotide
  Sense strand starting at position 3517 of SEQ ID NO: 914113
ucagacauguuucuaagau

SEQ ID NO: 979019 - RNA, 19 nt, Artificial Sequence
  Description of Artificial Sequence: Synthetic oligonucleotide
  Antisense strand to SEQ ID NO: 979018
aucuuagaaacaugucuga

SEQ ID NO: 979020 - RNA, 19 nt, Artificial Sequence
  Description of Artificial Sequence: Synthetic oligonucleotide
  Sense strand starting at position 855 of SEQ ID NO: 914113
aaaggagguuccucuuauc

SEQ ID NO: 979021 - RNA, 19 nt, Artificial Sequence
  Description of Artificial Sequence: Synthetic oligonucleotide
  Antisense strand to SEQ ID NO: 979020
gauaagaggaaccuccuuu

SEQ ID NO: 979022 - RNA, 19 nt, Artificial Sequence
  Description of Artificial Sequence: Synthetic oligonucleotide
  Sense strand starting at position 2920 of SEQ ID NO: 914113
aggagaaggacacguuagu

SEQ ID NO: 979023 - RNA, 19 nt, Artificial Sequence
  Description of Artificial Sequence: Synthetic oligonucleotide
  Antisense strand to SEQ ID NO: 979022
acuaacguguccuucuccu

SEQ ID NO: 979024 - RNA, 19 nt, Artificial Sequence
  Description of Artificial Sequence: Synthetic oligonucleotide
  Sense strand starting at position 284 of SEQ ID NO: 914113
ggaacaaacuuguuguuag

SEQ ID NO: 979025 - RNA, 19 nt, Artificial Sequence
  Description of Artificial Sequence: Synthetic oligonucleotide
  Antisense strand to SEQ ID NO: 979024
cuaacaacaaguuuguucc

SEQ ID NO: 979026 - RNA, 19 nt, Artificial Sequence
  Description of Artificial Sequence: Synthetic oligonucleotide
  Sense strand starting at position 2806 of SEQ ID NO: 914113
ugggcucaacuuuaaugua

SEQ ID NO: 979027 - RNA, 19 nt, Artificial Sequence
  Description of Artificial Sequence: Synthetic oligonucleotide
  Antisense strand to SEQ ID NO: 979026
uacauuaaaguugagccca

SEQ ID NO: 979028 - RNA, 19 nt, Artificial Sequence
  Description of Artificial Sequence: Synthetic oligonucleotide
  Sense strand starting at position 1353 of SEQ ID NO: 914113
gggugaaagaguuaccgua

SEQ ID NO: 979029 - RNA, 19 nt, Artificial Sequence
  Description of Artificial Sequence: Synthetic oligonucleotide
  Antisense strand to SEQ ID NO: 979028
uacgguaacucuuucaccc

SEQ ID NO: 979030 - RNA, 19 nt, Artificial Sequence
  Description of Artificial Sequence: Synthetic oligonucleotide
  Sense strand starting at position 295 of SEQ ID NO: 914113
guuguuagggcuaguguca

SEQ ID NO: 979031 - RNA, 19 nt, Artificial Sequence
  Description of Artificial Sequence: Synthetic oligonucleotide
  Antisense strand to SEQ ID NO: 979030
ugacacuagcccuaacaac

SEQ ID NO: 979032 - RNA, 19 nt, Artificial Sequence
  Description of Artificial Sequence: Synthetic oligonucleotide
  Sense strand starting at position 3643 of SEQ ID NO: 914113
uuagucuaucuaggauuau

SEQ ID NO: 979033 - RNA, 19 nt, Artificial Sequence
  Description of Artificial Sequence: Synthetic oligonucleotide
  Antisense strand to SEQ ID NO: 979032
auaauccuagauagacuaa

SEQ ID NO: 979034 - RNA, 19 nt, Artificial Sequence
  Description of Artificial Sequence: Synthetic oligonucleotide
  Sense strand starting at position 1033 of SEQ ID NO: 914113
gacagucuccaguaaugca

SEQ ID NO: 979035 - RNA, 19 nt, Artificial Sequence
  Description of Artificial Sequence: Synthetic oligonucleotide
  Antisense strand to SEQ ID NO: 979034
ugcauuacuggagacuguc

SEQ ID NO: 979036 - RNA, 19 nt, Artificial Sequence
  Description of Artificial Sequence: Synthetic oligonucleotide
  Sense strand starting at position 192 of SEQ ID NO: 914113
aauugcguuccagaagauu

SEQ ID NO: 979037 - RNA, 19 nt, Artificial Sequence
  Description of Artificial Sequence: Synthetic oligonucleotide
  Antisense strand to SEQ ID NO: 979036
aaucuucuggaacgcaauu

SEQ ID NO: 979038 - RNA, 19 nt, Artificial Sequence
  Description of Artificial Sequence: Synthetic oligonucleotide
  Sense strand starting at position 523 of SEQ ID NO: 914113
gagguaauuucagggaagg

SEQ ID NO: 979039 - RNA, 19 nt, Artificial Sequence
  Description of Artificial Sequence: Synthetic oligonucleotide
  Antisense strand to SEQ ID NO: 979038
ccuucccugaaauuaccuc

SEQ ID NO: 979040 - RNA, 19 nt, Artificial Sequence
  Description of Artificial Sequence: Synthetic oligonucleotide
  Sense strand starting at position 3632 of SEQ ID NO: 914113
cccuuuaaggcuuagucua

SEQ ID NO: 979041 - RNA, 19 nt, Artificial Sequence
  Description of Artificial Sequence: Synthetic oligonucleotide
  Antisense strand to SEQ ID NO: 979040
uagacuaagccuuaaaggg

SEQ ID NO: 979042 - RNA, 19 nt, Artificial Sequence
  Description of Artificial Sequence: Synthetic oligonucleotide
  Sense strand starting at position 1030 of SEQ ID NO: 914113
cucgacagucuccaguaau

SEQ ID NO: 979043 - RNA, 19 nt, Artificial Sequence
  Description of Artificial Sequence: Synthetic oligonucleotide
  Antisense strand to SEQ ID NO: 979042
auuacuggagacugucgag

SEQ ID NO: 979044 - RNA, 19 nt, Artificial Sequence
  Description of Artificial Sequence: Synthetic oligonucleotide
  Sense strand starting at position 3521 of SEQ ID NO: 914113
acauguuucuaagauuuga

SEQ ID NO: 979045 - RNA, 19 nt, Artificial Sequence
  Description of Artificial Sequence: Synthetic oligonucleotide
  Antisense strand to SEQ ID NO: 979044
ucaaaucuuagaaacaugu

SEQ ID NO: 979046 - RNA, 19 nt, Artificial Sequence
  Description of Artificial Sequence: Synthetic oligonucleotide
  Sense strand starting at position 1355 of SEQ ID NO: 914113
gugaaagaguuaccguaag

SEQ ID NO: 979047 - RNA, 19 nt, Artificial Sequence
  Description of Artificial Sequence: Synthetic oligonucleotide
  Antisense strand to SEQ ID NO: 979046
cuuacgguaacucuuucac

SEQ ID NO: 979048 - RNA, 19 nt, Artificial Sequence
  Description of Artificial Sequence: Synthetic oligonucleotide
  Sense strand starting at position 481 of SEQ ID NO: 914113
uugguagcucuccaaggua

SEQ ID NO: 979049 - RNA, 19 nt, Artificial Sequence
  Description of Artificial Sequence: Synthetic oligonucleotide
  Antisense strand to SEQ ID NO: 979048
uaccuuggagagcuaccaa

SEQ ID NO: 979050 - RNA, 19 nt, Artificial Sequence
  Description of Artificial Sequence: Synthetic oligonucleotide
  Sense strand starting at position 544 of SEQ ID NO: 914113
gaacacuuguuaguggcaa

SEQ ID NO: 979051 - RNA, 19 nt, Artificial Sequence
  Description of Artificial Sequence: Synthetic oligonucleotide
  Antisense strand to SEQ ID NO: 979050
uugccacuaacaaguguuc

SEQ ID NO: 979052 - RNA, 19 nt, Artificial Sequence
  Description of Artificial Sequence: Synthetic oligonucleotide
  Sense strand starting at position 3640 of SEQ ID NO: 914113
ggcuuagucuaucuaggau

SEQ ID NO: 979053 - RNA, 19 nt, Artificial Sequence
  Description of Artificial Sequence: Synthetic oligonucleotide
  Antisense strand to SEQ ID NO: 979052
auccuagauagacuaagcc

SEQ ID NO: 979054 - RNA, 19 nt, Artificial Sequence
  Description of Artificial Sequence: Synthetic oligonucleotide
  Sense strand starting at position 3953 of SEQ ID NO: 914113
gccugaauuccaggcuaga

SEQ ID NO: 979055 - RNA, 19 nt, Artificial Sequence
  Description of Artificial Sequence: Synthetic oligonucleotide
  Antisense strand to SEQ ID NO: 979054
ucuagccuggaauucaggc

SEQ ID NO: 979056 - RNA, 19 nt, Artificial Sequence
  Description of Artificial Sequence: Synthetic oligonucleotide
  Sense strand starting at position 819 of SEQ ID NO: 914113
uuguguuaagcugaccuca

SEQ ID NO: 979057 - RNA, 19 nt, Artificial Sequence
  Description of Artificial Sequence: Synthetic oligonucleotide
  Antisense strand to SEQ ID NO: 979056
ugaggucagcuuaacacaa

SEQ ID NO: 979058 - RNA, 19 nt, Artificial Sequence
  Description of Artificial Sequence: Synthetic oligonucleotide
  Sense strand starting at position 3711 of SEQ ID NO: 914113
uuaccucuccuguauguuu

SEQ ID NO: 979059 - RNA, 19 nt, Artificial Sequence
  Description of Artificial Sequence: Synthetic oligonucleotide
  Antisense strand to SEQ ID NO: 979058
aaacauacaggagagguaa

SEQ ID NO: 979060 - RNA, 19 nt, Artificial Sequence
  Description of Artificial Sequence: Synthetic oligonucleotide
  Sense strand starting at position 3005 of SEQ ID NO: 914113
ugacgcugcauccaugauu

SEQ ID NO: 979061 - RNA, 19 nt, Artificial Sequence
  Description of Artificial Sequence: Synthetic oligonucleotide
  Antisense strand to SEQ ID NO: 979060
aaucauggaugcagcguca

SEQ ID NO: 979062 - RNA, 19 nt, Artificial Sequence
  Description of Artificial Sequence: Synthetic oligonucleotide
  Sense strand starting at position 1029 of SEQ ID NO: 914113
ucucgacagucuccaguaa

SEQ ID NO: 979063 - RNA, 19 nt, Artificial Sequence
  Description of Artificial Sequence: Synthetic oligonucleotide
  Antisense strand to SEQ ID NO: 979062
uuacuggagacugucgaga

SEQ ID NO: 979064 - RNA, 19 nt, Artificial Sequence
  Description of Artificial Sequence: Synthetic oligonucleotide
  Sense strand starting at position 995 of SEQ ID NO: 914113
cugcaaacacgugguuaaa

SEQ ID NO: 979065 - RNA, 19 nt, Artificial Sequence
  Description of Artificial Sequence: Synthetic oligonucleotide
  Antisense strand to SEQ ID NO: 979064
uuuaaccacguguuugcag

SEQ ID NO: 979066 - RNA, 19 nt, Artificial Sequence
  Description of Artificial Sequence: Synthetic oligonucleotide
  Sense strand starting at position 994 of SEQ ID NO: 914113
acugcaaacacgugguuaa

SEQ ID NO: 979067 - RNA, 19 nt, Artificial Sequence
  Description of Artificial Sequence: Synthetic oligonucleotide
  Antisense strand to SEQ ID NO: 979066
uuaaccacguguuugcagu

SEQ ID NO: 979068 - RNA, 19 nt, Artificial Sequence
  Description of Artificial Sequence: Synthetic oligonucleotide
  Sense strand starting at position 3970 of SEQ ID NO: 914113
gaauauccacagugcguaa

SEQ ID NO: 979069 - RNA, 19 nt, Artificial Sequence
  Description of Artificial Sequence: Synthetic oligonucleotide
  Antisense strand to SEQ ID NO: 979068
uuacgcacuguggauauuc

SEQ ID NO: 979070 - RNA, 19 nt, Artificial Sequence
  Description of Artificial Sequence: Synthetic oligonucleotide
  Sense strand starting at position 223 of SEQ ID NO: 914113
uucuguaagcagcauguua

SEQ ID NO: 979071 - RNA, 19 nt, Artificial Sequence
  Description of Artificial Sequence: Synthetic oligonucleotide
  Antisense strand to SEQ ID NO: 979070
uaacaugcugcuuacagaa

SEQ ID NO: 979072 - RNA, 19 nt, Artificial Sequence
  Description of Artificial Sequence: Synthetic oligonucleotide
  Sense strand starting at position 3536 of SEQ ID NO: 914113
uugaguccuuaguaaauuu

SEQ ID NO: 979073 - RNA, 19 nt, Artificial Sequence
  Description of Artificial Sequence: Synthetic oligonucleotide
  Antisense strand to SEQ ID NO: 979072
aaauuuacuaaggacucaa

SEQ ID NO: 979074 - RNA, 19 nt, Artificial Sequence
  Description of Artificial Sequence: Synthetic oligonucleotide
  Sense strand starting at position 720 of SEQ ID NO: 914113
gaggcugauuggcuuugua

SEQ ID NO: 979075 - RNA, 19 nt, Artificial Sequence
  Description of Artificial Sequence: Synthetic oligonucleotide
  Antisense strand to SEQ ID NO: 979074
uacaaagccaaucagccuc

SEQ ID NO: 979076 - RNA, 19 nt, Artificial Sequence
  Description of Artificial Sequence: Synthetic oligonucleotide
  Sense strand starting at position 496 of SEQ ID NO: 914113
gguaguugcgaucaccuuu

SEQ ID NO: 979077 - RNA, 19 nt, Artificial Sequence
  Description of Artificial Sequence: Synthetic oligonucleotide
  Antisense strand to SEQ ID NO: 979076
aaaggugaucgcaacuacc

SEQ ID NO: 979078 - RNA, 19 nt, Artificial Sequence
  Description of Artificial Sequence: Synthetic oligonucleotide
  Sense strand starting at position 821 of SEQ ID NO: 914113
guguuaagcugaccucauu

SEQ ID NO: 979079 - RNA, 19 nt, Artificial Sequence
  Description of Artificial Sequence: Synthetic oligonucleotide
  Antisense strand to SEQ ID NO: 979078
aaugaggucagcuuaacac

SEQ ID NO: 979080 - RNA, 19 nt, Artificial Sequence
  Description of Artificial Sequence: Synthetic oligonucleotide
  Sense strand starting at position 368 of SEQ ID NO: 914113
cgagcuaugugacuuuagu

SEQ ID NO: 979081 - RNA, 19 nt, Artificial Sequence
  Description of Artificial Sequence: Synthetic oligonucleotide
  Antisense strand to SEQ ID NO: 979080
acuaaagucacauagcucg

SEQ ID NO: 979082 - RNA, 19 nt, Artificial Sequence
  Description of Artificial Sequence: Synthetic oligonucleotide
  Sense strand starting at position 3008 of SEQ ID NO: 914113
cgcugcauccaugauuguu

SEQ ID NO: 979083 - RNA, 19 nt, Artificial Sequence
  Description of Artificial Sequence: Synthetic oligonucleotide
  Antisense strand to SEQ ID NO: 979082
aacaaucauggaugcagcg

SEQ ID NO: 979084 - RNA, 19 nt, Artificial Sequence
  Description of Artificial Sequence: Synthetic oligonucleotide
  Sense strand starting at position 1408 of SEQ ID NO: 914113
gcgauucuccaacgaggca

SEQ ID NO: 979085 - RNA, 19 nt, Artificial Sequence
  Description of Artificial Sequence: Synthetic oligonucleotide
  Antisense strand to SEQ ID NO: 979084
ugccucguuggagaaucgc

SEQ ID NO: 979086 - RNA, 19 nt, Artificial Sequence
  Description of Artificial Sequence: Synthetic oligonucleotide
  Sense strand starting at position 484 of SEQ ID NO: 914113
guagcucuccaagguaguu

SEQ ID NO: 979087 - RNA, 19 nt, Artificial Sequence
  Description of Artificial Sequence: Synthetic oligonucleotide
  Antisense strand to SEQ ID NO: 979086
aacuaccuuggagagcuac

SEQ ID NO: 979088 - RNA, 19 nt, Artificial Sequence
  Description of Artificial Sequence: Synthetic oligonucleotide
  Sense strand starting at position 2303 of SEQ ID NO: 914113
gcgccuucacucgggaaga

SEQ ID NO: 979089 - RNA, 19 nt, Artificial Sequence
  Description of Artificial Sequence: Synthetic oligonucleotide
  Antisense strand to SEQ ID NO: 979088
ucuucccgagugaaggcgc

SEQ ID NO: 979090 - RNA, 19 nt, Artificial Sequence
  Description of Artificial Sequence: Synthetic oligonucleotide
  Sense strand starting at position 3533 of SEQ ID NO: 914114
gguucucgcacuuuagcua

SEQ ID NO: 979091 - RNA, 19 nt, Artificial Sequence
  Description of Artificial Sequence: Synthetic oligonucleotide
  Antisense strand to SEQ ID NO: 979090
uagcuaaagugcgagaacc

SEQ ID NO: 979092 - RNA, 19 nt, Artificial Sequence
  Description of Artificial Sequence: Synthetic oligonucleotide
  Sense strand starting at position 296 of SEQ ID NO: 914114
uguagaauuccugacucca

SEQ ID NO: 979093 - RNA, 19 nt, Artificial Sequence
  Description of Artificial Sequence: Synthetic oligonucleotide
  Antisense strand to SEQ ID NO: 979092
uggagucaggaauucuaca

SEQ ID NO: 979094 - RNA, 19 nt, Artificial Sequence
  Description of Artificial Sequence: Synthetic oligonucleotide
  Sense strand starting at position 723 of SEQ ID NO: 914114
gguuguaagguuuaaagag

SEQ ID NO: 979095 - RNA, 19 nt, Artificial Sequence
  Description of Artificial Sequence: Synthetic oligonucleotide
  Antisense strand to SEQ ID NO: 979094
cucuuuaaaccuuacaacc

SEQ ID NO: 979096 - RNA, 19 nt, Artificial Sequence
  Description of Artificial Sequence: Synthetic oligonucleotide
  Sense strand starting at position 2437 of SEQ ID NO: 914114
caaggaaaccgcgaugaau

SEQ ID NO: 979097 - RNA, 19 nt, Artificial Sequence
  Description of Artificial Sequence: Synthetic oligonucleotide
  Antisense strand to SEQ ID NO: 979096
auucaucgcgguuuccuug

SEQ ID NO: 979098 - RNA, 19 nt, Artificial Sequence
  Description of Artificial Sequence: Synthetic oligonucleotide
  Sense strand starting at position 1514 of SEQ ID NO: 914114
ggcgaugucguaguucuga

SEQ ID NO: 979099 - RNA, 19 nt, Artificial Sequence
  Description of Artificial Sequence: Synthetic oligonucleotide
  Antisense strand to SEQ ID NO: 979098
ucagaacuacgacaucgcc

SEQ ID NO: 979100 - RNA, 19 nt, Artificial Sequence
  Description of Artificial Sequence: Synthetic oligonucleotide
  Sense strand starting at position 3836 of SEQ ID NO: 914114
auguuuccuccugaauaug

SEQ ID NO: 979101 - RNA, 19 nt, Artificial Sequence
  Description of Artificial Sequence: Synthetic oligonucleotide
  Antisense strand to SEQ ID NO: 979100
cauauucaggaggaaacau

SEQ ID NO: 979102 - RNA, 19 nt, Artificial Sequence
  Description of Artificial Sequence: Synthetic oligonucleotide
  Sense strand starting at position 871 of SEQ ID NO: 914114
gugaauuccaucgauugac

SEQ ID NO: 979103 - RNA, 19 nt, Artificial Sequence
  Description of Artificial Sequence: Synthetic oligonucleotide
  Antisense strand to SEQ ID NO: 979102
gucaaucgauggaauucac

SEQ ID NO: 979104 - RNA, 19 nt, Artificial Sequence
  Description of Artificial Sequence: Synthetic oligonucleotide
  Sense strand starting at position 403 of SEQ ID NO: 914114
gaggaaaccuuaguucucu

SEQ ID NO: 979105 - RNA, 19 nt, Artificial Sequence
  Description of Artificial Sequence: Synthetic oligonucleotide
  Antisense strand to SEQ ID NO: 979104
agagaacuaagguuuccuc

SEQ ID NO: 979106 - RNA, 19 nt, Artificial Sequence
  Description of Artificial Sequence: Synthetic oligonucleotide
  Sense strand starting at position 3947 of SEQ ID NO: 914114
agucuuggagucuggaaga

SEQ ID NO: 979107 - RNA, 19 nt, Artificial Sequence
  Description of Artificial Sequence: Synthetic oligonucleotide
  Antisense strand to SEQ ID NO: 979106
ucuuccagacuccaagacu

SEQ ID NO: 979108 - RNA, 19 nt, Artificial Sequence
  Description of Artificial Sequence: Synthetic oligonucleotide
  Sense strand starting at position 2449 of SEQ ID NO: 914114
gaugaaucggcauaagcac

SEQ ID NO: 979109 - RNA, 19 nt, Artificial Sequence
  Description of Artificial Sequence: Synthetic oligonucleotide
  Antisense strand to SEQ ID NO: 979108
gugcuuaugccgauucauc

SEQ ID NO: 979110 - RNA, 19 nt, Artificial Sequence
  Description of Artificial Sequence: Synthetic oligonucleotide
  Sense strand starting at position 3978 of SEQ ID NO: 914114
ucaagauguggucaggguu

SEQ ID NO: 979111 - RNA, 19 nt, Artificial Sequence
  Description of Artificial Sequence: Synthetic oligonucleotide
  Antisense strand to SEQ ID NO: 979110
aacccugaccacaucuuga

SEQ ID NO: 979112 - RNA, 19 nt, Artificial Sequence
  Description of Artificial Sequence: Synthetic oligonucleotide
  Sense strand starting at position 1135 of SEQ ID NO: 914114
aggaacuucucauugcaau

SEQ ID NO: 979113 - RNA, 19 nt, Artificial Sequence
  Description of Artificial Sequence: Synthetic oligonucleotide
  Antisense strand to SEQ ID NO: 979112
auugcaaugagaaguuccu

SEQ ID NO: 979114 - RNA, 19 nt, Artificial Sequence
  Description of Artificial Sequence: Synthetic oligonucleotide
  Sense strand starting at position 439 of SEQ ID NO: 914114
uaaauaugaguugguuuag

SEQ ID NO: 979115 - RNA, 19 nt, Artificial Sequence
  Description of Artificial Sequence: Synthetic oligonucleotide
  Antisense strand to SEQ ID NO: 979114
cuaaaccaacucauauuua

SEQ ID NO: 979116 - RNA, 19 nt, Artificial Sequence
  Description of Artificial Sequence: Synthetic oligonucleotide
  Sense strand starting at position 1136 of SEQ ID NO: 914114
ggaacuucucauugcaaua

SEQ ID NO: 979117 - RNA, 19 nt, Artificial Sequence
  Description of Artificial Sequence: Synthetic oligonucleotide
  Antisense strand to SEQ ID NO: 979116
uauugcaaugagaaguucc

SEQ ID NO: 979118 - RNA, 19 nt, Artificial Sequence
  Description of Artificial Sequence: Synthetic oligonucleotide
  Sense strand starting at position 3540 of SEQ ID NO: 914114
gcacuuuagcuacaccaga

SEQ ID NO: 979119 - RNA, 19 nt, Artificial Sequence
  Description of Artificial Sequence: Synthetic oligonucleotide
  Antisense strand to SEQ ID NO: 979118
ucugguguagcuaaagugc

SEQ ID NO: 979120 - RNA, 19 nt, Artificial Sequence
  Description of Artificial Sequence: Synthetic oligonucleotide
  Sense strand starting at position 1491 of SEQ ID NO: 914114
ggcuggugucgggaaagga

SEQ ID NO: 979121 - RNA, 19 nt, Artificial Sequence
  Description of Artificial Sequence: Synthetic oligonucleotide
  Antisense strand to SEQ ID NO: 979120
uccuuucccgacaccagcc

SEQ ID NO: 979122 - RNA, 19 nt, Artificial Sequence
  Description of Artificial Sequence: Synthetic oligonucleotide
  Sense strand starting at position 316 of SEQ ID NO: 914114
gcccaccugccugaugaaa

SEQ ID NO: 979123 - RNA, 19 nt, Artificial Sequence
  Description of Artificial Sequence: Synthetic oligonucleotide
  Antisense strand to SEQ ID NO: 979122
uuucaucaggcaggugggc

SEQ ID NO: 979124 - RNA, 19 nt, Artificial Sequence
  Description of Artificial Sequence: Synthetic oligonucleotide
  Sense strand starting at position 1934 of SEQ ID NO: 914114
gagggacuuugcucaccua

SEQ ID NO: 979125 - RNA, 19 nt, Artificial Sequence
  Description of Artificial Sequence: Synthetic oligonucleotide
  Antisense strand to SEQ ID NO: 979124
uaggugagcaaagucccuc

SEQ ID NO: 979126 - RNA, 19 nt, Artificial Sequence
  Description of Artificial Sequence: Synthetic oligonucleotide
  Sense strand starting at position 3823 of SEQ ID NO: 914114
guuagacuacuuuauguuu

SEQ ID NO: 979127 - RNA, 19 nt, Artificial Sequence
  Description of Artificial Sequence: Synthetic oligonucleotide
  Antisense strand to SEQ ID NO: 979126
aaacauaaaguagucuaac

SEQ ID NO: 979128 - RNA, 19 nt, Artificial Sequence
  Description of Artificial Sequence: Synthetic oligonucleotide
  Sense strand starting at position 60 of SEQ ID NO: 914114
uuguaaacuugagcucaaa

SEQ ID NO: 979129 - RNA, 19 nt, Artificial Sequence
  Description of Artificial Sequence: Synthetic oligonucleotide
  Antisense strand to SEQ ID NO: 979128
uuugagcucaaguuuacaa

SEQ ID NO: 979130 - RNA, 19 nt, Artificial Sequence
  Description of Artificial Sequence: Synthetic oligonucleotide
  Sense strand starting at position 3905 of SEQ ID NO: 914114
cacagauuggguggccuaa

SEQ ID NO: 979131 - RNA, 19 nt, Artificial Sequence
  Description of Artificial Sequence: Synthetic oligonucleotide
  Antisense strand to SEQ ID NO: 979130
uuaggccacccaaucugug

SEQ ID NO: 979132 - RNA, 19 nt, Artificial Sequence
  Description of Artificial Sequence: Synthetic oligonucleotide
  Sense strand starting at position 2583 of SEQ ID NO: 914114
ugggaagaugcuugggcua

SEQ ID NO: 979133 - RNA, 19 nt, Artificial Sequence
  Description of Artificial Sequence: Synthetic oligonucleotide
  Antisense strand to SEQ ID NO: 979132
uagcccaagcaucuuccca

SEQ ID NO: 979134 - RNA, 19 nt, Artificial Sequence
  Description of Artificial Sequence: Synthetic oligonucleotide
  Sense strand starting at position 3553 of SEQ ID NO: 914114
accagaguccuccaacguu

SEQ ID NO: 979135 - RNA, 19 nt, Artificial Sequence
  Description of Artificial Sequence: Synthetic oligonucleotide
  Antisense strand to SEQ ID NO: 979134
aacguuggaggacucuggu

SEQ ID NO: 979136 - RNA, 19 nt, Artificial Sequence
  Description of Artificial Sequence: Synthetic oligonucleotide
  Sense strand starting at position 717 of SEQ ID NO: 914114
ggaagagguuguaagguuu

SEQ ID NO: 979137 - RNA, 19 nt, Artificial Sequence
  Description of Artificial Sequence: Synthetic oligonucleotide
  Antisense strand to SEQ ID NO: 979136
aaaccuuacaaccucuucc

SEQ ID NO: 979138 - RNA, 19 nt, Artificial Sequence
  Description of Artificial Sequence: Synthetic oligonucleotide
  Sense strand starting at position 770 of SEQ ID NO: 914114
gggagagucccugguccau

SEQ ID NO: 979139 - RNA, 19 nt, Artificial Sequence
  Description of Artificial Sequence: Synthetic oligonucleotide
  Antisense strand to SEQ ID NO: 979138
auggaccagggacucuccc

SEQ ID NO: 979140 - RNA, 19 nt, Artificial Sequence
  Description of Artificial Sequence: Synthetic oligonucleotide
  Sense strand starting at position 772 of SEQ ID NO: 914114
gagagucccugguccauua

SEQ ID NO: 979141 - RNA, 19 nt, Artificial Sequence
  Description of Artificial Sequence: Synthetic oligonucleotide
  Antisense strand to SEQ ID NO: 979140
uaauggaccagggacucuc

SEQ ID NO: 979142 - RNA, 19 nt, Artificial Sequence
  Description of Artificial Sequence: Synthetic oligonucleotide
  Sense strand starting at position 139 of SEQ ID NO: 914114
uuuaacuuaucagucagua

SEQ ID NO: 979143 - RNA, 19 nt, Artificial Sequence
  Description of Artificial Sequence: Synthetic oligonucleotide
  Antisense strand to SEQ ID NO: 979142
uacugacugauaaguuaaa

SEQ ID NO: 979144 - RNA, 19 nt, Artificial Sequence
  Description of Artificial Sequence: Synthetic oligonucleotide
  Sense strand starting at position 582 of SEQ ID NO: 914114
aguaaccgacuuugucaaa

SEQ ID NO: 979145 - RNA, 19 nt, Artificial Sequence
  Description of Artificial Sequence: Synthetic oligonucleotide
  Antisense strand to SEQ ID NO: 979144
uuugacaaagucgguuacu

SEQ ID NO: 979146 - RNA, 19 nt, Artificial Sequence
  Description of Artificial Sequence: Synthetic oligonucleotide
  Sense strand starting at position 143 of SEQ ID NO: 914114
acuuaucagucaguaaggu

SEQ ID NO: 979147 - RNA, 19 nt, Artificial Sequence
  Description of Artificial Sequence: Synthetic oligonucleotide
  Antisense strand to SEQ ID NO: 979146
accuuacugacugauaagu

SEQ ID NO: 979148 - RNA, 19 nt, Artificial Sequence
  Description of Artificial Sequence: Synthetic oligonucleotide
  Sense strand starting at position 1513 of SEQ ID NO: 914114
gggcgaugucguaguucug

SEQ ID NO: 979149 - RNA, 19 nt, Artificial Sequence
  Description of Artificial Sequence: Synthetic oligonucleotide
  Antisense strand to SEQ ID NO: 979148
cagaacuacgacaucgccc

SEQ ID NO: 979150 - RNA, 19 nt, Artificial Sequence
  Description of Artificial Sequence: Synthetic oligonucleotide
  Sense strand starting at position 3831 of SEQ ID NO: 914114
acuuuauguuuccuccuga

SEQ ID NO: 979151 - RNA, 19 nt, Artificial Sequence
  Description of Artificial Sequence: Synthetic oligonucleotide
  Antisense strand to SEQ ID NO: 979150
ucaggaggaaacauaaagu

SEQ ID NO: 979152 - RNA, 19 nt, Artificial Sequence
  Description of Artificial Sequence: Synthetic oligonucleotide
  Sense strand starting at position 507 of SEQ ID NO: 914114
agcccuauagccuagcaua

SEQ ID NO: 979153 - RNA, 19 nt, Artificial Sequence
  Description of Artificial Sequence: Synthetic oligonucleotide
  Antisense strand to SEQ ID NO: 979152
uaugcuaggcuauagggcu

SEQ ID NO: 979154 - RNA, 19 nt, Artificial Sequence
  Description of Artificial Sequence: Synthetic oligonucleotide
  Sense strand starting at position 969 of SEQ ID NO: 914114
cugagaaacaucuggcgca

SEQ ID NO: 979155 - RNA, 19 nt, Artificial Sequence
  Description of Artificial Sequence: Synthetic oligonucleotide
  Antisense strand to SEQ ID NO: 979154
ugcgccagauguuucucag

SEQ ID NO: 979156 - RNA, 19 nt, Artificial Sequence
  Description of Artificial Sequence: Synthetic oligonucleotide
  Sense strand starting at position 870 of SEQ ID NO: 914114
cgugaauuccaucgauuga

SEQ ID NO: 979157 - RNA, 19 nt, Artificial Sequence
  Description of Artificial Sequence: Synthetic oligonucleotide
  Antisense strand to SEQ ID NO: 979156
ucaaucgauggaauucacg

SEQ ID NO: 979158 - RNA, 19 nt, Artificial Sequence
  Description of Artificial Sequence: Synthetic oligonucleotide
  Sense strand starting at position 3612 of SEQ ID NO: 914114
gugucugauucuguaagac

SEQ ID NO: 979159 - RNA, 19 nt, Artificial Sequence
  Description of Artificial Sequence: Synthetic oligonucleotide
  Antisense strand to SEQ ID NO: 979158
gucuuacagaaucagacac

SEQ ID NO: 979160 - RNA, 19 nt, Artificial Sequence
  Description of Artificial Sequence: Synthetic oligonucleotide
  Sense strand starting at position 3763 of SEQ ID NO: 914114
accuguuaaguauguuacu

SEQ ID NO: 979161 - RNA, 19 nt, Artificial Sequence
  Description of Artificial Sequence: Synthetic oligonucleotide
  Antisense strand to SEQ ID NO: 979160
aguaacauacuuaacaggu

SEQ ID NO: 979162 - RNA, 19 nt, Artificial Sequence
  Description of Artificial Sequence: Synthetic oligonucleotide
  Sense strand starting at position 3560 of SEQ ID NO: 914114
uccuccaacguuugugaaa

SEQ ID NO: 979163 - RNA, 19 nt, Artificial Sequence
  Description of Artificial Sequence: Synthetic oligonucleotide
  Antisense strand to SEQ ID NO: 979162
uuucacaaacguuggagga

SEQ ID NO: 979164 - RNA, 19 nt, Artificial Sequence
  Description of Artificial Sequence: Synthetic oligonucleotide
  Sense strand starting at position 992 of SEQ ID NO: 914114
agaugcugccucugacauu

SEQ ID NO: 979165 - RNA, 19 nt, Artificial Sequence
  Description of Artificial Sequence: Synthetic oligonucleotide
  Antisense strand to SEQ ID NO: 979164
aaugucagaggcagcaucu

SEQ ID NO: 979166 - RNA, 19 nt, Artificial Sequence
  Description of Artificial Sequence: Synthetic oligonucleotide
  Sense strand starting at position 3821 of SEQ ID NO: 914114
guguuagacuacuuuaugu

SEQ ID NO: 979167 - RNA, 19 nt, Artificial Sequence
  Description of Artificial Sequence: Synthetic oligonucleotide
  Antisense strand to SEQ ID NO: 979166
acauaaaguagucuaacac

SEQ ID NO: 979168 - RNA, 19 nt, Artificial Sequence
  Description of Artificial Sequence: Synthetic oligonucleotide
  Sense strand starting at position 3764 of SEQ ID NO: 914114
ccuguuaaguauguuacuu

SEQ ID NO: 979169 - RNA, 19 nt, Artificial Sequence
  Description of Artificial Sequence: Synthetic oligonucleotide
  Antisense strand to SEQ ID NO: 979168
aaguaacauacuuaacagg

SEQ ID NO: 979170 - RNA, 19 nt, Artificial Sequence
  Description of Artificial Sequence: Synthetic oligonucleotide
  Sense strand starting at position 2069 of SEQ ID NO: 914115
agaaauagcccuggaaauu

SEQ ID NO: 979171 - RNA, 19 nt, Artificial Sequence
  Description of Artificial Sequence: Synthetic oligonucleotide
  Antisense strand to SEQ ID NO: 979170
aauuuccagggcuauuucu

SEQ ID NO: 979172 - RNA, 19 nt, Artificial Sequence
  Description of Artificial Sequence: Synthetic oligonucleotide
  Sense strand starting at position 3537 of SEQ ID NO: 914115
agauuaauacacuggaguc

SEQ ID NO: 979173 - RNA, 19 nt, Artificial Sequence
  Description of Artificial Sequence: Synthetic oligonucleotide
  Antisense strand to SEQ ID NO: 979172
gacuccaguguauuaaucu

SEQ ID NO: 979174 - RNA, 19 nt, Artificial Sequence
  Description of Artificial Sequence: Synthetic oligonucleotide
  Sense strand starting at position 1737 of SEQ ID NO: 914115
aggauaaauuuagaauggu

SEQ ID NO: 979175 - RNA, 19 nt, Artificial Sequence
  Description of Artificial Sequence: Synthetic oligonucleotide
  Antisense strand to SEQ ID NO: 979174
accauucuaaauuuauccu

SEQ ID NO: 979176 - RNA, 19 nt, Artificial Sequence
  Description of Artificial Sequence: Synthetic oligonucleotide
  Sense strand starting at position 3549 of SEQ ID NO: 914115
uggagucuaauaggguaaa

SEQ ID NO: 979177 - RNA, 19 nt, Artificial Sequence
  Description of Artificial Sequence: Synthetic oligonucleotide
  Antisense strand to SEQ ID NO: 979176
uuuacccuauuagacucca

SEQ ID NO: 979178 - RNA, 19 nt, Artificial Sequence
  Description of Artificial Sequence: Synthetic oligonucleotide
  Sense strand starting at position 2398 of SEQ ID NO: 914115
gauauaauggcacaugucu

SEQ ID NO: 979179 - RNA, 19 nt, Artificial Sequence
  Description of Artificial Sequence: Synthetic oligonucleotide
  Antisense strand to SEQ ID NO: 979178
agacaugugccauuauauc

SEQ ID NO: 979180 - RNA, 19 nt, Artificial Sequence
  Description of Artificial Sequence: Synthetic oligonucleotide
  Sense strand starting at position 418 of SEQ ID NO: 914115
aggguaaugcuguauggga

SEQ ID NO: 979181 - RNA, 19 nt, Artificial Sequence
  Description of Artificial Sequence: Synthetic oligonucleotide
  Antisense strand to SEQ ID NO: 979180
ucccauacagcauuacccu

SEQ ID NO: 979182 - RNA, 19 nt, Artificial Sequence
  Description of Artificial Sequence: Synthetic oligonucleotide
  Sense strand starting at position 1027 of SEQ ID NO: 914115
uuauaauggcagugaaaua

SEQ ID NO: 979183 - RNA, 19 nt, Artificial Sequence
  Description of Artificial Sequence: Synthetic oligonucleotide
  Antisense strand to SEQ ID NO: 979182
uauuucacugccauuauaa

SEQ ID NO: 979184 - RNA, 19 nt, Artificial Sequence
  Description of Artificial Sequence: Synthetic oligonucleotide
  Sense strand starting at position 1930 of SEQ ID NO: 914115
auccauuacugggcaaauc

SEQ ID NO: 979185 - RNA, 19 nt, Artificial Sequence
  Description of Artificial Sequence: Synthetic oligonucleotide
  Antisense strand to SEQ ID NO: 979184
gauuugcccaguaauggau

SEQ ID NO: 979186 - RNA, 19 nt, Artificial Sequence
  Description of Artificial Sequence: Synthetic oligonucleotide
  Sense strand starting at position 2166 of SEQ ID NO: 914115
cagcuuguuguauagagaa

SEQ ID NO: 979187 - RNA, 19 nt, Artificial Sequence
  Description of Artificial Sequence: Synthetic oligonucleotide
  Antisense strand to SEQ ID NO: 979186
uucucuauacaacaagcug

SEQ ID NO: 979188 - RNA, 19 nt, Artificial Sequence
  Description of Artificial Sequence: Synthetic oligonucleotide
  Sense strand starting at position 2168 of SEQ ID NO: 914115
gcuuguuguauagagaaau

SEQ ID NO: 979189 - RNA, 19 nt, Artificial Sequence
  Description of Artificial Sequence: Synthetic oligonucleotide
  Antisense strand to SEQ ID NO: 979188
auuucucuauacaacaagc

SEQ ID NO: 979190 - RNA, 19 nt, Artificial Sequence
  Description of Artificial Sequence: Synthetic oligonucleotide
  Sense strand starting at position 1921 of SEQ ID NO: 914115
gguggagccauccauuacu

SEQ ID NO: 979191 - RNA, 19 nt, Artificial Sequence
  Description of Artificial Sequence: Synthetic oligonucleotide
  Antisense strand to SEQ ID NO: 979190
aguaauggauggcuccacc

SEQ ID NO: 979192 - RNA, 19 nt, Artificial Sequence
  Description of Artificial Sequence: Synthetic oligonucleotide
  Sense strand starting at position 2674 of SEQ ID NO: 914115
cuuaaauggccauaugcau

SEQ ID NO: 979193 - RNA, 19 nt, Artificial Sequence
  Description of Artificial Sequence: Synthetic oligonucleotide
  Antisense strand to SEQ ID NO: 979192
augcauauggccauuuaag

SEQ ID NO: 979194 - RNA, 19 nt, Artificial Sequence
  Description of Artificial Sequence: Synthetic oligonucleotide
  Sense strand starting at position 918 of SEQ ID NO: 914115
ucgcaaguucuagaaauca

SEQ ID NO: 979195 - RNA, 19 nt, Artificial Sequence
  Description of Artificial Sequence: Synthetic oligonucleotide
  Antisense strand to SEQ ID NO: 979194
ugauuucuagaacuugcga

SEQ ID NO: 979196 - RNA, 19 nt, Artificial Sequence
  Description of Artificial Sequence: Synthetic oligonucleotide
  Sense strand starting at position 2855 of SEQ ID NO: 914115
uaagacuugggcuggagua

SEQ ID NO: 979197 - RNA, 19 nt, Artificial Sequence
  Description of Artificial Sequence: Synthetic oligonucleotide
  Antisense strand to SEQ ID NO: 979196
uacuccagcccaagucuua

SEQ ID NO: 979198 - RNA, 19 nt, Artificial Sequence
  Description of Artificial Sequence: Synthetic oligonucleotide
  Sense strand starting at position 1138 of SEQ ID NO: 914115
ugcuaacauuuagacagaa

SEQ ID NO: 979199 - RNA, 19 nt, Artificial Sequence
  Description of Artificial Sequence: Synthetic oligonucleotide
  Antisense strand to SEQ ID NO: 979198
uucugucuaaauguuagca

SEQ ID NO: 979200 - RNA, 19 nt, Artificial Sequence
  Description of Artificial Sequence: Synthetic oligonucleotide
  Sense strand starting at position 1101 of SEQ ID NO: 914115
uugcauugugaauauacuu

SEQ ID NO: 979201 - RNA, 19 nt, Artificial Sequence
  Description of Artificial Sequence: Synthetic oligonucleotide
  Antisense strand to SEQ ID NO: 979200
aaguauauucacaaugcaa

SEQ ID NO: 979202 - RNA, 19 nt, Artificial Sequence
  Description of Artificial Sequence: Synthetic oligonucleotide
  Sense strand starting at position 1592 of SEQ ID NO: 914115
uggagucucuuuccaauga

SEQ ID NO: 979203 - RNA, 19 nt, Artificial Sequence
  Description of Artificial Sequence: Synthetic oligonucleotide
  Antisense strand to SEQ ID NO: 979202
ucauuggaaagagacucca

SEQ ID NO: 979204 - RNA, 19 nt, Artificial Sequence
  Description of Artificial Sequence: Synthetic oligonucleotide
  Sense strand starting at position 1708 of SEQ ID NO: 914115
aucuaucagaagcgaugau

SEQ ID NO: 979205 - RNA, 19 nt, Artificial Sequence
  Description of Artificial Sequence: Synthetic oligonucleotide
  Antisense strand to SEQ ID NO: 979204
aucaucgcuucugauagau

SEQ ID NO: 979206 - RNA, 19 nt, Artificial Sequence
  Description of Artificial Sequence: Synthetic oligonucleotide
  Sense strand starting at position 561 of SEQ ID NO: 914115
cacuaucuccggugaagaa

SEQ ID NO: 979207 - RNA, 19 nt, Artificial Sequence
  Description of Artificial Sequence: Synthetic oligonucleotide
  Antisense strand to SEQ ID NO: 979206
uucuucaccggagauagug

SEQ ID NO: 979208 - RNA, 19 nt, Artificial Sequence
  Description of Artificial Sequence: Synthetic oligonucleotide
  Sense strand starting at position 2709 of SEQ ID NO: 914115
aggccacugacauguugaa

SEQ ID NO: 979209 - RNA, 19 nt, Artificial Sequence
  Description of Artificial Sequence: Synthetic oligonucleotide
  Antisense strand to SEQ ID NO: 979208
uucaacaugucaguggccu

SEQ ID NO: 979210 - RNA, 19 nt, Artificial Sequence
  Description of Artificial Sequence: Synthetic oligonucleotide
  Sense strand starting at position 1125 of SEQ ID NO: 914115
ccaagacuuuaagugcuaa

SEQ ID NO: 979211 - RNA, 19 nt, Artificial Sequence
  Description of Artificial Sequence: Synthetic oligonucleotide
  Antisense strand to SEQ ID NO: 979210
uuagcacuuaaagucuugg

SEQ ID NO: 979212 - RNA, 19 nt, Artificial Sequence
  Description of Artificial Sequence: Synthetic oligonucleotide
  Sense strand starting at position 3882 of SEQ ID NO: 914115
aguagaggugugcaaucau

SEQ ID NO: 979213 - RNA, 19 nt, Artificial Sequence
  Description of Artificial Sequence: Synthetic oligonucleotide
  Antisense strand to SEQ ID NO: 979212
augauugcacaccucuacu

SEQ ID NO: 979214 - RNA, 19 nt, Artificial Sequence
  Description of Artificial Sequence: Synthetic oligonucleotide
  Sense strand starting at position 1077 of SEQ ID NO: 914115
uugugcuacgauuauuaaa

SEQ ID NO: 979215 - RNA, 19 nt, Artificial Sequence
  Description of Artificial Sequence: Synthetic oligonucleotide
  Antisense strand to SEQ ID NO: 979214
uuuaauaaucguagcacaa

SEQ ID NO: 979216 - RNA, 19 nt, Artificial Sequence
  Description of Artificial Sequence: Synthetic oligonucleotide
  Sense strand starting at position 2553 of SEQ ID NO: 914115
aagucaguccucugaacug

SEQ ID NO: 979217 - RNA, 19 nt, Artificial Sequence
  Description of Artificial Sequence: Synthetic oligonucleotide
  Antisense strand to SEQ ID NO: 979216
caguucagaggacugacuu

SEQ ID NO: 979218 - RNA, 19 nt, Artificial Sequence
  Description of Artificial Sequence: Synthetic oligonucleotide
  Sense strand starting at position 3370 of SEQ ID NO: 914115
ugggucuucucuguaaaga

SEQ ID NO: 979219 - RNA, 19 nt, Artificial Sequence
  Description of Artificial Sequence: Synthetic oligonucleotide
  Antisense strand to SEQ ID NO: 979218
ucuuuacagagaagaccca

SEQ ID NO: 979220 - RNA, 19 nt, Artificial Sequence
  Description of Artificial Sequence: Synthetic oligonucleotide
  Sense strand starting at position 495 of SEQ ID NO: 914115
gccagugagucauugagaa

SEQ ID NO: 979221 - RNA, 19 nt, Artificial Sequence
  Description of Artificial Sequence: Synthetic oligonucleotide
  Antisense strand to SEQ ID NO: 979220
uucucaaugacucacuggc

SEQ ID NO: 979222 - RNA, 19 nt, Artificial Sequence
  Description of Artificial Sequence: Synthetic oligonucleotide
  Sense strand starting at position 2282 of SEQ ID NO: 914115
agcacacaaucguugacaa

SEQ ID NO: 979223 - RNA, 19 nt, Artificial Sequence
  Description of Artificial Sequence: Synthetic oligonucleotide
  Antisense strand to SEQ ID NO: 979222
uugucaacgauugugugcu

SEQ ID NO: 979224 - RNA, 19 nt, Artificial Sequence
  Description of Artificial Sequence: Synthetic oligonucleotide
  Sense strand starting at position 2283 of SEQ ID NO: 914115
gcacacaaucguugacaaa

SEQ ID NO: 979225 - RNA, 19 nt, Artificial Sequence
  Description of Artificial Sequence: Synthetic oligonucleotide
  Antisense strand to SEQ ID NO: 979224
uuugucaacgauugugugc

SEQ ID NO: 979226 - RNA, 19 nt, Artificial Sequence
  Description of Artificial Sequence: Synthetic oligonucleotide
  Sense strand starting at position 1590 of SEQ ID NO: 914115
cuuggagucucuuuccaau

SEQ ID NO: 979227 - RNA, 19 nt, Artificial Sequence
  Description of Artificial Sequence: Synthetic oligonucleotide
  Antisense strand to SEQ ID NO: 979226
auuggaaagagacuccaag

SEQ ID NO: 979228 - RNA, 19 nt, Artificial Sequence
  Description of Artificial Sequence: Synthetic oligonucleotide
  Sense strand starting at position 1547 of SEQ ID NO: 914115
cguuauacccucgaaucca

SEQ ID NO: 979229 - RNA, 19 nt, Artificial Sequence
  Description of Artificial Sequence: Synthetic oligonucleotide
  Antisense strand to SEQ ID NO: 979228
uggauucgaggguauaacg

SEQ ID NO: 979230 - RNA, 19 nt, Artificial Sequence
  Description of Artificial Sequence: Synthetic oligonucleotide
  Sense strand starting at position 1685 of SEQ ID NO: 914115
ucacgaugucagcaagcaa

SEQ ID NO: 979231 - RNA, 19 nt, Artificial Sequence
  Description of Artificial Sequence: Synthetic oligonucleotide
  Antisense strand to SEQ ID NO: 979230
uugcuugcugacaucguga

SEQ ID NO: 979232 - RNA, 19 nt, Artificial Sequence
  Description of Artificial Sequence: Synthetic oligonucleotide
  Sense strand starting at position 2032 of SEQ ID NO: 914115
gccugaacucgagagccuu

SEQ ID NO: 979233 - RNA, 19 nt, Artificial Sequence
  Description of Artificial Sequence: Synthetic oligonucleotide
  Antisense strand to SEQ ID NO: 979232
aaggcucucgaguucaggc

SEQ ID NO: 979234 - RNA, 19 nt, Artificial Sequence
  Description of Artificial Sequence: Synthetic oligonucleotide
  Sense strand starting at position 3369 of SEQ ID NO: 914115
uugggucuucucuguaaag

SEQ ID NO: 979235 - RNA, 19 nt, Artificial Sequence
  Description of Artificial Sequence: Synthetic oligonucleotide
  Antisense strand to SEQ ID NO: 979234
cuuuacagagaagacccaa

SEQ ID NO: 979236 - RNA, 19 nt, Artificial Sequence
  Description of Artificial Sequence: Synthetic oligonucleotide
  Sense strand starting at position 596 of SEQ ID NO: 914115
cgaugaaguucuucucuau

SEQ ID NO: 979237 - RNA, 19 nt, Artificial Sequence
  Description of Artificial Sequence: Synthetic oligonucleotide
  Antisense strand to SEQ ID NO: 979236
auagagaagaacuucaucg

SEQ ID NO: 979238 - RNA, 19 nt, Artificial Sequence
  Description of Artificial Sequence: Synthetic oligonucleotide
  Sense strand starting at position 801 of SEQ ID NO: 914115
agcaaucuccagggcuuua

SEQ ID NO: 979239 - RNA, 19 nt, Artificial Sequence
  Description of Artificial Sequence: Synthetic oligonucleotide
  Antisense strand to SEQ ID NO: 979238
uaaagcccuggagauugcu

SEQ ID NO: 979240 - RNA, 19 nt, Artificial Sequence
  Description of Artificial Sequence: Synthetic oligonucleotide
  Sense strand starting at position 420 of SEQ ID NO: 914115
gguaaugcuguaugggacu

SEQ ID NO: 979241 - RNA, 19 nt, Artificial Sequence
  Description of Artificial Sequence: Synthetic oligonucleotide
  Antisense strand to SEQ ID NO: 979240
agucccauacagcauuacc

SEQ ID NO: 979242 - RNA, 19 nt, Artificial Sequence
  Description of Artificial Sequence: Synthetic oligonucleotide
  Sense strand starting at position 2433 of SEQ ID NO: 914115
ucuguaaccucuguggauu

SEQ ID NO: 979243 - RNA, 19 nt, Artificial Sequence
  Description of Artificial Sequence: Synthetic oligonucleotide
  Antisense strand to SEQ ID NO: 979242
aauccacagagguuacaga

SEQ ID NO: 979244 - RNA, 19 nt, Artificial Sequence
  Description of Artificial Sequence: Synthetic oligonucleotide
  Sense strand starting at position 488 of SEQ ID NO: 914115
cccaaaugccagugaguca

SEQ ID NO: 979245 - RNA, 19 nt, Artificial Sequence
  Description of Artificial Sequence: Synthetic oligonucleotide
  Antisense strand to SEQ ID NO: 979244
ugacucacuggcauuuggg

SEQ ID NO: 979246 - RNA, 19 nt, Artificial Sequence
  Description of Artificial Sequence: Synthetic oligonucleotide
  Sense strand starting at position 3880 of SEQ ID NO: 914115
ggaguagaggugugcaauc

SEQ ID NO: 979247 - RNA, 19 nt, Artificial Sequence
  Description of Artificial Sequence: Synthetic oligonucleotide
  Antisense strand to SEQ ID NO: 979246
gauugcacaccucuacucc

SEQ ID NO: 979248 - RNA, 19 nt, Artificial Sequence
  Description of Artificial Sequence: Synthetic oligonucleotide
  Sense strand starting at position 2432 of SEQ ID NO: 914115
uucuguaaccucuguggau

SEQ ID NO: 979249 - RNA, 19 nt, Artificial Sequence
  Description of Artificial Sequence: Synthetic oligonucleotide
  Antisense strand to SEQ ID NO: 979248
auccacagagguuacagaa

SEQ ID NO: 979250 - RNA, 19 nt, Artificial Sequence
  Description of Artificial Sequence: Synthetic oligonucleotide
  Sense strand starting at position 2751 of SEQ ID NO: 914116
uaggguuagggcuacagau

SEQ ID NO: 979251 - RNA, 19 nt, Artificial Sequence
  Description of Artificial Sequence: Synthetic oligonucleotide
  Antisense strand to SEQ ID NO: 979250
aucuguagcccuaacccua

SEQ ID NO: 979252 - RNA, 19 nt, Artificial Sequence
  Description of Artificial Sequence: Synthetic oligonucleotide
  Sense strand starting at position 2753 of SEQ ID NO: 914116
ggguuagggcuacagauua

SEQ ID NO: 979253 - RNA, 19 nt, Artificial Sequence
  Description of Artificial Sequence: Synthetic oligonucleotide
  Antisense strand to SEQ ID NO: 979252
uaaucuguagcccuaaccc

SEQ ID NO: 979254 - RNA, 19 nt, Artificial Sequence
  Description of Artificial Sequence: Synthetic oligonucleotide
  Sense strand starting at position 3535 of SEQ ID NO: 914116
gguguuggauuuagggauu

SEQ ID NO: 979255 - RNA, 19 nt, Artificial Sequence
  Description of Artificial Sequence: Synthetic oligonucleotide
  Antisense strand to SEQ ID NO: 979254
aaucccuaaauccaacacc

SEQ ID NO: 979256 - RNA, 19 nt, Artificial Sequence
  Description of Artificial Sequence: Synthetic oligonucleotide
  Sense strand starting at position 1482 of SEQ ID NO: 914116
uaggaauucccuugggauu

SEQ ID NO: 979257 - RNA, 19 nt, Artificial Sequence
  Description of Artificial Sequence: Synthetic oligonucleotide
  Antisense strand to SEQ ID NO: 979256
aaucccaagggaauuccua

SEQ ID NO: 979258 - RNA, 19 nt, Artificial Sequence
  Description of Artificial Sequence: Synthetic oligonucleotide
  Sense strand starting at position 3772 of SEQ ID NO: 914116
aaggguuaugguuaagggu

SEQ ID NO: 979259 - RNA, 19 nt, Artificial Sequence
  Description of Artificial Sequence: Synthetic oligonucleotide
  Antisense strand to SEQ ID NO: 979258
acccuuaaccauaacccuu

SEQ ID NO: 979260 - RNA, 19 nt, Artificial Sequence
  Description of Artificial Sequence: Synthetic oligonucleotide
  Sense strand starting at position 620 of SEQ ID NO: 914116
agaagucuauagccaggaa

SEQ ID NO: 979261 - RNA, 19 nt, Artificial Sequence
  Description of Artificial Sequence: Synthetic oligonucleotide
  Antisense strand to SEQ ID NO: 979260
uuccuggcuauagacuucu

SEQ ID NO: 979262 - RNA, 19 nt, Artificial Sequence
  Description of Artificial Sequence: Synthetic oligonucleotide
  Sense strand starting at position 3351 of SEQ ID NO: 914116
uagcguuguguguuaggau

SEQ ID NO: 979263 - RNA, 19 nt, Artificial Sequence
  Description of Artificial Sequence: Synthetic oligonucleotide
  Antisense strand to SEQ ID NO: 979262
auccuaacacacaacgcua

SEQ ID NO: 979264 - RNA, 19 nt, Artificial Sequence
  Description of Artificial Sequence: Synthetic oligonucleotide
  Sense strand starting at position 1245 of SEQ ID NO: 914116
ucuggacuucuguacaacu

SEQ ID NO: 979265 - RNA, 19 nt, Artificial Sequence
  Description of Artificial Sequence: Synthetic oligonucleotide
  Antisense strand to SEQ ID NO: 979264
aguuguacagaaguccaga

SEQ ID NO: 979266 - RNA, 19 nt, Artificial Sequence
  Description of Artificial Sequence: Synthetic oligonucleotide
  Sense strand starting at position 3360 of SEQ ID NO: 914116
guguuaggauuugugguua

SEQ ID NO: 979267 - RNA, 19 nt, Artificial Sequence
  Description of Artificial Sequence: Synthetic oligonucleotide
  Antisense strand to SEQ ID NO: 979266
uaaccacaaauccuaacac

SEQ ID NO: 979268 - RNA, 19 nt, Artificial Sequence
  Description of Artificial Sequence: Synthetic oligonucleotide
  Sense strand starting at position 3364 of SEQ ID NO: 914116
uaggauuugugguuacggu

SEQ ID NO: 979269 - RNA, 19 nt, Artificial Sequence
  Description of Artificial Sequence: Synthetic oligonucleotide
  Antisense strand to SEQ ID NO: 979268
accguaaccacaaauccua

SEQ ID NO: 979270 - RNA, 19 nt, Artificial Sequence
  Description of Artificial Sequence: Synthetic oligonucleotide
  Sense strand starting at position 3485 of SEQ ID NO: 914116
agguuaugaguugagguua

SEQ ID NO: 979271 - RNA, 19 nt, Artificial Sequence
  Description of Artificial Sequence: Synthetic oligonucleotide
  Antisense strand to SEQ ID NO: 979270
uaaccucaacucauaaccu

SEQ ID NO: 979272 - RNA, 19 nt, Artificial Sequence
  Description of Artificial Sequence: Synthetic oligonucleotide
  Sense strand starting at position 3662 of SEQ ID NO: 914116
guguuagcaguuaggguua

SEQ ID NO: 979273 - RNA, 19 nt, Artificial Sequence
  Description of Artificial Sequence: Synthetic oligonucleotide
  Antisense strand to SEQ ID NO: 979272
uaacccuaacugcuaacac

SEQ ID NO: 979274 - RNA, 19 nt, Artificial Sequence
  Description of Artificial Sequence: Synthetic oligonucleotide
  Sense strand starting at position 3780 of SEQ ID NO: 914116
ugguuaagggucagcguua

SEQ ID NO: 979275 - RNA, 19 nt, Artificial Sequence
  Description of Artificial Sequence: Synthetic oligonucleotide
  Antisense strand to SEQ ID NO: 979274
uaacgcugacccuuaacca

SEQ ID NO: 979276 - RNA, 19 nt, Artificial Sequence
  Description of Artificial Sequence: Synthetic oligonucleotide
  Sense strand starting at position 3161 of SEQ ID NO: 914116
uaggguuagcauuaggagu

SEQ ID NO: 979277 - RNA, 19 nt, Artificial Sequence
  Description of Artificial Sequence: Synthetic oligonucleotide
  Antisense strand to SEQ ID NO: 979276
acuccuaaugcuaacccua

SEQ ID NO: 979278 - RNA, 19 nt, Artificial Sequence
  Description of Artificial Sequence: Synthetic oligonucleotide
  Sense strand starting at position 3155 of SEQ ID NO: 914116
aaggguuaggguuagcauu

SEQ ID NO: 979279 - RNA, 19 nt, Artificial Sequence
  Description of Artificial Sequence: Synthetic oligonucleotide
  Antisense strand to SEQ ID NO: 979278
aaugcuaacccuaacccuu

SEQ ID NO: 979280 - RNA, 19 nt, Artificial Sequence
  Description of Artificial Sequence: Synthetic oligonucleotide
  Sense strand starting at position 1691 of SEQ ID NO: 914116
gaagaaacccgcuaagucu

SEQ ID NO: 979281 - RNA, 19 nt, Artificial Sequence
  Description of Artificial Sequence: Synthetic oligonucleotide
  Antisense strand to SEQ ID NO: 979280
agacuuagcggguuucuuc

SEQ ID NO: 979282 - RNA, 19 nt, Artificial Sequence
  Description of Artificial Sequence: Synthetic oligonucleotide
  Sense strand starting at position 723 of SEQ ID NO: 914116
agcaguuugaacuaaggca

SEQ ID NO: 979283 - RNA, 19 nt, Artificial Sequence
  Description of Artificial Sequence: Synthetic oligonucleotide
  Antisense strand to SEQ ID NO: 979282
ugccuuaguucaaacugcu

SEQ ID NO: 979284 - RNA, 19 nt, Artificial Sequence
  Description of Artificial Sequence: Synthetic oligonucleotide
  Sense strand starting at position 3168 of SEQ ID NO: 914116
agcauuaggaguuacaguu

SEQ ID NO: 979285 - RNA, 19 nt, Artificial Sequence
  Description of Artificial Sequence: Synthetic oligonucleotide
  Antisense strand to SEQ ID NO: 979284
aacuguaacuccuaaugcu

SEQ ID NO: 979286 - RNA, 19 nt, Artificial Sequence
  Description of Artificial Sequence: Synthetic oligonucleotide
  Sense strand starting at position 414 of SEQ ID NO: 914116
guagcuggucacuauagaa

SEQ ID NO: 979287 - RNA, 19 nt, Artificial Sequence
  Description of Artificial Sequence: Synthetic oligonucleotide
  Antisense strand to SEQ ID NO: 979286
uucuauagugaccagcuac

SEQ ID NO: 979288 - RNA, 19 nt, Artificial Sequence
  Description of Artificial Sequence: Synthetic oligonucleotide
  Sense strand starting at position 3359 of SEQ ID NO: 914116
uguguuaggauuugugguu

SEQ ID NO: 979289 - RNA, 19 nt, Artificial Sequence
  Description of Artificial Sequence: Synthetic oligonucleotide
  Antisense strand to SEQ ID NO: 979288
aaccacaaauccuaacaca

SEQ ID NO: 979290 - RNA, 19 nt, Artificial Sequence
  Description of Artificial Sequence: Synthetic oligonucleotide
  Sense strand starting at position 388 of SEQ ID NO: 914116
ggaaucuuguccuuuaaau

SEQ ID NO: 979291 - RNA, 19 nt, Artificial Sequence
  Description of Artificial Sequence: Synthetic oligonucleotide
  Antisense strand to SEQ ID NO: 979290
auuuaaaggacaagauucc

SEQ ID NO: 979292 - RNA, 19 nt, Artificial Sequence
  Description of Artificial Sequence: Synthetic oligonucleotide
  Sense strand starting at position 3655 of SEQ ID NO: 914116
uggguuaguguuagcaguu

SEQ ID NO: 979293 - RNA, 19 nt, Artificial Sequence
  Description of Artificial Sequence: Synthetic oligonucleotide
  Antisense strand to SEQ ID NO: 979292
aacugcuaacacuaaccca

SEQ ID NO: 979294 - RNA, 19 nt, Artificial Sequence
  Description of Artificial Sequence: Synthetic oligonucleotide
  Sense strand starting at position 2054 of SEQ ID NO: 914116
acuagugcgcaugcguaaa

SEQ ID NO: 979295 - RNA, 19 nt, Artificial Sequence
  Description of Artificial Sequence: Synthetic oligonucleotide
  Antisense strand to SEQ ID NO: 979294
uuuacgcaugcgcacuagu

SEQ ID NO: 979296 - RNA, 19 nt, Artificial Sequence
  Description of Artificial Sequence: Synthetic oligonucleotide
  Sense strand starting at position 1530 of SEQ ID NO: 914116
uuaagagguguguauguaa

SEQ ID NO: 979297 - RNA, 19 nt, Artificial Sequence
  Description of Artificial Sequence: Synthetic oligonucleotide
  Antisense strand to SEQ ID NO: 979296
uuacauacacaccucuuaa

SEQ ID NO: 979298 - RNA, 19 nt, Artificial Sequence
  Description of Artificial Sequence: Synthetic oligonucleotide
  Sense strand starting at position 862 of SEQ ID NO: 914116
gcgucuguccuguuuacuu

SEQ ID NO: 979299 - RNA, 19 nt, Artificial Sequence
  Description of Artificial Sequence: Synthetic oligonucleotide
  Antisense strand to SEQ ID NO: 979298
aaguaaacaggacagacgc

SEQ ID NO: 979300 - RNA, 19 nt, Artificial Sequence
  Description of Artificial Sequence: Synthetic oligonucleotide
  Sense strand starting at position 385 of SEQ ID NO: 914116
acuggaaucuuguccuuua

SEQ ID NO: 979301 - RNA, 19 nt, Artificial Sequence
  Description of Artificial Sequence: Synthetic oligonucleotide
  Antisense strand to SEQ ID NO: 979300
uaaaggacaagauuccagu

SEQ ID NO: 979302 - RNA, 19 nt, Artificial Sequence
  Description of Artificial Sequence: Synthetic oligonucleotide
  Sense strand starting at position 386 of SEQ ID NO: 914116
cuggaaucuuguccuuuaa

SEQ ID NO: 979303 - RNA, 19 nt, Artificial Sequence
  Description of Artificial Sequence: Synthetic oligonucleotide
  Antisense strand to SEQ ID NO: 979302
uuaaaggacaagauuccag

SEQ ID NO: 979304 - RNA, 19 nt, Artificial Sequence
  Description of Artificial Sequence: Synthetic oligonucleotide
  Sense strand starting at position 1543 of SEQ ID NO: 914116
auguaaagucugugggaca

SEQ ID NO: 979305 - RNA, 19 nt, Artificial Sequence
  Description of Artificial Sequence: Synthetic oligonucleotide
  Antisense strand to SEQ ID NO: 979304
ugucccacagacuuuacau

SEQ ID NO: 979306 - RNA, 19 nt, Artificial Sequence
  Description of Artificial Sequence: Synthetic oligonucleotide
  Sense strand starting at position 741 of SEQ ID NO: 914116
acaagcgacauugguuaaa

SEQ ID NO: 979307 - RNA, 19 nt, Artificial Sequence
  Description of Artificial Sequence: Synthetic oligonucleotide
  Antisense strand to SEQ ID NO: 979306
uuuaaccaaugucgcuugu

SEQ ID NO: 979308 - RNA, 19 nt, Artificial Sequence
  Description of Artificial Sequence: Synthetic oligonucleotide
  Sense strand starting at position 3175 of SEQ ID NO: 914116
ggaguuacaguuggguuaa

SEQ ID NO: 979309 - RNA, 19 nt, Artificial Sequence
  Description of Artificial Sequence: Synthetic oligonucleotide
  Antisense strand to SEQ ID NO: 979308
uuaacccaacuguaacucc

SEQ ID NO: 979310 - RNA, 19 nt, Artificial Sequence
  Description of Artificial Sequence: Synthetic oligonucleotide
  Sense strand starting at position 3174 of SEQ ID NO: 914116
aggaguuacaguuggguua

SEQ ID NO: 979311 - RNA, 19 nt, Artificial Sequence
  Description of Artificial Sequence: Synthetic oligonucleotide
  Antisense strand to SEQ ID NO: 979310
uaacccaacuguaacuccu

SEQ ID NO: 979312 - RNA, 19 nt, Artificial Sequence
  Description of Artificial Sequence: Synthetic oligonucleotide
  Sense strand starting at position 3754 of SEQ ID NO: 914116
gcguuagugguuaggguua

SEQ ID NO: 979313 - RNA, 19 nt, Artificial Sequence
  Description of Artificial Sequence: Synthetic oligonucleotide
  Antisense strand to SEQ ID NO: 979312
uaacccuaaccacuaacgc

SEQ ID NO: 979314 - RNA, 19 nt, Artificial Sequence
  Description of Artificial Sequence: Synthetic oligonucleotide
  Sense strand starting at position 3667 of SEQ ID NO: 914116
agcaguuaggguuaagguu

SEQ ID NO: 979315 - RNA, 19 nt, Artificial Sequence
  Description of Artificial Sequence: Synthetic oligonucleotide
  Antisense strand to SEQ ID NO: 979314
aaccuuaacccuaacugcu

SEQ ID NO: 979316 - RNA, 19 nt, Artificial Sequence
  Description of Artificial Sequence: Synthetic oligonucleotide
  Sense strand starting at position 3484 of SEQ ID NO: 914116
gagguuaugaguugagguu

SEQ ID NO: 979317 - RNA, 19 nt, Artificial Sequence
  Description of Artificial Sequence: Synthetic oligonucleotide
  Antisense strand to SEQ ID NO: 979316
aaccucaacucauaaccuc

SEQ ID NO: 979318 - RNA, 19 nt, Artificial Sequence
  Description of Artificial Sequence: Synthetic oligonucleotide
  Sense strand starting at position 3648 of SEQ ID NO: 914116
aggguuauggguuaguguu

SEQ ID NO: 979319 - RNA, 19 nt, Artificial Sequence
  Description of Artificial Sequence: Synthetic oligonucleotide
  Antisense strand to SEQ ID NO: 979318
aacacuaacccauaacccu

SEQ ID NO: 979320 - RNA, 19 nt, Artificial Sequence
  Description of Artificial Sequence: Synthetic oligonucleotide
  Sense strand starting at position 3051 of SEQ ID NO: 914116
guuuguaaggguuaggguu

SEQ ID NO: 979321 - RNA, 19 nt, Artificial Sequence
  Description of Artificial Sequence: Synthetic oligonucleotide
  Antisense strand to SEQ ID NO: 979320
aacccuaacccuuacaaac

SEQ ID NO: 979322 - RNA, 19 nt, Artificial Sequence
  Description of Artificial Sequence: Synthetic oligonucleotide
  Sense strand starting at position 658 of SEQ ID NO: 914116
ugaauugcaccuugaucuu

SEQ ID NO: 979323 - RNA, 19 nt, Artificial Sequence
  Description of Artificial Sequence: Synthetic oligonucleotide
  Antisense strand to SEQ ID NO: 979322
aagaucaaggugcaauuca

SEQ ID NO: 979324 - RNA, 19 nt, Artificial Sequence
  Description of Artificial Sequence: Synthetic oligonucleotide
  Sense strand starting at position 2650 of SEQ ID NO: 914116
ggaagaacuuuaccgugca

SEQ ID NO: 979325 - RNA, 19 nt, Artificial Sequence
  Description of Artificial Sequence: Synthetic oligonucleotide
  Antisense strand to SEQ ID NO: 979324
ugcacgguaaaguucuucc

SEQ ID NO: 979326 - RNA, 19 nt, Artificial Sequence
  Description of Artificial Sequence: Synthetic oligonucleotide
  Sense strand starting at position 537 of SEQ ID NO: 914116
gcccucagcaaugggauua

SEQ ID NO: 979327 - RNA, 19 nt, Artificial Sequence
  Description of Artificial Sequence: Synthetic oligonucleotide
  Antisense strand to SEQ ID NO: 979326
uaaucccauugcugagggc

SEQ ID NO: 979328 - RNA, 19 nt, Artificial Sequence
  Description of Artificial Sequence: Synthetic oligonucleotide
  Sense strand starting at position 411 of SEQ ID NO: 914116
ucuguagcuggucacuaua

SEQ ID NO: 979329 - RNA, 19 nt, Artificial Sequence
  Description of Artificial Sequence: Synthetic oligonucleotide
  Antisense strand to SEQ ID NO: 979328
uauagugaccagcuacaga

SEQ ID NO: 979330 - RNA, 19 nt, Artificial Sequence
  Description of Artificial Sequence: Synthetic oligonucleotide
  Sense strand starting at position 34 of SEQ ID NO: 914117
aaggguuaugguuaagggu

SEQ ID NO: 979331 - RNA, 19 nt, Artificial Sequence
  Description of Artificial Sequence: Synthetic oligonucleotide
  Antisense strand to SEQ ID NO: 979330
acccuuaaccauaacccuu

SEQ ID NO: 979332 - RNA, 19 nt, Artificial Sequence
  Description of Artificial Sequence: Synthetic oligonucleotide
  Sense strand starting at position 42 of SEQ ID NO: 914117
ugguuaagggucagcguua

SEQ ID NO: 979333 - RNA, 19 nt, Artificial Sequence
  Description of Artificial Sequence: Synthetic oligonucleotide
  Antisense strand to SEQ ID NO: 979332
uaacgcugacccuuaacca

SEQ ID NO: 979334 - RNA, 19 nt, Artificial Sequence
  Description of Artificial Sequence: Synthetic oligonucleotide
  Sense strand starting at position 16 of SEQ ID NO: 914117
gcguuagugguuaggguua

SEQ ID NO: 979335 - RNA, 19 nt, Artificial Sequence
  Description of Artificial Sequence: Synthetic oligonucleotide
  Antisense strand to SEQ ID NO: 979334
uaacccuaaccacuaacgc

SEQ ID NO: 979336 - RNA, 19 nt, Artificial Sequence
  Description of Artificial Sequence: Synthetic oligonucleotide
  Sense strand starting at position 36 of SEQ ID NO: 914117
ggguuaugguuaaggguca

SEQ ID NO: 979337 - RNA, 19 nt, Artificial Sequence
  Description of Artificial Sequence: Synthetic oligonucleotide
  Antisense strand to SEQ ID NO: 979336
ugacccuuaaccauaaccc

SEQ ID NO: 979338 - RNA, 19 nt, Artificial Sequence
  Description of Artificial Sequence: Synthetic oligonucleotide
  Sense strand starting at position 30 of SEQ ID NO: 914117
gguuaaggguuaugguuaa

SEQ ID NO: 979339 - RNA, 19 nt, Artificial Sequence
  Description of Artificial Sequence: Synthetic oligonucleotide
  Antisense strand to SEQ ID NO: 979338
uuaaccauaacccuuaacc

SEQ ID NO: 979340 - RNA, 19 nt, Artificial Sequence
  Description of Artificial Sequence: Synthetic oligonucleotide
  Sense strand starting at position 762 of SEQ ID NO: 914118
aagaaauggugauuaucuc

SEQ ID NO: 979341 - RNA, 19 nt, Artificial Sequence
  Description of Artificial Sequence: Synthetic oligonucleotide
  Antisense strand to SEQ ID NO: 979340
gagauaaucaccauuucuu

SEQ ID NO: 979342 - RNA, 19 nt, Artificial Sequence
  Description of Artificial Sequence: Synthetic oligonucleotide
  Sense strand starting at position 157 of SEQ ID NO: 914118
ccuggcuccgucuucgaau

SEQ ID NO: 979343 - RNA, 19 nt, Artificial Sequence
  Description of Artificial Sequence: Synthetic oligonucleotide
  Antisense strand to SEQ ID NO: 979342
auucgaagacggagccagg

SEQ ID NO: 979344 - RNA, 19 nt, Artificial Sequence
  Description of Artificial Sequence: Synthetic oligonucleotide
  Sense strand starting at position 2993 of SEQ ID NO: 914118
uguuacaaggcauaacauu

SEQ ID NO: 979345 - RNA, 19 nt, Artificial Sequence
  Description of Artificial Sequence: Synthetic oligonucleotide
  Antisense strand to SEQ ID NO: 979344
aauguuaugccuuguaaca

SEQ ID NO: 979346 - RNA, 19 nt, Artificial Sequence
  Description of Artificial Sequence: Synthetic oligonucleotide
  Sense strand starting at position 2967 of SEQ ID NO: 914118
cuagguuuccauuacgaga

SEQ ID NO: 979347 - RNA, 19 nt, Artificial Sequence
  Description of Artificial Sequence: Synthetic oligonucleotide
  Antisense strand to SEQ ID NO: 979346
ucucguaauggaaaccuag

SEQ ID NO: 979348 - RNA, 19 nt, Artificial Sequence
  Description of Artificial Sequence: Synthetic oligonucleotide
  Sense strand starting at position 2891 of SEQ ID NO: 914118
uacauacguggucauggaa

SEQ ID NO: 979349 - RNA, 19 nt, Artificial Sequence
  Description of Artificial Sequence: Synthetic oligonucleotide
  Antisense strand to SEQ ID NO: 979348
uuccaugaccacguaugua

SEQ ID NO: 979350 - RNA, 19 nt, Artificial Sequence
  Description of Artificial Sequence: Synthetic oligonucleotide
  Sense strand starting at position 1331 of SEQ ID NO: 914118
auaucaguuuagucagaga

SEQ ID NO: 979351 - RNA, 19 nt, Artificial Sequence
  Description of Artificial Sequence: Synthetic oligonucleotide
  Antisense strand to SEQ ID NO: 979350
ucucugacuaaacugauau

SEQ ID NO: 979352 - RNA, 19 nt, Artificial Sequence
  Description of Artificial Sequence: Synthetic oligonucleotide
  Sense strand starting at position 325 of SEQ ID NO: 914118
gccugucuagagggaagaa

SEQ ID NO: 979353 - RNA, 19 nt, Artificial Sequence
  Description of Artificial Sequence: Synthetic oligonucleotide
  Antisense strand to SEQ ID NO: 979352
uucuucccucuagacaggc

SEQ ID NO: 979354 - RNA, 19 nt, Artificial Sequence
  Description of Artificial Sequence: Synthetic oligonucleotide
  Sense strand starting at position 768 of SEQ ID NO: 914118
uggugauuaucuccacaag

SEQ ID NO: 979355 - RNA, 19 nt, Artificial Sequence
  Description of Artificial Sequence: Synthetic oligonucleotide
  Antisense strand to SEQ ID NO: 979354
cuuguggagauaaucacca

SEQ ID NO: 979356 - RNA, 19 nt, Artificial Sequence
  Description of Artificial Sequence: Synthetic oligonucleotide
  Sense strand starting at position 769 of SEQ ID NO: 914118
ggugauuaucuccacaagc

SEQ ID NO: 979357 - RNA, 19 nt, Artificial Sequence
  Description of Artificial Sequence: Synthetic oligonucleotide
  Antisense strand to SEQ ID NO: 979356
gcuuguggagauaaucacc

SEQ ID NO: 979358 - RNA, 19 nt, Artificial Sequence
  Description of Artificial Sequence: Synthetic oligonucleotide
  Sense strand starting at position 876 of SEQ ID NO: 914118
aacaguacuccagguugga

SEQ ID NO: 979359 - RNA, 19 nt, Artificial Sequence
  Description of Artificial Sequence: Synthetic oligonucleotide
  Antisense strand to SEQ ID NO: 979358
uccaaccuggaguacuguu

SEQ ID NO: 979360 - RNA, 19 nt, Artificial Sequence
  Description of Artificial Sequence: Synthetic oligonucleotide
  Sense strand starting at position 438 of SEQ ID NO: 914118
acuagaaauggugguuauu

SEQ ID NO: 979361 - RNA, 19 nt, Artificial Sequence
  Description of Artificial Sequence: Synthetic oligonucleotide
  Antisense strand to SEQ ID NO: 979360
aauaaccaccauuucuagu

SEQ ID NO: 979362 - RNA, 19 nt, Artificial Sequence
  Description of Artificial Sequence: Synthetic oligonucleotide
  Sense strand starting at position 170 of SEQ ID NO: 914118
ucgaaucugagauguugaa

SEQ ID NO: 979363 - RNA, 19 nt, Artificial Sequence
  Description of Artificial Sequence: Synthetic oligonucleotide
  Antisense strand to SEQ ID NO: 979362
uucaacaucucagauucga

SEQ ID NO: 979364 - RNA, 19 nt, Artificial Sequence
  Description of Artificial Sequence: Synthetic oligonucleotide
  Sense strand starting at position 2982 of SEQ ID NO: 914118
gagaaugucucuguuacaa

SEQ ID NO: 979365 - RNA, 19 nt, Artificial Sequence
  Description of Artificial Sequence: Synthetic oligonucleotide
  Antisense strand to SEQ ID NO: 979364
uuguaacagagacauucuc

SEQ ID NO: 979366 - RNA, 19 nt, Artificial Sequence
  Description of Artificial Sequence: Synthetic oligonucleotide
  Sense strand starting at position 1549 of SEQ ID NO: 914118
cgcuacucccacuaugaga

SEQ ID NO: 979367 - RNA, 19 nt, Artificial Sequence
  Description of Artificial Sequence: Synthetic oligonucleotide
  Antisense strand to SEQ ID NO: 979366
ucucauagugggaguagcg

SEQ ID NO: 979368 - RNA, 19 nt, Artificial Sequence
  Description of Artificial Sequence: Synthetic oligonucleotide
  Sense strand starting at position 1052 of SEQ ID NO: 914118
auuuaauccuuagaauggu

SEQ ID NO: 979369 - RNA, 19 nt, Artificial Sequence
  Description of Artificial Sequence: Synthetic oligonucleotide
  Antisense strand to SEQ ID NO: 979368
accauucuaaggauuaaau

SEQ ID NO: 979370 - RNA, 19 nt, Artificial Sequence
  Description of Artificial Sequence: Synthetic oligonucleotide
  Sense strand starting at position 2890 of SEQ ID NO: 914118
auacauacguggucaugga

SEQ ID NO: 979371 - RNA, 19 nt, Artificial Sequence
  Description of Artificial Sequence: Synthetic oligonucleotide
  Antisense strand to SEQ ID NO: 979370
uccaugaccacguauguau

SEQ ID NO: 979372 - RNA, 19 nt, Artificial Sequence
  Description of Artificial Sequence: Synthetic oligonucleotide
  Sense strand starting at position 2064 of SEQ ID NO: 914118
guguuacuccuagagcuaa

SEQ ID NO: 979373 - RNA, 19 nt, Artificial Sequence
  Description of Artificial Sequence: Synthetic oligonucleotide
  Antisense strand to SEQ ID NO: 979372
uuagcucuaggaguaacac

SEQ ID NO: 979374 - RNA, 19 nt, Artificial Sequence
  Description of Artificial Sequence: Synthetic oligonucleotide
  Sense strand starting at position 1492 of SEQ ID NO: 914118
ccuggaaaccgcgaauucu

SEQ ID NO: 979375 - RNA, 19 nt, Artificial Sequence
  Description of Artificial Sequence: Synthetic oligonucleotide
  Antisense strand to SEQ ID NO: 979374
agaauucgcgguuuccagg

SEQ ID NO: 979376 - RNA, 19 nt, Artificial Sequence
  Description of Artificial Sequence: Synthetic oligonucleotide
  Sense strand starting at position 267 of SEQ ID NO: 914118
uuuacuuugcaggguaaga

SEQ ID NO: 979377 - RNA, 19 nt, Artificial Sequence
  Description of Artificial Sequence: Synthetic oligonucleotide
  Antisense strand to SEQ ID NO: 979376
ucuuacccugcaaaguaaa

SEQ ID NO: 979378 - RNA, 19 nt, Artificial Sequence
  Description of Artificial Sequence: Synthetic oligonucleotide
  Sense strand starting at position 805 of SEQ ID NO: 914118
uaucuauauuggcugguaa

SEQ ID NO: 979379 - RNA, 19 nt, Artificial Sequence
  Description of Artificial Sequence: Synthetic oligonucleotide
  Antisense strand to SEQ ID NO: 979378
uuaccagccaauauagaua

SEQ ID NO: 979380 - RNA, 19 nt, Artificial Sequence
  Description of Artificial Sequence: Synthetic oligonucleotide
  Sense strand starting at position 806 of SEQ ID NO: 914118
aucuauauuggcugguaau

SEQ ID NO: 979381 - RNA, 19 nt, Artificial Sequence
  Description of Artificial Sequence: Synthetic oligonucleotide
  Antisense strand to SEQ ID NO: 979380
auuaccagccaauauagau

SEQ ID NO: 979382 - RNA, 19 nt, Artificial Sequence
  Description of Artificial Sequence: Synthetic oligonucleotide
  Sense strand starting at position 3564 of SEQ ID NO: 914118
gcuggagugcaauggagau

SEQ ID NO: 979383 - RNA, 19 nt, Artificial Sequence
  Description of Artificial Sequence: Synthetic oligonucleotide
  Antisense strand to SEQ ID NO: 979382
aucuccauugcacuccagc

SEQ ID NO: 979384 - RNA, 19 nt, Artificial Sequence
  Description of Artificial Sequence: Synthetic oligonucleotide
  Sense strand starting at position 2956 of SEQ ID NO: 914118
ucuacuugucucuagguuu

SEQ ID NO: 979385 - RNA, 19 nt, Artificial Sequence
  Description of Artificial Sequence: Synthetic oligonucleotide
  Antisense strand to SEQ ID NO: 979384
aaaccuagagacaaguaga

SEQ ID NO: 979386 - RNA, 19 nt, Artificial Sequence
  Description of Artificial Sequence: Synthetic oligonucleotide
  Sense strand starting at position 2334 of SEQ ID NO: 914118
augcacucucgcuauauaa

SEQ ID NO: 979387 - RNA, 19 nt, Artificial Sequence
  Description of Artificial Sequence: Synthetic oligonucleotide
  Antisense strand to SEQ ID NO: 979386
uuauauagcgagagugcau

SEQ ID NO: 979388 - RNA, 19 nt, Artificial Sequence
  Description of Artificial Sequence: Synthetic oligonucleotide
  Sense strand starting at position 2336 of SEQ ID NO: 914118
gcacucucgcuauauaaau

SEQ ID NO: 979389 - RNA, 19 nt, Artificial Sequence
  Description of Artificial Sequence: Synthetic oligonucleotide
  Antisense strand to SEQ ID NO: 979388
auuuauauagcgagagugc

SEQ ID NO: 979390 - RNA, 19 nt, Artificial Sequence
  Description of Artificial Sequence: Synthetic oligonucleotide
  Sense strand starting at position 3102 of SEQ ID NO: 914118
augccucuauguccuagaa

SEQ ID NO: 979391 - RNA, 19 nt, Artificial Sequence
  Description of Artificial Sequence: Synthetic oligonucleotide
  Antisense strand to SEQ ID NO: 979390
uucuaggacauagaggcau

SEQ ID NO: 979392 - RNA, 19 nt, Artificial Sequence
  Description of Artificial Sequence: Synthetic oligonucleotide
  Sense strand starting at position 985 of SEQ ID NO: 914118
aguaguaguggcuaccauu

SEQ ID NO: 979393 - RNA, 19 nt, Artificial Sequence
  Description of Artificial Sequence: Synthetic oligonucleotide
  Antisense strand to SEQ ID NO: 979392
aaugguagccacuacuacu

SEQ ID NO: 979394 - RNA, 19 nt, Artificial Sequence
  Description of Artificial Sequence: Synthetic oligonucleotide
  Sense strand starting at position 1481 of SEQ ID NO: 914118
uuccucugcucccuggaaa

SEQ ID NO: 979395 - RNA, 19 nt, Artificial Sequence
  Description of Artificial Sequence: Synthetic oligonucleotide
  Antisense strand to SEQ ID NO: 979394
uuuccagggagcagaggaa

SEQ ID NO: 979396 - RNA, 19 nt, Artificial Sequence
  Description of Artificial Sequence: Synthetic oligonucleotide
  Sense strand starting at position 816 of SEQ ID NO: 914118
gcugguaauucucuacuag

SEQ ID NO: 979397 - RNA, 19 nt, Artificial Sequence
  Description of Artificial Sequence: Synthetic oligonucleotide
  Antisense strand to SEQ ID NO: 979396
cuaguagagaauuaccagc

SEQ ID NO: 979398 - RNA, 19 nt, Artificial Sequence
  Description of Artificial Sequence: Synthetic oligonucleotide
  Sense strand starting at position 2980 of SEQ ID NO: 914118
acgagaaugucucuguuac

SEQ ID NO: 979399 - RNA, 19 nt, Artificial Sequence
  Description of Artificial Sequence: Synthetic oligonucleotide
  Antisense strand to SEQ ID NO: 979398
guaacagagacauucucgu

SEQ ID NO: 979400 - RNA, 19 nt, Artificial Sequence
  Description of Artificial Sequence: Synthetic oligonucleotide
  Sense strand starting at position 903 of SEQ ID NO: 914118
agcgguauucugggagauu

SEQ ID NO: 979401 - RNA, 19 nt, Artificial Sequence
  Description of Artificial Sequence: Synthetic oligonucleotide
  Antisense strand to SEQ ID NO: 979400
aaucucccagaauaccgcu

SEQ ID NO: 979402 - RNA, 19 nt, Artificial Sequence
  Description of Artificial Sequence: Synthetic oligonucleotide
  Sense strand starting at position 2981 of SEQ ID NO: 914118
cgagaaugucucuguuaca

SEQ ID NO: 979403 - RNA, 19 nt, Artificial Sequence
  Description of Artificial Sequence: Synthetic oligonucleotide
  Antisense strand to SEQ ID NO: 979402
uguaacagagacauucucg

SEQ ID NO: 979404 - RNA, 19 nt, Artificial Sequence
  Description of Artificial Sequence: Synthetic oligonucleotide
  Sense strand starting at position 165 of SEQ ID NO: 914118
cgucuucgaaucugagaug

SEQ ID NO: 979405 - RNA, 19 nt, Artificial Sequence
  Description of Artificial Sequence: Synthetic oligonucleotide
  Antisense strand to SEQ ID NO: 979404
caucucagauucgaagacg

SEQ ID NO: 979406 - RNA, 19 nt, Artificial Sequence
  Description of Artificial Sequence: Synthetic oligonucleotide
  Sense strand starting at position 3065 of SEQ ID NO: 914118
ccaccuaguguaugcuaaa

SEQ ID NO: 979407 - RNA, 19 nt, Artificial Sequence
  Description of Artificial Sequence: Synthetic oligonucleotide
  Antisense strand to SEQ ID NO: 979406
uuuagcauacacuaggugg

SEQ ID NO: 979408 - RNA, 19 nt, Artificial Sequence
  Description of Artificial Sequence: Synthetic oligonucleotide
  Sense strand starting at position 2978 of SEQ ID NO: 914118
uuacgagaaugucucuguu

SEQ ID NO: 979409 - RNA, 19 nt, Artificial Sequence
  Description of Artificial Sequence: Synthetic oligonucleotide
  Antisense strand to SEQ ID NO: 979408
aacagagacauucucguaa

SEQ ID NO: 979410 - RNA, 19 nt, Artificial Sequence
  Description of Artificial Sequence: Synthetic oligonucleotide
  Sense strand starting at position 3015 of SEQ ID NO: 914118
gugcuauaacugugauuau

SEQ ID NO: 979411 - RNA, 19 nt, Artificial Sequence
  Description of Artificial Sequence: Synthetic oligonucleotide
  Antisense strand to SEQ ID NO: 979410
auaaucacaguuauagcac

SEQ ID NO: 979412 - RNA, 19 nt, Artificial Sequence
  Description of Artificial Sequence: Synthetic oligonucleotide
  Sense strand starting at position 893 of SEQ ID NO: 914118
gagggaguccagcgguauu

SEQ ID NO: 979413 - RNA, 19 nt, Artificial Sequence
  Description of Artificial Sequence: Synthetic oligonucleotide
  Antisense strand to SEQ ID NO: 979412
aauaccgcuggacucccuc

SEQ ID NO: 979414 - RNA, 19 nt, Artificial Sequence
  Description of Artificial Sequence: Synthetic oligonucleotide
  Sense strand starting at position 3013 of SEQ ID NO: 914118
uggugcuauaacugugauu

SEQ ID NO: 979415 - RNA, 19 nt, Artificial Sequence
  Description of Artificial Sequence: Synthetic oligonucleotide
  Antisense strand to SEQ ID NO: 979414
aaucacaguuauagcacca

SEQ ID NO: 979416 - RNA, 19 nt, Artificial Sequence
  Description of Artificial Sequence: Synthetic oligonucleotide
  Sense strand starting at position 2009 of SEQ ID NO: 914118
aaucgcagaugugcucaaa

SEQ ID NO: 979417 - RNA, 19 nt, Artificial Sequence
  Description of Artificial Sequence: Synthetic oligonucleotide
  Antisense strand to SEQ ID NO: 979416
uuugagcacaucugcgauu

SEQ ID NO: 979418 - RNA, 19 nt, Artificial Sequence
  Description of Artificial Sequence: Synthetic oligonucleotide
  Sense strand starting at position 2887 of SEQ ID NO: 914118
gcaauacauacguggucau

SEQ ID NO: 979419 - RNA, 19 nt, Artificial Sequence
  Description of Artificial Sequence: Synthetic oligonucleotide
  Antisense strand to SEQ ID NO: 979418
augaccacguauguauugc

SEQ ID NO: 979420 - RNA, 19 nt, Artificial Sequence
  Description of Artificial Sequence: Synthetic oligonucleotide
  Sense strand starting at position 2609 of SEQ ID NO: 914119
acauucuugccugagauaa

SEQ ID NO: 979421 - RNA, 19 nt, Artificial Sequence
  Description of Artificial Sequence: Synthetic oligonucleotide
  Antisense strand to SEQ ID NO: 979420
uuaucucaggcaagaaugu

SEQ ID NO: 979422 - RNA, 19 nt, Artificial Sequence
  Description of Artificial Sequence: Synthetic oligonucleotide
  Sense strand starting at position 1303 of SEQ ID NO: 914119
agaauagugguauggauga

SEQ ID NO: 979423 - RNA, 19 nt, Artificial Sequence
  Description of Artificial Sequence: Synthetic oligonucleotide
  Antisense strand to SEQ ID NO: 979422
ucauccauaccacuauucu

SEQ ID NO: 979424 - RNA, 19 nt, Artificial Sequence
  Description of Artificial Sequence: Synthetic oligonucleotide
  Sense strand starting at position 1290 of SEQ ID NO: 914119
guguuuauaccacagaaua

SEQ ID NO: 979425 - RNA, 19 nt, Artificial Sequence
  Description of Artificial Sequence: Synthetic oligonucleotide
  Antisense strand to SEQ ID NO: 979424
uauucugugguauaaacac

SEQ ID NO: 979426 - RNA, 19 nt, Artificial Sequence
  Description of Artificial Sequence: Synthetic oligonucleotide
  Sense strand starting at position 109 of SEQ ID NO: 914119
ccuaucuuccaagagaugu

SEQ ID NO: 979427 - RNA, 19 nt, Artificial Sequence
  Description of Artificial Sequence: Synthetic oligonucleotide
  Antisense strand to SEQ ID NO: 979426
acaucucuuggaagauagg

SEQ ID NO: 979428 - RNA, 19 nt, Artificial Sequence
  Description of Artificial Sequence: Synthetic oligonucleotide
  Sense strand starting at position 1523 of SEQ ID NO: 914119
ugaagucuucuugacacua

SEQ ID NO: 979429 - RNA, 19 nt, Artificial Sequence
  Description of Artificial Sequence: Synthetic oligonucleotide
  Antisense strand to SEQ ID NO: 979428
uagugucaagaagacuuca

SEQ ID NO: 979430 - RNA, 19 nt, Artificial Sequence
  Description of Artificial Sequence: Synthetic oligonucleotide
  Sense strand starting at position 1849 of SEQ ID NO: 914119
uagauaugggaggguagua

SEQ ID NO: 979431 - RNA, 19 nt, Artificial Sequence
  Description of Artificial Sequence: Synthetic oligonucleotide
  Antisense strand to SEQ ID NO: 979430
uacuacccucccauaucua

SEQ ID NO: 979432 - RNA, 19 nt, Artificial Sequence
  Description of Artificial Sequence: Synthetic oligonucleotide
  Sense strand starting at position 2659 of SEQ ID NO: 914119
ucgggaucucaugaucauc

SEQ ID NO: 979433 - RNA, 19 nt, Artificial Sequence
  Description of Artificial Sequence: Synthetic oligonucleotide
  Antisense strand to SEQ ID NO: 979432
gaugaucaugagaucccga

SEQ ID NO: 979434 - RNA, 19 nt, Artificial Sequence
  Description of Artificial Sequence: Synthetic oligonucleotide
  Sense strand starting at position 2305 of SEQ ID NO: 914119
ucuggaauuccugggauau

SEQ ID NO: 979435 - RNA, 19 nt, Artificial Sequence
  Description of Artificial Sequence: Synthetic oligonucleotide
  Antisense strand to SEQ ID NO: 979434
auaucccaggaauuccaga

SEQ ID NO: 979436 - RNA, 19 nt, Artificial Sequence
  Description of Artificial Sequence: Synthetic oligonucleotide
  Sense strand starting at position 2306 of SEQ ID NO: 914119
cuggaauuccugggauauu

SEQ ID NO: 979437 - RNA, 19 nt, Artificial Sequence
  Description of Artificial Sequence: Synthetic oligonucleotide
  Antisense strand to SEQ ID NO: 979436
aauaucccaggaauuccag

SEQ ID NO: 979438 - RNA, 19 nt, Artificial Sequence
  Description of Artificial Sequence: Synthetic oligonucleotide
  Sense strand starting at position 1775 of SEQ ID NO: 914119
guaagaccuuucccaaaga

SEQ ID NO: 979439 - RNA, 19 nt, Artificial Sequence
  Description of Artificial Sequence: Synthetic oligonucleotide
  Antisense strand to SEQ ID NO: 979438
ucuuugggaaaggucuuac

SEQ ID NO: 979440 - RNA, 19 nt, Artificial Sequence
  Description of Artificial Sequence: Synthetic oligonucleotide
  Sense strand starting at position 1233 of SEQ ID NO: 914119
guaucuugaguggaaagua

SEQ ID NO: 979441 - RNA, 19 nt, Artificial Sequence
  Description of Artificial Sequence: Synthetic oligonucleotide
  Antisense strand to SEQ ID NO: 979440
uacuuuccacucaagauac

SEQ ID NO: 979442 - RNA, 19 nt, Artificial Sequence
  Description of Artificial Sequence: Synthetic oligonucleotide
  Sense strand starting at position 192 of SEQ ID NO: 914119
aggagaaggaugugucacu

SEQ ID NO: 979443 - RNA, 19 nt, Artificial Sequence
  Description of Artificial Sequence: Synthetic oligonucleotide
  Antisense strand to SEQ ID NO: 979442
agugacacauccuucuccu

SEQ ID NO: 979444 - RNA, 19 nt, Artificial Sequence
  Description of Artificial Sequence: Synthetic oligonucleotide
  Sense strand starting at position 3941 of SEQ ID NO: 914119
ccaugagaauaauuaugcu

SEQ ID NO: 979445 - RNA, 19 nt, Artificial Sequence
  Description of Artificial Sequence: Synthetic oligonucleotide
  Antisense strand to SEQ ID NO: 979444
agcauaauuauucucaugg

SEQ ID NO: 979446 - RNA, 19 nt, Artificial Sequence
  Description of Artificial Sequence: Synthetic oligonucleotide
  Sense strand starting at position 2187 of SEQ ID NO: 914119
ugaggucugcuugacuaaa

SEQ ID NO: 979447 - RNA, 19 nt, Artificial Sequence
  Description of Artificial Sequence: Synthetic oligonucleotide
  Antisense strand to SEQ ID NO: 979446
uuuagucaagcagaccuca

SEQ ID NO: 979448 - RNA, 19 nt, Artificial Sequence
  Description of Artificial Sequence: Synthetic oligonucleotide
  Sense strand starting at position 1435 of SEQ ID NO: 914119
cucauaggauugcuauaag

SEQ ID NO: 979449 - RNA, 19 nt, Artificial Sequence
  Description of Artificial Sequence: Synthetic oligonucleotide
  Antisense strand to SEQ ID NO: 979448
cuuauagcaauccuaugag

SEQ ID NO: 979450 - RNA, 19 nt, Artificial Sequence
  Description of Artificial Sequence: Synthetic oligonucleotide
  Sense strand starting at position 3837 of SEQ ID NO: 914119
cuauuugugucccuuucca

SEQ ID NO: 979451 - RNA, 19 nt, Artificial Sequence
  Description of Artificial Sequence: Synthetic oligonucleotide
  Antisense strand to SEQ ID NO: 979450
uggaaagggacacaaauag

SEQ ID NO: 979452 - RNA, 19 nt, Artificial Sequence
  Description of Artificial Sequence: Synthetic oligonucleotide
  Sense strand starting at position 2570 of SEQ ID NO: 914119
gccugagauaaguggaaug

SEQ ID NO: 979453 - RNA, 19 nt, Artificial Sequence
  Description of Artificial Sequence: Synthetic oligonucleotide
  Antisense strand to SEQ ID NO: 979452
cauuccacuuaucucaggc

SEQ ID NO: 979454 - RNA, 19 nt, Artificial Sequence
  Description of Artificial Sequence: Synthetic oligonucleotide
  Sense strand starting at position 294 of SEQ ID NO: 914119
uuaggaggcuucucaugaa

SEQ ID NO: 979455 - RNA, 19 nt, Artificial Sequence
  Description of Artificial Sequence: Synthetic oligonucleotide
  Antisense strand to SEQ ID NO: 979454
uucaugagaagccuccuaa

SEQ ID NO: 979456 - RNA, 19 nt, Artificial Sequence
  Description of Artificial Sequence: Synthetic oligonucleotide
  Sense strand starting at position 1360 of SEQ ID NO: 914119
ugguuucugggauaguuac

SEQ ID NO: 979457 - RNA, 19 nt, Artificial Sequence
  Description of Artificial Sequence: Synthetic oligonucleotide
  Antisense strand to SEQ ID NO: 979456
guaacuaucccagaaacca

SEQ ID NO: 979458 - RNA, 19 nt, Artificial Sequence
  Description of Artificial Sequence: Synthetic oligonucleotide
  Sense strand starting at position 1231 of SEQ ID NO: 914119
ugguaucuugaguggaaag

SEQ ID NO: 979459 - RNA, 19 nt, Artificial Sequence
  Description of Artificial Sequence: Synthetic oligonucleotide
  Antisense strand to SEQ ID NO: 979458
cuuuccacucaagauacca

SEQ ID NO: 979460 - RNA, 19 nt, Artificial Sequence
  Description of Artificial Sequence: Synthetic oligonucleotide
  Sense strand starting at position 1483 of SEQ ID NO: 914119
cacuuaacacagugugaag

SEQ ID NO: 979461 - RNA, 19 nt, Artificial Sequence
  Description of Artificial Sequence: Synthetic oligonucleotide
  Antisense strand to SEQ ID NO: 979460
cuucacacuguguuaagug

SEQ ID NO: 979462 - RNA, 19 nt, Artificial Sequence
  Description of Artificial Sequence: Synthetic oligonucleotide
  Sense strand starting at position 1521 of SEQ ID NO: 914119
auugaagucuucuugacac

SEQ ID NO: 979463 - RNA, 19 nt, Artificial Sequence
  Description of Artificial Sequence: Synthetic oligonucleotide
  Antisense strand to SEQ ID NO: 979462
gugucaagaagacuucaau

SEQ ID NO: 979464 - RNA, 19 nt, Artificial Sequence
  Description of Artificial Sequence: Synthetic oligonucleotide
  Sense strand starting at position 973 of SEQ ID NO: 914119
acacaaagacuaugugcua

SEQ ID NO: 979465 - RNA, 19 nt, Artificial Sequence
  Description of Artificial Sequence: Synthetic oligonucleotide
  Antisense strand to SEQ ID NO: 979464
uagcacauagucuuugugu

SEQ ID NO: 979466 - RNA, 19 nt, Artificial Sequence
  Description of Artificial Sequence: Synthetic oligonucleotide
  Sense strand starting at position 2518 of SEQ ID NO: 914119
gagaacguuuacccuuaga

SEQ ID NO: 979467 - RNA, 19 nt, Artificial Sequence
  Description of Artificial Sequence: Synthetic oligonucleotide
  Antisense strand to SEQ ID NO: 979466
ucuaaggguaaacguucuc

SEQ ID NO: 979468 - RNA, 19 nt, Artificial Sequence
  Description of Artificial Sequence: Synthetic oligonucleotide
  Sense strand starting at position 2229 of SEQ ID NO: 914119
agucucauccagcauuaug

SEQ ID NO: 979469 - RNA, 19 nt, Artificial Sequence
  Description of Artificial Sequence: Synthetic oligonucleotide
  Antisense strand to SEQ ID NO: 979468
cauaaugcuggaugagacu

SEQ ID NO: 979470 - RNA, 19 nt, Artificial Sequence
  Description of Artificial Sequence: Synthetic oligonucleotide
  Sense strand starting at position 2066 of SEQ ID NO: 914119
ugagcucacugugcuauuu

SEQ ID NO: 979471 - RNA, 19 nt, Artificial Sequence
  Description of Artificial Sequence: Synthetic oligonucleotide
  Antisense strand to SEQ ID NO: 979470
aaauagcacagugagcuca

SEQ ID NO: 979472 - RNA, 19 nt, Artificial Sequence
  Description of Artificial Sequence: Synthetic oligonucleotide
  Sense strand starting at position 1944 of SEQ ID NO: 914119
ggcugaugggcucaaaggu

SEQ ID NO: 979473 - RNA, 19 nt, Artificial Sequence
  Description of Artificial Sequence: Synthetic oligonucleotide
  Antisense strand to SEQ ID NO: 979472
accuuugagcccaucagcc

SEQ ID NO: 979474 - RNA, 19 nt, Artificial Sequence
  Description of Artificial Sequence: Synthetic oligonucleotide
  Sense strand starting at position 298 of SEQ ID NO: 914119
gaggcuucucaugaagcuu

SEQ ID NO: 979475 - RNA, 19 nt, Artificial Sequence
  Description of Artificial Sequence: Synthetic oligonucleotide
  Antisense strand to SEQ ID NO: 979474
aagcuucaugagaagccuc

SEQ ID NO: 979476 - RNA, 19 nt, Artificial Sequence
  Description of Artificial Sequence: Synthetic oligonucleotide
  Sense strand starting at position 2606 of SEQ ID NO: 914119
ccaacauucuugccugaga

SEQ ID NO: 979477 - RNA, 19 nt, Artificial Sequence
  Description of Artificial Sequence: Synthetic oligonucleotide
  Antisense strand to SEQ ID NO: 979476
ucucaggcaagaauguugg

SEQ ID NO: 979478 - RNA, 19 nt, Artificial Sequence
  Description of Artificial Sequence: Synthetic oligonucleotide
  Sense strand starting at position 1664 of SEQ ID NO: 914119
agcucuuguggucagaaac

SEQ ID NO: 979479 - RNA, 19 nt, Artificial Sequence
  Description of Artificial Sequence: Synthetic oligonucleotide
  Antisense strand to SEQ ID NO: 979478
guuucugaccacaagagcu

SEQ ID NO: 979480 - RNA, 19 nt, Artificial Sequence
  Description of Artificial Sequence: Synthetic oligonucleotide
  Sense strand starting at position 2182 of SEQ ID NO: 914119
gacaaugaggucugcuuga

SEQ ID NO: 979481 - RNA, 19 nt, Artificial Sequence
  Description of Artificial Sequence: Synthetic oligonucleotide
  Antisense strand to SEQ ID NO: 979480
ucaagcagaccucauuguc

SEQ ID NO: 979482 - RNA, 19 nt, Artificial Sequence
  Description of Artificial Sequence: Synthetic oligonucleotide
  Sense strand starting at position 1230 of SEQ ID NO: 914119
gugguaucuugaguggaaa

SEQ ID NO: 979483 - RNA, 19 nt, Artificial Sequence
  Description of Artificial Sequence: Synthetic oligonucleotide
  Antisense strand to SEQ ID NO: 979482
uuuccacucaagauaccac

SEQ ID NO: 979484 - RNA, 19 nt, Artificial Sequence
  Description of Artificial Sequence: Synthetic oligonucleotide
  Sense strand starting at position 498 of SEQ ID NO: 914119
ggcguacuuucuccuauuu

SEQ ID NO: 979485 - RNA, 19 nt, Artificial Sequence
  Description of Artificial Sequence: Synthetic oligonucleotide
  Antisense strand to SEQ ID NO: 979484
aaauaggagaaaguacgcc

SEQ ID NO: 979486 - RNA, 19 nt, Artificial Sequence
  Description of Artificial Sequence: Synthetic oligonucleotide
  Sense strand starting at position 1232 of SEQ ID NO: 914119
gguaucuugaguggaaagu

SEQ ID NO: 979487 - RNA, 19 nt, Artificial Sequence
  Description of Artificial Sequence: Synthetic oligonucleotide
  Antisense strand to SEQ ID NO: 979486
acuuuccacucaagauacc

SEQ ID NO: 979488 - RNA, 19 nt, Artificial Sequence
  Description of Artificial Sequence: Synthetic oligonucleotide
  Sense strand starting at position 1209 of SEQ ID NO: 914119
augagcuccuuuguaauga

SEQ ID NO: 979489 - RNA, 19 nt, Artificial Sequence
  Description of Artificial Sequence: Synthetic oligonucleotide
  Antisense strand to SEQ ID NO: 979488
ucauuacaaaggagcucau

SEQ ID NO: 979490 - RNA, 19 nt, Artificial Sequence
  Description of Artificial Sequence: Synthetic oligonucleotide
  Sense strand starting at position 164 of SEQ ID NO: 914119
cccauuccugacuggcaau

SEQ ID NO: 979491 - RNA, 19 nt, Artificial Sequence
  Description of Artificial Sequence: Synthetic oligonucleotide
  Antisense strand to SEQ ID NO: 979490
auugccagucaggaauggg

SEQ ID NO: 979492 - RNA, 19 nt, Artificial Sequence
  Description of Artificial Sequence: Synthetic oligonucleotide
  Sense strand starting at position 646 of SEQ ID NO: 914119
uggcccuucuucccagaga

SEQ ID NO: 979493 - RNA, 19 nt, Artificial Sequence
  Description of Artificial Sequence: Synthetic oligonucleotide
  Antisense strand to SEQ ID NO: 979492
ucucugggaagaagggcca

SEQ ID NO: 979494 - RNA, 19 nt, Artificial Sequence
  Description of Artificial Sequence: Synthetic oligonucleotide
  Sense strand starting at position 928 of SEQ ID NO: 914119
aacugucucuacguagaga

SEQ ID NO: 979495 - RNA, 19 nt, Artificial Sequence
  Description of Artificial Sequence: Synthetic oligonucleotide
  Antisense strand to SEQ ID NO: 979494
ucucuacguagagacaguu

SEQ ID NO: 979496 - RNA, 19 nt, Artificial Sequence
  Description of Artificial Sequence: Synthetic oligonucleotide
  Sense strand starting at position 3255 of SEQ ID NO: 914119
agacaugugccacaguguu

SEQ ID NO: 979497 - RNA, 19 nt, Artificial Sequence
  Description of Artificial Sequence: Synthetic oligonucleotide
  Antisense strand to SEQ ID NO: 979496
aacacuguggcacaugucu

SEQ ID NO: 979498 - RNA, 19 nt, Artificial Sequence
  Description of Artificial Sequence: Synthetic oligonucleotide
  Sense strand starting at position 1663 of SEQ ID NO: 914119
cagcucuuguggucagaaa

SEQ ID NO: 979499 - RNA, 19 nt, Artificial Sequence
  Description of Artificial Sequence: Synthetic oligonucleotide
  Antisense strand to SEQ ID NO: 979498
uuucugaccacaagagcug

SEQ ID NO: 979500 - RNA, 19 nt, Artificial Sequence
  Description of Artificial Sequence: Synthetic oligonucleotide
  Sense strand starting at position 3361 of SEQ ID NO: 914120
gcgagaucuccgcucuacu

SEQ ID NO: 979501 - RNA, 19 nt, Artificial Sequence
  Description of Artificial Sequence: Synthetic oligonucleotide
  Antisense strand to SEQ ID NO: 979500
aguagagcggagaucucgc

SEQ ID NO: 979502 - RNA, 19 nt, Artificial Sequence
  Description of Artificial Sequence: Synthetic oligonucleotide
  Sense strand starting at position 3349 of SEQ ID NO: 914120
ugcgcuuaacuggcgagau

SEQ ID NO: 979503 - RNA, 19 nt, Artificial Sequence
  Description of Artificial Sequence: Synthetic oligonucleotide
  Antisense strand to SEQ ID NO: 979502
aucucgccaguuaagcgca

SEQ ID NO: 979504 - RNA, 19 nt, Artificial Sequence
  Description of Artificial Sequence: Synthetic oligonucleotide
  Sense strand starting at position 2660 of SEQ ID NO: 914120
acuuaagaagcauguaaag

SEQ ID NO: 979505 - RNA, 19 nt, Artificial Sequence
  Description of Artificial Sequence: Synthetic oligonucleotide
  Antisense strand to SEQ ID NO: 979504
cuuuacaugcuucuuaagu

SEQ ID NO: 979506 - RNA, 19 nt, Artificial Sequence
  Description of Artificial Sequence: Synthetic oligonucleotide
  Sense strand starting at position 1150 of SEQ ID NO: 914120
uuccuugcgcuucugagua

SEQ ID NO: 979507 - RNA, 19 nt, Artificial Sequence
  Description of Artificial Sequence: Synthetic oligonucleotide
  Antisense strand to SEQ ID NO: 979506
uacucagaagcgcaaggaa

SEQ ID NO: 979508 - RNA, 19 nt, Artificial Sequence
  Description of Artificial Sequence: Synthetic oligonucleotide
  Sense strand starting at position 959 of SEQ ID NO: 914120
guuugaucucaggagugau

SEQ ID NO: 979509 - RNA, 19 nt, Artificial Sequence
  Description of Artificial Sequence: Synthetic oligonucleotide
  Antisense strand to SEQ ID NO: 979508
aucacuccugagaucaaac

SEQ ID NO: 979510 - RNA, 19 nt, Artificial Sequence
  Description of Artificial Sequence: Synthetic oligonucleotide
  Sense strand starting at position 3072 of SEQ ID NO: 914120
gaagguuauguccagaguc

SEQ ID NO: 979511 - RNA, 19 nt, Artificial Sequence
  Description of Artificial Sequence: Synthetic oligonucleotide
  Antisense strand to SEQ ID NO: 979510
gacucuggacauaaccuuc

SEQ ID NO: 979512 - RNA, 19 nt, Artificial Sequence
  Description of Artificial Sequence: Synthetic oligonucleotide
  Sense strand starting at position 1124 of SEQ ID NO: 914120
uugggauucuggcuuaaag

SEQ ID NO: 979513 - RNA, 19 nt, Artificial Sequence
  Description of Artificial Sequence: Synthetic oligonucleotide
  Antisense strand to SEQ ID NO: 979512
cuuuaagccagaaucccaa

SEQ ID NO: 979514 - RNA, 19 nt, Artificial Sequence
  Description of Artificial Sequence: Synthetic oligonucleotide
  Sense strand starting at position 3544 of SEQ ID NO: 914120
gauugaguaguuuaagcca

SEQ ID NO: 979515 - RNA, 19 nt, Artificial Sequence
  Description of Artificial Sequence: Synthetic oligonucleotide
  Antisense strand to SEQ ID NO: 979514
uggcuuaaacuacucaauc

SEQ ID NO: 979516 - RNA, 19 nt, Artificial Sequence
  Description of Artificial Sequence: Synthetic oligonucleotide
  Sense strand starting at position 3074 of SEQ ID NO: 914120
agguuauguccagagucau

SEQ ID NO: 979517 - RNA, 19 nt, Artificial Sequence
  Description of Artificial Sequence: Synthetic oligonucleotide
  Antisense strand to SEQ ID NO: 979516
augacucuggacauaaccu

SEQ ID NO: 979518 - RNA, 19 nt, Artificial Sequence
  Description of Artificial Sequence: Synthetic oligonucleotide
  Sense strand starting at position 1245 of SEQ ID NO: 914120
gacgcagucaguuaaggaa

SEQ ID NO: 979519 - RNA, 19 nt, Artificial Sequence
  Description of Artificial Sequence: Synthetic oligonucleotide
  Antisense strand to SEQ ID NO: 979518
uuccuuaacugacugcguc

SEQ ID NO: 979520 - RNA, 19 nt, Artificial Sequence
  Description of Artificial Sequence: Synthetic oligonucleotide
  Sense strand starting at position 3538 of SEQ ID NO: 914120
accacagauugaguaguuu

SEQ ID NO: 979521 - RNA, 19 nt, Artificial Sequence
  Description of Artificial Sequence: Synthetic oligonucleotide
  Antisense strand to SEQ ID NO: 979520
aaacuacucaaucuguggu

SEQ ID NO: 979522 - RNA, 19 nt, Artificial Sequence
  Description of Artificial Sequence: Synthetic oligonucleotide
  Sense strand starting at position 1157 of SEQ ID NO: 914120
cgcuucugaguagaaauca

SEQ ID NO: 979523 - RNA, 19 nt, Artificial Sequence
  Description of Artificial Sequence: Synthetic oligonucleotide
  Antisense strand to SEQ ID NO: 979522
ugauuucuacucagaagcg

SEQ ID NO: 979524 - RNA, 19 nt, Artificial Sequence
  Description of Artificial Sequence: Synthetic oligonucleotide
  Sense strand starting at position 2959 of SEQ ID NO: 914120
aaggaauguguguaucugu

SEQ ID NO: 979525 - RNA, 19 nt, Artificial Sequence
  Description of Artificial Sequence: Synthetic oligonucleotide
  Antisense strand to SEQ ID NO: 979524
acagauacacacauuccuu

SEQ ID NO: 979526 - RNA, 19 nt, Artificial Sequence
  Description of Artificial Sequence: Synthetic oligonucleotide
  Sense strand starting at position 493 of SEQ ID NO: 914120
ugccuaauagcugauguga

SEQ ID NO: 979527 - RNA, 19 nt, Artificial Sequence
  Description of Artificial Sequence: Synthetic oligonucleotide
  Antisense strand to SEQ ID NO: 979526
ucacaucagcuauuaggca

SEQ ID NO: 979528 - RNA, 19 nt, Artificial Sequence
  Description of Artificial Sequence: Synthetic oligonucleotide
  Sense strand starting at position 1337 of SEQ ID NO: 914120
gcuggacucuucucuaaca

SEQ ID NO: 979529 - RNA, 19 nt, Artificial Sequence
  Description of Artificial Sequence: Synthetic oligonucleotide
  Antisense strand to SEQ ID NO: 979528
uguuagagaagaguccagc

SEQ ID NO: 979530 - RNA, 19 nt, Artificial Sequence
  Description of Artificial Sequence: Synthetic oligonucleotide
  Sense strand starting at position 3562 of SEQ ID NO: 914120
acaugcauguuaucucaca

SEQ ID NO: 979531 - RNA, 19 nt, Artificial Sequence
  Description of Artificial Sequence: Synthetic oligonucleotide
  Antisense strand to SEQ ID NO: 979530
ugugagauaacaugcaugu

SEQ ID NO: 979532 - RNA, 19 nt, Artificial Sequence
  Description of Artificial Sequence: Synthetic oligonucleotide
  Sense strand starting at position 3487 of SEQ ID NO: 914120
ucgggucugaguuagaugu

SEQ ID NO: 979533 - RNA, 19 nt, Artificial Sequence
  Description of Artificial Sequence: Synthetic oligonucleotide
  Antisense strand to SEQ ID NO: 979532
acaucuaacucagacccga

SEQ ID NO: 979534 - RNA, 19 nt, Artificial Sequence
  Description of Artificial Sequence: Synthetic oligonucleotide
  Sense strand starting at position 3494 of SEQ ID NO: 914120
ugaguuagaugucuguaug

SEQ ID NO: 979535 - RNA, 19 nt, Artificial Sequence
  Description of Artificial Sequence: Synthetic oligonucleotide
  Antisense strand to SEQ ID NO: 979534
cauacagacaucuaacuca

SEQ ID NO: 979536 - RNA, 19 nt, Artificial Sequence
  Description of Artificial Sequence: Synthetic oligonucleotide
  Sense strand starting at position 3547 of SEQ ID NO: 914120
ugaguaguuuaagccacau

SEQ ID NO: 979537 - RNA, 19 nt, Artificial Sequence
  Description of Artificial Sequence: Synthetic oligonucleotide
  Antisense strand to SEQ ID NO: 979536
auguggcuuaaacuacuca

SEQ ID NO: 979538 - RNA, 19 nt, Artificial Sequence
  Description of Artificial Sequence: Synthetic oligonucleotide
  Sense strand starting at position 416 of SEQ ID NO: 914120
aauuguguucucuggaccu

SEQ ID NO: 979539 - RNA, 19 nt, Artificial Sequence
  Description of Artificial Sequence: Synthetic oligonucleotide
  Antisense strand to SEQ ID NO: 979538
agguccagagaacacaauu

SEQ ID NO: 979540 - RNA, 19 nt, Artificial Sequence
  Description of Artificial Sequence: Synthetic oligonucleotide
  Sense strand starting at position 1155 of SEQ ID NO: 914120
ugcgcuucugaguagaaau

SEQ ID NO: 979541 - RNA, 19 nt, Artificial Sequence
  Description of Artificial Sequence: Synthetic oligonucleotide
  Antisense strand to SEQ ID NO: 979540
auuucuacucagaagcgca

SEQ ID NO: 979542 - RNA, 19 nt, Artificial Sequence
  Description of Artificial Sequence: Synthetic oligonucleotide
  Sense strand starting at position 3772 of SEQ ID NO: 914120
cccucuuguaagugugaua

SEQ ID NO: 979543 - RNA, 19 nt, Artificial Sequence
  Description of Artificial Sequence: Synthetic oligonucleotide
  Antisense strand to SEQ ID NO: 979542
uaucacacuuacaagaggg

SEQ ID NO: 979544 - RNA, 19 nt, Artificial Sequence
  Description of Artificial Sequence: Synthetic oligonucleotide
  Sense strand starting at position 3351 of SEQ ID NO: 914120
cgcuuaacuggcgagaucu

SEQ ID NO: 979545 - RNA, 19 nt, Artificial Sequence
  Description of Artificial Sequence: Synthetic oligonucleotide
  Antisense strand to SEQ ID NO: 979544
agaucucgccaguuaagcg

SEQ ID NO: 979546 - RNA, 19 nt, Artificial Sequence
  Description of Artificial Sequence: Synthetic oligonucleotide
  Sense strand starting at position 2955 of SEQ ID NO: 914120
gcgaaaggaauguguguau

SEQ ID NO: 979547 - RNA, 19 nt, Artificial Sequence
  Description of Artificial Sequence: Synthetic oligonucleotide
  Antisense strand to SEQ ID NO: 979546
auacacacauuccuuucgc

SEQ ID NO: 979548 - RNA, 19 nt, Artificial Sequence
  Description of Artificial Sequence: Synthetic oligonucleotide
  Sense strand starting at position 3491 of SEQ ID NO: 914120
gucugaguuagaugucugu

SEQ ID NO: 979549 - RNA, 19 nt, Artificial Sequence
  Description of Artificial Sequence: Synthetic oligonucleotide
  Antisense strand to SEQ ID NO: 979548
acagacaucuaacucagac

SEQ ID NO: 979550 - RNA, 19 nt, Artificial Sequence
  Description of Artificial Sequence: Synthetic oligonucleotide
  Sense strand starting at position 1154 of SEQ ID NO: 914120
uugcgcuucugaguagaaa

SEQ ID NO: 979551 - RNA, 19 nt, Artificial Sequence
  Description of Artificial Sequence: Synthetic oligonucleotide
  Antisense strand to SEQ ID NO: 979550
uuucuacucagaagcgcaa

SEQ ID NO: 979552 - RNA, 19 nt, Artificial Sequence
  Description of Artificial Sequence: Synthetic oligonucleotide
  Sense strand starting at position 3482 of SEQ ID NO: 914120
aggccucgggucugaguua

SEQ ID NO: 979553 - RNA, 19 nt, Artificial Sequence
  Description of Artificial Sequence: Synthetic oligonucleotide
  Antisense strand to SEQ ID NO: 979552
uaacucagacccgaggccu

SEQ ID NO: 979554 - RNA, 19 nt, Artificial Sequence
  Description of Artificial Sequence: Synthetic oligonucleotide
  Sense strand starting at position 2466 of SEQ ID NO: 914120
uucgcucucagcggacaaa

SEQ ID NO: 979555 - RNA, 19 nt, Artificial Sequence
  Description of Artificial Sequence: Synthetic oligonucleotide
  Antisense strand to SEQ ID NO: 979554
uuuguccgcugagagcgaa

SEQ ID NO: 979556 - RNA, 19 nt, Artificial Sequence
  Description of Artificial Sequence: Synthetic oligonucleotide
  Sense strand starting at position 3359 of SEQ ID NO: 914120
uggcgagaucuccgcucua

SEQ ID NO: 979557 - RNA, 19 nt, Artificial Sequence
  Description of Artificial Sequence: Synthetic oligonucleotide
  Antisense strand to SEQ ID NO: 979556
uagagcggagaucucgcca

SEQ ID NO: 979558 - RNA, 19 nt, Artificial Sequence
  Description of Artificial Sequence: Synthetic oligonucleotide
  Sense strand starting at position 956 of SEQ ID NO: 914120
uggguuugaucucaggagu

SEQ ID NO: 979559 - RNA, 19 nt, Artificial Sequence
  Description of Artificial Sequence: Synthetic oligonucleotide
  Antisense strand to SEQ ID NO: 979558
acuccugagaucaaaccca

SEQ ID NO: 979560 - RNA, 19 nt, Artificial Sequence
  Description of Artificial Sequence: Synthetic oligonucleotide
  Sense strand starting at position 1596 of SEQ ID NO: 914120
gcauucaggucucagggau

SEQ ID NO: 979561 - RNA, 19 nt, Artificial Sequence
  Description of Artificial Sequence: Synthetic oligonucleotide
  Antisense strand to SEQ ID NO: 979560
aucccugagaccugaaugc

SEQ ID NO: 979562 - RNA, 19 nt, Artificial Sequence
  Description of Artificial Sequence: Synthetic oligonucleotide
  Sense strand starting at position 2654 of SEQ ID NO: 914120
ccgguaacuuaagaagcau

SEQ ID NO: 979563 - RNA, 19 nt, Artificial Sequence
  Description of Artificial Sequence: Synthetic oligonucleotide
  Antisense strand to SEQ ID NO: 979562
augcuucuuaaguuaccgg

SEQ ID NO: 979564 - RNA, 19 nt, Artificial Sequence
  Description of Artificial Sequence: Synthetic oligonucleotide
  Sense strand starting at position 2785 of SEQ ID NO: 914120
uggugauuauuagaacgca

SEQ ID NO: 979565 - RNA, 19 nt, Artificial Sequence
  Description of Artificial Sequence: Synthetic oligonucleotide
  Antisense strand to SEQ ID NO: 979564
ugcguucuaauaaucacca

SEQ ID NO: 979566 - RNA, 19 nt, Artificial Sequence
  Description of Artificial Sequence: Synthetic oligonucleotide
  Sense strand starting at position 3489 of SEQ ID NO: 914120
gggucugaguuagaugucu

SEQ ID NO: 979567 - RNA, 19 nt, Artificial Sequence
  Description of Artificial Sequence: Synthetic oligonucleotide
  Antisense strand to SEQ ID NO: 979566
agacaucuaacucagaccc

SEQ ID NO: 979568 - RNA, 19 nt, Artificial Sequence
  Description of Artificial Sequence: Synthetic oligonucleotide
  Sense strand starting at position 3777 of SEQ ID NO: 914120
uuguaagugugauacccua

SEQ ID NO: 979569 - RNA, 19 nt, Artificial Sequence
  Description of Artificial Sequence: Synthetic oligonucleotide
  Antisense strand to SEQ ID NO: 979568
uaggguaucacacuuacaa

SEQ ID NO: 979570 - RNA, 19 nt, Artificial Sequence
  Description of Artificial Sequence: Synthetic oligonucleotide
  Sense strand starting at position 2600 of SEQ ID NO: 914120
ucuucucaauuggguuaau

SEQ ID NO: 979571 - RNA, 19 nt, Artificial Sequence
  Description of Artificial Sequence: Synthetic oligonucleotide
  Antisense strand to SEQ ID NO: 979570
auuaacccaauugagaaga

SEQ ID NO: 979572 - RNA, 19 nt, Artificial Sequence
  Description of Artificial Sequence: Synthetic oligonucleotide
  Sense strand starting at position 3445 of SEQ ID NO: 914120
gcaggugucucaggaaaug

SEQ ID NO: 979573 - RNA, 19 nt, Artificial Sequence
  Description of Artificial Sequence: Synthetic oligonucleotide
  Antisense strand to SEQ ID NO: 979572
cauuuccugagacaccugc

SEQ ID NO: 979574 - RNA, 19 nt, Artificial Sequence
  Description of Artificial Sequence: Synthetic oligonucleotide
  Sense strand starting at position 2856 of SEQ ID NO: 914120
gaguaaggucgcugcgugu

SEQ ID NO: 979575 - RNA, 19 nt, Artificial Sequence
  Description of Artificial Sequence: Synthetic oligonucleotide
  Antisense strand to SEQ ID NO: 979574
acacgcagcgaccuuacuc

SEQ ID NO: 979576 - RNA, 19 nt, Artificial Sequence
  Description of Artificial Sequence: Synthetic oligonucleotide
  Sense strand starting at position 2774 of SEQ ID NO: 914120
gccuauuauuauggugauu

SEQ ID NO: 979577 - RNA, 19 nt, Artificial Sequence
  Description of Artificial Sequence: Synthetic oligonucleotide
  Antisense strand to SEQ ID NO: 979576
aaucaccauaauaauaggc

SEQ ID NO: 979578 - RNA, 19 nt, Artificial Sequence
  Description of Artificial Sequence: Synthetic oligonucleotide
  Sense strand starting at position 2773 of SEQ ID NO: 914120
cgccuauuauuauggugau

SEQ ID NO: 979579 - RNA, 19 nt, Artificial Sequence
  Description of Artificial Sequence: Synthetic oligonucleotide
  Antisense strand to SEQ ID NO: 979578
aucaccauaauaauaggcg

SEQ ID NO: 979580 - RNA, 19 nt, Artificial Sequence
  Description of Artificial Sequence: Synthetic oligonucleotide
  Sense strand starting at position 3357 of SEQ ID NO: 914121
gcgagaucuccgcucuacu

SEQ ID NO: 979581 - RNA, 19 nt, Artificial Sequence
  Description of Artificial Sequence: Synthetic oligonucleotide
  Antisense strand to SEQ ID NO: 979580
aguagagcggagaucucgc

SEQ ID NO: 979582 - RNA, 19 nt, Artificial Sequence
  Description of Artificial Sequence: Synthetic oligonucleotide
  Sense strand starting at position 3345 of SEQ ID NO: 914121
ugcgcuuaacuggcgagau

SEQ ID NO: 979583 - RNA, 19 nt, Artificial Sequence
  Description of Artificial Sequence: Synthetic oligonucleotide
  Antisense strand to SEQ ID NO: 979582
aucucgccaguuaagcgca

SEQ ID NO: 979584 - RNA, 19 nt, Artificial Sequence
  Description of Artificial Sequence: Synthetic oligonucleotide
  Sense strand starting at position 2659 of SEQ ID NO: 914121
acuuaagaagcauguaaag

SEQ ID NO: 979585 - RNA, 19 nt, Artificial Sequence
  Description of Artificial Sequence: Synthetic oligonucleotide
  Antisense strand to SEQ ID NO: 979584
cuuuacaugcuucuuaagu

SEQ ID NO: 979586 - RNA, 19 nt, Artificial Sequence
  Description of Artificial Sequence: Synthetic oligonucleotide
  Sense strand starting at position 1149 of SEQ ID NO: 914121
uuccuugcgcuucugagua

SEQ ID NO: 979587 - RNA, 19 nt, Artificial Sequence
  Description of Artificial Sequence: Synthetic oligonucleotide
  Antisense strand to SEQ ID NO: 979586
uacucagaagcgcaaggaa

SEQ ID NO: 979588 - RNA, 19 nt, Artificial Sequence
  Description of Artificial Sequence: Synthetic oligonucleotide
  Sense strand starting at position 958 of SEQ ID NO: 914121
guuugaucucaggagugau

SEQ ID NO: 979589 - RNA, 19 nt, Artificial Sequence
  Description of Artificial Sequence: Synthetic oligonucleotide
  Antisense strand to SEQ ID NO: 979588
aucacuccugagaucaaac

SEQ ID NO: 979590 - RNA, 19 nt, Artificial Sequence
  Description of Artificial Sequence: Synthetic oligonucleotide
  Sense strand starting at position 3068 of SEQ ID NO: 914121
gaagguuauguccagaguc

SEQ ID NO: 979591 - RNA, 19 nt, Artificial Sequence
  Description of Artificial Sequence: Synthetic oligonucleotide
  Antisense strand to SEQ ID NO: 979590
gacucuggacauaaccuuc

SEQ ID NO: 979592 - RNA, 19 nt, Artificial Sequence
  Description of Artificial Sequence: Synthetic oligonucleotide
  Sense strand starting at position 1123 of SEQ ID NO: 914121
uugggauucuggcuuaaag

SEQ ID NO: 979593 - RNA, 19 nt, Artificial Sequence
  Description of Artificial Sequence: Synthetic oligonucleotide
  Antisense strand to SEQ ID NO: 979592
cuuuaagccagaaucccaa

SEQ ID NO: 979594 - RNA, 19 nt, Artificial Sequence
  Description of Artificial Sequence: Synthetic oligonucleotide
  Sense strand starting at position 3070 of SEQ ID NO: 914121
agguuauguccagagucau

SEQ ID NO: 979595 - RNA, 19 nt, Artificial Sequence
  Description of Artificial Sequence: Synthetic oligonucleotide
  Antisense strand to SEQ ID NO: 979594
augacucuggacauaaccu

SEQ ID NO: 979596 - RNA, 19 nt, Artificial Sequence
  Description of Artificial Sequence: Synthetic oligonucleotide
  Sense strand starting at position 1244 of SEQ ID NO: 914121
gacgcagucaguuaaggaa

SEQ ID NO: 979597 - RNA, 19 nt, Artificial Sequence
  Description of Artificial Sequence: Synthetic oligonucleotide
  Antisense strand to SEQ ID NO: 979596
uuccuuaacugacugcguc

SEQ ID NO: 979598 - RNA, 19 nt, Artificial Sequence
  Description of Artificial Sequence: Synthetic oligonucleotide
  Sense strand starting at position 3534 of SEQ ID NO: 914121
accacagauugaguaguuu

SEQ ID NO: 979599 - RNA, 19 nt, Artificial Sequence
  Description of Artificial Sequence: Synthetic oligonucleotide
  Antisense strand to SEQ ID NO: 979598
aaacuacucaaucuguggu

SEQ ID NO: 979600 - RNA, 19 nt, Artificial Sequence
  Description of Artificial Sequence: Synthetic oligonucleotide
  Sense strand starting at position 1156 of SEQ ID NO: 914121
cgcuucugaguagaaauca

SEQ ID NO: 979601 - RNA, 19 nt, Artificial Sequence
  Description of Artificial Sequence: Synthetic oligonucleotide
  Antisense strand to SEQ ID NO: 979600
ugauuucuacucagaagcg

SEQ ID NO: 979602 - RNA, 19 nt, Artificial Sequence
  Description of Artificial Sequence: Synthetic oligonucleotide
  Sense strand starting at position 2958 of SEQ ID NO: 914121
aaggaauguguguaucugu

SEQ ID NO: 979603 - RNA, 19 nt, Artificial Sequence
  Description of Artificial Sequence: Synthetic oligonucleotide
  Antisense strand to SEQ ID NO: 979602
acagauacacacauuccuu

SEQ ID NO: 979604 - RNA, 19 nt, Artificial Sequence
  Description of Artificial Sequence: Synthetic oligonucleotide
  Sense strand starting at position 492 of SEQ ID NO: 914121
ugccuaauagcugauguga

SEQ ID NO: 979605 - RNA, 19 nt, Artificial Sequence
  Description of Artificial Sequence: Synthetic oligonucleotide
  Antisense strand to SEQ ID NO: 979604
ucacaucagcuauuaggca

SEQ ID NO: 979606 - RNA, 19 nt, Artificial Sequence
  Description of Artificial Sequence: Synthetic oligonucleotide
  Sense strand starting at position 1336 of SEQ ID NO: 914121
gcuggacucuucucuaaca

SEQ ID NO: 979607 - RNA, 19 nt, Artificial Sequence
  Description of Artificial Sequence: Synthetic oligonucleotide
  Antisense strand to SEQ ID NO: 979606
uguuagagaagaguccagc

SEQ ID NO: 979608 - RNA, 19 nt, Artificial Sequence
  Description of Artificial Sequence: Synthetic oligonucleotide
  Sense strand starting at position 3483 of SEQ ID NO: 914121
ucgggucugaguuagaugu

SEQ ID NO: 979609 - RNA, 19 nt, Artificial Sequence
  Description of Artificial Sequence: Synthetic oligonucleotide
  Antisense strand to SEQ ID NO: 979608
acaucuaacucagacccga

SEQ ID NO: 979610 - RNA, 19 nt, Artificial Sequence
  Description of Artificial Sequence: Synthetic oligonucleotide
  Sense strand starting at position 3490 of SEQ ID NO: 914121
ugaguuagaugucuguaug

SEQ ID NO: 979611 - RNA, 19 nt, Artificial Sequence
  Description of Artificial Sequence: Synthetic oligonucleotide
  Antisense strand to SEQ ID NO: 979610
cauacagacaucuaacuca

SEQ ID NO: 979612 - RNA, 19 nt, Artificial Sequence
  Description of Artificial Sequence: Synthetic oligonucleotide
  Sense strand starting at position 415 of SEQ ID NO: 914121
aauuguguucucuggaccu

SEQ ID NO: 979613 - RNA, 19 nt, Artificial Sequence
  Description of Artificial Sequence: Synthetic oligonucleotide
  Antisense strand to SEQ ID NO: 979612
agguccagagaacacaauu

SEQ ID NO: 979614 - RNA, 19 nt, Artificial Sequence
  Description of Artificial Sequence: Synthetic oligonucleotide
  Sense strand starting at position 1154 of SEQ ID NO: 914121
ugcgcuucugaguagaaau

SEQ ID NO: 979615 - RNA, 19 nt, Artificial Sequence
  Description of Artificial Sequence: Synthetic oligonucleotide
  Antisense strand to SEQ ID NO: 979614
auuucuacucagaagcgca

SEQ ID NO: 979616 - RNA, 19 nt, Artificial Sequence
  Description of Artificial Sequence: Synthetic oligonucleotide
  Sense strand starting at position 3493 of SEQ ID NO: 914121
guuagaugucuguauguuu

SEQ ID NO: 979617 - RNA, 19 nt, Artificial Sequence
  Description of Artificial Sequence: Synthetic oligonucleotide
  Antisense strand to SEQ ID NO: 979616
aaacauacagacaucuaac

SEQ ID NO: 979618 - RNA, 19 nt, Artificial Sequence
  Description of Artificial Sequence: Synthetic oligonucleotide
  Sense strand starting at position 3558 of SEQ ID NO: 914121
acacgcauguuaucucaca

SEQ ID NO: 979619 - RNA, 19 nt, Artificial Sequence
  Description of Artificial Sequence: Synthetic oligonucleotide
  Antisense strand to SEQ ID NO: 979618
ugugagauaacaugcgugu

SEQ ID NO: 979620 - RNA, 19 nt, Artificial Sequence
  Description of Artificial Sequence: Synthetic oligonucleotide
  Sense strand starting at position 3768 of SEQ ID NO: 914121
cccucuuguaagugugaua

SEQ ID NO: 979621 - RNA, 19 nt, Artificial Sequence
  Description of Artificial Sequence: Synthetic oligonucleotide
  Antisense strand to SEQ ID NO: 979620
uaucacacuuacaagaggg

SEQ ID NO: 979622 - RNA, 19 nt, Artificial Sequence
  Description of Artificial Sequence: Synthetic oligonucleotide
  Sense strand starting at position 3347 of SEQ ID NO: 914121
cgcuuaacuggcgagaucu

SEQ ID NO: 979623 - RNA, 19 nt, Artificial Sequence
  Description of Artificial Sequence: Synthetic oligonucleotide
  Antisense strand to SEQ ID NO: 979622
agaucucgccaguuaagcg

SEQ ID NO: 979624 - RNA, 19 nt, Artificial Sequence
  Description of Artificial Sequence: Synthetic oligonucleotide
  Sense strand starting at position 3491 of SEQ ID NO: 914121
gaguuagaugucuguaugu

SEQ ID NO: 979625 - RNA, 19 nt, Artificial Sequence
  Description of Artificial Sequence: Synthetic oligonucleotide
  Antisense strand to SEQ ID NO: 979624
acauacagacaucuaacuc

SEQ ID NO: 979626 - RNA, 19 nt, Artificial Sequence
  Description of Artificial Sequence: Synthetic oligonucleotide
  Sense strand starting at position 2954 of SEQ ID NO: 914121
gcgaaaggaauguguguau

SEQ ID NO: 979627 - RNA, 19 nt, Artificial Sequence
  Description of Artificial Sequence: Synthetic oligonucleotide
  Antisense strand to SEQ ID NO: 979626
auacacacauuccuuucgc

SEQ ID NO: 979628 - RNA, 19 nt, Artificial Sequence
  Description of Artificial Sequence: Synthetic oligonucleotide
  Sense strand starting at position 3487 of SEQ ID NO: 914121
gucugaguuagaugucugu

SEQ ID NO: 979629 - RNA, 19 nt, Artificial Sequence
  Description of Artificial Sequence: Synthetic oligonucleotide
  Antisense strand to SEQ ID NO: 979628
acagacaucuaacucagac

SEQ ID NO: 979630 - RNA, 19 nt, Artificial Sequence
  Description of Artificial Sequence: Synthetic oligonucleotide
  Sense strand starting at position 1153 of SEQ ID NO: 914121
uugcgcuucugaguagaaa

SEQ ID NO: 979631 - RNA, 19 nt, Artificial Sequence
  Description of Artificial Sequence: Synthetic oligonucleotide
  Antisense strand to SEQ ID NO: 979630
uuucuacucagaagcgcaa

SEQ ID NO: 979632 - RNA, 19 nt, Artificial Sequence
  Description of Artificial Sequence: Synthetic oligonucleotide
  Sense strand starting at position 3478 of SEQ ID NO: 914121
aggccucgggucugaguua

SEQ ID NO: 979633 - RNA, 19 nt, Artificial Sequence
  Description of Artificial Sequence: Synthetic oligonucleotide
  Antisense strand to SEQ ID NO: 979632
uaacucagacccgaggccu

SEQ ID NO: 979634 - RNA, 19 nt, Artificial Sequence
  Description of Artificial Sequence: Synthetic oligonucleotide
  Sense strand starting at position 2465 of SEQ ID NO: 914121
uucgcucucagcggacaaa

SEQ ID NO: 979635 - RNA, 19 nt, Artificial Sequence
  Description of Artificial Sequence: Synthetic oligonucleotide
  Antisense strand to SEQ ID NO: 979634
uuuguccgcugagagcgaa

SEQ ID NO: 979636 - RNA, 19 nt, Artificial Sequence
  Description of Artificial Sequence: Synthetic oligonucleotide
  Sense strand starting at position 3355 of SEQ ID NO: 914121
uggcgagaucuccgcucua

SEQ ID NO: 979637 - RNA, 19 nt, Artificial Sequence
  Description of Artificial Sequence: Synthetic oligonucleotide
  Antisense strand to SEQ ID NO: 979636
uagagcggagaucucgcca

SEQ ID NO: 979638 - RNA, 19 nt, Artificial Sequence
  Description of Artificial Sequence: Synthetic oligonucleotide
  Sense strand starting at position 1595 of SEQ ID NO: 914121
gcauucaggucucagggau

SEQ ID NO: 979639 - RNA, 19 nt, Artificial Sequence
  Description of Artificial Sequence: Synthetic oligonucleotide
  Antisense strand to SEQ ID NO: 979638
aucccugagaccugaaugc

SEQ ID NO: 979640 - RNA, 19 nt, Artificial Sequence
  Description of Artificial Sequence: Synthetic oligonucleotide
  Sense strand starting at position 2653 of SEQ ID NO: 914121
ccgguaacuuaagaagcau

SEQ ID NO: 979641 - RNA, 19 nt, Artificial Sequence
  Description of Artificial Sequence: Synthetic oligonucleotide
  Antisense strand to SEQ ID NO: 979640
augcuucuuaaguuaccgg

SEQ ID NO: 979642 - RNA, 19 nt, Artificial Sequence
  Description of Artificial Sequence: Synthetic oligonucleotide
  Sense strand starting at position 2784 of SEQ ID NO: 914121
uggugauuauuagaacgca

SEQ ID NO: 979643 - RNA, 19 nt, Artificial Sequence
  Description of Artificial Sequence: Synthetic oligonucleotide
  Antisense strand to SEQ ID NO: 979642
ugcguucuaauaaucacca

SEQ ID NO: 979644 - RNA, 19 nt, Artificial Sequence
  Description of Artificial Sequence: Synthetic oligonucleotide
  Sense strand starting at position 3485 of SEQ ID NO: 914121
gggucugaguuagaugucu

SEQ ID NO: 979645 - RNA, 19 nt, Artificial Sequence
  Description of Artificial Sequence: Synthetic oligonucleotide
  Antisense strand to SEQ ID NO: 979644
agacaucuaacucagaccc

SEQ ID NO: 979646 - RNA, 19 nt, Artificial Sequence
  Description of Artificial Sequence: Synthetic oligonucleotide
  Sense strand starting at position 3773 of SEQ ID NO: 914121
uuguaagugugauacccua

SEQ ID NO: 979647 - RNA, 19 nt, Artificial Sequence
  Description of Artificial Sequence: Synthetic oligonucleotide
  Antisense strand to SEQ ID NO: 979646
uaggguaucacacuuacaa

SEQ ID NO: 979648 - RNA, 19 nt, Artificial Sequence
  Description of Artificial Sequence: Synthetic oligonucleotide
  Sense strand starting at position 2599 of SEQ ID NO: 914121
ucuucucaauuggguuaau

SEQ ID NO: 979649 - RNA, 19 nt, Artificial Sequence
  Description of Artificial Sequence: Synthetic oligonucleotide
  Antisense strand to SEQ ID NO: 979648
auuaacccaauugagaaga

SEQ ID NO: 979650 - RNA, 19 nt, Artificial Sequence
  Description of Artificial Sequence: Synthetic oligonucleotide
  Sense strand starting at position 735 of SEQ ID NO: 914121
ggcagcuccucauagguga

SEQ ID NO: 979651 - RNA, 19 nt, Artificial Sequence
  Description of Artificial Sequence: Synthetic oligonucleotide
  Antisense strand to SEQ ID NO: 979650
ucaccuaugaggagcugcc

SEQ ID NO: 979652 - RNA, 19 nt, Artificial Sequence
  Description of Artificial Sequence: Synthetic oligonucleotide
  Sense strand starting at position 3441 of SEQ ID NO: 914121
gcaggugucucaggaaaug

SEQ ID NO: 979653 - RNA, 19 nt, Artificial Sequence
  Description of Artificial Sequence: Synthetic oligonucleotide
  Antisense strand to SEQ ID NO: 979652
cauuuccugagacaccugc

SEQ ID NO: 979654 - RNA, 19 nt, Artificial Sequence
  Description of Artificial Sequence: Synthetic oligonucleotide
  Sense strand starting at position 2855 of SEQ ID NO: 914121
gaguaaggucgcugcgugu

SEQ ID NO: 979655 - RNA, 19 nt, Artificial Sequence
  Description of Artificial Sequence: Synthetic oligonucleotide
  Antisense strand to SEQ ID NO: 979654
acacgcagcgaccuuacuc

SEQ ID NO: 979656 - RNA, 19 nt, Artificial Sequence
  Description of Artificial Sequence: Synthetic oligonucleotide
  Sense strand starting at position 519 of SEQ ID NO: 914121
ggguuucuuugugauagcu

SEQ ID NO: 979657 - RNA, 19 nt, Artificial Sequence
  Description of Artificial Sequence: Synthetic oligonucleotide
  Antisense strand to SEQ ID NO: 979656
agcuaucacaaagaaaccc

SEQ ID NO: 979658 - RNA, 19 nt, Artificial Sequence
  Description of Artificial Sequence: Synthetic oligonucleotide
  Sense strand starting at position 2773 of SEQ ID NO: 914121
gccuauuauuauggugauu

SEQ ID NO: 979659 - RNA, 19 nt, Artificial Sequence
  Description of Artificial Sequence: Synthetic oligonucleotide
  Antisense strand to SEQ ID NO: 979658
aaucaccauaauaauaggc

SEQ ID NO: 979660 - RNA, 19 nt, Artificial Sequence
  Description of Artificial Sequence: Synthetic oligonucleotide
  Sense strand starting at position 2042 of SEQ ID NO: 914122
cgcacucacaguguguuua

SEQ ID NO: 979661 - RNA, 19 nt, Artificial Sequence
  Description of Artificial Sequence: Synthetic oligonucleotide
  Antisense strand to SEQ ID NO: 979660
uaaacacacugugagugcg

SEQ ID NO: 979662 - RNA, 19 nt, Artificial Sequence
  Description of Artificial Sequence: Synthetic oligonucleotide
  Sense strand starting at position 449 of SEQ ID NO: 914122
ggcacauuagcugaugaga

SEQ ID NO: 979663 - RNA, 19 nt, Artificial Sequence
  Description of Artificial Sequence: Synthetic oligonucleotide
  Antisense strand to SEQ ID NO: 979662
ucucaucagcuaaugugcc

SEQ ID NO: 979664 - RNA, 19 nt, Artificial Sequence
  Description of Artificial Sequence: Synthetic oligonucleotide
  Sense strand starting at position 3606 of SEQ ID NO: 914122
uguuacuuacaggagcaau

SEQ ID NO: 979665 - RNA, 19 nt, Artificial Sequence
  Description of Artificial Sequence: Synthetic oligonucleotide
  Antisense strand to SEQ ID NO: 979664
auugcuccuguaaguaaca

SEQ ID NO: 979666 - RNA, 19 nt, Artificial Sequence
  Description of Artificial Sequence: Synthetic oligonucleotide
  Sense strand starting at position 476 of SEQ ID NO: 914122
caugguuguggguaaugga

SEQ ID NO: 979667 - RNA, 19 nt, Artificial Sequence
  Description of Artificial Sequence: Synthetic oligonucleotide
  Antisense strand to SEQ ID NO: 979666
uccauuacccacaaccaug

SEQ ID NO: 979668 - RNA, 19 nt, Artificial Sequence
  Description of Artificial Sequence: Synthetic oligonucleotide
  Sense strand starting at position 2431 of SEQ ID NO: 914122
uucugaacuuucuugaaug

SEQ ID NO: 979669 - RNA, 19 nt, Artificial Sequence
  Description of Artificial Sequence: Synthetic oligonucleotide
  Antisense strand to SEQ ID NO: 979668
cauucaagaaaguucagaa

SEQ ID NO: 979670 - RNA, 19 nt, Artificial Sequence
  Description of Artificial Sequence: Synthetic oligonucleotide
  Sense strand starting at position 3356 of SEQ ID NO: 914122
ccaggaccuguugagucau

SEQ ID NO: 979671 - RNA, 19 nt, Artificial Sequence
  Description of Artificial Sequence: Synthetic oligonucleotide
  Antisense strand to SEQ ID NO: 979670
augacucaacagguccugg

SEQ ID NO: 979672 - RNA, 19 nt, Artificial Sequence
  Description of Artificial Sequence: Synthetic oligonucleotide
  Sense strand starting at position 1169 of SEQ ID NO: 914122
uaucuaagugacgggagau

SEQ ID NO: 979673 - RNA, 19 nt, Artificial Sequence
  Description of Artificial Sequence: Synthetic oligonucleotide
  Antisense strand to SEQ ID NO: 979672
aucucccgucacuuagaua

SEQ ID NO: 979674 - RNA, 19 nt, Artificial Sequence
  Description of Artificial Sequence: Synthetic oligonucleotide
  Sense strand starting at position 3871 of SEQ ID NO: 914122
gccuaugcccaggaauaac

SEQ ID NO: 979675 - RNA, 19 nt, Artificial Sequence
  Description of Artificial Sequence: Synthetic oligonucleotide
  Antisense strand to SEQ ID NO: 979674
guuauuccugggcauaggc

SEQ ID NO: 979676 - RNA, 19 nt, Artificial Sequence
  Description of Artificial Sequence: Synthetic oligonucleotide
  Sense strand starting at position 1559 of SEQ ID NO: 914122
aguucucaccuugagugau

SEQ ID NO: 979677 - RNA, 19 nt, Artificial Sequence
  Description of Artificial Sequence: Synthetic oligonucleotide
  Antisense strand to SEQ ID NO: 979676
aucacucaaggugagaacu

SEQ ID NO: 979678 - RNA, 19 nt, Artificial Sequence
  Description of Artificial Sequence: Synthetic oligonucleotide
  Sense strand starting at position 1157 of SEQ ID NO: 914122
cugugaggucccuaucuaa

SEQ ID NO: 979679 - RNA, 19 nt, Artificial Sequence
  Description of Artificial Sequence: Synthetic oligonucleotide
  Antisense strand to SEQ ID NO: 979678
uuagauagggaccucacag

SEQ ID NO: 979680 - RNA, 19 nt, Artificial Sequence
  Description of Artificial Sequence: Synthetic oligonucleotide
  Sense strand starting at position 3015 of SEQ ID NO: 914122
ugucuccuccaugagagua

SEQ ID NO: 979681 - RNA, 19 nt, Artificial Sequence
  Description of Artificial Sequence: Synthetic oligonucleotide
  Antisense strand to SEQ ID NO: 979680
uacucucauggaggagaca

SEQ ID NO: 979682 - RNA, 19 nt, Artificial Sequence
  Description of Artificial Sequence: Synthetic oligonucleotide
  Sense strand starting at position 2125 of SEQ ID NO: 914122
ggucauauauuaguuaaac

SEQ ID NO: 979683 - RNA, 19 nt, Artificial Sequence
  Description of Artificial Sequence: Synthetic oligonucleotide
  Antisense strand to SEQ ID NO: 979682
guuuaacuaauauaugacc

SEQ ID NO: 979684 - RNA, 19 nt, Artificial Sequence
  Description of Artificial Sequence: Synthetic oligonucleotide
  Sense strand starting at position 3919 of SEQ ID NO: 914122
ugaagucaaccaugucaca

SEQ ID NO: 979685 - RNA, 19 nt, Artificial Sequence
  Description of Artificial Sequence: Synthetic oligonucleotide
  Antisense strand to SEQ ID NO: 979684
ugugacaugguugacuuca

SEQ ID NO: 979686 - RNA, 19 nt, Artificial Sequence
  Description of Artificial Sequence: Synthetic oligonucleotide
  Sense strand starting at position 3298 of SEQ ID NO: 914122
aaaucauaccgguguggaa

SEQ ID NO: 979687 - RNA, 19 nt, Artificial Sequence
  Description of Artificial Sequence: Synthetic oligonucleotide
  Antisense strand to SEQ ID NO: 979686
uuccacaccgguaugauuu

SEQ ID NO: 979688 - RNA, 19 nt, Artificial Sequence
  Description of Artificial Sequence: Synthetic oligonucleotide
  Sense strand starting at position 464 of SEQ ID NO: 914122
gagagcuuucuccaugguu

SEQ ID NO: 979689 - RNA, 19 nt, Artificial Sequence
  Description of Artificial Sequence: Synthetic oligonucleotide
  Antisense strand to SEQ ID NO: 979688
aaccauggagaaagcucuc

SEQ ID NO: 979690 - RNA, 19 nt, Artificial Sequence
  Description of Artificial Sequence: Synthetic oligonucleotide
  Sense strand starting at position 3375 of SEQ ID NO: 914122
gagucaugagucugaguga

SEQ ID NO: 979691 - RNA, 19 nt, Artificial Sequence
  Description of Artificial Sequence: Synthetic oligonucleotide
  Antisense strand to SEQ ID NO: 979690
ucacucagacucaugacuc

SEQ ID NO: 979692 - RNA, 19 nt, Artificial Sequence
  Description of Artificial Sequence: Synthetic oligonucleotide
  Sense strand starting at position 2272 of SEQ ID NO: 914122
ggcugcaaccaaugaugau

SEQ ID NO: 979693 - RNA, 19 nt, Artificial Sequence
  Description of Artificial Sequence: Synthetic oligonucleotide
  Antisense strand to SEQ ID NO: 979692
aucaucauugguugcagcc

SEQ ID NO: 979694 - RNA, 19 nt, Artificial Sequence
  Description of Artificial Sequence: Synthetic oligonucleotide
  Sense strand starting at position 938 of SEQ ID NO: 914122
aggauugcuccugguggga

SEQ ID NO: 979695 - RNA, 19 nt, Artificial Sequence
  Description of Artificial Sequence: Synthetic oligonucleotide
  Antisense strand to SEQ ID NO: 979694
ucccaccaggagcaauccu

SEQ ID NO: 979696 - RNA, 19 nt, Artificial Sequence
  Description of Artificial Sequence: Synthetic oligonucleotide
  Sense strand starting at position 3378 of SEQ ID NO: 914122
ucaugagucugagugaggu

SEQ ID NO: 979697 - RNA, 19 nt, Artificial Sequence
  Description of Artificial Sequence: Synthetic oligonucleotide
  Antisense strand to SEQ ID NO: 979696
accucacucagacucauga

SEQ ID NO: 979698 - RNA, 19 nt, Artificial Sequence
  Description of Artificial Sequence: Synthetic oligonucleotide
  Sense strand starting at position 1558 of SEQ ID NO: 914122
caguucucaccuugaguga

SEQ ID NO: 979699 - RNA, 19 nt, Artificial Sequence
  Description of Artificial Sequence: Synthetic oligonucleotide
  Antisense strand to SEQ ID NO: 979698
ucacucaaggugagaacug

SEQ ID NO: 979700 - RNA, 19 nt, Artificial Sequence
  Description of Artificial Sequence: Synthetic oligonucleotide
  Sense strand starting at position 3202 of SEQ ID NO: 914122
ucagaucagucucccugua

SEQ ID NO: 979701 - RNA, 19 nt, Artificial Sequence
  Description of Artificial Sequence: Synthetic oligonucleotide
  Antisense strand to SEQ ID NO: 979700
uacagggagacugaucuga

SEQ ID NO: 979702 - RNA, 19 nt, Artificial Sequence
  Description of Artificial Sequence: Synthetic oligonucleotide
  Sense strand starting at position 2325 of SEQ ID NO: 914122
acaugauggucgccugaca

SEQ ID NO: 979703 - RNA, 19 nt, Artificial Sequence
  Description of Artificial Sequence: Synthetic oligonucleotide
  Antisense strand to SEQ ID NO: 979702
ugucaggcgaccaucaugu

SEQ ID NO: 979704 - RNA, 19 nt, Artificial Sequence
  Description of Artificial Sequence: Synthetic oligonucleotide
  Sense strand starting at position 1216 of SEQ ID NO: 914122
agaaagugucgagguggua

SEQ ID NO: 979705 - RNA, 19 nt, Artificial Sequence
  Description of Artificial Sequence: Synthetic oligonucleotide
  Antisense strand to SEQ ID NO: 979704
uaccaccucgacacuuucu

SEQ ID NO: 979706 - RNA, 19 nt, Artificial Sequence
  Description of Artificial Sequence: Synthetic oligonucleotide
  Sense strand starting at position 3214 of SEQ ID NO: 914122
cccuguaggcucggaacaa

SEQ ID NO: 979707 - RNA, 19 nt, Artificial Sequence
  Description of Artificial Sequence: Synthetic oligonucleotide
  Antisense strand to SEQ ID NO: 979706
uuguuccgagccuacaggg

SEQ ID NO: 979708 - RNA, 19 nt, Artificial Sequence
  Description of Artificial Sequence: Synthetic oligonucleotide
  Sense strand starting at position 2421 of SEQ ID NO: 914122
auguaugccuuucugaacu

SEQ ID NO: 979709 - RNA, 19 nt, Artificial Sequence
  Description of Artificial Sequence: Synthetic oligonucleotide
  Antisense strand to SEQ ID NO: 979708
aguucagaaaggcauacau

SEQ ID NO: 979710 - RNA, 19 nt, Artificial Sequence
  Description of Artificial Sequence: Synthetic oligonucleotide
  Sense strand starting at position 1523 of SEQ ID NO: 914122
cauacaguucugugaguug

SEQ ID NO: 979711 - RNA, 19 nt, Artificial Sequence
  Description of Artificial Sequence: Synthetic oligonucleotide
  Antisense strand to SEQ ID NO: 979710
caacucacagaacuguaug

SEQ ID NO: 979712 - RNA, 19 nt, Artificial Sequence
  Description of Artificial Sequence: Synthetic oligonucleotide
  Sense strand starting at position 1522 of SEQ ID NO: 914122
ucauacaguucugugaguu

SEQ ID NO: 979713 - RNA, 19 nt, Artificial Sequence
  Description of Artificial Sequence: Synthetic oligonucleotide
  Antisense strand to SEQ ID NO: 979712
aacucacagaacuguauga

SEQ ID NO: 979714 - RNA, 19 nt, Artificial Sequence
  Description of Artificial Sequence: Synthetic oligonucleotide
  Sense strand starting at position 2046 of SEQ ID NO: 914122
cucacaguguguuuacuga

SEQ ID NO: 979715 - RNA, 19 nt, Artificial Sequence
  Description of Artificial Sequence: Synthetic oligonucleotide
  Antisense strand to SEQ ID NO: 979714
ucaguaaacacacugugag

SEQ ID NO: 979716 - RNA, 19 nt, Artificial Sequence
  Description of Artificial Sequence: Synthetic oligonucleotide
  Sense strand starting at position 2118 of SEQ ID NO: 914122
agaggaaggucauauauua

SEQ ID NO: 979717 - RNA, 19 nt, Artificial Sequence
  Description of Artificial Sequence: Synthetic oligonucleotide
  Antisense strand to SEQ ID NO: 979716
uaauauaugaccuuccucu

SEQ ID NO: 979718 - RNA, 19 nt, Artificial Sequence
  Description of Artificial Sequence: Synthetic oligonucleotide
  Sense strand starting at position 1323 of SEQ ID NO: 914122
ccaguaguucugggcuaca

SEQ ID NO: 979719 - RNA, 19 nt, Artificial Sequence
  Description of Artificial Sequence: Synthetic oligonucleotide
  Antisense strand to SEQ ID NO: 979718
uguagcccagaacuacugg

SEQ ID NO: 979720 - RNA, 19 nt, Artificial Sequence
  Description of Artificial Sequence: Synthetic oligonucleotide
  Sense strand starting at position 2095 of SEQ ID NO: 914122
ucccuugccagucgagaau

SEQ ID NO: 979721 - RNA, 19 nt, Artificial Sequence
  Description of Artificial Sequence: Synthetic oligonucleotide
  Antisense strand to SEQ ID NO: 979720
auucucgacuggcaaggga

SEQ ID NO: 979722 - RNA, 19 nt, Artificial Sequence
  Description of Artificial Sequence: Synthetic oligonucleotide
  Sense strand starting at position 925 of SEQ ID NO: 914122
ccaacuacuugagaggauu

SEQ ID NO: 979723 - RNA, 19 nt, Artificial Sequence
  Description of Artificial Sequence: Synthetic oligonucleotide
  Antisense strand to SEQ ID NO: 979722
aauccucucaaguaguugg

SEQ ID NO: 979724 - RNA, 19 nt, Artificial Sequence
  Description of Artificial Sequence: Synthetic oligonucleotide
  Sense strand starting at position 2065 of SEQ ID NO: 914122
aguugugcgcgugcucauu

SEQ ID NO: 979725 - RNA, 19 nt, Artificial Sequence
  Description of Artificial Sequence: Synthetic oligonucleotide
  Antisense strand to SEQ ID NO: 979724
aaugagcacgcgcacaacu

SEQ ID NO: 979726 - RNA, 19 nt, Artificial Sequence
  Description of Artificial Sequence: Synthetic oligonucleotide
  Sense strand starting at position 466 of SEQ ID NO: 914122
gagcuuucuccaugguugu

SEQ ID NO: 979727 - RNA, 19 nt, Artificial Sequence
  Description of Artificial Sequence: Synthetic oligonucleotide
  Antisense strand to SEQ ID NO: 979726
acaaccauggagaaagcuc

SEQ ID NO: 979728 - RNA, 19 nt, Artificial Sequence
  Description of Artificial Sequence: Synthetic oligonucleotide
  Sense strand starting at position 3770 of SEQ ID NO: 914122
uuuggucccugagaaagga

SEQ ID NO: 979729 - RNA, 19 nt, Artificial Sequence
  Description of Artificial Sequence: Synthetic oligonucleotide
  Antisense strand to SEQ ID NO: 979728
uccuuucucagggaccaaa

SEQ ID NO: 979730 - RNA, 19 nt, Artificial Sequence
  Description of Artificial Sequence: Synthetic oligonucleotide
  Sense strand starting at position 609 of SEQ ID NO: 914122
gaacaauggugggaacgua

SEQ ID NO: 979731 - RNA, 19 nt, Artificial Sequence
  Description of Artificial Sequence: Synthetic oligonucleotide
  Antisense strand to SEQ ID NO: 979730
uacguucccaccauuguuc

SEQ ID NO: 979732 - RNA, 19 nt, Artificial Sequence
  Description of Artificial Sequence: Synthetic oligonucleotide
  Sense strand starting at position 1134 of SEQ ID NO: 914122
uauuaaaggucuggagaau

SEQ ID NO: 979733 - RNA, 19 nt, Artificial Sequence
  Description of Artificial Sequence: Synthetic oligonucleotide
  Antisense strand to SEQ ID NO: 979732
auucuccagaccuuuaaua

SEQ ID NO: 979734 - RNA, 19 nt, Artificial Sequence
  Description of Artificial Sequence: Synthetic oligonucleotide
  Sense strand starting at position 3930 of SEQ ID NO: 914122
augucacauuucuguuacu

SEQ ID NO: 979735 - RNA, 19 nt, Artificial Sequence
  Description of Artificial Sequence: Synthetic oligonucleotide
  Antisense strand to SEQ ID NO: 979734
aguaacagaaaugugacau

SEQ ID NO: 979736 - RNA, 19 nt, Artificial Sequence
  Description of Artificial Sequence: Synthetic oligonucleotide
  Sense strand starting at position 1369 of SEQ ID NO: 914122
uggcuuggaugacagagua

SEQ ID NO: 979737 - RNA, 19 nt, Artificial Sequence
  Description of Artificial Sequence: Synthetic oligonucleotide
  Antisense strand to SEQ ID NO: 979736
uacucugucauccaagcca

SEQ ID NO: 979738 - RNA, 19 nt, Artificial Sequence
  Description of Artificial Sequence: Synthetic oligonucleotide
  Sense strand starting at position 1264 of SEQ ID NO: 914122
cuggcaugugcuuguggua

SEQ ID NO: 979739 - RNA, 19 nt, Artificial Sequence
  Description of Artificial Sequence: Synthetic oligonucleotide
  Antisense strand to SEQ ID NO: 979738
uaccacaagcacaugccag

SEQ ID NO: 979740 - RNA, 19 nt, Artificial Sequence
  Description of Artificial Sequence: Synthetic oligonucleotide
  Sense strand starting at position 779 of SEQ ID NO: 914123
uaaacacucggccaggaua

SEQ ID NO: 979741 - RNA, 19 nt, Artificial Sequence
  Description of Artificial Sequence: Synthetic oligonucleotide
  Antisense strand to SEQ ID NO: 979740
uauccuggccgaguguuua

SEQ ID NO: 979742 - RNA, 19 nt, Artificial Sequence
  Description of Artificial Sequence: Synthetic oligonucleotide
  Sense strand starting at position 167 of SEQ ID NO: 914123
cuagacucgaguuguauuu

SEQ ID NO: 979743 - RNA, 19 nt, Artificial Sequence
  Description of Artificial Sequence: Synthetic oligonucleotide
  Antisense strand to SEQ ID NO: 979742
aaauacaacucgagucuag

SEQ ID NO: 979744 - RNA, 19 nt, Artificial Sequence
  Description of Artificial Sequence: Synthetic oligonucleotide
  Sense strand starting at position 1217 of SEQ ID NO: 914123
cugaauuccagggaaucgu

SEQ ID NO: 979745 - RNA, 19 nt, Artificial Sequence
  Description of Artificial Sequence: Synthetic oligonucleotide
  Antisense strand to SEQ ID NO: 979744
acgauucccuggaauucag

SEQ ID NO: 979746 - RNA, 19 nt, Artificial Sequence
  Description of Artificial Sequence: Synthetic oligonucleotide
  Sense strand starting at position 3807 of SEQ ID NO: 914123
gcgauaacaagauaggguu

SEQ ID NO: 979747 - RNA, 19 nt, Artificial Sequence
  Description of Artificial Sequence: Synthetic oligonucleotide
  Antisense strand to SEQ ID NO: 979746
aacccuaucuuguuaucgc

SEQ ID NO: 979748 - RNA, 19 nt, Artificial Sequence
  Description of Artificial Sequence: Synthetic oligonucleotide
  Sense strand starting at position 3782 of SEQ ID NO: 914123
agccuuaauagguaaaggu

SEQ ID NO: 979749 - RNA, 19 nt, Artificial Sequence
  Description of Artificial Sequence: Synthetic oligonucleotide
  Antisense strand to SEQ ID NO: 979748
accuuuaccuauuaaggcu

SEQ ID NO: 979750 - RNA, 19 nt, Artificial Sequence
  Description of Artificial Sequence: Synthetic oligonucleotide
  Sense strand starting at position 841 of SEQ ID NO: 914123
aucggauuccuggaucgau

SEQ ID NO: 979751 - RNA, 19 nt, Artificial Sequence
  Description of Artificial Sequence: Synthetic oligonucleotide
  Antisense strand to SEQ ID NO: 979750
aucgauccaggaauccgau

SEQ ID NO: 979752 - RNA, 19 nt, Artificial Sequence
  Description of Artificial Sequence: Synthetic oligonucleotide
  Sense strand starting at position 3571 of SEQ ID NO: 914123
cugaaacaucuguaagcuc

SEQ ID NO: 979753 - RNA, 19 nt, Artificial Sequence
  Description of Artificial Sequence: Synthetic oligonucleotide
  Antisense strand to SEQ ID NO: 979752
gagcuuacagauguuucag

SEQ ID NO: 979754 - RNA, 19 nt, Artificial Sequence
  Description of Artificial Sequence: Synthetic oligonucleotide
  Sense strand starting at position 2960 of SEQ ID NO: 914123
guggaagacucuuccacau

SEQ ID NO: 979755 - RNA, 19 nt, Artificial Sequence
  Description of Artificial Sequence: Synthetic oligonucleotide
  Antisense strand to SEQ ID NO: 979754
auguggaagagucuuccac

SEQ ID NO: 979756 - RNA, 19 nt, Artificial Sequence
  Description of Artificial Sequence: Synthetic oligonucleotide
  Sense strand starting at position 3257 of SEQ ID NO: 914123
gauguaacagcaugaaauu

SEQ ID NO: 979757 - RNA, 19 nt, Artificial Sequence
  Description of Artificial Sequence: Synthetic oligonucleotide
  Antisense strand to SEQ ID NO: 979756
aauuucaugcuguuacauc

SEQ ID NO: 979758 - RNA, 19 nt, Artificial Sequence
  Description of Artificial Sequence: Synthetic oligonucleotide
  Sense strand starting at position 781 of SEQ ID NO: 914123
aacacucggccaggauaaa

SEQ ID NO: 979759 - RNA, 19 nt, Artificial Sequence
  Description of Artificial Sequence: Synthetic oligonucleotide
  Antisense strand to SEQ ID NO: 979758
uuuauccuggccgaguguu

SEQ ID NO: 979760 - RNA, 19 nt, Artificial Sequence
  Description of Artificial Sequence: Synthetic oligonucleotide
  Sense strand starting at position 72 of SEQ ID NO: 914123
gucugagccgugagaguug

SEQ ID NO: 979761 - RNA, 19 nt, Artificial Sequence
  Description of Artificial Sequence: Synthetic oligonucleotide
  Antisense strand to SEQ ID NO: 979760
caacucucacggcucagac

SEQ ID NO: 979762 - RNA, 19 nt, Artificial Sequence
  Description of Artificial Sequence: Synthetic oligonucleotide
  Sense strand starting at position 3826 of SEQ ID NO: 914123
ugaaaugagacucgaguuc

SEQ ID NO: 979763 - RNA, 19 nt, Artificial Sequence
  Description of Artificial Sequence: Synthetic oligonucleotide
  Antisense strand to SEQ ID NO: 979762
gaacucgagucucauuuca

SEQ ID NO: 979764 - RNA, 19 nt, Artificial Sequence
  Description of Artificial Sequence: Synthetic oligonucleotide
  Sense strand starting at position 3561 of SEQ ID NO: 914123
ccacguggagcugaaacau

SEQ ID NO: 979765 - RNA, 19 nt, Artificial Sequence
  Description of Artificial Sequence: Synthetic oligonucleotide
  Antisense strand to SEQ ID NO: 979764
auguuucagcuccacgugg

SEQ ID NO: 979766 - RNA, 19 nt, Artificial Sequence
  Description of Artificial Sequence: Synthetic oligonucleotide
  Sense strand starting at position 608 of SEQ ID NO: 914123
auagucuucucucuggaaa

SEQ ID NO: 979767 - RNA, 19 nt, Artificial Sequence
  Description of Artificial Sequence: Synthetic oligonucleotide
  Antisense strand to SEQ ID NO: 979766
uuuccagagagaagacuau

SEQ ID NO: 979768 - RNA, 19 nt, Artificial Sequence
  Description of Artificial Sequence: Synthetic oligonucleotide
  Sense strand starting at position 174 of SEQ ID NO: 914123
cgaguuguauuuccaugca

SEQ ID NO: 979769 - RNA, 19 nt, Artificial Sequence
  Description of Artificial Sequence: Synthetic oligonucleotide
  Antisense strand to SEQ ID NO: 979768
ugcauggaaauacaacucg

SEQ ID NO: 979770 - RNA, 19 nt, Artificial Sequence
  Description of Artificial Sequence: Synthetic oligonucleotide
  Sense strand starting at position 177 of SEQ ID NO: 914123
guuguauuuccaugcaccu

SEQ ID NO: 979771 - RNA, 19 nt, Artificial Sequence
  Description of Artificial Sequence: Synthetic oligonucleotide
  Antisense strand to SEQ ID NO: 979770
aggugcauggaaauacaac

SEQ ID NO: 979772 - RNA, 19 nt, Artificial Sequence
  Description of Artificial Sequence: Synthetic oligonucleotide
  Sense strand starting at position 2962 of SEQ ID NO: 914123
ggaagacucuuccacauuu

SEQ ID NO: 979773 - RNA, 19 nt, Artificial Sequence
  Description of Artificial Sequence: Synthetic oligonucleotide
  Antisense strand to SEQ ID NO: 979772
aaauguggaagagucuucc

SEQ ID NO: 979774 - RNA, 19 nt, Artificial Sequence
  Description of Artificial Sequence: Synthetic oligonucleotide
  Sense strand starting at position 202 of SEQ ID NO: 914123
acuacacgugcaugagaaa

SEQ ID NO: 979775 - RNA, 19 nt, Artificial Sequence
  Description of Artificial Sequence: Synthetic oligonucleotide
  Antisense strand to SEQ ID NO: 979774
uuucucaugcacguguagu

SEQ ID NO: 979776 - RNA, 19 nt, Artificial Sequence
  Description of Artificial Sequence: Synthetic oligonucleotide
  Sense strand starting at position 954 of SEQ ID NO: 914123
guggaugaugcuuaggcua

SEQ ID NO: 979777 - RNA, 19 nt, Artificial Sequence
  Description of Artificial Sequence: Synthetic oligonucleotide
  Antisense strand to SEQ ID NO: 979776
uagccuaagcaucauccac

SEQ ID NO: 979778 - RNA, 19 nt, Artificial Sequence
  Description of Artificial Sequence: Synthetic oligonucleotide
  Sense strand starting at position 3322 of SEQ ID NO: 914123
gcuaaugauuaugucaauc

SEQ ID NO: 979779 - RNA, 19 nt, Artificial Sequence
  Description of Artificial Sequence: Synthetic oligonucleotide
  Antisense strand to SEQ ID NO: 979778
gauugacauaaucauuagc

SEQ ID NO: 979780 - RNA, 19 nt, Artificial Sequence
  Description of Artificial Sequence: Synthetic oligonucleotide
  Sense strand starting at position 934 of SEQ ID NO: 914123
ucgaguguucaccagagua

SEQ ID NO: 979781 - RNA, 19 nt, Artificial Sequence
  Description of Artificial Sequence: Synthetic oligonucleotide
  Antisense strand to SEQ ID NO: 979780
uacucuggugaacacucga

SEQ ID NO: 979782 - RNA, 19 nt, Artificial Sequence
  Description of Artificial Sequence: Synthetic oligonucleotide
  Sense strand starting at position 3375 of SEQ ID NO: 914123
aggugugcucuggaaagca

SEQ ID NO: 979783 - RNA, 19 nt, Artificial Sequence
  Description of Artificial Sequence: Synthetic oligonucleotide
  Antisense strand to SEQ ID NO: 979782
ugcuuuccagagcacaccu

SEQ ID NO: 979784 - RNA, 19 nt, Artificial Sequence
  Description of Artificial Sequence: Synthetic oligonucleotide
  Sense strand starting at position 1116 of SEQ ID NO: 914123
uguucccuugcaggaaaua

SEQ ID NO: 979785 - RNA, 19 nt, Artificial Sequence
  Description of Artificial Sequence: Synthetic oligonucleotide
  Antisense strand to SEQ ID NO: 979784
uauuuccugcaagggaaca

SEQ ID NO: 979786 - RNA, 19 nt, Artificial Sequence
  Description of Artificial Sequence: Synthetic oligonucleotide
  Sense strand starting at position 3883 of SEQ ID NO: 914123
ccgacuguuuaaccauacu

SEQ ID NO: 979787 - RNA, 19 nt, Artificial Sequence
  Description of Artificial Sequence: Synthetic oligonucleotide
  Antisense strand to SEQ ID NO: 979786
aguaugguuaaacagucgg

SEQ ID NO: 979788 - RNA, 19 nt, Artificial Sequence
  Description of Artificial Sequence: Synthetic oligonucleotide
  Sense strand starting at position 3658 of SEQ ID NO: 914123
caagccucguacucagaaa

SEQ ID NO: 979789 - RNA, 19 nt, Artificial Sequence
  Description of Artificial Sequence: Synthetic oligonucleotide
  Antisense strand to SEQ ID NO: 979788
uuucugaguacgaggcuug

SEQ ID NO: 979790 - RNA, 19 nt, Artificial Sequence
  Description of Artificial Sequence: Synthetic oligonucleotide
  Sense strand starting at position 2609 of SEQ ID NO: 914123
ucagcucugugauucuaaa

SEQ ID NO: 979791 - RNA, 19 nt, Artificial Sequence
  Description of Artificial Sequence: Synthetic oligonucleotide
  Antisense strand to SEQ ID NO: 979790
uuuagaaucacagagcuga

SEQ ID NO: 979792 - RNA, 19 nt, Artificial Sequence
  Description of Artificial Sequence: Synthetic oligonucleotide
  Sense strand starting at position 2643 of SEQ ID NO: 914123
uaggaauguccgugacacc

SEQ ID NO: 979793 - RNA, 19 nt, Artificial Sequence
  Description of Artificial Sequence: Synthetic oligonucleotide
  Antisense strand to SEQ ID NO: 979792
ggugucacggacauuccua

SEQ ID NO: 979794 - RNA, 19 nt, Artificial Sequence
  Description of Artificial Sequence: Synthetic oligonucleotide
  Sense strand starting at position 3428 of SEQ ID NO: 914123
ggaugucacuugguggcaa

SEQ ID NO: 979795 - RNA, 19 nt, Artificial Sequence
  Description of Artificial Sequence: Synthetic oligonucleotide
  Antisense strand to SEQ ID NO: 979794
uugccaccaagugacaucc

SEQ ID NO: 979796 - RNA, 19 nt, Artificial Sequence
  Description of Artificial Sequence: Synthetic oligonucleotide
  Sense strand starting at position 666 of SEQ ID NO: 914123
aagccugaguugcugaaau

SEQ ID NO: 979797 - RNA, 19 nt, Artificial Sequence
  Description of Artificial Sequence: Synthetic oligonucleotide
  Antisense strand to SEQ ID NO: 979796
auuucagcaacucaggcuu

SEQ ID NO: 979798 - RNA, 19 nt, Artificial Sequence
  Description of Artificial Sequence: Synthetic oligonucleotide
  Sense strand starting at position 818 of SEQ ID NO: 914123
uagcucugugguugagaga

SEQ ID NO: 979799 - RNA, 19 nt, Artificial Sequence
  Description of Artificial Sequence: Synthetic oligonucleotide
  Antisense strand to SEQ ID NO: 979798
ucucucaaccacagagcua

SEQ ID NO: 979800 - RNA, 19 nt, Artificial Sequence
  Description of Artificial Sequence: Synthetic oligonucleotide
  Sense strand starting at position 3020 of SEQ ID NO: 914123
guaucuaaacuguggccaa

SEQ ID NO: 979801 - RNA, 19 nt, Artificial Sequence
  Description of Artificial Sequence: Synthetic oligonucleotide
  Antisense strand to SEQ ID NO: 979800
uuggccacaguuuagauac

SEQ ID NO: 979802 - RNA, 19 nt, Artificial Sequence
  Description of Artificial Sequence: Synthetic oligonucleotide
  Sense strand starting at position 97 of SEQ ID NO: 914123
gccugucacugauuaacuc

SEQ ID NO: 979803 - RNA, 19 nt, Artificial Sequence
  Description of Artificial Sequence: Synthetic oligonucleotide
  Antisense strand to SEQ ID NO: 979802
gaguuaaucagugacaggc

SEQ ID NO: 979804 - RNA, 19 nt, Artificial Sequence
  Description of Artificial Sequence: Synthetic oligonucleotide
  Sense strand starting at position 2642 of SEQ ID NO: 914123
guaggaauguccgugacac

SEQ ID NO: 979805 - RNA, 19 nt, Artificial Sequence
  Description of Artificial Sequence: Synthetic oligonucleotide
  Antisense strand to SEQ ID NO: 979804
gugucacggacauuccuac

SEQ ID NO: 979806 - RNA, 19 nt, Artificial Sequence
  Description of Artificial Sequence: Synthetic oligonucleotide
  Sense strand starting at position 3570 of SEQ ID NO: 914123
gcugaaacaucuguaagcu

SEQ ID NO: 979807 - RNA, 19 nt, Artificial Sequence
  Description of Artificial Sequence: Synthetic oligonucleotide
  Antisense strand to SEQ ID NO: 979806
agcuuacagauguuucagc

SEQ ID NO: 979808 - RNA, 19 nt, Artificial Sequence
  Description of Artificial Sequence: Synthetic oligonucleotide
  Sense strand starting at position 3815 of SEQ ID NO: 914123
aagauaggguuugaaauga

SEQ ID NO: 979809 - RNA, 19 nt, Artificial Sequence
  Description of Artificial Sequence: Synthetic oligonucleotide
  Antisense strand to SEQ ID NO: 979808
ucauuucaaacccuaucuu

SEQ ID NO: 979810 - RNA, 19 nt, Artificial Sequence
  Description of Artificial Sequence: Synthetic oligonucleotide
  Sense strand starting at position 289 of SEQ ID NO: 914123
guaagacgaugcuuucuca

SEQ ID NO: 979811 - RNA, 19 nt, Artificial Sequence
  Description of Artificial Sequence: Synthetic oligonucleotide
  Antisense strand to SEQ ID NO: 979810
ugagaaagcaucgucuuac

SEQ ID NO: 979812 - RNA, 19 nt, Artificial Sequence
  Description of Artificial Sequence: Synthetic oligonucleotide
  Sense strand starting at position 68 of SEQ ID NO: 914123
auaggucugagccgugaga

SEQ ID NO: 979813 - RNA, 19 nt, Artificial Sequence
  Description of Artificial Sequence: Synthetic oligonucleotide
  Antisense strand to SEQ ID NO: 979812
ucucacggcucagaccuau

SEQ ID NO: 979814 - RNA, 19 nt, Artificial Sequence
  Description of Artificial Sequence: Synthetic oligonucleotide
  Sense strand starting at position 276 of SEQ ID NO: 914123
augugccuccauuguaaga

SEQ ID NO: 979815 - RNA, 19 nt, Artificial Sequence
  Description of Artificial Sequence: Synthetic oligonucleotide
  Antisense strand to SEQ ID NO: 979814
ucuuacaauggaggcacau

SEQ ID NO: 979816 - RNA, 19 nt, Artificial Sequence
  Description of Artificial Sequence: Synthetic oligonucleotide
  Sense strand starting at position 94 of SEQ ID NO: 914123
agugccugucacugauuaa

SEQ ID NO: 979817 - RNA, 19 nt, Artificial Sequence
  Description of Artificial Sequence: Synthetic oligonucleotide
  Antisense strand to SEQ ID NO: 979816
uuaaucagugacaggcacu

SEQ ID NO: 979818 - RNA, 19 nt, Artificial Sequence
  Description of Artificial Sequence: Synthetic oligonucleotide
  Sense strand starting at position 3373 of SEQ ID NO: 914123
cgaggugugcucuggaaag

SEQ ID NO: 979819 - RNA, 19 nt, Artificial Sequence
  Description of Artificial Sequence: Synthetic oligonucleotide
  Antisense strand to SEQ ID NO: 979818
cuuuccagagcacaccucg

SEQ ID NO: 979820 - RNA, 19 nt, Artificial Sequence
  Description of Artificial Sequence: Synthetic oligonucleotide
  Sense strand starting at position 3139 of SEQ ID NO: 914124
ccucguaucguauuaaugu

SEQ ID NO: 979821 - RNA, 19 nt, Artificial Sequence
  Description of Artificial Sequence: Synthetic oligonucleotide
  Antisense strand to SEQ ID NO: 979820
acauuaauacgauacgagg

SEQ ID NO: 979822 - RNA, 19 nt, Artificial Sequence
  Description of Artificial Sequence: Synthetic oligonucleotide
  Sense strand starting at position 2712 of SEQ ID NO: 914124
ccuuuaagggccuaacuaa

SEQ ID NO: 979823 - RNA, 19 nt, Artificial Sequence
  Description of Artificial Sequence: Synthetic oligonucleotide
  Antisense strand to SEQ ID NO: 979822
uuaguuaggcccuuaaagg

SEQ ID NO: 979824 - RNA, 19 nt, Artificial Sequence
  Description of Artificial Sequence: Synthetic oligonucleotide
  Sense strand starting at position 273 of SEQ ID NO: 914124
ccgguauaugaauaacuau

SEQ ID NO: 979825 - RNA, 19 nt, Artificial Sequence
  Description of Artificial Sequence: Synthetic oligonucleotide
  Antisense strand to SEQ ID NO: 979824
auaguuauucauauaccgg

SEQ ID NO: 979826 - RNA, 19 nt, Artificial Sequence
  Description of Artificial Sequence: Synthetic oligonucleotide
  Sense strand starting at position 265 of SEQ ID NO: 914124
ccauaacaccgguauauga

SEQ ID NO: 979827 - RNA, 19 nt, Artificial Sequence
  Description of Artificial Sequence: Synthetic oligonucleotide
  Antisense strand to SEQ ID NO: 979826
ucauauaccgguguuaugg

SEQ ID NO: 979828 - RNA, 19 nt, Artificial Sequence
  Description of Artificial Sequence: Synthetic oligonucleotide
  Sense strand starting at position 3131 of SEQ ID NO: 914124
acagguuuccucguaucgu

SEQ ID NO: 979829 - RNA, 19 nt, Artificial Sequence
  Description of Artificial Sequence: Synthetic oligonucleotide
  Antisense strand to SEQ ID NO: 979828
acgauacgaggaaaccugu

SEQ ID NO: 979830 - RNA, 19 nt, Artificial Sequence
  Description of Artificial Sequence: Synthetic oligonucleotide
  Sense strand starting at position 3838 of SEQ ID NO: 914124
gggaaugaagguuguagau

SEQ ID NO: 979831 - RNA, 19 nt, Artificial Sequence
  Description of Artificial Sequence: Synthetic oligonucleotide
  Antisense strand to SEQ ID NO: 979830
aucuacaaccuucauuccc

SEQ ID NO: 979832 - RNA, 19 nt, Artificial Sequence
  Description of Artificial Sequence: Synthetic oligonucleotide
  Sense strand starting at position 3563 of SEQ ID NO: 914124
gucauauccauuuguggua

SEQ ID NO: 979833 - RNA, 19 nt, Artificial Sequence
  Description of Artificial Sequence: Synthetic oligonucleotide
  Antisense strand to SEQ ID NO: 979832
uaccacaaauggauaugac

SEQ ID NO: 979834 - RNA, 19 nt, Artificial Sequence
  Description of Artificial Sequence: Synthetic oligonucleotide
  Sense strand starting at position 372 of SEQ ID NO: 914124
agcugaguugcuguggcau

SEQ ID NO: 979835 - RNA, 19 nt, Artificial Sequence
  Description of Artificial Sequence: Synthetic oligonucleotide
  Antisense strand to SEQ ID NO: 979834
augccacagcaacucagcu

SEQ ID NO: 979836 - RNA, 19 nt, Artificial Sequence
  Description of Artificial Sequence: Synthetic oligonucleotide
  Sense strand starting at position 3938 of SEQ ID NO: 914124
gguccuuuaauuggaagga

SEQ ID NO: 979837 - RNA, 19 nt, Artificial Sequence
  Description of Artificial Sequence: Synthetic oligonucleotide
  Antisense strand to SEQ ID NO: 979836
uccuuccaauuaaaggacc

SEQ ID NO: 979838 - RNA, 19 nt, Artificial Sequence
  Description of Artificial Sequence: Synthetic oligonucleotide
  Sense strand starting at position 3975 of SEQ ID NO: 914124
gagaaagagauguggcuau

SEQ ID NO: 979839 - RNA, 19 nt, Artificial Sequence
  Description of Artificial Sequence: Synthetic oligonucleotide
  Antisense strand to SEQ ID NO: 979838
auagccacaucucuuucuc

SEQ ID NO: 979840 - RNA, 19 nt, Artificial Sequence
  Description of Artificial Sequence: Synthetic oligonucleotide
  Sense strand starting at position 3185 of SEQ ID NO: 914124
acccaaauaggcuaguuua

SEQ ID NO: 979841 - RNA, 19 nt, Artificial Sequence
  Description of Artificial Sequence: Synthetic oligonucleotide
  Antisense strand to SEQ ID NO: 979840
uaaacuagccuauuugggu

SEQ ID NO: 979842 - RNA, 19 nt, Artificial Sequence
  Description of Artificial Sequence: Synthetic oligonucleotide
  Sense strand starting at position 3844 of SEQ ID NO: 914124
gaagguuguagauggaauu

SEQ ID NO: 979843 - RNA, 19 nt, Artificial Sequence
  Description of Artificial Sequence: Synthetic oligonucleotide
  Antisense strand to SEQ ID NO: 979842
aauuccaucuacaaccuuc

SEQ ID NO: 979844 - RNA, 19 nt, Artificial Sequence
  Description of Artificial Sequence: Synthetic oligonucleotide
  Sense strand starting at position 2591 of SEQ ID NO: 914124
acuugacgugcguucuauu

SEQ ID NO: 979845 - RNA, 19 nt, Artificial Sequence
  Description of Artificial Sequence: Synthetic oligonucleotide
  Antisense strand to SEQ ID NO: 979844
aauagaacgcacgucaagu

SEQ ID NO: 979846 - RNA, 19 nt, Artificial Sequence
  Description of Artificial Sequence: Synthetic oligonucleotide
  Sense strand starting at position 725 of SEQ ID NO: 914124
auuuccagauaucauggaa

SEQ ID NO: 979847 - RNA, 19 nt, Artificial Sequence
  Description of Artificial Sequence: Synthetic oligonucleotide
  Antisense strand to SEQ ID NO: 979846
uuccaugauaucuggaaau

SEQ ID NO: 979848 - RNA, 19 nt, Artificial Sequence
  Description of Artificial Sequence: Synthetic oligonucleotide
  Sense strand starting at position 3235 of SEQ ID NO: 914124
aauggaaaugcccagucuu

SEQ ID NO: 979849 - RNA, 19 nt, Artificial Sequence
  Description of Artificial Sequence: Synthetic oligonucleotide
  Antisense strand to SEQ ID NO: 979848
aagacugggcauuuccauu

SEQ ID NO: 979850 - RNA, 19 nt, Artificial Sequence
  Description of Artificial Sequence: Synthetic oligonucleotide
  Sense strand starting at position 2996 of SEQ ID NO: 914124
ugaggauucucuguagaau

SEQ ID NO: 979851 - RNA, 19 nt, Artificial Sequence
  Description of Artificial Sequence: Synthetic oligonucleotide
  Antisense strand to SEQ ID NO: 979850
auucuacagagaauccuca

SEQ ID NO: 979852 - RNA, 19 nt, Artificial Sequence
  Description of Artificial Sequence: Synthetic oligonucleotide
  Sense strand starting at position 2993 of SEQ ID NO: 914124
uaaugaggauucucuguag

SEQ ID NO: 979853 - RNA, 19 nt, Artificial Sequence
  Description of Artificial Sequence: Synthetic oligonucleotide
  Antisense strand to SEQ ID NO: 979852
cuacagagaauccucauua

SEQ ID NO: 979854 - RNA, 19 nt, Artificial Sequence
  Description of Artificial Sequence: Synthetic oligonucleotide
  Sense strand starting at position 83 of SEQ ID NO: 914124
acgaaaccuugaucuuuaa

SEQ ID NO: 979855 - RNA, 19 nt, Artificial Sequence
  Description of Artificial Sequence: Synthetic oligonucleotide
  Antisense strand to SEQ ID NO: 979854
uuaaagaucaagguuucgu

SEQ ID NO: 979856 - RNA, 19 nt, Artificial Sequence
  Description of Artificial Sequence: Synthetic oligonucleotide
  Sense strand starting at position 3134 of SEQ ID NO: 914124
gguuuccucguaucguauu

SEQ ID NO: 979857 - RNA, 19 nt, Artificial Sequence
  Description of Artificial Sequence: Synthetic oligonucleotide
  Antisense strand to SEQ ID NO: 979856
aauacgauacgaggaaacc

SEQ ID NO: 979858 - RNA, 19 nt, Artificial Sequence
  Description of Artificial Sequence: Synthetic oligonucleotide
  Sense strand starting at position 998 of SEQ ID NO: 914124
uuugacagagccugaagau

SEQ ID NO: 979859 - RNA, 19 nt, Artificial Sequence
  Description of Artificial Sequence: Synthetic oligonucleotide
  Antisense strand to SEQ ID NO: 979858
aucuucaggcucugucaaa

SEQ ID NO: 979860 - RNA, 19 nt, Artificial Sequence
  Description of Artificial Sequence: Synthetic oligonucleotide
  Sense strand starting at position 3894 of SEQ ID NO: 914124
gaggcuauccuggaguauc

SEQ ID NO: 979861 - RNA, 19 nt, Artificial Sequence
  Description of Artificial Sequence: Synthetic oligonucleotide
  Antisense strand to SEQ ID NO: 979860
gauacuccaggauagccuc

SEQ ID NO: 979862 - RNA, 19 nt, Artificial Sequence
  Description of Artificial Sequence: Synthetic oligonucleotide
  Sense strand starting at position 328 of SEQ ID NO: 914124
aggcuugggauguaacuuu

SEQ ID NO: 979863 - RNA, 19 nt, Artificial Sequence
  Description of Artificial Sequence: Synthetic oligonucleotide
  Antisense strand to SEQ ID NO: 979862
aaaguuacaucccaagccu

SEQ ID NO: 979864 - RNA, 19 nt, Artificial Sequence
  Description of Artificial Sequence: Synthetic oligonucleotide
  Sense strand starting at position 3805 of SEQ ID NO: 914124
uggaguugugaauauguua

SEQ ID NO: 979865 - RNA, 19 nt, Artificial Sequence
  Description of Artificial Sequence: Synthetic oligonucleotide
  Antisense strand to SEQ ID NO: 979864
uaacauauucacaacucca

SEQ ID NO: 979866 - RNA, 19 nt, Artificial Sequence
  Description of Artificial Sequence: Synthetic oligonucleotide
  Sense strand starting at position 2834 of SEQ ID NO: 914124
ugaagagcccgugacuaua

SEQ ID NO: 979867 - RNA, 19 nt, Artificial Sequence
  Description of Artificial Sequence: Synthetic oligonucleotide
  Antisense strand to SEQ ID NO: 979866
uauagucacgggcucuuca

SEQ ID NO: 979868 - RNA, 19 nt, Artificial Sequence
  Description of Artificial Sequence: Synthetic oligonucleotide
  Sense strand starting at position 2278 of SEQ ID NO: 914124
aggagucucugagucauga

SEQ ID NO: 979869 - RNA, 19 nt, Artificial Sequence
  Description of Artificial Sequence: Synthetic oligonucleotide
  Antisense strand to SEQ ID NO: 979868
ucaugacucagagacuccu

SEQ ID NO: 979870 - RNA, 19 nt, Artificial Sequence
  Description of Artificial Sequence: Synthetic oligonucleotide
  Sense strand starting at position 572 of SEQ ID NO: 914124
gagggaacucacugugcaa

SEQ ID NO: 979871 - RNA, 19 nt, Artificial Sequence
  Description of Artificial Sequence: Synthetic oligonucleotide
  Antisense strand to SEQ ID NO: 979870
uugcacagugaguucccuc

SEQ ID NO: 979872 - RNA, 19 nt, Artificial Sequence
  Description of Artificial Sequence: Synthetic oligonucleotide
  Sense strand starting at position 445 of SEQ ID NO: 914124
gaauuagucccaggcagag

SEQ ID NO: 979873 - RNA, 19 nt, Artificial Sequence
  Description of Artificial Sequence: Synthetic oligonucleotide
  Antisense strand to SEQ ID NO: 979872
cucugccugggacuaauuc

SEQ ID NO: 979874 - RNA, 19 nt, Artificial Sequence
  Description of Artificial Sequence: Synthetic oligonucleotide
  Sense strand starting at position 3931 of SEQ ID NO: 914124
ucaugaagguccuuuaauu

SEQ ID NO: 979875 - RNA, 19 nt, Artificial Sequence
  Description of Artificial Sequence: Synthetic oligonucleotide
  Antisense strand to SEQ ID NO: 979874
aauuaaaggaccuucauga

SEQ ID NO: 979876 - RNA, 19 nt, Artificial Sequence
  Description of Artificial Sequence: Synthetic oligonucleotide
  Sense strand starting at position 138 of SEQ ID NO: 914124
acguuucuugaacauuauu

SEQ ID NO: 979877 - RNA, 19 nt, Artificial Sequence
  Description of Artificial Sequence: Synthetic oligonucleotide
  Antisense strand to SEQ ID NO: 979876
aauaauguucaagaaacgu

SEQ ID NO: 979878 - RNA, 19 nt, Artificial Sequence
  Description of Artificial Sequence: Synthetic oligonucleotide
  Sense strand starting at position 302 of SEQ ID NO: 914124
ggucauauuccaugaucac

SEQ ID NO: 979879 - RNA, 19 nt, Artificial Sequence
  Description of Artificial Sequence: Synthetic oligonucleotide
  Antisense strand to SEQ ID NO: 979878
gugaucauggaauaugacc

SEQ ID NO: 979880 - RNA, 19 nt, Artificial Sequence
  Description of Artificial Sequence: Synthetic oligonucleotide
  Sense strand starting at position 797 of SEQ ID NO: 914124
aguucucuccgguaacaga

SEQ ID NO: 979881 - RNA, 19 nt, Artificial Sequence
  Description of Artificial Sequence: Synthetic oligonucleotide
  Antisense strand to SEQ ID NO: 979880
ucuguuaccggagagaacu

SEQ ID NO: 979882 - RNA, 19 nt, Artificial Sequence
  Description of Artificial Sequence: Synthetic oligonucleotide
  Sense strand starting at position 1264 of SEQ ID NO: 914124
ugacguaacuauucgagaa

SEQ ID NO: 979883 - RNA, 19 nt, Artificial Sequence
  Description of Artificial Sequence: Synthetic oligonucleotide
  Antisense strand to SEQ ID NO: 979882
uucucgaauaguuacguca

SEQ ID NO: 979884 - RNA, 19 nt, Artificial Sequence
  Description of Artificial Sequence: Synthetic oligonucleotide
  Sense strand starting at position 326 of SEQ ID NO: 914124
ugaggcuugggauguaacu

SEQ ID NO: 979885 - RNA, 19 nt, Artificial Sequence
  Description of Artificial Sequence: Synthetic oligonucleotide
  Antisense strand to SEQ ID NO: 979884
aguuacaucccaagccuca

SEQ ID NO: 979886 - RNA, 19 nt, Artificial Sequence
  Description of Artificial Sequence: Synthetic oligonucleotide
  Sense strand starting at position 3893 of SEQ ID NO: 914124
ggaggcuauccuggaguau

SEQ ID NO: 979887 - RNA, 19 nt, Artificial Sequence
  Description of Artificial Sequence: Synthetic oligonucleotide
  Antisense strand to SEQ ID NO: 979886
auacuccaggauagccucc

SEQ ID NO: 979888 - RNA, 19 nt, Artificial Sequence
  Description of Artificial Sequence: Synthetic oligonucleotide
  Sense strand starting at position 1096 of SEQ ID NO: 914124
gguguauucggcgcucgga

SEQ ID NO: 979889 - RNA, 19 nt, Artificial Sequence
  Description of Artificial Sequence: Synthetic oligonucleotide
  Antisense strand to SEQ ID NO: 979888
uccgagcgccgaauacacc

SEQ ID NO: 979890 - RNA, 19 nt, Artificial Sequence
  Description of Artificial Sequence: Synthetic oligonucleotide
  Sense strand starting at position 574 of SEQ ID NO: 914124
gggaacucacugugcaauu

SEQ ID NO: 979891 - RNA, 19 nt, Artificial Sequence
  Description of Artificial Sequence: Synthetic oligonucleotide
  Antisense strand to SEQ ID NO: 979890
aauugcacagugaguuccc

SEQ ID NO: 979892 - RNA, 19 nt, Artificial Sequence
  Description of Artificial Sequence: Synthetic oligonucleotide
  Sense strand starting at position 1304 of SEQ ID NO: 914124
ggaaauccagcgcagaguu

SEQ ID NO: 979893 - RNA, 19 nt, Artificial Sequence
  Description of Artificial Sequence: Synthetic oligonucleotide
  Antisense strand to SEQ ID NO: 979892
aacucugcgcuggauuucc

SEQ ID NO: 979894 - RNA, 19 nt, Artificial Sequence
  Description of Artificial Sequence: Synthetic oligonucleotide
  Sense strand starting at position 415 of SEQ ID NO: 914124
ccuauuugcugcuccgauu

SEQ ID NO: 979895 - RNA, 19 nt, Artificial Sequence
  Description of Artificial Sequence: Synthetic oligonucleotide
  Antisense strand to SEQ ID NO: 979894
aaucggagcagcaaauagg

SEQ ID NO: 979896 - RNA, 19 nt, Artificial Sequence
  Description of Artificial Sequence: Synthetic oligonucleotide
  Sense strand starting at position 11 of SEQ ID NO: 914124
gaguccuaccuugaugugu

SEQ ID NO: 979897 - RNA, 19 nt, Artificial Sequence
  Description of Artificial Sequence: Synthetic oligonucleotide
  Antisense strand to SEQ ID NO: 979896
acacaucaagguaggacuc

SEQ ID NO: 979898 - RNA, 19 nt, Artificial Sequence
  Description of Artificial Sequence: Synthetic oligonucleotide
  Sense strand starting at position 3215 of SEQ ID NO: 914124
ucugcugucggugaagaga

SEQ ID NO: 979899 - RNA, 19 nt, Artificial Sequence
  Description of Artificial Sequence: Synthetic oligonucleotide
  Antisense strand to SEQ ID NO: 979898
ucucuucaccgacagcaga

SEQ ID NO: 979900 - RNA, 19 nt, Artificial Sequence
  Description of Artificial Sequence: Synthetic oligonucleotide
  Sense strand starting at position 632 of SEQ ID NO: 914125
guaaucuauccggaauaau

SEQ ID NO: 979901 - RNA, 19 nt, Artificial Sequence
  Description of Artificial Sequence: Synthetic oligonucleotide
  Antisense strand to SEQ ID NO: 979900
auuauuccggauagauuac

SEQ ID NO: 979902 - RNA, 19 nt, Artificial Sequence
  Description of Artificial Sequence: Synthetic oligonucleotide
  Sense strand starting at position 667 of SEQ ID NO: 914125
aagacauaucuuuggagug

SEQ ID NO: 979903 - RNA, 19 nt, Artificial Sequence
  Description of Artificial Sequence: Synthetic oligonucleotide
  Antisense strand to SEQ ID NO: 979902
cacuccaaagauaugucuu

SEQ ID NO: 979904 - RNA, 19 nt, Artificial Sequence
  Description of Artificial Sequence: Synthetic oligonucleotide
  Sense strand starting at position 1560 of SEQ ID NO: 914125
cuaggucucaggcaaagau

SEQ ID NO: 979905 - RNA, 19 nt, Artificial Sequence
  Description of Artificial Sequence: Synthetic oligonucleotide
  Antisense strand to SEQ ID NO: 979904
aucuuugccugagaccuag

SEQ ID NO: 979906 - RNA, 19 nt, Artificial Sequence
  Description of Artificial Sequence: Synthetic oligonucleotide
  Sense strand starting at position 666 of SEQ ID NO: 914125
uaagacauaucuuuggagu

SEQ ID NO: 979907 - RNA, 19 nt, Artificial Sequence
  Description of Artificial Sequence: Synthetic oligonucleotide
  Antisense strand to SEQ ID NO: 979906
acuccaaagauaugucuua

SEQ ID NO: 979908 - RNA, 19 nt, Artificial Sequence
  Description of Artificial Sequence: Synthetic oligonucleotide
  Sense strand starting at position 2361 of SEQ ID NO: 914125
uggagauaaugugcacaaa

SEQ ID NO: 979909 - RNA, 19 nt, Artificial Sequence
  Description of Artificial Sequence: Synthetic oligonucleotide
  Antisense strand to SEQ ID NO: 979908
uuugugcacauuaucucca

SEQ ID NO: 979910 - RNA, 19 nt, Artificial Sequence
  Description of Artificial Sequence: Synthetic oligonucleotide
  Sense strand starting at position 3119 of SEQ ID NO: 914125
gaaagagcuucuuuaugga

SEQ ID NO: 979911 - RNA, 19 nt, Artificial Sequence
  Description of Artificial Sequence: Synthetic oligonucleotide
  Antisense strand to SEQ ID NO: 979910
uccauaaagaagcucuuuc

SEQ ID NO: 979912 - RNA, 19 nt, Artificial Sequence
  Description of Artificial Sequence: Synthetic oligonucleotide
  Sense strand starting at position 3465 of SEQ ID NO: 914125
agagcagaauguguagaaa

SEQ ID NO: 979913 - RNA, 19 nt, Artificial Sequence
  Description of Artificial Sequence: Synthetic oligonucleotide
  Antisense strand to SEQ ID NO: 979912
uuucuacacauucugcucu

SEQ ID NO: 979914 - RNA, 19 nt, Artificial Sequence
  Description of Artificial Sequence: Synthetic oligonucleotide
  Sense strand starting at position 1180 of SEQ ID NO: 914125
ccagauugacgaugaagua

SEQ ID NO: 979915 - RNA, 19 nt, Artificial Sequence
  Description of Artificial Sequence: Synthetic oligonucleotide
  Antisense strand to SEQ ID NO: 979914
uacuucaucgucaaucugg

SEQ ID NO: 979916 - RNA, 19 nt, Artificial Sequence
  Description of Artificial Sequence: Synthetic oligonucleotide
  Sense strand starting at position 2485 of SEQ ID NO: 914125
ggagcguuuccagcgaguu

SEQ ID NO: 979917 - RNA, 19 nt, Artificial Sequence
  Description of Artificial Sequence: Synthetic oligonucleotide
  Antisense strand to SEQ ID NO: 979916
aacucgcuggaaacgcucc

SEQ ID NO: 979918 - RNA, 19 nt, Artificial Sequence
  Description of Artificial Sequence: Synthetic oligonucleotide
  Sense strand starting at position 1650 of SEQ ID NO: 914125
ucgaauaucauguggaaac

SEQ ID NO: 979919 - RNA, 19 nt, Artificial Sequence
  Description of Artificial Sequence: Synthetic oligonucleotide
  Antisense strand to SEQ ID NO: 979918
guuuccacaugauauucga

SEQ ID NO: 979920 - RNA, 19 nt, Artificial Sequence
  Description of Artificial Sequence: Synthetic oligonucleotide
  Sense strand starting at position 2338 of SEQ ID NO: 914125
acaguacauuugugaauuu

SEQ ID NO: 979921 - RNA, 19 nt, Artificial Sequence
  Description of Artificial Sequence: Synthetic oligonucleotide
  Antisense strand to SEQ ID NO: 979920
aaauucacaaauguacugu

SEQ ID NO: 979922 - RNA, 19 nt, Artificial Sequence
  Description of Artificial Sequence: Synthetic oligonucleotide
  Sense strand starting at position 2675 of SEQ ID NO: 914125
gugugaagcagugaagaug

SEQ ID NO: 979923 - RNA, 19 nt, Artificial Sequence
  Description of Artificial Sequence: Synthetic oligonucleotide
  Antisense strand to SEQ ID NO: 979922
caucuucacugcuucacac

SEQ ID NO: 979924 - RNA, 19 nt, Artificial Sequence
  Description of Artificial Sequence: Synthetic oligonucleotide
  Sense strand starting at position 1049 of SEQ ID NO: 914125
gacaaacauggcugugaug

SEQ ID NO: 979925 - RNA, 19 nt, Artificial Sequence
  Description of Artificial Sequence: Synthetic oligonucleotide
  Antisense strand to SEQ ID NO: 979924
caucacagccauguuuguc

SEQ ID NO: 979926 - RNA, 19 nt, Artificial Sequence
  Description of Artificial Sequence: Synthetic oligonucleotide
  Sense strand starting at position 3659 of SEQ ID NO: 914125
accuccacuguuuauguaa

SEQ ID NO: 979927 - RNA, 19 nt, Artificial Sequence
  Description of Artificial Sequence: Synthetic oligonucleotide
  Antisense strand to SEQ ID NO: 979926
uuacauaaacaguggaggu

SEQ ID NO: 979928 - RNA, 19 nt, Artificial Sequence
  Description of Artificial Sequence: Synthetic oligonucleotide
  Sense strand starting at position 1640 of SEQ ID NO: 914125
gccagacuucucgaauauc

SEQ ID NO: 979929 - RNA, 19 nt, Artificial Sequence
  Description of Artificial Sequence: Synthetic oligonucleotide
  Antisense strand to SEQ ID NO: 979928
gauauucgagaagucuggc

SEQ ID NO: 979930 - RNA, 19 nt, Artificial Sequence
  Description of Artificial Sequence: Synthetic oligonucleotide
  Sense strand starting at position 1048 of SEQ ID NO: 914125
ugacaaacauggcugugau

SEQ ID NO: 979931 - RNA, 19 nt, Artificial Sequence
  Description of Artificial Sequence: Synthetic oligonucleotide
  Antisense strand to SEQ ID NO: 979930
aucacagccauguuuguca

SEQ ID NO: 979932 - RNA, 19 nt, Artificial Sequence
  Description of Artificial Sequence: Synthetic oligonucleotide
  Sense strand starting at position 3149 of SEQ ID NO: 914125
augaacuucuggguaaguu

SEQ ID NO: 979933 - RNA, 19 nt, Artificial Sequence
  Description of Artificial Sequence: Synthetic oligonucleotide
  Antisense strand to SEQ ID NO: 979932
aacuuacccagaaguucau

SEQ ID NO: 979934 - RNA, 19 nt, Artificial Sequence
  Description of Artificial Sequence: Synthetic oligonucleotide
  Sense strand starting at position 1238 of SEQ ID NO: 914125
ccagaugacgauggcauua

SEQ ID NO: 979935 - RNA, 19 nt, Artificial Sequence
  Description of Artificial Sequence: Synthetic oligonucleotide
  Antisense strand to SEQ ID NO: 979934
uaaugccaucgucaucugg

SEQ ID NO: 979936 - RNA, 19 nt, Artificial Sequence
  Description of Artificial Sequence: Synthetic oligonucleotide
  Sense strand starting at position 2475 of SEQ ID NO: 914125
gccagaacccggagcguuu

SEQ ID NO: 979937 - RNA, 19 nt, Artificial Sequence
  Description of Artificial Sequence: Synthetic oligonucleotide
  Antisense strand to SEQ ID NO: 979936
aaacgcuccggguucuggc

SEQ ID NO: 979938 - RNA, 19 nt, Artificial Sequence
  Description of Artificial Sequence: Synthetic oligonucleotide
  Sense strand starting at position 3148 of SEQ ID NO: 914125
uaugaacuucuggguaagu

SEQ ID NO: 979939 - RNA, 19 nt, Artificial Sequence
  Description of Artificial Sequence: Synthetic oligonucleotide
  Antisense strand to SEQ ID NO: 979938
acuuacccagaaguucaua

SEQ ID NO: 979940 - RNA, 19 nt, Artificial Sequence
  Description of Artificial Sequence: Synthetic oligonucleotide
  Sense strand starting at position 145 of SEQ ID NO: 914125
gccagaugccagcaauaac

SEQ ID NO: 979941 - RNA, 19 nt, Artificial Sequence
  Description of Artificial Sequence: Synthetic oligonucleotide
  Antisense strand to SEQ ID NO: 979940
guuauugcuggcaucuggc

SEQ ID NO: 979942 - RNA, 19 nt, Artificial Sequence
  Description of Artificial Sequence: Synthetic oligonucleotide
  Sense strand starting at position 2689 of SEQ ID NO: 914125
agauguuucugagcaacug

SEQ ID NO: 979943 - RNA, 19 nt, Artificial Sequence
  Description of Artificial Sequence: Synthetic oligonucleotide
  Antisense strand to SEQ ID NO: 979942
caguugcucagaaacaucu

SEQ ID NO: 979944 - RNA, 19 nt, Artificial Sequence
  Description of Artificial Sequence: Synthetic oligonucleotide
  Sense strand starting at position 3158 of SEQ ID NO: 914125
uggguaaguucaucgacaa

SEQ ID NO: 979945 - RNA, 19 nt, Artificial Sequence
  Description of Artificial Sequence: Synthetic oligonucleotide
  Antisense strand to SEQ ID NO: 979944
uugucgaugaacuuaccca

SEQ ID NO: 979946 - RNA, 19 nt, Artificial Sequence
  Description of Artificial Sequence: Synthetic oligonucleotide
  Sense strand starting at position 3159 of SEQ ID NO: 914125
ggguaaguucaucgacaau

SEQ ID NO: 979947 - RNA, 19 nt, Artificial Sequence
  Description of Artificial Sequence: Synthetic oligonucleotide
  Antisense strand to SEQ ID NO: 979946
auugucgaugaacuuaccc

SEQ ID NO: 979948 - RNA, 19 nt, Artificial Sequence
  Description of Artificial Sequence: Synthetic oligonucleotide
  Sense strand starting at position 2690 of SEQ ID NO: 914125
gauguuucugagcaacugu

SEQ ID NO: 979949 - RNA, 19 nt, Artificial Sequence
  Description of Artificial Sequence: Synthetic oligonucleotide
  Antisense strand to SEQ ID NO: 979948
acaguugcucagaaacauc

SEQ ID NO: 979950 - RNA, 19 nt, Artificial Sequence
  Description of Artificial Sequence: Synthetic oligonucleotide
  Sense strand starting at position 3183 of SEQ ID NO: 914125
cugaaauuguaucuauugu

SEQ ID NO: 979951 - RNA, 19 nt, Artificial Sequence
  Description of Artificial Sequence: Synthetic oligonucleotide
  Antisense strand to SEQ ID NO: 979950
acaauagauacaauuucag

SEQ ID NO: 979952 - RNA, 19 nt, Artificial Sequence
  Description of Artificial Sequence: Synthetic oligonucleotide
  Sense strand starting at position 336 of SEQ ID NO: 914125
cugccaucugcugauauca

SEQ ID NO: 979953 - RNA, 19 nt, Artificial Sequence
  Description of Artificial Sequence: Synthetic oligonucleotide
  Antisense strand to SEQ ID NO: 979952
ugauaucagcagauggcag

SEQ ID NO: 979954 - RNA, 19 nt, Artificial Sequence
  Description of Artificial Sequence: Synthetic oligonucleotide
  Sense strand starting at position 1453 of SEQ ID NO: 914125
cggauuugcuaugaaagag

SEQ ID NO: 979955 - RNA, 19 nt, Artificial Sequence
  Description of Artificial Sequence: Synthetic oligonucleotide
  Antisense strand to SEQ ID NO: 979954
cucuuucauagcaaauccg

SEQ ID NO: 979956 - RNA, 19 nt, Artificial Sequence
  Description of Artificial Sequence: Synthetic oligonucleotide
  Sense strand starting at position 812 of SEQ ID NO: 914125
gugucuaacccucagucua

SEQ ID NO: 979957 - RNA, 19 nt, Artificial Sequence
  Description of Artificial Sequence: Synthetic oligonucleotide
  Antisense strand to SEQ ID NO: 979956
uagacugaggguuagacac

SEQ ID NO: 979958 - RNA, 19 nt, Artificial Sequence
  Description of Artificial Sequence: Synthetic oligonucleotide
  Sense strand starting at position 630 of SEQ ID NO: 914125
guguaaucuauccggaaua

SEQ ID NO: 979959 - RNA, 19 nt, Artificial Sequence
  Description of Artificial Sequence: Synthetic oligonucleotide
  Antisense strand to SEQ ID NO: 979958
uauuccggauagauuacac

SEQ ID NO: 979960 - RNA, 19 nt, Artificial Sequence
  Description of Artificial Sequence: Synthetic oligonucleotide
  Sense strand starting at position 536 of SEQ ID NO: 914125
ccaacauuagccugaagcu

SEQ ID NO: 979961 - RNA, 19 nt, Artificial Sequence
  Description of Artificial Sequence: Synthetic oligonucleotide
  Antisense strand to SEQ ID NO: 979960
agcuucaggcuaauguugg

SEQ ID NO: 979962 - RNA, 19 nt, Artificial Sequence
  Description of Artificial Sequence: Synthetic oligonucleotide
  Sense strand starting at position 585 of SEQ ID NO: 914125
gcccuauuagauuguaacu

SEQ ID NO: 979963 - RNA, 19 nt, Artificial Sequence
  Description of Artificial Sequence: Synthetic oligonucleotide
  Antisense strand to SEQ ID NO: 979962
aguuacaaucuaauagggc

SEQ ID NO: 979964 - RNA, 19 nt, Artificial Sequence
  Description of Artificial Sequence: Synthetic oligonucleotide
  Sense strand starting at position 3371 of SEQ ID NO: 914125
aagggucucugccuuugau

SEQ ID NO: 979965 - RNA, 19 nt, Artificial Sequence
  Description of Artificial Sequence: Synthetic oligonucleotide
  Antisense strand to SEQ ID NO: 979964
aucaaaggcagagacccuu

SEQ ID NO: 979966 - RNA, 19 nt, Artificial Sequence
  Description of Artificial Sequence: Synthetic oligonucleotide
  Sense strand starting at position 2419 of SEQ ID NO: 914125
uggaguuucuggcccgaag

SEQ ID NO: 979967 - RNA, 19 nt, Artificial Sequence
  Description of Artificial Sequence: Synthetic oligonucleotide
  Antisense strand to SEQ ID NO: 979966
cuucgggccagaaacucca

SEQ ID NO: 979968 - RNA, 19 nt, Artificial Sequence
  Description of Artificial Sequence: Synthetic oligonucleotide
  Sense strand starting at position 1638 of SEQ ID NO: 914125
cggccagacuucucgaaua

SEQ ID NO: 979969 - RNA, 19 nt, Artificial Sequence
  Description of Artificial Sequence: Synthetic oligonucleotide
  Antisense strand to SEQ ID NO: 979968
uauucgagaagucuggccg

SEQ ID NO: 979970 - RNA, 19 nt, Artificial Sequence
  Description of Artificial Sequence: Synthetic oligonucleotide
  Sense strand starting at position 898 of SEQ ID NO: 914125
agccauucccaugguucua

SEQ ID NO: 979971 - RNA, 19 nt, Artificial Sequence
  Description of Artificial Sequence: Synthetic oligonucleotide
  Antisense strand to SEQ ID NO: 979970
uagaaccaugggaauggcu

SEQ ID NO: 979972 - RNA, 19 nt, Artificial Sequence
  Description of Artificial Sequence: Synthetic oligonucleotide
  Sense strand starting at position 2087 of SEQ ID NO: 914125
uuggccuugucucuugaaa

SEQ ID NO: 979973 - RNA, 19 nt, Artificial Sequence
  Description of Artificial Sequence: Synthetic oligonucleotide
  Antisense strand to SEQ ID NO: 979972
uuucaagagacaaggccaa

SEQ ID NO: 979974 - RNA, 19 nt, Artificial Sequence
  Description of Artificial Sequence: Synthetic oligonucleotide
  Sense strand starting at position 3842 of SEQ ID NO: 914125
cuggccuucugaguccaua

SEQ ID NO: 979975 - RNA, 19 nt, Artificial Sequence
  Description of Artificial Sequence: Synthetic oligonucleotide
  Antisense strand to SEQ ID NO: 979974
uauggacucagaaggccag

SEQ ID NO: 979976 - RNA, 19 nt, Artificial Sequence
  Description of Artificial Sequence: Synthetic oligonucleotide
  Sense strand starting at position 2671 of SEQ ID NO: 914125
acgugugugaagcagugaa

SEQ ID NO: 979977 - RNA, 19 nt, Artificial Sequence
  Description of Artificial Sequence: Synthetic oligonucleotide
  Antisense strand to SEQ ID NO: 979976
uucacugcuucacacacgu

SEQ ID NO: 979978 - RNA, 19 nt, Artificial Sequence
  Description of Artificial Sequence: Synthetic oligonucleotide
  Sense strand starting at position 918 of SEQ ID NO: 914125
ccaaacuugcuguguaauc

SEQ ID NO: 979979 - RNA, 19 nt, Artificial Sequence
  Description of Artificial Sequence: Synthetic oligonucleotide
  Antisense strand to SEQ ID NO: 979978
gauuacacagcaaguuugg

SEQ ID NO: 979980 - RNA, 19 nt, Artificial Sequence
  Description of Artificial Sequence: Synthetic oligonucleotide
  Sense strand starting at position 3967 of SEQ ID NO: 914126
gggugugugcucucaggca

SEQ ID NO: 979981 - RNA, 19 nt, Artificial Sequence
  Description of Artificial Sequence: Synthetic oligonucleotide
  Antisense strand to SEQ ID NO: 979980
ugccugagagcacacaccc

SEQ ID NO: 979982 - RNA, 19 nt, Artificial Sequence
  Description of Artificial Sequence: Synthetic oligonucleotide
  Sense strand starting at position 287 of SEQ ID NO: 914126
augaguucccuagagcaag

SEQ ID NO: 979983 - RNA, 19 nt, Artificial Sequence
  Description of Artificial Sequence: Synthetic oligonucleotide
  Antisense strand to SEQ ID NO: 979982
cuugcucuagggaacucau

SEQ ID NO: 979984 - RNA, 19 nt, Artificial Sequence
  Description of Artificial Sequence: Synthetic oligonucleotide
  Sense strand starting at position 2293 of SEQ ID NO: 914126
aguuaugugcuagagagaa

SEQ ID NO: 979985 - RNA, 19 nt, Artificial Sequence
  Description of Artificial Sequence: Synthetic oligonucleotide
  Antisense strand to SEQ ID NO: 979984
uucucucuagcacauaacu

SEQ ID NO: 979986 - RNA, 19 nt, Artificial Sequence
  Description of Artificial Sequence: Synthetic oligonucleotide
  Sense strand starting at position 2230 of SEQ ID NO: 914126
ggaucugggauacgacauu

SEQ ID NO: 979987 - RNA, 19 nt, Artificial Sequence
  Description of Artificial Sequence: Synthetic oligonucleotide
  Antisense strand to SEQ ID NO: 979986
aaugucguaucccagaucc

SEQ ID NO: 979988 - RNA, 19 nt, Artificial Sequence
  Description of Artificial Sequence: Synthetic oligonucleotide
  Sense strand starting at position 53 of SEQ ID NO: 914126
ggaacucaauauguaaagu

SEQ ID NO: 979989 - RNA, 19 nt, Artificial Sequence
  Description of Artificial Sequence: Synthetic oligonucleotide
  Antisense strand to SEQ ID NO: 979988
acuuuacauauugaguucc

SEQ ID NO: 979990 - RNA, 19 nt, Artificial Sequence
  Description of Artificial Sequence: Synthetic oligonucleotide
  Sense strand starting at position 2512 of SEQ ID NO: 914126
cucagucaucaagaucgau

SEQ ID NO: 979991 - RNA, 19 nt, Artificial Sequence
  Description of Artificial Sequence: Synthetic oligonucleotide
  Antisense strand to SEQ ID NO: 979990
aucgaucuugaugacugag

SEQ ID NO: 979992 - RNA, 19 nt, Artificial Sequence
  Description of Artificial Sequence: Synthetic oligonucleotide
  Sense strand starting at position 285 of SEQ ID NO: 914126
acaugaguucccuagagca

SEQ ID NO: 979993 - RNA, 19 nt, Artificial Sequence
  Description of Artificial Sequence: Synthetic oligonucleotide
  Antisense strand to SEQ ID NO: 979992
ugcucuagggaacucaugu

SEQ ID NO: 979994 - RNA, 19 nt, Artificial Sequence
  Description of Artificial Sequence: Synthetic oligonucleotide
  Sense strand starting at position 951 of SEQ ID NO: 914126
uggagaaucuugucaacug

SEQ ID NO: 979995 - RNA, 19 nt, Artificial Sequence
  Description of Artificial Sequence: Synthetic oligonucleotide
  Antisense strand to SEQ ID NO: 979994
caguugacaagauucucca

SEQ ID NO: 979996 - RNA, 19 nt, Artificial Sequence
  Description of Artificial Sequence: Synthetic oligonucleotide
  Sense strand starting at position 2241 of SEQ ID NO: 914126
acgacauugacagguuaga

SEQ ID NO: 979997 - RNA, 19 nt, Artificial Sequence
  Description of Artificial Sequence: Synthetic oligonucleotide
  Antisense strand to SEQ ID NO: 979996
ucuaaccugucaaugucgu

SEQ ID NO: 979998 - RNA, 19 nt, Artificial Sequence
  Description of Artificial Sequence: Synthetic oligonucleotide
  Sense strand starting at position 303 of SEQ ID NO: 914126
aagugauaagugcaucuga

SEQ ID NO: 979999 - RNA, 19 nt, Artificial Sequence
  Description of Artificial Sequence: Synthetic oligonucleotide
  Antisense strand to SEQ ID NO: 979998
ucagaugcacuuaucacuu

SEQ ID NO: 980000 - RNA, 19 nt, Artificial Sequence
  Description of Artificial Sequence: Synthetic oligonucleotide
  Sense strand starting at position 295 of SEQ ID NO: 914126
ccuagagcaagugauaagu

SEQ ID NO: 980001 - RNA, 19 nt, Artificial Sequence
  Description of Artificial Sequence: Synthetic oligonucleotide
  Antisense strand to SEQ ID NO: 980000
acuuaucacuugcucuagg

SEQ ID NO: 980002 - RNA, 19 nt, Artificial Sequence
  Description of Artificial Sequence: Synthetic oligonucleotide
  Sense strand starting at position 584 of SEQ ID NO: 914126
cugugcuauggacagauua

SEQ ID NO: 980003 - RNA, 19 nt, Artificial Sequence
  Description of Artificial Sequence: Synthetic oligonucleotide
  Antisense strand to SEQ ID NO: 980002
uaaucuguccauagcacag

SEQ ID NO: 980004 - RNA, 19 nt, Artificial Sequence
  Description of Artificial Sequence: Synthetic oligonucleotide
  Sense strand starting at position 582 of SEQ ID NO: 914126
aucugugcuauggacagau

SEQ ID NO: 980005 - RNA, 19 nt, Artificial Sequence
  Description of Artificial Sequence: Synthetic oligonucleotide
  Antisense strand to SEQ ID NO: 980004
aucuguccauagcacagau

SEQ ID NO: 980006 - RNA, 19 nt, Artificial Sequence
  Description of Artificial Sequence: Synthetic oligonucleotide
  Sense strand starting at position 586 of SEQ ID NO: 914126
gugcuauggacagauuauu

SEQ ID NO: 980007 - RNA, 19 nt, Artificial Sequence
  Description of Artificial Sequence: Synthetic oligonucleotide
  Antisense strand to SEQ ID NO: 980006
aauaaucuguccauagcac

SEQ ID NO: 980008 - RNA, 19 nt, Artificial Sequence
  Description of Artificial Sequence: Synthetic oligonucleotide
  Sense strand starting at position 1001 of SEQ ID NO: 914126
acugacaucucacugguaa

SEQ ID NO: 980009 - RNA, 19 nt, Artificial Sequence
  Description of Artificial Sequence: Synthetic oligonucleotide
  Antisense strand to SEQ ID NO: 980008
uuaccagugagaugucagu

SEQ ID NO: 980010 - RNA, 19 nt, Artificial Sequence
  Description of Artificial Sequence: Synthetic oligonucleotide
  Sense strand starting at position 2295 of SEQ ID NO: 914126
uuaugugcuagagagaagu

SEQ ID NO: 980011 - RNA, 19 nt, Artificial Sequence
  Description of Artificial Sequence: Synthetic oligonucleotide
  Antisense strand to SEQ ID NO: 980010
acuucucucuagcacauaa

SEQ ID NO: 980012 - RNA, 19 nt, Artificial Sequence
  Description of Artificial Sequence: Synthetic oligonucleotide
  Sense strand starting at position 2252 of SEQ ID NO: 914126
agguuagagaguuagcacu

SEQ ID NO: 980013 - RNA, 19 nt, Artificial Sequence
  Description of Artificial Sequence: Synthetic oligonucleotide
  Antisense strand to SEQ ID NO: 980012
agugcuaacucucuaaccu

SEQ ID NO: 980014 - RNA, 19 nt, Artificial Sequence
  Description of Artificial Sequence: Synthetic oligonucleotide
  Sense strand starting at position 2297 of SEQ ID NO: 914126
augugcuagagagaaguuu

SEQ ID NO: 980015 - RNA, 19 nt, Artificial Sequence
  Description of Artificial Sequence: Synthetic oligonucleotide
  Antisense strand to SEQ ID NO: 980014
aaacuucucucuagcacau

SEQ ID NO: 980016 - RNA, 19 nt, Artificial Sequence
  Description of Artificial Sequence: Synthetic oligonucleotide
  Sense strand starting at position 3636 of SEQ ID NO: 914126
accacaccucgacauguau

SEQ ID NO: 980017 - RNA, 19 nt, Artificial Sequence
  Description of Artificial Sequence: Synthetic oligonucleotide
  Antisense strand to SEQ ID NO: 980016
auacaugucgagguguggu

SEQ ID NO: 980018 - RNA, 19 nt, Artificial Sequence
  Description of Artificial Sequence: Synthetic oligonucleotide
  Sense strand starting at position 2515 of SEQ ID NO: 914126
agucaucaagaucgauaau

SEQ ID NO: 980019 - RNA, 19 nt, Artificial Sequence
  Description of Artificial Sequence: Synthetic oligonucleotide
  Antisense strand to SEQ ID NO: 980018
auuaucgaucuugaugacu

SEQ ID NO: 980020 - RNA, 19 nt, Artificial Sequence
  Description of Artificial Sequence: Synthetic oligonucleotide
  Sense strand starting at position 2827 of SEQ ID NO: 914126
caaguauugccagaaaucg

SEQ ID NO: 980021 - RNA, 19 nt, Artificial Sequence
  Description of Artificial Sequence: Synthetic oligonucleotide
  Antisense strand to SEQ ID NO: 980020
cgauuucuggcaauacuug

SEQ ID NO: 980022 - RNA, 19 nt, Artificial Sequence
  Description of Artificial Sequence: Synthetic oligonucleotide
  Sense strand starting at position 3003 of SEQ ID NO: 914126
caguguauuuaguuuaugu

SEQ ID NO: 980023 - RNA, 19 nt, Artificial Sequence
  Description of Artificial Sequence: Synthetic oligonucleotide
  Antisense strand to SEQ ID NO: 980022
acauaaacuaaauacacug

SEQ ID NO: 980024 - RNA, 19 nt, Artificial Sequence
  Description of Artificial Sequence: Synthetic oligonucleotide
  Sense strand starting at position 2824 of SEQ ID NO: 914126
auccaaguauugccagaaa

SEQ ID NO: 980025 - RNA, 19 nt, Artificial Sequence
  Description of Artificial Sequence: Synthetic oligonucleotide
  Antisense strand to SEQ ID NO: 980024
uuucuggcaauacuuggau

SEQ ID NO: 980026 - RNA, 19 nt, Artificial Sequence
  Description of Artificial Sequence: Synthetic oligonucleotide
  Sense strand starting at position 2357 of SEQ ID NO: 914126
gcugguguugccucagcua

SEQ ID NO: 980027 - RNA, 19 nt, Artificial Sequence
  Description of Artificial Sequence: Synthetic oligonucleotide
  Antisense strand to SEQ ID NO: 980026
uagcugaggcaacaccagc

SEQ ID NO: 980028 - RNA, 19 nt, Artificial Sequence
  Description of Artificial Sequence: Synthetic oligonucleotide
  Sense strand starting at position 3741 of SEQ ID NO: 914126
uagagaugagccugcagaa

SEQ ID NO: 980029 - RNA, 19 nt, Artificial Sequence
  Description of Artificial Sequence: Synthetic oligonucleotide
  Antisense strand to SEQ ID NO: 980028
uucugcaggcucaucucua

SEQ ID NO: 980030 - RNA, 19 nt, Artificial Sequence
  Description of Artificial Sequence: Synthetic oligonucleotide
  Sense strand starting at position 1012 of SEQ ID NO: 914126
acugguaaccgagacguaa

SEQ ID NO: 980031 - RNA, 19 nt, Artificial Sequence
  Description of Artificial Sequence: Synthetic oligonucleotide
  Antisense strand to SEQ ID NO: 980030
uuacgucucgguuaccagu

SEQ ID NO: 980032 - RNA, 19 nt, Artificial Sequence
  Description of Artificial Sequence: Synthetic oligonucleotide
  Sense strand starting at position 3827 of SEQ ID NO: 914126
gcaagaaagccucagccaa

SEQ ID NO: 980033 - RNA, 19 nt, Artificial Sequence
  Description of Artificial Sequence: Synthetic oligonucleotide
  Antisense strand to SEQ ID NO: 980032
uuggcugaggcuuucuugc

SEQ ID NO: 980034 - RNA, 19 nt, Artificial Sequence
  Description of Artificial Sequence: Synthetic oligonucleotide
  Sense strand starting at position 3415 of SEQ ID NO: 914126
auuugccuuucuguguaua

SEQ ID NO: 980035 - RNA, 19 nt, Artificial Sequence
  Description of Artificial Sequence: Synthetic oligonucleotide
  Antisense strand to SEQ ID NO: 980034
uauacacagaaaggcaaau

SEQ ID NO: 980036 - RNA, 19 nt, Artificial Sequence
  Description of Artificial Sequence: Synthetic oligonucleotide
  Sense strand starting at position 1021 of SEQ ID NO: 914126
cgagacguaagugaaagua

SEQ ID NO: 980037 - RNA, 19 nt, Artificial Sequence
  Description of Artificial Sequence: Synthetic oligonucleotide
  Antisense strand to SEQ ID NO: 980036
uacuuucacuuacgucucg

SEQ ID NO: 980038 - RNA, 19 nt, Artificial Sequence
  Description of Artificial Sequence: Synthetic oligonucleotide
  Sense strand starting at position 1002 of SEQ ID NO: 914126
cugacaucucacugguaac

SEQ ID NO: 980039 - RNA, 19 nt, Artificial Sequence
  Description of Artificial Sequence: Synthetic oligonucleotide
  Antisense strand to SEQ ID NO: 980038
guuaccagugagaugucag

SEQ ID NO: 980040 - RNA, 19 nt, Artificial Sequence
  Description of Artificial Sequence: Synthetic oligonucleotide
  Sense strand starting at position 3020 of SEQ ID NO: 914126
gugcuccuccaauaaauug

SEQ ID NO: 980041 - RNA, 19 nt, Artificial Sequence
  Description of Artificial Sequence: Synthetic oligonucleotide
  Antisense strand to SEQ ID NO: 980040
caauuuauuggaggagcac

SEQ ID NO: 980042 - RNA, 19 nt, Artificial Sequence
  Description of Artificial Sequence: Synthetic oligonucleotide
  Sense strand starting at position 1088 of SEQ ID NO: 914126
ggagaugucguucacgaaa

SEQ ID NO: 980043 - RNA, 19 nt, Artificial Sequence
  Description of Artificial Sequence: Synthetic oligonucleotide
  Antisense strand to SEQ ID NO: 980042
uuucgugaacgacaucucc

SEQ ID NO: 980044 - RNA, 19 nt, Artificial Sequence
  Description of Artificial Sequence: Synthetic oligonucleotide
  Sense strand starting at position 3815 of SEQ ID NO: 914126
gugaauuccuuggcaagaa

SEQ ID NO: 980045 - RNA, 19 nt, Artificial Sequence
  Description of Artificial Sequence: Synthetic oligonucleotide
  Antisense strand to SEQ ID NO: 980044
uucuugccaaggaauucac

SEQ ID NO: 980046 - RNA, 19 nt, Artificial Sequence
  Description of Artificial Sequence: Synthetic oligonucleotide
  Sense strand starting at position 3814 of SEQ ID NO: 914126
agugaauuccuuggcaaga

SEQ ID NO: 980047 - RNA, 19 nt, Artificial Sequence
  Description of Artificial Sequence: Synthetic oligonucleotide
  Antisense strand to SEQ ID NO: 980046
ucuugccaaggaauucacu

SEQ ID NO: 980048 - RNA, 19 nt, Artificial Sequence
  Description of Artificial Sequence: Synthetic oligonucleotide
  Sense strand starting at position 2474 of SEQ ID NO: 914126
ggaggacucugugccaaau

SEQ ID NO: 980049 - RNA, 19 nt, Artificial Sequence
  Description of Artificial Sequence: Synthetic oligonucleotide
  Antisense strand to SEQ ID NO: 980048
auuuggcacagaguccucc

SEQ ID NO: 980050 - RNA, 19 nt, Artificial Sequence
  Description of Artificial Sequence: Synthetic oligonucleotide
  Sense strand starting at position 1039 of SEQ ID NO: 914126
acaucuaaucagcgaaacu

SEQ ID NO: 980051 - RNA, 19 nt, Artificial Sequence
  Description of Artificial Sequence: Synthetic oligonucleotide
  Antisense strand to SEQ ID NO: 980050
aguuucgcugauuagaugu

SEQ ID NO: 980052 - RNA, 19 nt, Artificial Sequence
  Description of Artificial Sequence: Synthetic oligonucleotide
  Sense strand starting at position 2950 of SEQ ID NO: 914126
auuguaguggcugaacuau

SEQ ID NO: 980053 - RNA, 19 nt, Artificial Sequence
  Description of Artificial Sequence: Synthetic oligonucleotide
  Antisense strand to SEQ ID NO: 980052
auaguucagccacuacaau

SEQ ID NO: 980054 - RNA, 19 nt, Artificial Sequence
  Description of Artificial Sequence: Synthetic oligonucleotide
  Sense strand starting at position 3413 of SEQ ID NO: 914126
ucauuugccuuucugugua

SEQ ID NO: 980055 - RNA, 19 nt, Artificial Sequence
  Description of Artificial Sequence: Synthetic oligonucleotide
  Antisense strand to SEQ ID NO: 980054
uacacagaaaggcaaauga

SEQ ID NO: 980056 - RNA, 19 nt, Artificial Sequence
  Description of Artificial Sequence: Synthetic oligonucleotide
  Sense strand starting at position 2254 of SEQ ID NO: 914126
guuagagaguuagcacuaa

SEQ ID NO: 980057 - RNA, 19 nt, Artificial Sequence
  Description of Artificial Sequence: Synthetic oligonucleotide
  Antisense strand to SEQ ID NO: 980056
uuagugcuaacucucuaac

SEQ ID NO: 980058 - RNA, 19 nt, Artificial Sequence
  Description of Artificial Sequence: Synthetic oligonucleotide
  Sense strand starting at position 129 of SEQ ID NO: 914126
uucucaggugccuauuaua

SEQ ID NO: 980059 - RNA, 19 nt, Artificial Sequence
  Description of Artificial Sequence: Synthetic oligonucleotide
  Antisense strand to SEQ ID NO: 980058
uauaauaggcaccugagaa

SEQ ID NO: 980060 - RNA, 19 nt, Artificial Sequence
  Description of Artificial Sequence: Synthetic oligonucleotide
  Sense strand starting at position 2508 of SEQ ID NO: 914127
uccaaaugucaacauucga

SEQ ID NO: 980061 - RNA, 19 nt, Artificial Sequence
  Description of Artificial Sequence: Synthetic oligonucleotide
  Antisense strand to SEQ ID NO: 980060
ucgaauguugacauuugga

SEQ ID NO: 980062 - RNA, 19 nt, Artificial Sequence
  Description of Artificial Sequence: Synthetic oligonucleotide
  Sense strand starting at position 2568 of SEQ ID NO: 914127
ggaggcuuccgagauacug

SEQ ID NO: 980063 - RNA, 19 nt, Artificial Sequence
  Description of Artificial Sequence: Synthetic oligonucleotide
  Antisense strand to SEQ ID NO: 980062
caguaucucggaagccucc

SEQ ID NO: 980064 - RNA, 19 nt, Artificial Sequence
  Description of Artificial Sequence: Synthetic oligonucleotide
  Sense strand starting at position 2231 of SEQ ID NO: 914127
ggcauuaugauagauguuu

SEQ ID NO: 980065 - RNA, 19 nt, Artificial Sequence
  Description of Artificial Sequence: Synthetic oligonucleotide
  Antisense strand to SEQ ID NO: 980064
aaacaucuaucauaaugcc

SEQ ID NO: 980066 - RNA, 19 nt, Artificial Sequence
  Description of Artificial Sequence: Synthetic oligonucleotide
  Sense strand starting at position 259 of SEQ ID NO: 914127
agacuuaacacugguggua

SEQ ID NO: 980067 - RNA, 19 nt, Artificial Sequence
  Description of Artificial Sequence: Synthetic oligonucleotide
  Antisense strand to SEQ ID NO: 980066
uaccaccaguguuaagucu

SEQ ID NO: 980068 - RNA, 19 nt, Artificial Sequence
  Description of Artificial Sequence: Synthetic oligonucleotide
  Sense strand starting at position 1146 of SEQ ID NO: 914127
ggaccaagagcgugaagau

SEQ ID NO: 980069 - RNA, 19 nt, Artificial Sequence
  Description of Artificial Sequence: Synthetic oligonucleotide
  Antisense strand to SEQ ID NO: 980068
aucuucacgcucuuggucc

SEQ ID NO: 980070 - RNA, 19 nt, Artificial Sequence
  Description of Artificial Sequence: Synthetic oligonucleotide
  Sense strand starting at position 273 of SEQ ID NO: 914127
ugguacucagcccauauau

SEQ ID NO: 980071 - RNA, 19 nt, Artificial Sequence
  Description of Artificial Sequence: Synthetic oligonucleotide
  Antisense strand to SEQ ID NO: 980070
auauaugggcugaguacca

SEQ ID NO: 980072 - RNA, 19 nt, Artificial Sequence
  Description of Artificial Sequence: Synthetic oligonucleotide
  Sense strand starting at position 229 of SEQ ID NO: 914127
aagugaugcccaggaaccu

SEQ ID NO: 980073 - RNA, 19 nt, Artificial Sequence
  Description of Artificial Sequence: Synthetic oligonucleotide
  Antisense strand to SEQ ID NO: 980072
agguuccugggcaucacuu

SEQ ID NO: 980074 - RNA, 19 nt, Artificial Sequence
  Description of Artificial Sequence: Synthetic oligonucleotide
  Sense strand starting at position 3797 of SEQ ID NO: 914127
acuuguaacucuguggaau

SEQ ID NO: 980075 - RNA, 19 nt, Artificial Sequence
  Description of Artificial Sequence: Synthetic oligonucleotide
  Antisense strand to SEQ ID NO: 980074
auuccacagaguuacaagu

SEQ ID NO: 980076 - RNA, 19 nt, Artificial Sequence
  Description of Artificial Sequence: Synthetic oligonucleotide
  Sense strand starting at position 2183 of SEQ ID NO: 914127
acauuugccugagaauaau

SEQ ID NO: 980077 - RNA, 19 nt, Artificial Sequence
  Description of Artificial Sequence: Synthetic oligonucleotide
  Antisense strand to SEQ ID NO: 980076
auuauucucaggcaaaugu

SEQ ID NO: 980078 - RNA, 19 nt, Artificial Sequence
  Description of Artificial Sequence: Synthetic oligonucleotide
  Sense strand starting at position 3333 of SEQ ID NO: 914127
gugguugugaaauauguac

SEQ ID NO: 980079 - RNA, 19 nt, Artificial Sequence
  Description of Artificial Sequence: Synthetic oligonucleotide
  Antisense strand to SEQ ID NO: 980078
guacauauuucacaaccac

SEQ ID NO: 980080 - RNA, 19 nt, Artificial Sequence
  Description of Artificial Sequence: Synthetic oligonucleotide
  Sense strand starting at position 3337 of SEQ ID NO: 914127
uugugaaauauguacguua

SEQ ID NO: 980081 - RNA, 19 nt, Artificial Sequence
  Description of Artificial Sequence: Synthetic oligonucleotide
  Antisense strand to SEQ ID NO: 980080
uaacguacauauuucacaa

SEQ ID NO: 980082 - RNA, 19 nt, Artificial Sequence
  Description of Artificial Sequence: Synthetic oligonucleotide
  Sense strand starting at position 2162 of SEQ ID NO: 914127
gggcauuggugaccaccua

SEQ ID NO: 980083 - RNA, 19 nt, Artificial Sequence
  Description of Artificial Sequence: Synthetic oligonucleotide
  Antisense strand to SEQ ID NO: 980082
uagguggucaccaaugccc

SEQ ID NO: 980084 - RNA, 19 nt, Artificial Sequence
  Description of Artificial Sequence: Synthetic oligonucleotide
  Sense strand starting at position 2189 of SEQ ID NO: 914127
gccugagaauaauugccau

SEQ ID NO: 980085 - RNA, 19 nt, Artificial Sequence
  Description of Artificial Sequence: Synthetic oligonucleotide
  Antisense strand to SEQ ID NO: 980084
auggcaauuauucucaggc

SEQ ID NO: 980086 - RNA, 19 nt, Artificial Sequence
  Description of Artificial Sequence: Synthetic oligonucleotide
  Sense strand starting at position 2040 of SEQ ID NO: 914127
ggaggagcauuucacgaca

SEQ ID NO: 980087 - RNA, 19 nt, Artificial Sequence
  Description of Artificial Sequence: Synthetic oligonucleotide
  Antisense strand to SEQ ID NO: 980086
ugucgugaaaugcuccucc

SEQ ID NO: 980088 - RNA, 19 nt, Artificial Sequence
  Description of Artificial Sequence: Synthetic oligonucleotide
  Sense strand starting at position 2449 of SEQ ID NO: 914127
gcagauggcucaguugaaa

SEQ ID NO: 980089 - RNA, 19 nt, Artificial Sequence
  Description of Artificial Sequence: Synthetic oligonucleotide
  Antisense strand to SEQ ID NO: 980088
uuucaacugagccaucugc

SEQ ID NO: 980090 - RNA, 19 nt, Artificial Sequence
  Description of Artificial Sequence: Synthetic oligonucleotide
  Sense strand starting at position 3365 of SEQ ID NO: 914127
gcuauuauccguuauuaca

SEQ ID NO: 980091 - RNA, 19 nt, Artificial Sequence
  Description of Artificial Sequence: Synthetic oligonucleotide
  Antisense strand to SEQ ID NO: 980090
uguaauaacggauaauagc

SEQ ID NO: 980092 - RNA, 19 nt, Artificial Sequence
  Description of Artificial Sequence: Synthetic oligonucleotide
  Sense strand starting at position 2170 of SEQ ID NO: 914127
gugaccaccuauuacauuu

SEQ ID NO: 980093 - RNA, 19 nt, Artificial Sequence
  Description of Artificial Sequence: Synthetic oligonucleotide
  Antisense strand to SEQ ID NO: 980092
aaauguaauagguggucac

SEQ ID NO: 980094 - RNA, 19 nt, Artificial Sequence
  Description of Artificial Sequence: Synthetic oligonucleotide
  Sense strand starting at position 3326 of SEQ ID NO: 914127
gaauguugugguugugaaa

SEQ ID NO: 980095 - RNA, 19 nt, Artificial Sequence
  Description of Artificial Sequence: Synthetic oligonucleotide
  Antisense strand to SEQ ID NO: 980094
uuucacaaccacaacauuc

SEQ ID NO: 980096 - RNA, 19 nt, Artificial Sequence
  Description of Artificial Sequence: Synthetic oligonucleotide
  Sense strand starting at position 3339 of SEQ ID NO: 914127
gugaaauauguacguuaug

SEQ ID NO: 980097 - RNA, 19 nt, Artificial Sequence
  Description of Artificial Sequence: Synthetic oligonucleotide
  Antisense strand to SEQ ID NO: 980096
cauaacguacauauuucac

SEQ ID NO: 980098 - RNA, 19 nt, Artificial Sequence
  Description of Artificial Sequence: Synthetic oligonucleotide
  Sense strand starting at position 2604 of SEQ ID NO: 914127
ccugaauagugcuuacuuu

SEQ ID NO: 980099 - RNA, 19 nt, Artificial Sequence
  Description of Artificial Sequence: Synthetic oligonucleotide
  Antisense strand to SEQ ID NO: 980098
aaaguaagcacuauucagg

SEQ ID NO: 980100 - RNA, 19 nt, Artificial Sequence
  Description of Artificial Sequence: Synthetic oligonucleotide
  Sense strand starting at position 2574 of SEQ ID NO: 914127
uuccgagauacugguaguu

SEQ ID NO: 980101 - RNA, 19 nt, Artificial Sequence
  Description of Artificial Sequence: Synthetic oligonucleotide
  Antisense strand to SEQ ID NO: 980100
aacuaccaguaucucggaa

SEQ ID NO: 980102 - RNA, 19 nt, Artificial Sequence
  Description of Artificial Sequence: Synthetic oligonucleotide
  Sense strand starting at position 3340 of SEQ ID NO: 914127
ugaaauauguacguuaugu

SEQ ID NO: 980103 - RNA, 19 nt, Artificial Sequence
  Description of Artificial Sequence: Synthetic oligonucleotide
  Antisense strand to SEQ ID NO: 980102
acauaacguacauauuuca

SEQ ID NO: 980104 - RNA, 19 nt, Artificial Sequence
  Description of Artificial Sequence: Synthetic oligonucleotide
  Sense strand starting at position 3363 of SEQ ID NO: 914127
augcuauuauccguuauua

SEQ ID NO: 980105 - RNA, 19 nt, Artificial Sequence
  Description of Artificial Sequence: Synthetic oligonucleotide
  Antisense strand to SEQ ID NO: 980104
uaauaacggauaauagcau

SEQ ID NO: 980106 - RNA, 19 nt, Artificial Sequence
  Description of Artificial Sequence: Synthetic oligonucleotide
  Sense strand starting at position 3335 of SEQ ID NO: 914127
gguugugaaauauguacgu

SEQ ID NO: 980107 - RNA, 19 nt, Artificial Sequence
  Description of Artificial Sequence: Synthetic oligonucleotide
  Antisense strand to SEQ ID NO: 980106
acguacauauuucacaacc

SEQ ID NO: 980108 - RNA, 19 nt, Artificial Sequence
  Description of Artificial Sequence: Synthetic oligonucleotide
  Sense strand starting at position 3361 of SEQ ID NO: 914127
ucaugcuauuauccguuau

SEQ ID NO: 980109 - RNA, 19 nt, Artificial Sequence
  Description of Artificial Sequence: Synthetic oligonucleotide
  Antisense strand to SEQ ID NO: 980108
auaacggauaauagcauga

SEQ ID NO: 980110 - RNA, 19 nt, Artificial Sequence
  Description of Artificial Sequence: Synthetic oligonucleotide
  Sense strand starting at position 2659 of SEQ ID NO: 914127
aaucgagcugcaugcauua

SEQ ID NO: 980111 - RNA, 19 nt, Artificial Sequence
  Description of Artificial Sequence: Synthetic oligonucleotide
  Antisense strand to SEQ ID NO: 980110
uaaugcaugcagcucgauu

SEQ ID NO: 980112 - RNA, 19 nt, Artificial Sequence
  Description of Artificial Sequence: Synthetic oligonucleotide
  Sense strand starting at position 3790 of SEQ ID NO: 914127
auuggaaacuuguaacucu

SEQ ID NO: 980113 - RNA, 19 nt, Artificial Sequence
  Description of Artificial Sequence: Synthetic oligonucleotide
  Antisense strand to SEQ ID NO: 980112
agaguuacaaguuuccaau

SEQ ID NO: 980114 - RNA, 19 nt, Artificial Sequence
  Description of Artificial Sequence: Synthetic oligonucleotide
  Sense strand starting at position 2229 of SEQ ID NO: 914127
uaggcauuaugauagaugu

SEQ ID NO: 980115 - RNA, 19 nt, Artificial Sequence
  Description of Artificial Sequence: Synthetic oligonucleotide
  Antisense strand to SEQ ID NO: 980114
acaucuaucauaaugccua

SEQ ID NO: 980116 - RNA, 19 nt, Artificial Sequence
  Description of Artificial Sequence: Synthetic oligonucleotide
  Sense strand starting at position 2979 of SEQ ID NO: 914127
gcgccuggcccguauacau

SEQ ID NO: 980117 - RNA, 19 nt, Artificial Sequence
  Description of Artificial Sequence: Synthetic oligonucleotide
  Antisense strand to SEQ ID NO: 980116
auguauacgggccaggcgc

SEQ ID NO: 980118 - RNA, 19 nt, Artificial Sequence
  Description of Artificial Sequence: Synthetic oligonucleotide
  Sense strand starting at position 2002 of SEQ ID NO: 914127
cgucaagcgugauugcauu

SEQ ID NO: 980119 - RNA, 19 nt, Artificial Sequence
  Description of Artificial Sequence: Synthetic oligonucleotide
  Antisense strand to SEQ ID NO: 980118
aaugcaaucacgcuugacg

SEQ ID NO: 980120 - RNA, 19 nt, Artificial Sequence
  Description of Artificial Sequence: Synthetic oligonucleotide
  Sense strand starting at position 2565 of SEQ ID NO: 914127
gagggaggcuuccgagaua

SEQ ID NO: 980121 - RNA, 19 nt, Artificial Sequence
  Description of Artificial Sequence: Synthetic oligonucleotide
  Antisense strand to SEQ ID NO: 980120
uaucucggaagccucccuc

SEQ ID NO: 980122 - RNA, 19 nt, Artificial Sequence
  Description of Artificial Sequence: Synthetic oligonucleotide
  Sense strand starting at position 3799 of SEQ ID NO: 914127
uuguaacucuguggaauag

SEQ ID NO: 980123 - RNA, 19 nt, Artificial Sequence
  Description of Artificial Sequence: Synthetic oligonucleotide
  Antisense strand to SEQ ID NO: 980122
cuauuccacagaguuacaa

SEQ ID NO: 980124 - RNA, 19 nt, Artificial Sequence
  Description of Artificial Sequence: Synthetic oligonucleotide
  Sense strand starting at position 3329 of SEQ ID NO: 914127
uguugugguugugaaauau

SEQ ID NO: 980125 - RNA, 19 nt, Artificial Sequence
  Description of Artificial Sequence: Synthetic oligonucleotide
  Antisense strand to SEQ ID NO: 980124
auauuucacaaccacaaca

SEQ ID NO: 980126 - RNA, 19 nt, Artificial Sequence
  Description of Artificial Sequence: Synthetic oligonucleotide
  Sense strand starting at position 3320 of SEQ ID NO: 914127
auaccagaauguugugguu

SEQ ID NO: 980127 - RNA, 19 nt, Artificial Sequence
  Description of Artificial Sequence: Synthetic oligonucleotide
  Antisense strand to SEQ ID NO: 980126
aaccacaacauucugguau

SEQ ID NO: 980128 - RNA, 19 nt, Artificial Sequence
  Description of Artificial Sequence: Synthetic oligonucleotide
  Sense strand starting at position 139 of SEQ ID NO: 914127
gcugccauaugucaauacu

SEQ ID NO: 980129 - RNA, 19 nt, Artificial Sequence
  Description of Artificial Sequence: Synthetic oligonucleotide
  Antisense strand to SEQ ID NO: 980128
aguauugacauauggcagc

SEQ ID NO: 980130 - RNA, 19 nt, Artificial Sequence
  Description of Artificial Sequence: Synthetic oligonucleotide
  Sense strand starting at position 3322 of SEQ ID NO: 914127
accagaauguugugguugu

SEQ ID NO: 980131 - RNA, 19 nt, Artificial Sequence
  Description of Artificial Sequence: Synthetic oligonucleotide
  Antisense strand to SEQ ID NO: 980130
acaaccacaacauucuggu

SEQ ID NO: 980132 - RNA, 19 nt, Artificial Sequence
  Description of Artificial Sequence: Synthetic oligonucleotide
  Sense strand starting at position 1092 of SEQ ID NO: 914127
cuguuagugucaugcggac

SEQ ID NO: 980133 - RNA, 19 nt, Artificial Sequence
  Description of Artificial Sequence: Synthetic oligonucleotide
  Antisense strand to SEQ ID NO: 980132
guccgcaugacacuaacag

SEQ ID NO: 980134 - RNA, 19 nt, Artificial Sequence
  Description of Artificial Sequence: Synthetic oligonucleotide
  Sense strand starting at position 1000 of SEQ ID NO: 914128
ugauuaaaucuauggaccu

SEQ ID NO: 980135 - RNA, 19 nt, Artificial Sequence
  Description of Artificial Sequence: Synthetic oligonucleotide
  Antisense strand to SEQ ID NO: 980134
agguccauagauuuaauca

SEQ ID NO: 980136 - RNA, 19 nt, Artificial Sequence
  Description of Artificial Sequence: Synthetic oligonucleotide
  Sense strand starting at position 1421 of SEQ ID NO: 914128
cugugaugacgguaagaaa

SEQ ID NO: 980137 - RNA, 19 nt, Artificial Sequence
  Description of Artificial Sequence: Synthetic oligonucleotide
  Antisense strand to SEQ ID NO: 980136
uuucuuaccgucaucacag

SEQ ID NO: 980138 - RNA, 19 nt, Artificial Sequence
  Description of Artificial Sequence: Synthetic oligonucleotide
  Sense strand starting at position 3766 of SEQ ID NO: 914128
ugaggaaacucuucugacu

SEQ ID NO: 980139 - RNA, 19 nt, Artificial Sequence
  Description of Artificial Sequence: Synthetic oligonucleotide
  Antisense strand to SEQ ID NO: 980138
agucagaagaguuuccuca

SEQ ID NO: 980140 - RNA, 19 nt, Artificial Sequence
  Description of Artificial Sequence: Synthetic oligonucleotide
  Sense strand starting at position 1281 of SEQ ID NO: 914128
ccagacauccuugauguca

SEQ ID NO: 980141 - RNA, 19 nt, Artificial Sequence
  Description of Artificial Sequence: Synthetic oligonucleotide
  Antisense strand to SEQ ID NO: 980140
ugacaucaaggaugucugg

SEQ ID NO: 980142 - RNA, 19 nt, Artificial Sequence
  Description of Artificial Sequence: Synthetic oligonucleotide
  Sense strand starting at position 2675 of SEQ ID NO: 914128
cucacaggauguuugagaa

SEQ ID NO: 980143 - RNA, 19 nt, Artificial Sequence
  Description of Artificial Sequence: Synthetic oligonucleotide
  Antisense strand to SEQ ID NO: 980142
uucucaaacauccugugag

SEQ ID NO: 980144 - RNA, 19 nt, Artificial Sequence
  Description of Artificial Sequence: Synthetic oligonucleotide
  Sense strand starting at position 789 of SEQ ID NO: 914128
ggaaaugcuaagcacgaaa

SEQ ID NO: 980145 - RNA, 19 nt, Artificial Sequence
  Description of Artificial Sequence: Synthetic oligonucleotide
  Antisense strand to SEQ ID NO: 980144
uuucgugcuuagcauuucc

SEQ ID NO: 980146 - RNA, 19 nt, Artificial Sequence
  Description of Artificial Sequence: Synthetic oligonucleotide
  Sense strand starting at position 1511 of SEQ ID NO: 914128
agcaauauuuauccguacu

SEQ ID NO: 980147 - RNA, 19 nt, Artificial Sequence
  Description of Artificial Sequence: Synthetic oligonucleotide
  Antisense strand to SEQ ID NO: 980146
aguacggauaaauauugcu

SEQ ID NO: 980148 - RNA, 19 nt, Artificial Sequence
  Description of Artificial Sequence: Synthetic oligonucleotide
  Sense strand starting at position 408 of SEQ ID NO: 914128
aucuuauaaucaguaugag

SEQ ID NO: 980149 - RNA, 19 nt, Artificial Sequence
  Description of Artificial Sequence: Synthetic oligonucleotide
  Antisense strand to SEQ ID NO: 980148
cucauacugauuauaagau

SEQ ID NO: 980150 - RNA, 19 nt, Artificial Sequence
  Description of Artificial Sequence: Synthetic oligonucleotide
  Sense strand starting at position 3071 of SEQ ID NO: 914128
ggcucuguaaacuauggga

SEQ ID NO: 980151 - RNA, 19 nt, Artificial Sequence
  Description of Artificial Sequence: Synthetic oligonucleotide
  Antisense strand to SEQ ID NO: 980150
ucccauaguuuacagagcc

SEQ ID NO: 980152 - RNA, 19 nt, Artificial Sequence
  Description of Artificial Sequence: Synthetic oligonucleotide
  Sense strand starting at position 3855 of SEQ ID NO: 914128
cuggaugacucagucauaa

SEQ ID NO: 980153 - RNA, 19 nt, Artificial Sequence
  Description of Artificial Sequence: Synthetic oligonucleotide
  Antisense strand to SEQ ID NO: 980152
uuaugacugagucauccag

SEQ ID NO: 980154 - RNA, 19 nt, Artificial Sequence
  Description of Artificial Sequence: Synthetic oligonucleotide
  Sense strand starting at position 102 of SEQ ID NO: 914128
ggaaguguaaacgggaaca

SEQ ID NO: 980155 - RNA, 19 nt, Artificial Sequence
  Description of Artificial Sequence: Synthetic oligonucleotide
  Antisense strand to SEQ ID NO: 980154
uguucccguuuacacuucc

SEQ ID NO: 980156 - RNA, 19 nt, Artificial Sequence
  Description of Artificial Sequence: Synthetic oligonucleotide
  Sense strand starting at position 2455 of SEQ ID NO: 914128
ugcauuuggacagguguuu

SEQ ID NO: 980157 - RNA, 19 nt, Artificial Sequence
  Description of Artificial Sequence: Synthetic oligonucleotide
  Antisense strand to SEQ ID NO: 980156
aaacaccuguccaaaugca

SEQ ID NO: 980158 - RNA, 19 nt, Artificial Sequence
  Description of Artificial Sequence: Synthetic oligonucleotide
  Sense strand starting at position 2688 of SEQ ID NO: 914128
ugagaauauuaagugaguu

SEQ ID NO: 980159 - RNA, 19 nt, Artificial Sequence
  Description of Artificial Sequence: Synthetic oligonucleotide
  Antisense strand to SEQ ID NO: 980158
aacucacuuaauauucuca

SEQ ID NO: 980160 - RNA, 19 nt, Artificial Sequence
  Description of Artificial Sequence: Synthetic oligonucleotide
  Sense strand starting at position 874 of SEQ ID NO: 914128
agauguguuagugaugaug

SEQ ID NO: 980161 - RNA, 19 nt, Artificial Sequence
  Description of Artificial Sequence: Synthetic oligonucleotide
  Antisense strand to SEQ ID NO: 980160
caucaucacuaacacaucu

SEQ ID NO: 980162 - RNA, 19 nt, Artificial Sequence
  Description of Artificial Sequence: Synthetic oligonucleotide
  Sense strand starting at position 2789 of SEQ ID NO: 914128
gggauauccucaccuacuu

SEQ ID NO: 980163 - RNA, 19 nt, Artificial Sequence
  Description of Artificial Sequence: Synthetic oligonucleotide
  Antisense strand to SEQ ID NO: 980162
aaguaggugaggauauccc

SEQ ID NO: 980164 - RNA, 19 nt, Artificial Sequence
  Description of Artificial Sequence: Synthetic oligonucleotide
  Sense strand starting at position 2910 of SEQ ID NO: 914128
uaacuugauggagguagua

SEQ ID NO: 980165 - RNA, 19 nt, Artificial Sequence
  Description of Artificial Sequence: Synthetic oligonucleotide
  Antisense strand to SEQ ID NO: 980164
uacuaccuccaucaaguua

SEQ ID NO: 980166 - RNA, 19 nt, Artificial Sequence
  Description of Artificial Sequence: Synthetic oligonucleotide
  Sense strand starting at position 3007 of SEQ ID NO: 914128
ggguaaggauaguucuuag

SEQ ID NO: 980167 - RNA, 19 nt, Artificial Sequence
  Description of Artificial Sequence: Synthetic oligonucleotide
  Antisense strand to SEQ ID NO: 980166
cuaagaacuauccuuaccc

SEQ ID NO: 980168 - RNA, 19 nt, Artificial Sequence
  Description of Artificial Sequence: Synthetic oligonucleotide
  Sense strand starting at position 3504 of SEQ ID NO: 914128
uauagcauuugggagaaga

SEQ ID NO: 980169 - RNA, 19 nt, Artificial Sequence
  Description of Artificial Sequence: Synthetic oligonucleotide
  Antisense strand to SEQ ID NO: 980168
ucuucucccaaaugcuaua

SEQ ID NO: 980170 - RNA, 19 nt, Artificial Sequence
  Description of Artificial Sequence: Synthetic oligonucleotide
  Sense strand starting at position 3483 of SEQ ID NO: 914128
ggcagcugugaagauagau

SEQ ID NO: 980171 - RNA, 19 nt, Artificial Sequence
  Description of Artificial Sequence: Synthetic oligonucleotide
  Antisense strand to SEQ ID NO: 980170
aucuaucuucacagcugcc

SEQ ID NO: 980172 - RNA, 19 nt, Artificial Sequence
  Description of Artificial Sequence: Synthetic oligonucleotide
  Sense strand starting at position 2907 of SEQ ID NO: 914128
ugguaacuugauggaggua

SEQ ID NO: 980173 - RNA, 19 nt, Artificial Sequence
  Description of Artificial Sequence: Synthetic oligonucleotide
  Antisense strand to SEQ ID NO: 980172
uaccuccaucaaguuacca

SEQ ID NO: 980174 - RNA, 19 nt, Artificial Sequence
  Description of Artificial Sequence: Synthetic oligonucleotide
  Sense strand starting at position 1313 of SEQ ID NO: 914128
agaguacugagaugcuaca

SEQ ID NO: 980175 - RNA, 19 nt, Artificial Sequence
  Description of Artificial Sequence: Synthetic oligonucleotide
  Antisense strand to SEQ ID NO: 980174
uguagcaucucaguacucu

SEQ ID NO: 980176 - RNA, 19 nt, Artificial Sequence
  Description of Artificial Sequence: Synthetic oligonucleotide
  Sense strand starting at position 2854 of SEQ ID NO: 914128
guaugucuggcacacaaga

SEQ ID NO: 980177 - RNA, 19 nt, Artificial Sequence
  Description of Artificial Sequence: Synthetic oligonucleotide
  Antisense strand to SEQ ID NO: 980176
ucuugugugccagacauac

SEQ ID NO: 980178 - RNA, 19 nt, Artificial Sequence
  Description of Artificial Sequence: Synthetic oligonucleotide
  Sense strand starting at position 555 of SEQ ID NO: 914128
guugucauccacuauauau

SEQ ID NO: 980179 - RNA, 19 nt, Artificial Sequence
  Description of Artificial Sequence: Synthetic oligonucleotide
  Antisense strand to SEQ ID NO: 980178
auauauaguggaugacaac

SEQ ID NO: 980180 - RNA, 19 nt, Artificial Sequence
  Description of Artificial Sequence: Synthetic oligonucleotide
  Sense strand starting at position 745 of SEQ ID NO: 914128
ugaucaugaacaugcgaua

SEQ ID NO: 980181 - RNA, 19 nt, Artificial Sequence
  Description of Artificial Sequence: Synthetic oligonucleotide
  Antisense strand to SEQ ID NO: 980180
uaucgcauguucaugauca

SEQ ID NO: 980182 - RNA, 19 nt, Artificial Sequence
  Description of Artificial Sequence: Synthetic oligonucleotide
  Sense strand starting at position 872 of SEQ ID NO: 914128
ggagauguguuagugauga

SEQ ID NO: 980183 - RNA, 19 nt, Artificial Sequence
  Description of Artificial Sequence: Synthetic oligonucleotide
  Antisense strand to SEQ ID NO: 980182
ucaucacuaacacaucucc

SEQ ID NO: 980184 - RNA, 19 nt, Artificial Sequence
  Description of Artificial Sequence: Synthetic oligonucleotide
  Sense strand starting at position 1300 of SEQ ID NO: 914128
gguacugggcucuagagua

SEQ ID NO: 980185 - RNA, 19 nt, Artificial Sequence
  Description of Artificial Sequence: Synthetic oligonucleotide
  Antisense strand to SEQ ID NO: 980184
uacucuagagcccaguacc

SEQ ID NO: 980186 - RNA, 19 nt, Artificial Sequence
  Description of Artificial Sequence: Synthetic oligonucleotide
  Sense strand starting at position 3123 of SEQ ID NO: 914128
gaaugaugaggugggcuuu

SEQ ID NO: 980187 - RNA, 19 nt, Artificial Sequence
  Description of Artificial Sequence: Synthetic oligonucleotide
  Antisense strand to SEQ ID NO: 980186
aaagcccaccucaucauuc

SEQ ID NO: 980188 - RNA, 19 nt, Artificial Sequence
  Description of Artificial Sequence: Synthetic oligonucleotide
  Sense strand starting at position 544 of SEQ ID NO: 914128
acaauacaauuguugucau

SEQ ID NO: 980189 - RNA, 19 nt, Artificial Sequence
  Description of Artificial Sequence: Synthetic oligonucleotide
  Antisense strand to SEQ ID NO: 980188
augacaacaauuguauugu

SEQ ID NO: 980190 - RNA, 19 nt, Artificial Sequence
  Description of Artificial Sequence: Synthetic oligonucleotide
  Sense strand starting at position 1432 of SEQ ID NO: 914128
guaagaaauucuuuauguc

SEQ ID NO: 980191 - RNA, 19 nt, Artificial Sequence
  Description of Artificial Sequence: Synthetic oligonucleotide
  Antisense strand to SEQ ID NO: 980190
gacauaaagaauuucuuac

SEQ ID NO: 980192 - RNA, 19 nt, Artificial Sequence
  Description of Artificial Sequence: Synthetic oligonucleotide
  Sense strand starting at position 3065 of SEQ ID NO: 914128
cagacaggcucuguaaacu

SEQ ID NO: 980193 - RNA, 19 nt, Artificial Sequence
  Description of Artificial Sequence: Synthetic oligonucleotide
  Antisense strand to SEQ ID NO: 980192
aguuuacagagccugucug

SEQ ID NO: 980194 - RNA, 19 nt, Artificial Sequence
  Description of Artificial Sequence: Synthetic oligonucleotide
  Sense strand starting at position 348 of SEQ ID NO: 914128
ugggauacuuuauugcuau

SEQ ID NO: 980195 - RNA, 19 nt, Artificial Sequence
  Description of Artificial Sequence: Synthetic oligonucleotide
  Antisense strand to SEQ ID NO: 980194
auagcaauaaaguauccca

SEQ ID NO: 980196 - RNA, 19 nt, Artificial Sequence
  Description of Artificial Sequence: Synthetic oligonucleotide
  Sense strand starting at position 59 of SEQ ID NO: 914128
uaguguugaggaugcagaa

SEQ ID NO: 980197 - RNA, 19 nt, Artificial Sequence
  Description of Artificial Sequence: Synthetic oligonucleotide
  Antisense strand to SEQ ID NO: 980196
uucugcauccucaacacua

SEQ ID NO: 980198 - RNA, 19 nt, Artificial Sequence
  Description of Artificial Sequence: Synthetic oligonucleotide
  Sense strand starting at position 2948 of SEQ ID NO: 914128
gaacuaucuuagguaguuc

SEQ ID NO: 980199 - RNA, 19 nt, Artificial Sequence
  Description of Artificial Sequence: Synthetic oligonucleotide
  Antisense strand to SEQ ID NO: 980198
gaacuaccuaagauaguuc

SEQ ID NO: 980200 - RNA, 19 nt, Artificial Sequence
  Description of Artificial Sequence: Synthetic oligonucleotide
  Sense strand starting at position 1280 of SEQ ID NO: 914128
uccagacauccuugauguc

SEQ ID NO: 980201 - RNA, 19 nt, Artificial Sequence
  Description of Artificial Sequence: Synthetic oligonucleotide
  Antisense strand to SEQ ID NO: 980200
gacaucaaggaugucugga

SEQ ID NO: 980202 - RNA, 19 nt, Artificial Sequence
  Description of Artificial Sequence: Synthetic oligonucleotide
  Sense strand starting at position 2549 of SEQ ID NO: 914128
gaagaauccuugcuucgag

SEQ ID NO: 980203 - RNA, 19 nt, Artificial Sequence
  Description of Artificial Sequence: Synthetic oligonucleotide
  Antisense strand to SEQ ID NO: 980202
cucgaagcaaggauucuuc

SEQ ID NO: 980204 - RNA, 19 nt, Artificial Sequence
  Description of Artificial Sequence: Synthetic oligonucleotide
  Sense strand starting at position 1364 of SEQ ID NO: 914128
uccuccugccuaugggaaa

SEQ ID NO: 980205 - RNA, 19 nt, Artificial Sequence
  Description of Artificial Sequence: Synthetic oligonucleotide
  Antisense strand to SEQ ID NO: 980204
uuucccauaggcaggagga

SEQ ID NO: 980206 - RNA, 19 nt, Artificial Sequence
  Description of Artificial Sequence: Synthetic oligonucleotide
  Sense strand starting at position 2931 of SEQ ID NO: 914128
augaguccuuugucugaga

SEQ ID NO: 980207 - RNA, 19 nt, Artificial Sequence
  Description of Artificial Sequence: Synthetic oligonucleotide
  Antisense strand to SEQ ID NO: 980206
ucucagacaaaggacucau

SEQ ID NO: 980208 - RNA, 19 nt, Artificial Sequence
  Description of Artificial Sequence: Synthetic oligonucleotide
  Sense strand starting at position 2932 of SEQ ID NO: 914128
ugaguccuuugucugagaa

SEQ ID NO: 980209 - RNA, 19 nt, Artificial Sequence
  Description of Artificial Sequence: Synthetic oligonucleotide
  Antisense strand to SEQ ID NO: 980208
uucucagacaaaggacuca

SEQ ID NO: 980210 - RNA, 19 nt, Artificial Sequence
  Description of Artificial Sequence: Synthetic oligonucleotide
  Sense strand starting at position 547 of SEQ ID NO: 914128
auacaauuguugucaucca

SEQ ID NO: 980211 - RNA, 19 nt, Artificial Sequence
  Description of Artificial Sequence: Synthetic oligonucleotide
  Antisense strand to SEQ ID NO: 980210
uggaugacaacaauuguau

SEQ ID NO: 980212 - RNA, 19 nt, Artificial Sequence
  Description of Artificial Sequence: Synthetic oligonucleotide
  Sense strand starting at position 159 of SEQ ID NO: 914128
ugagcauuugcaugcugua

SEQ ID NO: 980213 - RNA, 19 nt, Artificial Sequence
  Description of Artificial Sequence: Synthetic oligonucleotide
  Antisense strand to SEQ ID NO: 980212
uacagcaugcaaaugcuca

SEQ ID NO: 980214 - RNA, 19 nt, Artificial Sequence
  Description of Artificial Sequence: Synthetic oligonucleotide
  Sense strand starting at position 3453 of SEQ ID NO: 914129
ugaguaacauuaccuagga

SEQ ID NO: 980215 - RNA, 19 nt, Artificial Sequence
  Description of Artificial Sequence: Synthetic oligonucleotide
  Antisense strand to SEQ ID NO: 980214
uccuagguaauguuacuca

SEQ ID NO: 980216 - RNA, 19 nt, Artificial Sequence
  Description of Artificial Sequence: Synthetic oligonucleotide
  Sense strand starting at position 3679 of SEQ ID NO: 914129
agucguagaggagacauua

SEQ ID NO: 980217 - RNA, 19 nt, Artificial Sequence
  Description of Artificial Sequence: Synthetic oligonucleotide
  Antisense strand to SEQ ID NO: 980216
uaaugucuccucuacgacu

SEQ ID NO: 980218 - RNA, 19 nt, Artificial Sequence
  Description of Artificial Sequence: Synthetic oligonucleotide
  Sense strand starting at position 2845 of SEQ ID NO: 914129
uugaccauugaguggaaau

SEQ ID NO: 980219 - RNA, 19 nt, Artificial Sequence
  Description of Artificial Sequence: Synthetic oligonucleotide
  Antisense strand to SEQ ID NO: 980218
auuuccacucaauggucaa

SEQ ID NO: 980220 - RNA, 19 nt, Artificial Sequence
  Description of Artificial Sequence: Synthetic oligonucleotide
  Sense strand starting at position 2153 of SEQ ID NO: 914129
gguauugcucgcuuagcaa

SEQ ID NO: 980221 - RNA, 19 nt, Artificial Sequence
  Description of Artificial Sequence: Synthetic oligonucleotide
  Antisense strand to SEQ ID NO: 980220
uugcuaagcgagcaauacc

SEQ ID NO: 980222 - RNA, 19 nt, Artificial Sequence
  Description of Artificial Sequence: Synthetic oligonucleotide
  Sense strand starting at position 153 of SEQ ID NO: 914129
gaggcuuaucugggagauu

SEQ ID NO: 980223 - RNA, 19 nt, Artificial Sequence
  Description of Artificial Sequence: Synthetic oligonucleotide
  Antisense strand to SEQ ID NO: 980222
aaucucccagauaagccuc

SEQ ID NO: 980224 - RNA, 19 nt, Artificial Sequence
  Description of Artificial Sequence: Synthetic oligonucleotide
  Sense strand starting at position 3534 of SEQ ID NO: 914129
guuguauugcaagaaauug

SEQ ID NO: 980225 - RNA, 19 nt, Artificial Sequence
  Description of Artificial Sequence: Synthetic oligonucleotide
  Antisense strand to SEQ ID NO: 980224
caauuucuugcaauacaac

SEQ ID NO: 980226 - RNA, 19 nt, Artificial Sequence
  Description of Artificial Sequence: Synthetic oligonucleotide
  Sense strand starting at position 3689 of SEQ ID NO: 914129
gagacauuauugucaagca

SEQ ID NO: 980227 - RNA, 19 nt, Artificial Sequence
  Description of Artificial Sequence: Synthetic oligonucleotide
  Antisense strand to SEQ ID NO: 980226
ugcuugacaauaaugucuc

SEQ ID NO: 980228 - RNA, 19 nt, Artificial Sequence
  Description of Artificial Sequence: Synthetic oligonucleotide
  Sense strand starting at position 2264 of SEQ ID NO: 914129
accagucgacuuuacgauu

SEQ ID NO: 980229 - RNA, 19 nt, Artificial Sequence
  Description of Artificial Sequence: Synthetic oligonucleotide
  Antisense strand to SEQ ID NO: 980228
aaucguaaagucgacuggu

SEQ ID NO: 980230 - RNA, 19 nt, Artificial Sequence
  Description of Artificial Sequence: Synthetic oligonucleotide
  Sense strand starting at position 3648 of SEQ ID NO: 914129
uauguuagugaaugcaaga

SEQ ID NO: 980231 - RNA, 19 nt, Artificial Sequence
  Description of Artificial Sequence: Synthetic oligonucleotide
  Antisense strand to SEQ ID NO: 980230
ucuugcauucacuaacaua

SEQ ID NO: 980232 - RNA, 19 nt, Artificial Sequence
  Description of Artificial Sequence: Synthetic oligonucleotide
  Sense strand starting at position 448 of SEQ ID NO: 914129
accuaaauguuuguaguaa

SEQ ID NO: 980233 - RNA, 19 nt, Artificial Sequence
  Description of Artificial Sequence: Synthetic oligonucleotide
  Antisense strand to SEQ ID NO: 980232
uuacuacaaacauuuaggu

SEQ ID NO: 980234 - RNA, 19 nt, Artificial Sequence
  Description of Artificial Sequence: Synthetic oligonucleotide
  Sense strand starting at position 3554 of SEQ ID NO: 914129
agaggcaucaguuguggau

SEQ ID NO: 980235 - RNA, 19 nt, Artificial Sequence
  Description of Artificial Sequence: Synthetic oligonucleotide
  Antisense strand to SEQ ID NO: 980234
auccacaacugaugccucu

SEQ ID NO: 980236 - RNA, 19 nt, Artificial Sequence
  Description of Artificial Sequence: Synthetic oligonucleotide
  Sense strand starting at position 2251 of SEQ ID NO: 914129
gcucuaauuggucaccagu

SEQ ID NO: 980237 - RNA, 19 nt, Artificial Sequence
  Description of Artificial Sequence: Synthetic oligonucleotide
  Antisense strand to SEQ ID NO: 980236
acuggugaccaauuagagc

SEQ ID NO: 980238 - RNA, 19 nt, Artificial Sequence
  Description of Artificial Sequence: Synthetic oligonucleotide
  Sense strand starting at position 487 of SEQ ID NO: 914129
ggagaugguuaucugcuuu

SEQ ID NO: 980239 - RNA, 19 nt, Artificial Sequence
  Description of Artificial Sequence: Synthetic oligonucleotide
  Antisense strand to SEQ ID NO: 980238
aaagcagauaaccaucucc

SEQ ID NO: 980240 - RNA, 19 nt, Artificial Sequence
  Description of Artificial Sequence: Synthetic oligonucleotide
  Sense strand starting at position 3415 of SEQ ID NO: 914129
aggcgucaucuguauaaug

SEQ ID NO: 980241 - RNA, 19 nt, Artificial Sequence
  Description of Artificial Sequence: Synthetic oligonucleotide
  Antisense strand to SEQ ID NO: 980240
cauuauacagaugacgccu

SEQ ID NO: 980242 - RNA, 19 nt, Artificial Sequence
  Description of Artificial Sequence: Synthetic oligonucleotide
  Sense strand starting at position 2424 of SEQ ID NO: 914129
aucacaguccucuguuuaa

SEQ ID NO: 980243 - RNA, 19 nt, Artificial Sequence
  Description of Artificial Sequence: Synthetic oligonucleotide
  Antisense strand to SEQ ID NO: 980242
uuaaacagaggacugugau

SEQ ID NO: 980244 - RNA, 19 nt, Artificial Sequence
  Description of Artificial Sequence: Synthetic oligonucleotide
  Sense strand starting at position 2288 of SEQ ID NO: 914129
auccuucuccggcaucauu

SEQ ID NO: 980245 - RNA, 19 nt, Artificial Sequence
  Description of Artificial Sequence: Synthetic oligonucleotide
  Antisense strand to SEQ ID NO: 980244
aaugaugccggagaaggau

SEQ ID NO: 980246 - RNA, 19 nt, Artificial Sequence
  Description of Artificial Sequence: Synthetic oligonucleotide
  Sense strand starting at position 196 of SEQ ID NO: 914129
agcccuacuuuggcuuaaa

SEQ ID NO: 980247 - RNA, 19 nt, Artificial Sequence
  Description of Artificial Sequence: Synthetic oligonucleotide
  Antisense strand to SEQ ID NO: 980246
uuuaagccaaaguagggcu

SEQ ID NO: 980248 - RNA, 19 nt, Artificial Sequence
  Description of Artificial Sequence: Synthetic oligonucleotide
  Sense strand starting at position 2816 of SEQ ID NO: 914129
cucugcgauaguggauuaa

SEQ ID NO: 980249 - RNA, 19 nt, Artificial Sequence
  Description of Artificial Sequence: Synthetic oligonucleotide
  Antisense strand to SEQ ID NO: 980248
uuaauccacuaucgcagag

SEQ ID NO: 980250 - RNA, 19 nt, Artificial Sequence
  Description of Artificial Sequence: Synthetic oligonucleotide
  Sense strand starting at position 3409 of SEQ ID NO: 914129
cagauuaggcgucaucugu

SEQ ID NO: 980251 - RNA, 19 nt, Artificial Sequence
  Description of Artificial Sequence: Synthetic oligonucleotide
  Antisense strand to SEQ ID NO: 980250
acagaugacgccuaaucug

SEQ ID NO: 980252 - RNA, 19 nt, Artificial Sequence
  Description of Artificial Sequence: Synthetic oligonucleotide
  Sense strand starting at position 2896 of SEQ ID NO: 914129
gauaacugaucagaaguga

SEQ ID NO: 980253 - RNA, 19 nt, Artificial Sequence
  Description of Artificial Sequence: Synthetic oligonucleotide
  Antisense strand to SEQ ID NO: 980252
ucacuucugaucaguuauc

SEQ ID NO: 980254 - RNA, 19 nt, Artificial Sequence
  Description of Artificial Sequence: Synthetic oligonucleotide
  Sense strand starting at position 486 of SEQ ID NO: 914129
cggagaugguuaucugcuu

SEQ ID NO: 980255 - RNA, 19 nt, Artificial Sequence
  Description of Artificial Sequence: Synthetic oligonucleotide
  Antisense strand to SEQ ID NO: 980254
aagcagauaaccaucuccg

SEQ ID NO: 980256 - RNA, 19 nt, Artificial Sequence
  Description of Artificial Sequence: Synthetic oligonucleotide
  Sense strand starting at position 2962 of SEQ ID NO: 914129
cugauaugguuugaagaaa

SEQ ID NO: 980257 - RNA, 19 nt, Artificial Sequence
  Description of Artificial Sequence: Synthetic oligonucleotide
  Antisense strand to SEQ ID NO: 980256
uuucuucaaaccauaucag

SEQ ID NO: 980258 - RNA, 19 nt, Artificial Sequence
  Description of Artificial Sequence: Synthetic oligonucleotide
  Sense strand starting at position 2807 of SEQ ID NO: 914129
auuccagcacucugcgaua

SEQ ID NO: 980259 - RNA, 19 nt, Artificial Sequence
  Description of Artificial Sequence: Synthetic oligonucleotide
  Antisense strand to SEQ ID NO: 980258
uaucgcagagugcuggaau

SEQ ID NO: 980260 - RNA, 19 nt, Artificial Sequence
  Description of Artificial Sequence: Synthetic oligonucleotide
  Sense strand starting at position 3413 of SEQ ID NO: 914129
uuaggcgucaucuguauaa

SEQ ID NO: 980261 - RNA, 19 nt, Artificial Sequence
  Description of Artificial Sequence: Synthetic oligonucleotide
  Antisense strand to SEQ ID NO: 980260
uuauacagaugacgccuaa

SEQ ID NO: 980262 - RNA, 19 nt, Artificial Sequence
  Description of Artificial Sequence: Synthetic oligonucleotide
  Sense strand starting at position 3417 of SEQ ID NO: 914129
gcgucaucuguauaaugca

SEQ ID NO: 980263 - RNA, 19 nt, Artificial Sequence
  Description of Artificial Sequence: Synthetic oligonucleotide
  Antisense strand to SEQ ID NO: 980262
ugcauuauacagaugacgc

SEQ ID NO: 980264 - RNA, 19 nt, Artificial Sequence
  Description of Artificial Sequence: Synthetic oligonucleotide
  Sense strand starting at position 2954 of SEQ ID NO: 914129
gacugaaacugauaugguu

SEQ ID NO: 980265 - RNA, 19 nt, Artificial Sequence
  Description of Artificial Sequence: Synthetic oligonucleotide
  Antisense strand to SEQ ID NO: 980264
aaccauaucaguuucaguc

SEQ ID NO: 980266 - RNA, 19 nt, Artificial Sequence
  Description of Artificial Sequence: Synthetic oligonucleotide
  Sense strand starting at position 3015 of SEQ ID NO: 914129
ggaaauacaucugguaaag

SEQ ID NO: 980267 - RNA, 19 nt, Artificial Sequence
  Description of Artificial Sequence: Synthetic oligonucleotide
  Antisense strand to SEQ ID NO: 980266
cuuuaccagauguauuucc

SEQ ID NO: 980268 - RNA, 19 nt, Artificial Sequence
  Description of Artificial Sequence: Synthetic oligonucleotide
  Sense strand starting at position 2223 of SEQ ID NO: 914129
gagguguuagcguggguaa

SEQ ID NO: 980269 - RNA, 19 nt, Artificial Sequence
  Description of Artificial Sequence: Synthetic oligonucleotide
  Antisense strand to SEQ ID NO: 980268
uuacccacgcuaacaccuc

SEQ ID NO: 980270 - RNA, 19 nt, Artificial Sequence
  Description of Artificial Sequence: Synthetic oligonucleotide
  Sense strand starting at position 154 of SEQ ID NO: 914129
aggcuuaucugggagauua

SEQ ID NO: 980271 - RNA, 19 nt, Artificial Sequence
  Description of Artificial Sequence: Synthetic oligonucleotide
  Antisense strand to SEQ ID NO: 980270
uaaucucccagauaagccu

SEQ ID NO: 980272 - RNA, 19 nt, Artificial Sequence
  Description of Artificial Sequence: Synthetic oligonucleotide
  Sense strand starting at position 2809 of SEQ ID NO: 914129
uccagcacucugcgauagu

SEQ ID NO: 980273 - RNA, 19 nt, Artificial Sequence
  Description of Artificial Sequence: Synthetic oligonucleotide
  Antisense strand to SEQ ID NO: 980272
acuaucgcagagugcugga

SEQ ID NO: 980274 - RNA, 19 nt, Artificial Sequence
  Description of Artificial Sequence: Synthetic oligonucleotide
  Sense strand starting at position 2128 of SEQ ID NO: 914129
gcgugacaguucuuaccga

SEQ ID NO: 980275 - RNA, 19 nt, Artificial Sequence
  Description of Artificial Sequence: Synthetic oligonucleotide
  Antisense strand to SEQ ID NO: 980274
ucgguaagaacugucacgc

SEQ ID NO: 980276 - RNA, 19 nt, Artificial Sequence
  Description of Artificial Sequence: Synthetic oligonucleotide
  Sense strand starting at position 2120 of SEQ ID NO: 914129
cgcucuaagcgugacaguu

SEQ ID NO: 980277 - RNA, 19 nt, Artificial Sequence
  Description of Artificial Sequence: Synthetic oligonucleotide
  Antisense strand to SEQ ID NO: 980276
aacugucacgcuuagagcg

SEQ ID NO: 980278 - RNA, 19 nt, Artificial Sequence
  Description of Artificial Sequence: Synthetic oligonucleotide
  Sense strand starting at position 3531 of SEQ ID NO: 914129
aaaguuguauugcaagaaa

SEQ ID NO: 980279 - RNA, 19 nt, Artificial Sequence
  Description of Artificial Sequence: Synthetic oligonucleotide
  Antisense strand to SEQ ID NO: 980278
uuucuugcaauacaacuuu

SEQ ID NO: 980280 - RNA, 19 nt, Artificial Sequence
  Description of Artificial Sequence: Synthetic oligonucleotide
  Sense strand starting at position 3441 of SEQ ID NO: 914129
guggaugaaucaugaguaa

SEQ ID NO: 980281 - RNA, 19 nt, Artificial Sequence
  Description of Artificial Sequence: Synthetic oligonucleotide
  Antisense strand to SEQ ID NO: 980280
uuacucaugauucauccac

SEQ ID NO: 980282 - RNA, 19 nt, Artificial Sequence
  Description of Artificial Sequence: Synthetic oligonucleotide
  Sense strand starting at position 3690 of SEQ ID NO: 914129
agacauuauugucaagcau

SEQ ID NO: 980283 - RNA, 19 nt, Artificial Sequence
  Description of Artificial Sequence: Synthetic oligonucleotide
  Antisense strand to SEQ ID NO: 980282
augcuugacaauaaugucu

SEQ ID NO: 980284 - RNA, 19 nt, Artificial Sequence
  Description of Artificial Sequence: Synthetic oligonucleotide
  Sense strand starting at position 152 of SEQ ID NO: 914129
agaggcuuaucugggagau

SEQ ID NO: 980285 - RNA, 19 nt, Artificial Sequence
  Description of Artificial Sequence: Synthetic oligonucleotide
  Antisense strand to SEQ ID NO: 980284
aucucccagauaagccucu

SEQ ID NO: 980286 - RNA, 19 nt, Artificial Sequence
  Description of Artificial Sequence: Synthetic oligonucleotide
  Sense strand starting at position 2152 of SEQ ID NO: 914129
ggguauugcucgcuuagca

SEQ ID NO: 980287 - RNA, 19 nt, Artificial Sequence
  Description of Artificial Sequence: Synthetic oligonucleotide
  Antisense strand to SEQ ID NO: 980286
ugcuaagcgagcaauaccc

SEQ ID NO: 980288 - RNA, 19 nt, Artificial Sequence
  Description of Artificial Sequence: Synthetic oligonucleotide
  Sense strand starting at position 2225 of SEQ ID NO: 914129
gguguuagcguggguaagu

SEQ ID NO: 980289 - RNA, 19 nt, Artificial Sequence
  Description of Artificial Sequence: Synthetic oligonucleotide
  Antisense strand to SEQ ID NO: 980288
acuuacccacgcuaacacc

SEQ ID NO: 980290 - RNA, 19 nt, Artificial Sequence
  Description of Artificial Sequence: Synthetic oligonucleotide
  Sense strand starting at position 449 of SEQ ID NO: 914129
ccuaaauguuuguaguaaa

SEQ ID NO: 980291 - RNA, 19 nt, Artificial Sequence
  Description of Artificial Sequence: Synthetic oligonucleotide
  Antisense strand to SEQ ID NO: 980290
uuuacuacaaacauuuagg

SEQ ID NO: 980292 - RNA, 19 nt, Artificial Sequence
  Description of Artificial Sequence: Synthetic oligonucleotide
  Sense strand starting at position 2119 of SEQ ID NO: 914129
ccgcucuaagcgugacagu

SEQ ID NO: 980293 - RNA, 19 nt, Artificial Sequence
  Description of Artificial Sequence: Synthetic oligonucleotide
  Antisense strand to SEQ ID NO: 980292
acugucacgcuuagagcgg

SEQ ID NO: 980294 - RNA, 19 nt, Artificial Sequence
  Description of Artificial Sequence: Synthetic oligonucleotide
  Sense strand starting at position 775 of SEQ ID NO: 914130
aggucaauccuuggaauaa

SEQ ID NO: 980295 - RNA, 19 nt, Artificial Sequence
  Description of Artificial Sequence: Synthetic oligonucleotide
  Antisense strand to SEQ ID NO: 980294
uuauuccaaggauugaccu

SEQ ID NO: 980296 - RNA, 19 nt, Artificial Sequence
  Description of Artificial Sequence: Synthetic oligonucleotide
  Sense strand starting at position 774 of SEQ ID NO: 914130
gaggucaauccuuggaaua

SEQ ID NO: 980297 - RNA, 19 nt, Artificial Sequence
  Description of Artificial Sequence: Synthetic oligonucleotide
  Antisense strand to SEQ ID NO: 980296
uauuccaaggauugaccuc

SEQ ID NO: 980298 - RNA, 19 nt, Artificial Sequence
  Description of Artificial Sequence: Synthetic oligonucleotide
  Sense strand starting at position 1001 of SEQ ID NO: 914130
gggaaucuccgguaacauc

SEQ ID NO: 980299 - RNA, 19 nt, Artificial Sequence
  Description of Artificial Sequence: Synthetic oligonucleotide
  Antisense strand to SEQ ID NO: 980298
gauguuaccggagauuccc

SEQ ID NO: 980300 - RNA, 19 nt, Artificial Sequence
  Description of Artificial Sequence: Synthetic oligonucleotide
  Sense strand starting at position 497 of SEQ ID NO: 914130
guuccuugacauuauauac

SEQ ID NO: 980301 - RNA, 19 nt, Artificial Sequence
  Description of Artificial Sequence: Synthetic oligonucleotide
  Antisense strand to SEQ ID NO: 980300
guauauaaugucaaggaac

SEQ ID NO: 980302 - RNA, 19 nt, Artificial Sequence
  Description of Artificial Sequence: Synthetic oligonucleotide
  Sense strand starting at position 3356 of SEQ ID NO: 914130
uuaauuugcgucuaggguu

SEQ ID NO: 980303 - RNA, 19 nt, Artificial Sequence
  Description of Artificial Sequence: Synthetic oligonucleotide
  Antisense strand to SEQ ID NO: 980302
aacccuagacgcaaauuaa

SEQ ID NO: 980304 - RNA, 19 nt, Artificial Sequence
  Description of Artificial Sequence: Synthetic oligonucleotide
  Sense strand starting at position 773 of SEQ ID NO: 914130
ugaggucaauccuuggaau

SEQ ID NO: 980305 - RNA, 19 nt, Artificial Sequence
  Description of Artificial Sequence: Synthetic oligonucleotide
  Antisense strand to SEQ ID NO: 980304
auuccaaggauugaccuca

SEQ ID NO: 980306 - RNA, 19 nt, Artificial Sequence
  Description of Artificial Sequence: Synthetic oligonucleotide
  Sense strand starting at position 3153 of SEQ ID NO: 914130
agggucuuucuggaugcaa

SEQ ID NO: 980307 - RNA, 19 nt, Artificial Sequence
  Description of Artificial Sequence: Synthetic oligonucleotide
  Antisense strand to SEQ ID NO: 980306
uugcauccagaaagacccu

SEQ ID NO: 980308 - RNA, 19 nt, Artificial Sequence
  Description of Artificial Sequence: Synthetic oligonucleotide
  Sense strand starting at position 3132 of SEQ ID NO: 914130
aguguuguuagaggcauuu

SEQ ID NO: 980309 - RNA, 19 nt, Artificial Sequence
  Description of Artificial Sequence: Synthetic oligonucleotide
  Antisense strand to SEQ ID NO: 980308
aaaugccucuaacaacacu

SEQ ID NO: 980310 - RNA, 19 nt, Artificial Sequence
  Description of Artificial Sequence: Synthetic oligonucleotide
  Sense strand starting at position 3057 of SEQ ID NO: 914130
gacuuccgugcgcuguaaa

SEQ ID NO: 980311 - RNA, 19 nt, Artificial Sequence
  Description of Artificial Sequence: Synthetic oligonucleotide
  Antisense strand to SEQ ID NO: 980310
uuuacagcgcacggaaguc

SEQ ID NO: 980312 - RNA, 19 nt, Artificial Sequence
  Description of Artificial Sequence: Synthetic oligonucleotide
  Sense strand starting at position 1034 of SEQ ID NO: 914130
gcaggauuucccggccacu

SEQ ID NO: 980313 - RNA, 19 nt, Artificial Sequence
  Description of Artificial Sequence: Synthetic oligonucleotide
  Antisense strand to SEQ ID NO: 980312
aguggccgggaaauccugc

SEQ ID NO: 980314 - RNA, 19 nt, Artificial Sequence
  Description of Artificial Sequence: Synthetic oligonucleotide
  Sense strand starting at position 3762 of SEQ ID NO: 914130
aggagauucuccuuccuuc

SEQ ID NO: 980315 - RNA, 19 nt, Artificial Sequence
  Description of Artificial Sequence: Synthetic oligonucleotide
  Antisense strand to SEQ ID NO: 980314
gaaggaaggagaaucuccu

SEQ ID NO: 980316 - RNA, 19 nt, Artificial Sequence
  Description of Artificial Sequence: Synthetic oligonucleotide
  Sense strand starting at position 1141 of SEQ ID NO: 914130
agcugaaacagcuaucgau

SEQ ID NO: 980317 - RNA, 19 nt, Artificial Sequence
  Description of Artificial Sequence: Synthetic oligonucleotide
  Antisense strand to SEQ ID NO: 980316
aucgauagcuguuucagcu

SEQ ID NO: 980318 - RNA, 19 nt, Artificial Sequence
  Description of Artificial Sequence: Synthetic oligonucleotide
  Sense strand starting at position 749 of SEQ ID NO: 914130
auaacacccguuugaauau

SEQ ID NO: 980319 - RNA, 19 nt, Artificial Sequence
  Description of Artificial Sequence: Synthetic oligonucleotide
  Antisense strand to SEQ ID NO: 980318
auauucaaacggguguuau

SEQ ID NO: 980320 - RNA, 19 nt, Artificial Sequence
  Description of Artificial Sequence: Synthetic oligonucleotide
  Sense strand starting at position 797 of SEQ ID NO: 914130
gcacgcuauucccugauuu

SEQ ID NO: 980321 - RNA, 19 nt, Artificial Sequence
  Description of Artificial Sequence: Synthetic oligonucleotide
  Antisense strand to SEQ ID NO: 980320
aaaucagggaauagcgugc

SEQ ID NO: 980322 - RNA, 19 nt, Artificial Sequence
  Description of Artificial Sequence: Synthetic oligonucleotide
  Sense strand starting at position 3575 of SEQ ID NO: 914130
acauuagaaggcuguuacu

SEQ ID NO: 980323 - RNA, 19 nt, Artificial Sequence
  Description of Artificial Sequence: Synthetic oligonucleotide
  Antisense strand to SEQ ID NO: 980322
aguaacagccuucuaaugu

SEQ ID NO: 980324 - RNA, 19 nt, Artificial Sequence
  Description of Artificial Sequence: Synthetic oligonucleotide
  Sense strand starting at position 831 of SEQ ID NO: 914130
guuagcugacaaugaaucu

SEQ ID NO: 980325 - RNA, 19 nt, Artificial Sequence
  Description of Artificial Sequence: Synthetic oligonucleotide
  Antisense strand to SEQ ID NO: 980324
agauucauugucagcuaac

SEQ ID NO: 980326 - RNA, 19 nt, Artificial Sequence
  Description of Artificial Sequence: Synthetic oligonucleotide
  Sense strand starting at position 3560 of SEQ ID NO: 914130
aucagaaagcucugcacau

SEQ ID NO: 980327 - RNA, 19 nt, Artificial Sequence
  Description of Artificial Sequence: Synthetic oligonucleotide
  Antisense strand to SEQ ID NO: 980326
augugcagagcuuucugau

SEQ ID NO: 980328 - RNA, 19 nt, Artificial Sequence
  Description of Artificial Sequence: Synthetic oligonucleotide
  Sense strand starting at position 660 of SEQ ID NO: 914130
agaccaauuuagcaggagu

SEQ ID NO: 980329 - RNA, 19 nt, Artificial Sequence
  Description of Artificial Sequence: Synthetic oligonucleotide
  Antisense strand to SEQ ID NO: 980328
acuccugcuaaauuggucu

SEQ ID NO: 980330 - RNA, 19 nt, Artificial Sequence
  Description of Artificial Sequence: Synthetic oligonucleotide
  Sense strand starting at position 1124 of SEQ ID NO: 914130
agauuagaaucugaaacag

SEQ ID NO: 980331 - RNA, 19 nt, Artificial Sequence
  Description of Artificial Sequence: Synthetic oligonucleotide
  Antisense strand to SEQ ID NO: 980330
cuguuucagauucuaaucu

SEQ ID NO: 980332 - RNA, 19 nt, Artificial Sequence
  Description of Artificial Sequence: Synthetic oligonucleotide
  Sense strand starting at position 1074 of SEQ ID NO: 914130
aagcauugcccugagucua

SEQ ID NO: 980333 - RNA, 19 nt, Artificial Sequence
  Description of Artificial Sequence: Synthetic oligonucleotide
  Antisense strand to SEQ ID NO: 980332
uagacucagggcaaugcuu

SEQ ID NO: 980334 - RNA, 19 nt, Artificial Sequence
  Description of Artificial Sequence: Synthetic oligonucleotide
  Sense strand starting at position 3561 of SEQ ID NO: 914130
ucagaaagcucugcacauu

SEQ ID NO: 980335 - RNA, 19 nt, Artificial Sequence
  Description of Artificial Sequence: Synthetic oligonucleotide
  Antisense strand to SEQ ID NO: 980334
aaugugcagagcuuucuga

SEQ ID NO: 980336 - RNA, 19 nt, Artificial Sequence
  Description of Artificial Sequence: Synthetic oligonucleotide
  Sense strand starting at position 565 of SEQ ID NO: 914130
cuaccaacguuucuugaau

SEQ ID NO: 980337 - RNA, 19 nt, Artificial Sequence
  Description of Artificial Sequence: Synthetic oligonucleotide
  Antisense strand to SEQ ID NO: 980336
auucaagaaacguugguag

SEQ ID NO: 980338 - RNA, 19 nt, Artificial Sequence
  Description of Artificial Sequence: Synthetic oligonucleotide
  Sense strand starting at position 3621 of SEQ ID NO: 914130
auauauuaguaugugcaca

SEQ ID NO: 980339 - RNA, 19 nt, Artificial Sequence
  Description of Artificial Sequence: Synthetic oligonucleotide
  Antisense strand to SEQ ID NO: 980338
ugugcacauacuaauauau

SEQ ID NO: 980340 - RNA, 19 nt, Artificial Sequence
  Description of Artificial Sequence: Synthetic oligonucleotide
  Sense strand starting at position 358 of SEQ ID NO: 914130
gguuguacauauucuuacu

SEQ ID NO: 980341 - RNA, 19 nt, Artificial Sequence
  Description of Artificial Sequence: Synthetic oligonucleotide
  Antisense strand to SEQ ID NO: 980340
aguaagaauauguacaacc

SEQ ID NO: 980342 - RNA, 19 nt, Artificial Sequence
  Description of Artificial Sequence: Synthetic oligonucleotide
  Sense strand starting at position 265 of SEQ ID NO: 914130
ugcauugcucaaugacaug

SEQ ID NO: 980343 - RNA, 19 nt, Artificial Sequence
  Description of Artificial Sequence: Synthetic oligonucleotide
  Antisense strand to SEQ ID NO: 980342
caugucauugagcaaugca

SEQ ID NO: 980344 - RNA, 19 nt, Artificial Sequence
  Description of Artificial Sequence: Synthetic oligonucleotide
  Sense strand starting at position 638 of SEQ ID NO: 914130
ugugauguaucauuaaguc

SEQ ID NO: 980345 - RNA, 19 nt, Artificial Sequence
  Description of Artificial Sequence: Synthetic oligonucleotide
  Antisense strand to SEQ ID NO: 980344
gacuuaaugauacaucaca

SEQ ID NO: 980346 - RNA, 19 nt, Artificial Sequence
  Description of Artificial Sequence: Synthetic oligonucleotide
  Sense strand starting at position 3368 of SEQ ID NO: 914130
uaggguuguuuccucauua

SEQ ID NO: 980347 - RNA, 19 nt, Artificial Sequence
  Description of Artificial Sequence: Synthetic oligonucleotide
  Antisense strand to SEQ ID NO: 980346
uaaugaggaaacaacccua

SEQ ID NO: 980348 - RNA, 19 nt, Artificial Sequence
  Description of Artificial Sequence: Synthetic oligonucleotide
  Sense strand starting at position 3369 of SEQ ID NO: 914130
aggguuguuuccucauuau

SEQ ID NO: 980349 - RNA, 19 nt, Artificial Sequence
  Description of Artificial Sequence: Synthetic oligonucleotide
  Antisense strand to SEQ ID NO: 980348
auaaugaggaaacaacccu

SEQ ID NO: 980350 - RNA, 19 nt, Artificial Sequence
  Description of Artificial Sequence: Synthetic oligonucleotide
  Sense strand starting at position 824 of SEQ ID NO: 914130
cugcauaguuagcugacaa

SEQ ID NO: 980351 - RNA, 19 nt, Artificial Sequence
  Description of Artificial Sequence: Synthetic oligonucleotide
  Antisense strand to SEQ ID NO: 980350
uugucagcuaacuaugcag

SEQ ID NO: 980352 - RNA, 19 nt, Artificial Sequence
  Description of Artificial Sequence: Synthetic oligonucleotide
  Sense strand starting at position 1009 of SEQ ID NO: 914130
ccgguaacaucccucagua

SEQ ID NO: 980353 - RNA, 19 nt, Artificial Sequence
  Description of Artificial Sequence: Synthetic oligonucleotide
  Antisense strand to SEQ ID NO: 980352
uacugagggauguuaccgg

SEQ ID NO: 980354 - RNA, 19 nt, Artificial Sequence
  Description of Artificial Sequence: Synthetic oligonucleotide
  Sense strand starting at position 521 of SEQ ID NO: 914130
guggcagcacucugauaua

SEQ ID NO: 980355 - RNA, 19 nt, Artificial Sequence
  Description of Artificial Sequence: Synthetic oligonucleotide
  Antisense strand to SEQ ID NO: 980354
uauaucagagugcugccac

SEQ ID NO: 980356 - RNA, 19 nt, Artificial Sequence
  Description of Artificial Sequence: Synthetic oligonucleotide
  Sense strand starting at position 814 of SEQ ID NO: 914130
uuaaaugcaucugcauagu

SEQ ID NO: 980357 - RNA, 19 nt, Artificial Sequence
  Description of Artificial Sequence: Synthetic oligonucleotide
  Antisense strand to SEQ ID NO: 980356
acuaugcagaugcauuuaa

SEQ ID NO: 980358 - RNA, 19 nt, Artificial Sequence
  Description of Artificial Sequence: Synthetic oligonucleotide
  Sense strand starting at position 2524 of SEQ ID NO: 914130
ggauuucuguugcacaaau

SEQ ID NO: 980359 - RNA, 19 nt, Artificial Sequence
  Description of Artificial Sequence: Synthetic oligonucleotide
  Antisense strand to SEQ ID NO: 980358
auuugugcaacagaaaucc

SEQ ID NO: 980360 - RNA, 19 nt, Artificial Sequence
  Description of Artificial Sequence: Synthetic oligonucleotide
  Sense strand starting at position 624 of SEQ ID NO: 914130
uccagugcugcauauguga

SEQ ID NO: 980361 - RNA, 19 nt, Artificial Sequence
  Description of Artificial Sequence: Synthetic oligonucleotide
  Antisense strand to SEQ ID NO: 980360
ucacauaugcagcacugga

SEQ ID NO: 980362 - RNA, 19 nt, Artificial Sequence
  Description of Artificial Sequence: Synthetic oligonucleotide
  Sense strand starting at position 3631 of SEQ ID NO: 914130
augugcacauguguuauaa

SEQ ID NO: 980363 - RNA, 19 nt, Artificial Sequence
  Description of Artificial Sequence: Synthetic oligonucleotide
  Antisense strand to SEQ ID NO: 980362
uuauaacacaugugcacau

SEQ ID NO: 980364 - RNA, 19 nt, Artificial Sequence
  Description of Artificial Sequence: Synthetic oligonucleotide
  Sense strand starting at position 211 of SEQ ID NO: 914130
agggcaccgucucucuaau

SEQ ID NO: 980365 - RNA, 19 nt, Artificial Sequence
  Description of Artificial Sequence: Synthetic oligonucleotide
  Antisense strand to SEQ ID NO: 980364
auuagagagacggugcccu

SEQ ID NO: 980366 - RNA, 19 nt, Artificial Sequence
  Description of Artificial Sequence: Synthetic oligonucleotide
  Sense strand starting at position 348 of SEQ ID NO: 914130
auguucuucugguuguaca

SEQ ID NO: 980367 - RNA, 19 nt, Artificial Sequence
  Description of Artificial Sequence: Synthetic oligonucleotide
  Antisense strand to SEQ ID NO: 980366
uguacaaccagaagaacau

SEQ ID NO: 980368 - RNA, 19 nt, Artificial Sequence
  Description of Artificial Sequence: Synthetic oligonucleotide
  Sense strand starting at position 1201 of SEQ ID NO: 914130
uaacuucuccgcgauguca

SEQ ID NO: 980369 - RNA, 19 nt, Artificial Sequence
  Description of Artificial Sequence: Synthetic oligonucleotide
  Antisense strand to SEQ ID NO: 980368
ugacaucgcggagaaguua

SEQ ID NO: 980370 - RNA, 19 nt, Artificial Sequence
  Description of Artificial Sequence: Synthetic oligonucleotide
  Sense strand starting at position 3372 of SEQ ID NO: 914130
guuguuuccucauuauccu

SEQ ID NO: 980371 - RNA, 19 nt, Artificial Sequence
  Description of Artificial Sequence: Synthetic oligonucleotide
  Antisense strand to SEQ ID NO: 980370
aggauaaugaggaaacaac

SEQ ID NO: 980372 - RNA, 19 nt, Artificial Sequence
  Description of Artificial Sequence: Synthetic oligonucleotide
  Sense strand starting at position 213 of SEQ ID NO: 914130
ggcaccgucucucuaauua

SEQ ID NO: 980373 - RNA, 19 nt, Artificial Sequence
  Description of Artificial Sequence: Synthetic oligonucleotide
  Antisense strand to SEQ ID NO: 980372
uaauuagagagacggugcc

SEQ ID NO: 980374 - RNA, 19 nt, Artificial Sequence
  Description of Artificial Sequence: Synthetic oligonucleotide
  Sense strand starting at position 3487 of SEQ ID NO: 914131
gcaaauuugccauguaaua

SEQ ID NO: 980375 - RNA, 19 nt, Artificial Sequence
  Description of Artificial Sequence: Synthetic oligonucleotide
  Antisense strand to SEQ ID NO: 980374
uauuacauggcaaauuugc

SEQ ID NO: 980376 - RNA, 19 nt, Artificial Sequence
  Description of Artificial Sequence: Synthetic oligonucleotide
  Sense strand starting at position 2729 of SEQ ID NO: 914131
cuaggauggauaugccaaa

SEQ ID NO: 980377 - RNA, 19 nt, Artificial Sequence
  Description of Artificial Sequence: Synthetic oligonucleotide
  Antisense strand to SEQ ID NO: 980376
uuuggcauauccauccuag

SEQ ID NO: 980378 - RNA, 19 nt, Artificial Sequence
  Description of Artificial Sequence: Synthetic oligonucleotide
  Sense strand starting at position 3135 of SEQ ID NO: 914131
gggcuugaggcagguauuu

SEQ ID NO: 980379 - RNA, 19 nt, Artificial Sequence
  Description of Artificial Sequence: Synthetic oligonucleotide
  Antisense strand to SEQ ID NO: 980378
aaauaccugccucaagccc

SEQ ID NO: 980380 - RNA, 19 nt, Artificial Sequence
  Description of Artificial Sequence: Synthetic oligonucleotide
  Sense strand starting at position 757 of SEQ ID NO: 914131
gccucuuggccgcuaacau

SEQ ID NO: 980381 - RNA, 19 nt, Artificial Sequence
  Description of Artificial Sequence: Synthetic oligonucleotide
  Antisense strand to SEQ ID NO: 980380
auguuagcggccaagaggc

SEQ ID NO: 980382 - RNA, 19 nt, Artificial Sequence
  Description of Artificial Sequence: Synthetic oligonucleotide
  Sense strand starting at position 76 of SEQ ID NO: 914131
gcgcuagccaguucucaag

SEQ ID NO: 980383 - RNA, 19 nt, Artificial Sequence
  Description of Artificial Sequence: Synthetic oligonucleotide
  Antisense strand to SEQ ID NO: 980382
cuugagaacuggcuagcgc

SEQ ID NO: 980384 - RNA, 19 nt, Artificial Sequence
  Description of Artificial Sequence: Synthetic oligonucleotide
  Sense strand starting at position 330 of SEQ ID NO: 914131
aaaggaaaguucuucggau

SEQ ID NO: 980385 - RNA, 19 nt, Artificial Sequence
  Description of Artificial Sequence: Synthetic oligonucleotide
  Antisense strand to SEQ ID NO: 980384
auccgaagaacuuuccuuu

SEQ ID NO: 980386 - RNA, 19 nt, Artificial Sequence
  Description of Artificial Sequence: Synthetic oligonucleotide
  Sense strand starting at position 2723 of SEQ ID NO: 914131
gucccacuaggauggauau

SEQ ID NO: 980387 - RNA, 19 nt, Artificial Sequence
  Description of Artificial Sequence: Synthetic oligonucleotide
  Antisense strand to SEQ ID NO: 980386
auauccauccuagugggac

SEQ ID NO: 980388 - RNA, 19 nt, Artificial Sequence
  Description of Artificial Sequence: Synthetic oligonucleotide
  Sense strand starting at position 1995 of SEQ ID NO: 914131
gauuauugacagggcgaga

SEQ ID NO: 980389 - RNA, 19 nt, Artificial Sequence
  Description of Artificial Sequence: Synthetic oligonucleotide
  Antisense strand to SEQ ID NO: 980388
ucucgcccugucaauaauc

SEQ ID NO: 980390 - RNA, 19 nt, Artificial Sequence
  Description of Artificial Sequence: Synthetic oligonucleotide
  Sense strand starting at position 331 of SEQ ID NO: 914131
aaggaaaguucuucggauu

SEQ ID NO: 980391 - RNA, 19 nt, Artificial Sequence
  Description of Artificial Sequence: Synthetic oligonucleotide
  Antisense strand to SEQ ID NO: 980390
aauccgaagaacuuuccuu

SEQ ID NO: 980392 - RNA, 19 nt, Artificial Sequence
  Description of Artificial Sequence: Synthetic oligonucleotide
  Sense strand starting at position 2457 of SEQ ID NO: 914131
aggguaguauuugagaaag

SEQ ID NO: 980393 - RNA, 19 nt, Artificial Sequence
  Description of Artificial Sequence: Synthetic oligonucleotide
  Antisense strand to SEQ ID NO: 980392
cuuucucaaauacuacccu

SEQ ID NO: 980394 - RNA, 19 nt, Artificial Sequence
  Description of Artificial Sequence: Synthetic oligonucleotide
  Sense strand starting at position 3385 of SEQ ID NO: 914131
aguauuagucuagagucca

SEQ ID NO: 980395 - RNA, 19 nt, Artificial Sequence
  Description of Artificial Sequence: Synthetic oligonucleotide
  Antisense strand to SEQ ID NO: 980394
uggacucuagacuaauacu

SEQ ID NO: 980396 - RNA, 19 nt, Artificial Sequence
  Description of Artificial Sequence: Synthetic oligonucleotide
  Sense strand starting at position 93 of SEQ ID NO: 914131
aguccaaugccuggaggaa

SEQ ID NO: 980397 - RNA, 19 nt, Artificial Sequence
  Description of Artificial Sequence: Synthetic oligonucleotide
  Antisense strand to SEQ ID NO: 980396
uuccuccaggcauuggacu

SEQ ID NO: 980398 - RNA, 19 nt, Artificial Sequence
  Description of Artificial Sequence: Synthetic oligonucleotide
  Sense strand starting at position 3249 of SEQ ID NO: 914131
aauguuccugggugauaga

SEQ ID NO: 980399 - RNA, 19 nt, Artificial Sequence
  Description of Artificial Sequence: Synthetic oligonucleotide
  Antisense strand to SEQ ID NO: 980398
ucuaucacccaggaacauu

SEQ ID NO: 980400 - RNA, 19 nt, Artificial Sequence
  Description of Artificial Sequence: Synthetic oligonucleotide
  Sense strand starting at position 2879 of SEQ ID NO: 914131
gguaguaggaaaugagcua

SEQ ID NO: 980401 - RNA, 19 nt, Artificial Sequence
  Description of Artificial Sequence: Synthetic oligonucleotide
  Antisense strand to SEQ ID NO: 980400
uagcucauuuccuacuacc

SEQ ID NO: 980402 - RNA, 19 nt, Artificial Sequence
  Description of Artificial Sequence: Synthetic oligonucleotide
  Sense strand starting at position 3380 of SEQ ID NO: 914131
ggaguaguauuagucuaga

SEQ ID NO: 980403 - RNA, 19 nt, Artificial Sequence
  Description of Artificial Sequence: Synthetic oligonucleotide
  Antisense strand to SEQ ID NO: 980402
ucuagacuaauacuacucc

SEQ ID NO: 980404 - RNA, 19 nt, Artificial Sequence
  Description of Artificial Sequence: Synthetic oligonucleotide
  Sense strand starting at position 332 of SEQ ID NO: 914131
aggaaaguucuucggauuc

SEQ ID NO: 980405 - RNA, 19 nt, Artificial Sequence
  Description of Artificial Sequence: Synthetic oligonucleotide
  Antisense strand to SEQ ID NO: 980404
gaauccgaagaacuuuccu

SEQ ID NO: 980406 - RNA, 19 nt, Artificial Sequence
  Description of Artificial Sequence: Synthetic oligonucleotide
  Sense strand starting at position 3248 of SEQ ID NO: 914131
caauguuccugggugauag

SEQ ID NO: 980407 - RNA, 19 nt, Artificial Sequence
  Description of Artificial Sequence: Synthetic oligonucleotide
  Antisense strand to SEQ ID NO: 980406
cuaucacccaggaacauug

SEQ ID NO: 980408 - RNA, 19 nt, Artificial Sequence
  Description of Artificial Sequence: Synthetic oligonucleotide
  Sense strand starting at position 3965 of SEQ ID NO: 914131
cuguuaaauccauguacaa

SEQ ID NO: 980409 - RNA, 19 nt, Artificial Sequence
  Description of Artificial Sequence: Synthetic oligonucleotide
  Antisense strand to SEQ ID NO: 980408
uuguacauggauuuaacag

SEQ ID NO: 980410 - RNA, 19 nt, Artificial Sequence
  Description of Artificial Sequence: Synthetic oligonucleotide
  Sense strand starting at position 75 of SEQ ID NO: 914131
cgcgcuagccaguucucaa

SEQ ID NO: 980411 - RNA, 19 nt, Artificial Sequence
  Description of Artificial Sequence: Synthetic oligonucleotide
  Antisense strand to SEQ ID NO: 980410
uugagaacuggcuagcgcg

SEQ ID NO: 980412 - RNA, 19 nt, Artificial Sequence
  Description of Artificial Sequence: Synthetic oligonucleotide
  Sense strand starting at position 3246 of SEQ ID NO: 914131
cacaauguuccugggugau

SEQ ID NO: 980413 - RNA, 19 nt, Artificial Sequence
  Description of Artificial Sequence: Synthetic oligonucleotide
  Antisense strand to SEQ ID NO: 980412
aucacccaggaacauugug

SEQ ID NO: 980414 - RNA, 19 nt, Artificial Sequence
  Description of Artificial Sequence: Synthetic oligonucleotide
  Sense strand starting at position 268 of SEQ ID NO: 914131
gucaucuucccagggugaa

SEQ ID NO: 980415 - RNA, 19 nt, Artificial Sequence
  Description of Artificial Sequence: Synthetic oligonucleotide
  Antisense strand to SEQ ID NO: 980414
uucacccugggaagaugac

SEQ ID NO: 980416 - RNA, 19 nt, Artificial Sequence
  Description of Artificial Sequence: Synthetic oligonucleotide
  Sense strand starting at position 3372 of SEQ ID NO: 914131
gccucuuaggaguaguauu

SEQ ID NO: 980417 - RNA, 19 nt, Artificial Sequence
  Description of Artificial Sequence: Synthetic oligonucleotide
  Antisense strand to SEQ ID NO: 980416
aauacuacuccuaagaggc

SEQ ID NO: 980418 - RNA, 19 nt, Artificial Sequence
  Description of Artificial Sequence: Synthetic oligonucleotide
  Sense strand starting at position 2625 of SEQ ID NO: 914131
aguuccuggucaucuacaa

SEQ ID NO: 980419 - RNA, 19 nt, Artificial Sequence
  Description of Artificial Sequence: Synthetic oligonucleotide
  Antisense strand to SEQ ID NO: 980418
uuguagaugaccaggaacu

SEQ ID NO: 980420 - RNA, 19 nt, Artificial Sequence
  Description of Artificial Sequence: Synthetic oligonucleotide
  Sense strand starting at position 3383 of SEQ ID NO: 914131
guaguauuagucuagaguc

SEQ ID NO: 980421 - RNA, 19 nt, Artificial Sequence
  Description of Artificial Sequence: Synthetic oligonucleotide
  Antisense strand to SEQ ID NO: 980420
gacucuagacuaauacuac

SEQ ID NO: 980422 - RNA, 19 nt, Artificial Sequence
  Description of Artificial Sequence: Synthetic oligonucleotide
  Sense strand starting at position 2459 of SEQ ID NO: 914131
gguaguauuugagaaagug

SEQ ID NO: 980423 - RNA, 19 nt, Artificial Sequence
  Description of Artificial Sequence: Synthetic oligonucleotide
  Antisense strand to SEQ ID NO: 980422
cacuuucucaaauacuacc

SEQ ID NO: 980424 - RNA, 19 nt, Artificial Sequence
  Description of Artificial Sequence: Synthetic oligonucleotide
  Sense strand starting at position 3826 of SEQ ID NO: 914131
uaauuagucucagcaggua

SEQ ID NO: 980425 - RNA, 19 nt, Artificial Sequence
  Description of Artificial Sequence: Synthetic oligonucleotide
  Antisense strand to SEQ ID NO: 980424
uaccugcugagacuaauua

SEQ ID NO: 980426 - RNA, 19 nt, Artificial Sequence
  Description of Artificial Sequence: Synthetic oligonucleotide
  Sense strand starting at position 2426 of SEQ ID NO: 914131
agaaauaagucuuaaggga

SEQ ID NO: 980427 - RNA, 19 nt, Artificial Sequence
  Description of Artificial Sequence: Synthetic oligonucleotide
  Antisense strand to SEQ ID NO: 980426
ucccuuaagacuuauuucu

SEQ ID NO: 980428 - RNA, 19 nt, Artificial Sequence
  Description of Artificial Sequence: Synthetic oligonucleotide
  Sense strand starting at position 2024 of SEQ ID NO: 914131
gccuuaaugagaugccgga

SEQ ID NO: 980429 - RNA, 19 nt, Artificial Sequence
  Description of Artificial Sequence: Synthetic oligonucleotide
  Antisense strand to SEQ ID NO: 980428
uccggcaucucauuaaggc

SEQ ID NO: 980430 - RNA, 19 nt, Artificial Sequence
  Description of Artificial Sequence: Synthetic oligonucleotide
  Sense strand starting at position 2057 of SEQ ID NO: 914131
cagugacgugugcauaaau

SEQ ID NO: 980431 - RNA, 19 nt, Artificial Sequence
  Description of Artificial Sequence: Synthetic oligonucleotide
  Antisense strand to SEQ ID NO: 980430
auuuaugcacacgucacug

SEQ ID NO: 980432 - RNA, 19 nt, Artificial Sequence
  Description of Artificial Sequence: Synthetic oligonucleotide
  Sense strand starting at position 3067 of SEQ ID NO: 914131
guggcucuggcaggaaauu

SEQ ID NO: 980433 - RNA, 19 nt, Artificial Sequence
  Description of Artificial Sequence: Synthetic oligonucleotide
  Antisense strand to SEQ ID NO: 980432
aauuuccugccagagccac

SEQ ID NO: 980434 - RNA, 19 nt, Artificial Sequence
  Description of Artificial Sequence: Synthetic oligonucleotide
  Sense strand starting at position 2502 of SEQ ID NO: 914131
gugcuuggugguuaauuca

SEQ ID NO: 980435 - RNA, 19 nt, Artificial Sequence
  Description of Artificial Sequence: Synthetic oligonucleotide
  Antisense strand to SEQ ID NO: 980434
ugaauuaaccaccaagcac

SEQ ID NO: 980436 - RNA, 19 nt, Artificial Sequence
  Description of Artificial Sequence: Synthetic oligonucleotide
  Sense strand starting at position 3726 of SEQ ID NO: 914131
aucagaauaucagaaguag

SEQ ID NO: 980437 - RNA, 19 nt, Artificial Sequence
  Description of Artificial Sequence: Synthetic oligonucleotide
  Antisense strand to SEQ ID NO: 980436
cuacuucugauauucugau

SEQ ID NO: 980438 - RNA, 19 nt, Artificial Sequence
  Description of Artificial Sequence: Synthetic oligonucleotide
  Sense strand starting at position 2620 of SEQ ID NO: 914131
gucaaaguuccuggucauc

SEQ ID NO: 980439 - RNA, 19 nt, Artificial Sequence
  Description of Artificial Sequence: Synthetic oligonucleotide
  Antisense strand to SEQ ID NO: 980438
gaugaccaggaacuuugac

SEQ ID NO: 980440 - RNA, 19 nt, Artificial Sequence
  Description of Artificial Sequence: Synthetic oligonucleotide
  Sense strand starting at position 2509 of SEQ ID NO: 914131
gugguuaauucagcaguga

SEQ ID NO: 980441 - RNA, 19 nt, Artificial Sequence
  Description of Artificial Sequence: Synthetic oligonucleotide
  Antisense strand to SEQ ID NO: 980440
ucacugcugaauuaaccac

SEQ ID NO: 980442 - RNA, 19 nt, Artificial Sequence
  Description of Artificial Sequence: Synthetic oligonucleotide
  Sense strand starting at position 3797 of SEQ ID NO: 914131
aggauugcauaggauacaa

SEQ ID NO: 980443 - RNA, 19 nt, Artificial Sequence
  Description of Artificial Sequence: Synthetic oligonucleotide
  Antisense strand to SEQ ID NO: 980442
uuguauccuaugcaauccu

SEQ ID NO: 980444 - RNA, 19 nt, Artificial Sequence
  Description of Artificial Sequence: Synthetic oligonucleotide
  Sense strand starting at position 2997 of SEQ ID NO: 914131
gcuacaguguuucucgaag

SEQ ID NO: 980445 - RNA, 19 nt, Artificial Sequence
  Description of Artificial Sequence: Synthetic oligonucleotide
  Antisense strand to SEQ ID NO: 980444
cuucgagaaacacuguagc

SEQ ID NO: 980446 - RNA, 19 nt, Artificial Sequence
  Description of Artificial Sequence: Synthetic oligonucleotide
  Sense strand starting at position 3542 of SEQ ID NO: 914131
aggcuaaagucucagaaag

SEQ ID NO: 980447 - RNA, 19 nt, Artificial Sequence
  Description of Artificial Sequence: Synthetic oligonucleotide
  Antisense strand to SEQ ID NO: 980446
cuuucugagacuuuagccu

SEQ ID NO: 980448 - RNA, 19 nt, Artificial Sequence
  Description of Artificial Sequence: Synthetic oligonucleotide
  Sense strand starting at position 2055 of SEQ ID NO: 914131
cccagugacgugugcauaa

SEQ ID NO: 980449 - RNA, 19 nt, Artificial Sequence
  Description of Artificial Sequence: Synthetic oligonucleotide
  Antisense strand to SEQ ID NO: 980448
uuaugcacacgucacuggg

SEQ ID NO: 980450 - RNA, 19 nt, Artificial Sequence
  Description of Artificial Sequence: Synthetic oligonucleotide
  Sense strand starting at position 3544 of SEQ ID NO: 914131
gcuaaagucucagaaagac

SEQ ID NO: 980451 - RNA, 19 nt, Artificial Sequence
  Description of Artificial Sequence: Synthetic oligonucleotide
  Antisense strand to SEQ ID NO: 980450
gucuuucugagacuuuagc

SEQ ID NO: 980452 - RNA, 19 nt, Artificial Sequence
  Description of Artificial Sequence: Synthetic oligonucleotide
  Sense strand starting at position 2772 of SEQ ID NO: 914131
ugcuaaaugucagaaacau

SEQ ID NO: 980453 - RNA, 19 nt, Artificial Sequence
  Description of Artificial Sequence: Synthetic oligonucleotide
  Antisense strand to SEQ ID NO: 980452
auguuucugacauuuagca

SEQ ID NO: 980454 - RNA, 19 nt, Artificial Sequence
  Description of Artificial Sequence: Synthetic oligonucleotide
  Sense strand starting at position 3969 of SEQ ID NO: 914132
gugauaaggaaguaauguu

SEQ ID NO: 980455 - RNA, 19 nt, Artificial Sequence
  Description of Artificial Sequence: Synthetic oligonucleotide
  Antisense strand to SEQ ID NO: 980454
aacauuacuuccuuaucac

SEQ ID NO: 980456 - RNA, 19 nt, Artificial Sequence
  Description of Artificial Sequence: Synthetic oligonucleotide
  Sense strand starting at position 2709 of SEQ ID NO: 914132
gcaauugugcgcuugaaau

SEQ ID NO: 980457 - RNA, 19 nt, Artificial Sequence
  Description of Artificial Sequence: Synthetic oligonucleotide
  Antisense strand to SEQ ID NO: 980456
auuucaagcgcacaauugc

SEQ ID NO: 980458 - RNA, 19 nt, Artificial Sequence
  Description of Artificial Sequence: Synthetic oligonucleotide
  Sense strand starting at position 3704 of SEQ ID NO: 914132
uguugaacucuuuagaauu

SEQ ID NO: 980459 - RNA, 19 nt, Artificial Sequence
  Description of Artificial Sequence: Synthetic oligonucleotide
  Antisense strand to SEQ ID NO: 980458
aauucuaaagaguucaaca

SEQ ID NO: 980460 - RNA, 19 nt, Artificial Sequence
  Description of Artificial Sequence: Synthetic oligonucleotide
  Sense strand starting at position 965 of SEQ ID NO: 914132
caauaucggccagaugaug

SEQ ID NO: 980461 - RNA, 19 nt, Artificial Sequence
  Description of Artificial Sequence: Synthetic oligonucleotide
  Antisense strand to SEQ ID NO: 980460
caucaucuggccgauauug

SEQ ID NO: 980462 - RNA, 19 nt, Artificial Sequence
  Description of Artificial Sequence: Synthetic oligonucleotide
  Sense strand starting at position 2167 of SEQ ID NO: 914132
ggauuccaacggugagaaa

SEQ ID NO: 980463 - RNA, 19 nt, Artificial Sequence
  Description of Artificial Sequence: Synthetic oligonucleotide
  Antisense strand to SEQ ID NO: 980462
uuucucaccguuggaaucc

SEQ ID NO: 980464 - RNA, 19 nt, Artificial Sequence
  Description of Artificial Sequence: Synthetic oligonucleotide
  Sense strand starting at position 3835 of SEQ ID NO: 914132
uuguacaucugaucagaga

SEQ ID NO: 980465 - RNA, 19 nt, Artificial Sequence
  Description of Artificial Sequence: Synthetic oligonucleotide
  Antisense strand to SEQ ID NO: 980464
ucucugaucagauguacaa

SEQ ID NO: 980466 - RNA, 19 nt, Artificial Sequence
  Description of Artificial Sequence: Synthetic oligonucleotide
  Sense strand starting at position 801 of SEQ ID NO: 914132
gccugauuccauuagaauc

SEQ ID NO: 980467 - RNA, 19 nt, Artificial Sequence
  Description of Artificial Sequence: Synthetic oligonucleotide
  Antisense strand to SEQ ID NO: 980466
gauucuaauggaaucaggc

SEQ ID NO: 980468 - RNA, 19 nt, Artificial Sequence
  Description of Artificial Sequence: Synthetic oligonucleotide
  Sense strand starting at position 381 of SEQ ID NO: 914132
aaauguauuccguaauaag

SEQ ID NO: 980469 - RNA, 19 nt, Artificial Sequence
  Description of Artificial Sequence: Synthetic oligonucleotide
  Antisense strand to SEQ ID NO: 980468
cuuauuacggaauacauuu

SEQ ID NO: 980470 - RNA, 19 nt, Artificial Sequence
  Description of Artificial Sequence: Synthetic oligonucleotide
  Sense strand starting at position 2486 of SEQ ID NO: 914132
uugucuaggaggugagaaa

SEQ ID NO: 980471 - RNA, 19 nt, Artificial Sequence
  Description of Artificial Sequence: Synthetic oligonucleotide
  Antisense strand to SEQ ID NO: 980470
uuucucaccuccuagacaa

SEQ ID NO: 980472 - RNA, 19 nt, Artificial Sequence
  Description of Artificial Sequence: Synthetic oligonucleotide
  Sense strand starting at position 1866 of SEQ ID NO: 914132
uucucauuggcucaugaga

SEQ ID NO: 980473 - RNA, 19 nt, Artificial Sequence
  Description of Artificial Sequence: Synthetic oligonucleotide
  Antisense strand to SEQ ID NO: 980472
ucucaugagccaaugagaa

SEQ ID NO: 980474 - RNA, 19 nt, Artificial Sequence
  Description of Artificial Sequence: Synthetic oligonucleotide
  Sense strand starting at position 2484 of SEQ ID NO: 914132
cauugucuaggaggugaga

SEQ ID NO: 980475 - RNA, 19 nt, Artificial Sequence
  Description of Artificial Sequence: Synthetic oligonucleotide
  Antisense strand to SEQ ID NO: 980474
ucucaccuccuagacaaug

SEQ ID NO: 980476 - RNA, 19 nt, Artificial Sequence
  Description of Artificial Sequence: Synthetic oligonucleotide
  Sense strand starting at position 3657 of SEQ ID NO: 914132
auguuagaugugcauuaaa

SEQ ID NO: 980477 - RNA, 19 nt, Artificial Sequence
  Description of Artificial Sequence: Synthetic oligonucleotide
  Antisense strand to SEQ ID NO: 980476
uuuaaugcacaucuaacau

SEQ ID NO: 980478 - RNA, 19 nt, Artificial Sequence
  Description of Artificial Sequence: Synthetic oligonucleotide
  Sense strand starting at position 3919 of SEQ ID NO: 914132
auuuauuagcguuggcaaa

SEQ ID NO: 980479 - RNA, 19 nt, Artificial Sequence
  Description of Artificial Sequence: Synthetic oligonucleotide
  Antisense strand to SEQ ID NO: 980478
uuugccaacgcuaauaaau

SEQ ID NO: 980480 - RNA, 19 nt, Artificial Sequence
  Description of Artificial Sequence: Synthetic oligonucleotide
  Sense strand starting at position 2199 of SEQ ID NO: 914132
agaauaauguucucaggug

SEQ ID NO: 980481 - RNA, 19 nt, Artificial Sequence
  Description of Artificial Sequence: Synthetic oligonucleotide
  Antisense strand to SEQ ID NO: 980480
caccugagaacauuauucu

SEQ ID NO: 980482 - RNA, 19 nt, Artificial Sequence
  Description of Artificial Sequence: Synthetic oligonucleotide
  Sense strand starting at position 963 of SEQ ID NO: 914132
agcaauaucggccagauga

SEQ ID NO: 980483 - RNA, 19 nt, Artificial Sequence
  Description of Artificial Sequence: Synthetic oligonucleotide
  Antisense strand to SEQ ID NO: 980482
ucaucuggccgauauugcu

SEQ ID NO: 980484 - RNA, 19 nt, Artificial Sequence
  Description of Artificial Sequence: Synthetic oligonucleotide
  Sense strand starting at position 3192 of SEQ ID NO: 914132
gguucugacaucuggauua

SEQ ID NO: 980485 - RNA, 19 nt, Artificial Sequence
  Description of Artificial Sequence: Synthetic oligonucleotide
  Antisense strand to SEQ ID NO: 980484
uaauccagaugucagaacc

SEQ ID NO: 980486 - RNA, 19 nt, Artificial Sequence
  Description of Artificial Sequence: Synthetic oligonucleotide
  Sense strand starting at position 860 of SEQ ID NO: 914132
auaacagaguugucuacac

SEQ ID NO: 980487 - RNA, 19 nt, Artificial Sequence
  Description of Artificial Sequence: Synthetic oligonucleotide
  Antisense strand to SEQ ID NO: 980486
guguagacaacucuguuau

SEQ ID NO: 980488 - RNA, 19 nt, Artificial Sequence
  Description of Artificial Sequence: Synthetic oligonucleotide
  Sense strand starting at position 1240 of SEQ ID NO: 914132
acuguccucggauggagaa

SEQ ID NO: 980489 - RNA, 19 nt, Artificial Sequence
  Description of Artificial Sequence: Synthetic oligonucleotide
  Antisense strand to SEQ ID NO: 980488
uucuccauccgaggacagu

SEQ ID NO: 980490 - RNA, 19 nt, Artificial Sequence
  Description of Artificial Sequence: Synthetic oligonucleotide
  Sense strand starting at position 3644 of SEQ ID NO: 914132
cagugucugggacauguua

SEQ ID NO: 980491 - RNA, 19 nt, Artificial Sequence
  Description of Artificial Sequence: Synthetic oligonucleotide
  Antisense strand to SEQ ID NO: 980490
uaacaugucccagacacug

SEQ ID NO: 980492 - RNA, 19 nt, Artificial Sequence
  Description of Artificial Sequence: Synthetic oligonucleotide
  Sense strand starting at position 1325 of SEQ ID NO: 914132
ucgguaagacuaugaaagu

SEQ ID NO: 980493 - RNA, 19 nt, Artificial Sequence
  Description of Artificial Sequence: Synthetic oligonucleotide
  Antisense strand to SEQ ID NO: 980492
acuuucauagucuuaccga

SEQ ID NO: 980494 - RNA, 19 nt, Artificial Sequence
  Description of Artificial Sequence: Synthetic oligonucleotide
  Sense strand starting at position 3936 of SEQ ID NO: 914132
aaagacuguugguugaagu

SEQ ID NO: 980495 - RNA, 19 nt, Artificial Sequence
  Description of Artificial Sequence: Synthetic oligonucleotide
  Antisense strand to SEQ ID NO: 980494
acuucaaccaacagucuuu

SEQ ID NO: 980496 - RNA, 19 nt, Artificial Sequence
  Description of Artificial Sequence: Synthetic oligonucleotide
  Sense strand starting at position 3452 of SEQ ID NO: 914132
uugugugauagacagcuau

SEQ ID NO: 980497 - RNA, 19 nt, Artificial Sequence
  Description of Artificial Sequence: Synthetic oligonucleotide
  Antisense strand to SEQ ID NO: 980496
auagcugucuaucacacaa

SEQ ID NO: 980498 - RNA, 19 nt, Artificial Sequence
  Description of Artificial Sequence: Synthetic oligonucleotide
  Sense strand starting at position 3937 of SEQ ID NO: 914132
aagacuguugguugaagua

SEQ ID NO: 980499 - RNA, 19 nt, Artificial Sequence
  Description of Artificial Sequence: Synthetic oligonucleotide
  Antisense strand to SEQ ID NO: 980498
uacuucaaccaacagucuu

SEQ ID NO: 980500 - RNA, 19 nt, Artificial Sequence
  Description of Artificial Sequence: Synthetic oligonucleotide
  Sense strand starting at position 1093 of SEQ ID NO: 914132
uguccuaggaguggaagua

SEQ ID NO: 980501 - RNA, 19 nt, Artificial Sequence
  Description of Artificial Sequence: Synthetic oligonucleotide
  Antisense strand to SEQ ID NO: 980500
uacuuccacuccuaggaca

SEQ ID NO: 980502 - RNA, 19 nt, Artificial Sequence
  Description of Artificial Sequence: Synthetic oligonucleotide
  Sense strand starting at position 2165 of SEQ ID NO: 914132
ccggauuccaacggugaga

SEQ ID NO: 980503 - RNA, 19 nt, Artificial Sequence
  Description of Artificial Sequence: Synthetic oligonucleotide
  Antisense strand to SEQ ID NO: 980502
ucucaccguuggaauccgg

SEQ ID NO: 980504 - RNA, 19 nt, Artificial Sequence
  Description of Artificial Sequence: Synthetic oligonucleotide
  Sense strand starting at position 3961 of SEQ ID NO: 914132
agagaugagugauaaggaa

SEQ ID NO: 980505 - RNA, 19 nt, Artificial Sequence
  Description of Artificial Sequence: Synthetic oligonucleotide
  Antisense strand to SEQ ID NO: 980504
uuccuuaucacucaucucu

SEQ ID NO: 980506 - RNA, 19 nt, Artificial Sequence
  Description of Artificial Sequence: Synthetic oligonucleotide
  Sense strand starting at position 3646 of SEQ ID NO: 914132
gugucugggacauguuaga

SEQ ID NO: 980507 - RNA, 19 nt, Artificial Sequence
  Description of Artificial Sequence: Synthetic oligonucleotide
  Antisense strand to SEQ ID NO: 980506
ucuaacaugucccagacac

SEQ ID NO: 980508 - RNA, 19 nt, Artificial Sequence
  Description of Artificial Sequence: Synthetic oligonucleotide
  Sense strand starting at position 3977 of SEQ ID NO: 914132
gaaguaauguuuccggauc

SEQ ID NO: 980509 - RNA, 19 nt, Artificial Sequence
  Description of Artificial Sequence: Synthetic oligonucleotide
  Antisense strand to SEQ ID NO: 980508
gauccggaaacauuacuuc

SEQ ID NO: 980510 - RNA, 19 nt, Artificial Sequence
  Description of Artificial Sequence: Synthetic oligonucleotide
  Sense strand starting at position 2636 of SEQ ID NO: 914132
augggacuuuccuucggua

SEQ ID NO: 980511 - RNA, 19 nt, Artificial Sequence
  Description of Artificial Sequence: Synthetic oligonucleotide
  Antisense strand to SEQ ID NO: 980510
uaccgaaggaaagucccau

SEQ ID NO: 980512 - RNA, 19 nt, Artificial Sequence
  Description of Artificial Sequence: Synthetic oligonucleotide
  Sense strand starting at position 761 of SEQ ID NO: 914132
acauguuucuacucacagu

SEQ ID NO: 980513 - RNA, 19 nt, Artificial Sequence
  Description of Artificial Sequence: Synthetic oligonucleotide
  Antisense strand to SEQ ID NO: 980512
acugugaguagaaacaugu

SEQ ID NO: 980514 - RNA, 19 nt, Artificial Sequence
  Description of Artificial Sequence: Synthetic oligonucleotide
  Sense strand starting at position 3653 of SEQ ID NO: 914132
ggacauguuagaugugcau

SEQ ID NO: 980515 - RNA, 19 nt, Artificial Sequence
  Description of Artificial Sequence: Synthetic oligonucleotide
  Antisense strand to SEQ ID NO: 980514
augcacaucuaacaugucc

SEQ ID NO: 980516 - RNA, 19 nt, Artificial Sequence
  Description of Artificial Sequence: Synthetic oligonucleotide
  Sense strand starting at position 3656 of SEQ ID NO: 914132
cauguuagaugugcauuaa

SEQ ID NO: 980517 - RNA, 19 nt, Artificial Sequence
  Description of Artificial Sequence: Synthetic oligonucleotide
  Antisense strand to SEQ ID NO: 980516
uuaaugcacaucuaacaug

SEQ ID NO: 980518 - RNA, 19 nt, Artificial Sequence
  Description of Artificial Sequence: Synthetic oligonucleotide
  Sense strand starting at position 3472 of SEQ ID NO: 914132
ggagauauguguuuggucu

SEQ ID NO: 980519 - RNA, 19 nt, Artificial Sequence
  Description of Artificial Sequence: Synthetic oligonucleotide
  Antisense strand to SEQ ID NO: 980518
agaccaaacacauaucucc

SEQ ID NO: 980520 - RNA, 19 nt, Artificial Sequence
  Description of Artificial Sequence: Synthetic oligonucleotide
  Sense strand starting at position 3476 of SEQ ID NO: 914132
auauguguuuggucuuaaa

SEQ ID NO: 980521 - RNA, 19 nt, Artificial Sequence
  Description of Artificial Sequence: Synthetic oligonucleotide
  Antisense strand to SEQ ID NO: 980520
uuuaagaccaaacacauau

SEQ ID NO: 980522 - RNA, 19 nt, Artificial Sequence
  Description of Artificial Sequence: Synthetic oligonucleotide
  Sense strand starting at position 1433 of SEQ ID NO: 914132
gcucaacuuugcucacaga

SEQ ID NO: 980523 - RNA, 19 nt, Artificial Sequence
  Description of Artificial Sequence: Synthetic oligonucleotide
  Antisense strand to SEQ ID NO: 980522
ucugugagcaaaguugagc

SEQ ID NO: 980524 - RNA, 19 nt, Artificial Sequence
  Description of Artificial Sequence: Synthetic oligonucleotide
  Sense strand starting at position 961 of SEQ ID NO: 914132
ccagcaauaucggccagau

SEQ ID NO: 980525 - RNA, 19 nt, Artificial Sequence
  Description of Artificial Sequence: Synthetic oligonucleotide
  Antisense strand to SEQ ID NO: 980524
aucuggccgauauugcugg

SEQ ID NO: 980526 - RNA, 19 nt, Artificial Sequence
  Description of Artificial Sequence: Synthetic oligonucleotide
  Sense strand starting at position 2638 of SEQ ID NO: 914132
gggacuuuccuucgguauu

SEQ ID NO: 980527 - RNA, 19 nt, Artificial Sequence
  Description of Artificial Sequence: Synthetic oligonucleotide
  Antisense strand to SEQ ID NO: 980526
aauaccgaaggaaaguccc

SEQ ID NO: 980528 - RNA, 19 nt, Artificial Sequence
  Description of Artificial Sequence: Synthetic oligonucleotide
  Sense strand starting at position 2581 of SEQ ID NO: 914132
uuuguucuucccgggaaug

SEQ ID NO: 980529 - RNA, 19 nt, Artificial Sequence
  Description of Artificial Sequence: Synthetic oligonucleotide
  Antisense strand to SEQ ID NO: 980528
cauucccgggaagaacaaa

SEQ ID NO: 980530 - RNA, 19 nt, Artificial Sequence
  Description of Artificial Sequence: Synthetic oligonucleotide
  Sense strand starting at position 3473 of SEQ ID NO: 914132
gagauauguguuuggucuu

SEQ ID NO: 980531 - RNA, 19 nt, Artificial Sequence
  Description of Artificial Sequence: Synthetic oligonucleotide
  Antisense strand to SEQ ID NO: 980530
aagaccaaacacauaucuc

SEQ ID NO: 980532 - RNA, 19 nt, Artificial Sequence
  Description of Artificial Sequence: Synthetic oligonucleotide
  Sense strand starting at position 377 of SEQ ID NO: 914132
augcaaauguauuccguaa

SEQ ID NO: 980533 - RNA, 19 nt, Artificial Sequence
  Description of Artificial Sequence: Synthetic oligonucleotide
  Antisense strand to SEQ ID NO: 980532
uuacggaauacauuugcau

SEQ ID NO: 980534 - RNA, 19 nt, Artificial Sequence
  Description of Artificial Sequence: Synthetic oligonucleotide
  Sense strand starting at position 2672 of SEQ ID NO: 914133
cucagcccuccagaagaau

SEQ ID NO: 980535 - RNA, 19 nt, Artificial Sequence
  Description of Artificial Sequence: Synthetic oligonucleotide
  Antisense strand to SEQ ID NO: 980534
auucuucuggagggcugag

SEQ ID NO: 980536 - RNA, 19 nt, Artificial Sequence
  Description of Artificial Sequence: Synthetic oligonucleotide
  Sense strand starting at position 2681 of SEQ ID NO: 914133
ccagaagaaugccuugaag

SEQ ID NO: 980537 - RNA, 19 nt, Artificial Sequence
  Description of Artificial Sequence: Synthetic oligonucleotide
  Antisense strand to SEQ ID NO: 980536
cuucaaggcauucuucugg

SEQ ID NO: 980538 - RNA, 19 nt, Artificial Sequence
  Description of Artificial Sequence: Synthetic oligonucleotide
  Sense strand starting at position 2809 of SEQ ID NO: 914133
ugaugaugccuagacuuac

SEQ ID NO: 980539 - RNA, 19 nt, Artificial Sequence
  Description of Artificial Sequence: Synthetic oligonucleotide
  Antisense strand to SEQ ID NO: 980538
guaagucuaggcaucauca

SEQ ID NO: 980540 - RNA, 19 nt, Artificial Sequence
  Description of Artificial Sequence: Synthetic oligonucleotide
  Sense strand starting at position 189 of SEQ ID NO: 914133
uggauuucuuuguucugua

SEQ ID NO: 980541 - RNA, 19 nt, Artificial Sequence
  Description of Artificial Sequence: Synthetic oligonucleotide
  Antisense strand to SEQ ID NO: 980540
uacagaacaaagaaaucca

SEQ ID NO: 980542 - RNA, 19 nt, Artificial Sequence
  Description of Artificial Sequence: Synthetic oligonucleotide
  Sense strand starting at position 190 of SEQ ID NO: 914133
ggauuucuuuguucuguac

SEQ ID NO: 980543 - RNA, 19 nt, Artificial Sequence
  Description of Artificial Sequence: Synthetic oligonucleotide
  Antisense strand to SEQ ID NO: 980542
guacagaacaaagaaaucc

SEQ ID NO: 980544 - RNA, 19 nt, Artificial Sequence
  Description of Artificial Sequence: Synthetic oligonucleotide
  Sense strand starting at position 1171 of SEQ ID NO: 914133
uuauuucguuauuccuaca

SEQ ID NO: 980545 - RNA, 19 nt, Artificial Sequence
  Description of Artificial Sequence: Synthetic oligonucleotide
  Antisense strand to SEQ ID NO: 980544
uguaggaauaacgaaauaa

SEQ ID NO: 980546 - RNA, 19 nt, Artificial Sequence
  Description of Artificial Sequence: Synthetic oligonucleotide
  Sense strand starting at position 774 of SEQ ID NO: 914133
gugaaacucuuacucaaag

SEQ ID NO: 980547 - RNA, 19 nt, Artificial Sequence
  Description of Artificial Sequence: Synthetic oligonucleotide
  Antisense strand to SEQ ID NO: 980546
cuuugaguaagaguuucac

SEQ ID NO: 980548 - RNA, 19 nt, Artificial Sequence
  Description of Artificial Sequence: Synthetic oligonucleotide
  Sense strand starting at position 3823 of SEQ ID NO: 914133
acggguuauuggaaggaag

SEQ ID NO: 980549 - RNA, 19 nt, Artificial Sequence
  Description of Artificial Sequence: Synthetic oligonucleotide
  Antisense strand to SEQ ID NO: 980548
cuuccuuccaauaacccgu

SEQ ID NO: 980550 - RNA, 19 nt, Artificial Sequence
  Description of Artificial Sequence: Synthetic oligonucleotide
  Sense strand starting at position 2531 of SEQ ID NO: 914133
aagcaaauccgagaauugu

SEQ ID NO: 980551 - RNA, 19 nt, Artificial Sequence
  Description of Artificial Sequence: Synthetic oligonucleotide
  Antisense strand to SEQ ID NO: 980550
acaauucucggauuugcuu

SEQ ID NO: 980552 - RNA, 19 nt, Artificial Sequence
  Description of Artificial Sequence: Synthetic oligonucleotide
  Sense strand starting at position 3734 of SEQ ID NO: 914133
ucaaguuuccaggaguacu

SEQ ID NO: 980553 - RNA, 19 nt, Artificial Sequence
  Description of Artificial Sequence: Synthetic oligonucleotide
  Antisense strand to SEQ ID NO: 980552
aguacuccuggaaacuuga

SEQ ID NO: 980554 - RNA, 19 nt, Artificial Sequence
  Description of Artificial Sequence: Synthetic oligonucleotide
  Sense strand starting at position 2334 of SEQ ID NO: 914133
agggcaugugauuauaccu

SEQ ID NO: 980555 - RNA, 19 nt, Artificial Sequence
  Description of Artificial Sequence: Synthetic oligonucleotide
  Antisense strand to SEQ ID NO: 980554
agguauaaucacaugcccu

SEQ ID NO: 980556 - RNA, 19 nt, Artificial Sequence
  Description of Artificial Sequence: Synthetic oligonucleotide
  Sense strand starting at position 3817 of SEQ ID NO: 914133
ggaguuacggguuauugga

SEQ ID NO: 980557 - RNA, 19 nt, Artificial Sequence
  Description of Artificial Sequence: Synthetic oligonucleotide
  Antisense strand to SEQ ID NO: 980556
uccaauaacccguaacucc

SEQ ID NO: 980558 - RNA, 19 nt, Artificial Sequence
  Description of Artificial Sequence: Synthetic oligonucleotide
  Sense strand starting at position 1176 of SEQ ID NO: 914133
ucguuauuccuacagauaa

SEQ ID NO: 980559 - RNA, 19 nt, Artificial Sequence
  Description of Artificial Sequence: Synthetic oligonucleotide
  Antisense strand to SEQ ID NO: 980558
uuaucuguaggaauaacga

SEQ ID NO: 980560 - RNA, 19 nt, Artificial Sequence
  Description of Artificial Sequence: Synthetic oligonucleotide
  Sense strand starting at position 462 of SEQ ID NO: 914133
uguauucugcaagaaccau

SEQ ID NO: 980561 - RNA, 19 nt, Artificial Sequence
  Description of Artificial Sequence: Synthetic oligonucleotide
  Antisense strand to SEQ ID NO: 980560
augguucuugcagaauaca

SEQ ID NO: 980562 - RNA, 19 nt, Artificial Sequence
  Description of Artificial Sequence: Synthetic oligonucleotide
  Sense strand starting at position 151 of SEQ ID NO: 914133
ucuauaguucuacaggcaa

SEQ ID NO: 980563 - RNA, 19 nt, Artificial Sequence
  Description of Artificial Sequence: Synthetic oligonucleotide
  Antisense strand to SEQ ID NO: 980562
uugccuguagaacuauaga

SEQ ID NO: 980564 - RNA, 19 nt, Artificial Sequence
  Description of Artificial Sequence: Synthetic oligonucleotide
  Sense strand starting at position 459 of SEQ ID NO: 914133
ccauguauucugcaagaac

SEQ ID NO: 980565 - RNA, 19 nt, Artificial Sequence
  Description of Artificial Sequence: Synthetic oligonucleotide
  Antisense strand to SEQ ID NO: 980564
guucuugcagaauacaugg

SEQ ID NO: 980566 - RNA, 19 nt, Artificial Sequence
  Description of Artificial Sequence: Synthetic oligonucleotide
  Sense strand starting at position 124 of SEQ ID NO: 914133
agaguaguggacugaaagu

SEQ ID NO: 980567 - RNA, 19 nt, Artificial Sequence
  Description of Artificial Sequence: Synthetic oligonucleotide
  Antisense strand to SEQ ID NO: 980566
acuuucaguccacuacucu

SEQ ID NO: 980568 - RNA, 19 nt, Artificial Sequence
  Description of Artificial Sequence: Synthetic oligonucleotide
  Sense strand starting at position 2071 of SEQ ID NO: 914133
gcagcuugugcucuaguua

SEQ ID NO: 980569 - RNA, 19 nt, Artificial Sequence
  Description of Artificial Sequence: Synthetic oligonucleotide
  Antisense strand to SEQ ID NO: 980568
uaacuagagcacaagcugc

SEQ ID NO: 980570 - RNA, 19 nt, Artificial Sequence
  Description of Artificial Sequence: Synthetic oligonucleotide
  Sense strand starting at position 2353 of SEQ ID NO: 914133
guugguguuacuuaaagac

SEQ ID NO: 980571 - RNA, 19 nt, Artificial Sequence
  Description of Artificial Sequence: Synthetic oligonucleotide
  Antisense strand to SEQ ID NO: 980570
gucuuuaaguaacaccaac

SEQ ID NO: 980572 - RNA, 19 nt, Artificial Sequence
  Description of Artificial Sequence: Synthetic oligonucleotide
  Sense strand starting at position 2101 of SEQ ID NO: 914133
aguuccuuugcagaaacuu

SEQ ID NO: 980573 - RNA, 19 nt, Artificial Sequence
  Description of Artificial Sequence: Synthetic oligonucleotide
  Antisense strand to SEQ ID NO: 980572
aaguuucugcaaaggaacu

SEQ ID NO: 980574 - RNA, 19 nt, Artificial Sequence
  Description of Artificial Sequence: Synthetic oligonucleotide
  Sense strand starting at position 2956 of SEQ ID NO: 914133
acagaaauucucugggcuc

SEQ ID NO: 980575 - RNA, 19 nt, Artificial Sequence
  Description of Artificial Sequence: Synthetic oligonucleotide
  Antisense strand to SEQ ID NO: 980574
gagcccagagaauuucugu

SEQ ID NO: 980576 - RNA, 19 nt, Artificial Sequence
  Description of Artificial Sequence: Synthetic oligonucleotide
  Sense strand starting at position 2143 of SEQ ID NO: 914133
gaaagaugucucuggcaac

SEQ ID NO: 980577 - RNA, 19 nt, Artificial Sequence
  Description of Artificial Sequence: Synthetic oligonucleotide
  Antisense strand to SEQ ID NO: 980576
guugccagagacaucuuuc

SEQ ID NO: 980578 - RNA, 19 nt, Artificial Sequence
  Description of Artificial Sequence: Synthetic oligonucleotide
  Sense strand starting at position 1339 of SEQ ID NO: 914133
gcauuuagcucccuuaguu

SEQ ID NO: 980579 - RNA, 19 nt, Artificial Sequence
  Description of Artificial Sequence: Synthetic oligonucleotide
  Antisense strand to SEQ ID NO: 980578
aacuaagggagcuaaaugc

SEQ ID NO: 980580 - RNA, 19 nt, Artificial Sequence
  Description of Artificial Sequence: Synthetic oligonucleotide
  Sense strand starting at position 3814 of SEQ ID NO: 914133
aaaggaguuacggguuauu

SEQ ID NO: 980581 - RNA, 19 nt, Artificial Sequence
  Description of Artificial Sequence: Synthetic oligonucleotide
  Antisense strand to SEQ ID NO: 980580
aauaacccguaacuccuuu

SEQ ID NO: 980582 - RNA, 19 nt, Artificial Sequence
  Description of Artificial Sequence: Synthetic oligonucleotide
  Sense strand starting at position 2481 of SEQ ID NO: 914133
guuaaucuugucuacaucu

SEQ ID NO: 980583 - RNA, 19 nt, Artificial Sequence
  Description of Artificial Sequence: Synthetic oligonucleotide
  Antisense strand to SEQ ID NO: 980582
agauguagacaagauuaac

SEQ ID NO: 980584 - RNA, 19 nt, Artificial Sequence
  Description of Artificial Sequence: Synthetic oligonucleotide
  Sense strand starting at position 947 of SEQ ID NO: 914133
ugcagagggcaguaguuaa

SEQ ID NO: 980585 - RNA, 19 nt, Artificial Sequence
  Description of Artificial Sequence: Synthetic oligonucleotide
  Antisense strand to SEQ ID NO: 980584
uuaacuacugcccucugca

SEQ ID NO: 980586 - RNA, 19 nt, Artificial Sequence
  Description of Artificial Sequence: Synthetic oligonucleotide
  Sense strand starting at position 2983 of SEQ ID NO: 914133
ugcaguccucaguaagacu

SEQ ID NO: 980587 - RNA, 19 nt, Artificial Sequence
  Description of Artificial Sequence: Synthetic oligonucleotide
  Antisense strand to SEQ ID NO: 980586
agucuuacugaggacugca

SEQ ID NO: 980588 - RNA, 19 nt, Artificial Sequence
  Description of Artificial Sequence: Synthetic oligonucleotide
  Sense strand starting at position 3513 of SEQ ID NO: 914133
gucuguuagcaugauacau

SEQ ID NO: 980589 - RNA, 19 nt, Artificial Sequence
  Description of Artificial Sequence: Synthetic oligonucleotide
  Antisense strand to SEQ ID NO: 980588
auguaucaugcuaacagac

SEQ ID NO: 980590 - RNA, 19 nt, Artificial Sequence
  Description of Artificial Sequence: Synthetic oligonucleotide
  Sense strand starting at position 958 of SEQ ID NO: 914133
guaguuaacuuccucacaa

SEQ ID NO: 980591 - RNA, 19 nt, Artificial Sequence
  Description of Artificial Sequence: Synthetic oligonucleotide
  Antisense strand to SEQ ID NO: 980590
uugugaggaaguuaacuac

SEQ ID NO: 980592 - RNA, 19 nt, Artificial Sequence
  Description of Artificial Sequence: Synthetic oligonucleotide
  Sense strand starting at position 1005 of SEQ ID NO: 914133
cgaaguaaaucacuuagca

SEQ ID NO: 980593 - RNA, 19 nt, Artificial Sequence
  Description of Artificial Sequence: Synthetic oligonucleotide
  Antisense strand to SEQ ID NO: 980592
ugcuaagugauuuacuucg

SEQ ID NO: 980594 - RNA, 19 nt, Artificial Sequence
  Description of Artificial Sequence: Synthetic oligonucleotide
  Sense strand starting at position 2937 of SEQ ID NO: 914133
acugcuuuggaguaguuua

SEQ ID NO: 980595 - RNA, 19 nt, Artificial Sequence
  Description of Artificial Sequence: Synthetic oligonucleotide
  Antisense strand to SEQ ID NO: 980594
uaaacuacuccaaagcagu

SEQ ID NO: 980596 - RNA, 19 nt, Artificial Sequence
  Description of Artificial Sequence: Synthetic oligonucleotide
  Sense strand starting at position 1588 of SEQ ID NO: 914133
augcaaguuucucuuagag

SEQ ID NO: 980597 - RNA, 19 nt, Artificial Sequence
  Description of Artificial Sequence: Synthetic oligonucleotide
  Antisense strand to SEQ ID NO: 980596
cucuaagagaaacuugcau

SEQ ID NO: 980598 - RNA, 19 nt, Artificial Sequence
  Description of Artificial Sequence: Synthetic oligonucleotide
  Sense strand starting at position 896 of SEQ ID NO: 914133
cgcuaucuugggcaaauca

SEQ ID NO: 980599 - RNA, 19 nt, Artificial Sequence
  Description of Artificial Sequence: Synthetic oligonucleotide
  Antisense strand to SEQ ID NO: 980598
ugauuugcccaagauagcg

SEQ ID NO: 980600 - RNA, 19 nt, Artificial Sequence
  Description of Artificial Sequence: Synthetic oligonucleotide
  Sense strand starting at position 2631 of SEQ ID NO: 914133
cuguguuugucagcauuuc

SEQ ID NO: 980601 - RNA, 19 nt, Artificial Sequence
  Description of Artificial Sequence: Synthetic oligonucleotide
  Antisense strand to SEQ ID NO: 980600
gaaaugcugacaaacacag

SEQ ID NO: 980602 - RNA, 19 nt, Artificial Sequence
  Description of Artificial Sequence: Synthetic oligonucleotide
  Sense strand starting at position 989 of SEQ ID NO: 914133
agaauuaaaugagagacga

SEQ ID NO: 980603 - RNA, 19 nt, Artificial Sequence
  Description of Artificial Sequence: Synthetic oligonucleotide
  Antisense strand to SEQ ID NO: 980602
ucgucucucauuuaauucu

SEQ ID NO: 980604 - RNA, 19 nt, Artificial Sequence
  Description of Artificial Sequence: Synthetic oligonucleotide
  Sense strand starting at position 2932 of SEQ ID NO: 914133
gacccacugcuuuggagua

SEQ ID NO: 980605 - RNA, 19 nt, Artificial Sequence
  Description of Artificial Sequence: Synthetic oligonucleotide
  Antisense strand to SEQ ID NO: 980604
uacuccaaagcaguggguc

SEQ ID NO: 980606 - RNA, 19 nt, Artificial Sequence
  Description of Artificial Sequence: Synthetic oligonucleotide
  Sense strand starting at position 2480 of SEQ ID NO: 914133
gguuaaucuugucuacauc

SEQ ID NO: 980607 - RNA, 19 nt, Artificial Sequence
  Description of Artificial Sequence: Synthetic oligonucleotide
  Antisense strand to SEQ ID NO: 980606
gauguagacaagauuaacc

SEQ ID NO: 980608 - RNA, 19 nt, Artificial Sequence
  Description of Artificial Sequence: Synthetic oligonucleotide
  Sense strand starting at position 2479 of SEQ ID NO: 914133
ugguuaaucuugucuacau

SEQ ID NO: 980609 - RNA, 19 nt, Artificial Sequence
  Description of Artificial Sequence: Synthetic oligonucleotide
  Antisense strand to SEQ ID NO: 980608
auguagacaagauuaacca

SEQ ID NO: 980610 - RNA, 19 nt, Artificial Sequence
  Description of Artificial Sequence: Synthetic oligonucleotide
  Sense strand starting at position 2190 of SEQ ID NO: 914133
cagacuuugucuccucgaa

SEQ ID NO: 980611 - RNA, 19 nt, Artificial Sequence
  Description of Artificial Sequence: Synthetic oligonucleotide
  Antisense strand to SEQ ID NO: 980610
uucgaggagacaaagucug

SEQ ID NO: 980612 - RNA, 19 nt, Artificial Sequence
  Description of Artificial Sequence: Synthetic oligonucleotide
  Sense strand starting at position 840 of SEQ ID NO: 914133
gguaaagcaugagcucuua

SEQ ID NO: 980613 - RNA, 19 nt, Artificial Sequence
  Description of Artificial Sequence: Synthetic oligonucleotide
  Antisense strand to SEQ ID NO: 980612
uaagagcucaugcuuuacc

SEQ ID NO: 980614 - RNA, 19 nt, Artificial Sequence
  Description of Artificial Sequence: Synthetic oligonucleotide
  Sense strand starting at position 791 of SEQ ID NO: 914134
caggauauuugggaaucag

SEQ ID NO: 980615 - RNA, 19 nt, Artificial Sequence
  Description of Artificial Sequence: Synthetic oligonucleotide
  Antisense strand to SEQ ID NO: 980614
cugauucccaaauauccug

SEQ ID NO: 980616 - RNA, 19 nt, Artificial Sequence
  Description of Artificial Sequence: Synthetic oligonucleotide
  Sense strand starting at position 1759 of SEQ ID NO: 914134
acaaguuaagcacagaagu

SEQ ID NO: 980617 - RNA, 19 nt, Artificial Sequence
  Description of Artificial Sequence: Synthetic oligonucleotide
  Antisense strand to SEQ ID NO: 980616
acuucugugcuuaacuugu

SEQ ID NO: 980618 - RNA, 19 nt, Artificial Sequence
  Description of Artificial Sequence: Synthetic oligonucleotide
  Sense strand starting at position 2270 of SEQ ID NO: 914134
cuaguuugacuuuauauag

SEQ ID NO: 980619 - RNA, 19 nt, Artificial Sequence
  Description of Artificial Sequence: Synthetic oligonucleotide
  Antisense strand to SEQ ID NO: 980618
cuauauaaagucaaacuag

SEQ ID NO: 980620 - RNA, 19 nt, Artificial Sequence
  Description of Artificial Sequence: Synthetic oligonucleotide
  Sense strand starting at position 1602 of SEQ ID NO: 914134
guguaaguaagagagugaa

SEQ ID NO: 980621 - RNA, 19 nt, Artificial Sequence
  Description of Artificial Sequence: Synthetic oligonucleotide
  Antisense strand to SEQ ID NO: 980620
uucacucucuuacuuacac

SEQ ID NO: 980622 - RNA, 19 nt, Artificial Sequence
  Description of Artificial Sequence: Synthetic oligonucleotide
  Sense strand starting at position 1615 of SEQ ID NO: 914134
agugaaauagagcaagcau

SEQ ID NO: 980623 - RNA, 19 nt, Artificial Sequence
  Description of Artificial Sequence: Synthetic oligonucleotide
  Antisense strand to SEQ ID NO: 980622
augcuugcucuauuucacu

SEQ ID NO: 980624 - RNA, 19 nt, Artificial Sequence
  Description of Artificial Sequence: Synthetic oligonucleotide
  Sense strand starting at position 257 of SEQ ID NO: 914134
augcucugagauggauaga

SEQ ID NO: 980625 - RNA, 19 nt, Artificial Sequence
  Description of Artificial Sequence: Synthetic oligonucleotide
  Antisense strand to SEQ ID NO: 980624
ucuauccaucucagagcau

SEQ ID NO: 980626 - RNA, 19 nt, Artificial Sequence
  Description of Artificial Sequence: Synthetic oligonucleotide
  Sense strand starting at position 2375 of SEQ ID NO: 914134
acaguaauccgaugggaag

SEQ ID NO: 980627 - RNA, 19 nt, Artificial Sequence
  Description of Artificial Sequence: Synthetic oligonucleotide
  Antisense strand to SEQ ID NO: 980626
cuucccaucggauuacugu

SEQ ID NO: 980628 - RNA, 19 nt, Artificial Sequence
  Description of Artificial Sequence: Synthetic oligonucleotide
  Sense strand starting at position 302 of SEQ ID NO: 914134
guaggaaugcuagaucuug

SEQ ID NO: 980629 - RNA, 19 nt, Artificial Sequence
  Description of Artificial Sequence: Synthetic oligonucleotide
  Antisense strand to SEQ ID NO: 980628
caagaucuagcauuccuac

SEQ ID NO: 980630 - RNA, 19 nt, Artificial Sequence
  Description of Artificial Sequence: Synthetic oligonucleotide
  Sense strand starting at position 3229 of SEQ ID NO: 914134
cuguaaguaguacauaaau

SEQ ID NO: 980631 - RNA, 19 nt, Artificial Sequence
  Description of Artificial Sequence: Synthetic oligonucleotide
  Antisense strand to SEQ ID NO: 980630
auuuauguacuacuuacag

SEQ ID NO: 980632 - RNA, 19 nt, Artificial Sequence
  Description of Artificial Sequence: Synthetic oligonucleotide
  Sense strand starting at position 656 of SEQ ID NO: 914134
gaaggugggaaauguacuu

SEQ ID NO: 980633 - RNA, 19 nt, Artificial Sequence
  Description of Artificial Sequence: Synthetic oligonucleotide
  Antisense strand to SEQ ID NO: 980632
aaguacauuucccaccuuc

SEQ ID NO: 980634 - RNA, 19 nt, Artificial Sequence
  Description of Artificial Sequence: Synthetic oligonucleotide
  Sense strand starting at position 1377 of SEQ ID NO: 914134
caaggaauguaucugugaa

SEQ ID NO: 980635 - RNA, 19 nt, Artificial Sequence
  Description of Artificial Sequence: Synthetic oligonucleotide
  Antisense strand to SEQ ID NO: 980634
uucacagauacauuccuug

SEQ ID NO: 980636 - RNA, 19 nt, Artificial Sequence
  Description of Artificial Sequence: Synthetic oligonucleotide
  Sense strand starting at position 1379 of SEQ ID NO: 914134
aggaauguaucugugaaac

SEQ ID NO: 980637 - RNA, 19 nt, Artificial Sequence
  Description of Artificial Sequence: Synthetic oligonucleotide
  Antisense strand to SEQ ID NO: 980636
guuucacagauacauuccu

SEQ ID NO: 980638 - RNA, 19 nt, Artificial Sequence
  Description of Artificial Sequence: Synthetic oligonucleotide
  Sense strand starting at position 2101 of SEQ ID NO: 914134
uguugugucguuucuaauu

SEQ ID NO: 980639 - RNA, 19 nt, Artificial Sequence
  Description of Artificial Sequence: Synthetic oligonucleotide
  Antisense strand to SEQ ID NO: 980638
aauuagaaacgacacaaca

SEQ ID NO: 980640 - RNA, 19 nt, Artificial Sequence
  Description of Artificial Sequence: Synthetic oligonucleotide
  Sense strand starting at position 673 of SEQ ID NO: 914134
uuuguucuacuagaaggua

SEQ ID NO: 980641 - RNA, 19 nt, Artificial Sequence
  Description of Artificial Sequence: Synthetic oligonucleotide
  Antisense strand to SEQ ID NO: 980640
uaccuucuaguagaacaaa

SEQ ID NO: 980642 - RNA, 19 nt, Artificial Sequence
  Description of Artificial Sequence: Synthetic oligonucleotide
  Sense strand starting at position 2165 of SEQ ID NO: 914134
ggaagcgucaaugacacau

SEQ ID NO: 980643 - RNA, 19 nt, Artificial Sequence
  Description of Artificial Sequence: Synthetic oligonucleotide
  Antisense strand to SEQ ID NO: 980642
augugucauugacgcuucc

SEQ ID NO: 980644 - RNA, 19 nt, Artificial Sequence
  Description of Artificial Sequence: Synthetic oligonucleotide
  Sense strand starting at position 3492 of SEQ ID NO: 914134
uauuguggccuggaaacau

SEQ ID NO: 980645 - RNA, 19 nt, Artificial Sequence
  Description of Artificial Sequence: Synthetic oligonucleotide
  Antisense strand to SEQ ID NO: 980644
auguuuccaggccacaaua

SEQ ID NO: 980646 - RNA, 19 nt, Artificial Sequence
  Description of Artificial Sequence: Synthetic oligonucleotide
  Sense strand starting at position 2280 of SEQ ID NO: 914134
uuuauauagcccgaggaug

SEQ ID NO: 980647 - RNA, 19 nt, Artificial Sequence
  Description of Artificial Sequence: Synthetic oligonucleotide
  Antisense strand to SEQ ID NO: 980646
cauccucgggcuauauaaa

SEQ ID NO: 980648 - RNA, 19 nt, Artificial Sequence
  Description of Artificial Sequence: Synthetic oligonucleotide
  Sense strand starting at position 3334 of SEQ ID NO: 914134
caaagugacucauuguaga

SEQ ID NO: 980649 - RNA, 19 nt, Artificial Sequence
  Description of Artificial Sequence: Synthetic oligonucleotide
  Antisense strand to SEQ ID NO: 980648
ucuacaaugagucacuuug

SEQ ID NO: 980650 - RNA, 19 nt, Artificial Sequence
  Description of Artificial Sequence: Synthetic oligonucleotide
  Sense strand starting at position 2818 of SEQ ID NO: 914134
auuagucucccagagcaau

SEQ ID NO: 980651 - RNA, 19 nt, Artificial Sequence
  Description of Artificial Sequence: Synthetic oligonucleotide
  Antisense strand to SEQ ID NO: 980650
auugcucugggagacuaau

SEQ ID NO: 980652 - RNA, 19 nt, Artificial Sequence
  Description of Artificial Sequence: Synthetic oligonucleotide
  Sense strand starting at position 381 of SEQ ID NO: 914134
cugaaugagugacuuuauu

SEQ ID NO: 980653 - RNA, 19 nt, Artificial Sequence
  Description of Artificial Sequence: Synthetic oligonucleotide
  Antisense strand to SEQ ID NO: 980652
aauaaagucacucauucag

SEQ ID NO: 980654 - RNA, 19 nt, Artificial Sequence
  Description of Artificial Sequence: Synthetic oligonucleotide
  Sense strand starting at position 3224 of SEQ ID NO: 914134
guaaacuguaaguaguaca

SEQ ID NO: 980655 - RNA, 19 nt, Artificial Sequence
  Description of Artificial Sequence: Synthetic oligonucleotide
  Antisense strand to SEQ ID NO: 980654
uguacuacuuacaguuuac

SEQ ID NO: 980656 - RNA, 19 nt, Artificial Sequence
  Description of Artificial Sequence: Synthetic oligonucleotide
  Sense strand starting at position 2605 of SEQ ID NO: 914134
uuuguauguagguaaacua

SEQ ID NO: 980657 - RNA, 19 nt, Artificial Sequence
  Description of Artificial Sequence: Synthetic oligonucleotide
  Antisense strand to SEQ ID NO: 980656
uaguuuaccuacauacaaa

SEQ ID NO: 980658 - RNA, 19 nt, Artificial Sequence
  Description of Artificial Sequence: Synthetic oligonucleotide
  Sense strand starting at position 2171 of SEQ ID NO: 914134
gucaaugacacauggaguu

SEQ ID NO: 980659 - RNA, 19 nt, Artificial Sequence
  Description of Artificial Sequence: Synthetic oligonucleotide
  Antisense strand to SEQ ID NO: 980658
aacuccaugugucauugac

SEQ ID NO: 980660 - RNA, 19 nt, Artificial Sequence
  Description of Artificial Sequence: Synthetic oligonucleotide
  Sense strand starting at position 2002 of SEQ ID NO: 914134
cgaucauucuaagucagaa

SEQ ID NO: 980661 - RNA, 19 nt, Artificial Sequence
  Description of Artificial Sequence: Synthetic oligonucleotide
  Antisense strand to SEQ ID NO: 980660
uucugacuuagaaugaucg

SEQ ID NO: 980662 - RNA, 19 nt, Artificial Sequence
  Description of Artificial Sequence: Synthetic oligonucleotide
  Sense strand starting at position 2098 of SEQ ID NO: 914134
cgauguugugucguuucua

SEQ ID NO: 980663 - RNA, 19 nt, Artificial Sequence
  Description of Artificial Sequence: Synthetic oligonucleotide
  Antisense strand to SEQ ID NO: 980662
uagaaacgacacaacaucg

SEQ ID NO: 980664 - RNA, 19 nt, Artificial Sequence
  Description of Artificial Sequence: Synthetic oligonucleotide
  Sense strand starting at position 2824 of SEQ ID NO: 914134
cucccagagcaaugacauu

SEQ ID NO: 980665 - RNA, 19 nt, Artificial Sequence
  Description of Artificial Sequence: Synthetic oligonucleotide
  Antisense strand to SEQ ID NO: 980664
aaugucauugcucugggag

SEQ ID NO: 980666 - RNA, 19 nt, Artificial Sequence
  Description of Artificial Sequence: Synthetic oligonucleotide
  Sense strand starting at position 3058 of SEQ ID NO: 914134
guuaaauugaugggauguu

SEQ ID NO: 980667 - RNA, 19 nt, Artificial Sequence
  Description of Artificial Sequence: Synthetic oligonucleotide
  Antisense strand to SEQ ID NO: 980666
aacaucccaucaauuuaac

SEQ ID NO: 980668 - RNA, 19 nt, Artificial Sequence
  Description of Artificial Sequence: Synthetic oligonucleotide
  Sense strand starting at position 388 of SEQ ID NO: 914134
agugacuuuauugggaagu

SEQ ID NO: 980669 - RNA, 19 nt, Artificial Sequence
  Description of Artificial Sequence: Synthetic oligonucleotide
  Antisense strand to SEQ ID NO: 980668
acuucccaauaaagucacu

SEQ ID NO: 980670 - RNA, 19 nt, Artificial Sequence
  Description of Artificial Sequence: Synthetic oligonucleotide
  Sense strand starting at position 3057 of SEQ ID NO: 914134
uguuaaauugaugggaugu

SEQ ID NO: 980671 - RNA, 19 nt, Artificial Sequence
  Description of Artificial Sequence: Synthetic oligonucleotide
  Antisense strand to SEQ ID NO: 980670
acaucccaucaauuuaaca

SEQ ID NO: 980672 - RNA, 19 nt, Artificial Sequence
  Description of Artificial Sequence: Synthetic oligonucleotide
  Sense strand starting at position 3196 of SEQ ID NO: 914134
guaggagagcaaugaugua

SEQ ID NO: 980673 - RNA, 19 nt, Artificial Sequence
  Description of Artificial Sequence: Synthetic oligonucleotide
  Antisense strand to SEQ ID NO: 980672
uacaucauugcucuccuac

SEQ ID NO: 980674 - RNA, 19 nt, Artificial Sequence
  Description of Artificial Sequence: Synthetic oligonucleotide
  Sense strand starting at position 1340 of SEQ ID NO: 914134
cacguuuaacauggaauua

SEQ ID NO: 980675 - RNA, 19 nt, Artificial Sequence
  Description of Artificial Sequence: Synthetic oligonucleotide
  Antisense strand to SEQ ID NO: 980674
uaauuccauguuaaacgug

SEQ ID NO: 980676 - RNA, 19 nt, Artificial Sequence
  Description of Artificial Sequence: Synthetic oligonucleotide
  Sense strand starting at position 423 of SEQ ID NO: 914134
gucauaugauacuugguaa

SEQ ID NO: 980677 - RNA, 19 nt, Artificial Sequence
  Description of Artificial Sequence: Synthetic oligonucleotide
  Antisense strand to SEQ ID NO: 980676
uuaccaaguaucauaugac

SEQ ID NO: 980678 - RNA, 19 nt, Artificial Sequence
  Description of Artificial Sequence: Synthetic oligonucleotide
  Sense strand starting at position 151 of SEQ ID NO: 914134
aagacaugaugucuuguua

SEQ ID NO: 980679 - RNA, 19 nt, Artificial Sequence
  Description of Artificial Sequence: Synthetic oligonucleotide
  Antisense strand to SEQ ID NO: 980678
uaacaagacaucaugucuu

SEQ ID NO: 980680 - RNA, 19 nt, Artificial Sequence
  Description of Artificial Sequence: Synthetic oligonucleotide
  Sense strand starting at position 2788 of SEQ ID NO: 914134
auuguacacccuugagauu

SEQ ID NO: 980681 - RNA, 19 nt, Artificial Sequence
  Description of Artificial Sequence: Synthetic oligonucleotide
  Antisense strand to SEQ ID NO: 980680
aaucucaaggguguacaau

SEQ ID NO: 980682 - RNA, 19 nt, Artificial Sequence
  Description of Artificial Sequence: Synthetic oligonucleotide
  Sense strand starting at position 1827 of SEQ ID NO: 914134
uggacuuggcgaggacaua

SEQ ID NO: 980683 - RNA, 19 nt, Artificial Sequence
  Description of Artificial Sequence: Synthetic oligonucleotide
  Antisense strand to SEQ ID NO: 980682
uauguccucgccaagucca

SEQ ID NO: 980684 - RNA, 19 nt, Artificial Sequence
  Description of Artificial Sequence: Synthetic oligonucleotide
  Sense strand starting at position 2652 of SEQ ID NO: 914134
auuguugcaccugauaacu

SEQ ID NO: 980685 - RNA, 19 nt, Artificial Sequence
  Description of Artificial Sequence: Synthetic oligonucleotide
  Antisense strand to SEQ ID NO: 980684
aguuaucaggugcaacaau

SEQ ID NO: 980686 - RNA, 19 nt, Artificial Sequence
  Description of Artificial Sequence: Synthetic oligonucleotide
  Sense strand starting at position 166 of SEQ ID NO: 914134
guuaaucaugcucaugacu

SEQ ID NO: 980687 - RNA, 19 nt, Artificial Sequence
  Description of Artificial Sequence: Synthetic oligonucleotide
  Antisense strand to SEQ ID NO: 980686
agucaugagcaugauuaac

SEQ ID NO: 980688 - RNA, 19 nt, Artificial Sequence
  Description of Artificial Sequence: Synthetic oligonucleotide
  Sense strand starting at position 3954 of SEQ ID NO: 914134
uauugugaacagugacauu

SEQ ID NO: 980689 - RNA, 19 nt, Artificial Sequence
  Description of Artificial Sequence: Synthetic oligonucleotide
  Antisense strand to SEQ ID NO: 980688
aaugucacuguucacaaua

SEQ ID NO: 980690 - RNA, 19 nt, Artificial Sequence
  Description of Artificial Sequence: Synthetic oligonucleotide
  Sense strand starting at position 1769 of SEQ ID NO: 914134
cacagaagugcugagcauu

SEQ ID NO: 980691 - RNA, 19 nt, Artificial Sequence
  Description of Artificial Sequence: Synthetic oligonucleotide
  Antisense strand to SEQ ID NO: 980690
aaugcucagcacuucugug

SEQ ID NO: 980692 - RNA, 19 nt, Artificial Sequence
  Description of Artificial Sequence: Synthetic oligonucleotide
  Sense strand starting at position 1592 of SEQ ID NO: 914134
gggagagaguguguaagua

SEQ ID NO: 980693 - RNA, 19 nt, Artificial Sequence
  Description of Artificial Sequence: Synthetic oligonucleotide
  Antisense strand to SEQ ID NO: 980692
uacuuacacacucucuccc

SEQ ID NO: 980694 - RNA, 19 nt, Artificial Sequence
  Description of Artificial Sequence: Synthetic oligonucleotide
  Sense strand starting at position 2306 of SEQ ID NO: 914135
agaugacaccauugagcaa

SEQ ID NO: 980695 - RNA, 19 nt, Artificial Sequence
  Description of Artificial Sequence: Synthetic oligonucleotide
  Antisense strand to SEQ ID NO: 980694
uugcucaauggugucaucu

SEQ ID NO: 980696 - RNA, 19 nt, Artificial Sequence
  Description of Artificial Sequence: Synthetic oligonucleotide
  Sense strand starting at position 3005 of SEQ ID NO: 914135
aguaccuuggcugaauaaa

SEQ ID NO: 980697 - RNA, 19 nt, Artificial Sequence
  Description of Artificial Sequence: Synthetic oligonucleotide
  Antisense strand to SEQ ID NO: 980696
uuuauucagccaagguacu

SEQ ID NO: 980698 - RNA, 19 nt, Artificial Sequence
  Description of Artificial Sequence: Synthetic oligonucleotide
  Sense strand starting at position 62 of SEQ ID NO: 914135
gcccuuacugguuaagaag

SEQ ID NO: 980699 - RNA, 19 nt, Artificial Sequence
  Description of Artificial Sequence: Synthetic oligonucleotide
  Antisense strand to SEQ ID NO: 980698
cuucuuaaccaguaagggc

SEQ ID NO: 980700 - RNA, 19 nt, Artificial Sequence
  Description of Artificial Sequence: Synthetic oligonucleotide
  Sense strand starting at position 452 of SEQ ID NO: 914135
gaaagacuccgaggcugaa

SEQ ID NO: 980701 - RNA, 19 nt, Artificial Sequence
  Description of Artificial Sequence: Synthetic oligonucleotide
  Antisense strand to SEQ ID NO: 980700
uucagccucggagucuuuc

SEQ ID NO: 980702 - RNA, 19 nt, Artificial Sequence
  Description of Artificial Sequence: Synthetic oligonucleotide
  Sense strand starting at position 3981 of SEQ ID NO: 914135
auagaaugauguccauggu

SEQ ID NO: 980703 - RNA, 19 nt, Artificial Sequence
  Description of Artificial Sequence: Synthetic oligonucleotide
  Antisense strand to SEQ ID NO: 980702
accauggacaucauucuau

SEQ ID NO: 980704 - RNA, 19 nt, Artificial Sequence
  Description of Artificial Sequence: Synthetic oligonucleotide
  Sense strand starting at position 2534 of SEQ ID NO: 914135
ggaauaaccaguggcauua

SEQ ID NO: 980705 - RNA, 19 nt, Artificial Sequence
  Description of Artificial Sequence: Synthetic oligonucleotide
  Antisense strand to SEQ ID NO: 980704
uaaugccacugguuauucc

SEQ ID NO: 980706 - RNA, 19 nt, Artificial Sequence
  Description of Artificial Sequence: Synthetic oligonucleotide
  Sense strand starting at position 2533 of SEQ ID NO: 914135
aggaauaaccaguggcauu

SEQ ID NO: 980707 - RNA, 19 nt, Artificial Sequence
  Description of Artificial Sequence: Synthetic oligonucleotide
  Antisense strand to SEQ ID NO: 980706
aaugccacugguuauuccu

SEQ ID NO: 980708 - RNA, 19 nt, Artificial Sequence
  Description of Artificial Sequence: Synthetic oligonucleotide
  Sense strand starting at position 3003 of SEQ ID NO: 914135
aaaguaccuuggcugaaua

SEQ ID NO: 980709 - RNA, 19 nt, Artificial Sequence
  Description of Artificial Sequence: Synthetic oligonucleotide
  Antisense strand to SEQ ID NO: 980708
uauucagccaagguacuuu

SEQ ID NO: 980710 - RNA, 19 nt, Artificial Sequence
  Description of Artificial Sequence: Synthetic oligonucleotide
  Sense strand starting at position 3367 of SEQ ID NO: 914135
auaugacccguugauggua

SEQ ID NO: 980711 - RNA, 19 nt, Artificial Sequence
  Description of Artificial Sequence: Synthetic oligonucleotide
  Antisense strand to SEQ ID NO: 980710
uaccaucaacgggucauau

SEQ ID NO: 980712 - RNA, 19 nt, Artificial Sequence
  Description of Artificial Sequence: Synthetic oligonucleotide
  Sense strand starting at position 347 of SEQ ID NO: 914135
cguuuagugcccaggagug

SEQ ID NO: 980713 - RNA, 19 nt, Artificial Sequence
  Description of Artificial Sequence: Synthetic oligonucleotide
  Antisense strand to SEQ ID NO: 980712
cacuccugggcacuaaacg

SEQ ID NO: 980714 - RNA, 19 nt, Artificial Sequence
  Description of Artificial Sequence: Synthetic oligonucleotide
  Sense strand starting at position 2878 of SEQ ID NO: 914135
guauucuugcacuacaaug

SEQ ID NO: 980715 - RNA, 19 nt, Artificial Sequence
  Description of Artificial Sequence: Synthetic oligonucleotide
  Antisense strand to SEQ ID NO: 980714
cauuguagugcaagaauac

SEQ ID NO: 980716 - RNA, 19 nt, Artificial Sequence
  Description of Artificial Sequence: Synthetic oligonucleotide
  Sense strand starting at position 2546 of SEQ ID NO: 914135
ggcauuacgccagaauuaa

SEQ ID NO: 980717 - RNA, 19 nt, Artificial Sequence
  Description of Artificial Sequence: Synthetic oligonucleotide
  Antisense strand to SEQ ID NO: 980716
uuaauucuggcguaaugcc

SEQ ID NO: 980718 - RNA, 19 nt, Artificial Sequence
  Description of Artificial Sequence: Synthetic oligonucleotide
  Sense strand starting at position 393 of SEQ ID NO: 914135
cuaagagacguaugcagaa

SEQ ID NO: 980719 - RNA, 19 nt, Artificial Sequence
  Description of Artificial Sequence: Synthetic oligonucleotide
  Antisense strand to SEQ ID NO: 980718
uucugcauacgucucuuag

SEQ ID NO: 980720 - RNA, 19 nt, Artificial Sequence
  Description of Artificial Sequence: Synthetic oligonucleotide
  Sense strand starting at position 1057 of SEQ ID NO: 914135
gcgccaaagcguuucccua

SEQ ID NO: 980721 - RNA, 19 nt, Artificial Sequence
  Description of Artificial Sequence: Synthetic oligonucleotide
  Antisense strand to SEQ ID NO: 980720
uagggaaacgcuuuggcgc

SEQ ID NO: 980722 - RNA, 19 nt, Artificial Sequence
  Description of Artificial Sequence: Synthetic oligonucleotide
  Sense strand starting at position 3002 of SEQ ID NO: 914135
caaaguaccuuggcugaau

SEQ ID NO: 980723 - RNA, 19 nt, Artificial Sequence
  Description of Artificial Sequence: Synthetic oligonucleotide
  Antisense strand to SEQ ID NO: 980722
auucagccaagguacuuug

SEQ ID NO: 980724 - RNA, 19 nt, Artificial Sequence
  Description of Artificial Sequence: Synthetic oligonucleotide
  Sense strand starting at position 38 of SEQ ID NO: 914135
ccuagugugcuccaaauaa

SEQ ID NO: 980725 - RNA, 19 nt, Artificial Sequence
  Description of Artificial Sequence: Synthetic oligonucleotide
  Antisense strand to SEQ ID NO: 980724
uuauuuggagcacacuagg

SEQ ID NO: 980726 - RNA, 19 nt, Artificial Sequence
  Description of Artificial Sequence: Synthetic oligonucleotide
  Sense strand starting at position 1406 of SEQ ID NO: 914135
guuuaucuccggcaacaaa

SEQ ID NO: 980727 - RNA, 19 nt, Artificial Sequence
  Description of Artificial Sequence: Synthetic oligonucleotide
  Antisense strand to SEQ ID NO: 980726
uuuguugccggagauaaac

SEQ ID NO: 980728 - RNA, 19 nt, Artificial Sequence
  Description of Artificial Sequence: Synthetic oligonucleotide
  Sense strand starting at position 877 of SEQ ID NO: 914135
cccaguggugcucauaaau

SEQ ID NO: 980729 - RNA, 19 nt, Artificial Sequence
  Description of Artificial Sequence: Synthetic oligonucleotide
  Antisense strand to SEQ ID NO: 980728
auuuaugagcaccacuggg

SEQ ID NO: 980730 - RNA, 19 nt, Artificial Sequence
  Description of Artificial Sequence: Synthetic oligonucleotide
  Sense strand starting at position 406 of SEQ ID NO: 914135
gcagaaagguugguuaauu

SEQ ID NO: 980731 - RNA, 19 nt, Artificial Sequence
  Description of Artificial Sequence: Synthetic oligonucleotide
  Antisense strand to SEQ ID NO: 980730
aauuaaccaaccuuucugc

SEQ ID NO: 980732 - RNA, 19 nt, Artificial Sequence
  Description of Artificial Sequence: Synthetic oligonucleotide
  Sense strand starting at position 2189 of SEQ ID NO: 914135
gacguagagaggugucaag

SEQ ID NO: 980733 - RNA, 19 nt, Artificial Sequence
  Description of Artificial Sequence: Synthetic oligonucleotide
  Antisense strand to SEQ ID NO: 980732
cuugacaccucucuacguc

SEQ ID NO: 980734 - RNA, 19 nt, Artificial Sequence
  Description of Artificial Sequence: Synthetic oligonucleotide
  Sense strand starting at position 405 of SEQ ID NO: 914135
ugcagaaagguugguuaau

SEQ ID NO: 980735 - RNA, 19 nt, Artificial Sequence
  Description of Artificial Sequence: Synthetic oligonucleotide
  Antisense strand to SEQ ID NO: 980734
auuaaccaaccuuucugca

SEQ ID NO: 980736 - RNA, 19 nt, Artificial Sequence
  Description of Artificial Sequence: Synthetic oligonucleotide
  Sense strand starting at position 3704 of SEQ ID NO: 914135
ugacuuucaggugggcaua

SEQ ID NO: 980737 - RNA, 19 nt, Artificial Sequence
  Description of Artificial Sequence: Synthetic oligonucleotide
  Antisense strand to SEQ ID NO: 980736
uaugcccaccugaaaguca

SEQ ID NO: 980738 - RNA, 19 nt, Artificial Sequence
  Description of Artificial Sequence: Synthetic oligonucleotide
  Sense strand starting at position 535 of SEQ ID NO: 914135
cucguucacguggaaagau

SEQ ID NO: 980739 - RNA, 19 nt, Artificial Sequence
  Description of Artificial Sequence: Synthetic oligonucleotide
  Antisense strand to SEQ ID NO: 980738
aucuuuccacgugaacgag

SEQ ID NO: 980740 - RNA, 19 nt, Artificial Sequence
  Description of Artificial Sequence: Synthetic oligonucleotide
  Sense strand starting at position 61 of SEQ ID NO: 914135
ugcccuuacugguuaagaa

SEQ ID NO: 980741 - RNA, 19 nt, Artificial Sequence
  Description of Artificial Sequence: Synthetic oligonucleotide
  Antisense strand to SEQ ID NO: 980740
uucuuaaccaguaagggca

SEQ ID NO: 980742 - RNA, 19 nt, Artificial Sequence
  Description of Artificial Sequence: Synthetic oligonucleotide
  Sense strand starting at position 3196 of SEQ ID NO: 914135
acacccagcuauguuauua

SEQ ID NO: 980743 - RNA, 19 nt, Artificial Sequence
  Description of Artificial Sequence: Synthetic oligonucleotide
  Antisense strand to SEQ ID NO: 980742
uaauaacauagcugggugu

SEQ ID NO: 980744 - RNA, 19 nt, Artificial Sequence
  Description of Artificial Sequence: Synthetic oligonucleotide
  Sense strand starting at position 2816 of SEQ ID NO: 914135
cgggcuguucugggaaaga

SEQ ID NO: 980745 - RNA, 19 nt, Artificial Sequence
  Description of Artificial Sequence: Synthetic oligonucleotide
  Antisense strand to SEQ ID NO: 980744
ucuuucccagaacagcccg

SEQ ID NO: 980746 - RNA, 19 nt, Artificial Sequence
  Description of Artificial Sequence: Synthetic oligonucleotide
  Sense strand starting at position 886 of SEQ ID NO: 914135
gcucauaaaugaguuucuu

SEQ ID NO: 980747 - RNA, 19 nt, Artificial Sequence
  Description of Artificial Sequence: Synthetic oligonucleotide
  Antisense strand to SEQ ID NO: 980746
aagaaacucauuuaugagc

SEQ ID NO: 980748 - RNA, 19 nt, Artificial Sequence
  Description of Artificial Sequence: Synthetic oligonucleotide
  Sense strand starting at position 3025 of SEQ ID NO: 914135
ucagaaauguggcauuuga

SEQ ID NO: 980749 - RNA, 19 nt, Artificial Sequence
  Description of Artificial Sequence: Synthetic oligonucleotide
  Antisense strand to SEQ ID NO: 980748
ucaaaugccacauuucuga

SEQ ID NO: 980750 - RNA, 19 nt, Artificial Sequence
  Description of Artificial Sequence: Synthetic oligonucleotide
  Sense strand starting at position 27 of SEQ ID NO: 914135
agucauaaauuccuagugu

SEQ ID NO: 980751 - RNA, 19 nt, Artificial Sequence
  Description of Artificial Sequence: Synthetic oligonucleotide
  Antisense strand to SEQ ID NO: 980750
acacuaggaauuuaugacu

SEQ ID NO: 980752 - RNA, 19 nt, Artificial Sequence
  Description of Artificial Sequence: Synthetic oligonucleotide
  Sense strand starting at position 2169 of SEQ ID NO: 914135
acuucucugucuccgaaga

SEQ ID NO: 980753 - RNA, 19 nt, Artificial Sequence
  Description of Artificial Sequence: Synthetic oligonucleotide
  Antisense strand to SEQ ID NO: 980752
ucuucggagacagagaagu

SEQ ID NO: 980754 - RNA, 19 nt, Artificial Sequence
  Description of Artificial Sequence: Synthetic oligonucleotide
  Sense strand starting at position 2170 of SEQ ID NO: 914135
cuucucugucuccgaagaa

SEQ ID NO: 980755 - RNA, 19 nt, Artificial Sequence
  Description of Artificial Sequence: Synthetic oligonucleotide
  Antisense strand to SEQ ID NO: 980754
uucuucggagacagagaag

SEQ ID NO: 980756 - RNA, 19 nt, Artificial Sequence
  Description of Artificial Sequence: Synthetic oligonucleotide
  Sense strand starting at position 1236 of SEQ ID NO: 914135
gaaccaaccgcugguauau

SEQ ID NO: 980757 - RNA, 19 nt, Artificial Sequence
  Description of Artificial Sequence: Synthetic oligonucleotide
  Antisense strand to SEQ ID NO: 980756
auauaccagcgguugguuc

SEQ ID NO: 980758 - RNA, 19 nt, Artificial Sequence
  Description of Artificial Sequence: Synthetic oligonucleotide
  Sense strand starting at position 3200 of SEQ ID NO: 914135
ccagcuauguuauuauuau

SEQ ID NO: 980759 - RNA, 19 nt, Artificial Sequence
  Description of Artificial Sequence: Synthetic oligonucleotide
  Antisense strand to SEQ ID NO: 980758
auaauaauaacauagcugg

SEQ ID NO: 980760 - RNA, 19 nt, Artificial Sequence
  Description of Artificial Sequence: Synthetic oligonucleotide
  Sense strand starting at position 883 of SEQ ID NO: 914135
ggugcucauaaaugaguuu

SEQ ID NO: 980761 - RNA, 19 nt, Artificial Sequence
  Description of Artificial Sequence: Synthetic oligonucleotide
  Antisense strand to SEQ ID NO: 980760
aaacucauuuaugagcacc

SEQ ID NO: 980762 - RNA, 19 nt, Artificial Sequence
  Description of Artificial Sequence: Synthetic oligonucleotide
  Sense strand starting at position 2544 of SEQ ID NO: 914135
guggcauuacgccagaauu

SEQ ID NO: 980763 - RNA, 19 nt, Artificial Sequence
  Description of Artificial Sequence: Synthetic oligonucleotide
  Antisense strand to SEQ ID NO: 980762
aauucuggcguaaugccac

SEQ ID NO: 980764 - RNA, 19 nt, Artificial Sequence
  Description of Artificial Sequence: Synthetic oligonucleotide
  Sense strand starting at position 2405 of SEQ ID NO: 914135
gcuggaugucugcaaaguu

SEQ ID NO: 980765 - RNA, 19 nt, Artificial Sequence
  Description of Artificial Sequence: Synthetic oligonucleotide
  Antisense strand to SEQ ID NO: 980764
aacuuugcagacauccagc

SEQ ID NO: 980766 - RNA, 19 nt, Artificial Sequence
  Description of Artificial Sequence: Synthetic oligonucleotide
  Sense strand starting at position 3411 of SEQ ID NO: 914135
ugaaauaaaucuuauggac

SEQ ID NO: 980767 - RNA, 19 nt, Artificial Sequence
  Description of Artificial Sequence: Synthetic oligonucleotide
  Antisense strand to SEQ ID NO: 980766
guccauaagauuuauuuca

SEQ ID NO: 980768 - RNA, 19 nt, Artificial Sequence
  Description of Artificial Sequence: Synthetic oligonucleotide
  Sense strand starting at position 3400 of SEQ ID NO: 914135
gcugccuuccgugaaauaa

SEQ ID NO: 980769 - RNA, 19 nt, Artificial Sequence
  Description of Artificial Sequence: Synthetic oligonucleotide
  Antisense strand to SEQ ID NO: 980768
uuauuucacggaaggcagc

SEQ ID NO: 980770 - RNA, 19 nt, Artificial Sequence
  Description of Artificial Sequence: Synthetic oligonucleotide
  Sense strand starting at position 2827 of SEQ ID NO: 914135
gggaaagauuccuaaacuu

SEQ ID NO: 980771 - RNA, 19 nt, Artificial Sequence
  Description of Artificial Sequence: Synthetic oligonucleotide
  Antisense strand to SEQ ID NO: 980770
aaguuuaggaaucuuuccc

SEQ ID NO: 980772 - RNA, 19 nt, Artificial Sequence
  Description of Artificial Sequence: Synthetic oligonucleotide
  Sense strand starting at position 534 of SEQ ID NO: 914135
ucucguucacguggaaaga

SEQ ID NO: 980773 - RNA, 19 nt, Artificial Sequence
  Description of Artificial Sequence: Synthetic oligonucleotide
  Antisense strand to SEQ ID NO: 980772
ucuuuccacgugaacgaga

SEQ ID NO: 980774 - RNA, 19 nt, Artificial Sequence
  Description of Artificial Sequence: Synthetic oligonucleotide
  Sense strand starting at position 3980 of SEQ ID NO: 914136
ugcacagugcugucuacuu

SEQ ID NO: 980775 - RNA, 19 nt, Artificial Sequence
  Description of Artificial Sequence: Synthetic oligonucleotide
  Antisense strand to SEQ ID NO: 980774
aaguagacagcacugugca

SEQ ID NO: 980776 - RNA, 19 nt, Artificial Sequence
  Description of Artificial Sequence: Synthetic oligonucleotide
  Sense strand starting at position 1078 of SEQ ID NO: 914136
aggcuaagaccucacacuu

SEQ ID NO: 980777 - RNA, 19 nt, Artificial Sequence
  Description of Artificial Sequence: Synthetic oligonucleotide
  Antisense strand to SEQ ID NO: 980776
aagugugaggucuuagccu

SEQ ID NO: 980778 - RNA, 19 nt, Artificial Sequence
  Description of Artificial Sequence: Synthetic oligonucleotide
  Sense strand starting at position 3800 of SEQ ID NO: 914136
guuuaauuaccauggaaga

SEQ ID NO: 980779 - RNA, 19 nt, Artificial Sequence
  Description of Artificial Sequence: Synthetic oligonucleotide
  Antisense strand to SEQ ID NO: 980778
ucuuccaugguaauuaaac

SEQ ID NO: 980780 - RNA, 19 nt, Artificial Sequence
  Description of Artificial Sequence: Synthetic oligonucleotide
  Sense strand starting at position 571 of SEQ ID NO: 914136
uauacauuuguguguauac

SEQ ID NO: 980781 - RNA, 19 nt, Artificial Sequence
  Description of Artificial Sequence: Synthetic oligonucleotide
  Antisense strand to SEQ ID NO: 980780
guauacacacaaauguaua

SEQ ID NO: 980782 - RNA, 19 nt, Artificial Sequence
  Description of Artificial Sequence: Synthetic oligonucleotide
  Sense strand starting at position 2715 of SEQ ID NO: 914136
ucgugaaaucuggcguuuc

SEQ ID NO: 980783 - RNA, 19 nt, Artificial Sequence
  Description of Artificial Sequence: Synthetic oligonucleotide
  Antisense strand to SEQ ID NO: 980782
gaaacgccagauuucacga

SEQ ID NO: 980784 - RNA, 19 nt, Artificial Sequence
  Description of Artificial Sequence: Synthetic oligonucleotide
  Sense strand starting at position 320 of SEQ ID NO: 914136
uggaguugacauuaucucu

SEQ ID NO: 980785 - RNA, 19 nt, Artificial Sequence
  Description of Artificial Sequence: Synthetic oligonucleotide
  Antisense strand to SEQ ID NO: 980784
agagauaaugucaacucca

SEQ ID NO: 980786 - RNA, 19 nt, Artificial Sequence
  Description of Artificial Sequence: Synthetic oligonucleotide
  Sense strand starting at position 3866 of SEQ ID NO: 914136
gcggguguucucuuaucuu

SEQ ID NO: 980787 - RNA, 19 nt, Artificial Sequence
  Description of Artificial Sequence: Synthetic oligonucleotide
  Antisense strand to SEQ ID NO: 980786
aagauaagagaacacccgc

SEQ ID NO: 980788 - RNA, 19 nt, Artificial Sequence
  Description of Artificial Sequence: Synthetic oligonucleotide
  Sense strand starting at position 940 of SEQ ID NO: 914136
gcgagucuacugcugugau

SEQ ID NO: 980789 - RNA, 19 nt, Artificial Sequence
  Description of Artificial Sequence: Synthetic oligonucleotide
  Antisense strand to SEQ ID NO: 980788
aucacagcaguagacucgc

SEQ ID NO: 980790 - RNA, 19 nt, Artificial Sequence
  Description of Artificial Sequence: Synthetic oligonucleotide
  Sense strand starting at position 568 of SEQ ID NO: 914136
agguauacauuugugugua

SEQ ID NO: 980791 - RNA, 19 nt, Artificial Sequence
  Description of Artificial Sequence: Synthetic oligonucleotide
  Antisense strand to SEQ ID NO: 980790
uacacacaaauguauaccu

SEQ ID NO: 980792 - RNA, 19 nt, Artificial Sequence
  Description of Artificial Sequence: Synthetic oligonucleotide
  Sense strand starting at position 261 of SEQ ID NO: 914136
agggaaagcuacuuaaucu

SEQ ID NO: 980793 - RNA, 19 nt, Artificial Sequence
  Description of Artificial Sequence: Synthetic oligonucleotide
  Antisense strand to SEQ ID NO: 980792
agauuaaguagcuuucccu

SEQ ID NO: 980794 - RNA, 19 nt, Artificial Sequence
  Description of Artificial Sequence: Synthetic oligonucleotide
  Sense strand starting at position 1110 of SEQ ID NO: 914136
auguuuccugaagauggua

SEQ ID NO: 980795 - RNA, 19 nt, Artificial Sequence
  Description of Artificial Sequence: Synthetic oligonucleotide
  Antisense strand to SEQ ID NO: 980794
uaccaucuucaggaaacau

SEQ ID NO: 980796 - RNA, 19 nt, Artificial Sequence
  Description of Artificial Sequence: Synthetic oligonucleotide
  Sense strand starting at position 2850 of SEQ ID NO: 914136
gugugaauacgagaguaaa

SEQ ID NO: 980797 - RNA, 19 nt, Artificial Sequence
  Description of Artificial Sequence: Synthetic oligonucleotide
  Antisense strand to SEQ ID NO: 980796
uuuacucucguauucacac

SEQ ID NO: 980798 - RNA, 19 nt, Artificial Sequence
  Description of Artificial Sequence: Synthetic oligonucleotide
  Sense strand starting at position 1631 of SEQ ID NO: 914136
agaggauucccaugucaca

SEQ ID NO: 980799 - RNA, 19 nt, Artificial Sequence
  Description of Artificial Sequence: Synthetic oligonucleotide
  Antisense strand to SEQ ID NO: 980798
ugugacaugggaauccucu

SEQ ID NO: 980800 - RNA, 19 nt, Artificial Sequence
  Description of Artificial Sequence: Synthetic oligonucleotide
  Sense strand starting at position 977 of SEQ ID NO: 914136
uugugaaugaauuguagaa

SEQ ID NO: 980801 - RNA, 19 nt, Artificial Sequence
  Description of Artificial Sequence: Synthetic oligonucleotide
  Antisense strand to SEQ ID NO: 980800
uucuacaauucauucacaa

SEQ ID NO: 980802 - RNA, 19 nt, Artificial Sequence
  Description of Artificial Sequence: Synthetic oligonucleotide
  Sense strand starting at position 1105 of SEQ ID NO: 914136
cccaaauguuuccugaaga

SEQ ID NO: 980803 - RNA, 19 nt, Artificial Sequence
  Description of Artificial Sequence: Synthetic oligonucleotide
  Antisense strand to SEQ ID NO: 980802
ucuucaggaaacauuuggg

SEQ ID NO: 980804 - RNA, 19 nt, Artificial Sequence
  Description of Artificial Sequence: Synthetic oligonucleotide
  Sense strand starting at position 1104 of SEQ ID NO: 914136
acccaaauguuuccugaag

SEQ ID NO: 980805 - RNA, 19 nt, Artificial Sequence
  Description of Artificial Sequence: Synthetic oligonucleotide
  Antisense strand to SEQ ID NO: 980804
cuucaggaaacauuugggu

SEQ ID NO: 980806 - RNA, 19 nt, Artificial Sequence
  Description of Artificial Sequence: Synthetic oligonucleotide
  Sense strand starting at position 1485 of SEQ ID NO: 914136
gaauaaguucuguaguaug

SEQ ID NO: 980807 - RNA, 19 nt, Artificial Sequence
  Description of Artificial Sequence: Synthetic oligonucleotide
  Antisense strand to SEQ ID NO: 980806
cauacuacagaacuuauuc

SEQ ID NO: 980808 - RNA, 19 nt, Artificial Sequence
  Description of Artificial Sequence: Synthetic oligonucleotide
  Sense strand starting at position 2 of SEQ ID NO: 914136
uuauuucccugccugaguu

SEQ ID NO: 980809 - RNA, 19 nt, Artificial Sequence
  Description of Artificial Sequence: Synthetic oligonucleotide
  Antisense strand to SEQ ID NO: 980808
aacucaggcagggaaauaa

SEQ ID NO: 980810 - RNA, 19 nt, Artificial Sequence
  Description of Artificial Sequence: Synthetic oligonucleotide
  Sense strand starting at position 372 of SEQ ID NO: 914136
aaauguggugcccaaauau

SEQ ID NO: 980811 - RNA, 19 nt, Artificial Sequence
  Description of Artificial Sequence: Synthetic oligonucleotide
  Antisense strand to SEQ ID NO: 980810
auauuugggcaccacauuu

SEQ ID NO: 980812 - RNA, 19 nt, Artificial Sequence
  Description of Artificial Sequence: Synthetic oligonucleotide
  Sense strand starting at position 2073 of SEQ ID NO: 914136
uucuaaacccucggaggau

SEQ ID NO: 980813 - RNA, 19 nt, Artificial Sequence
  Description of Artificial Sequence: Synthetic oligonucleotide
  Antisense strand to SEQ ID NO: 980812
auccuccgaggguuuagaa

SEQ ID NO: 980814 - RNA, 19 nt, Artificial Sequence
  Description of Artificial Sequence: Synthetic oligonucleotide
  Sense strand starting at position 2072 of SEQ ID NO: 914136
cuucuaaacccucggagga

SEQ ID NO: 980815 - RNA, 19 nt, Artificial Sequence
  Description of Artificial Sequence: Synthetic oligonucleotide
  Antisense strand to SEQ ID NO: 980814
uccuccgaggguuuagaag

SEQ ID NO: 980816 - RNA, 19 nt, Artificial Sequence
  Description of Artificial Sequence: Synthetic oligonucleotide
  Sense strand starting at position 1238 of SEQ ID NO: 914136
gaugcauuccuggacucuu

SEQ ID NO: 980817 - RNA, 19 nt, Artificial Sequence
  Description of Artificial Sequence: Synthetic oligonucleotide
  Antisense strand to SEQ ID NO: 980816
aagaguccaggaaugcauc

SEQ ID NO: 980818 - RNA, 19 nt, Artificial Sequence
  Description of Artificial Sequence: Synthetic oligonucleotide
  Sense strand starting at position 1658 of SEQ ID NO: 914136
aacugagguugaguaaagu

SEQ ID NO: 980819 - RNA, 19 nt, Artificial Sequence
  Description of Artificial Sequence: Synthetic oligonucleotide
  Antisense strand to SEQ ID NO: 980818
acuuuacucaaccucaguu

SEQ ID NO: 980820 - RNA, 19 nt, Artificial Sequence
  Description of Artificial Sequence: Synthetic oligonucleotide
  Sense strand starting at position 943 of SEQ ID NO: 914136
agucuacugcugugauuuc

SEQ ID NO: 980821 - RNA, 19 nt, Artificial Sequence
  Description of Artificial Sequence: Synthetic oligonucleotide
  Antisense strand to SEQ ID NO: 980820
gaaaucacagcaguagacu

SEQ ID NO: 980822 - RNA, 19 nt, Artificial Sequence
  Description of Artificial Sequence: Synthetic oligonucleotide
  Sense strand starting at position 1112 of SEQ ID NO: 914136
guuuccugaagaugguaga

SEQ ID NO: 980823 - RNA, 19 nt, Artificial Sequence
  Description of Artificial Sequence: Synthetic oligonucleotide
  Antisense strand to SEQ ID NO: 980822
ucuaccaucuucaggaaac

SEQ ID NO: 980824 - RNA, 19 nt, Artificial Sequence
  Description of Artificial Sequence: Synthetic oligonucleotide
  Sense strand starting at position 1839 of SEQ ID NO: 914136
uggucauucucuccaggaa

SEQ ID NO: 980825 - RNA, 19 nt, Artificial Sequence
  Description of Artificial Sequence: Synthetic oligonucleotide
  Antisense strand to SEQ ID NO: 980824
uuccuggagagaaugacca

SEQ ID NO: 980826 - RNA, 19 nt, Artificial Sequence
  Description of Artificial Sequence: Synthetic oligonucleotide
  Sense strand starting at position 3016 of SEQ ID NO: 914136
agagguggcccuuagaugu

SEQ ID NO: 980827 - RNA, 19 nt, Artificial Sequence
  Description of Artificial Sequence: Synthetic oligonucleotide
  Antisense strand to SEQ ID NO: 980826
acaucuaagggccaccucu

SEQ ID NO: 980828 - RNA, 19 nt, Artificial Sequence
  Description of Artificial Sequence: Synthetic oligonucleotide
  Sense strand starting at position 3794 of SEQ ID NO: 914136
ccgaaaguuuaauuaccau

SEQ ID NO: 980829 - RNA, 19 nt, Artificial Sequence
  Description of Artificial Sequence: Synthetic oligonucleotide
  Antisense strand to SEQ ID NO: 980828
augguaauuaaacuuucgg

SEQ ID NO: 980830 - RNA, 19 nt, Artificial Sequence
  Description of Artificial Sequence: Synthetic oligonucleotide
  Sense strand starting at position 323 of SEQ ID NO: 914136
aguugacauuaucucucau

SEQ ID NO: 980831 - RNA, 19 nt, Artificial Sequence
  Description of Artificial Sequence: Synthetic oligonucleotide
  Antisense strand to SEQ ID NO: 980830
augagagauaaugucaacu

SEQ ID NO: 980832 - RNA, 19 nt, Artificial Sequence
  Description of Artificial Sequence: Synthetic oligonucleotide
  Sense strand starting at position 94 of SEQ ID NO: 914136
ugaugacucccuugagcag

SEQ ID NO: 980833 - RNA, 19 nt, Artificial Sequence
  Description of Artificial Sequence: Synthetic oligonucleotide
  Antisense strand to SEQ ID NO: 980832
cugcucaagggagucauca

SEQ ID NO: 980834 - RNA, 19 nt, Artificial Sequence
  Description of Artificial Sequence: Synthetic oligonucleotide
  Sense strand starting at position 3336 of SEQ ID NO: 914136
gcacuauauugauuacgaa

SEQ ID NO: 980835 - RNA, 19 nt, Artificial Sequence
  Description of Artificial Sequence: Synthetic oligonucleotide
  Antisense strand to SEQ ID NO: 980834
uucguaaucaauauagugc

SEQ ID NO: 980836 - RNA, 19 nt, Artificial Sequence
  Description of Artificial Sequence: Synthetic oligonucleotide
  Sense strand starting at position 1484 of SEQ ID NO: 914136
agaauaaguucuguaguau

SEQ ID NO: 980837 - RNA, 19 nt, Artificial Sequence
  Description of Artificial Sequence: Synthetic oligonucleotide
  Antisense strand to SEQ ID NO: 980836
auacuacagaacuuauucu

SEQ ID NO: 980838 - RNA, 19 nt, Artificial Sequence
  Description of Artificial Sequence: Synthetic oligonucleotide
  Sense strand starting at position 1897 of SEQ ID NO: 914136
agcucuacaugucugggaa

SEQ ID NO: 980839 - RNA, 19 nt, Artificial Sequence
  Description of Artificial Sequence: Synthetic oligonucleotide
  Antisense strand to SEQ ID NO: 980838
uucccagacauguagagcu

SEQ ID NO: 980840 - RNA, 19 nt, Artificial Sequence
  Description of Artificial Sequence: Synthetic oligonucleotide
  Sense strand starting at position 1612 of SEQ ID NO: 914136
caaucuuugcaagaguguu

SEQ ID NO: 980841 - RNA, 19 nt, Artificial Sequence
  Description of Artificial Sequence: Synthetic oligonucleotide
  Antisense strand to SEQ ID NO: 980840
aacacucuugcaaagauug

SEQ ID NO: 980842 - RNA, 19 nt, Artificial Sequence
  Description of Artificial Sequence: Synthetic oligonucleotide
  Sense strand starting at position 1020 of SEQ ID NO: 914136
cuugucggccaugaaauau

SEQ ID NO: 980843 - RNA, 19 nt, Artificial Sequence
  Description of Artificial Sequence: Synthetic oligonucleotide
  Antisense strand to SEQ ID NO: 980842
auauuucauggccgacaag

SEQ ID NO: 980844 - RNA, 19 nt, Artificial Sequence
  Description of Artificial Sequence: Synthetic oligonucleotide
  Sense strand starting at position 1898 of SEQ ID NO: 914136
gcucuacaugucugggaag

SEQ ID NO: 980845 - RNA, 19 nt, Artificial Sequence
  Description of Artificial Sequence: Synthetic oligonucleotide
  Antisense strand to SEQ ID NO: 980844
cuucccagacauguagagc

SEQ ID NO: 980846 - RNA, 19 nt, Artificial Sequence
  Description of Artificial Sequence: Synthetic oligonucleotide
  Sense strand starting at position 1799 of SEQ ID NO: 914136
cucccauccuugucugaag

SEQ ID NO: 980847 - RNA, 19 nt, Artificial Sequence
  Description of Artificial Sequence: Synthetic oligonucleotide
  Antisense strand to SEQ ID NO: 980846
cuucagacaaggaugggag

SEQ ID NO: 980848 - RNA, 19 nt, Artificial Sequence
  Description of Artificial Sequence: Synthetic oligonucleotide
  Sense strand starting at position 12 of SEQ ID NO: 914136
gccugaguuguggauucac

SEQ ID NO: 980849 - RNA, 19 nt, Artificial Sequence
  Description of Artificial Sequence: Synthetic oligonucleotide
  Antisense strand to SEQ ID NO: 980848
gugaauccacaacucaggc

SEQ ID NO: 980850 - RNA, 19 nt, Artificial Sequence
  Description of Artificial Sequence: Synthetic oligonucleotide
  Sense strand starting at position 1965 of SEQ ID NO: 914136
cuccuuguuccugaucuuu

SEQ ID NO: 980851 - RNA, 19 nt, Artificial Sequence
  Description of Artificial Sequence: Synthetic oligonucleotide
  Antisense strand to SEQ ID NO: 980850
aaagaucaggaacaaggag

SEQ ID NO: 980852 - RNA, 19 nt, Artificial Sequence
  Description of Artificial Sequence: Synthetic oligonucleotide
  Sense strand starting at position 1237 of SEQ ID NO: 914136
ugaugcauuccuggacucu

SEQ ID NO: 980853 - RNA, 19 nt, Artificial Sequence
  Description of Artificial Sequence: Synthetic oligonucleotide
  Antisense strand to SEQ ID NO: 980852
agaguccaggaaugcauca

SEQ ID NO: 980854 - RNA, 19 nt, Artificial Sequence
  Description of Artificial Sequence: Synthetic oligonucleotide
  Sense strand starting at position 329 of SEQ ID NO: 914137
ucugaacuccuaugaugaa

SEQ ID NO: 980855 - RNA, 19 nt, Artificial Sequence
  Description of Artificial Sequence: Synthetic oligonucleotide
  Antisense strand to SEQ ID NO: 980854
uucaucauaggaguucaga

SEQ ID NO: 980856 - RNA, 19 nt, Artificial Sequence
  Description of Artificial Sequence: Synthetic oligonucleotide
  Sense strand starting at position 3535 of SEQ ID NO: 914137
ucaugacugccauauugaa

SEQ ID NO: 980857 - RNA, 19 nt, Artificial Sequence
  Description of Artificial Sequence: Synthetic oligonucleotide
  Antisense strand to SEQ ID NO: 980856
uucaauauggcagucauga

SEQ ID NO: 980858 - RNA, 19 nt, Artificial Sequence
  Description of Artificial Sequence: Synthetic oligonucleotide
  Sense strand starting at position 1186 of SEQ ID NO: 914137
ccucaaugccuagaugaug

SEQ ID NO: 980859 - RNA, 19 nt, Artificial Sequence
  Description of Artificial Sequence: Synthetic oligonucleotide
  Antisense strand to SEQ ID NO: 980858
caucaucuaggcauugagg

SEQ ID NO: 980860 - RNA, 19 nt, Artificial Sequence
  Description of Artificial Sequence: Synthetic oligonucleotide
  Sense strand starting at position 519 of SEQ ID NO: 914137
agugguccucuagaccaaa

SEQ ID NO: 980861 - RNA, 19 nt, Artificial Sequence
  Description of Artificial Sequence: Synthetic oligonucleotide
  Antisense strand to SEQ ID NO: 980860
uuuggucuagaggaccacu

SEQ ID NO: 980862 - RNA, 19 nt, Artificial Sequence
  Description of Artificial Sequence: Synthetic oligonucleotide
  Sense strand starting at position 192 of SEQ ID NO: 914137
aggcuuucuagagagucaa

SEQ ID NO: 980863 - RNA, 19 nt, Artificial Sequence
  Description of Artificial Sequence: Synthetic oligonucleotide
  Antisense strand to SEQ ID NO: 980862
uugacucucuagaaagccu

SEQ ID NO: 980864 - RNA, 19 nt, Artificial Sequence
  Description of Artificial Sequence: Synthetic oligonucleotide
  Sense strand starting at position 1207 of SEQ ID NO: 914137
cggagacucggcgcgaauu

SEQ ID NO: 980865 - RNA, 19 nt, Artificial Sequence
  Description of Artificial Sequence: Synthetic oligonucleotide
  Antisense strand to SEQ ID NO: 980864
aauucgcgccgagucuccg

SEQ ID NO: 980866 - RNA, 19 nt, Artificial Sequence
  Description of Artificial Sequence: Synthetic oligonucleotide
  Sense strand starting at position 1184 of SEQ ID NO: 914137
cuccucaaugccuagauga

SEQ ID NO: 980867 - RNA, 19 nt, Artificial Sequence
  Description of Artificial Sequence: Synthetic oligonucleotide
  Antisense strand to SEQ ID NO: 980866
ucaucuaggcauugaggag

SEQ ID NO: 980868 - RNA, 19 nt, Artificial Sequence
  Description of Artificial Sequence: Synthetic oligonucleotide
  Sense strand starting at position 2219 of SEQ ID NO: 914137
gcuuaauuccgugugucua

SEQ ID NO: 980869 - RNA, 19 nt, Artificial Sequence
  Description of Artificial Sequence: Synthetic oligonucleotide
  Antisense strand to SEQ ID NO: 980868
uagacacacggaauuaagc

SEQ ID NO: 980870 - RNA, 19 nt, Artificial Sequence
  Description of Artificial Sequence: Synthetic oligonucleotide
  Sense strand starting at position 2576 of SEQ ID NO: 914137
caaguaugccuugagacau

SEQ ID NO: 980871 - RNA, 19 nt, Artificial Sequence
  Description of Artificial Sequence: Synthetic oligonucleotide
  Antisense strand to SEQ ID NO: 980870
augucucaaggcauacuug

SEQ ID NO: 980872 - RNA, 19 nt, Artificial Sequence
  Description of Artificial Sequence: Synthetic oligonucleotide
  Sense strand starting at position 1305 of SEQ ID NO: 914137
ggcguauuaagagaguaaa

SEQ ID NO: 980873 - RNA, 19 nt, Artificial Sequence
  Description of Artificial Sequence: Synthetic oligonucleotide
  Antisense strand to SEQ ID NO: 980872
uuuacucucuuaauacgcc

SEQ ID NO: 980874 - RNA, 19 nt, Artificial Sequence
  Description of Artificial Sequence: Synthetic oligonucleotide
  Sense strand starting at position 2584 of SEQ ID NO: 914137
ccuugagacauugaugugu

SEQ ID NO: 980875 - RNA, 19 nt, Artificial Sequence
  Description of Artificial Sequence: Synthetic oligonucleotide
  Antisense strand to SEQ ID NO: 980874
acacaucaaugucucaagg

SEQ ID NO: 980876 - RNA, 19 nt, Artificial Sequence
  Description of Artificial Sequence: Synthetic oligonucleotide
  Sense strand starting at position 2969 of SEQ ID NO: 914137
ccauucuggcauggaauaa

SEQ ID NO: 980877 - RNA, 19 nt, Artificial Sequence
  Description of Artificial Sequence: Synthetic oligonucleotide
  Antisense strand to SEQ ID NO: 980876
uuauuccaugccagaaugg

SEQ ID NO: 980878 - RNA, 19 nt, Artificial Sequence
  Description of Artificial Sequence: Synthetic oligonucleotide
  Sense strand starting at position 2322 of SEQ ID NO: 914137
gcaauauagcuuuagacug

SEQ ID NO: 980879 - RNA, 19 nt, Artificial Sequence
  Description of Artificial Sequence: Synthetic oligonucleotide
  Antisense strand to SEQ ID NO: 980878
cagucuaaagcuauauugc

SEQ ID NO: 980880 - RNA, 19 nt, Artificial Sequence
  Description of Artificial Sequence: Synthetic oligonucleotide
  Sense strand starting at position 2400 of SEQ ID NO: 914137
gaggaaacuggcuaguugu

SEQ ID NO: 980881 - RNA, 19 nt, Artificial Sequence
  Description of Artificial Sequence: Synthetic oligonucleotide
  Antisense strand to SEQ ID NO: 980880
acaacuagccaguuuccuc

SEQ ID NO: 980882 - RNA, 19 nt, Artificial Sequence
  Description of Artificial Sequence: Synthetic oligonucleotide
  Sense strand starting at position 1148 of SEQ ID NO: 914137
aaggaaagcgucuauacuc

SEQ ID NO: 980883 - RNA, 19 nt, Artificial Sequence
  Description of Artificial Sequence: Synthetic oligonucleotide
  Antisense strand to SEQ ID NO: 980882
gaguauagacgcuuuccuu

SEQ ID NO: 980884 - RNA, 19 nt, Artificial Sequence
  Description of Artificial Sequence: Synthetic oligonucleotide
  Sense strand starting at position 2039 of SEQ ID NO: 914137
aagggcuguacguaacaga

SEQ ID NO: 980885 - RNA, 19 nt, Artificial Sequence
  Description of Artificial Sequence: Synthetic oligonucleotide
  Antisense strand to SEQ ID NO: 980884
ucuguuacguacagcccuu

SEQ ID NO: 980886 - RNA, 19 nt, Artificial Sequence
  Description of Artificial Sequence: Synthetic oligonucleotide
  Sense strand starting at position 2575 of SEQ ID NO: 914137
acaaguaugccuugagaca

SEQ ID NO: 980887 - RNA, 19 nt, Artificial Sequence
  Description of Artificial Sequence: Synthetic oligonucleotide
  Antisense strand to SEQ ID NO: 980886
ugucucaaggcauacuugu

SEQ ID NO: 980888 - RNA, 19 nt, Artificial Sequence
  Description of Artificial Sequence: Synthetic oligonucleotide
  Sense strand starting at position 2968 of SEQ ID NO: 914137
cccauucuggcauggaaua

SEQ ID NO: 980889 - RNA, 19 nt, Artificial Sequence
  Description of Artificial Sequence: Synthetic oligonucleotide
  Antisense strand to SEQ ID NO: 980888
uauuccaugccagaauggg

SEQ ID NO: 980890 - RNA, 19 nt, Artificial Sequence
  Description of Artificial Sequence: Synthetic oligonucleotide
  Sense strand starting at position 579 of SEQ ID NO: 914137
gggugcuuucuacacuaua

SEQ ID NO: 980891 - RNA, 19 nt, Artificial Sequence
  Description of Artificial Sequence: Synthetic oligonucleotide
  Antisense strand to SEQ ID NO: 980890
uauaguguagaaagcaccc

SEQ ID NO: 980892 - RNA, 19 nt, Artificial Sequence
  Description of Artificial Sequence: Synthetic oligonucleotide
  Sense strand starting at position 187 of SEQ ID NO: 914137
ccgagaggcuuucuagaga

SEQ ID NO: 980893 - RNA, 19 nt, Artificial Sequence
  Description of Artificial Sequence: Synthetic oligonucleotide
  Antisense strand to SEQ ID NO: 980892
ucucuagaaagccucucgg

SEQ ID NO: 980894 - RNA, 19 nt, Artificial Sequence
  Description of Artificial Sequence: Synthetic oligonucleotide
  Sense strand starting at position 1364 of SEQ ID NO: 914137
cgcggucugaaucaaagaa

SEQ ID NO: 980895 - RNA, 19 nt, Artificial Sequence
  Description of Artificial Sequence: Synthetic oligonucleotide
  Antisense strand to SEQ ID NO: 980894
uucuuugauucagaccgcg

SEQ ID NO: 980896 - RNA, 19 nt, Artificial Sequence
  Description of Artificial Sequence: Synthetic oligonucleotide
  Sense strand starting at position 2464 of SEQ ID NO: 914137
acgucuugacuugggaaua

SEQ ID NO: 980897 - RNA, 19 nt, Artificial Sequence
  Description of Artificial Sequence: Synthetic oligonucleotide
  Antisense strand to SEQ ID NO: 980896
uauucccaagucaagacgu

SEQ ID NO: 980898 - RNA, 19 nt, Artificial Sequence
  Description of Artificial Sequence: Synthetic oligonucleotide
  Sense strand starting at position 3694 of SEQ ID NO: 914137
ugguaagaugcacauguuu

SEQ ID NO: 980899 - RNA, 19 nt, Artificial Sequence
  Description of Artificial Sequence: Synthetic oligonucleotide
  Antisense strand to SEQ ID NO: 980898
aaacaugugcaucuuacca

SEQ ID NO: 980900 - RNA, 19 nt, Artificial Sequence
  Description of Artificial Sequence: Synthetic oligonucleotide
  Sense strand starting at position 3015 of SEQ ID NO: 914137
uguacaacgcccuaaacau

SEQ ID NO: 980901 - RNA, 19 nt, Artificial Sequence
  Description of Artificial Sequence: Synthetic oligonucleotide
  Antisense strand to SEQ ID NO: 980900
auguuuagggcguuguaca

SEQ ID NO: 980902 - RNA, 19 nt, Artificial Sequence
  Description of Artificial Sequence: Synthetic oligonucleotide
  Sense strand starting at position 956 of SEQ ID NO: 914137
ucagauguuuaacugucaa

SEQ ID NO: 980903 - RNA, 19 nt, Artificial Sequence
  Description of Artificial Sequence: Synthetic oligonucleotide
  Antisense strand to SEQ ID NO: 980902
uugacaguuaaacaucuga

SEQ ID NO: 980904 - RNA, 19 nt, Artificial Sequence
  Description of Artificial Sequence: Synthetic oligonucleotide
  Sense strand starting at position 1217 of SEQ ID NO: 914137
gcgcgaauucgcagaggag

SEQ ID NO: 980905 - RNA, 19 nt, Artificial Sequence
  Description of Artificial Sequence: Synthetic oligonucleotide
  Antisense strand to SEQ ID NO: 980904
cuccucugcgaauucgcgc

SEQ ID NO: 980906 - RNA, 19 nt, Artificial Sequence
  Description of Artificial Sequence: Synthetic oligonucleotide
  Sense strand starting at position 643 of SEQ ID NO: 914137
gcauuuccauuugguauaa

SEQ ID NO: 980907 - RNA, 19 nt, Artificial Sequence
  Description of Artificial Sequence: Synthetic oligonucleotide
  Antisense strand to SEQ ID NO: 980906
uuauaccaaauggaaaugc

SEQ ID NO: 980908 - RNA, 19 nt, Artificial Sequence
  Description of Artificial Sequence: Synthetic oligonucleotide
  Sense strand starting at position 3338 of SEQ ID NO: 914137
uuuacauugcagugauaau

SEQ ID NO: 980909 - RNA, 19 nt, Artificial Sequence
  Description of Artificial Sequence: Synthetic oligonucleotide
  Antisense strand to SEQ ID NO: 980908
auuaucacugcaauguaaa

SEQ ID NO: 980910 - RNA, 19 nt, Artificial Sequence
  Description of Artificial Sequence: Synthetic oligonucleotide
  Sense strand starting at position 3884 of SEQ ID NO: 914137
caguaauaugcugguaaau

SEQ ID NO: 980911 - RNA, 19 nt, Artificial Sequence
  Description of Artificial Sequence: Synthetic oligonucleotide
  Antisense strand to SEQ ID NO: 980910
auuuaccagcauauuacug

SEQ ID NO: 980912 - RNA, 19 nt, Artificial Sequence
  Description of Artificial Sequence: Synthetic oligonucleotide
  Sense strand starting at position 1297 of SEQ ID NO: 914137
gaagguacggcguauuaag

SEQ ID NO: 980913 - RNA, 19 nt, Artificial Sequence
  Description of Artificial Sequence: Synthetic oligonucleotide
  Antisense strand to SEQ ID NO: 980912
cuuaauacgccguaccuuc

SEQ ID NO: 980914 - RNA, 19 nt, Artificial Sequence
  Description of Artificial Sequence: Synthetic oligonucleotide
  Sense strand starting at position 3797 of SEQ ID NO: 914137
ugaugaguauugcugauuc

SEQ ID NO: 980915 - RNA, 19 nt, Artificial Sequence
  Description of Artificial Sequence: Synthetic oligonucleotide
  Antisense strand to SEQ ID NO: 980914
gaaucagcaauacucauca

SEQ ID NO: 980916 - RNA, 19 nt, Artificial Sequence
  Description of Artificial Sequence: Synthetic oligonucleotide
  Sense strand starting at position 949 of SEQ ID NO: 914137
accagugucagauguuuaa

SEQ ID NO: 980917 - RNA, 19 nt, Artificial Sequence
  Description of Artificial Sequence: Synthetic oligonucleotide
  Antisense strand to SEQ ID NO: 980916
uuaaacaucugacacuggu

SEQ ID NO: 980918 - RNA, 19 nt, Artificial Sequence
  Description of Artificial Sequence: Synthetic oligonucleotide
  Sense strand starting at position 3683 of SEQ ID NO: 914137
aguccuucucuugguaaga

SEQ ID NO: 980919 - RNA, 19 nt, Artificial Sequence
  Description of Artificial Sequence: Synthetic oligonucleotide
  Antisense strand to SEQ ID NO: 980918
ucuuaccaagagaaggacu

SEQ ID NO: 980920 - RNA, 19 nt, Artificial Sequence
  Description of Artificial Sequence: Synthetic oligonucleotide
  Sense strand starting at position 3260 of SEQ ID NO: 914137
guauaaaucuugcuguaaa

SEQ ID NO: 980921 - RNA, 19 nt, Artificial Sequence
  Description of Artificial Sequence: Synthetic oligonucleotide
  Antisense strand to SEQ ID NO: 980920
uuuacagcaagauuuauac

SEQ ID NO: 980922 - RNA, 19 nt, Artificial Sequence
  Description of Artificial Sequence: Synthetic oligonucleotide
  Sense strand starting at position 687 of SEQ ID NO: 914137
ucaaaugauuguuccugca

SEQ ID NO: 980923 - RNA, 19 nt, Artificial Sequence
  Description of Artificial Sequence: Synthetic oligonucleotide
  Antisense strand to SEQ ID NO: 980922
ugcaggaacaaucauuuga

SEQ ID NO: 980924 - RNA, 19 nt, Artificial Sequence
  Description of Artificial Sequence: Synthetic oligonucleotide
  Sense strand starting at position 3499 of SEQ ID NO: 914137
ucucuagucccaugacuuc

SEQ ID NO: 980925 - RNA, 19 nt, Artificial Sequence
  Description of Artificial Sequence: Synthetic oligonucleotide
  Antisense strand to SEQ ID NO: 980924
gaagucaugggacuagaga

SEQ ID NO: 980926 - RNA, 19 nt, Artificial Sequence
  Description of Artificial Sequence: Synthetic oligonucleotide
  Sense strand starting at position 953 of SEQ ID NO: 914137
gugucagauguuuaacugu

SEQ ID NO: 980927 - RNA, 19 nt, Artificial Sequence
  Description of Artificial Sequence: Synthetic oligonucleotide
  Antisense strand to SEQ ID NO: 980926
acaguuaaacaucugacac

SEQ ID NO: 980928 - RNA, 19 nt, Artificial Sequence
  Description of Artificial Sequence: Synthetic oligonucleotide
  Sense strand starting at position 2327 of SEQ ID NO: 914137
auagcuuuagacuguuuau

SEQ ID NO: 980929 - RNA, 19 nt, Artificial Sequence
  Description of Artificial Sequence: Synthetic oligonucleotide
  Antisense strand to SEQ ID NO: 980928
auaaacagucuaaagcuau

SEQ ID NO: 980930 - RNA, 19 nt, Artificial Sequence
  Description of Artificial Sequence: Synthetic oligonucleotide
  Sense strand starting at position 2193 of SEQ ID NO: 914137
ugcagauuccaaggccuua

SEQ ID NO: 980931 - RNA, 19 nt, Artificial Sequence
  Description of Artificial Sequence: Synthetic oligonucleotide
  Antisense strand to SEQ ID NO: 980930
uaaggccuuggaaucugca

SEQ ID NO: 980932 - RNA, 19 nt, Artificial Sequence
  Description of Artificial Sequence: Synthetic oligonucleotide
  Sense strand starting at position 2485 of SEQ ID NO: 914137
gcauucccucguuaagauu

SEQ ID NO: 980933 - RNA, 19 nt, Artificial Sequence
  Description of Artificial Sequence: Synthetic oligonucleotide
  Antisense strand to SEQ ID NO: 980932
aaucuuaacgagggaaugc

SEQ ID NO: 980934 - RNA, 19 nt, Artificial Sequence
  Description of Artificial Sequence: Synthetic oligonucleotide
  Sense strand starting at position 3938 of SEQ ID NO: 914138
uauaacagauugguagauu

SEQ ID NO: 980935 - RNA, 19 nt, Artificial Sequence
  Description of Artificial Sequence: Synthetic oligonucleotide
  Antisense strand to SEQ ID NO: 980934
aaucuaccaaucuguuaua

SEQ ID NO: 980936 - RNA, 19 nt, Artificial Sequence
  Description of Artificial Sequence: Synthetic oligonucleotide
  Sense strand starting at position 2630 of SEQ ID NO: 914138
gucauuugguggccaugga

SEQ ID NO: 980937 - RNA, 19 nt, Artificial Sequence
  Description of Artificial Sequence: Synthetic oligonucleotide
  Antisense strand to SEQ ID NO: 980936
uccauggccaccaaaugac

SEQ ID NO: 980938 - RNA, 19 nt, Artificial Sequence
  Description of Artificial Sequence: Synthetic oligonucleotide
  Sense strand starting at position 3215 of SEQ ID NO: 914138
ugaucagugaaacgaaaua

SEQ ID NO: 980939 - RNA, 19 nt, Artificial Sequence
  Description of Artificial Sequence: Synthetic oligonucleotide
  Antisense strand to SEQ ID NO: 980938
uauuucguuucacugauca

SEQ ID NO: 980940 - RNA, 19 nt, Artificial Sequence
  Description of Artificial Sequence: Synthetic oligonucleotide
  Sense strand starting at position 3936 of SEQ ID NO: 914138
ucuauaacagauugguaga

SEQ ID NO: 980941 - RNA, 19 nt, Artificial Sequence
  Description of Artificial Sequence: Synthetic oligonucleotide
  Antisense strand to SEQ ID NO: 980940
ucuaccaaucuguuauaga

SEQ ID NO: 980942 - RNA, 19 nt, Artificial Sequence
  Description of Artificial Sequence: Synthetic oligonucleotide
  Sense strand starting at position 1143 of SEQ ID NO: 914138
cgggaagcuuuauuuccuu

SEQ ID NO: 980943 - RNA, 19 nt, Artificial Sequence
  Description of Artificial Sequence: Synthetic oligonucleotide
  Antisense strand to SEQ ID NO: 980942
aaggaaauaaagcuucccg

SEQ ID NO: 980944 - RNA, 19 nt, Artificial Sequence
  Description of Artificial Sequence: Synthetic oligonucleotide
  Sense strand starting at position 2628 of SEQ ID NO: 914138
gagucauuugguggccaug

SEQ ID NO: 980945 - RNA, 19 nt, Artificial Sequence
  Description of Artificial Sequence: Synthetic oligonucleotide
  Antisense strand to SEQ ID NO: 980944
cauggccaccaaaugacuc

SEQ ID NO: 980946 - RNA, 19 nt, Artificial Sequence
  Description of Artificial Sequence: Synthetic oligonucleotide
  Sense strand starting at position 2718 of SEQ ID NO: 914138
uagguauguggauaagcaa

SEQ ID NO: 980947 - RNA, 19 nt, Artificial Sequence
  Description of Artificial Sequence: Synthetic oligonucleotide
  Antisense strand to SEQ ID NO: 980946
uugcuuauccacauaccua

SEQ ID NO: 980948 - RNA, 19 nt, Artificial Sequence
  Description of Artificial Sequence: Synthetic oligonucleotide
  Sense strand starting at position 807 of SEQ ID NO: 914138
gauauagauuuggaucuag

SEQ ID NO: 980949 - RNA, 19 nt, Artificial Sequence
  Description of Artificial Sequence: Synthetic oligonucleotide
  Antisense strand to SEQ ID NO: 980948
cuagauccaaaucuauauc

SEQ ID NO: 980950 - RNA, 19 nt, Artificial Sequence
  Description of Artificial Sequence: Synthetic oligonucleotide
  Sense strand starting at position 991 of SEQ ID NO: 914138
ucaguaagagcccaaagua

SEQ ID NO: 980951 - RNA, 19 nt, Artificial Sequence
  Description of Artificial Sequence: Synthetic oligonucleotide
  Antisense strand to SEQ ID NO: 980950
uacuuugggcucuuacuga

SEQ ID NO: 980952 - RNA, 19 nt, Artificial Sequence
  Description of Artificial Sequence: Synthetic oligonucleotide
  Sense strand starting at position 3766 of SEQ ID NO: 914138
aaauuagagcaguaacugu

SEQ ID NO: 980953 - RNA, 19 nt, Artificial Sequence
  Description of Artificial Sequence: Synthetic oligonucleotide
  Antisense strand to SEQ ID NO: 980952
acaguuacugcucuaauuu

SEQ ID NO: 980954 - RNA, 19 nt, Artificial Sequence
  Description of Artificial Sequence: Synthetic oligonucleotide
  Sense strand starting at position 427 of SEQ ID NO: 914138
ugaggucuugcacaaauug

SEQ ID NO: 980955 - RNA, 19 nt, Artificial Sequence
  Description of Artificial Sequence: Synthetic oligonucleotide
  Antisense strand to SEQ ID NO: 980954
caauuugugcaagaccuca

SEQ ID NO: 980956 - RNA, 19 nt, Artificial Sequence
  Description of Artificial Sequence: Synthetic oligonucleotide
  Sense strand starting at position 2870 of SEQ ID NO: 914138
ggucgaaauaucuagguau

SEQ ID NO: 980957 - RNA, 19 nt, Artificial Sequence
  Description of Artificial Sequence: Synthetic oligonucleotide
  Antisense strand to SEQ ID NO: 980956
auaccuagauauuucgacc

SEQ ID NO: 980958 - RNA, 19 nt, Artificial Sequence
  Description of Artificial Sequence: Synthetic oligonucleotide
  Sense strand starting at position 676 of SEQ ID NO: 914138
uuaucauuccaugaguccu

SEQ ID NO: 980959 - RNA, 19 nt, Artificial Sequence
  Description of Artificial Sequence: Synthetic oligonucleotide
  Antisense strand to SEQ ID NO: 980958
aggacucauggaaugauaa

SEQ ID NO: 980960 - RNA, 19 nt, Artificial Sequence
  Description of Artificial Sequence: Synthetic oligonucleotide
  Sense strand starting at position 1333 of SEQ ID NO: 914138
cgcuucucagaagacaauu

SEQ ID NO: 980961 - RNA, 19 nt, Artificial Sequence
  Description of Artificial Sequence: Synthetic oligonucleotide
  Antisense strand to SEQ ID NO: 980960
aauugucuucugagaagcg

SEQ ID NO: 980962 - RNA, 19 nt, Artificial Sequence
  Description of Artificial Sequence: Synthetic oligonucleotide
  Sense strand starting at position 1417 of SEQ ID NO: 914138
aguuuaggcugcucauuua

SEQ ID NO: 980963 - RNA, 19 nt, Artificial Sequence
  Description of Artificial Sequence: Synthetic oligonucleotide
  Antisense strand to SEQ ID NO: 980962
uaaaugagcagccuaaacu

SEQ ID NO: 980964 - RNA, 19 nt, Artificial Sequence
  Description of Artificial Sequence: Synthetic oligonucleotide
  Sense strand starting at position 3005 of SEQ ID NO: 914138
ugugauauacagcauagua

SEQ ID NO: 980965 - RNA, 19 nt, Artificial Sequence
  Description of Artificial Sequence: Synthetic oligonucleotide
  Antisense strand to SEQ ID NO: 980964
uacuaugcuguauaucaca

SEQ ID NO: 980966 - RNA, 19 nt, Artificial Sequence
  Description of Artificial Sequence: Synthetic oligonucleotide
  Sense strand starting at position 3631 of SEQ ID NO: 914138
uuuacugaucugugagaua

SEQ ID NO: 980967 - RNA, 19 nt, Artificial Sequence
  Description of Artificial Sequence: Synthetic oligonucleotide
  Antisense strand to SEQ ID NO: 980966
uaucucacagaucaguaaa

SEQ ID NO: 980968 - RNA, 19 nt, Artificial Sequence
  Description of Artificial Sequence: Synthetic oligonucleotide
  Sense strand starting at position 2965 of SEQ ID NO: 914138
uuauuaauacgguauguga

SEQ ID NO: 980969 - RNA, 19 nt, Artificial Sequence
  Description of Artificial Sequence: Synthetic oligonucleotide
  Antisense strand to SEQ ID NO: 980968
ucacauaccguauuaauaa

SEQ ID NO: 980970 - RNA, 19 nt, Artificial Sequence
  Description of Artificial Sequence: Synthetic oligonucleotide
  Sense strand starting at position 3059 of SEQ ID NO: 914138
cuauuaucuuguuuaagga

SEQ ID NO: 980971 - RNA, 19 nt, Artificial Sequence
  Description of Artificial Sequence: Synthetic oligonucleotide
  Antisense strand to SEQ ID NO: 980970
uccuuaaacaagauaauag

SEQ ID NO: 980972 - RNA, 19 nt, Artificial Sequence
  Description of Artificial Sequence: Synthetic oligonucleotide
  Sense strand starting at position 2835 of SEQ ID NO: 914138
ugaaguagccuuggaggau

SEQ ID NO: 980973 - RNA, 19 nt, Artificial Sequence
  Description of Artificial Sequence: Synthetic oligonucleotide
  Antisense strand to SEQ ID NO: 980972
auccuccaaggcuacuuca

SEQ ID NO: 980974 - RNA, 19 nt, Artificial Sequence
  Description of Artificial Sequence: Synthetic oligonucleotide
  Sense strand starting at position 3069 of SEQ ID NO: 914138
guuuaaggauacuugaugu

SEQ ID NO: 980975 - RNA, 19 nt, Artificial Sequence
  Description of Artificial Sequence: Synthetic oligonucleotide
  Antisense strand to SEQ ID NO: 980974
acaucaaguauccuuaaac

SEQ ID NO: 980976 - RNA, 19 nt, Artificial Sequence
  Description of Artificial Sequence: Synthetic oligonucleotide
  Sense strand starting at position 3782 of SEQ ID NO: 914138
uguauuacaucuccauuag

SEQ ID NO: 980977 - RNA, 19 nt, Artificial Sequence
  Description of Artificial Sequence: Synthetic oligonucleotide
  Antisense strand to SEQ ID NO: 980976
cuaauggagauguaauaca

SEQ ID NO: 980978 - RNA, 19 nt, Artificial Sequence
  Description of Artificial Sequence: Synthetic oligonucleotide
  Sense strand starting at position 2714 of SEQ ID NO: 914138
cuccuagguauguggauaa

SEQ ID NO: 980979 - RNA, 19 nt, Artificial Sequence
  Description of Artificial Sequence: Synthetic oligonucleotide
  Antisense strand to SEQ ID NO: 980978
uuauccacauaccuaggag

SEQ ID NO: 980980 - RNA, 19 nt, Artificial Sequence
  Description of Artificial Sequence: Synthetic oligonucleotide
  Sense strand starting at position 2181 of SEQ ID NO: 914138
cgcuuugccgucucuacua

SEQ ID NO: 980981 - RNA, 19 nt, Artificial Sequence
  Description of Artificial Sequence: Synthetic oligonucleotide
  Antisense strand to SEQ ID NO: 980980
uaguagagacggcaaagcg

SEQ ID NO: 980982 - RNA, 19 nt, Artificial Sequence
  Description of Artificial Sequence: Synthetic oligonucleotide
  Sense strand starting at position 3058 of SEQ ID NO: 914138
ucuauuaucuuguuuaagg

SEQ ID NO: 980983 - RNA, 19 nt, Artificial Sequence
  Description of Artificial Sequence: Synthetic oligonucleotide
  Antisense strand to SEQ ID NO: 980982
ccuuaaacaagauaauaga

SEQ ID NO: 980984 - RNA, 19 nt, Artificial Sequence
  Description of Artificial Sequence: Synthetic oligonucleotide
  Sense strand starting at position 2872 of SEQ ID NO: 914138
ucgaaauaucuagguauuc

SEQ ID NO: 980985 - RNA, 19 nt, Artificial Sequence
  Description of Artificial Sequence: Synthetic oligonucleotide
  Antisense strand to SEQ ID NO: 980984
gaauaccuagauauuucga

SEQ ID NO: 980986 - RNA, 19 nt, Artificial Sequence
  Description of Artificial Sequence: Synthetic oligonucleotide
  Sense strand starting at position 3630 of SEQ ID NO: 914138
guuuacugaucugugagau

SEQ ID NO: 980987 - RNA, 19 nt, Artificial Sequence
  Description of Artificial Sequence: Synthetic oligonucleotide
  Antisense strand to SEQ ID NO: 980986
aucucacagaucaguaaac

SEQ ID NO: 980988 - RNA, 19 nt, Artificial Sequence
  Description of Artificial Sequence: Synthetic oligonucleotide
  Sense strand starting at position 2713 of SEQ ID NO: 914138
ccuccuagguauguggaua

SEQ ID NO: 980989 - RNA, 19 nt, Artificial Sequence
  Description of Artificial Sequence: Synthetic oligonucleotide
  Antisense strand to SEQ ID NO: 980988
uauccacauaccuaggagg

SEQ ID NO: 980990 - RNA, 19 nt, Artificial Sequence
  Description of Artificial Sequence: Synthetic oligonucleotide
  Sense strand starting at position 806 of SEQ ID NO: 914138
ugauauagauuuggaucua

SEQ ID NO: 980991 - RNA, 19 nt, Artificial Sequence
  Description of Artificial Sequence: Synthetic oligonucleotide
  Antisense strand to SEQ ID NO: 980990
uagauccaaaucuauauca

SEQ ID NO: 980992 - RNA, 19 nt, Artificial Sequence
  Description of Artificial Sequence: Synthetic oligonucleotide
  Sense strand starting at position 2656 of SEQ ID NO: 914138
ugcucuucugagugcauuu

SEQ ID NO: 980993 - RNA, 19 nt, Artificial Sequence
  Description of Artificial Sequence: Synthetic oligonucleotide
  Antisense strand to SEQ ID NO: 980992
aaaugcacucagaagagca

SEQ ID NO: 980994 - RNA, 19 nt, Artificial Sequence
  Description of Artificial Sequence: Synthetic oligonucleotide
  Sense strand starting at position 3629 of SEQ ID NO: 914138
uguuuacugaucugugaga

SEQ ID NO: 980995 - RNA, 19 nt, Artificial Sequence
  Description of Artificial Sequence: Synthetic oligonucleotide
  Antisense strand to SEQ ID NO: 980994
ucucacagaucaguaaaca

SEQ ID NO: 980996 - RNA, 19 nt, Artificial Sequence
  Description of Artificial Sequence: Synthetic oligonucleotide
  Sense strand starting at position 201 of SEQ ID NO: 914138
ucaucccuguagguauaua

SEQ ID NO: 980997 - RNA, 19 nt, Artificial Sequence
  Description of Artificial Sequence: Synthetic oligonucleotide
  Antisense strand to SEQ ID NO: 980996
uauauaccuacagggauga

SEQ ID NO: 980998 - RNA, 19 nt, Artificial Sequence
  Description of Artificial Sequence: Synthetic oligonucleotide
  Sense strand starting at position 436 of SEQ ID NO: 914138
gcacaaauuguuuagcauu

SEQ ID NO: 980999 - RNA, 19 nt, Artificial Sequence
  Description of Artificial Sequence: Synthetic oligonucleotide
  Antisense strand to SEQ ID NO: 980998
aaugcuaaacaauuugugc

SEQ ID NO: 981000 - RNA, 19 nt, Artificial Sequence
  Description of Artificial Sequence: Synthetic oligonucleotide
  Sense strand starting at position 2968 of SEQ ID NO: 914138
uuaauacgguaugugauua

SEQ ID NO: 981001 - RNA, 19 nt, Artificial Sequence
  Description of Artificial Sequence: Synthetic oligonucleotide
  Antisense strand to SEQ ID NO: 981000
uaaucacauaccguauuaa

SEQ ID NO: 981002 - RNA, 19 nt, Artificial Sequence
  Description of Artificial Sequence: Synthetic oligonucleotide
  Sense strand starting at position 3591 of SEQ ID NO: 914138
auuaauugucuuugugaac

SEQ ID NO: 981003 - RNA, 19 nt, Artificial Sequence
  Description of Artificial Sequence: Synthetic oligonucleotide
  Antisense strand to SEQ ID NO: 981002
guucacaaagacaauuaau

SEQ ID NO: 981004 - RNA, 19 nt, Artificial Sequence
  Description of Artificial Sequence: Synthetic oligonucleotide
  Sense strand starting at position 220 of SEQ ID NO: 914138
ccaguuaauucccugugga

SEQ ID NO: 981005 - RNA, 19 nt, Artificial Sequence
  Description of Artificial Sequence: Synthetic oligonucleotide
  Antisense strand to SEQ ID NO: 981004
uccacagggaauuaacugg

SEQ ID NO: 981006 - RNA, 19 nt, Artificial Sequence
  Description of Artificial Sequence: Synthetic oligonucleotide
  Sense strand starting at position 396 of SEQ ID NO: 914138
ugcucauggcuguaaacua

SEQ ID NO: 981007 - RNA, 19 nt, Artificial Sequence
  Description of Artificial Sequence: Synthetic oligonucleotide
  Antisense strand to SEQ ID NO: 981006
uaguuuacagccaugagca

SEQ ID NO: 981008 - RNA, 19 nt, Artificial Sequence
  Description of Artificial Sequence: Synthetic oligonucleotide
  Sense strand starting at position 2967 of SEQ ID NO: 914138
auuaauacgguaugugauu

SEQ ID NO: 981009 - RNA, 19 nt, Artificial Sequence
  Description of Artificial Sequence: Synthetic oligonucleotide
  Antisense strand to SEQ ID NO: 981008
aaucacauaccguauuaau

SEQ ID NO: 981010 - RNA, 19 nt, Artificial Sequence
  Description of Artificial Sequence: Synthetic oligonucleotide
  Sense strand starting at position 223 of SEQ ID NO: 914138
guuaauucccuguggacau

SEQ ID NO: 981011 - RNA, 19 nt, Artificial Sequence
  Description of Artificial Sequence: Synthetic oligonucleotide
  Antisense strand to SEQ ID NO: 981010
auguccacagggaauuaac

SEQ ID NO: 981012 - RNA, 19 nt, Artificial Sequence
  Description of Artificial Sequence: Synthetic oligonucleotide
  Sense strand starting at position 3076 of SEQ ID NO: 914138
gauacuugauguuugguuu

SEQ ID NO: 981013 - RNA, 19 nt, Artificial Sequence
  Description of Artificial Sequence: Synthetic oligonucleotide
  Antisense strand to SEQ ID NO: 981012
aaaccaaacaucaaguauc

SEQ ID NO: 981014 - RNA, 19 nt, Artificial Sequence
  Description of Artificial Sequence: Synthetic oligonucleotide
  Sense strand starting at position 3760 of SEQ ID NO: 914139
ucccaaauucugggaauua

SEQ ID NO: 981015 - RNA, 19 nt, Artificial Sequence
  Description of Artificial Sequence: Synthetic oligonucleotide
  Antisense strand to SEQ ID NO: 981014
uaauucccagaauuuggga

SEQ ID NO: 981016 - RNA, 19 nt, Artificial Sequence
  Description of Artificial Sequence: Synthetic oligonucleotide
  Sense strand starting at position 508 of SEQ ID NO: 914139
gaauuaagugguuggaaga

SEQ ID NO: 981017 - RNA, 19 nt, Artificial Sequence
  Description of Artificial Sequence: Synthetic oligonucleotide
  Antisense strand to SEQ ID NO: 981016
ucuuccaaccacuuaauuc

SEQ ID NO: 981018 - RNA, 19 nt, Artificial Sequence
  Description of Artificial Sequence: Synthetic oligonucleotide
  Sense strand starting at position 3876 of SEQ ID NO: 914139
uuauaaugacacgaguuua

SEQ ID NO: 981019 - RNA, 19 nt, Artificial Sequence
  Description of Artificial Sequence: Synthetic oligonucleotide
  Antisense strand to SEQ ID NO: 981018
uaaacucgugucauuauaa

SEQ ID NO: 981020 - RNA, 19 nt, Artificial Sequence
  Description of Artificial Sequence: Synthetic oligonucleotide
  Sense strand starting at position 434 of SEQ ID NO: 914139
aaaggagugccacacuauu

SEQ ID NO: 981021 - RNA, 19 nt, Artificial Sequence
  Description of Artificial Sequence: Synthetic oligonucleotide
  Antisense strand to SEQ ID NO: 981020
aauaguguggcacuccuuu

SEQ ID NO: 981022 - RNA, 19 nt, Artificial Sequence
  Description of Artificial Sequence: Synthetic oligonucleotide
  Sense strand starting at position 3782 of SEQ ID NO: 914139
cauagaaaucuuuggugga

SEQ ID NO: 981023 - RNA, 19 nt, Artificial Sequence
  Description of Artificial Sequence: Synthetic oligonucleotide
  Antisense strand to SEQ ID NO: 981022
uccaccaaagauuucuaug

SEQ ID NO: 981024 - RNA, 19 nt, Artificial Sequence
  Description of Artificial Sequence: Synthetic oligonucleotide
  Sense strand starting at position 509 of SEQ ID NO: 914139
aauuaagugguuggaagau

SEQ ID NO: 981025 - RNA, 19 nt, Artificial Sequence
  Description of Artificial Sequence: Synthetic oligonucleotide
  Antisense strand to SEQ ID NO: 981024
aucuuccaaccacuuaauu

SEQ ID NO: 981026 - RNA, 19 nt, Artificial Sequence
  Description of Artificial Sequence: Synthetic oligonucleotide
  Sense strand starting at position 2668 of SEQ ID NO: 914139
guuuacagacaucagucau

SEQ ID NO: 981027 - RNA, 19 nt, Artificial Sequence
  Description of Artificial Sequence: Synthetic oligonucleotide
  Antisense strand to SEQ ID NO: 981026
augacugaugucuguaaac

SEQ ID NO: 981028 - RNA, 19 nt, Artificial Sequence
  Description of Artificial Sequence: Synthetic oligonucleotide
  Sense strand starting at position 2641 of SEQ ID NO: 914139
cagagacgugcacaaacau

SEQ ID NO: 981029 - RNA, 19 nt, Artificial Sequence
  Description of Artificial Sequence: Synthetic oligonucleotide
  Antisense strand to SEQ ID NO: 981028
auguuugugcacgucucug

SEQ ID NO: 981030 - RNA, 19 nt, Artificial Sequence
  Description of Artificial Sequence: Synthetic oligonucleotide
  Sense strand starting at position 515 of SEQ ID NO: 914139
gugguuggaagauggaauu

SEQ ID NO: 981031 - RNA, 19 nt, Artificial Sequence
  Description of Artificial Sequence: Synthetic oligonucleotide
  Antisense strand to SEQ ID NO: 981030
aauuccaucuuccaaccac

SEQ ID NO: 981032 - RNA, 19 nt, Artificial Sequence
  Description of Artificial Sequence: Synthetic oligonucleotide
  Sense strand starting at position 2820 of SEQ ID NO: 914139
aggagaaaguacuuggucu

SEQ ID NO: 981033 - RNA, 19 nt, Artificial Sequence
  Description of Artificial Sequence: Synthetic oligonucleotide
  Antisense strand to SEQ ID NO: 981032
agaccaaguacuuucuccu

SEQ ID NO: 981034 - RNA, 19 nt, Artificial Sequence
  Description of Artificial Sequence: Synthetic oligonucleotide
  Sense strand starting at position 3786 of SEQ ID NO: 914139
gaaaucuuugguggaccau

SEQ ID NO: 981035 - RNA, 19 nt, Artificial Sequence
  Description of Artificial Sequence: Synthetic oligonucleotide
  Antisense strand to SEQ ID NO: 981034
augguccaccaaagauuuc

SEQ ID NO: 981036 - RNA, 19 nt, Artificial Sequence
  Description of Artificial Sequence: Synthetic oligonucleotide
  Sense strand starting at position 3693 of SEQ ID NO: 914139
auuacuuugggcgaagauu

SEQ ID NO: 981037 - RNA, 19 nt, Artificial Sequence
  Description of Artificial Sequence: Synthetic oligonucleotide
  Antisense strand to SEQ ID NO: 981036
aaucuucgcccaaaguaau

SEQ ID NO: 981038 - RNA, 19 nt, Artificial Sequence
  Description of Artificial Sequence: Synthetic oligonucleotide
  Sense strand starting at position 505 of SEQ ID NO: 914139
ccagaauuaagugguugga

SEQ ID NO: 981039 - RNA, 19 nt, Artificial Sequence
  Description of Artificial Sequence: Synthetic oligonucleotide
  Antisense strand to SEQ ID NO: 981038
uccaaccacuuaauucugg

SEQ ID NO: 981040 - RNA, 19 nt, Artificial Sequence
  Description of Artificial Sequence: Synthetic oligonucleotide
  Sense strand starting at position 3323 of SEQ ID NO: 914139
auuggaccuagguguagaa

SEQ ID NO: 981041 - RNA, 19 nt, Artificial Sequence
  Description of Artificial Sequence: Synthetic oligonucleotide
  Antisense strand to SEQ ID NO: 981040
uucuacaccuagguccaau

SEQ ID NO: 981042 - RNA, 19 nt, Artificial Sequence
  Description of Artificial Sequence: Synthetic oligonucleotide
  Sense strand starting at position 2681 of SEQ ID NO: 914139
agucaugugggcuagaaac

SEQ ID NO: 981043 - RNA, 19 nt, Artificial Sequence
  Description of Artificial Sequence: Synthetic oligonucleotide
  Antisense strand to SEQ ID NO: 981042
guuucuagcccacaugacu

SEQ ID NO: 981044 - RNA, 19 nt, Artificial Sequence
  Description of Artificial Sequence: Synthetic oligonucleotide
  Sense strand starting at position 358 of SEQ ID NO: 914139
gggaaauuagggugcccaa

SEQ ID NO: 981045 - RNA, 19 nt, Artificial Sequence
  Description of Artificial Sequence: Synthetic oligonucleotide
  Antisense strand to SEQ ID NO: 981044
uugggcacccuaauuuccc

SEQ ID NO: 981046 - RNA, 19 nt, Artificial Sequence
  Description of Artificial Sequence: Synthetic oligonucleotide
  Sense strand starting at position 3702 of SEQ ID NO: 914139
ggcgaagauuaucucaaga

SEQ ID NO: 981047 - RNA, 19 nt, Artificial Sequence
  Description of Artificial Sequence: Synthetic oligonucleotide
  Antisense strand to SEQ ID NO: 981046
ucuugagauaaucuucgcc

SEQ ID NO: 981048 - RNA, 19 nt, Artificial Sequence
  Description of Artificial Sequence: Synthetic oligonucleotide
  Sense strand starting at position 46 of SEQ ID NO: 914139
acggauacuucagugagac

SEQ ID NO: 981049 - RNA, 19 nt, Artificial Sequence
  Description of Artificial Sequence: Synthetic oligonucleotide
  Antisense strand to SEQ ID NO: 981048
gucucacugaaguauccgu

SEQ ID NO: 981050 - RNA, 19 nt, Artificial Sequence
  Description of Artificial Sequence: Synthetic oligonucleotide
  Sense strand starting at position 3701 of SEQ ID NO: 914139
gggcgaagauuaucucaag

SEQ ID NO: 981051 - RNA, 19 nt, Artificial Sequence
  Description of Artificial Sequence: Synthetic oligonucleotide
  Antisense strand to SEQ ID NO: 981050
cuugagauaaucuucgccc

SEQ ID NO: 981052 - RNA, 19 nt, Artificial Sequence
  Description of Artificial Sequence: Synthetic oligonucleotide
  Sense strand starting at position 2002 of SEQ ID NO: 914139
gagacuucuggguagugua

SEQ ID NO: 981053 - RNA, 19 nt, Artificial Sequence
  Description of Artificial Sequence: Synthetic oligonucleotide
  Antisense strand to SEQ ID NO: 981052
uacacuacccagaagucuc

SEQ ID NO: 981054 - RNA, 19 nt, Artificial Sequence
  Description of Artificial Sequence: Synthetic oligonucleotide
  Sense strand starting at position 2000 of SEQ ID NO: 914139
aggagacuucuggguagug

SEQ ID NO: 981055 - RNA, 19 nt, Artificial Sequence
  Description of Artificial Sequence: Synthetic oligonucleotide
  Antisense strand to SEQ ID NO: 981054
cacuacccagaagucuccu

SEQ ID NO: 981056 - RNA, 19 nt, Artificial Sequence
  Description of Artificial Sequence: Synthetic oligonucleotide
  Sense strand starting at position 1229 of SEQ ID NO: 914139
ggauuuccuucccaaggaa

SEQ ID NO: 981057 - RNA, 19 nt, Artificial Sequence
  Description of Artificial Sequence: Synthetic oligonucleotide
  Antisense strand to SEQ ID NO: 981056
uuccuugggaaggaaaucc

SEQ ID NO: 981058 - RNA, 19 nt, Artificial Sequence
  Description of Artificial Sequence: Synthetic oligonucleotide
  Sense strand starting at position 2878 of SEQ ID NO: 914139
agcccauugccagaacuua

SEQ ID NO: 981059 - RNA, 19 nt, Artificial Sequence
  Description of Artificial Sequence: Synthetic oligonucleotide
  Antisense strand to SEQ ID NO: 981058
uaaguucuggcaaugggcu

SEQ ID NO: 981060 - RNA, 19 nt, Artificial Sequence
  Description of Artificial Sequence: Synthetic oligonucleotide
  Sense strand starting at position 2821 of SEQ ID NO: 914139
ggagaaaguacuuggucuu

SEQ ID NO: 981061 - RNA, 19 nt, Artificial Sequence
  Description of Artificial Sequence: Synthetic oligonucleotide
  Antisense strand to SEQ ID NO: 981060
aagaccaaguacuuucucc

SEQ ID NO: 981062 - RNA, 19 nt, Artificial Sequence
  Description of Artificial Sequence: Synthetic oligonucleotide
  Sense strand starting at position 2822 of SEQ ID NO: 914139
gagaaaguacuuggucuug

SEQ ID NO: 981063 - RNA, 19 nt, Artificial Sequence
  Description of Artificial Sequence: Synthetic oligonucleotide
  Antisense strand to SEQ ID NO: 981062
caagaccaaguacuuucuc

SEQ ID NO: 981064 - RNA, 19 nt, Artificial Sequence
  Description of Artificial Sequence: Synthetic oligonucleotide
  Sense strand starting at position 461 of SEQ ID NO: 914139
aaugcaaaugcugagucau

SEQ ID NO: 981065 - RNA, 19 nt, Artificial Sequence
  Description of Artificial Sequence: Synthetic oligonucleotide
  Antisense strand to SEQ ID NO: 981064
augacucagcauuugcauu

SEQ ID NO: 981066 - RNA, 19 nt, Artificial Sequence
  Description of Artificial Sequence: Synthetic oligonucleotide
  Sense strand starting at position 3108 of SEQ ID NO: 914139
ccauaagaguccguaggaa

SEQ ID NO: 981067 - RNA, 19 nt, Artificial Sequence
  Description of Artificial Sequence: Synthetic oligonucleotide
  Antisense strand to SEQ ID NO: 981066
uuccuacggacucuuaugg

SEQ ID NO: 981068 - RNA, 19 nt, Artificial Sequence
  Description of Artificial Sequence: Synthetic oligonucleotide
  Sense strand starting at position 1893 of SEQ ID NO: 914139
ugggaauugugguccugga

SEQ ID NO: 981069 - RNA, 19 nt, Artificial Sequence
  Description of Artificial Sequence: Synthetic oligonucleotide
  Antisense strand to SEQ ID NO: 981068
uccaggaccacaauuccca

SEQ ID NO: 981070 - RNA, 19 nt, Artificial Sequence
  Description of Artificial Sequence: Synthetic oligonucleotide
  Sense strand starting at position 1846 of SEQ ID NO: 914139
ccgggagagaucgggcaaa

SEQ ID NO: 981071 - RNA, 19 nt, Artificial Sequence
  Description of Artificial Sequence: Synthetic oligonucleotide
  Antisense strand to SEQ ID NO: 981070
uuugcccgaucucucccgg

SEQ ID NO: 981072 - RNA, 19 nt, Artificial Sequence
  Description of Artificial Sequence: Synthetic oligonucleotide
  Sense strand starting at position 3691 of SEQ ID NO: 914139
ugauuacuuugggcgaaga

SEQ ID NO: 981073 - RNA, 19 nt, Artificial Sequence
  Description of Artificial Sequence: Synthetic oligonucleotide
  Antisense strand to SEQ ID NO: 981072
ucuucgcccaaaguaauca

SEQ ID NO: 981074 - RNA, 19 nt, Artificial Sequence
  Description of Artificial Sequence: Synthetic oligonucleotide
  Sense strand starting at position 2537 of SEQ ID NO: 914139
ucaaaugucucaucggaua

SEQ ID NO: 981075 - RNA, 19 nt, Artificial Sequence
  Description of Artificial Sequence: Synthetic oligonucleotide
  Antisense strand to SEQ ID NO: 981074
uauccgaugagacauuuga

SEQ ID NO: 981076 - RNA, 19 nt, Artificial Sequence
  Description of Artificial Sequence: Synthetic oligonucleotide
  Sense strand starting at position 3692 of SEQ ID NO: 914139
gauuacuuugggcgaagau

SEQ ID NO: 981077 - RNA, 19 nt, Artificial Sequence
  Description of Artificial Sequence: Synthetic oligonucleotide
  Antisense strand to SEQ ID NO: 981076
aucuucgcccaaaguaauc

SEQ ID NO: 981078 - RNA, 19 nt, Artificial Sequence
  Description of Artificial Sequence: Synthetic oligonucleotide
  Sense strand starting at position 3030 of SEQ ID NO: 914139
gcccuuauguuguccauuu

SEQ ID NO: 981079 - RNA, 19 nt, Artificial Sequence
  Description of Artificial Sequence: Synthetic oligonucleotide
  Antisense strand to SEQ ID NO: 981078
aaauggacaacauaagggc

SEQ ID NO: 981080 - RNA, 19 nt, Artificial Sequence
  Description of Artificial Sequence: Synthetic oligonucleotide
  Sense strand starting at position 2742 of SEQ ID NO: 914139
ucugcaucccuguagaauu

SEQ ID NO: 981081 - RNA, 19 nt, Artificial Sequence
  Description of Artificial Sequence: Synthetic oligonucleotide
  Antisense strand to SEQ ID NO: 981080
aauucuacagggaugcaga

SEQ ID NO: 981082 - RNA, 19 nt, Artificial Sequence
  Description of Artificial Sequence: Synthetic oligonucleotide
  Sense strand starting at position 3490 of SEQ ID NO: 914139
ucaguuacacugggcuaaa

SEQ ID NO: 981083 - RNA, 19 nt, Artificial Sequence
  Description of Artificial Sequence: Synthetic oligonucleotide
  Antisense strand to SEQ ID NO: 981082
uuuagcccaguguaacuga

SEQ ID NO: 981084 - RNA, 19 nt, Artificial Sequence
  Description of Artificial Sequence: Synthetic oligonucleotide
  Sense strand starting at position 3107 of SEQ ID NO: 914139
cccauaagaguccguagga

SEQ ID NO: 981085 - RNA, 19 nt, Artificial Sequence
  Description of Artificial Sequence: Synthetic oligonucleotide
  Antisense strand to SEQ ID NO: 981084
uccuacggacucuuauggg

SEQ ID NO: 981086 - RNA, 19 nt, Artificial Sequence
  Description of Artificial Sequence: Synthetic oligonucleotide
  Sense strand starting at position 173 of SEQ ID NO: 914139
augugaagcuagucaaacu

SEQ ID NO: 981087 - RNA, 19 nt, Artificial Sequence
  Description of Artificial Sequence: Synthetic oligonucleotide
  Antisense strand to SEQ ID NO: 981086
aguuugacuagcuucacau

SEQ ID NO: 981088 - RNA, 19 nt, Artificial Sequence
  Description of Artificial Sequence: Synthetic oligonucleotide
  Sense strand starting at position 47 of SEQ ID NO: 914139
cggauacuucagugagacg

SEQ ID NO: 981089 - RNA, 19 nt, Artificial Sequence
  Description of Artificial Sequence: Synthetic oligonucleotide
  Antisense strand to SEQ ID NO: 981088
cgucucacugaaguauccg

SEQ ID NO: 981090 - RNA, 19 nt, Artificial Sequence
  Description of Artificial Sequence: Synthetic oligonucleotide
  Sense strand starting at position 150 of SEQ ID NO: 914139
cuuucuuugguaggaguga

SEQ ID NO: 981091 - RNA, 19 nt, Artificial Sequence
  Description of Artificial Sequence: Synthetic oligonucleotide
  Antisense strand to SEQ ID NO: 981090
ucacuccuaccaaagaaag

SEQ ID NO: 981092 - RNA, 19 nt, Artificial Sequence
  Description of Artificial Sequence: Synthetic oligonucleotide
  Sense strand starting at position 3227 of SEQ ID NO: 914139
agaaccguguugucaagaa

SEQ ID NO: 981093 - RNA, 19 nt, Artificial Sequence
  Description of Artificial Sequence: Synthetic oligonucleotide
  Antisense strand to SEQ ID NO: 981092
uucuugacaacacgguucu

SEQ ID NO: 981094 - RNA, 19 nt, Artificial Sequence
  Description of Artificial Sequence: Synthetic oligonucleotide
  Sense strand starting at position 2931 of SEQ ID NO: 914140
uacaguguugaaugagaga

SEQ ID NO: 981095 - RNA, 19 nt, Artificial Sequence
  Description of Artificial Sequence: Synthetic oligonucleotide
  Antisense strand to SEQ ID NO: 981094
ucucucauucaacacugua

SEQ ID NO: 981096 - RNA, 19 nt, Artificial Sequence
  Description of Artificial Sequence: Synthetic oligonucleotide
  Sense strand starting at position 1408 of SEQ ID NO: 914140
acucuuaaucaagggucaa

SEQ ID NO: 981097 - RNA, 19 nt, Artificial Sequence
  Description of Artificial Sequence: Synthetic oligonucleotide
  Antisense strand to SEQ ID NO: 981096
uugacccuugauuaagagu

SEQ ID NO: 981098 - RNA, 19 nt, Artificial Sequence
  Description of Artificial Sequence: Synthetic oligonucleotide
  Sense strand starting at position 3380 of SEQ ID NO: 914140
gcaggagaaucacuggcau

SEQ ID NO: 981099 - RNA, 19 nt, Artificial Sequence
  Description of Artificial Sequence: Synthetic oligonucleotide
  Antisense strand to SEQ ID NO: 981098
augccagugauucuccugc

SEQ ID NO: 981100 - RNA, 19 nt, Artificial Sequence
  Description of Artificial Sequence: Synthetic oligonucleotide
  Sense strand starting at position 1295 of SEQ ID NO: 914140
acugaauauucugcccuga

SEQ ID NO: 981101 - RNA, 19 nt, Artificial Sequence
  Description of Artificial Sequence: Synthetic oligonucleotide
  Antisense strand to SEQ ID NO: 981100
ucagggcagaauauucagu

SEQ ID NO: 981102 - RNA, 19 nt, Artificial Sequence
  Description of Artificial Sequence: Synthetic oligonucleotide
  Sense strand starting at position 2230 of SEQ ID NO: 914140
ucucucagguuagugaaau

SEQ ID NO: 981103 - RNA, 19 nt, Artificial Sequence
  Description of Artificial Sequence: Synthetic oligonucleotide
  Antisense strand to SEQ ID NO: 981102
auuucacuaaccugagaga

SEQ ID NO: 981104 - RNA, 19 nt, Artificial Sequence
  Description of Artificial Sequence: Synthetic oligonucleotide
  Sense strand starting at position 2891 of SEQ ID NO: 914140
gagcuauuagucuaagcug

SEQ ID NO: 981105 - RNA, 19 nt, Artificial Sequence
  Description of Artificial Sequence: Synthetic oligonucleotide
  Antisense strand to SEQ ID NO: 981104
cagcuuagacuaauagcuc

SEQ ID NO: 981106 - RNA, 19 nt, Artificial Sequence
  Description of Artificial Sequence: Synthetic oligonucleotide
  Sense strand starting at position 1150 of SEQ ID NO: 914140
uugccuauuuccguuucua

SEQ ID NO: 981107 - RNA, 19 nt, Artificial Sequence
  Description of Artificial Sequence: Synthetic oligonucleotide
  Antisense strand to SEQ ID NO: 981106
uagaaacggaaauaggcaa

SEQ ID NO: 981108 - RNA, 19 nt, Artificial Sequence
  Description of Artificial Sequence: Synthetic oligonucleotide
  Sense strand starting at position 896 of SEQ ID NO: 914140
ugcacuacagucugaacau

SEQ ID NO: 981109 - RNA, 19 nt, Artificial Sequence
  Description of Artificial Sequence: Synthetic oligonucleotide
  Antisense strand to SEQ ID NO: 981108
auguucagacuguagugca

SEQ ID NO: 981110 - RNA, 19 nt, Artificial Sequence
  Description of Artificial Sequence: Synthetic oligonucleotide
  Sense strand starting at position 1601 of SEQ ID NO: 914140
gguacuuaagcuuguaaau

SEQ ID NO: 981111 - RNA, 19 nt, Artificial Sequence
  Description of Artificial Sequence: Synthetic oligonucleotide
  Antisense strand to SEQ ID NO: 981110
auuuacaagcuuaaguacc

SEQ ID NO: 981112 - RNA, 19 nt, Artificial Sequence
  Description of Artificial Sequence: Synthetic oligonucleotide
  Sense strand starting at position 2606 of SEQ ID NO: 914140
gcaucaucacucugagguc

SEQ ID NO: 981113 - RNA, 19 nt, Artificial Sequence
  Description of Artificial Sequence: Synthetic oligonucleotide
  Antisense strand to SEQ ID NO: 981112
gaccucagagugaugaugc

SEQ ID NO: 981114 - RNA, 19 nt, Artificial Sequence
  Description of Artificial Sequence: Synthetic oligonucleotide
  Sense strand starting at position 454 of SEQ ID NO: 914140
cucugaaacucagagauac

SEQ ID NO: 981115 - RNA, 19 nt, Artificial Sequence
  Description of Artificial Sequence: Synthetic oligonucleotide
  Antisense strand to SEQ ID NO: 981114
guaucucugaguuucagag

SEQ ID NO: 981116 - RNA, 19 nt, Artificial Sequence
  Description of Artificial Sequence: Synthetic oligonucleotide
  Sense strand starting at position 3164 of SEQ ID NO: 914140
guguuucaggagugcaaug

SEQ ID NO: 981117 - RNA, 19 nt, Artificial Sequence
  Description of Artificial Sequence: Synthetic oligonucleotide
  Antisense strand to SEQ ID NO: 981116
cauugcacuccugaaacac

SEQ ID NO: 981118 - RNA, 19 nt, Artificial Sequence
  Description of Artificial Sequence: Synthetic oligonucleotide
  Sense strand starting at position 1335 of SEQ ID NO: 914140
uaugucgcuguguacuaaa

SEQ ID NO: 981119 - RNA, 19 nt, Artificial Sequence
  Description of Artificial Sequence: Synthetic oligonucleotide
  Antisense strand to SEQ ID NO: 981118
uuuaguacacagcgacaua

SEQ ID NO: 981120 - RNA, 19 nt, Artificial Sequence
  Description of Artificial Sequence: Synthetic oligonucleotide
  Sense strand starting at position 1026 of SEQ ID NO: 914140
agguccaaguuguauuuau

SEQ ID NO: 981121 - RNA, 19 nt, Artificial Sequence
  Description of Artificial Sequence: Synthetic oligonucleotide
  Antisense strand to SEQ ID NO: 981120
auaaauacaacuuggaccu

SEQ ID NO: 981122 - RNA, 19 nt, Artificial Sequence
  Description of Artificial Sequence: Synthetic oligonucleotide
  Sense strand starting at position 1330 of SEQ ID NO: 914140
cagaauaugucgcugugua

SEQ ID NO: 981123 - RNA, 19 nt, Artificial Sequence
  Description of Artificial Sequence: Synthetic oligonucleotide
  Antisense strand to SEQ ID NO: 981122
uacacagcgacauauucug

SEQ ID NO: 981124 - RNA, 19 nt, Artificial Sequence
  Description of Artificial Sequence: Synthetic oligonucleotide
  Sense strand starting at position 1331 of SEQ ID NO: 914140
agaauaugucgcuguguac

SEQ ID NO: 981125 - RNA, 19 nt, Artificial Sequence
  Description of Artificial Sequence: Synthetic oligonucleotide
  Antisense strand to SEQ ID NO: 981124
guacacagcgacauauucu

SEQ ID NO: 981126 - RNA, 19 nt, Artificial Sequence
  Description of Artificial Sequence: Synthetic oligonucleotide
  Sense strand starting at position 1334 of SEQ ID NO: 914140
auaugucgcuguguacuaa

SEQ ID NO: 981127 - RNA, 19 nt, Artificial Sequence
  Description of Artificial Sequence: Synthetic oligonucleotide
  Antisense strand to SEQ ID NO: 981126
uuaguacacagcgacauau

SEQ ID NO: 981128 - RNA, 19 nt, Artificial Sequence
  Description of Artificial Sequence: Synthetic oligonucleotide
  Sense strand starting at position 1452 of SEQ ID NO: 914140
guaggaggcuuggauauaa

SEQ ID NO: 981129 - RNA, 19 nt, Artificial Sequence
  Description of Artificial Sequence: Synthetic oligonucleotide
  Antisense strand to SEQ ID NO: 981128
uuauauccaagccuccuac

SEQ ID NO: 981130 - RNA, 19 nt, Artificial Sequence
  Description of Artificial Sequence: Synthetic oligonucleotide
  Sense strand starting at position 3897 of SEQ ID NO: 914140
gggaguucauggcauaaac

SEQ ID NO: 981131 - RNA, 19 nt, Artificial Sequence
  Description of Artificial Sequence: Synthetic oligonucleotide
  Antisense strand to SEQ ID NO: 981130
guuuaugccaugaacuccc

SEQ ID NO: 981132 - RNA, 19 nt, Artificial Sequence
  Description of Artificial Sequence: Synthetic oligonucleotide
  Sense strand starting at position 897 of SEQ ID NO: 914140
gcacuacagucugaacaua

SEQ ID NO: 981133 - RNA, 19 nt, Artificial Sequence
  Description of Artificial Sequence: Synthetic oligonucleotide
  Antisense strand to SEQ ID NO: 981132
uauguucagacuguagugc

SEQ ID NO: 981134 - RNA, 19 nt, Artificial Sequence
  Description of Artificial Sequence: Synthetic oligonucleotide
  Sense strand starting at position 2231 of SEQ ID NO: 914140
cucucagguuagugaaaug

SEQ ID NO: 981135 - RNA, 19 nt, Artificial Sequence
  Description of Artificial Sequence: Synthetic oligonucleotide
  Antisense strand to SEQ ID NO: 981134
cauuucacuaaccugagag

SEQ ID NO: 981136 - RNA, 19 nt, Artificial Sequence
  Description of Artificial Sequence: Synthetic oligonucleotide
  Sense strand starting at position 1401 of SEQ ID NO: 914140
cggcucuacucuuaaucaa

SEQ ID NO: 981137 - RNA, 19 nt, Artificial Sequence
  Description of Artificial Sequence: Synthetic oligonucleotide
  Antisense strand to SEQ ID NO: 981136
uugauuaagaguagagccg

SEQ ID NO: 981138 - RNA, 19 nt, Artificial Sequence
  Description of Artificial Sequence: Synthetic oligonucleotide
  Sense strand starting at position 2927 of SEQ ID NO: 914140
gguauacaguguugaauga

SEQ ID NO: 981139 - RNA, 19 nt, Artificial Sequence
  Description of Artificial Sequence: Synthetic oligonucleotide
  Antisense strand to SEQ ID NO: 981138
ucauucaacacuguauacc

SEQ ID NO: 981140 - RNA, 19 nt, Artificial Sequence
  Description of Artificial Sequence: Synthetic oligonucleotide
  Sense strand starting at position 185 of SEQ ID NO: 914140
acuuaucacuaacggcaau

SEQ ID NO: 981141 - RNA, 19 nt, Artificial Sequence
  Description of Artificial Sequence: Synthetic oligonucleotide
  Antisense strand to SEQ ID NO: 981140
auugccguuagugauaagu

SEQ ID NO: 981142 - RNA, 19 nt, Artificial Sequence
  Description of Artificial Sequence: Synthetic oligonucleotide
  Sense strand starting at position 2899 of SEQ ID NO: 914140
agucuaagcuggcauugua

SEQ ID NO: 981143 - RNA, 19 nt, Artificial Sequence
  Description of Artificial Sequence: Synthetic oligonucleotide
  Antisense strand to SEQ ID NO: 981142
uacaaugccagcuuagacu

SEQ ID NO: 981144 - RNA, 19 nt, Artificial Sequence
  Description of Artificial Sequence: Synthetic oligonucleotide
  Sense strand starting at position 3055 of SEQ ID NO: 914141
uguucugauagaugaauga

SEQ ID NO: 981145 - RNA, 19 nt, Artificial Sequence
  Description of Artificial Sequence: Synthetic oligonucleotide
  Antisense strand to SEQ ID NO: 981144
ucauucaucuaucagaaca

SEQ ID NO: 981146 - RNA, 19 nt, Artificial Sequence
  Description of Artificial Sequence: Synthetic oligonucleotide
  Sense strand starting at position 2239 of SEQ ID NO: 914141
cucucucaggguuagugaa

SEQ ID NO: 981147 - RNA, 19 nt, Artificial Sequence
  Description of Artificial Sequence: Synthetic oligonucleotide
  Antisense strand to SEQ ID NO: 981146
uucacuaacccugagagag

SEQ ID NO: 981148 - RNA, 19 nt, Artificial Sequence
  Description of Artificial Sequence: Synthetic oligonucleotide
  Sense strand starting at position 2954 of SEQ ID NO: 914141
uacaguguugaacgagaga

SEQ ID NO: 981149 - RNA, 19 nt, Artificial Sequence
  Description of Artificial Sequence: Synthetic oligonucleotide
  Antisense strand to SEQ ID NO: 981148
ucucucguucaacacugua

SEQ ID NO: 981150 - RNA, 19 nt, Artificial Sequence
  Description of Artificial Sequence: Synthetic oligonucleotide
  Sense strand starting at position 2914 of SEQ ID NO: 914141
gagcuauuaguuuaagcug

SEQ ID NO: 981151 - RNA, 19 nt, Artificial Sequence
  Description of Artificial Sequence: Synthetic oligonucleotide
  Antisense strand to SEQ ID NO: 981150
cagcuuaaacuaauagcuc

SEQ ID NO: 981152 - RNA, 19 nt, Artificial Sequence
  Description of Artificial Sequence: Synthetic oligonucleotide
  Sense strand starting at position 3922 of SEQ ID NO: 914141
gaguucguggcauaaacau

SEQ ID NO: 981153 - RNA, 19 nt, Artificial Sequence
  Description of Artificial Sequence: Synthetic oligonucleotide
  Antisense strand to SEQ ID NO: 981152
auguuuaugccacgaacuc

SEQ ID NO: 981154 - RNA, 19 nt, Artificial Sequence
  Description of Artificial Sequence: Synthetic oligonucleotide
  Sense strand starting at position 1343 of SEQ ID NO: 914141
cagaauaugucacugugua

SEQ ID NO: 981155 - RNA, 19 nt, Artificial Sequence
  Description of Artificial Sequence: Synthetic oligonucleotide
  Antisense strand to SEQ ID NO: 981154
uacacagugacauauucug

SEQ ID NO: 981156 - RNA, 19 nt, Artificial Sequence
  Description of Artificial Sequence: Synthetic oligonucleotide
  Sense strand starting at position 904 of SEQ ID NO: 914141
gcacuagagucagucugaa

SEQ ID NO: 981157 - RNA, 19 nt, Artificial Sequence
  Description of Artificial Sequence: Synthetic oligonucleotide
  Antisense strand to SEQ ID NO: 981156
uucagacugacucuagugc

SEQ ID NO: 981158 - RNA, 19 nt, Artificial Sequence
  Description of Artificial Sequence: Synthetic oligonucleotide
  Sense strand starting at position 1344 of SEQ ID NO: 914141
agaauaugucacuguguac

SEQ ID NO: 981159 - RNA, 19 nt, Artificial Sequence
  Description of Artificial Sequence: Synthetic oligonucleotide
  Antisense strand to SEQ ID NO: 981158
guacacagugacauauucu

SEQ ID NO: 981160 - RNA, 19 nt, Artificial Sequence
  Description of Artificial Sequence: Synthetic oligonucleotide
  Sense strand starting at position 672 of SEQ ID NO: 914141
guaccuagauucccagcua

SEQ ID NO: 981161 - RNA, 19 nt, Artificial Sequence
  Description of Artificial Sequence: Synthetic oligonucleotide
  Antisense strand to SEQ ID NO: 981160
uagcugggaaucuagguac

SEQ ID NO: 981162 - RNA, 19 nt, Artificial Sequence
  Description of Artificial Sequence: Synthetic oligonucleotide
  Sense strand starting at position 1347 of SEQ ID NO: 914141
auaugucacuguguacuaa

SEQ ID NO: 981163 - RNA, 19 nt, Artificial Sequence
  Description of Artificial Sequence: Synthetic oligonucleotide
  Antisense strand to SEQ ID NO: 981162
uuaguacacagugacauau

SEQ ID NO: 981164 - RNA, 19 nt, Artificial Sequence
  Description of Artificial Sequence: Synthetic oligonucleotide
  Sense strand starting at position 1610 of SEQ ID NO: 914141
gguacuuaagcuuguaaac

SEQ ID NO: 981165 - RNA, 19 nt, Artificial Sequence
  Description of Artificial Sequence: Synthetic oligonucleotide
  Antisense strand to SEQ ID NO: 981164
guuuacaagcuuaaguacc

SEQ ID NO: 981166 - RNA, 19 nt, Artificial Sequence
  Description of Artificial Sequence: Synthetic oligonucleotide
  Sense strand starting at position 1037 of SEQ ID NO: 914141
agguccaaguucuauuuau

SEQ ID NO: 981167 - RNA, 19 nt, Artificial Sequence
  Description of Artificial Sequence: Synthetic oligonucleotide
  Antisense strand to SEQ ID NO: 981166
auaaauagaacuuggaccu

SEQ ID NO: 981168 - RNA, 19 nt, Artificial Sequence
  Description of Artificial Sequence: Synthetic oligonucleotide
  Sense strand starting at position 664 of SEQ ID NO: 914141
ggugguacguaccuagauu

SEQ ID NO: 981169 - RNA, 19 nt, Artificial Sequence
  Description of Artificial Sequence: Synthetic oligonucleotide
  Antisense strand to SEQ ID NO: 981168
aaucuagguacguaccacc

SEQ ID NO: 981170 - RNA, 19 nt, Artificial Sequence
  Description of Artificial Sequence: Synthetic oligonucleotide
  Sense strand starting at position 1459 of SEQ ID NO: 914141
acguacgaggcuuggauau

SEQ ID NO: 981171 - RNA, 19 nt, Artificial Sequence
  Description of Artificial Sequence: Synthetic oligonucleotide
  Antisense strand to SEQ ID NO: 981170
auauccaagccucguacgu

SEQ ID NO: 981172 - RNA, 19 nt, Artificial Sequence
  Description of Artificial Sequence: Synthetic oligonucleotide
  Sense strand starting at position 1268 of SEQ ID NO: 914141
ugucccaagucauauuuau

SEQ ID NO: 981173 - RNA, 19 nt, Artificial Sequence
  Description of Artificial Sequence: Synthetic oligonucleotide
  Antisense strand to SEQ ID NO: 981172
auaaauaugacuugggaca

SEQ ID NO: 981174 - RNA, 19 nt, Artificial Sequence
  Description of Artificial Sequence: Synthetic oligonucleotide
  Sense strand starting at position 2566 of SEQ ID NO: 914141
cgaaccuucuggucucagu

SEQ ID NO: 981175 - RNA, 19 nt, Artificial Sequence
  Description of Artificial Sequence: Synthetic oligonucleotide
  Antisense strand to SEQ ID NO: 981174
acugagaccagaagguucg

SEQ ID NO: 981176 - RNA, 19 nt, Artificial Sequence
  Description of Artificial Sequence: Synthetic oligonucleotide
  Sense strand starting at position 908 of SEQ ID NO: 914141
uagagucagucugaacaua

SEQ ID NO: 981177 - RNA, 19 nt, Artificial Sequence
  Description of Artificial Sequence: Synthetic oligonucleotide
  Antisense strand to SEQ ID NO: 981176
uauguucagacugacucua

SEQ ID NO: 981178 - RNA, 19 nt, Artificial Sequence
  Description of Artificial Sequence: Synthetic oligonucleotide
  Sense strand starting at position 1669 of SEQ ID NO: 914141
cgcgcaacuuuaguguaaa

SEQ ID NO: 981179 - RNA, 19 nt, Artificial Sequence
  Description of Artificial Sequence: Synthetic oligonucleotide
  Antisense strand to SEQ ID NO: 981178
uuuacacuaaaguugcgcg

SEQ ID NO: 981180 - RNA, 19 nt, Artificial Sequence
  Description of Artificial Sequence: Synthetic oligonucleotide
  Sense strand starting at position 1461 of SEQ ID NO: 914141
guacgaggcuuggauauaa

SEQ ID NO: 981181 - RNA, 19 nt, Artificial Sequence
  Description of Artificial Sequence: Synthetic oligonucleotide
  Antisense strand to SEQ ID NO: 981180
uuauauccaagccucguac

SEQ ID NO: 981182 - RNA, 19 nt, Artificial Sequence
  Description of Artificial Sequence: Synthetic oligonucleotide
  Sense strand starting at position 1414 of SEQ ID NO: 914141
gggcucuacucuuaagggu

SEQ ID NO: 981183 - RNA, 19 nt, Artificial Sequence
  Description of Artificial Sequence: Synthetic oligonucleotide
  Antisense strand to SEQ ID NO: 981182
acccuuaagaguagagccc

SEQ ID NO: 981184 - RNA, 19 nt, Artificial Sequence
  Description of Artificial Sequence: Synthetic oligonucleotide
  Sense strand starting at position 3920 of SEQ ID NO: 914141
gggaguucguggcauaaac

SEQ ID NO: 981185 - RNA, 19 nt, Artificial Sequence
  Description of Artificial Sequence: Synthetic oligonucleotide
  Antisense strand to SEQ ID NO: 981184
guuuaugccacgaacuccc

SEQ ID NO: 981186 - RNA, 19 nt, Artificial Sequence
  Description of Artificial Sequence: Synthetic oligonucleotide
  Sense strand starting at position 2950 of SEQ ID NO: 914141
gguauacaguguugaacga

SEQ ID NO: 981187 - RNA, 19 nt, Artificial Sequence
  Description of Artificial Sequence: Synthetic oligonucleotide
  Antisense strand to SEQ ID NO: 981186
ucguucaacacuguauacc

SEQ ID NO: 981188 - RNA, 19 nt, Artificial Sequence
  Description of Artificial Sequence: Synthetic oligonucleotide
  Sense strand starting at position 2922 of SEQ ID NO: 914141
aguuuaagcuggcauugua

SEQ ID NO: 981189 - RNA, 19 nt, Artificial Sequence
  Description of Artificial Sequence: Synthetic oligonucleotide
  Antisense strand to SEQ ID NO: 981188
uacaaugccagcuuaaacu

SEQ ID NO: 981190 - RNA, 19 nt, Artificial Sequence
  Description of Artificial Sequence: Synthetic oligonucleotide
  Sense strand starting at position 1670 of SEQ ID NO: 914141
gcgcaacuuuaguguaaac

SEQ ID NO: 981191 - RNA, 19 nt, Artificial Sequence
  Description of Artificial Sequence: Synthetic oligonucleotide
  Antisense strand to SEQ ID NO: 981190
guuuacacuaaaguugcgc

SEQ ID NO: 981192 - RNA, 19 nt, Artificial Sequence
  Description of Artificial Sequence: Synthetic oligonucleotide
  Sense strand starting at position 1041 of SEQ ID NO: 914142
gcuauucgagucuugcuca

SEQ ID NO: 981193 - RNA, 19 nt, Artificial Sequence
  Description of Artificial Sequence: Synthetic oligonucleotide
  Antisense strand to SEQ ID NO: 981192
ugagcaagacucgaauagc

SEQ ID NO: 981194 - RNA, 19 nt, Artificial Sequence
  Description of Artificial Sequence: Synthetic oligonucleotide
  Sense strand starting at position 3827 of SEQ ID NO: 914142
gacagugguguugaagaau

SEQ ID NO: 981195 - RNA, 19 nt, Artificial Sequence
  Description of Artificial Sequence: Synthetic oligonucleotide
  Antisense strand to SEQ ID NO: 981194
auucuucaacaccacuguc

SEQ ID NO: 981196 - RNA, 19 nt, Artificial Sequence
  Description of Artificial Sequence: Synthetic oligonucleotide
  Sense strand starting at position 105 of SEQ ID NO: 914142
ccaguuguccaggaaccaa

SEQ ID NO: 981197 - RNA, 19 nt, Artificial Sequence
  Description of Artificial Sequence: Synthetic oligonucleotide
  Antisense strand to SEQ ID NO: 981196
uugguuccuggacaacugg

SEQ ID NO: 981198 - RNA, 19 nt, Artificial Sequence
  Description of Artificial Sequence: Synthetic oligonucleotide
  Sense strand starting at position 2750 of SEQ ID NO: 914142
caccguuaacuugauggaa

SEQ ID NO: 981199 - RNA, 19 nt, Artificial Sequence
  Description of Artificial Sequence: Synthetic oligonucleotide
  Antisense strand to SEQ ID NO: 981198
uuccaucaaguuaacggug

SEQ ID NO: 981200 - RNA, 19 nt, Artificial Sequence
  Description of Artificial Sequence: Synthetic oligonucleotide
  Sense strand starting at position 3532 of SEQ ID NO: 914142
acgccauagcucucugcau

SEQ ID NO: 981201 - RNA, 19 nt, Artificial Sequence
  Description of Artificial Sequence: Synthetic oligonucleotide
  Antisense strand to SEQ ID NO: 981200
augcagagagcuauggcgu

SEQ ID NO: 981202 - RNA, 19 nt, Artificial Sequence
  Description of Artificial Sequence: Synthetic oligonucleotide
  Sense strand starting at position 220 of SEQ ID NO: 914142
agacuaguuugaucucaaa

SEQ ID NO: 981203 - RNA, 19 nt, Artificial Sequence
  Description of Artificial Sequence: Synthetic oligonucleotide
  Antisense strand to SEQ ID NO: 981202
uuugagaucaaacuagucu

SEQ ID NO: 981204 - RNA, 19 nt, Artificial Sequence
  Description of Artificial Sequence: Synthetic oligonucleotide
  Sense strand starting at position 176 of SEQ ID NO: 914142
agauauucugcaggaaacu

SEQ ID NO: 981205 - RNA, 19 nt, Artificial Sequence
  Description of Artificial Sequence: Synthetic oligonucleotide
  Antisense strand to SEQ ID NO: 981204
aguuuccugcagaauaucu

SEQ ID NO: 981206 - RNA, 19 nt, Artificial Sequence
  Description of Artificial Sequence: Synthetic oligonucleotide
  Sense strand starting at position 2753 of SEQ ID NO: 914142
cguuaacuugauggaauaa

SEQ ID NO: 981207 - RNA, 19 nt, Artificial Sequence
  Description of Artificial Sequence: Synthetic oligonucleotide
  Antisense strand to SEQ ID NO: 981206
uuauuccaucaaguuaacg

SEQ ID NO: 981208 - RNA, 19 nt, Artificial Sequence
  Description of Artificial Sequence: Synthetic oligonucleotide
  Sense strand starting at position 1039 of SEQ ID NO: 914142
cggcuauucgagucuugcu

SEQ ID NO: 981209 - RNA, 19 nt, Artificial Sequence
  Description of Artificial Sequence: Synthetic oligonucleotide
  Antisense strand to SEQ ID NO: 981208
agcaagacucgaauagccg

SEQ ID NO: 981210 - RNA, 19 nt, Artificial Sequence
  Description of Artificial Sequence: Synthetic oligonucleotide
  Sense strand starting at position 345 of SEQ ID NO: 914142
agccacugcagugauagaa

SEQ ID NO: 981211 - RNA, 19 nt, Artificial Sequence
  Description of Artificial Sequence: Synthetic oligonucleotide
  Antisense strand to SEQ ID NO: 981210
uucuaucacugcaguggcu

SEQ ID NO: 981212 - RNA, 19 nt, Artificial Sequence
  Description of Artificial Sequence: Synthetic oligonucleotide
  Sense strand starting at position 173 of SEQ ID NO: 914142
gguagauauucugcaggaa

SEQ ID NO: 981213 - RNA, 19 nt, Artificial Sequence
  Description of Artificial Sequence: Synthetic oligonucleotide
  Antisense strand to SEQ ID NO: 981212
uuccugcagaauaucuacc

SEQ ID NO: 981214 - RNA, 19 nt, Artificial Sequence
  Description of Artificial Sequence: Synthetic oligonucleotide
  Sense strand starting at position 215 of SEQ ID NO: 914142
ccucaagacuaguuugauc

SEQ ID NO: 981215 - RNA, 19 nt, Artificial Sequence
  Description of Artificial Sequence: Synthetic oligonucleotide
  Antisense strand to SEQ ID NO: 981214
gaucaaacuagucuugagg

SEQ ID NO: 981216 - RNA, 19 nt, Artificial Sequence
  Description of Artificial Sequence: Synthetic oligonucleotide
  Sense strand starting at position 3495 of SEQ ID NO: 914142
gcaugcauuucugccugaa

SEQ ID NO: 981217 - RNA, 19 nt, Artificial Sequence
  Description of Artificial Sequence: Synthetic oligonucleotide
  Antisense strand to SEQ ID NO: 981216
uucaggcagaaaugcaugc

SEQ ID NO: 981218 - RNA, 19 nt, Artificial Sequence
  Description of Artificial Sequence: Synthetic oligonucleotide
  Sense strand starting at position 2434 of SEQ ID NO: 914142
cuucuuugcagggaugagu

SEQ ID NO: 981219 - RNA, 19 nt, Artificial Sequence
  Description of Artificial Sequence: Synthetic oligonucleotide
  Antisense strand to SEQ ID NO: 981218
acucaucccugcaaagaag

SEQ ID NO: 981220 - RNA, 19 nt, Artificial Sequence
  Description of Artificial Sequence: Synthetic oligonucleotide
  Sense strand starting at position 3498 of SEQ ID NO: 914142
ugcauuucugccugaaagc

SEQ ID NO: 981221 - RNA, 19 nt, Artificial Sequence
  Description of Artificial Sequence: Synthetic oligonucleotide
  Antisense strand to SEQ ID NO: 981220
gcuuucaggcagaaaugca

SEQ ID NO: 981222 - RNA, 19 nt, Artificial Sequence
  Description of Artificial Sequence: Synthetic oligonucleotide
  Sense strand starting at position 445 of SEQ ID NO: 914142
gccaccaauuuagagauga

SEQ ID NO: 981223 - RNA, 19 nt, Artificial Sequence
  Description of Artificial Sequence: Synthetic oligonucleotide
  Antisense strand to SEQ ID NO: 981222
ucaucucuaaauugguggc

SEQ ID NO: 981224 - RNA, 19 nt, Artificial Sequence
  Description of Artificial Sequence: Synthetic oligonucleotide
  Sense strand starting at position 185 of SEQ ID NO: 914142
gcaggaaacuucccuuacu

SEQ ID NO: 981225 - RNA, 19 nt, Artificial Sequence
  Description of Artificial Sequence: Synthetic oligonucleotide
  Antisense strand to SEQ ID NO: 981224
aguaagggaaguuuccugc

SEQ ID NO: 981226 - RNA, 19 nt, Artificial Sequence
  Description of Artificial Sequence: Synthetic oligonucleotide
  Sense strand starting at position 3669 of SEQ ID NO: 914142
cuggcuuccuuauuagaag

SEQ ID NO: 981227 - RNA, 19 nt, Artificial Sequence
  Description of Artificial Sequence: Synthetic oligonucleotide
  Antisense strand to SEQ ID NO: 981226
cuucuaauaaggaagccag

SEQ ID NO: 981228 - RNA, 19 nt, Artificial Sequence
  Description of Artificial Sequence: Synthetic oligonucleotide
  Sense strand starting at position 2999 of SEQ ID NO: 914142
aaauguguauguguagaaa

SEQ ID NO: 981229 - RNA, 19 nt, Artificial Sequence
  Description of Artificial Sequence: Synthetic oligonucleotide
  Antisense strand to SEQ ID NO: 981228
uuucuacacauacacauuu

SEQ ID NO: 981230 - RNA, 19 nt, Artificial Sequence
  Description of Artificial Sequence: Synthetic oligonucleotide
  Sense strand starting at position 104 of SEQ ID NO: 914142
uccaguuguccaggaacca

SEQ ID NO: 981231 - RNA, 19 nt, Artificial Sequence
  Description of Artificial Sequence: Synthetic oligonucleotide
  Antisense strand to SEQ ID NO: 981230
ugguuccuggacaacugga

SEQ ID NO: 981232 - RNA, 19 nt, Artificial Sequence
  Description of Artificial Sequence: Synthetic oligonucleotide
  Sense strand starting at position 420 of SEQ ID NO: 914142
ucaccugaguccuccuaua

SEQ ID NO: 981233 - RNA, 19 nt, Artificial Sequence
  Description of Artificial Sequence: Synthetic oligonucleotide
  Antisense strand to SEQ ID NO: 981232
uauaggaggacucagguga

SEQ ID NO: 981234 - RNA, 19 nt, Artificial Sequence
  Description of Artificial Sequence: Synthetic oligonucleotide
  Sense strand starting at position 3022 of SEQ ID NO: 914142
uugcaucaugcccaguaga

SEQ ID NO: 981235 - RNA, 19 nt, Artificial Sequence
  Description of Artificial Sequence: Synthetic oligonucleotide
  Antisense strand to SEQ ID NO: 981234
ucuacugggcaugaugcaa

SEQ ID NO: 981236 - RNA, 19 nt, Artificial Sequence
  Description of Artificial Sequence: Synthetic oligonucleotide
  Sense strand starting at position 2997 of SEQ ID NO: 914142
acaaauguguauguguaga

SEQ ID NO: 981237 - RNA, 19 nt, Artificial Sequence
  Description of Artificial Sequence: Synthetic oligonucleotide
  Antisense strand to SEQ ID NO: 981236
ucuacacauacacauuugu

SEQ ID NO: 981238 - RNA, 19 nt, Artificial Sequence
  Description of Artificial Sequence: Synthetic oligonucleotide
  Sense strand starting at position 2775 of SEQ ID NO: 914142
ugaccaauuucugaagucu

SEQ ID NO: 981239 - RNA, 19 nt, Artificial Sequence
  Description of Artificial Sequence: Synthetic oligonucleotide
  Antisense strand to SEQ ID NO: 981238
agacuucagaaauugguca

SEQ ID NO: 981240 - RNA, 19 nt, Artificial Sequence
  Description of Artificial Sequence: Synthetic oligonucleotide
  Sense strand starting at position 344 of SEQ ID NO: 914142
gagccacugcagugauaga

SEQ ID NO: 981241 - RNA, 19 nt, Artificial Sequence
  Description of Artificial Sequence: Synthetic oligonucleotide
  Antisense strand to SEQ ID NO: 981240
ucuaucacugcaguggcuc

SEQ ID NO: 981242 - RNA, 19 nt, Artificial Sequence
  Description of Artificial Sequence: Synthetic oligonucleotide
  Sense strand starting at position 2449 of SEQ ID NO: 914142
gagugaaugucucucaggu

SEQ ID NO: 981243 - RNA, 19 nt, Artificial Sequence
  Description of Artificial Sequence: Synthetic oligonucleotide
  Antisense strand to SEQ ID NO: 981242
accugagagacauucacuc

SEQ ID NO: 981244 - RNA, 19 nt, Artificial Sequence
  Description of Artificial Sequence: Synthetic oligonucleotide
  Sense strand starting at position 949 of SEQ ID NO: 914142
ccgcuuccuggagggauua

SEQ ID NO: 981245 - RNA, 19 nt, Artificial Sequence
  Description of Artificial Sequence: Synthetic oligonucleotide
  Antisense strand to SEQ ID NO: 981244
uaaucccuccaggaagcgg

SEQ ID NO: 981246 - RNA, 19 nt, Artificial Sequence
  Description of Artificial Sequence: Synthetic oligonucleotide
  Sense strand starting at position 29 of SEQ ID NO: 914142
ucucccuggccuugaauua

SEQ ID NO: 981247 - RNA, 19 nt, Artificial Sequence
  Description of Artificial Sequence: Synthetic oligonucleotide
  Antisense strand to SEQ ID NO: 981246
uaauucaaggccagggaga

SEQ ID NO: 981248 - RNA, 19 nt, Artificial Sequence
  Description of Artificial Sequence: Synthetic oligonucleotide
  Sense strand starting at position 2433 of SEQ ID NO: 914142
gcuucuuugcagggaugag

SEQ ID NO: 981249 - RNA, 19 nt, Artificial Sequence
  Description of Artificial Sequence: Synthetic oligonucleotide
  Antisense strand to SEQ ID NO: 981248
cucaucccugcaaagaagc

SEQ ID NO: 981250 - RNA, 19 nt, Artificial Sequence
  Description of Artificial Sequence: Synthetic oligonucleotide
  Sense strand starting at position 1142 of SEQ ID NO: 914142
gaaacuuugcgcgaaacuu

SEQ ID NO: 981251 - RNA, 19 nt, Artificial Sequence
  Description of Artificial Sequence: Synthetic oligonucleotide
  Antisense strand to SEQ ID NO: 981250
aaguuucgcgcaaaguuuc

SEQ ID NO: 981252 - RNA, 19 nt, Artificial Sequence
  Description of Artificial Sequence: Synthetic oligonucleotide
  Sense strand starting at position 1428 of SEQ ID NO: 914142
aagcaauuccucggaggca

SEQ ID NO: 981253 - RNA, 19 nt, Artificial Sequence
  Description of Artificial Sequence: Synthetic oligonucleotide
  Antisense strand to SEQ ID NO: 981252
ugccuccgaggaauugcuu

SEQ ID NO: 981254 - RNA, 19 nt, Artificial Sequence
  Description of Artificial Sequence: Synthetic oligonucleotide
  Sense strand starting at position 1338 of SEQ ID NO: 914142
ucugauucgcuuugggaac

SEQ ID NO: 981255 - RNA, 19 nt, Artificial Sequence
  Description of Artificial Sequence: Synthetic oligonucleotide
  Antisense strand to SEQ ID NO: 981254
guucccaaagcgaaucaga

SEQ ID NO: 981256 - RNA, 19 nt, Artificial Sequence
  Description of Artificial Sequence: Synthetic oligonucleotide
  Sense strand starting at position 910 of SEQ ID NO: 914142
gcggcgauugcgcccgaaa

SEQ ID NO: 981257 - RNA, 19 nt, Artificial Sequence
  Description of Artificial Sequence: Synthetic oligonucleotide
  Antisense strand to SEQ ID NO: 981256
uuucgggcgcaaucgccgc

SEQ ID NO: 981258 - RNA, 19 nt, Artificial Sequence
  Description of Artificial Sequence: Synthetic oligonucleotide
  Sense strand starting at position 2432 of SEQ ID NO: 914142
ugcuucuuugcagggauga

SEQ ID NO: 981259 - RNA, 19 nt, Artificial Sequence
  Description of Artificial Sequence: Synthetic oligonucleotide
  Antisense strand to SEQ ID NO: 981258
ucaucccugcaaagaagca

SEQ ID NO: 981260 - RNA, 19 nt, Artificial Sequence
  Description of Artificial Sequence: Synthetic oligonucleotide
  Sense strand starting at position 1031 of SEQ ID NO: 914142
gaaguuuccggcuauucga

SEQ ID NO: 981261 - RNA, 19 nt, Artificial Sequence
  Description of Artificial Sequence: Synthetic oligonucleotide
  Antisense strand to SEQ ID NO: 981260
ucgaauagccggaaacuuc

SEQ ID NO: 981262 - RNA, 19 nt, Artificial Sequence
  Description of Artificial Sequence: Synthetic oligonucleotide
  Sense strand starting at position 2255 of SEQ ID NO: 914142
cgagaaugcugcuccugaa

SEQ ID NO: 981263 - RNA, 19 nt, Artificial Sequence
  Description of Artificial Sequence: Synthetic oligonucleotide
  Antisense strand to SEQ ID NO: 981262
uucaggagcagcauucucg

SEQ ID NO: 981264 - RNA, 19 nt, Artificial Sequence
  Description of Artificial Sequence: Synthetic oligonucleotide
  Sense strand starting at position 1140 of SEQ ID NO: 914142
gggaaacuuugcgcgaaac

SEQ ID NO: 981265 - RNA, 19 nt, Artificial Sequence
  Description of Artificial Sequence: Synthetic oligonucleotide
  Antisense strand to SEQ ID NO: 981264
guuucgcgcaaaguuuccc

SEQ ID NO: 981266 - RNA, 19 nt, Artificial Sequence
  Description of Artificial Sequence: Synthetic oligonucleotide
  Sense strand starting at position 480 of SEQ ID NO: 914142
agagguuuccagggcguga

SEQ ID NO: 981267 - RNA, 19 nt, Artificial Sequence
  Description of Artificial Sequence: Synthetic oligonucleotide
  Antisense strand to SEQ ID NO: 981266
ucacgcccuggaaaccucu

SEQ ID NO: 981268 - RNA, 19 nt, Artificial Sequence
  Description of Artificial Sequence: Synthetic oligonucleotide
  Sense strand starting at position 3893 of SEQ ID NO: 914142
uugcuacuuuggcuaucaa

SEQ ID NO: 981269 - RNA, 19 nt, Artificial Sequence
  Description of Artificial Sequence: Synthetic oligonucleotide
  Antisense strand to SEQ ID NO: 981268
uugauagccaaaguagcaa

SEQ ID NO: 981270 - RNA, 19 nt, Artificial Sequence
  Description of Artificial Sequence: Synthetic oligonucleotide
  Sense strand starting at position 2929 of SEQ ID NO: 914142
guauuauuacugugaggcu

SEQ ID NO: 981271 - RNA, 19 nt, Artificial Sequence
  Description of Artificial Sequence: Synthetic oligonucleotide
  Antisense strand to SEQ ID NO: 981270
agccucacaguaauaauac

SEQ ID NO: 981272 - RNA, 19 nt, Artificial Sequence
  Description of Artificial Sequence: Synthetic oligonucleotide
  Sense strand starting at position 3706 of SEQ ID NO: 914143
augauugguguggaucaau

SEQ ID NO: 981273 - RNA, 19 nt, Artificial Sequence
  Description of Artificial Sequence: Synthetic oligonucleotide
  Antisense strand to SEQ ID NO: 981272
auugauccacaccaaucau

SEQ ID NO: 981274 - RNA, 19 nt, Artificial Sequence
  Description of Artificial Sequence: Synthetic oligonucleotide
  Sense strand starting at position 3709 of SEQ ID NO: 914143
auugguguggaucaauaug

SEQ ID NO: 981275 - RNA, 19 nt, Artificial Sequence
  Description of Artificial Sequence: Synthetic oligonucleotide
  Antisense strand to SEQ ID NO: 981274
cauauugauccacaccaau

SEQ ID NO: 981276 - RNA, 19 nt, Artificial Sequence
  Description of Artificial Sequence: Synthetic oligonucleotide
  Sense strand starting at position 887 of SEQ ID NO: 914143
gaaggugguccugaaucua

SEQ ID NO: 981277 - RNA, 19 nt, Artificial Sequence
  Description of Artificial Sequence: Synthetic oligonucleotide
  Antisense strand to SEQ ID NO: 981276
uagauucaggaccaccuuc

SEQ ID NO: 981278 - RNA, 19 nt, Artificial Sequence
  Description of Artificial Sequence: Synthetic oligonucleotide
  Sense strand starting at position 3409 of SEQ ID NO: 914143
gucaucuugggugaauaac

SEQ ID NO: 981279 - RNA, 19 nt, Artificial Sequence
  Description of Artificial Sequence: Synthetic oligonucleotide
  Antisense strand to SEQ ID NO: 981278
guuauucacccaagaugac

SEQ ID NO: 981280 - RNA, 19 nt, Artificial Sequence
  Description of Artificial Sequence: Synthetic oligonucleotide
  Sense strand starting at position 1029 of SEQ ID NO: 914143
ggcgagucugcguuauaga

SEQ ID NO: 981281 - RNA, 19 nt, Artificial Sequence
  Description of Artificial Sequence: Synthetic oligonucleotide
  Antisense strand to SEQ ID NO: 981280
ucuauaacgcagacucgcc

SEQ ID NO: 981282 - RNA, 19 nt, Artificial Sequence
  Description of Artificial Sequence: Synthetic oligonucleotide
  Sense strand starting at position 3367 of SEQ ID NO: 914143
cuguucucuccugaagaau

SEQ ID NO: 981283 - RNA, 19 nt, Artificial Sequence
  Description of Artificial Sequence: Synthetic oligonucleotide
  Antisense strand to SEQ ID NO: 981282
auucuucaggagagaacag

SEQ ID NO: 981284 - RNA, 19 nt, Artificial Sequence
  Description of Artificial Sequence: Synthetic oligonucleotide
  Sense strand starting at position 2446 of SEQ ID NO: 914143
gucacucaaccaggagauu

SEQ ID NO: 981285 - RNA, 19 nt, Artificial Sequence
  Description of Artificial Sequence: Synthetic oligonucleotide
  Antisense strand to SEQ ID NO: 981284
aaucuccugguugagugac

SEQ ID NO: 981286 - RNA, 19 nt, Artificial Sequence
  Description of Artificial Sequence: Synthetic oligonucleotide
  Sense strand starting at position 3643 of SEQ ID NO: 914143
auccuucgagaugaguauu

SEQ ID NO: 981287 - RNA, 19 nt, Artificial Sequence
  Description of Artificial Sequence: Synthetic oligonucleotide
  Antisense strand to SEQ ID NO: 981286
aauacucaucucgaaggau

SEQ ID NO: 981288 - RNA, 19 nt, Artificial Sequence
  Description of Artificial Sequence: Synthetic oligonucleotide
  Sense strand starting at position 3640 of SEQ ID NO: 914143
ccaauccuucgagaugagu

SEQ ID NO: 981289 - RNA, 19 nt, Artificial Sequence
  Description of Artificial Sequence: Synthetic oligonucleotide
  Antisense strand to SEQ ID NO: 981288
acucaucucgaaggauugg

SEQ ID NO: 981290 - RNA, 19 nt, Artificial Sequence
  Description of Artificial Sequence: Synthetic oligonucleotide
  Sense strand starting at position 2134 of SEQ ID NO: 914143
gccagaagccgagacagau

SEQ ID NO: 981291 - RNA, 19 nt, Artificial Sequence
  Description of Artificial Sequence: Synthetic oligonucleotide
  Antisense strand to SEQ ID NO: 981290
aucugucucggcuucuggc

SEQ ID NO: 981292 - RNA, 19 nt, Artificial Sequence
  Description of Artificial Sequence: Synthetic oligonucleotide
  Sense strand starting at position 3329 of SEQ ID NO: 914143
agagaucuucuuggaggca

SEQ ID NO: 981293 - RNA, 19 nt, Artificial Sequence
  Description of Artificial Sequence: Synthetic oligonucleotide
  Antisense strand to SEQ ID NO: 981292
ugccuccaagaagaucucu

SEQ ID NO: 981294 - RNA, 19 nt, Artificial Sequence
  Description of Artificial Sequence: Synthetic oligonucleotide
  Sense strand starting at position 2034 of SEQ ID NO: 914143
gagagcuucgcgguuucga

SEQ ID NO: 981295 - RNA, 19 nt, Artificial Sequence
  Description of Artificial Sequence: Synthetic oligonucleotide
  Antisense strand to SEQ ID NO: 981294
ucgaaaccgcgaagcucuc

SEQ ID NO: 981296 - RNA, 19 nt, Artificial Sequence
  Description of Artificial Sequence: Synthetic oligonucleotide
  Sense strand starting at position 3754 of SEQ ID NO: 914143
uggguuagccuggaaaccu

SEQ ID NO: 981297 - RNA, 19 nt, Artificial Sequence
  Description of Artificial Sequence: Synthetic oligonucleotide
  Antisense strand to SEQ ID NO: 981296
agguuuccaggcuaaccca

SEQ ID NO: 981298 - RNA, 19 nt, Artificial Sequence
  Description of Artificial Sequence: Synthetic oligonucleotide
  Sense strand starting at position 3637 of SEQ ID NO: 914143
acaccaauccuucgagaug

SEQ ID NO: 981299 - RNA, 19 nt, Artificial Sequence
  Description of Artificial Sequence: Synthetic oligonucleotide
  Antisense strand to SEQ ID NO: 981298
caucucgaaggauuggugu

SEQ ID NO: 981300 - RNA, 19 nt, Artificial Sequence
  Description of Artificial Sequence: Synthetic oligonucleotide
  Sense strand starting at position 2187 of SEQ ID NO: 914143
cucggaguaguucaugaag

SEQ ID NO: 981301 - RNA, 19 nt, Artificial Sequence
  Description of Artificial Sequence: Synthetic oligonucleotide
  Antisense strand to SEQ ID NO: 981300
cuucaugaacuacuccgag

SEQ ID NO: 981302 - RNA, 19 nt, Artificial Sequence
  Description of Artificial Sequence: Synthetic oligonucleotide
  Sense strand starting at position 858 of SEQ ID NO: 914143
cuaagauucccaggccaag

SEQ ID NO: 981303 - RNA, 19 nt, Artificial Sequence
  Description of Artificial Sequence: Synthetic oligonucleotide
  Antisense strand to SEQ ID NO: 981302
cuuggccugggaaucuuag

SEQ ID NO: 981304 - RNA, 19 nt, Artificial Sequence
  Description of Artificial Sequence: Synthetic oligonucleotide
  Sense strand starting at position 3131 of SEQ ID NO: 914143
gaagccaagcuuugggaaa

SEQ ID NO: 981305 - RNA, 19 nt, Artificial Sequence
  Description of Artificial Sequence: Synthetic oligonucleotide
  Antisense strand to SEQ ID NO: 981304
uuucccaaagcuuggcuuc

SEQ ID NO: 981306 - RNA, 19 nt, Artificial Sequence
  Description of Artificial Sequence: Synthetic oligonucleotide
  Sense strand starting at position 3651 of SEQ ID NO: 914143
agaugaguauucucccuau

SEQ ID NO: 981307 - RNA, 19 nt, Artificial Sequence
  Description of Artificial Sequence: Synthetic oligonucleotide
  Antisense strand to SEQ ID NO: 981306
auagggagaauacucaucu

SEQ ID NO: 981308 - RNA, 19 nt, Artificial Sequence
  Description of Artificial Sequence: Synthetic oligonucleotide
  Sense strand starting at position 267 of SEQ ID NO: 914143
gaaggaucguggucuagga

SEQ ID NO: 981309 - RNA, 19 nt, Artificial Sequence
  Description of Artificial Sequence: Synthetic oligonucleotide
  Antisense strand to SEQ ID NO: 981308
uccuagaccacgauccuuc

SEQ ID NO: 981310 - RNA, 19 nt, Artificial Sequence
  Description of Artificial Sequence: Synthetic oligonucleotide
  Sense strand starting at position 3405 of SEQ ID NO: 914143
uauggucaucuugggugaa

SEQ ID NO: 981311 - RNA, 19 nt, Artificial Sequence
  Description of Artificial Sequence: Synthetic oligonucleotide
  Antisense strand to SEQ ID NO: 981310
uucacccaagaugaccaua

SEQ ID NO: 981312 - RNA, 19 nt, Artificial Sequence
  Description of Artificial Sequence: Synthetic oligonucleotide
  Sense strand starting at position 3704 of SEQ ID NO: 914143
cuaugauugguguggauca

SEQ ID NO: 981313 - RNA, 19 nt, Artificial Sequence
  Description of Artificial Sequence: Synthetic oligonucleotide
  Antisense strand to SEQ ID NO: 981312
ugauccacaccaaucauag

SEQ ID NO: 981314 - RNA, 19 nt, Artificial Sequence
  Description of Artificial Sequence: Synthetic oligonucleotide
  Sense strand starting at position 827 of SEQ ID NO: 914143
ggaagaaacuguucacguu

SEQ ID NO: 981315 - RNA, 19 nt, Artificial Sequence
  Description of Artificial Sequence: Synthetic oligonucleotide
  Antisense strand to SEQ ID NO: 981314
aacgugaacaguuucuucc

SEQ ID NO: 981316 - RNA, 19 nt, Artificial Sequence
  Description of Artificial Sequence: Synthetic oligonucleotide
  Sense strand starting at position 2805 of SEQ ID NO: 914143
uccuacaguguuugaauga

SEQ ID NO: 981317 - RNA, 19 nt, Artificial Sequence
  Description of Artificial Sequence: Synthetic oligonucleotide
  Antisense strand to SEQ ID NO: 981316
ucauucaaacacuguagga

SEQ ID NO: 981318 - RNA, 19 nt, Artificial Sequence
  Description of Artificial Sequence: Synthetic oligonucleotide
  Sense strand starting at position 2798 of SEQ ID NO: 914143
aggcaauuccuacaguguu

SEQ ID NO: 981319 - RNA, 19 nt, Artificial Sequence
  Description of Artificial Sequence: Synthetic oligonucleotide
  Antisense strand to SEQ ID NO: 981318
aacacuguaggaauugccu

SEQ ID NO: 981320 - RNA, 19 nt, Artificial Sequence
  Description of Artificial Sequence: Synthetic oligonucleotide
  Sense strand starting at position 2389 of SEQ ID NO: 914143
aagggaugucucugcccaa

SEQ ID NO: 981321 - RNA, 19 nt, Artificial Sequence
  Description of Artificial Sequence: Synthetic oligonucleotide
  Antisense strand to SEQ ID NO: 981320
uugggcagagacaucccuu

SEQ ID NO: 981322 - RNA, 19 nt, Artificial Sequence
  Description of Artificial Sequence: Synthetic oligonucleotide
  Sense strand starting at position 2372 of SEQ ID NO: 914143
ccacaaggcgucugaggaa

SEQ ID NO: 981323 - RNA, 19 nt, Artificial Sequence
  Description of Artificial Sequence: Synthetic oligonucleotide
  Antisense strand to SEQ ID NO: 981322
uuccucagacgccuugugg

SEQ ID NO: 981324 - RNA, 19 nt, Artificial Sequence
  Description of Artificial Sequence: Synthetic oligonucleotide
  Sense strand starting at position 3461 of SEQ ID NO: 914143
ugaguacuguacucacuau

SEQ ID NO: 981325 - RNA, 19 nt, Artificial Sequence
  Description of Artificial Sequence: Synthetic oligonucleotide
  Antisense strand to SEQ ID NO: 981324
auagugaguacaguacuca

SEQ ID NO: 981326 - RNA, 19 nt, Artificial Sequence
  Description of Artificial Sequence: Synthetic oligonucleotide
  Sense strand starting at position 724 of SEQ ID NO: 914143
cgcgaagugcaugugugua

SEQ ID NO: 981327 - RNA, 19 nt, Artificial Sequence
  Description of Artificial Sequence: Synthetic oligonucleotide
  Antisense strand to SEQ ID NO: 981326
uacacacaugcacuucgcg

SEQ ID NO: 981328 - RNA, 19 nt, Artificial Sequence
  Description of Artificial Sequence: Synthetic oligonucleotide
  Sense strand starting at position 2804 of SEQ ID NO: 914143
uuccuacaguguuugaaug

SEQ ID NO: 981329 - RNA, 19 nt, Artificial Sequence
  Description of Artificial Sequence: Synthetic oligonucleotide
  Antisense strand to SEQ ID NO: 981328
cauucaaacacuguaggaa

SEQ ID NO: 981330 - RNA, 19 nt, Artificial Sequence
  Description of Artificial Sequence: Synthetic oligonucleotide
  Sense strand starting at position 504 of SEQ ID NO: 914143
guucgugcccaagauaaca

SEQ ID NO: 981331 - RNA, 19 nt, Artificial Sequence
  Description of Artificial Sequence: Synthetic oligonucleotide
  Antisense strand to SEQ ID NO: 981330
uguuaucuugggcacgaac

SEQ ID NO: 981332 - RNA, 19 nt, Artificial Sequence
  Description of Artificial Sequence: Synthetic oligonucleotide
  Sense strand starting at position 448 of SEQ ID NO: 914143
acccaaugucccgggagua

SEQ ID NO: 981333 - RNA, 19 nt, Artificial Sequence
  Description of Artificial Sequence: Synthetic oligonucleotide
  Antisense strand to SEQ ID NO: 981332
uacucccgggacauugggu

SEQ ID NO: 981334 - RNA, 19 nt, Artificial Sequence
  Description of Artificial Sequence: Synthetic oligonucleotide
  Sense strand starting at position 2720 of SEQ ID NO: 914143
gugcccaugccucaacaua

SEQ ID NO: 981335 - RNA, 19 nt, Artificial Sequence
  Description of Artificial Sequence: Synthetic oligonucleotide
  Antisense strand to SEQ ID NO: 981334
uauguugaggcaugggcac

SEQ ID NO: 981336 - RNA, 19 nt, Artificial Sequence
  Description of Artificial Sequence: Synthetic oligonucleotide
  Sense strand starting at position 223 of SEQ ID NO: 914143
uggcuaaccugggcucaau

SEQ ID NO: 981337 - RNA, 19 nt, Artificial Sequence
  Description of Artificial Sequence: Synthetic oligonucleotide
  Antisense strand to SEQ ID NO: 981336
auugagcccagguuagcca

SEQ ID NO: 981338 - RNA, 19 nt, Artificial Sequence
  Description of Artificial Sequence: Synthetic oligonucleotide
  Sense strand starting at position 501 of SEQ ID NO: 914143
auuguucgugcccaagaua

SEQ ID NO: 981339 - RNA, 19 nt, Artificial Sequence
  Description of Artificial Sequence: Synthetic oligonucleotide
  Antisense strand to SEQ ID NO: 981338
uaucuugggcacgaacaau

SEQ ID NO: 981340 - RNA, 19 nt, Artificial Sequence
  Description of Artificial Sequence: Synthetic oligonucleotide
  Sense strand starting at position 2300 of SEQ ID NO: 914143
ggugaagucaacugucuuc

SEQ ID NO: 981341 - RNA, 19 nt, Artificial Sequence
  Description of Artificial Sequence: Synthetic oligonucleotide
  Antisense strand to SEQ ID NO: 981340
gaagacaguugacuucacc

SEQ ID NO: 981342 - RNA, 19 nt, Artificial Sequence
  Description of Artificial Sequence: Synthetic oligonucleotide
  Sense strand starting at position 101 of SEQ ID NO: 914143
ucucccaaguaguuaugua

SEQ ID NO: 981343 - RNA, 19 nt, Artificial Sequence
  Description of Artificial Sequence: Synthetic oligonucleotide
  Antisense strand to SEQ ID NO: 981342
uacauaacuacuugggaga

SEQ ID NO: 981344 - RNA, 19 nt, Artificial Sequence
  Description of Artificial Sequence: Synthetic oligonucleotide
  Sense strand starting at position 346 of SEQ ID NO: 914143
agaguugagugcccagagu

SEQ ID NO: 981345 - RNA, 19 nt, Artificial Sequence
  Description of Artificial Sequence: Synthetic oligonucleotide
  Antisense strand to SEQ ID NO: 981344
acucugggcacucaacucu

SEQ ID NO: 981346 - RNA, 19 nt, Artificial Sequence
  Description of Artificial Sequence: Synthetic oligonucleotide
  Sense strand starting at position 618 of SEQ ID NO: 914143
gaagccugcucuccggaaa

SEQ ID NO: 981347 - RNA, 19 nt, Artificial Sequence
  Description of Artificial Sequence: Synthetic oligonucleotide
  Antisense strand to SEQ ID NO: 981346
uuuccggagagcaggcuuc

SEQ ID NO: 981348 - RNA, 19 nt, Artificial Sequence
  Description of Artificial Sequence: Synthetic oligonucleotide
  Sense strand starting at position 3867 of SEQ ID NO: 914143
auugguaguuguuuguaaa

SEQ ID NO: 981349 - RNA, 19 nt, Artificial Sequence
  Description of Artificial Sequence: Synthetic oligonucleotide
  Antisense strand to SEQ ID NO: 981348
uuuacaaacaacuaccaau

SEQ ID NO: 981350 - RNA, 19 nt, Artificial Sequence
  Description of Artificial Sequence: Synthetic oligonucleotide
  Sense strand starting at position 1185 of SEQ ID NO: 914143
gccggacucaccugugaac

SEQ ID NO: 981351 - RNA, 19 nt, Artificial Sequence
  Description of Artificial Sequence: Synthetic oligonucleotide
  Antisense strand to SEQ ID NO: 981350
guucacaggugaguccggc

SEQ ID NO: 981352 - RNA, 19 nt, Artificial Sequence
  Description of Artificial Sequence: Synthetic oligonucleotide
  Sense strand starting at position 494 of SEQ ID NO: 914144
ggagaauacucaucucgaa

SEQ ID NO: 981353 - RNA, 19 nt, Artificial Sequence
  Description of Artificial Sequence: Synthetic oligonucleotide
  Antisense strand to SEQ ID NO: 981352
uucgagaugaguauucucc

SEQ ID NO: 981354 - RNA, 19 nt, Artificial Sequence
  Description of Artificial Sequence: Synthetic oligonucleotide
  Sense strand starting at position 3914 of SEQ ID NO: 914144
acaaauugagcccagguua

SEQ ID NO: 981355 - RNA, 19 nt, Artificial Sequence
  Description of Artificial Sequence: Synthetic oligonucleotide
  Antisense strand to SEQ ID NO: 981354
uaaccugggcucaauuugu

SEQ ID NO: 981356 - RNA, 19 nt, Artificial Sequence
  Description of Artificial Sequence: Synthetic oligonucleotide
  Sense strand starting at position 676 of SEQ ID NO: 914144
acacauagugaguacagua

SEQ ID NO: 981357 - RNA, 19 nt, Artificial Sequence
  Description of Artificial Sequence: Synthetic oligonucleotide
  Antisense strand to SEQ ID NO: 981356
uacuguacucacuaugugu

SEQ ID NO: 981358 - RNA, 19 nt, Artificial Sequence
  Description of Artificial Sequence: Synthetic oligonucleotide
  Sense strand starting at position 2151 of SEQ ID NO: 914144
auugaugucccagagucaa

SEQ ID NO: 981359 - RNA, 19 nt, Artificial Sequence
  Description of Artificial Sequence: Synthetic oligonucleotide
  Antisense strand to SEQ ID NO: 981358
uugacucugggacaucaau

SEQ ID NO: 981360 - RNA, 19 nt, Artificial Sequence
  Description of Artificial Sequence: Synthetic oligonucleotide
  Sense strand starting at position 510 of SEQ ID NO: 914144
gaaggauugguguagaguu

SEQ ID NO: 981361 - RNA, 19 nt, Artificial Sequence
  Description of Artificial Sequence: Synthetic oligonucleotide
  Antisense strand to SEQ ID NO: 981360
aacucuacaccaauccuuc

SEQ ID NO: 981362 - RNA, 19 nt, Artificial Sequence
  Description of Artificial Sequence: Synthetic oligonucleotide
  Sense strand starting at position 3860 of SEQ ID NO: 914144
uaggguucccuggauccua

SEQ ID NO: 981363 - RNA, 19 nt, Artificial Sequence
  Description of Artificial Sequence: Synthetic oligonucleotide
  Antisense strand to SEQ ID NO: 981362
uaggauccagggaacccua

SEQ ID NO: 981364 - RNA, 19 nt, Artificial Sequence
  Description of Artificial Sequence: Synthetic oligonucleotide
  Sense strand starting at position 1747 of SEQ ID NO: 914144
uccaguugggcagagacau

SEQ ID NO: 981365 - RNA, 19 nt, Artificial Sequence
  Description of Artificial Sequence: Synthetic oligonucleotide
  Antisense strand to SEQ ID NO: 981364
augucucugcccaacugga

SEQ ID NO: 981366 - RNA, 19 nt, Artificial Sequence
  Description of Artificial Sequence: Synthetic oligonucleotide
  Sense strand starting at position 3688 of SEQ ID NO: 914144
aagacuacucccgggacau

SEQ ID NO: 981367 - RNA, 19 nt, Artificial Sequence
  Description of Artificial Sequence: Synthetic oligonucleotide
  Antisense strand to SEQ ID NO: 981366
augucccgggaguagucuu

SEQ ID NO: 981368 - RNA, 19 nt, Artificial Sequence
  Description of Artificial Sequence: Synthetic oligonucleotide
  Sense strand starting at position 3640 of SEQ ID NO: 914144
uaucuugggcacgaacaau

SEQ ID NO: 981369 - RNA, 19 nt, Artificial Sequence
  Description of Artificial Sequence: Synthetic oligonucleotide
  Antisense strand to SEQ ID NO: 981368
auuguucgugcccaagaua

SEQ ID NO: 981370 - RNA, 19 nt, Artificial Sequence
  Description of Artificial Sequence: Synthetic oligonucleotide
  Sense strand starting at position 512 of SEQ ID NO: 914144
aggauugguguagaguuua

SEQ ID NO: 981371 - RNA, 19 nt, Artificial Sequence
  Description of Artificial Sequence: Synthetic oligonucleotide
  Antisense strand to SEQ ID NO: 981370
uaaacucuacaccaauccu

SEQ ID NO: 981372 - RNA, 19 nt, Artificial Sequence
  Description of Artificial Sequence: Synthetic oligonucleotide
  Sense strand starting at position 681 of SEQ ID NO: 914144
uagugaguacaguacucaa

SEQ ID NO: 981373 - RNA, 19 nt, Artificial Sequence
  Description of Artificial Sequence: Synthetic oligonucleotide
  Antisense strand to SEQ ID NO: 981372
uugaguacuguacucacua

SEQ ID NO: 981374 - RNA, 19 nt, Artificial Sequence
  Description of Artificial Sequence: Synthetic oligonucleotide
  Sense strand starting at position 331 of SEQ ID NO: 914144
cuggcuagagcucagacaa

SEQ ID NO: 981375 - RNA, 19 nt, Artificial Sequence
  Description of Artificial Sequence: Synthetic oligonucleotide
  Antisense strand to SEQ ID NO: 981374
uugucugagcucuagccag

SEQ ID NO: 981376 - RNA, 19 nt, Artificial Sequence
  Description of Artificial Sequence: Synthetic oligonucleotide
  Sense strand starting at position 1678 of SEQ ID NO: 914144
acuugaaauuuggaguaaa

SEQ ID NO: 981377 - RNA, 19 nt, Artificial Sequence
  Description of Artificial Sequence: Synthetic oligonucleotide
  Antisense strand to SEQ ID NO: 981376
uuuacuccaaauuucaagu

SEQ ID NO: 981378 - RNA, 19 nt, Artificial Sequence
  Description of Artificial Sequence: Synthetic oligonucleotide
  Sense strand starting at position 684 of SEQ ID NO: 914144
ugaguacaguacucaauaa

SEQ ID NO: 981379 - RNA, 19 nt, Artificial Sequence
  Description of Artificial Sequence: Synthetic oligonucleotide
  Antisense strand to SEQ ID NO: 981378
uuauugaguacuguacuca

SEQ ID NO: 981380 - RNA, 19 nt, Artificial Sequence
  Description of Artificial Sequence: Synthetic oligonucleotide
  Sense strand starting at position 1736 of SEQ ID NO: 914144
ugaggagauucuccaguug

SEQ ID NO: 981381 - RNA, 19 nt, Artificial Sequence
  Description of Artificial Sequence: Synthetic oligonucleotide
  Antisense strand to SEQ ID NO: 981380
caacuggagaaucuccuca

SEQ ID NO: 981382 - RNA, 19 nt, Artificial Sequence
  Description of Artificial Sequence: Synthetic oligonucleotide
  Sense strand starting at position 717 of SEQ ID NO: 914144
agagauacauucuuuguua

SEQ ID NO: 981383 - RNA, 19 nt, Artificial Sequence
  Description of Artificial Sequence: Synthetic oligonucleotide
  Antisense strand to SEQ ID NO: 981382
uaacaaagaauguaucucu

SEQ ID NO: 981384 - RNA, 19 nt, Artificial Sequence
  Description of Artificial Sequence: Synthetic oligonucleotide
  Sense strand starting at position 1390 of SEQ ID NO: 914144
ugacgcaucuguuuauuua

SEQ ID NO: 981385 - RNA, 19 nt, Artificial Sequence
  Description of Artificial Sequence: Synthetic oligonucleotide
  Antisense strand to SEQ ID NO: 981384
uaaauaaacagaugcguca

SEQ ID NO: 981386 - RNA, 19 nt, Artificial Sequence
  Description of Artificial Sequence: Synthetic oligonucleotide
  Sense strand starting at position 768 of SEQ ID NO: 914144
ggcuguauucuucaggaga

SEQ ID NO: 981387 - RNA, 19 nt, Artificial Sequence
  Description of Artificial Sequence: Synthetic oligonucleotide
  Antisense strand to SEQ ID NO: 981386
ucuccugaagaauacagcc

SEQ ID NO: 981388 - RNA, 19 nt, Artificial Sequence
  Description of Artificial Sequence: Synthetic oligonucleotide
  Sense strand starting at position 3535 of SEQ ID NO: 914144
aggcuucaucugggaggau

SEQ ID NO: 981389 - RNA, 19 nt, Artificial Sequence
  Description of Artificial Sequence: Synthetic oligonucleotide
  Antisense strand to SEQ ID NO: 981388
auccucccagaugaagccu

SEQ ID NO: 981390 - RNA, 19 nt, Artificial Sequence
  Description of Artificial Sequence: Synthetic oligonucleotide
  Sense strand starting at position 3689 of SEQ ID NO: 914144
agacuacucccgggacauu

SEQ ID NO: 981391 - RNA, 19 nt, Artificial Sequence
  Description of Artificial Sequence: Synthetic oligonucleotide
  Antisense strand to SEQ ID NO: 981390
aaugucccgggaguagucu

SEQ ID NO: 981392 - RNA, 19 nt, Artificial Sequence
  Description of Artificial Sequence: Synthetic oligonucleotide
  Sense strand starting at position 1363 of SEQ ID NO: 914144
uuucgaacccuguaggauu

SEQ ID NO: 981393 - RNA, 19 nt, Artificial Sequence
  Description of Artificial Sequence: Synthetic oligonucleotide
  Antisense strand to SEQ ID NO: 981392
aauccuacaggguucgaaa

SEQ ID NO: 981394 - RNA, 19 nt, Artificial Sequence
  Description of Artificial Sequence: Synthetic oligonucleotide
  Sense strand starting at position 2147 of SEQ ID NO: 914144
ggugauugaugucccagag

SEQ ID NO: 981395 - RNA, 19 nt, Artificial Sequence
  Description of Artificial Sequence: Synthetic oligonucleotide
  Antisense strand to SEQ ID NO: 981394
cucugggacaucaaucacc

SEQ ID NO: 981396 - RNA, 19 nt, Artificial Sequence
  Description of Artificial Sequence: Synthetic oligonucleotide
  Sense strand starting at position 675 of SEQ ID NO: 914144
gacacauagugaguacagu

SEQ ID NO: 981397 - RNA, 19 nt, Artificial Sequence
  Description of Artificial Sequence: Synthetic oligonucleotide
  Antisense strand to SEQ ID NO: 981396
acuguacucacuauguguc

SEQ ID NO: 981398 - RNA, 19 nt, Artificial Sequence
  Description of Artificial Sequence: Synthetic oligonucleotide
  Sense strand starting at position 1691 of SEQ ID NO: 914144
aguaaaucuccugguugag

SEQ ID NO: 981399 - RNA, 19 nt, Artificial Sequence
  Description of Artificial Sequence: Synthetic oligonucleotide
  Antisense strand to SEQ ID NO: 981398
cucaaccaggagauuuacu

SEQ ID NO: 981400 - RNA, 19 nt, Artificial Sequence
  Description of Artificial Sequence: Synthetic oligonucleotide
  Sense strand starting at position 1694 of SEQ ID NO: 914144
aaaucuccugguugaguga

SEQ ID NO: 981401 - RNA, 19 nt, Artificial Sequence
  Description of Artificial Sequence: Synthetic oligonucleotide
  Antisense strand to SEQ ID NO: 981400
ucacucaaccaggagauuu

SEQ ID NO: 981402 - RNA, 19 nt, Artificial Sequence
  Description of Artificial Sequence: Synthetic oligonucleotide
  Sense strand starting at position 875 of SEQ ID NO: 914144
aagacuugaugggagagaa

SEQ ID NO: 981403 - RNA, 19 nt, Artificial Sequence
  Description of Artificial Sequence: Synthetic oligonucleotide
  Antisense strand to SEQ ID NO: 981402
uucucucccaucaagucuu

SEQ ID NO: 981404 - RNA, 19 nt, Artificial Sequence
  Description of Artificial Sequence: Synthetic oligonucleotide
  Sense strand starting at position 3639 of SEQ ID NO: 914144
uuaucuugggcacgaacaa

SEQ ID NO: 981405 - RNA, 19 nt, Artificial Sequence
  Description of Artificial Sequence: Synthetic oligonucleotide
  Antisense strand to SEQ ID NO: 981404
uuguucgugcccaagauaa

SEQ ID NO: 981406 - RNA, 19 nt, Artificial Sequence
  Description of Artificial Sequence: Synthetic oligonucleotide
  Sense strand starting at position 1270 of SEQ ID NO: 914144
aaaggcuucuugucuggaa

SEQ ID NO: 981407 - RNA, 19 nt, Artificial Sequence
  Description of Artificial Sequence: Synthetic oligonucleotide
  Antisense strand to SEQ ID NO: 981406
uuccagacaagaagccuuu

SEQ ID NO: 981408 - RNA, 19 nt, Artificial Sequence
  Description of Artificial Sequence: Synthetic oligonucleotide
  Sense strand starting at position 1303 of SEQ ID NO: 914144
guaauuguuagguggaaug

SEQ ID NO: 981409 - RNA, 19 nt, Artificial Sequence
  Description of Artificial Sequence: Synthetic oligonucleotide
  Antisense strand to SEQ ID NO: 981408
cauuccaccuaacaauuac

SEQ ID NO: 981410 - RNA, 19 nt, Artificial Sequence
  Description of Artificial Sequence: Synthetic oligonucleotide
  Sense strand starting at position 1688 of SEQ ID NO: 914144
uggaguaaaucuccugguu

SEQ ID NO: 981411 - RNA, 19 nt, Artificial Sequence
  Description of Artificial Sequence: Synthetic oligonucleotide
  Antisense strand to SEQ ID NO: 981410
aaccaggagauuuacucca

SEQ ID NO: 981412 - RNA, 19 nt, Artificial Sequence
  Description of Artificial Sequence: Synthetic oligonucleotide
  Sense strand starting at position 3278 of SEQ ID NO: 914144
cuacucuuggccugggaau

SEQ ID NO: 981413 - RNA, 19 nt, Artificial Sequence
  Description of Artificial Sequence: Synthetic oligonucleotide
  Antisense strand to SEQ ID NO: 981412
auucccaggccaagaguag

SEQ ID NO: 981414 - RNA, 19 nt, Artificial Sequence
  Description of Artificial Sequence: Synthetic oligonucleotide
  Sense strand starting at position 264 of SEQ ID NO: 914144
cugcuuaguguuuacaaac

SEQ ID NO: 981415 - RNA, 19 nt, Artificial Sequence
  Description of Artificial Sequence: Synthetic oligonucleotide
  Antisense strand to SEQ ID NO: 981414
guuuguaaacacuaagcag

SEQ ID NO: 981416 - RNA, 19 nt, Artificial Sequence
  Description of Artificial Sequence: Synthetic oligonucleotide
  Sense strand starting at position 1319 of SEQ ID NO: 914144
augcaaucugguugaauuc

SEQ ID NO: 981417 - RNA, 19 nt, Artificial Sequence
  Description of Artificial Sequence: Synthetic oligonucleotide
  Antisense strand to SEQ ID NO: 981416
gaauucaaccagauugcau

SEQ ID NO: 981418 - RNA, 19 nt, Artificial Sequence
  Description of Artificial Sequence: Synthetic oligonucleotide
  Sense strand starting at position 1271 of SEQ ID NO: 914144
aaggcuucuugucuggaau

SEQ ID NO: 981419 - RNA, 19 nt, Artificial Sequence
  Description of Artificial Sequence: Synthetic oligonucleotide
  Antisense strand to SEQ ID NO: 981418
auuccagacaagaagccuu

SEQ ID NO: 981420 - RNA, 19 nt, Artificial Sequence
  Description of Artificial Sequence: Synthetic oligonucleotide
  Sense strand starting at position 3139 of SEQ ID NO: 914144
agaguucucucagccugga

SEQ ID NO: 981421 - RNA, 19 nt, Artificial Sequence
  Description of Artificial Sequence: Synthetic oligonucleotide
  Antisense strand to SEQ ID NO: 981420
uccaggcugagagaacucu

SEQ ID NO: 981422 - RNA, 19 nt, Artificial Sequence
  Description of Artificial Sequence: Synthetic oligonucleotide
  Sense strand starting at position 1272 of SEQ ID NO: 914144
aggcuucuugucuggaaua

SEQ ID NO: 981423 - RNA, 19 nt, Artificial Sequence
  Description of Artificial Sequence: Synthetic oligonucleotide
  Antisense strand to SEQ ID NO: 981422
uauuccagacaagaagccu

SEQ ID NO: 981424 - RNA, 19 nt, Artificial Sequence
  Description of Artificial Sequence: Synthetic oligonucleotide
  Sense strand starting at position 1506 of SEQ ID NO: 914144
gaauuugucuaagaaggcu

SEQ ID NO: 981425 - RNA, 19 nt, Artificial Sequence
  Description of Artificial Sequence: Synthetic oligonucleotide
  Antisense strand to SEQ ID NO: 981424
agccuucuuagacaaauuc

SEQ ID NO: 981426 - RNA, 19 nt, Artificial Sequence
  Description of Artificial Sequence: Synthetic oligonucleotide
  Sense strand starting at position 3289 of SEQ ID NO: 914144
cugggaaucuuagagaaag

SEQ ID NO: 981427 - RNA, 19 nt, Artificial Sequence
  Description of Artificial Sequence: Synthetic oligonucleotide
  Antisense strand to SEQ ID NO: 981426
cuuucucuaagauucccag

SEQ ID NO: 981428 - RNA, 19 nt, Artificial Sequence
  Description of Artificial Sequence: Synthetic oligonucleotide
  Sense strand starting at position 1352 of SEQ ID NO: 914144
ggaauugccucuuucgaac

SEQ ID NO: 981429 - RNA, 19 nt, Artificial Sequence
  Description of Artificial Sequence: Synthetic oligonucleotide
  Antisense strand to SEQ ID NO: 981428
guucgaaagaggcaauucc

SEQ ID NO: 981430 - RNA, 19 nt, Artificial Sequence
  Description of Artificial Sequence: Synthetic oligonucleotide
  Sense strand starting at position 1013 of SEQ ID NO: 914144
cccaaagcuuggcuucuaa

SEQ ID NO: 981431 - RNA, 19 nt, Artificial Sequence
  Description of Artificial Sequence: Synthetic oligonucleotide
  Antisense strand to SEQ ID NO: 981430
uuagaagccaagcuuuggg

SEQ ID NO: 981432 - RNA, 19 nt, Artificial Sequence
  Description of Artificial Sequence: Synthetic oligonucleotide
  Sense strand starting at position 3726 of SEQ ID NO: 914145
ugaucaccuccucagugaa

SEQ ID NO: 981433 - RNA, 19 nt, Artificial Sequence
  Description of Artificial Sequence: Synthetic oligonucleotide
  Antisense strand to SEQ ID NO: 981432
uucacugaggaggugauca

SEQ ID NO: 981434 - RNA, 19 nt, Artificial Sequence
  Description of Artificial Sequence: Synthetic oligonucleotide
  Sense strand starting at position 2792 of SEQ ID NO: 914145
ucuagcauuuggucucuua

SEQ ID NO: 981435 - RNA, 19 nt, Artificial Sequence
  Description of Artificial Sequence: Synthetic oligonucleotide
  Antisense strand to SEQ ID NO: 981434
uaagagaccaaaugcuaga

SEQ ID NO: 981436 - RNA, 19 nt, Artificial Sequence
  Description of Artificial Sequence: Synthetic oligonucleotide
  Sense strand starting at position 3090 of SEQ ID NO: 914145
acgauauuggcucauuaaa

SEQ ID NO: 981437 - RNA, 19 nt, Artificial Sequence
  Description of Artificial Sequence: Synthetic oligonucleotide
  Antisense strand to SEQ ID NO: 981436
uuuaaugagccaauaucgu

SEQ ID NO: 981438 - RNA, 19 nt, Artificial Sequence
  Description of Artificial Sequence: Synthetic oligonucleotide
  Sense strand starting at position 330 of SEQ ID NO: 914145
gagacagcuuaucugauga

SEQ ID NO: 981439 - RNA, 19 nt, Artificial Sequence
  Description of Artificial Sequence: Synthetic oligonucleotide
  Antisense strand to SEQ ID NO: 981438
ucaucagauaagcugucuc

SEQ ID NO: 981440 - RNA, 19 nt, Artificial Sequence
  Description of Artificial Sequence: Synthetic oligonucleotide
  Sense strand starting at position 3876 of SEQ ID NO: 914145
cuaugauuuguuugucuuu

SEQ ID NO: 981441 - RNA, 19 nt, Artificial Sequence
  Description of Artificial Sequence: Synthetic oligonucleotide
  Antisense strand to SEQ ID NO: 981440
aaagacaaacaaaucauag

SEQ ID NO: 981442 - RNA, 19 nt, Artificial Sequence
  Description of Artificial Sequence: Synthetic oligonucleotide
  Sense strand starting at position 2407 of SEQ ID NO: 914145
uguaaucaccguuaggaga

SEQ ID NO: 981443 - RNA, 19 nt, Artificial Sequence
  Description of Artificial Sequence: Synthetic oligonucleotide
  Antisense strand to SEQ ID NO: 981442
ucuccuaacggugauuaca

SEQ ID NO: 981444 - RNA, 19 nt, Artificial Sequence
  Description of Artificial Sequence: Synthetic oligonucleotide
  Sense strand starting at position 317 of SEQ ID NO: 914145
guucuuaaacuuugagaca

SEQ ID NO: 981445 - RNA, 19 nt, Artificial Sequence
  Description of Artificial Sequence: Synthetic oligonucleotide
  Antisense strand to SEQ ID NO: 981444
ugucucaaaguuuaagaac

SEQ ID NO: 981446 - RNA, 19 nt, Artificial Sequence
  Description of Artificial Sequence: Synthetic oligonucleotide
  Sense strand starting at position 2414 of SEQ ID NO: 914145
accguuaggagagauuguu

SEQ ID NO: 981447 - RNA, 19 nt, Artificial Sequence
  Description of Artificial Sequence: Synthetic oligonucleotide
  Antisense strand to SEQ ID NO: 981446
aacaaucucuccuaacggu

SEQ ID NO: 981448 - RNA, 19 nt, Artificial Sequence
  Description of Artificial Sequence: Synthetic oligonucleotide
  Sense strand starting at position 1205 of SEQ ID NO: 914145
ccauaaaguguaggauauu

SEQ ID NO: 981449 - RNA, 19 nt, Artificial Sequence
  Description of Artificial Sequence: Synthetic oligonucleotide
  Antisense strand to SEQ ID NO: 981448
aauauccuacacuuuaugg

SEQ ID NO: 981450 - RNA, 19 nt, Artificial Sequence
  Description of Artificial Sequence: Synthetic oligonucleotide
  Sense strand starting at position 63 of SEQ ID NO: 914145
agcaguguaagucacaaga

SEQ ID NO: 981451 - RNA, 19 nt, Artificial Sequence
  Description of Artificial Sequence: Synthetic oligonucleotide
  Antisense strand to SEQ ID NO: 981450
ucuugugacuuacacugcu

SEQ ID NO: 981452 - RNA, 19 nt, Artificial Sequence
  Description of Artificial Sequence: Synthetic oligonucleotide
  Sense strand starting at position 748 of SEQ ID NO: 914145
acaauuacucgucaagcaa

SEQ ID NO: 981453 - RNA, 19 nt, Artificial Sequence
  Description of Artificial Sequence: Synthetic oligonucleotide
  Antisense strand to SEQ ID NO: 981452
uugcuugacgaguaauugu

SEQ ID NO: 981454 - RNA, 19 nt, Artificial Sequence
  Description of Artificial Sequence: Synthetic oligonucleotide
  Sense strand starting at position 3316 of SEQ ID NO: 914145
ccaagagguucuguuaaau

SEQ ID NO: 981455 - RNA, 19 nt, Artificial Sequence
  Description of Artificial Sequence: Synthetic oligonucleotide
  Antisense strand to SEQ ID NO: 981454
auuuaacagaaccucuugg

SEQ ID NO: 981456 - RNA, 19 nt, Artificial Sequence
  Description of Artificial Sequence: Synthetic oligonucleotide
  Sense strand starting at position 3215 of SEQ ID NO: 914145
ucagucuggcuccauaaua

SEQ ID NO: 981457 - RNA, 19 nt, Artificial Sequence
  Description of Artificial Sequence: Synthetic oligonucleotide
  Antisense strand to SEQ ID NO: 981456
uauuauggagccagacuga

SEQ ID NO: 981458 - RNA, 19 nt, Artificial Sequence
  Description of Artificial Sequence: Synthetic oligonucleotide
  Sense strand starting at position 2655 of SEQ ID NO: 914145
cguaguagacacugaaaca

SEQ ID NO: 981459 - RNA, 19 nt, Artificial Sequence
  Description of Artificial Sequence: Synthetic oligonucleotide
  Antisense strand to SEQ ID NO: 981458
uguuucagugucuacuacg

SEQ ID NO: 981460 - RNA, 19 nt, Artificial Sequence
  Description of Artificial Sequence: Synthetic oligonucleotide
  Sense strand starting at position 822 of SEQ ID NO: 914145
caguuacagcccuaaguga

SEQ ID NO: 981461 - RNA, 19 nt, Artificial Sequence
  Description of Artificial Sequence: Synthetic oligonucleotide
  Antisense strand to SEQ ID NO: 981460
ucacuuagggcuguaacug

SEQ ID NO: 981462 - RNA, 19 nt, Artificial Sequence
  Description of Artificial Sequence: Synthetic oligonucleotide
  Sense strand starting at position 2246 of SEQ ID NO: 914145
cgguguuucggguugugua

SEQ ID NO: 981463 - RNA, 19 nt, Artificial Sequence
  Description of Artificial Sequence: Synthetic oligonucleotide
  Antisense strand to SEQ ID NO: 981462
uacacaacccgaaacaccg

SEQ ID NO: 981464 - RNA, 19 nt, Artificial Sequence
  Description of Artificial Sequence: Synthetic oligonucleotide
  Sense strand starting at position 3149 of SEQ ID NO: 914145
uccuguuacagaugaggua

SEQ ID NO: 981465 - RNA, 19 nt, Artificial Sequence
  Description of Artificial Sequence: Synthetic oligonucleotide
  Antisense strand to SEQ ID NO: 981464
uaccucaucuguaacagga

SEQ ID NO: 981466 - RNA, 19 nt, Artificial Sequence
  Description of Artificial Sequence: Synthetic oligonucleotide
  Sense strand starting at position 291 of SEQ ID NO: 914145
ccuguauacuaugugaaac

SEQ ID NO: 981467 - RNA, 19 nt, Artificial Sequence
  Description of Artificial Sequence: Synthetic oligonucleotide
  Antisense strand to SEQ ID NO: 981466
guuucacauaguauacagg

SEQ ID NO: 981468 - RNA, 19 nt, Artificial Sequence
  Description of Artificial Sequence: Synthetic oligonucleotide
  Sense strand starting at position 3804 of SEQ ID NO: 914145
gcguguuguguuguaauua

SEQ ID NO: 981469 - RNA, 19 nt, Artificial Sequence
  Description of Artificial Sequence: Synthetic oligonucleotide
  Antisense strand to SEQ ID NO: 981468
uaauuacaacacaacacgc

SEQ ID NO: 981470 - RNA, 19 nt, Artificial Sequence
  Description of Artificial Sequence: Synthetic oligonucleotide
  Sense strand starting at position 3088 of SEQ ID NO: 914145
gaacgauauuggcucauua

SEQ ID NO: 981471 - RNA, 19 nt, Artificial Sequence
  Description of Artificial Sequence: Synthetic oligonucleotide
  Antisense strand to SEQ ID NO: 981470
uaaugagccaauaucguuc

SEQ ID NO: 981472 - RNA, 19 nt, Artificial Sequence
  Description of Artificial Sequence: Synthetic oligonucleotide
  Sense strand starting at position 3747 of SEQ ID NO: 914145
cuugcaugaucccuugaga

SEQ ID NO: 981473 - RNA, 19 nt, Artificial Sequence
  Description of Artificial Sequence: Synthetic oligonucleotide
  Antisense strand to SEQ ID NO: 981472
ucucaagggaucaugcaag

SEQ ID NO: 981474 - RNA, 19 nt, Artificial Sequence
  Description of Artificial Sequence: Synthetic oligonucleotide
  Sense strand starting at position 290 of SEQ ID NO: 914145
cccuguauacuaugugaaa

SEQ ID NO: 981475 - RNA, 19 nt, Artificial Sequence
  Description of Artificial Sequence: Synthetic oligonucleotide
  Antisense strand to SEQ ID NO: 981474
uuucacauaguauacaggg

SEQ ID NO: 981476 - RNA, 19 nt, Artificial Sequence
  Description of Artificial Sequence: Synthetic oligonucleotide
  Sense strand starting at position 3453 of SEQ ID NO: 914145
uguacaugccuauaaaugu

SEQ ID NO: 981477 - RNA, 19 nt, Artificial Sequence
  Description of Artificial Sequence: Synthetic oligonucleotide
  Antisense strand to SEQ ID NO: 981476
acauuuauaggcauguaca

SEQ ID NO: 981478 - RNA, 19 nt, Artificial Sequence
  Description of Artificial Sequence: Synthetic oligonucleotide
  Sense strand starting at position 53 of SEQ ID NO: 914145
cccuaaucacagcagugua

SEQ ID NO: 981479 - RNA, 19 nt, Artificial Sequence
  Description of Artificial Sequence: Synthetic oligonucleotide
  Antisense strand to SEQ ID NO: 981478
uacacugcugugauuaggg

SEQ ID NO: 981480 - RNA, 19 nt, Artificial Sequence
  Description of Artificial Sequence: Synthetic oligonucleotide
  Sense strand starting at position 3802 of SEQ ID NO: 914145
uggcguguuguguuguaau

SEQ ID NO: 981481 - RNA, 19 nt, Artificial Sequence
  Description of Artificial Sequence: Synthetic oligonucleotide
  Antisense strand to SEQ ID NO: 981480
auuacaacacaacacgcca

SEQ ID NO: 981482 - RNA, 19 nt, Artificial Sequence
  Description of Artificial Sequence: Synthetic oligonucleotide
  Sense strand starting at position 3770 of SEQ ID NO: 914145
gagcauuccuucuuuggga

SEQ ID NO: 981483 - RNA, 19 nt, Artificial Sequence
  Description of Artificial Sequence: Synthetic oligonucleotide
  Antisense strand to SEQ ID NO: 981482
ucccaaagaaggaaugcuc

SEQ ID NO: 981484 - RNA, 19 nt, Artificial Sequence
  Description of Artificial Sequence: Synthetic oligonucleotide
  Sense strand starting at position 2576 of SEQ ID NO: 914145
uaaauaucucuuggagugu

SEQ ID NO: 981485 - RNA, 19 nt, Artificial Sequence
  Description of Artificial Sequence: Synthetic oligonucleotide
  Antisense strand to SEQ ID NO: 981484
acacuccaagagauauuua

SEQ ID NO: 981486 - RNA, 19 nt, Artificial Sequence
  Description of Artificial Sequence: Synthetic oligonucleotide
  Sense strand starting at position 1045 of SEQ ID NO: 914145
aggagaaaguuacaagaaa

SEQ ID NO: 981487 - RNA, 19 nt, Artificial Sequence
  Description of Artificial Sequence: Synthetic oligonucleotide
  Antisense strand to SEQ ID NO: 981486
uuucuuguaacuuucuccu

SEQ ID NO: 981488 - RNA, 19 nt, Artificial Sequence
  Description of Artificial Sequence: Synthetic oligonucleotide
  Sense strand starting at position 1206 of SEQ ID NO: 914145
cauaaaguguaggauauuu

SEQ ID NO: 981489 - RNA, 19 nt, Artificial Sequence
  Description of Artificial Sequence: Synthetic oligonucleotide
  Antisense strand to SEQ ID NO: 981488
aaauauccuacacuuuaug

SEQ ID NO: 981490 - RNA, 19 nt, Artificial Sequence
  Description of Artificial Sequence: Synthetic oligonucleotide
  Sense strand starting at position 2430 of SEQ ID NO: 914145
guuaaacucguacaggguu

SEQ ID NO: 981491 - RNA, 19 nt, Artificial Sequence
  Description of Artificial Sequence: Synthetic oligonucleotide
  Antisense strand to SEQ ID NO: 981490
aacccuguacgaguuuaac

SEQ ID NO: 981492 - RNA, 19 nt, Artificial Sequence
  Description of Artificial Sequence: Synthetic oligonucleotide
  Sense strand starting at position 3771 of SEQ ID NO: 914145
agcauuccuucuuugggau

SEQ ID NO: 981493 - RNA, 19 nt, Artificial Sequence
  Description of Artificial Sequence: Synthetic oligonucleotide
  Antisense strand to SEQ ID NO: 981492
aucccaaagaaggaaugcu

SEQ ID NO: 981494 - RNA, 19 nt, Artificial Sequence
  Description of Artificial Sequence: Synthetic oligonucleotide
  Sense strand starting at position 3461 of SEQ ID NO: 914145
ccuauaaauguuugguuau

SEQ ID NO: 981495 - RNA, 19 nt, Artificial Sequence
  Description of Artificial Sequence: Synthetic oligonucleotide
  Antisense strand to SEQ ID NO: 981494
auaaccaaacauuuauagg

SEQ ID NO: 981496 - RNA, 19 nt, Artificial Sequence
  Description of Artificial Sequence: Synthetic oligonucleotide
  Sense strand starting at position 281 of SEQ ID NO: 914145
auacauggucccuguauac

SEQ ID NO: 981497 - RNA, 19 nt, Artificial Sequence
  Description of Artificial Sequence: Synthetic oligonucleotide
  Antisense strand to SEQ ID NO: 981496
guauacagggaccauguau

SEQ ID NO: 981498 - RNA, 19 nt, Artificial Sequence
  Description of Artificial Sequence: Synthetic oligonucleotide
  Sense strand starting at position 1240 of SEQ ID NO: 914145
ccggguaaucacgaugcau

SEQ ID NO: 981499 - RNA, 19 nt, Artificial Sequence
  Description of Artificial Sequence: Synthetic oligonucleotide
  Antisense strand to SEQ ID NO: 981498
augcaucgugauuacccgg

SEQ ID NO: 981500 - RNA, 19 nt, Artificial Sequence
  Description of Artificial Sequence: Synthetic oligonucleotide
  Sense strand starting at position 2859 of SEQ ID NO: 914145
accagucuuccguaucacu

SEQ ID NO: 981501 - RNA, 19 nt, Artificial Sequence
  Description of Artificial Sequence: Synthetic oligonucleotide
  Antisense strand to SEQ ID NO: 981500
agugauacggaagacuggu

SEQ ID NO: 981502 - RNA, 19 nt, Artificial Sequence
  Description of Artificial Sequence: Synthetic oligonucleotide
  Sense strand starting at position 3772 of SEQ ID NO: 914145
gcauuccuucuuugggauu

SEQ ID NO: 981503 - RNA, 19 nt, Artificial Sequence
  Description of Artificial Sequence: Synthetic oligonucleotide
  Antisense strand to SEQ ID NO: 981502
aaucccaaagaaggaaugc

SEQ ID NO: 981504 - RNA, 19 nt, Artificial Sequence
  Description of Artificial Sequence: Synthetic oligonucleotide
  Sense strand starting at position 3912 of SEQ ID NO: 914145
ugagauagugcuugucaca

SEQ ID NO: 981505 - RNA, 19 nt, Artificial Sequence
  Description of Artificial Sequence: Synthetic oligonucleotide
  Antisense strand to SEQ ID NO: 981504
ugugacaagcacuaucuca

SEQ ID NO: 981506 - RNA, 19 nt, Artificial Sequence
  Description of Artificial Sequence: Synthetic oligonucleotide
  Sense strand starting at position 2373 of SEQ ID NO: 914145
gcucgucugccgcugugaa

SEQ ID NO: 981507 - RNA, 19 nt, Artificial Sequence
  Description of Artificial Sequence: Synthetic oligonucleotide
  Antisense strand to SEQ ID NO: 981506
uucacagcggcagacgagc

SEQ ID NO: 981508 - RNA, 19 nt, Artificial Sequence
  Description of Artificial Sequence: Synthetic oligonucleotide
  Sense strand starting at position 488 of SEQ ID NO: 914145
agaaguuucuggcugugac

SEQ ID NO: 981509 - RNA, 19 nt, Artificial Sequence
  Description of Artificial Sequence: Synthetic oligonucleotide
  Antisense strand to SEQ ID NO: 981508
gucacagccagaaacuucu

SEQ ID NO: 981510 - RNA, 19 nt, Artificial Sequence
  Description of Artificial Sequence: Synthetic oligonucleotide
  Sense strand starting at position 3495 of SEQ ID NO: 914145
ugugcuaacuauguaauca

SEQ ID NO: 981511 - RNA, 19 nt, Artificial Sequence
  Description of Artificial Sequence: Synthetic oligonucleotide
  Antisense strand to SEQ ID NO: 981510
ugauuacauaguuagcaca

SEQ ID NO: 981512 - RNA, 19 nt, Artificial Sequence
  Description of Artificial Sequence: Synthetic oligonucleotide
  Sense strand starting at position 3873 of SEQ ID NO: 914146
ugugcuuuccuggcuguga

SEQ ID NO: 981513 - RNA, 19 nt, Artificial Sequence
  Description of Artificial Sequence: Synthetic oligonucleotide
  Antisense strand to SEQ ID NO: 981512
ucacagccaggaaagcaca

SEQ ID NO: 981514 - RNA, 19 nt, Artificial Sequence
  Description of Artificial Sequence: Synthetic oligonucleotide
  Sense strand starting at position 3823 of SEQ ID NO: 914146
guagaagacaggugaucau

SEQ ID NO: 981515 - RNA, 19 nt, Artificial Sequence
  Description of Artificial Sequence: Synthetic oligonucleotide
  Antisense strand to SEQ ID NO: 981514
augaucaccugucuucuac

SEQ ID NO: 981516 - RNA, 19 nt, Artificial Sequence
  Description of Artificial Sequence: Synthetic oligonucleotide
  Sense strand starting at position 959 of SEQ ID NO: 914146
gacauuagugcagagguaa

SEQ ID NO: 981517 - RNA, 19 nt, Artificial Sequence
  Description of Artificial Sequence: Synthetic oligonucleotide
  Antisense strand to SEQ ID NO: 981516
uuaccucugcacuaauguc

SEQ ID NO: 981518 - RNA, 19 nt, Artificial Sequence
  Description of Artificial Sequence: Synthetic oligonucleotide
  Sense strand starting at position 957 of SEQ ID NO: 914146
gagacauuagugcagaggu

SEQ ID NO: 981519 - RNA, 19 nt, Artificial Sequence
  Description of Artificial Sequence: Synthetic oligonucleotide
  Antisense strand to SEQ ID NO: 981518
accucugcacuaaugucuc

SEQ ID NO: 981520 - RNA, 19 nt, Artificial Sequence
  Description of Artificial Sequence: Synthetic oligonucleotide
  Sense strand starting at position 2684 of SEQ ID NO: 914146
acaucauuccuaggaggua

SEQ ID NO: 981521 - RNA, 19 nt, Artificial Sequence
  Description of Artificial Sequence: Synthetic oligonucleotide
  Antisense strand to SEQ ID NO: 981520
uaccuccuaggaaugaugu

SEQ ID NO: 981522 - RNA, 19 nt, Artificial Sequence
  Description of Artificial Sequence: Synthetic oligonucleotide
  Sense strand starting at position 3806 of SEQ ID NO: 914146
uccagaaagccucaugagu

SEQ ID NO: 981523 - RNA, 19 nt, Artificial Sequence
  Description of Artificial Sequence: Synthetic oligonucleotide
  Antisense strand to SEQ ID NO: 981522
acucaugaggcuuucugga

SEQ ID NO: 981524 - RNA, 19 nt, Artificial Sequence
  Description of Artificial Sequence: Synthetic oligonucleotide
  Sense strand starting at position 1020 of SEQ ID NO: 914146
aggugugaacauuaucuuu

SEQ ID NO: 981525 - RNA, 19 nt, Artificial Sequence
  Description of Artificial Sequence: Synthetic oligonucleotide
  Antisense strand to SEQ ID NO: 981524
aaagauaauguucacaccu

SEQ ID NO: 981526 - RNA, 19 nt, Artificial Sequence
  Description of Artificial Sequence: Synthetic oligonucleotide
  Sense strand starting at position 938 of SEQ ID NO: 914146
gagguaucagacuguacaa

SEQ ID NO: 981527 - RNA, 19 nt, Artificial Sequence
  Description of Artificial Sequence: Synthetic oligonucleotide
  Antisense strand to SEQ ID NO: 981526
uuguacagucugauaccuc

SEQ ID NO: 981528 - RNA, 19 nt, Artificial Sequence
  Description of Artificial Sequence: Synthetic oligonucleotide
  Sense strand starting at position 3070 of SEQ ID NO: 914146
gggacuucuuuauuauuau

SEQ ID NO: 981529 - RNA, 19 nt, Artificial Sequence
  Description of Artificial Sequence: Synthetic oligonucleotide
  Antisense strand to SEQ ID NO: 981528
auaauaauaaagaaguccc

SEQ ID NO: 981530 - RNA, 19 nt, Artificial Sequence
  Description of Artificial Sequence: Synthetic oligonucleotide
  Sense strand starting at position 2372 of SEQ ID NO: 914146
ucuuguggucugagcggau

SEQ ID NO: 981531 - RNA, 19 nt, Artificial Sequence
  Description of Artificial Sequence: Synthetic oligonucleotide
  Antisense strand to SEQ ID NO: 981530
auccgcucagaccacaaga

SEQ ID NO: 981532 - RNA, 19 nt, Artificial Sequence
  Description of Artificial Sequence: Synthetic oligonucleotide
  Sense strand starting at position 1095 of SEQ ID NO: 914146
ucugccuauccucaggaau

SEQ ID NO: 981533 - RNA, 19 nt, Artificial Sequence
  Description of Artificial Sequence: Synthetic oligonucleotide
  Antisense strand to SEQ ID NO: 981532
auuccugaggauaggcaga

SEQ ID NO: 981534 - RNA, 19 nt, Artificial Sequence
  Description of Artificial Sequence: Synthetic oligonucleotide
  Sense strand starting at position 3546 of SEQ ID NO: 914146
cagcaaaugguccaaugua

SEQ ID NO: 981535 - RNA, 19 nt, Artificial Sequence
  Description of Artificial Sequence: Synthetic oligonucleotide
  Antisense strand to SEQ ID NO: 981534
uacauuggaccauuugcug

SEQ ID NO: 981536 - RNA, 19 nt, Artificial Sequence
  Description of Artificial Sequence: Synthetic oligonucleotide
  Sense strand starting at position 496 of SEQ ID NO: 914146
ugccucucugaguaagaca

SEQ ID NO: 981537 - RNA, 19 nt, Artificial Sequence
  Description of Artificial Sequence: Synthetic oligonucleotide
  Antisense strand to SEQ ID NO: 981536
ugucuuacucagagaggca

SEQ ID NO: 981538 - RNA, 19 nt, Artificial Sequence
  Description of Artificial Sequence: Synthetic oligonucleotide
  Sense strand starting at position 1504 of SEQ ID NO: 914146
ugaggagcugugcaauaau

SEQ ID NO: 981539 - RNA, 19 nt, Artificial Sequence
  Description of Artificial Sequence: Synthetic oligonucleotide
  Antisense strand to SEQ ID NO: 981538
auuauugcacagcuccuca

SEQ ID NO: 981540 - RNA, 19 nt, Artificial Sequence
  Description of Artificial Sequence: Synthetic oligonucleotide
  Sense strand starting at position 677 of SEQ ID NO: 914146
guaaaccuugugcaagauu

SEQ ID NO: 981541 - RNA, 19 nt, Artificial Sequence
  Description of Artificial Sequence: Synthetic oligonucleotide
  Antisense strand to SEQ ID NO: 981540
aaucuugcacaagguuuac

SEQ ID NO: 981542 - RNA, 19 nt, Artificial Sequence
  Description of Artificial Sequence: Synthetic oligonucleotide
  Sense strand starting at position 1047 of SEQ ID NO: 914146
aucugagucuauuccuaca

SEQ ID NO: 981543 - RNA, 19 nt, Artificial Sequence
  Description of Artificial Sequence: Synthetic oligonucleotide
  Antisense strand to SEQ ID NO: 981542
uguaggaauagacucagau

SEQ ID NO: 981544 - RNA, 19 nt, Artificial Sequence
  Description of Artificial Sequence: Synthetic oligonucleotide
  Sense strand starting at position 1022 of SEQ ID NO: 914146
gugugaacauuaucuuuaa

SEQ ID NO: 981545 - RNA, 19 nt, Artificial Sequence
  Description of Artificial Sequence: Synthetic oligonucleotide
  Antisense strand to SEQ ID NO: 981544
uuaaagauaauguucacac

SEQ ID NO: 981546 - RNA, 19 nt, Artificial Sequence
  Description of Artificial Sequence: Synthetic oligonucleotide
  Sense strand starting at position 2917 of SEQ ID NO: 914146
ccuguaagccuggauaggu

SEQ ID NO: 981547 - RNA, 19 nt, Artificial Sequence
  Description of Artificial Sequence: Synthetic oligonucleotide
  Antisense strand to SEQ ID NO: 981546
accuauccaggcuuacagg

SEQ ID NO: 981548 - RNA, 19 nt, Artificial Sequence
  Description of Artificial Sequence: Synthetic oligonucleotide
  Sense strand starting at position 3939 of SEQ ID NO: 914146
ccauacauuugcuaaagga

SEQ ID NO: 981549 - RNA, 19 nt, Artificial Sequence
  Description of Artificial Sequence: Synthetic oligonucleotide
  Antisense strand to SEQ ID NO: 981548
uccuuuagcaaauguaugg

SEQ ID NO: 981550 - RNA, 19 nt, Artificial Sequence
  Description of Artificial Sequence: Synthetic oligonucleotide
  Sense strand starting at position 560 of SEQ ID NO: 914146
aggaacauuuauuaagcuu

SEQ ID NO: 981551 - RNA, 19 nt, Artificial Sequence
  Description of Artificial Sequence: Synthetic oligonucleotide
  Antisense strand to SEQ ID NO: 981550
aagcuuaauaaauguuccu

SEQ ID NO: 981552 - RNA, 19 nt, Artificial Sequence
  Description of Artificial Sequence: Synthetic oligonucleotide
  Sense strand starting at position 688 of SEQ ID NO: 914146
gcaagauucuaugcugagg

SEQ ID NO: 981553 - RNA, 19 nt, Artificial Sequence
  Description of Artificial Sequence: Synthetic oligonucleotide
  Antisense strand to SEQ ID NO: 981552
ccucagcauagaaucuugc

SEQ ID NO: 981554 - RNA, 19 nt, Artificial Sequence
  Description of Artificial Sequence: Synthetic oligonucleotide
  Sense strand starting at position 1041 of SEQ ID NO: 914146
cuuacuaucugagucuauu

SEQ ID NO: 981555 - RNA, 19 nt, Artificial Sequence
  Description of Artificial Sequence: Synthetic oligonucleotide
  Antisense strand to SEQ ID NO: 981554
aauagacucagauaguaag

SEQ ID NO: 981556 - RNA, 19 nt, Artificial Sequence
  Description of Artificial Sequence: Synthetic oligonucleotide
  Sense strand starting at position 3788 of SEQ ID NO: 914146
ugcugaaacuccuccugau

SEQ ID NO: 981557 - RNA, 19 nt, Artificial Sequence
  Description of Artificial Sequence: Synthetic oligonucleotide
  Antisense strand to SEQ ID NO: 981556
aucaggaggaguuucagca

SEQ ID NO: 981558 - RNA, 19 nt, Artificial Sequence
  Description of Artificial Sequence: Synthetic oligonucleotide
  Sense strand starting at position 2325 of SEQ ID NO: 914146
cuaguacucguugggagaa

SEQ ID NO: 981559 - RNA, 19 nt, Artificial Sequence
  Description of Artificial Sequence: Synthetic oligonucleotide
  Antisense strand to SEQ ID NO: 981558
uucucccaacgaguacuag

SEQ ID NO: 981560 - RNA, 19 nt, Artificial Sequence
  Description of Artificial Sequence: Synthetic oligonucleotide
  Sense strand starting at position 3460 of SEQ ID NO: 914146
uugugaacugcucauccuu

SEQ ID NO: 981561 - RNA, 19 nt, Artificial Sequence
  Description of Artificial Sequence: Synthetic oligonucleotide
  Antisense strand to SEQ ID NO: 981560
aaggaugagcaguucacaa

SEQ ID NO: 981562 - RNA, 19 nt, Artificial Sequence
  Description of Artificial Sequence: Synthetic oligonucleotide
  Sense strand starting at position 1013 of SEQ ID NO: 914146
cugggucaggugugaacau

SEQ ID NO: 981563 - RNA, 19 nt, Artificial Sequence
  Description of Artificial Sequence: Synthetic oligonucleotide
  Antisense strand to SEQ ID NO: 981562
auguucacaccugacccag

SEQ ID NO: 981564 - RNA, 19 nt, Artificial Sequence
  Description of Artificial Sequence: Synthetic oligonucleotide
  Sense strand starting at position 2216 of SEQ ID NO: 914146
ggauuccugaccggcucaa

SEQ ID NO: 981565 - RNA, 19 nt, Artificial Sequence
  Description of Artificial Sequence: Synthetic oligonucleotide
  Antisense strand to SEQ ID NO: 981564
uugagccggucaggaaucc

SEQ ID NO: 981566 - RNA, 19 nt, Artificial Sequence
  Description of Artificial Sequence: Synthetic oligonucleotide
  Sense strand starting at position 3349 of SEQ ID NO: 914146
gaaugauaagcgugaguca

SEQ ID NO: 981567 - RNA, 19 nt, Artificial Sequence
  Description of Artificial Sequence: Synthetic oligonucleotide
  Antisense strand to SEQ ID NO: 981566
ugacucacgcuuaucauuc

SEQ ID NO: 981568 - RNA, 19 nt, Artificial Sequence
  Description of Artificial Sequence: Synthetic oligonucleotide
  Sense strand starting at position 676 of SEQ ID NO: 914146
uguaaaccuugugcaagau

SEQ ID NO: 981569 - RNA, 19 nt, Artificial Sequence
  Description of Artificial Sequence: Synthetic oligonucleotide
  Antisense strand to SEQ ID NO: 981568
aucuugcacaagguuuaca

SEQ ID NO: 981570 - RNA, 19 nt, Artificial Sequence
  Description of Artificial Sequence: Synthetic oligonucleotide
  Sense strand starting at position 1058 of SEQ ID NO: 914146
uuccuacaucugugaagca

SEQ ID NO: 981571 - RNA, 19 nt, Artificial Sequence
  Description of Artificial Sequence: Synthetic oligonucleotide
  Antisense strand to SEQ ID NO: 981570
ugcuucacagauguaggaa

SEQ ID NO: 981572 - RNA, 19 nt, Artificial Sequence
  Description of Artificial Sequence: Synthetic oligonucleotide
  Sense strand starting at position 1618 of SEQ ID NO: 914146
guuaaaugccuuuaugcua

SEQ ID NO: 981573 - RNA, 19 nt, Artificial Sequence
  Description of Artificial Sequence: Synthetic oligonucleotide
  Antisense strand to SEQ ID NO: 981572
uagcauaaaggcauuuaac

SEQ ID NO: 981574 - RNA, 19 nt, Artificial Sequence
  Description of Artificial Sequence: Synthetic oligonucleotide
  Sense strand starting at position 2324 of SEQ ID NO: 914146
ccuaguacucguugggaga

SEQ ID NO: 981575 - RNA, 19 nt, Artificial Sequence
  Description of Artificial Sequence: Synthetic oligonucleotide
  Antisense strand to SEQ ID NO: 981574
ucucccaacgaguacuagg

SEQ ID NO: 981576 - RNA, 19 nt, Artificial Sequence
  Description of Artificial Sequence: Synthetic oligonucleotide
  Sense strand starting at position 3347 of SEQ ID NO: 914146
uggaaugauaagcgugagu

SEQ ID NO: 981577 - RNA, 19 nt, Artificial Sequence
  Description of Artificial Sequence: Synthetic oligonucleotide
  Antisense strand to SEQ ID NO: 981576
acucacgcuuaucauucca

SEQ ID NO: 981578 - RNA, 19 nt, Artificial Sequence
  Description of Artificial Sequence: Synthetic oligonucleotide
  Sense strand starting at position 835 of SEQ ID NO: 914146
gcagcaacaucucccugau

SEQ ID NO: 981579 - RNA, 19 nt, Artificial Sequence
  Description of Artificial Sequence: Synthetic oligonucleotide
  Antisense strand to SEQ ID NO: 981578
aucagggagauguugcugc

SEQ ID NO: 981580 - RNA, 19 nt, Artificial Sequence
  Description of Artificial Sequence: Synthetic oligonucleotide
  Sense strand starting at position 3462 of SEQ ID NO: 914146
gugaacugcucauccuuau

SEQ ID NO: 981581 - RNA, 19 nt, Artificial Sequence
  Description of Artificial Sequence: Synthetic oligonucleotide
  Antisense strand to SEQ ID NO: 981580
auaaggaugagcaguucac

SEQ ID NO: 981582 - RNA, 19 nt, Artificial Sequence
  Description of Artificial Sequence: Synthetic oligonucleotide
  Sense strand starting at position 447 of SEQ ID NO: 914146
ugcuuaacugugggaguca

SEQ ID NO: 981583 - RNA, 19 nt, Artificial Sequence
  Description of Artificial Sequence: Synthetic oligonucleotide
  Antisense strand to SEQ ID NO: 981582
ugacucccacaguuaagca

SEQ ID NO: 981584 - RNA, 19 nt, Artificial Sequence
  Description of Artificial Sequence: Synthetic oligonucleotide
  Sense strand starting at position 2670 of SEQ ID NO: 914146
cuuguugaguccucacauc

SEQ ID NO: 981585 - RNA, 19 nt, Artificial Sequence
  Description of Artificial Sequence: Synthetic oligonucleotide
  Antisense strand to SEQ ID NO: 981584
gaugugaggacucaacaag

SEQ ID NO: 981586 - RNA, 19 nt, Artificial Sequence
  Description of Artificial Sequence: Synthetic oligonucleotide
  Sense strand starting at position 2202 of SEQ ID NO: 914146
gggucagguugccuggauu

SEQ ID NO: 981587 - RNA, 19 nt, Artificial Sequence
  Description of Artificial Sequence: Synthetic oligonucleotide
  Antisense strand to SEQ ID NO: 981586
aauccaggcaaccugaccc

SEQ ID NO: 981588 - RNA, 19 nt, Artificial Sequence
  Description of Artificial Sequence: Synthetic oligonucleotide
  Sense strand starting at position 495 of SEQ ID NO: 914146
gugccucucugaguaagac

SEQ ID NO: 981589 - RNA, 19 nt, Artificial Sequence
  Description of Artificial Sequence: Synthetic oligonucleotide
  Antisense strand to SEQ ID NO: 981588
gucuuacucagagaggcac

SEQ ID NO: 981590 - RNA, 19 nt, Artificial Sequence
  Description of Artificial Sequence: Synthetic oligonucleotide
  Sense strand starting at position 611 of SEQ ID NO: 914146
cagaaacaaucugggaaga

SEQ ID NO: 981591 - RNA, 19 nt, Artificial Sequence
  Description of Artificial Sequence: Synthetic oligonucleotide
  Antisense strand to SEQ ID NO: 981590
ucuucccagauuguuucug

SEQ ID NO: 981592 - RNA, 19 nt, Artificial Sequence
  Description of Artificial Sequence: Synthetic oligonucleotide
  Sense strand starting at position 122 of SEQ ID NO: 914147
uuauguaauuuagugucca

SEQ ID NO: 981593 - RNA, 19 nt, Artificial Sequence
  Description of Artificial Sequence: Synthetic oligonucleotide
  Antisense strand to SEQ ID NO: 981592
uggacacuaaauuacauaa

SEQ ID NO: 981594 - RNA, 19 nt, Artificial Sequence
  Description of Artificial Sequence: Synthetic oligonucleotide
  Sense strand starting at position 232 of SEQ ID NO: 914147
aguauaaaugacuguagaa

SEQ ID NO: 981595 - RNA, 19 nt, Artificial Sequence
  Description of Artificial Sequence: Synthetic oligonucleotide
  Antisense strand to SEQ ID NO: 981594
uucuacagucauuuauacu

SEQ ID NO: 981596 - RNA, 19 nt, Artificial Sequence
  Description of Artificial Sequence: Synthetic oligonucleotide
  Sense strand starting at position 130 of SEQ ID NO: 914147
uuuaguguccaggagaauu

SEQ ID NO: 981597 - RNA, 19 nt, Artificial Sequence
  Description of Artificial Sequence: Synthetic oligonucleotide
  Antisense strand to SEQ ID NO: 981596
aauucuccuggacacuaaa

SEQ ID NO: 981598 - RNA, 19 nt, Artificial Sequence
  Description of Artificial Sequence: Synthetic oligonucleotide
  Sense strand starting at position 231 of SEQ ID NO: 914147
caguauaaaugacuguaga

SEQ ID NO: 981599 - RNA, 19 nt, Artificial Sequence
  Description of Artificial Sequence: Synthetic oligonucleotide
  Antisense strand to SEQ ID NO: 981598
ucuacagucauuuauacug

SEQ ID NO: 981600 - RNA, 19 nt, Artificial Sequence
  Description of Artificial Sequence: Synthetic oligonucleotide
  Sense strand starting at position 80 of SEQ ID NO: 914147
ccaucuucugauuaugagu

SEQ ID NO: 981601 - RNA, 19 nt, Artificial Sequence
  Description of Artificial Sequence: Synthetic oligonucleotide
  Antisense strand to SEQ ID NO: 981600
acucauaaucagaagaugg

SEQ ID NO: 981602 - RNA, 19 nt, Artificial Sequence
  Description of Artificial Sequence: Synthetic oligonucleotide
  Sense strand starting at position 2193 of SEQ ID NO: 914147
gcacauccauuauuagaag

SEQ ID NO: 981603 - RNA, 19 nt, Artificial Sequence
  Description of Artificial Sequence: Synthetic oligonucleotide
  Antisense strand to SEQ ID NO: 981602
cuucuaauaauggaugugc

SEQ ID NO: 981604 - RNA, 19 nt, Artificial Sequence
  Description of Artificial Sequence: Synthetic oligonucleotide
  Sense strand starting at position 640 of SEQ ID NO: 914147
gcauauauacuuuaucgaa

SEQ ID NO: 981605 - RNA, 19 nt, Artificial Sequence
  Description of Artificial Sequence: Synthetic oligonucleotide
  Antisense strand to SEQ ID NO: 981604
uucgauaaaguauauaugc

SEQ ID NO: 981606 - RNA, 19 nt, Artificial Sequence
  Description of Artificial Sequence: Synthetic oligonucleotide
  Sense strand starting at position 2700 of SEQ ID NO: 914147
ugacaauugucuccaugaa

SEQ ID NO: 981607 - RNA, 19 nt, Artificial Sequence
  Description of Artificial Sequence: Synthetic oligonucleotide
  Antisense strand to SEQ ID NO: 981606
uucauggagacaauuguca

SEQ ID NO: 981608 - RNA, 19 nt, Artificial Sequence
  Description of Artificial Sequence: Synthetic oligonucleotide
  Sense strand starting at position 3631 of SEQ ID NO: 914147
uguggugucggugacauuu

SEQ ID NO: 981609 - RNA, 19 nt, Artificial Sequence
  Description of Artificial Sequence: Synthetic oligonucleotide
  Antisense strand to SEQ ID NO: 981608
aaaugucaccgacaccaca

SEQ ID NO: 981610 - RNA, 19 nt, Artificial Sequence
  Description of Artificial Sequence: Synthetic oligonucleotide
  Sense strand starting at position 3407 of SEQ ID NO: 914147
uuaguauguguuagggugu

SEQ ID NO: 981611 - RNA, 19 nt, Artificial Sequence
  Description of Artificial Sequence: Synthetic oligonucleotide
  Antisense strand to SEQ ID NO: 981610
acacccuaacacauacuaa

SEQ ID NO: 981612 - RNA, 19 nt, Artificial Sequence
  Description of Artificial Sequence: Synthetic oligonucleotide
  Sense strand starting at position 3514 of SEQ ID NO: 914147
aggccagaagaguguaaau

SEQ ID NO: 981613 - RNA, 19 nt, Artificial Sequence
  Description of Artificial Sequence: Synthetic oligonucleotide
  Antisense strand to SEQ ID NO: 981612
auuuacacucuucuggccu

SEQ ID NO: 981614 - RNA, 19 nt, Artificial Sequence
  Description of Artificial Sequence: Synthetic oligonucleotide
  Sense strand starting at position 2625 of SEQ ID NO: 914147
agaagccuguuaucaagau

SEQ ID NO: 981615 - RNA, 19 nt, Artificial Sequence
  Description of Artificial Sequence: Synthetic oligonucleotide
  Antisense strand to SEQ ID NO: 981614
aucuugauaacaggcuucu

SEQ ID NO: 981616 - RNA, 19 nt, Artificial Sequence
  Description of Artificial Sequence: Synthetic oligonucleotide
  Sense strand starting at position 111 of SEQ ID NO: 914147
cuccgauaaguuuauguaa

SEQ ID NO: 981617 - RNA, 19 nt, Artificial Sequence
  Description of Artificial Sequence: Synthetic oligonucleotide
  Antisense strand to SEQ ID NO: 981616
uuacauaaacuuaucggag

SEQ ID NO: 981618 - RNA, 19 nt, Artificial Sequence
  Description of Artificial Sequence: Synthetic oligonucleotide
  Sense strand starting at position 3785 of SEQ ID NO: 914147
aggucaagguggguugaua

SEQ ID NO: 981619 - RNA, 19 nt, Artificial Sequence
  Description of Artificial Sequence: Synthetic oligonucleotide
  Antisense strand to SEQ ID NO: 981618
uaucaacccaccuugaccu

SEQ ID NO: 981620 - RNA, 19 nt, Artificial Sequence
  Description of Artificial Sequence: Synthetic oligonucleotide
  Sense strand starting at position 2660 of SEQ ID NO: 914147
aucugugacuagcucaaau

SEQ ID NO: 981621 - RNA, 19 nt, Artificial Sequence
  Description of Artificial Sequence: Synthetic oligonucleotide
  Antisense strand to SEQ ID NO: 981620
auuugagcuagucacagau

SEQ ID NO: 981622 - RNA, 19 nt, Artificial Sequence
  Description of Artificial Sequence: Synthetic oligonucleotide
  Sense strand starting at position 2299 of SEQ ID NO: 914147
uugugugauagucaauucu

SEQ ID NO: 981623 - RNA, 19 nt, Artificial Sequence
  Description of Artificial Sequence: Synthetic oligonucleotide
  Antisense strand to SEQ ID NO: 981622
agaauugacuaucacacaa

SEQ ID NO: 981624 - RNA, 19 nt, Artificial Sequence
  Description of Artificial Sequence: Synthetic oligonucleotide
  Sense strand starting at position 2620 of SEQ ID NO: 914147
acauuagaagccuguuauc

SEQ ID NO: 981625 - RNA, 19 nt, Artificial Sequence
  Description of Artificial Sequence: Synthetic oligonucleotide
  Antisense strand to SEQ ID NO: 981624
gauaacaggcuucuaaugu

SEQ ID NO: 981626 - RNA, 19 nt, Artificial Sequence
  Description of Artificial Sequence: Synthetic oligonucleotide
  Sense strand starting at position 105 of SEQ ID NO: 914147
agcucacuccgauaaguuu

SEQ ID NO: 981627 - RNA, 19 nt, Artificial Sequence
  Description of Artificial Sequence: Synthetic oligonucleotide
  Antisense strand to SEQ ID NO: 981626
aaacuuaucggagugagcu

SEQ ID NO: 981628 - RNA, 19 nt, Artificial Sequence
  Description of Artificial Sequence: Synthetic oligonucleotide
  Sense strand starting at position 87 of SEQ ID NO: 914147
cugauuaugaguuguguaa

SEQ ID NO: 981629 - RNA, 19 nt, Artificial Sequence
  Description of Artificial Sequence: Synthetic oligonucleotide
  Antisense strand to SEQ ID NO: 981628
uuacacaacucauaaucag

SEQ ID NO: 981630 - RNA, 19 nt, Artificial Sequence
  Description of Artificial Sequence: Synthetic oligonucleotide
  Sense strand starting at position 2308 of SEQ ID NO: 914147
agucaauucuuguuaagua

SEQ ID NO: 981631 - RNA, 19 nt, Artificial Sequence
  Description of Artificial Sequence: Synthetic oligonucleotide
  Antisense strand to SEQ ID NO: 981630
uacuuaacaagaauugacu

SEQ ID NO: 981632 - RNA, 19 nt, Artificial Sequence
  Description of Artificial Sequence: Synthetic oligonucleotide
  Sense strand starting at position 2657 of SEQ ID NO: 914147
gcuaucugugacuagcuca

SEQ ID NO: 981633 - RNA, 19 nt, Artificial Sequence
  Description of Artificial Sequence: Synthetic oligonucleotide
  Antisense strand to SEQ ID NO: 981632
ugagcuagucacagauagc

SEQ ID NO: 981634 - RNA, 19 nt, Artificial Sequence
  Description of Artificial Sequence: Synthetic oligonucleotide
  Sense strand starting at position 3525 of SEQ ID NO: 914147
guguaaaugaagugcuaca

SEQ ID NO: 981635 - RNA, 19 nt, Artificial Sequence
  Description of Artificial Sequence: Synthetic oligonucleotide
  Antisense strand to SEQ ID NO: 981634
uguagcacuucauuuacac

SEQ ID NO: 981636 - RNA, 19 nt, Artificial Sequence
  Description of Artificial Sequence: Synthetic oligonucleotide
  Sense strand starting at position 207 of SEQ ID NO: 914147
cccaucucauguguuauua

SEQ ID NO: 981637 - RNA, 19 nt, Artificial Sequence
  Description of Artificial Sequence: Synthetic oligonucleotide
  Antisense strand to SEQ ID NO: 981636
uaauaacacaugagauggg

SEQ ID NO: 981638 - RNA, 19 nt, Artificial Sequence
  Description of Artificial Sequence: Synthetic oligonucleotide
  Sense strand starting at position 3454 of SEQ ID NO: 914147
uucugaaagugcuugaggu

SEQ ID NO: 981639 - RNA, 19 nt, Artificial Sequence
  Description of Artificial Sequence: Synthetic oligonucleotide
  Antisense strand to SEQ ID NO: 981638
accucaagcacuuucagaa

SEQ ID NO: 981640 - RNA, 19 nt, Artificial Sequence
  Description of Artificial Sequence: Synthetic oligonucleotide
  Sense strand starting at position 3413 of SEQ ID NO: 914147
uguguuagggugugaagau

SEQ ID NO: 981641 - RNA, 19 nt, Artificial Sequence
  Description of Artificial Sequence: Synthetic oligonucleotide
  Antisense strand to SEQ ID NO: 981640
aucuucacacccuaacaca

SEQ ID NO: 981642 - RNA, 19 nt, Artificial Sequence
  Description of Artificial Sequence: Synthetic oligonucleotide
  Sense strand starting at position 91 of SEQ ID NO: 914147
uuaugaguuguguaagcuc

SEQ ID NO: 981643 - RNA, 19 nt, Artificial Sequence
  Description of Artificial Sequence: Synthetic oligonucleotide
  Antisense strand to SEQ ID NO: 981642
gagcuuacacaacucauaa

SEQ ID NO: 981644 - RNA, 19 nt, Artificial Sequence
  Description of Artificial Sequence: Synthetic oligonucleotide
  Sense strand starting at position 1216 of SEQ ID NO: 914147
gugcaugccggugaaauaa

SEQ ID NO: 981645 - RNA, 19 nt, Artificial Sequence
  Description of Artificial Sequence: Synthetic oligonucleotide
  Antisense strand to SEQ ID NO: 981644
uuauuucaccggcaugcac

SEQ ID NO: 981646 - RNA, 19 nt, Artificial Sequence
  Description of Artificial Sequence: Synthetic oligonucleotide
  Sense strand starting at position 217 of SEQ ID NO: 914147
guguuauuaucacucagua

SEQ ID NO: 981647 - RNA, 19 nt, Artificial Sequence
  Description of Artificial Sequence: Synthetic oligonucleotide
  Antisense strand to SEQ ID NO: 981646
uacugagugauaauaacac

SEQ ID NO: 981648 - RNA, 19 nt, Artificial Sequence
  Description of Artificial Sequence: Synthetic oligonucleotide
  Sense strand starting at position 2133 of SEQ ID NO: 914147
uaacaaccguggucucuua

SEQ ID NO: 981649 - RNA, 19 nt, Artificial Sequence
  Description of Artificial Sequence: Synthetic oligonucleotide
  Antisense strand to SEQ ID NO: 981648
uaagagaccacgguuguua

SEQ ID NO: 981650 - RNA, 19 nt, Artificial Sequence
  Description of Artificial Sequence: Synthetic oligonucleotide
  Sense strand starting at position 3443 of SEQ ID NO: 914147
agcaguuccuguucugaaa

SEQ ID NO: 981651 - RNA, 19 nt, Artificial Sequence
  Description of Artificial Sequence: Synthetic oligonucleotide
  Antisense strand to SEQ ID NO: 981650
uuucagaacaggaacugcu

SEQ ID NO: 981652 - RNA, 19 nt, Artificial Sequence
  Description of Artificial Sequence: Synthetic oligonucleotide
  Sense strand starting at position 1367 of SEQ ID NO: 914147
gggauucccuacuaaagaa

SEQ ID NO: 981653 - RNA, 19 nt, Artificial Sequence
  Description of Artificial Sequence: Synthetic oligonucleotide
  Antisense strand to SEQ ID NO: 981652
uucuuuaguagggaauccc

SEQ ID NO: 981654 - RNA, 19 nt, Artificial Sequence
  Description of Artificial Sequence: Synthetic oligonucleotide
  Sense strand starting at position 85 of SEQ ID NO: 914147
uucugauuaugaguugugu

SEQ ID NO: 981655 - RNA, 19 nt, Artificial Sequence
  Description of Artificial Sequence: Synthetic oligonucleotide
  Antisense strand to SEQ ID NO: 981654
acacaacucauaaucagaa

SEQ ID NO: 981656 - RNA, 19 nt, Artificial Sequence
  Description of Artificial Sequence: Synthetic oligonucleotide
  Sense strand starting at position 3451 of SEQ ID NO: 914147
cuguucugaaagugcuuga

SEQ ID NO: 981657 - RNA, 19 nt, Artificial Sequence
  Description of Artificial Sequence: Synthetic oligonucleotide
  Antisense strand to SEQ ID NO: 981656
ucaagcacuuucagaacag

SEQ ID NO: 981658 - RNA, 19 nt, Artificial Sequence
  Description of Artificial Sequence: Synthetic oligonucleotide
  Sense strand starting at position 2070 of SEQ ID NO: 914147
aucgcuaaccagugacuuu

SEQ ID NO: 981659 - RNA, 19 nt, Artificial Sequence
  Description of Artificial Sequence: Synthetic oligonucleotide
  Antisense strand to SEQ ID NO: 981658
aaagucacugguuagcgau

SEQ ID NO: 981660 - RNA, 19 nt, Artificial Sequence
  Description of Artificial Sequence: Synthetic oligonucleotide
  Sense strand starting at position 2275 of SEQ ID NO: 914147
uugcuaacguuagcacaaa

SEQ ID NO: 981661 - RNA, 19 nt, Artificial Sequence
  Description of Artificial Sequence: Synthetic oligonucleotide
  Antisense strand to SEQ ID NO: 981660
uuugugcuaacguuagcaa

SEQ ID NO: 981662 - RNA, 19 nt, Artificial Sequence
  Description of Artificial Sequence: Synthetic oligonucleotide
  Sense strand starting at position 2609 of SEQ ID NO: 914147
cugaaauggugacauuaga

SEQ ID NO: 981663 - RNA, 19 nt, Artificial Sequence
  Description of Artificial Sequence: Synthetic oligonucleotide
  Antisense strand to SEQ ID NO: 981662
ucuaaugucaccauuucag

SEQ ID NO: 981664 - RNA, 19 nt, Artificial Sequence
  Description of Artificial Sequence: Synthetic oligonucleotide
  Sense strand starting at position 2295 of SEQ ID NO: 914147
ccauuugugugauagucaa

SEQ ID NO: 981665 - RNA, 19 nt, Artificial Sequence
  Description of Artificial Sequence: Synthetic oligonucleotide
  Antisense strand to SEQ ID NO: 981664
uugacuaucacacaaaugg

SEQ ID NO: 981666 - RNA, 19 nt, Artificial Sequence
  Description of Artificial Sequence: Synthetic oligonucleotide
  Sense strand starting at position 2293 of SEQ ID NO: 914147
aaccauuugugugauaguc

SEQ ID NO: 981667 - RNA, 19 nt, Artificial Sequence
  Description of Artificial Sequence: Synthetic oligonucleotide
  Antisense strand to SEQ ID NO: 981666
gacuaucacacaaaugguu

SEQ ID NO: 981668 - RNA, 19 nt, Artificial Sequence
  Description of Artificial Sequence: Synthetic oligonucleotide
  Sense strand starting at position 94 of SEQ ID NO: 914147
ugaguuguguaagcucacu

SEQ ID NO: 981669 - RNA, 19 nt, Artificial Sequence
  Description of Artificial Sequence: Synthetic oligonucleotide
  Antisense strand to SEQ ID NO: 981668
agugagcuuacacaacuca

SEQ ID NO: 981670 - RNA, 19 nt, Artificial Sequence
  Description of Artificial Sequence: Synthetic oligonucleotide
  Sense strand starting at position 2551 of SEQ ID NO: 914147
gugcauuaguugccauaua

SEQ ID NO: 981671 - RNA, 19 nt, Artificial Sequence
  Description of Artificial Sequence: Synthetic oligonucleotide
  Antisense strand to SEQ ID NO: 981670
uauauggcaacuaaugcac

SEQ ID NO: 981672 - RNA, 19 nt, Artificial Sequence
  Description of Artificial Sequence: Synthetic oligonucleotide
  Sense strand starting at position 2719 of SEQ ID NO: 914148
gaaugagguguuggaauaa

SEQ ID NO: 981673 - RNA, 19 nt, Artificial Sequence
  Description of Artificial Sequence: Synthetic oligonucleotide
  Antisense strand to SEQ ID NO: 981672
uuauuccaacaccucauuc

SEQ ID NO: 981674 - RNA, 19 nt, Artificial Sequence
  Description of Artificial Sequence: Synthetic oligonucleotide
  Sense strand starting at position 3173 of SEQ ID NO: 914148
cuauuuguguaagcuuaga

SEQ ID NO: 981675 - RNA, 19 nt, Artificial Sequence
  Description of Artificial Sequence: Synthetic oligonucleotide
  Antisense strand to SEQ ID NO: 981674
ucuaagcuuacacaaauag

SEQ ID NO: 981676 - RNA, 19 nt, Artificial Sequence
  Description of Artificial Sequence: Synthetic oligonucleotide
  Sense strand starting at position 2715 of SEQ ID NO: 914148
gaaugaaugagguguugga

SEQ ID NO: 981677 - RNA, 19 nt, Artificial Sequence
  Description of Artificial Sequence: Synthetic oligonucleotide
  Antisense strand to SEQ ID NO: 981676
uccaacaccucauucauuc

SEQ ID NO: 981678 - RNA, 19 nt, Artificial Sequence
  Description of Artificial Sequence: Synthetic oligonucleotide
  Sense strand starting at position 3280 of SEQ ID NO: 914148
guuaaaugaguugauaucu

SEQ ID NO: 981679 - RNA, 19 nt, Artificial Sequence
  Description of Artificial Sequence: Synthetic oligonucleotide
  Antisense strand to SEQ ID NO: 981678
agauaucaacucauuuaac

SEQ ID NO: 981680 - RNA, 19 nt, Artificial Sequence
  Description of Artificial Sequence: Synthetic oligonucleotide
  Sense strand starting at position 2599 of SEQ ID NO: 914148
uggcgugucccuguaaucu

SEQ ID NO: 981681 - RNA, 19 nt, Artificial Sequence
  Description of Artificial Sequence: Synthetic oligonucleotide
  Antisense strand to SEQ ID NO: 981680
agauuacagggacacgcca

SEQ ID NO: 981682 - RNA, 19 nt, Artificial Sequence
  Description of Artificial Sequence: Synthetic oligonucleotide
  Sense strand starting at position 3981 of SEQ ID NO: 914148
gcccaagugggugaggaau

SEQ ID NO: 981683 - RNA, 19 nt, Artificial Sequence
  Description of Artificial Sequence: Synthetic oligonucleotide
  Antisense strand to SEQ ID NO: 981682
auuccucacccacuugggc

SEQ ID NO: 981684 - RNA, 19 nt, Artificial Sequence
  Description of Artificial Sequence: Synthetic oligonucleotide
  Sense strand starting at position 3277 of SEQ ID NO: 914148
uggguuaaaugaguugaua

SEQ ID NO: 981685 - RNA, 19 nt, Artificial Sequence
  Description of Artificial Sequence: Synthetic oligonucleotide
  Antisense strand to SEQ ID NO: 981684
uaucaacucauuuaaccca

SEQ ID NO: 981686 - RNA, 19 nt, Artificial Sequence
  Description of Artificial Sequence: Synthetic oligonucleotide
  Sense strand starting at position 973 of SEQ ID NO: 914148
caggacauagguugucaga

SEQ ID NO: 981687 - RNA, 19 nt, Artificial Sequence
  Description of Artificial Sequence: Synthetic oligonucleotide
  Antisense strand to SEQ ID NO: 981686
ucugacaaccuauguccug

SEQ ID NO: 981688 - RNA, 19 nt, Artificial Sequence
  Description of Artificial Sequence: Synthetic oligonucleotide
  Sense strand starting at position 3438 of SEQ ID NO: 914148
ugaagugucugauuaaaca

SEQ ID NO: 981689 - RNA, 19 nt, Artificial Sequence
  Description of Artificial Sequence: Synthetic oligonucleotide
  Antisense strand to SEQ ID NO: 981688
uguuuaaucagacacuuca

SEQ ID NO: 981690 - RNA, 19 nt, Artificial Sequence
  Description of Artificial Sequence: Synthetic oligonucleotide
  Sense strand starting at position 3082 of SEQ ID NO: 914148
uaguuaagauguuuggaac

SEQ ID NO: 981691 - RNA, 19 nt, Artificial Sequence
  Description of Artificial Sequence: Synthetic oligonucleotide
  Antisense strand to SEQ ID NO: 981690
guuccaaacaucuuaacua

SEQ ID NO: 981692 - RNA, 19 nt, Artificial Sequence
  Description of Artificial Sequence: Synthetic oligonucleotide
  Sense strand starting at position 3346 of SEQ ID NO: 914148
ggugauuaucaauacugcu

SEQ ID NO: 981693 - RNA, 19 nt, Artificial Sequence
  Description of Artificial Sequence: Synthetic oligonucleotide
  Antisense strand to SEQ ID NO: 981692
agcaguauugauaaucacc

SEQ ID NO: 981694 - RNA, 19 nt, Artificial Sequence
  Description of Artificial Sequence: Synthetic oligonucleotide
  Sense strand starting at position 3083 of SEQ ID NO: 914148
aguuaagauguuuggaacu

SEQ ID NO: 981695 - RNA, 19 nt, Artificial Sequence
  Description of Artificial Sequence: Synthetic oligonucleotide
  Antisense strand to SEQ ID NO: 981694
aguuccaaacaucuuaacu

SEQ ID NO: 981696 - RNA, 19 nt, Artificial Sequence
  Description of Artificial Sequence: Synthetic oligonucleotide
  Sense strand starting at position 3279 of SEQ ID NO: 914148
gguuaaaugaguugauauc

SEQ ID NO: 981697 - RNA, 19 nt, Artificial Sequence
  Description of Artificial Sequence: Synthetic oligonucleotide
  Antisense strand to SEQ ID NO: 981696
gauaucaacucauuuaacc

SEQ ID NO: 981698 - RNA, 19 nt, Artificial Sequence
  Description of Artificial Sequence: Synthetic oligonucleotide
  Sense strand starting at position 3225 of SEQ ID NO: 914148
guaucuguaacaugaggau

SEQ ID NO: 981699 - RNA, 19 nt, Artificial Sequence
  Description of Artificial Sequence: Synthetic oligonucleotide
  Antisense strand to SEQ ID NO: 981698
auccucauguuacagauac

SEQ ID NO: 981700 - RNA, 19 nt, Artificial Sequence
  Description of Artificial Sequence: Synthetic oligonucleotide
  Sense strand starting at position 975 of SEQ ID NO: 914148
ggacauagguugucagauu

SEQ ID NO: 981701 - RNA, 19 nt, Artificial Sequence
  Description of Artificial Sequence: Synthetic oligonucleotide
  Antisense strand to SEQ ID NO: 981700
aaucugacaaccuaugucc

SEQ ID NO: 981702 - RNA, 19 nt, Artificial Sequence
  Description of Artificial Sequence: Synthetic oligonucleotide
  Sense strand starting at position 1090 of SEQ ID NO: 914148
accuuaucacuugacguua

SEQ ID NO: 981703 - RNA, 19 nt, Artificial Sequence
  Description of Artificial Sequence: Synthetic oligonucleotide
  Antisense strand to SEQ ID NO: 981702
uaacgucaagugauaaggu

SEQ ID NO: 981704 - RNA, 19 nt, Artificial Sequence
  Description of Artificial Sequence: Synthetic oligonucleotide
  Sense strand starting at position 447 of SEQ ID NO: 914148
guuucuuuacugcagaaac

SEQ ID NO: 981705 - RNA, 19 nt, Artificial Sequence
  Description of Artificial Sequence: Synthetic oligonucleotide
  Antisense strand to SEQ ID NO: 981704
guuucugcaguaaagaaac

SEQ ID NO: 981706 - RNA, 19 nt, Artificial Sequence
  Description of Artificial Sequence: Synthetic oligonucleotide
  Sense strand starting at position 569 of SEQ ID NO: 914148
gugagauaagguugugaca

SEQ ID NO: 981707 - RNA, 19 nt, Artificial Sequence
  Description of Artificial Sequence: Synthetic oligonucleotide
  Antisense strand to SEQ ID NO: 981706
ugucacaaccuuaucucac

SEQ ID NO: 981708 - RNA, 19 nt, Artificial Sequence
  Description of Artificial Sequence: Synthetic oligonucleotide
  Sense strand starting at position 717 of SEQ ID NO: 914148
aaucuuugucaagagcagu

SEQ ID NO: 981709 - RNA, 19 nt, Artificial Sequence
  Description of Artificial Sequence: Synthetic oligonucleotide
  Antisense strand to SEQ ID NO: 981708
acugcucuugacaaagauu

SEQ ID NO: 981710 - RNA, 19 nt, Artificial Sequence
  Description of Artificial Sequence: Synthetic oligonucleotide
  Sense strand starting at position 3339 of SEQ ID NO: 914148
aagugugggugauuaucaa

SEQ ID NO: 981711 - RNA, 19 nt, Artificial Sequence
  Description of Artificial Sequence: Synthetic oligonucleotide
  Antisense strand to SEQ ID NO: 981710
uugauaaucacccacacuu

SEQ ID NO: 981712 - RNA, 19 nt, Artificial Sequence
  Description of Artificial Sequence: Synthetic oligonucleotide
  Sense strand starting at position 3398 of SEQ ID NO: 914148
acuguuguaucaucaauga

SEQ ID NO: 981713 - RNA, 19 nt, Artificial Sequence
  Description of Artificial Sequence: Synthetic oligonucleotide
  Antisense strand to SEQ ID NO: 981712
ucauugaugauacaacagu

SEQ ID NO: 981714 - RNA, 19 nt, Artificial Sequence
  Description of Artificial Sequence: Synthetic oligonucleotide
  Sense strand starting at position 3407 of SEQ ID NO: 914148
ucaucaaugagcuguggga

SEQ ID NO: 981715 - RNA, 19 nt, Artificial Sequence
  Description of Artificial Sequence: Synthetic oligonucleotide
  Antisense strand to SEQ ID NO: 981714
ucccacagcucauugauga

SEQ ID NO: 981716 - RNA, 19 nt, Artificial Sequence
  Description of Artificial Sequence: Synthetic oligonucleotide
  Sense strand starting at position 3170 of SEQ ID NO: 914148
cggcuauuuguguaagcuu

SEQ ID NO: 981717 - RNA, 19 nt, Artificial Sequence
  Description of Artificial Sequence: Synthetic oligonucleotide
  Antisense strand to SEQ ID NO: 981716
aagcuuacacaaauagccg

SEQ ID NO: 981718 - RNA, 19 nt, Artificial Sequence
  Description of Artificial Sequence: Synthetic oligonucleotide
  Sense strand starting at position 3411 of SEQ ID NO: 914148
caaugagcugugggaggua

SEQ ID NO: 981719 - RNA, 19 nt, Artificial Sequence
  Description of Artificial Sequence: Synthetic oligonucleotide
  Antisense strand to SEQ ID NO: 981718
uaccucccacagcucauug

SEQ ID NO: 981720 - RNA, 19 nt, Artificial Sequence
  Description of Artificial Sequence: Synthetic oligonucleotide
  Sense strand starting at position 3927 of SEQ ID NO: 914148
aguaaacuauuguccuuau

SEQ ID NO: 981721 - RNA, 19 nt, Artificial Sequence
  Description of Artificial Sequence: Synthetic oligonucleotide
  Antisense strand to SEQ ID NO: 981720
auaaggacaauaguuuacu

SEQ ID NO: 981722 - RNA, 19 nt, Artificial Sequence
  Description of Artificial Sequence: Synthetic oligonucleotide
  Sense strand starting at position 3337 of SEQ ID NO: 914148
guaagugugggugauuauc

SEQ ID NO: 981723 - RNA, 19 nt, Artificial Sequence
  Description of Artificial Sequence: Synthetic oligonucleotide
  Antisense strand to SEQ ID NO: 981722
gauaaucacccacacuuac

SEQ ID NO: 981724 - RNA, 19 nt, Artificial Sequence
  Description of Artificial Sequence: Synthetic oligonucleotide
  Sense strand starting at position 3073 of SEQ ID NO: 914148
uguccucauuaguuaagau

SEQ ID NO: 981725 - RNA, 19 nt, Artificial Sequence
  Description of Artificial Sequence: Synthetic oligonucleotide
  Antisense strand to SEQ ID NO: 981724
aucuuaacuaaugaggaca

SEQ ID NO: 981726 - RNA, 19 nt, Artificial Sequence
  Description of Artificial Sequence: Synthetic oligonucleotide
  Sense strand starting at position 3072 of SEQ ID NO: 914148
cuguccucauuaguuaaga

SEQ ID NO: 981727 - RNA, 19 nt, Artificial Sequence
  Description of Artificial Sequence: Synthetic oligonucleotide
  Antisense strand to SEQ ID NO: 981726
ucuuaacuaaugaggacag

SEQ ID NO: 981728 - RNA, 19 nt, Artificial Sequence
  Description of Artificial Sequence: Synthetic oligonucleotide
  Sense strand starting at position 572 of SEQ ID NO: 914148
agauaagguugugacauuu

SEQ ID NO: 981729 - RNA, 19 nt, Artificial Sequence
  Description of Artificial Sequence: Synthetic oligonucleotide
  Antisense strand to SEQ ID NO: 981728
aaaugucacaaccuuaucu

SEQ ID NO: 981730 - RNA, 19 nt, Artificial Sequence
  Description of Artificial Sequence: Synthetic oligonucleotide
  Sense strand starting at position 2677 of SEQ ID NO: 914148
cggguaacauagcuagacu

SEQ ID NO: 981731 - RNA, 19 nt, Artificial Sequence
  Description of Artificial Sequence: Synthetic oligonucleotide
  Antisense strand to SEQ ID NO: 981730
agucuagcuauguuacccg

SEQ ID NO: 981732 - RNA, 19 nt, Artificial Sequence
  Description of Artificial Sequence: Synthetic oligonucleotide
  Sense strand starting at position 3414 of SEQ ID NO: 914148
ugagcugugggagguauau

SEQ ID NO: 981733 - RNA, 19 nt, Artificial Sequence
  Description of Artificial Sequence: Synthetic oligonucleotide
  Antisense strand to SEQ ID NO: 981732
auauaccucccacagcuca

SEQ ID NO: 981734 - RNA, 19 nt, Artificial Sequence
  Description of Artificial Sequence: Synthetic oligonucleotide
  Sense strand starting at position 3435 of SEQ ID NO: 914148
agcugaagugucugauuaa

SEQ ID NO: 981735 - RNA, 19 nt, Artificial Sequence
  Description of Artificial Sequence: Synthetic oligonucleotide
  Antisense strand to SEQ ID NO: 981734
uuaaucagacacuucagcu

SEQ ID NO: 981736 - RNA, 19 nt, Artificial Sequence
  Description of Artificial Sequence: Synthetic oligonucleotide
  Sense strand starting at position 3928 of SEQ ID NO: 914148
guaaacuauuguccuuauu

SEQ ID NO: 981737 - RNA, 19 nt, Artificial Sequence
  Description of Artificial Sequence: Synthetic oligonucleotide
  Antisense strand to SEQ ID NO: 981736
aauaaggacaauaguuuac

SEQ ID NO: 981738 - RNA, 19 nt, Artificial Sequence
  Description of Artificial Sequence: Synthetic oligonucleotide
  Sense strand starting at position 2519 of SEQ ID NO: 914148
gagggcuggucaucaucuu

SEQ ID NO: 981739 - RNA, 19 nt, Artificial Sequence
  Description of Artificial Sequence: Synthetic oligonucleotide
  Antisense strand to SEQ ID NO: 981738
aagaugaugaccagcccuc

SEQ ID NO: 981740 - RNA, 19 nt, Artificial Sequence
  Description of Artificial Sequence: Synthetic oligonucleotide
  Sense strand starting at position 976 of SEQ ID NO: 914148
gacauagguugucagauuu

SEQ ID NO: 981741 - RNA, 19 nt, Artificial Sequence
  Description of Artificial Sequence: Synthetic oligonucleotide
  Antisense strand to SEQ ID NO: 981740
aaaucugacaaccuauguc

SEQ ID NO: 981742 - RNA, 19 nt, Artificial Sequence
  Description of Artificial Sequence: Synthetic oligonucleotide
  Sense strand starting at position 3070 of SEQ ID NO: 914148
ugcuguccucauuaguuaa

SEQ ID NO: 981743 - RNA, 19 nt, Artificial Sequence
  Description of Artificial Sequence: Synthetic oligonucleotide
  Antisense strand to SEQ ID NO: 981742
uuaacuaaugaggacagca

SEQ ID NO: 981744 - RNA, 19 nt, Artificial Sequence
  Description of Artificial Sequence: Synthetic oligonucleotide
  Sense strand starting at position 3712 of SEQ ID NO: 914148
acgagaauugcuugagcac

SEQ ID NO: 981745 - RNA, 19 nt, Artificial Sequence
  Description of Artificial Sequence: Synthetic oligonucleotide
  Antisense strand to SEQ ID NO: 981744
gugcucaagcaauucucgu

SEQ ID NO: 981746 - RNA, 19 nt, Artificial Sequence
  Description of Artificial Sequence: Synthetic oligonucleotide
  Sense strand starting at position 3169 of SEQ ID NO: 914148
ucggcuauuuguguaagcu

SEQ ID NO: 981747 - RNA, 19 nt, Artificial Sequence
  Description of Artificial Sequence: Synthetic oligonucleotide
  Antisense strand to SEQ ID NO: 981746
agcuuacacaaauagccga

SEQ ID NO: 981748 - RNA, 19 nt, Artificial Sequence
  Description of Artificial Sequence: Synthetic oligonucleotide
  Sense strand starting at position 3160 of SEQ ID NO: 914148
ggcucugucucggcuauuu

SEQ ID NO: 981749 - RNA, 19 nt, Artificial Sequence
  Description of Artificial Sequence: Synthetic oligonucleotide
  Antisense strand to SEQ ID NO: 981748
aaauagccgagacagagcc

SEQ ID NO: 981750 - RNA, 19 nt, Artificial Sequence
  Description of Artificial Sequence: Synthetic oligonucleotide
  Sense strand starting at position 444 of SEQ ID NO: 914148
cuaguuucuuuacugcaga

SEQ ID NO: 981751 - RNA, 19 nt, Artificial Sequence
  Description of Artificial Sequence: Synthetic oligonucleotide
  Antisense strand to SEQ ID NO: 981750
ucugcaguaaagaaacuag

SEQ ID NO: 981752 - RNA, 19 nt, Artificial Sequence
  Description of Artificial Sequence: Synthetic oligonucleotide
  Sense strand starting at position 2342 of SEQ ID NO: 914149
gaaugagguguuggaauaa

SEQ ID NO: 981753 - RNA, 19 nt, Artificial Sequence
  Description of Artificial Sequence: Synthetic oligonucleotide
  Antisense strand to SEQ ID NO: 981752
uuauuccaacaccucauuc

SEQ ID NO: 981754 - RNA, 19 nt, Artificial Sequence
  Description of Artificial Sequence: Synthetic oligonucleotide
  Sense strand starting at position 2796 of SEQ ID NO: 914149
cuauuuguguaagcuuaga

SEQ ID NO: 981755 - RNA, 19 nt, Artificial Sequence
  Description of Artificial Sequence: Synthetic oligonucleotide
  Antisense strand to SEQ ID NO: 981754
ucuaagcuuacacaaauag

SEQ ID NO: 981756 - RNA, 19 nt, Artificial Sequence
  Description of Artificial Sequence: Synthetic oligonucleotide
  Sense strand starting at position 2338 of SEQ ID NO: 914149
gaaugaaugagguguugga

SEQ ID NO: 981757 - RNA, 19 nt, Artificial Sequence
  Description of Artificial Sequence: Synthetic oligonucleotide
  Antisense strand to SEQ ID NO: 981756
uccaacaccucauucauuc

SEQ ID NO: 981758 - RNA, 19 nt, Artificial Sequence
  Description of Artificial Sequence: Synthetic oligonucleotide
  Sense strand starting at position 2903 of SEQ ID NO: 914149
guuaaaugaguugauaucu

SEQ ID NO: 981759 - RNA, 19 nt, Artificial Sequence
  Description of Artificial Sequence: Synthetic oligonucleotide
  Antisense strand to SEQ ID NO: 981758
agauaucaacucauuuaac

SEQ ID NO: 981760 - RNA, 19 nt, Artificial Sequence
  Description of Artificial Sequence: Synthetic oligonucleotide
  Sense strand starting at position 3785 of SEQ ID NO: 914149
agugcucuugaauaucaag

SEQ ID NO: 981761 - RNA, 19 nt, Artificial Sequence
  Description of Artificial Sequence: Synthetic oligonucleotide
  Antisense strand to SEQ ID NO: 981760
cuugauauucaagagcacu

SEQ ID NO: 981762 - RNA, 19 nt, Artificial Sequence
  Description of Artificial Sequence: Synthetic oligonucleotide
  Sense strand starting at position 2222 of SEQ ID NO: 914149
uggcgugucccuguaaucu

SEQ ID NO: 981763 - RNA, 19 nt, Artificial Sequence
  Description of Artificial Sequence: Synthetic oligonucleotide
  Antisense strand to SEQ ID NO: 981762
agauuacagggacacgcca

SEQ ID NO: 981764 - RNA, 19 nt, Artificial Sequence
  Description of Artificial Sequence: Synthetic oligonucleotide
  Sense strand starting at position 3604 of SEQ ID NO: 914149
gcccaagugggugaggaau

SEQ ID NO: 981765 - RNA, 19 nt, Artificial Sequence
  Description of Artificial Sequence: Synthetic oligonucleotide
  Antisense strand to SEQ ID NO: 981764
auuccucacccacuugggc

SEQ ID NO: 981766 - RNA, 19 nt, Artificial Sequence
  Description of Artificial Sequence: Synthetic oligonucleotide
  Sense strand starting at position 2900 of SEQ ID NO: 914149
uggguuaaaugaguugaua

SEQ ID NO: 981767 - RNA, 19 nt, Artificial Sequence
  Description of Artificial Sequence: Synthetic oligonucleotide
  Antisense strand to SEQ ID NO: 981766
uaucaacucauuuaaccca

SEQ ID NO: 981768 - RNA, 19 nt, Artificial Sequence
  Description of Artificial Sequence: Synthetic oligonucleotide
  Sense strand starting at position 596 of SEQ ID NO: 914149
caggacauagguugucaga

SEQ ID NO: 981769 - RNA, 19 nt, Artificial Sequence
  Description of Artificial Sequence: Synthetic oligonucleotide
  Antisense strand to SEQ ID NO: 981768
ucugacaaccuauguccug

SEQ ID NO: 981770 - RNA, 19 nt, Artificial Sequence
  Description of Artificial Sequence: Synthetic oligonucleotide
  Sense strand starting at position 3061 of SEQ ID NO: 914149
ugaagugucugauuaaaca

SEQ ID NO: 981771 - RNA, 19 nt, Artificial Sequence
  Description of Artificial Sequence: Synthetic oligonucleotide
  Antisense strand to SEQ ID NO: 981770
uguuuaaucagacacuuca

SEQ ID NO: 981772 - RNA, 19 nt, Artificial Sequence
  Description of Artificial Sequence: Synthetic oligonucleotide
  Sense strand starting at position 2705 of SEQ ID NO: 914149
uaguuaagauguuuggaac

SEQ ID NO: 981773 - RNA, 19 nt, Artificial Sequence
  Description of Artificial Sequence: Synthetic oligonucleotide
  Antisense strand to SEQ ID NO: 981772
guuccaaacaucuuaacua

SEQ ID NO: 981774 - RNA, 19 nt, Artificial Sequence
  Description of Artificial Sequence: Synthetic oligonucleotide
  Sense strand starting at position 2969 of SEQ ID NO: 914149
ggugauuaucaauacugcu

SEQ ID NO: 981775 - RNA, 19 nt, Artificial Sequence
  Description of Artificial Sequence: Synthetic oligonucleotide
  Antisense strand to SEQ ID NO: 981774
agcaguauugauaaucacc

SEQ ID NO: 981776 - RNA, 19 nt, Artificial Sequence
  Description of Artificial Sequence: Synthetic oligonucleotide
  Sense strand starting at position 2848 of SEQ ID NO: 914149
guaucuguaacaugaggau

SEQ ID NO: 981777 - RNA, 19 nt, Artificial Sequence
  Description of Artificial Sequence: Synthetic oligonucleotide
  Antisense strand to SEQ ID NO: 981776
auccucauguuacagauac

SEQ ID NO: 981778 - RNA, 19 nt, Artificial Sequence
  Description of Artificial Sequence: Synthetic oligonucleotide
  Sense strand starting at position 2706 of SEQ ID NO: 914149
aguuaagauguuuggaacu

SEQ ID NO: 981779 - RNA, 19 nt, Artificial Sequence
  Description of Artificial Sequence: Synthetic oligonucleotide
  Antisense strand to SEQ ID NO: 981778
aguuccaaacaucuuaacu

SEQ ID NO: 981780 - RNA, 19 nt, Artificial Sequence
  Description of Artificial Sequence: Synthetic oligonucleotide
  Sense strand starting at position 2902 of SEQ ID NO: 914149
gguuaaaugaguugauauc

SEQ ID NO: 981781 - RNA, 19 nt, Artificial Sequence
  Description of Artificial Sequence: Synthetic oligonucleotide
  Antisense strand to SEQ ID NO: 981780
gauaucaacucauuuaacc

SEQ ID NO: 981782 - RNA, 19 nt, Artificial Sequence
  Description of Artificial Sequence: Synthetic oligonucleotide
  Sense strand starting at position 598 of SEQ ID NO: 914149
ggacauagguugucagauu

SEQ ID NO: 981783 - RNA, 19 nt, Artificial Sequence
  Description of Artificial Sequence: Synthetic oligonucleotide
  Antisense strand to SEQ ID NO: 981782
aaucugacaaccuaugucc

SEQ ID NO: 981784 - RNA, 19 nt, Artificial Sequence
  Description of Artificial Sequence: Synthetic oligonucleotide
  Sense strand starting at position 713 of SEQ ID NO: 914149
accuuaucacuugacguua

SEQ ID NO: 981785 - RNA, 19 nt, Artificial Sequence
  Description of Artificial Sequence: Synthetic oligonucleotide
  Antisense strand to SEQ ID NO: 981784
uaacgucaagugauaaggu

SEQ ID NO: 981786 - RNA, 19 nt, Artificial Sequence
  Description of Artificial Sequence: Synthetic oligonucleotide
  Sense strand starting at position 70 of SEQ ID NO: 914149
guuucuuuacugcagaaac

SEQ ID NO: 981787 - RNA, 19 nt, Artificial Sequence
  Description of Artificial Sequence: Synthetic oligonucleotide
  Antisense strand to SEQ ID NO: 981786
guuucugcaguaaagaaac

SEQ ID NO: 981788 - RNA, 19 nt, Artificial Sequence
  Description of Artificial Sequence: Synthetic oligonucleotide
  Sense strand starting at position 192 of SEQ ID NO: 914149
gugagauaagguugugaca

SEQ ID NO: 981789 - RNA, 19 nt, Artificial Sequence
  Description of Artificial Sequence: Synthetic oligonucleotide
  Antisense strand to SEQ ID NO: 981788
ugucacaaccuuaucucac

SEQ ID NO: 981790 - RNA, 19 nt, Artificial Sequence
  Description of Artificial Sequence: Synthetic oligonucleotide
  Sense strand starting at position 340 of SEQ ID NO: 914149
aaucuuugucaagagcagu

SEQ ID NO: 981791 - RNA, 19 nt, Artificial Sequence
  Description of Artificial Sequence: Synthetic oligonucleotide
  Antisense strand to SEQ ID NO: 981790
acugcucuugacaaagauu

SEQ ID NO: 981792 - RNA, 19 nt, Artificial Sequence
  Description of Artificial Sequence: Synthetic oligonucleotide
  Sense strand starting at position 2962 of SEQ ID NO: 914149
aagugugggugauuaucaa

SEQ ID NO: 981793 - RNA, 19 nt, Artificial Sequence
  Description of Artificial Sequence: Synthetic oligonucleotide
  Antisense strand to SEQ ID NO: 981792
uugauaaucacccacacuu

SEQ ID NO: 981794 - RNA, 19 nt, Artificial Sequence
  Description of Artificial Sequence: Synthetic oligonucleotide
  Sense strand starting at position 3021 of SEQ ID NO: 914149
acuguuguaucaucaauga

SEQ ID NO: 981795 - RNA, 19 nt, Artificial Sequence
  Description of Artificial Sequence: Synthetic oligonucleotide
  Antisense strand to SEQ ID NO: 981794
ucauugaugauacaacagu

SEQ ID NO: 981796 - RNA, 19 nt, Artificial Sequence
  Description of Artificial Sequence: Synthetic oligonucleotide
  Sense strand starting at position 3030 of SEQ ID NO: 914149
ucaucaaugagcuguggga

SEQ ID NO: 981797 - RNA, 19 nt, Artificial Sequence
  Description of Artificial Sequence: Synthetic oligonucleotide
  Antisense strand to SEQ ID NO: 981796
ucccacagcucauugauga

SEQ ID NO: 981798 - RNA, 19 nt, Artificial Sequence
  Description of Artificial Sequence: Synthetic oligonucleotide
  Sense strand starting at position 2793 of SEQ ID NO: 914149
cggcuauuuguguaagcuu

SEQ ID NO: 981799 - RNA, 19 nt, Artificial Sequence
  Description of Artificial Sequence: Synthetic oligonucleotide
  Antisense strand to SEQ ID NO: 981798
aagcuuacacaaauagccg

SEQ ID NO: 981800 - RNA, 19 nt, Artificial Sequence
  Description of Artificial Sequence: Synthetic oligonucleotide
  Sense strand starting at position 3034 of SEQ ID NO: 914149
caaugagcugugggaggua

SEQ ID NO: 981801 - RNA, 19 nt, Artificial Sequence
  Description of Artificial Sequence: Synthetic oligonucleotide
  Antisense strand to SEQ ID NO: 981800
uaccucccacagcucauug

SEQ ID NO: 981802 - RNA, 19 nt, Artificial Sequence
  Description of Artificial Sequence: Synthetic oligonucleotide
  Sense strand starting at position 3550 of SEQ ID NO: 914149
aguaaacuauuguccuuau

SEQ ID NO: 981803 - RNA, 19 nt, Artificial Sequence
  Description of Artificial Sequence: Synthetic oligonucleotide
  Antisense strand to SEQ ID NO: 981802
auaaggacaauaguuuacu

SEQ ID NO: 981804 - RNA, 19 nt, Artificial Sequence
  Description of Artificial Sequence: Synthetic oligonucleotide
  Sense strand starting at position 2960 of SEQ ID NO: 914149
guaagugugggugauuauc

SEQ ID NO: 981805 - RNA, 19 nt, Artificial Sequence
  Description of Artificial Sequence: Synthetic oligonucleotide
  Antisense strand to SEQ ID NO: 981804
gauaaucacccacacuuac

SEQ ID NO: 981806 - RNA, 19 nt, Artificial Sequence
  Description of Artificial Sequence: Synthetic oligonucleotide
  Sense strand starting at position 2696 of SEQ ID NO: 914149
uguccucauuaguuaagau

SEQ ID NO: 981807 - RNA, 19 nt, Artificial Sequence
  Description of Artificial Sequence: Synthetic oligonucleotide
  Antisense strand to SEQ ID NO: 981806
aucuuaacuaaugaggaca

SEQ ID NO: 981808 - RNA, 19 nt, Artificial Sequence
  Description of Artificial Sequence: Synthetic oligonucleotide
  Sense strand starting at position 2695 of SEQ ID NO: 914149
cuguccucauuaguuaaga

SEQ ID NO: 981809 - RNA, 19 nt, Artificial Sequence
  Description of Artificial Sequence: Synthetic oligonucleotide
  Antisense strand to SEQ ID NO: 981808
ucuuaacuaaugaggacag

SEQ ID NO: 981810 - RNA, 19 nt, Artificial Sequence
  Description of Artificial Sequence: Synthetic oligonucleotide
  Sense strand starting at position 195 of SEQ ID NO: 914149
agauaagguugugacauuu

SEQ ID NO: 981811 - RNA, 19 nt, Artificial Sequence
  Description of Artificial Sequence: Synthetic oligonucleotide
  Antisense strand to SEQ ID NO: 981810
aaaugucacaaccuuaucu

SEQ ID NO: 981812 - RNA, 19 nt, Artificial Sequence
  Description of Artificial Sequence: Synthetic oligonucleotide
  Sense strand starting at position 2300 of SEQ ID NO: 914149
cggguaacauagcuagacu

SEQ ID NO: 981813 - RNA, 19 nt, Artificial Sequence
  Description of Artificial Sequence: Synthetic oligonucleotide
  Antisense strand to SEQ ID NO: 981812
agucuagcuauguuacccg

SEQ ID NO: 981814 - RNA, 19 nt, Artificial Sequence
  Description of Artificial Sequence: Synthetic oligonucleotide
  Sense strand starting at position 3037 of SEQ ID NO: 914149
ugagcugugggagguauau

SEQ ID NO: 981815 - RNA, 19 nt, Artificial Sequence
  Description of Artificial Sequence: Synthetic oligonucleotide
  Antisense strand to SEQ ID NO: 981814
auauaccucccacagcuca

SEQ ID NO: 981816 - RNA, 19 nt, Artificial Sequence
  Description of Artificial Sequence: Synthetic oligonucleotide
  Sense strand starting at position 3058 of SEQ ID NO: 914149
agcugaagugucugauuaa

SEQ ID NO: 981817 - RNA, 19 nt, Artificial Sequence
  Description of Artificial Sequence: Synthetic oligonucleotide
  Antisense strand to SEQ ID NO: 981816
uuaaucagacacuucagcu

SEQ ID NO: 981818 - RNA, 19 nt, Artificial Sequence
  Description of Artificial Sequence: Synthetic oligonucleotide
  Sense strand starting at position 3551 of SEQ ID NO: 914149
guaaacuauuguccuuauu

SEQ ID NO: 981819 - RNA, 19 nt, Artificial Sequence
  Description of Artificial Sequence: Synthetic oligonucleotide
  Antisense strand to SEQ ID NO: 981818
aauaaggacaauaguuuac

SEQ ID NO: 981820 - RNA, 19 nt, Artificial Sequence
  Description of Artificial Sequence: Synthetic oligonucleotide
  Sense strand starting at position 2142 of SEQ ID NO: 914149
gagggcuggucaucaucuu

SEQ ID NO: 981821 - RNA, 19 nt, Artificial Sequence
  Description of Artificial Sequence: Synthetic oligonucleotide
  Antisense strand to SEQ ID NO: 981820
aagaugaugaccagcccuc

SEQ ID NO: 981822 - RNA, 19 nt, Artificial Sequence
  Description of Artificial Sequence: Synthetic oligonucleotide
  Sense strand starting at position 599 of SEQ ID NO: 914149
gacauagguugucagauuu

SEQ ID NO: 981823 - RNA, 19 nt, Artificial Sequence
  Description of Artificial Sequence: Synthetic oligonucleotide
  Antisense strand to SEQ ID NO: 981822
aaaucugacaaccuauguc

SEQ ID NO: 981824 - RNA, 19 nt, Artificial Sequence
  Description of Artificial Sequence: Synthetic oligonucleotide
  Sense strand starting at position 2693 of SEQ ID NO: 914149
ugcuguccucauuaguuaa

SEQ ID NO: 981825 - RNA, 19 nt, Artificial Sequence
  Description of Artificial Sequence: Synthetic oligonucleotide
  Antisense strand to SEQ ID NO: 981824
uuaacuaaugaggacagca

SEQ ID NO: 981826 - RNA, 19 nt, Artificial Sequence
  Description of Artificial Sequence: Synthetic oligonucleotide
  Sense strand starting at position 3335 of SEQ ID NO: 914149
acgagaauugcuugagcac

SEQ ID NO: 981827 - RNA, 19 nt, Artificial Sequence
  Description of Artificial Sequence: Synthetic oligonucleotide
  Antisense strand to SEQ ID NO: 981826
gugcucaagcaauucucgu

SEQ ID NO: 981828 - RNA, 19 nt, Artificial Sequence
  Description of Artificial Sequence: Synthetic oligonucleotide
  Sense strand starting at position 2792 of SEQ ID NO: 914149
ucggcuauuuguguaagcu

SEQ ID NO: 981829 - RNA, 19 nt, Artificial Sequence
  Description of Artificial Sequence: Synthetic oligonucleotide
  Antisense strand to SEQ ID NO: 981828
agcuuacacaaauagccga

SEQ ID NO: 981830 - RNA, 19 nt, Artificial Sequence
  Description of Artificial Sequence: Synthetic oligonucleotide
  Sense strand starting at position 2783 of SEQ ID NO: 914149
ggcucugucucggcuauuu

SEQ ID NO: 981831 - RNA, 19 nt, Artificial Sequence
  Description of Artificial Sequence: Synthetic oligonucleotide
  Antisense strand to SEQ ID NO: 981830
aaauagccgagacagagcc

SEQ ID NO: 981832 - RNA, 19 nt, Artificial Sequence
  Description of Artificial Sequence: Synthetic oligonucleotide
  Sense strand starting at position 2941 of SEQ ID NO: 914150
gaaugagguguuggaauaa

SEQ ID NO: 981833 - RNA, 19 nt, Artificial Sequence
  Description of Artificial Sequence: Synthetic oligonucleotide
  Antisense strand to SEQ ID NO: 981832
uuauuccaacaccucauuc

SEQ ID NO: 981834 - RNA, 19 nt, Artificial Sequence
  Description of Artificial Sequence: Synthetic oligonucleotide
  Sense strand starting at position 3395 of SEQ ID NO: 914150
cuauuuguguaagcuuaga

SEQ ID NO: 981835 - RNA, 19 nt, Artificial Sequence
  Description of Artificial Sequence: Synthetic oligonucleotide
  Antisense strand to SEQ ID NO: 981834
ucuaagcuuacacaaauag

SEQ ID NO: 981836 - RNA, 19 nt, Artificial Sequence
  Description of Artificial Sequence: Synthetic oligonucleotide
  Sense strand starting at position 2937 of SEQ ID NO: 914150
gaaugaaugagguguugga

SEQ ID NO: 981837 - RNA, 19 nt, Artificial Sequence
  Description of Artificial Sequence: Synthetic oligonucleotide
  Antisense strand to SEQ ID NO: 981836
uccaacaccucauucauuc

SEQ ID NO: 981838 - RNA, 19 nt, Artificial Sequence
  Description of Artificial Sequence: Synthetic oligonucleotide
  Sense strand starting at position 3502 of SEQ ID NO: 914150
guuaaaugaguugauaucu

SEQ ID NO: 981839 - RNA, 19 nt, Artificial Sequence
  Description of Artificial Sequence: Synthetic oligonucleotide
  Antisense strand to SEQ ID NO: 981838
agauaucaacucauuuaac

SEQ ID NO: 981840 - RNA, 19 nt, Artificial Sequence
  Description of Artificial Sequence: Synthetic oligonucleotide
  Sense strand starting at position 2821 of SEQ ID NO: 914150
uggcgugucccuguaaucu

SEQ ID NO: 981841 - RNA, 19 nt, Artificial Sequence
  Description of Artificial Sequence: Synthetic oligonucleotide
  Antisense strand to SEQ ID NO: 981840
agauuacagggacacgcca

SEQ ID NO: 981842 - RNA, 19 nt, Artificial Sequence
  Description of Artificial Sequence: Synthetic oligonucleotide
  Sense strand starting at position 3499 of SEQ ID NO: 914150
uggguuaaaugaguugaua

SEQ ID NO: 981843 - RNA, 19 nt, Artificial Sequence
  Description of Artificial Sequence: Synthetic oligonucleotide
  Antisense strand to SEQ ID NO: 981842
uaucaacucauuuaaccca

SEQ ID NO: 981844 - RNA, 19 nt, Artificial Sequence
  Description of Artificial Sequence: Synthetic oligonucleotide
  Sense strand starting at position 1195 of SEQ ID NO: 914150
caggacauagguugucaga

SEQ ID NO: 981845 - RNA, 19 nt, Artificial Sequence
  Description of Artificial Sequence: Synthetic oligonucleotide
  Antisense strand to SEQ ID NO: 981844
ucugacaaccuauguccug

SEQ ID NO: 981846 - RNA, 19 nt, Artificial Sequence
  Description of Artificial Sequence: Synthetic oligonucleotide
  Sense strand starting at position 3660 of SEQ ID NO: 914150
ugaagugucugauuaaaca

SEQ ID NO: 981847 - RNA, 19 nt, Artificial Sequence
  Description of Artificial Sequence: Synthetic oligonucleotide
  Antisense strand to SEQ ID NO: 981846
uguuuaaucagacacuuca

SEQ ID NO: 981848 - RNA, 19 nt, Artificial Sequence
  Description of Artificial Sequence: Synthetic oligonucleotide
  Sense strand starting at position 3304 of SEQ ID NO: 914150
uaguuaagauguuuggaac

SEQ ID NO: 981849 - RNA, 19 nt, Artificial Sequence
  Description of Artificial Sequence: Synthetic oligonucleotide
  Antisense strand to SEQ ID NO: 981848
guuccaaacaucuuaacua

SEQ ID NO: 981850 - RNA, 19 nt, Artificial Sequence
  Description of Artificial Sequence: Synthetic oligonucleotide
  Sense strand starting at position 3568 of SEQ ID NO: 914150
ggugauuaucaauacugcu

SEQ ID NO: 981851 - RNA, 19 nt, Artificial Sequence
  Description of Artificial Sequence: Synthetic oligonucleotide
  Antisense strand to SEQ ID NO: 981850
agcaguauugauaaucacc

SEQ ID NO: 981852 - RNA, 19 nt, Artificial Sequence
  Description of Artificial Sequence: Synthetic oligonucleotide
  Sense strand starting at position 3305 of SEQ ID NO: 914150
aguuaagauguuuggaacu

SEQ ID NO: 981853 - RNA, 19 nt, Artificial Sequence
  Description of Artificial Sequence: Synthetic oligonucleotide
  Antisense strand to SEQ ID NO: 981852
aguuccaaacaucuuaacu

SEQ ID NO: 981854 - RNA, 19 nt, Artificial Sequence
  Description of Artificial Sequence: Synthetic oligonucleotide
  Sense strand starting at position 3501 of SEQ ID NO: 914150
gguuaaaugaguugauauc

SEQ ID NO: 981855 - RNA, 19 nt, Artificial Sequence
  Description of Artificial Sequence: Synthetic oligonucleotide
  Antisense strand to SEQ ID NO: 981854
gauaucaacucauuuaacc

SEQ ID NO: 981856 - RNA, 19 nt, Artificial Sequence
  Description of Artificial Sequence: Synthetic oligonucleotide
  Sense strand starting at position 3447 of SEQ ID NO: 914150
guaucuguaacaugaggau

SEQ ID NO: 981857 - RNA, 19 nt, Artificial Sequence
  Description of Artificial Sequence: Synthetic oligonucleotide
  Antisense strand to SEQ ID NO: 981856
auccucauguuacagauac

SEQ ID NO: 981858 - RNA, 19 nt, Artificial Sequence
  Description of Artificial Sequence: Synthetic oligonucleotide
  Sense strand starting at position 1197 of SEQ ID NO: 914150
ggacauagguugucagauu

SEQ ID NO: 981859 - RNA, 19 nt, Artificial Sequence
  Description of Artificial Sequence: Synthetic oligonucleotide
  Antisense strand to SEQ ID NO: 981858
aaucugacaaccuaugucc

SEQ ID NO: 981860 - RNA, 19 nt, Artificial Sequence
  Description of Artificial Sequence: Synthetic oligonucleotide
  Sense strand starting at position 1312 of SEQ ID NO: 914150
accuuaucacuugacguua

SEQ ID NO: 981861 - RNA, 19 nt, Artificial Sequence
  Description of Artificial Sequence: Synthetic oligonucleotide
  Antisense strand to SEQ ID NO: 981860
uaacgucaagugauaaggu

SEQ ID NO: 981862 - RNA, 19 nt, Artificial Sequence
  Description of Artificial Sequence: Synthetic oligonucleotide
  Sense strand starting at position 669 of SEQ ID NO: 914150
guuucuuuacugcagaaac

SEQ ID NO: 981863 - RNA, 19 nt, Artificial Sequence
  Description of Artificial Sequence: Synthetic oligonucleotide
  Antisense strand to SEQ ID NO: 981862
guuucugcaguaaagaaac

SEQ ID NO: 981864 - RNA, 19 nt, Artificial Sequence
  Description of Artificial Sequence: Synthetic oligonucleotide
  Sense strand starting at position 791 of SEQ ID NO: 914150
gugagauaagguugugaca

SEQ ID NO: 981865 - RNA, 19 nt, Artificial Sequence
  Description of Artificial Sequence: Synthetic oligonucleotide
  Antisense strand to SEQ ID NO: 981864
ugucacaaccuuaucucac

SEQ ID NO: 981866 - RNA, 19 nt, Artificial Sequence
  Description of Artificial Sequence: Synthetic oligonucleotide
  Sense strand starting at position 939 of SEQ ID NO: 914150
aaucuuugucaagagcagu

SEQ ID NO: 981867 - RNA, 19 nt, Artificial Sequence
  Description of Artificial Sequence: Synthetic oligonucleotide
  Antisense strand to SEQ ID NO: 981866
acugcucuugacaaagauu

SEQ ID NO: 981868 - RNA, 19 nt, Artificial Sequence
  Description of Artificial Sequence: Synthetic oligonucleotide
  Sense strand starting at position 3561 of SEQ ID NO: 914150
aagugugggugauuaucaa

SEQ ID NO: 981869 - RNA, 19 nt, Artificial Sequence
  Description of Artificial Sequence: Synthetic oligonucleotide
  Antisense strand to SEQ ID NO: 981868
uugauaaucacccacacuu

SEQ ID NO: 981870 - RNA, 19 nt, Artificial Sequence
  Description of Artificial Sequence: Synthetic oligonucleotide
  Sense strand starting at position 3620 of SEQ ID NO: 914150
acuguuguaucaucaauga

SEQ ID NO: 981871 - RNA, 19 nt, Artificial Sequence
  Description of Artificial Sequence: Synthetic oligonucleotide
  Antisense strand to SEQ ID NO: 981870
ucauugaugauacaacagu

SEQ ID NO: 981872 - RNA, 19 nt, Artificial Sequence
  Description of Artificial Sequence: Synthetic oligonucleotide
  Sense strand starting at position 3629 of SEQ ID NO: 914150
ucaucaaugagcuguggga

SEQ ID NO: 981873 - RNA, 19 nt, Artificial Sequence
  Description of Artificial Sequence: Synthetic oligonucleotide
  Antisense strand to SEQ ID NO: 981872
ucccacagcucauugauga

SEQ ID NO: 981874 - RNA, 19 nt, Artificial Sequence
  Description of Artificial Sequence: Synthetic oligonucleotide
  Sense strand starting at position 3392 of SEQ ID NO: 914150
cggcuauuuguguaagcuu

SEQ ID NO: 981875 - RNA, 19 nt, Artificial Sequence
  Description of Artificial Sequence: Synthetic oligonucleotide
  Antisense strand to SEQ ID NO: 981874
aagcuuacacaaauagccg

SEQ ID NO: 981876 - RNA, 19 nt, Artificial Sequence
  Description of Artificial Sequence: Synthetic oligonucleotide
  Sense strand starting at position 3633 of SEQ ID NO: 914150
caaugagcugugggaggua

SEQ ID NO: 981877 - RNA, 19 nt, Artificial Sequence
  Description of Artificial Sequence: Synthetic oligonucleotide
  Antisense strand to SEQ ID NO: 981876
uaccucccacagcucauug

SEQ ID NO: 981878 - RNA, 19 nt, Artificial Sequence
  Description of Artificial Sequence: Synthetic oligonucleotide
  Sense strand starting at position 3559 of SEQ ID NO: 914150
guaagugugggugauuauc

SEQ ID NO: 981879 - RNA, 19 nt, Artificial Sequence
  Description of Artificial Sequence: Synthetic oligonucleotide
  Antisense strand to SEQ ID NO: 981878
gauaaucacccacacuuac

SEQ ID NO: 981880 - RNA, 19 nt, Artificial Sequence
  Description of Artificial Sequence: Synthetic oligonucleotide
  Sense strand starting at position 3295 of SEQ ID NO: 914150
uguccucauuaguuaagau

SEQ ID NO: 981881 - RNA, 19 nt, Artificial Sequence
  Description of Artificial Sequence: Synthetic oligonucleotide
  Antisense strand to SEQ ID NO: 981880
aucuuaacuaaugaggaca

SEQ ID NO: 981882 - RNA, 19 nt, Artificial Sequence
  Description of Artificial Sequence: Synthetic oligonucleotide
  Sense strand starting at position 3294 of SEQ ID NO: 914150
cuguccucauuaguuaaga

SEQ ID NO: 981883 - RNA, 19 nt, Artificial Sequence
  Description of Artificial Sequence: Synthetic oligonucleotide
  Antisense strand to SEQ ID NO: 981882
ucuuaacuaaugaggacag

SEQ ID NO: 981884 - RNA, 19 nt, Artificial Sequence
  Description of Artificial Sequence: Synthetic oligonucleotide
  Sense strand starting at position 794 of SEQ ID NO: 914150
agauaagguugugacauuu

SEQ ID NO: 981885 - RNA, 19 nt, Artificial Sequence
  Description of Artificial Sequence: Synthetic oligonucleotide
  Antisense strand to SEQ ID NO: 981884
aaaugucacaaccuuaucu

SEQ ID NO: 981886 - RNA, 19 nt, Artificial Sequence
  Description of Artificial Sequence: Synthetic oligonucleotide
  Sense strand starting at position 2899 of SEQ ID NO: 914150
cggguaacauagcuagacu

SEQ ID NO: 981887 - RNA, 19 nt, Artificial Sequence
  Description of Artificial Sequence: Synthetic oligonucleotide
  Antisense strand to SEQ ID NO: 981886
agucuagcuauguuacccg

SEQ ID NO: 981888 - RNA, 19 nt, Artificial Sequence
  Description of Artificial Sequence: Synthetic oligonucleotide
  Sense strand starting at position 3636 of SEQ ID NO: 914150
ugagcugugggagguauau

SEQ ID NO: 981889 - RNA, 19 nt, Artificial Sequence
  Description of Artificial Sequence: Synthetic oligonucleotide
  Antisense strand to SEQ ID NO: 981888
auauaccucccacagcuca

SEQ ID NO: 981890 - RNA, 19 nt, Artificial Sequence
  Description of Artificial Sequence: Synthetic oligonucleotide
  Sense strand starting at position 3657 of SEQ ID NO: 914150
agcugaagugucugauuaa

SEQ ID NO: 981891 - RNA, 19 nt, Artificial Sequence
  Description of Artificial Sequence: Synthetic oligonucleotide
  Antisense strand to SEQ ID NO: 981890
uuaaucagacacuucagcu

SEQ ID NO: 981892 - RNA, 19 nt, Artificial Sequence
  Description of Artificial Sequence: Synthetic oligonucleotide
  Sense strand starting at position 2741 of SEQ ID NO: 914150
gagggcuggucaucaucuu

SEQ ID NO: 981893 - RNA, 19 nt, Artificial Sequence
  Description of Artificial Sequence: Synthetic oligonucleotide
  Antisense strand to SEQ ID NO: 981892
aagaugaugaccagcccuc

SEQ ID NO: 981894 - RNA, 19 nt, Artificial Sequence
  Description of Artificial Sequence: Synthetic oligonucleotide
  Sense strand starting at position 1198 of SEQ ID NO: 914150
gacauagguugucagauuu

SEQ ID NO: 981895 - RNA, 19 nt, Artificial Sequence
  Description of Artificial Sequence: Synthetic oligonucleotide
  Antisense strand to SEQ ID NO: 981894
aaaucugacaaccuauguc

SEQ ID NO: 981896 - RNA, 19 nt, Artificial Sequence
  Description of Artificial Sequence: Synthetic oligonucleotide
  Sense strand starting at position 3292 of SEQ ID NO: 914150
ugcuguccucauuaguuaa

SEQ ID NO: 981897 - RNA, 19 nt, Artificial Sequence
  Description of Artificial Sequence: Synthetic oligonucleotide
  Antisense strand to SEQ ID NO: 981896
uuaacuaaugaggacagca

SEQ ID NO: 981898 - RNA, 19 nt, Artificial Sequence
  Description of Artificial Sequence: Synthetic oligonucleotide
  Sense strand starting at position 3934 of SEQ ID NO: 914150
acgagaauugcuugagcac

SEQ ID NO: 981899 - RNA, 19 nt, Artificial Sequence
  Description of Artificial Sequence: Synthetic oligonucleotide
  Antisense strand to SEQ ID NO: 981898
gugcucaagcaauucucgu

SEQ ID NO: 981900 - RNA, 19 nt, Artificial Sequence
  Description of Artificial Sequence: Synthetic oligonucleotide
  Sense strand starting at position 3391 of SEQ ID NO: 914150
ucggcuauuuguguaagcu

SEQ ID NO: 981901 - RNA, 19 nt, Artificial Sequence
  Description of Artificial Sequence: Synthetic oligonucleotide
  Antisense strand to SEQ ID NO: 981900
agcuuacacaaauagccga

SEQ ID NO: 981902 - RNA, 19 nt, Artificial Sequence
  Description of Artificial Sequence: Synthetic oligonucleotide
  Sense strand starting at position 3382 of SEQ ID NO: 914150
ggcucugucucggcuauuu

SEQ ID NO: 981903 - RNA, 19 nt, Artificial Sequence
  Description of Artificial Sequence: Synthetic oligonucleotide
  Antisense strand to SEQ ID NO: 981902
aaauagccgagacagagcc

SEQ ID NO: 981904 - RNA, 19 nt, Artificial Sequence
  Description of Artificial Sequence: Synthetic oligonucleotide
  Sense strand starting at position 666 of SEQ ID NO: 914150
cuaguuucuuuacugcaga

SEQ ID NO: 981905 - RNA, 19 nt, Artificial Sequence
  Description of Artificial Sequence: Synthetic oligonucleotide
  Antisense strand to SEQ ID NO: 981904
ucugcaguaaagaaacuag

SEQ ID NO: 981906 - RNA, 19 nt, Artificial Sequence
  Description of Artificial Sequence: Synthetic oligonucleotide
  Sense strand starting at position 3557 of SEQ ID NO: 914150
uuguaagugugggugauua

SEQ ID NO: 981907 - RNA, 19 nt, Artificial Sequence
  Description of Artificial Sequence: Synthetic oligonucleotide
  Antisense strand to SEQ ID NO: 981906
uaaucacccacacuuacaa

SEQ ID NO: 981908 - RNA, 19 nt, Artificial Sequence
  Description of Artificial Sequence: Synthetic oligonucleotide
  Sense strand starting at position 3270 of SEQ ID NO: 914150
ugcugugcaccuugagaaa

SEQ ID NO: 981909 - RNA, 19 nt, Artificial Sequence
  Description of Artificial Sequence: Synthetic oligonucleotide
  Antisense strand to SEQ ID NO: 981908
uuucucaaggugcacagca

SEQ ID NO: 981910 - RNA, 19 nt, Artificial Sequence
  Description of Artificial Sequence: Synthetic oligonucleotide
  Sense strand starting at position 3441 of SEQ ID NO: 914150
guuucuguaucuguaacau

SEQ ID NO: 981911 - RNA, 19 nt, Artificial Sequence
  Description of Artificial Sequence: Synthetic oligonucleotide
  Antisense strand to SEQ ID NO: 981910
auguuacagauacagaaac

SEQ ID NO: 981912 - RNA, 19 nt, Artificial Sequence
  Description of Artificial Sequence: Synthetic oligonucleotide
  Sense strand starting at position 2534 of SEQ ID NO: 914151
ucuugagaucaaugaccau

SEQ ID NO: 981913 - RNA, 19 nt, Artificial Sequence
  Description of Artificial Sequence: Synthetic oligonucleotide
  Antisense strand to SEQ ID NO: 981912
auggucauugaucucaaga

SEQ ID NO: 981914 - RNA, 19 nt, Artificial Sequence
  Description of Artificial Sequence: Synthetic oligonucleotide
  Sense strand starting at position 3910 of SEQ ID NO: 914151
ggauauuugugguuuguac

SEQ ID NO: 981915 - RNA, 19 nt, Artificial Sequence
  Description of Artificial Sequence: Synthetic oligonucleotide
  Antisense strand to SEQ ID NO: 981914
guacaaaccacaaauaucc

SEQ ID NO: 981916 - RNA, 19 nt, Artificial Sequence
  Description of Artificial Sequence: Synthetic oligonucleotide
  Sense strand starting at position 505 of SEQ ID NO: 914151
uucucauagcaugagauau

SEQ ID NO: 981917 - RNA, 19 nt, Artificial Sequence
  Description of Artificial Sequence: Synthetic oligonucleotide
  Antisense strand to SEQ ID NO: 981916
auaucucaugcuaugagaa

SEQ ID NO: 981918 - RNA, 19 nt, Artificial Sequence
  Description of Artificial Sequence: Synthetic oligonucleotide
  Sense strand starting at position 2748 of SEQ ID NO: 914151
auggaaagccuguauaauu

SEQ ID NO: 981919 - RNA, 19 nt, Artificial Sequence
  Description of Artificial Sequence: Synthetic oligonucleotide
  Antisense strand to SEQ ID NO: 981918
aauuauacaggcuuuccau

SEQ ID NO: 981920 - RNA, 19 nt, Artificial Sequence
  Description of Artificial Sequence: Synthetic oligonucleotide
  Sense strand starting at position 3516 of SEQ ID NO: 914151
aaaugcuugguagacauca

SEQ ID NO: 981921 - RNA, 19 nt, Artificial Sequence
  Description of Artificial Sequence: Synthetic oligonucleotide
  Antisense strand to SEQ ID NO: 981920
ugaugucuaccaagcauuu

SEQ ID NO: 981922 - RNA, 19 nt, Artificial Sequence
  Description of Artificial Sequence: Synthetic oligonucleotide
  Sense strand starting at position 606 of SEQ ID NO: 914151
agaaguucuggaugaacuu

SEQ ID NO: 981923 - RNA, 19 nt, Artificial Sequence
  Description of Artificial Sequence: Synthetic oligonucleotide
  Antisense strand to SEQ ID NO: 981922
aaguucauccagaacuucu

SEQ ID NO: 981924 - RNA, 19 nt, Artificial Sequence
  Description of Artificial Sequence: Synthetic oligonucleotide
  Sense strand starting at position 54 of SEQ ID NO: 914151
auaugaccugcugagugaa

SEQ ID NO: 981925 - RNA, 19 nt, Artificial Sequence
  Description of Artificial Sequence: Synthetic oligonucleotide
  Antisense strand to SEQ ID NO: 981924
uucacucagcaggucauau

SEQ ID NO: 981926 - RNA, 19 nt, Artificial Sequence
  Description of Artificial Sequence: Synthetic oligonucleotide
  Sense strand starting at position 3521 of SEQ ID NO: 914151
cuugguagacaucagugau

SEQ ID NO: 981927 - RNA, 19 nt, Artificial Sequence
  Description of Artificial Sequence: Synthetic oligonucleotide
  Antisense strand to SEQ ID NO: 981926
aucacugaugucuaccaag

SEQ ID NO: 981928 - RNA, 19 nt, Artificial Sequence
  Description of Artificial Sequence: Synthetic oligonucleotide
  Sense strand starting at position 3536 of SEQ ID NO: 914151
ugauuauugggagggccaa

SEQ ID NO: 981929 - RNA, 19 nt, Artificial Sequence
  Description of Artificial Sequence: Synthetic oligonucleotide
  Antisense strand to SEQ ID NO: 981928
uuggcccucccaauaauca

SEQ ID NO: 981930 - RNA, 19 nt, Artificial Sequence
  Description of Artificial Sequence: Synthetic oligonucleotide
  Sense strand starting at position 760 of SEQ ID NO: 914151
agacguuaagacugaacca

SEQ ID NO: 981931 - RNA, 19 nt, Artificial Sequence
  Description of Artificial Sequence: Synthetic oligonucleotide
  Antisense strand to SEQ ID NO: 981930
ugguucagucuuaacgucu

SEQ ID NO: 981932 - RNA, 19 nt, Artificial Sequence
  Description of Artificial Sequence: Synthetic oligonucleotide
  Sense strand starting at position 595 of SEQ ID NO: 914151
gccuaacuuggagaaguuc

SEQ ID NO: 981933 - RNA, 19 nt, Artificial Sequence
  Description of Artificial Sequence: Synthetic oligonucleotide
  Antisense strand to SEQ ID NO: 981932
gaacuucuccaaguuaggc

SEQ ID NO: 981934 - RNA, 19 nt, Artificial Sequence
  Description of Artificial Sequence: Synthetic oligonucleotide
  Sense strand starting at position 3303 of SEQ ID NO: 914151
cauaguguggcagaugaau

SEQ ID NO: 981935 - RNA, 19 nt, Artificial Sequence
  Description of Artificial Sequence: Synthetic oligonucleotide
  Antisense strand to SEQ ID NO: 981934
auucaucugccacacuaug

SEQ ID NO: 981936 - RNA, 19 nt, Artificial Sequence
  Description of Artificial Sequence: Synthetic oligonucleotide
  Sense strand starting at position 260 of SEQ ID NO: 914151
uuaggauuguucuugaaua

SEQ ID NO: 981937 - RNA, 19 nt, Artificial Sequence
  Description of Artificial Sequence: Synthetic oligonucleotide
  Antisense strand to SEQ ID NO: 981936
uauucaagaacaauccuaa

SEQ ID NO: 981938 - RNA, 19 nt, Artificial Sequence
  Description of Artificial Sequence: Synthetic oligonucleotide
  Sense strand starting at position 983 of SEQ ID NO: 914151
ugugcucagcucuugcgaa

SEQ ID NO: 981939 - RNA, 19 nt, Artificial Sequence
  Description of Artificial Sequence: Synthetic oligonucleotide
  Antisense strand to SEQ ID NO: 981938
uucgcaagagcugagcaca

SEQ ID NO: 981940 - RNA, 19 nt, Artificial Sequence
  Description of Artificial Sequence: Synthetic oligonucleotide
  Sense strand starting at position 754 of SEQ ID NO: 914151
gcacacagacguuaagacu

SEQ ID NO: 981941 - RNA, 19 nt, Artificial Sequence
  Description of Artificial Sequence: Synthetic oligonucleotide
  Antisense strand to SEQ ID NO: 981940
agucuuaacgucugugugc

SEQ ID NO: 981942 - RNA, 19 nt, Artificial Sequence
  Description of Artificial Sequence: Synthetic oligonucleotide
  Sense strand starting at position 249 of SEQ ID NO: 914151
gucguauuaaauuaggauu

SEQ ID NO: 981943 - RNA, 19 nt, Artificial Sequence
  Description of Artificial Sequence: Synthetic oligonucleotide
  Antisense strand to SEQ ID NO: 981942
aauccuaauuuaauacgac

SEQ ID NO: 981944 - RNA, 19 nt, Artificial Sequence
  Description of Artificial Sequence: Synthetic oligonucleotide
  Sense strand starting at position 3524 of SEQ ID NO: 914151
gguagacaucagugauuau

SEQ ID NO: 981945 - RNA, 19 nt, Artificial Sequence
  Description of Artificial Sequence: Synthetic oligonucleotide
  Antisense strand to SEQ ID NO: 981944
auaaucacugaugucuacc

SEQ ID NO: 981946 - RNA, 19 nt, Artificial Sequence
  Description of Artificial Sequence: Synthetic oligonucleotide
  Sense strand starting at position 3071 of SEQ ID NO: 914151
ugauuaaugucuccauuag

SEQ ID NO: 981947 - RNA, 19 nt, Artificial Sequence
  Description of Artificial Sequence: Synthetic oligonucleotide
  Antisense strand to SEQ ID NO: 981946
cuaauggagacauuaauca

SEQ ID NO: 981948 - RNA, 19 nt, Artificial Sequence
  Description of Artificial Sequence: Synthetic oligonucleotide
  Sense strand starting at position 2344 of SEQ ID NO: 914151
acucgaagauuccuuauug

SEQ ID NO: 981949 - RNA, 19 nt, Artificial Sequence
  Description of Artificial Sequence: Synthetic oligonucleotide
  Antisense strand to SEQ ID NO: 981948
caauaaggaaucuucgagu

SEQ ID NO: 981950 - RNA, 19 nt, Artificial Sequence
  Description of Artificial Sequence: Synthetic oligonucleotide
  Sense strand starting at position 2283 of SEQ ID NO: 914151
gggcuuucugcgaguuuag

SEQ ID NO: 981951 - RNA, 19 nt, Artificial Sequence
  Description of Artificial Sequence: Synthetic oligonucleotide
  Antisense strand to SEQ ID NO: 981950
cuaaacucgcagaaagccc

SEQ ID NO: 981952 - RNA, 19 nt, Artificial Sequence
  Description of Artificial Sequence: Synthetic oligonucleotide
  Sense strand starting at position 504 of SEQ ID NO: 914151
uuucucauagcaugagaua

SEQ ID NO: 981953 - RNA, 19 nt, Artificial Sequence
  Description of Artificial Sequence: Synthetic oligonucleotide
  Antisense strand to SEQ ID NO: 981952
uaucucaugcuaugagaaa

SEQ ID NO: 981954 - RNA, 19 nt, Artificial Sequence
  Description of Artificial Sequence: Synthetic oligonucleotide
  Sense strand starting at position 2987 of SEQ ID NO: 914151
ggaauaucuuuccugguua

SEQ ID NO: 981955 - RNA, 19 nt, Artificial Sequence
  Description of Artificial Sequence: Synthetic oligonucleotide
  Antisense strand to SEQ ID NO: 981954
uaaccaggaaagauauucc

SEQ ID NO: 981956 - RNA, 19 nt, Artificial Sequence
  Description of Artificial Sequence: Synthetic oligonucleotide
  Sense strand starting at position 745 of SEQ ID NO: 914151
guaguuauugcacacagac

SEQ ID NO: 981957 - RNA, 19 nt, Artificial Sequence
  Description of Artificial Sequence: Synthetic oligonucleotide
  Antisense strand to SEQ ID NO: 981956
gucugugugcaauaacuac

SEQ ID NO: 981958 - RNA, 19 nt, Artificial Sequence
  Description of Artificial Sequence: Synthetic oligonucleotide
  Sense strand starting at position 2526 of SEQ ID NO: 914151
accugugcucuugagauca

SEQ ID NO: 981959 - RNA, 19 nt, Artificial Sequence
  Description of Artificial Sequence: Synthetic oligonucleotide
  Antisense strand to SEQ ID NO: 981958
ugaucucaagagcacaggu

SEQ ID NO: 981960 - RNA, 19 nt, Artificial Sequence
  Description of Artificial Sequence: Synthetic oligonucleotide
  Sense strand starting at position 2986 of SEQ ID NO: 914151
gggaauaucuuuccugguu

SEQ ID NO: 981961 - RNA, 19 nt, Artificial Sequence
  Description of Artificial Sequence: Synthetic oligonucleotide
  Antisense strand to SEQ ID NO: 981960
aaccaggaaagauauuccc

SEQ ID NO: 981962 - RNA, 19 nt, Artificial Sequence
  Description of Artificial Sequence: Synthetic oligonucleotide
  Sense strand starting at position 57 of SEQ ID NO: 914151
ugaccugcugagugaacaa

SEQ ID NO: 981963 - RNA, 19 nt, Artificial Sequence
  Description of Artificial Sequence: Synthetic oligonucleotide
  Antisense strand to SEQ ID NO: 981962
uuguucacucagcagguca

SEQ ID NO: 981964 - RNA, 19 nt, Artificial Sequence
  Description of Artificial Sequence: Synthetic oligonucleotide
  Sense strand starting at position 3855 of SEQ ID NO: 914151
uuaggaagcuggguuaauu

SEQ ID NO: 981965 - RNA, 19 nt, Artificial Sequence
  Description of Artificial Sequence: Synthetic oligonucleotide
  Antisense strand to SEQ ID NO: 981964
aauuaacccagcuuccuaa

SEQ ID NO: 981966 - RNA, 19 nt, Artificial Sequence
  Description of Artificial Sequence: Synthetic oligonucleotide
  Sense strand starting at position 3518 of SEQ ID NO: 914151
augcuugguagacaucagu

SEQ ID NO: 981967 - RNA, 19 nt, Artificial Sequence
  Description of Artificial Sequence: Synthetic oligonucleotide
  Antisense strand to SEQ ID NO: 981966
acugaugucuaccaagcau

SEQ ID NO: 981968 - RNA, 19 nt, Artificial Sequence
  Description of Artificial Sequence: Synthetic oligonucleotide
  Sense strand starting at position 178 of SEQ ID NO: 914151
augucucacgcuuaauaaa

SEQ ID NO: 981969 - RNA, 19 nt, Artificial Sequence
  Description of Artificial Sequence: Synthetic oligonucleotide
  Antisense strand to SEQ ID NO: 981968
uuuauuaagcgugagacau

SEQ ID NO: 981970 - RNA, 19 nt, Artificial Sequence
  Description of Artificial Sequence: Synthetic oligonucleotide
  Sense strand starting at position 2998 of SEQ ID NO: 914151
ccugguuagguuuagucaa

SEQ ID NO: 981971 - RNA, 19 nt, Artificial Sequence
  Description of Artificial Sequence: Synthetic oligonucleotide
  Antisense strand to SEQ ID NO: 981970
uugacuaaaccuaaccagg

SEQ ID NO: 981972 - RNA, 19 nt, Artificial Sequence
  Description of Artificial Sequence: Synthetic oligonucleotide
  Sense strand starting at position 3078 of SEQ ID NO: 914151
ugucuccauuaguugagaa

SEQ ID NO: 981973 - RNA, 19 nt, Artificial Sequence
  Description of Artificial Sequence: Synthetic oligonucleotide
  Antisense strand to SEQ ID NO: 981972
uucucaacuaauggagaca

SEQ ID NO: 981974 - RNA, 19 nt, Artificial Sequence
  Description of Artificial Sequence: Synthetic oligonucleotide
  Sense strand starting at position 3077 of SEQ ID NO: 914151
augucuccauuaguugaga

SEQ ID NO: 981975 - RNA, 19 nt, Artificial Sequence
  Description of Artificial Sequence: Synthetic oligonucleotide
  Antisense strand to SEQ ID NO: 981974
ucucaacuaauggagacau

SEQ ID NO: 981976 - RNA, 19 nt, Artificial Sequence
  Description of Artificial Sequence: Synthetic oligonucleotide
  Sense strand starting at position 96 of SEQ ID NO: 914151
uucuuuaucccugaggcuu

SEQ ID NO: 981977 - RNA, 19 nt, Artificial Sequence
  Description of Artificial Sequence: Synthetic oligonucleotide
  Antisense strand to SEQ ID NO: 981976
aagccucagggauaaagaa

SEQ ID NO: 981978 - RNA, 19 nt, Artificial Sequence
  Description of Artificial Sequence: Synthetic oligonucleotide
  Sense strand starting at position 2758 of SEQ ID NO: 914151
uguauaauuggcuauaguu

SEQ ID NO: 981979 - RNA, 19 nt, Artificial Sequence
  Description of Artificial Sequence: Synthetic oligonucleotide
  Antisense strand to SEQ ID NO: 981978
aacuauagccaauuauaca

SEQ ID NO: 981980 - RNA, 19 nt, Artificial Sequence
  Description of Artificial Sequence: Synthetic oligonucleotide
  Sense strand starting at position 3390 of SEQ ID NO: 914151
cucacuaagucacuuagua

SEQ ID NO: 981981 - RNA, 19 nt, Artificial Sequence
  Description of Artificial Sequence: Synthetic oligonucleotide
  Antisense strand to SEQ ID NO: 981980
uacuaagugacuuagugag

SEQ ID NO: 981982 - RNA, 19 nt, Artificial Sequence
  Description of Artificial Sequence: Synthetic oligonucleotide
  Sense strand starting at position 3513 of SEQ ID NO: 914151
gguaaaugcuugguagaca

SEQ ID NO: 981983 - RNA, 19 nt, Artificial Sequence
  Description of Artificial Sequence: Synthetic oligonucleotide
  Antisense strand to SEQ ID NO: 981982
ugucuaccaagcauuuacc

SEQ ID NO: 981984 - RNA, 19 nt, Artificial Sequence
  Description of Artificial Sequence: Synthetic oligonucleotide
  Sense strand starting at position 3574 of SEQ ID NO: 914151
cugcucuucgaugaucuga

SEQ ID NO: 981985 - RNA, 19 nt, Artificial Sequence
  Description of Artificial Sequence: Synthetic oligonucleotide
  Antisense strand to SEQ ID NO: 981984
ucagaucaucgaagagcag

SEQ ID NO: 981986 - RNA, 19 nt, Artificial Sequence
  Description of Artificial Sequence: Synthetic oligonucleotide
  Sense strand starting at position 3569 of SEQ ID NO: 914151
gggaacugcucuucgauga

SEQ ID NO: 981987 - RNA, 19 nt, Artificial Sequence
  Description of Artificial Sequence: Synthetic oligonucleotide
  Antisense strand to SEQ ID NO: 981986
ucaucgaagagcaguuccc

SEQ ID NO: 981988 - RNA, 19 nt, Artificial Sequence
  Description of Artificial Sequence: Synthetic oligonucleotide
  Sense strand starting at position 507 of SEQ ID NO: 914151
cucauagcaugagauauuu

SEQ ID NO: 981989 - RNA, 19 nt, Artificial Sequence
  Description of Artificial Sequence: Synthetic oligonucleotide
  Antisense strand to SEQ ID NO: 981988
aaauaucucaugcuaugag

SEQ ID NO: 981990 - RNA, 19 nt, Artificial Sequence
  Description of Artificial Sequence: Synthetic oligonucleotide
  Sense strand starting at position 3576 of SEQ ID NO: 914151
gcucuucgaugaucugaga

SEQ ID NO: 981991 - RNA, 19 nt, Artificial Sequence
  Description of Artificial Sequence: Synthetic oligonucleotide
  Antisense strand to SEQ ID NO: 981990
ucucagaucaucgaagagc

SEQ ID NO: 981992 - RNA, 19 nt, Artificial Sequence
  Description of Artificial Sequence: Synthetic oligonucleotide
  Sense strand starting at position 2434 of SEQ ID NO: 914152
uuuggacucugacuagaca

SEQ ID NO: 981993 - RNA, 19 nt, Artificial Sequence
  Description of Artificial Sequence: Synthetic oligonucleotide
  Antisense strand to SEQ ID NO: 981992
ugucuagucagaguccaaa

SEQ ID NO: 981994 - RNA, 19 nt, Artificial Sequence
  Description of Artificial Sequence: Synthetic oligonucleotide
  Sense strand starting at position 285 of SEQ ID NO: 914152
cugccuacucuggaagaca

SEQ ID NO: 981995 - RNA, 19 nt, Artificial Sequence
  Description of Artificial Sequence: Synthetic oligonucleotide
  Antisense strand to SEQ ID NO: 981994
ugucuuccagaguaggcag

SEQ ID NO: 981996 - RNA, 19 nt, Artificial Sequence
  Description of Artificial Sequence: Synthetic oligonucleotide
  Sense strand starting at position 3713 of SEQ ID NO: 914152
uuuauuuccuggguuaguu

SEQ ID NO: 981997 - RNA, 19 nt, Artificial Sequence
  Description of Artificial Sequence: Synthetic oligonucleotide
  Antisense strand to SEQ ID NO: 981996
aacuaacccaggaaauaaa

SEQ ID NO: 981998 - RNA, 19 nt, Artificial Sequence
  Description of Artificial Sequence: Synthetic oligonucleotide
  Sense strand starting at position 2379 of SEQ ID NO: 914152
agcuuuauucuucugcgua

SEQ ID NO: 981999 - RNA, 19 nt, Artificial Sequence
  Description of Artificial Sequence: Synthetic oligonucleotide
  Antisense strand to SEQ ID NO: 981998
uacgcagaagaauaaagcu

SEQ ID NO: 982000 - RNA, 19 nt, Artificial Sequence
  Description of Artificial Sequence: Synthetic oligonucleotide
  Sense strand starting at position 3658 of SEQ ID NO: 914152
acuucugugcucgugugau

SEQ ID NO: 982001 - RNA, 19 nt, Artificial Sequence
  Description of Artificial Sequence: Synthetic oligonucleotide
  Antisense strand to SEQ ID NO: 982000
aucacacgagcacagaagu

SEQ ID NO: 982002 - RNA, 19 nt, Artificial Sequence
  Description of Artificial Sequence: Synthetic oligonucleotide
  Sense strand starting at position 3025 of SEQ ID NO: 914152
ucagaacacuuaguuuaug

SEQ ID NO: 982003 - RNA, 19 nt, Artificial Sequence
  Description of Artificial Sequence: Synthetic oligonucleotide
  Antisense strand to SEQ ID NO: 982002
cauaaacuaaguguucuga

SEQ ID NO: 982004 - RNA, 19 nt, Artificial Sequence
  Description of Artificial Sequence: Synthetic oligonucleotide
  Sense strand starting at position 330 of SEQ ID NO: 914152
cuuugugaaaguugaagga

SEQ ID NO: 982005 - RNA, 19 nt, Artificial Sequence
  Description of Artificial Sequence: Synthetic oligonucleotide
  Antisense strand to SEQ ID NO: 982004
uccuucaacuuucacaaag

SEQ ID NO: 982006 - RNA, 19 nt, Artificial Sequence
  Description of Artificial Sequence: Synthetic oligonucleotide
  Sense strand starting at position 2758 of SEQ ID NO: 914152
acggaugugcuagauugaa

SEQ ID NO: 982007 - RNA, 19 nt, Artificial Sequence
  Description of Artificial Sequence: Synthetic oligonucleotide
  Antisense strand to SEQ ID NO: 982006
uucaaucuagcacauccgu

SEQ ID NO: 982008 - RNA, 19 nt, Artificial Sequence
  Description of Artificial Sequence: Synthetic oligonucleotide
  Sense strand starting at position 2565 of SEQ ID NO: 914152
ucaauaauuaaccggguga

SEQ ID NO: 982009 - RNA, 19 nt, Artificial Sequence
  Description of Artificial Sequence: Synthetic oligonucleotide
  Antisense strand to SEQ ID NO: 982008
ucacccgguuaauuauuga

SEQ ID NO: 982010 - RNA, 19 nt, Artificial Sequence
  Description of Artificial Sequence: Synthetic oligonucleotide
  Sense strand starting at position 533 of SEQ ID NO: 914152
cccagugcuccugaaauga

SEQ ID NO: 982011 - RNA, 19 nt, Artificial Sequence
  Description of Artificial Sequence: Synthetic oligonucleotide
  Antisense strand to SEQ ID NO: 982010
ucauuucaggagcacuggg

SEQ ID NO: 982012 - RNA, 19 nt, Artificial Sequence
  Description of Artificial Sequence: Synthetic oligonucleotide
  Sense strand starting at position 3503 of SEQ ID NO: 914152
cuugcuugaggaugauaca

SEQ ID NO: 982013 - RNA, 19 nt, Artificial Sequence
  Description of Artificial Sequence: Synthetic oligonucleotide
  Antisense strand to SEQ ID NO: 982012
uguaucauccucaagcaag

SEQ ID NO: 982014 - RNA, 19 nt, Artificial Sequence
  Description of Artificial Sequence: Synthetic oligonucleotide
  Sense strand starting at position 3710 of SEQ ID NO: 914152
auauuuauuuccuggguua

SEQ ID NO: 982015 - RNA, 19 nt, Artificial Sequence
  Description of Artificial Sequence: Synthetic oligonucleotide
  Antisense strand to SEQ ID NO: 982014
uaacccaggaaauaaauau

SEQ ID NO: 982016 - RNA, 19 nt, Artificial Sequence
  Description of Artificial Sequence: Synthetic oligonucleotide
  Sense strand starting at position 3688 of SEQ ID NO: 914152
aguuuaugaguguaugauu

SEQ ID NO: 982017 - RNA, 19 nt, Artificial Sequence
  Description of Artificial Sequence: Synthetic oligonucleotide
  Antisense strand to SEQ ID NO: 982016
aaucauacacucauaaacu

SEQ ID NO: 982018 - RNA, 19 nt, Artificial Sequence
  Description of Artificial Sequence: Synthetic oligonucleotide
  Sense strand starting at position 2012 of SEQ ID NO: 914152
aggcacucagcuuaaucau

SEQ ID NO: 982019 - RNA, 19 nt, Artificial Sequence
  Description of Artificial Sequence: Synthetic oligonucleotide
  Antisense strand to SEQ ID NO: 982018
augauuaagcugagugccu

SEQ ID NO: 982020 - RNA, 19 nt, Artificial Sequence
  Description of Artificial Sequence: Synthetic oligonucleotide
  Sense strand starting at position 889 of SEQ ID NO: 914152
gacaauguggcucagaguu

SEQ ID NO: 982021 - RNA, 19 nt, Artificial Sequence
  Description of Artificial Sequence: Synthetic oligonucleotide
  Antisense strand to SEQ ID NO: 982020
aacucugagccacauuguc

SEQ ID NO: 982022 - RNA, 19 nt, Artificial Sequence
  Description of Artificial Sequence: Synthetic oligonucleotide
  Sense strand starting at position 1333 of SEQ ID NO: 914152
gcaggaugagcucaguuga

SEQ ID NO: 982023 - RNA, 19 nt, Artificial Sequence
  Description of Artificial Sequence: Synthetic oligonucleotide
  Antisense strand to SEQ ID NO: 982022
ucaacugagcucauccugc

SEQ ID NO: 982024 - RNA, 19 nt, Artificial Sequence
  Description of Artificial Sequence: Synthetic oligonucleotide
  Sense strand starting at position 766 of SEQ ID NO: 914152
gaacaagcacuaugugauu

SEQ ID NO: 982025 - RNA, 19 nt, Artificial Sequence
  Description of Artificial Sequence: Synthetic oligonucleotide
  Antisense strand to SEQ ID NO: 982024
aaucacauagugcuuguuc

SEQ ID NO: 982026 - RNA, 19 nt, Artificial Sequence
  Description of Artificial Sequence: Synthetic oligonucleotide
  Sense strand starting at position 1078 of SEQ ID NO: 914152
gauucugcugggugaagga

SEQ ID NO: 982027 - RNA, 19 nt, Artificial Sequence
  Description of Artificial Sequence: Synthetic oligonucleotide
  Antisense strand to SEQ ID NO: 982026
uccuucacccagcagaauc

SEQ ID NO: 982028 - RNA, 19 nt, Artificial Sequence
  Description of Artificial Sequence: Synthetic oligonucleotide
  Sense strand starting at position 2766 of SEQ ID NO: 914152
gcuagauugaaugguauua

SEQ ID NO: 982029 - RNA, 19 nt, Artificial Sequence
  Description of Artificial Sequence: Synthetic oligonucleotide
  Antisense strand to SEQ ID NO: 982028
uaauaccauucaaucuagc

SEQ ID NO: 982030 - RNA, 19 nt, Artificial Sequence
  Description of Artificial Sequence: Synthetic oligonucleotide
  Sense strand starting at position 180 of SEQ ID NO: 914152
cucuuauguguagacgaca

SEQ ID NO: 982031 - RNA, 19 nt, Artificial Sequence
  Description of Artificial Sequence: Synthetic oligonucleotide
  Antisense strand to SEQ ID NO: 982030
ugucgucuacacauaagag

SEQ ID NO: 982032 - RNA, 19 nt, Artificial Sequence
  Description of Artificial Sequence: Synthetic oligonucleotide
  Sense strand starting at position 2326 of SEQ ID NO: 914152
agaggagugugucuuuaaa

SEQ ID NO: 982033 - RNA, 19 nt, Artificial Sequence
  Description of Artificial Sequence: Synthetic oligonucleotide
  Antisense strand to SEQ ID NO: 982032
uuuaaagacacacuccucu

SEQ ID NO: 982034 - RNA, 19 nt, Artificial Sequence
  Description of Artificial Sequence: Synthetic oligonucleotide
  Sense strand starting at position 2021 of SEQ ID NO: 914152
gcuuaaucauuaccuugga

SEQ ID NO: 982035 - RNA, 19 nt, Artificial Sequence
  Description of Artificial Sequence: Synthetic oligonucleotide
  Antisense strand to SEQ ID NO: 982034
uccaagguaaugauuaagc

SEQ ID NO: 982036 - RNA, 19 nt, Artificial Sequence
  Description of Artificial Sequence: Synthetic oligonucleotide
  Sense strand starting at position 475 of SEQ ID NO: 914152
ucuaacucauggccuagau

SEQ ID NO: 982037 - RNA, 19 nt, Artificial Sequence
  Description of Artificial Sequence: Synthetic oligonucleotide
  Antisense strand to SEQ ID NO: 982036
aucuaggccaugaguuaga

SEQ ID NO: 982038 - RNA, 19 nt, Artificial Sequence
  Description of Artificial Sequence: Synthetic oligonucleotide
  Sense strand starting at position 1221 of SEQ ID NO: 914152
gagggaagccugugaucuc

SEQ ID NO: 982039 - RNA, 19 nt, Artificial Sequence
  Description of Artificial Sequence: Synthetic oligonucleotide
  Antisense strand to SEQ ID NO: 982038
gagaucacaggcuucccuc

SEQ ID NO: 982040 - RNA, 19 nt, Artificial Sequence
  Description of Artificial Sequence: Synthetic oligonucleotide
  Sense strand starting at position 2392 of SEQ ID NO: 914152
ugcguauagguggauuaga

SEQ ID NO: 982041 - RNA, 19 nt, Artificial Sequence
  Description of Artificial Sequence: Synthetic oligonucleotide
  Antisense strand to SEQ ID NO: 982040
ucuaauccaccuauacgca

SEQ ID NO: 982042 - RNA, 19 nt, Artificial Sequence
  Description of Artificial Sequence: Synthetic oligonucleotide
  Sense strand starting at position 2569 of SEQ ID NO: 914152
uaauuaaccgggugaccuu

SEQ ID NO: 982043 - RNA, 19 nt, Artificial Sequence
  Description of Artificial Sequence: Synthetic oligonucleotide
  Antisense strand to SEQ ID NO: 982042
aaggucacccgguuaauua

SEQ ID NO: 982044 - RNA, 19 nt, Artificial Sequence
  Description of Artificial Sequence: Synthetic oligonucleotide
  Sense strand starting at position 1477 of SEQ ID NO: 914152
gaggcuucccaaggucaca

SEQ ID NO: 982045 - RNA, 19 nt, Artificial Sequence
  Description of Artificial Sequence: Synthetic oligonucleotide
  Antisense strand to SEQ ID NO: 982044
ugugaccuugggaagccuc

SEQ ID NO: 982046 - RNA, 19 nt, Artificial Sequence
  Description of Artificial Sequence: Synthetic oligonucleotide
  Sense strand starting at position 2323 of SEQ ID NO: 914152
gagagaggagugugucuuu

SEQ ID NO: 982047 - RNA, 19 nt, Artificial Sequence
  Description of Artificial Sequence: Synthetic oligonucleotide
  Antisense strand to SEQ ID NO: 982046
aaagacacacuccucucuc

SEQ ID NO: 982048 - RNA, 19 nt, Artificial Sequence
  Description of Artificial Sequence: Synthetic oligonucleotide
  Sense strand starting at position 178 of SEQ ID NO: 914152
uucucuuauguguagacga

SEQ ID NO: 982049 - RNA, 19 nt, Artificial Sequence
  Description of Artificial Sequence: Synthetic oligonucleotide
  Antisense strand to SEQ ID NO: 982048
ucgucuacacauaagagaa

SEQ ID NO: 982050 - RNA, 19 nt, Artificial Sequence
  Description of Artificial Sequence: Synthetic oligonucleotide
  Sense strand starting at position 3686 of SEQ ID NO: 914152
caaguuuaugaguguauga

SEQ ID NO: 982051 - RNA, 19 nt, Artificial Sequence
  Description of Artificial Sequence: Synthetic oligonucleotide
  Antisense strand to SEQ ID NO: 982050
ucauacacucauaaacuug

SEQ ID NO: 982052 - RNA, 19 nt, Artificial Sequence
  Description of Artificial Sequence: Synthetic oligonucleotide
  Sense strand starting at position 2306 of SEQ ID NO: 914152
ugcuuaugugcauauggga

SEQ ID NO: 982053 - RNA, 19 nt, Artificial Sequence
  Description of Artificial Sequence: Synthetic oligonucleotide
  Antisense strand to SEQ ID NO: 982052
ucccauaugcacauaagca

SEQ ID NO: 982054 - RNA, 19 nt, Artificial Sequence
  Description of Artificial Sequence: Synthetic oligonucleotide
  Sense strand starting at position 942 of SEQ ID NO: 914152
aacagauccuggcucugua

SEQ ID NO: 982055 - RNA, 19 nt, Artificial Sequence
  Description of Artificial Sequence: Synthetic oligonucleotide
  Antisense strand to SEQ ID NO: 982054
uacagagccaggaucuguu

SEQ ID NO: 982056 - RNA, 19 nt, Artificial Sequence
  Description of Artificial Sequence: Synthetic oligonucleotide
  Sense strand starting at position 3084 of SEQ ID NO: 914152
uguggaguagcucauguaa

SEQ ID NO: 982057 - RNA, 19 nt, Artificial Sequence
  Description of Artificial Sequence: Synthetic oligonucleotide
  Antisense strand to SEQ ID NO: 982056
uuacaugagcuacuccaca

SEQ ID NO: 982058 - RNA, 19 nt, Artificial Sequence
  Description of Artificial Sequence: Synthetic oligonucleotide
  Sense strand starting at position 2744 of SEQ ID NO: 914152
uucuuaauuuacuaacgga

SEQ ID NO: 982059 - RNA, 19 nt, Artificial Sequence
  Description of Artificial Sequence: Synthetic oligonucleotide
  Antisense strand to SEQ ID NO: 982058
uccguuaguaaauuaagaa

SEQ ID NO: 982060 - RNA, 19 nt, Artificial Sequence
  Description of Artificial Sequence: Synthetic oligonucleotide
  Sense strand starting at position 1313 of SEQ ID NO: 914152
agggcuaugguuugaguaa

SEQ ID NO: 982061 - RNA, 19 nt, Artificial Sequence
  Description of Artificial Sequence: Synthetic oligonucleotide
  Antisense strand to SEQ ID NO: 982060
uuacucaaaccauagcccu

SEQ ID NO: 982062 - RNA, 19 nt, Artificial Sequence
  Description of Artificial Sequence: Synthetic oligonucleotide
  Sense strand starting at position 2730 of SEQ ID NO: 914152
ugggcuuucccucauucuu

SEQ ID NO: 982063 - RNA, 19 nt, Artificial Sequence
  Description of Artificial Sequence: Synthetic oligonucleotide
  Antisense strand to SEQ ID NO: 982062
aagaaugagggaaagccca

SEQ ID NO: 982064 - RNA, 19 nt, Artificial Sequence
  Description of Artificial Sequence: Synthetic oligonucleotide
  Sense strand starting at position 2328 of SEQ ID NO: 914152
aggagugugucuuuaaauc

SEQ ID NO: 982065 - RNA, 19 nt, Artificial Sequence
  Description of Artificial Sequence: Synthetic oligonucleotide
  Antisense strand to SEQ ID NO: 982064
gauuuaaagacacacuccu

SEQ ID NO: 982066 - RNA, 19 nt, Artificial Sequence
  Description of Artificial Sequence: Synthetic oligonucleotide
  Sense strand starting at position 3685 of SEQ ID NO: 914152
ucaaguuuaugaguguaug

SEQ ID NO: 982067 - RNA, 19 nt, Artificial Sequence
  Description of Artificial Sequence: Synthetic oligonucleotide
  Antisense strand to SEQ ID NO: 982066
cauacacucauaaacuuga

SEQ ID NO: 982068 - RNA, 19 nt, Artificial Sequence
  Description of Artificial Sequence: Synthetic oligonucleotide
  Sense strand starting at position 2552 of SEQ ID NO: 914152
gggaguugcuaugucaaua

SEQ ID NO: 982069 - RNA, 19 nt, Artificial Sequence
  Description of Artificial Sequence: Synthetic oligonucleotide
  Antisense strand to SEQ ID NO: 982068
uauugacauagcaacuccc

SEQ ID NO: 982070 - RNA, 19 nt, Artificial Sequence
  Description of Artificial Sequence: Synthetic oligonucleotide
  Sense strand starting at position 1272 of SEQ ID NO: 914152
ggcagagcugcucaugacu

SEQ ID NO: 982071 - RNA, 19 nt, Artificial Sequence
  Description of Artificial Sequence: Synthetic oligonucleotide
  Antisense strand to SEQ ID NO: 982070
agucaugagcagcucugcc

SEQ ID NO: 982072 - RNA, 19 nt, Artificial Sequence
  Description of Artificial Sequence: Synthetic oligonucleotide
  Sense strand starting at position 969 of SEQ ID NO: 914153
uccagaaacuugguaauga

SEQ ID NO: 982073 - RNA, 19 nt, Artificial Sequence
  Description of Artificial Sequence: Synthetic oligonucleotide
  Antisense strand to SEQ ID NO: 982072
ucauuaccaaguuucugga

SEQ ID NO: 982074 - RNA, 19 nt, Artificial Sequence
  Description of Artificial Sequence: Synthetic oligonucleotide
  Sense strand starting at position 556 of SEQ ID NO: 914153
aggauugucagagguaaga

SEQ ID NO: 982075 - RNA, 19 nt, Artificial Sequence
  Description of Artificial Sequence: Synthetic oligonucleotide
  Antisense strand to SEQ ID NO: 982074
ucuuaccucugacaauccu

SEQ ID NO: 982076 - RNA, 19 nt, Artificial Sequence
  Description of Artificial Sequence: Synthetic oligonucleotide
  Sense strand starting at position 406 of SEQ ID NO: 914153
aaguaauaucugugaaaga

SEQ ID NO: 982077 - RNA, 19 nt, Artificial Sequence
  Description of Artificial Sequence: Synthetic oligonucleotide
  Antisense strand to SEQ ID NO: 982076
ucuuucacagauauuacuu

SEQ ID NO: 982078 - RNA, 19 nt, Artificial Sequence
  Description of Artificial Sequence: Synthetic oligonucleotide
  Sense strand starting at position 3126 of SEQ ID NO: 914153
aucuaugaucagugauaag

SEQ ID NO: 982079 - RNA, 19 nt, Artificial Sequence
  Description of Artificial Sequence: Synthetic oligonucleotide
  Antisense strand to SEQ ID NO: 982078
cuuaucacugaucauagau

SEQ ID NO: 982080 - RNA, 19 nt, Artificial Sequence
  Description of Artificial Sequence: Synthetic oligonucleotide
  Sense strand starting at position 2588 of SEQ ID NO: 914153
uuauuagcucaggauugau

SEQ ID NO: 982081 - RNA, 19 nt, Artificial Sequence
  Description of Artificial Sequence: Synthetic oligonucleotide
  Antisense strand to SEQ ID NO: 982080
aucaauccugagcuaauaa

SEQ ID NO: 982082 - RNA, 19 nt, Artificial Sequence
  Description of Artificial Sequence: Synthetic oligonucleotide
  Sense strand starting at position 3470 of SEQ ID NO: 914153
ugugaaugcaaaugagaag

SEQ ID NO: 982083 - RNA, 19 nt, Artificial Sequence
  Description of Artificial Sequence: Synthetic oligonucleotide
  Antisense strand to SEQ ID NO: 982082
cuucucauuugcauucaca

SEQ ID NO: 982084 - RNA, 19 nt, Artificial Sequence
  Description of Artificial Sequence: Synthetic oligonucleotide
  Sense strand starting at position 99 of SEQ ID NO: 914153
uugacuacauggucaaaca

SEQ ID NO: 982085 - RNA, 19 nt, Artificial Sequence
  Description of Artificial Sequence: Synthetic oligonucleotide
  Antisense strand to SEQ ID NO: 982084
uguuugaccauguagucaa

SEQ ID NO: 982086 - RNA, 19 nt, Artificial Sequence
  Description of Artificial Sequence: Synthetic oligonucleotide
  Sense strand starting at position 2815 of SEQ ID NO: 914153
aaagaaagguaugccuaua

SEQ ID NO: 982087 - RNA, 19 nt, Artificial Sequence
  Description of Artificial Sequence: Synthetic oligonucleotide
  Antisense strand to SEQ ID NO: 982086
uauaggcauaccuuucuuu

SEQ ID NO: 982088 - RNA, 19 nt, Artificial Sequence
  Description of Artificial Sequence: Synthetic oligonucleotide
  Sense strand starting at position 2311 of SEQ ID NO: 914153
agucuuacuguggaaauug

SEQ ID NO: 982089 - RNA, 19 nt, Artificial Sequence
  Description of Artificial Sequence: Synthetic oligonucleotide
  Antisense strand to SEQ ID NO: 982088
caauuuccacaguaagacu

SEQ ID NO: 982090 - RNA, 19 nt, Artificial Sequence
  Description of Artificial Sequence: Synthetic oligonucleotide
  Sense strand starting at position 2529 of SEQ ID NO: 914153
cauggaaguugacuccaau

SEQ ID NO: 982091 - RNA, 19 nt, Artificial Sequence
  Description of Artificial Sequence: Synthetic oligonucleotide
  Antisense strand to SEQ ID NO: 982090
auuggagucaacuuccaug

SEQ ID NO: 982092 - RNA, 19 nt, Artificial Sequence
  Description of Artificial Sequence: Synthetic oligonucleotide
  Sense strand starting at position 2550 of SEQ ID NO: 914153
gagggauggcucugaucaa

SEQ ID NO: 982093 - RNA, 19 nt, Artificial Sequence
  Description of Artificial Sequence: Synthetic oligonucleotide
  Antisense strand to SEQ ID NO: 982092
uugaucagagccaucccuc

SEQ ID NO: 982094 - RNA, 19 nt, Artificial Sequence
  Description of Artificial Sequence: Synthetic oligonucleotide
  Sense strand starting at position 89 of SEQ ID NO: 914153
uguuuaaauguugacuaca

SEQ ID NO: 982095 - RNA, 19 nt, Artificial Sequence
  Description of Artificial Sequence: Synthetic oligonucleotide
  Antisense strand to SEQ ID NO: 982094
uguagucaacauuuaaaca

SEQ ID NO: 982096 - RNA, 19 nt, Artificial Sequence
  Description of Artificial Sequence: Synthetic oligonucleotide
  Sense strand starting at position 367 of SEQ ID NO: 914153
gguuaaagcgaacaaaucu

SEQ ID NO: 982097 - RNA, 19 nt, Artificial Sequence
  Description of Artificial Sequence: Synthetic oligonucleotide
  Antisense strand to SEQ ID NO: 982096
agauuuguucgcuuuaacc

SEQ ID NO: 982098 - RNA, 19 nt, Artificial Sequence
  Description of Artificial Sequence: Synthetic oligonucleotide
  Sense strand starting at position 3024 of SEQ ID NO: 914153
ggugcuuaucaauaacaug

SEQ ID NO: 982099 - RNA, 19 nt, Artificial Sequence
  Description of Artificial Sequence: Synthetic oligonucleotide
  Antisense strand to SEQ ID NO: 982098
cauguuauugauaagcacc

SEQ ID NO: 982100 - RNA, 19 nt, Artificial Sequence
  Description of Artificial Sequence: Synthetic oligonucleotide
  Sense strand starting at position 3321 of SEQ ID NO: 914153
uuaagaacucugcaauggu

SEQ ID NO: 982101 - RNA, 19 nt, Artificial Sequence
  Description of Artificial Sequence: Synthetic oligonucleotide
  Antisense strand to SEQ ID NO: 982100
accauugcagaguucuuaa

SEQ ID NO: 982102 - RNA, 19 nt, Artificial Sequence
  Description of Artificial Sequence: Synthetic oligonucleotide
  Sense strand starting at position 2585 of SEQ ID NO: 914153
aaguuauuagcucaggauu

SEQ ID NO: 982103 - RNA, 19 nt, Artificial Sequence
  Description of Artificial Sequence: Synthetic oligonucleotide
  Antisense strand to SEQ ID NO: 982102
aauccugagcuaauaacuu

SEQ ID NO: 982104 - RNA, 19 nt, Artificial Sequence
  Description of Artificial Sequence: Synthetic oligonucleotide
  Sense strand starting at position 3549 of SEQ ID NO: 914153
agacuuacugcugauacga

SEQ ID NO: 982105 - RNA, 19 nt, Artificial Sequence
  Description of Artificial Sequence: Synthetic oligonucleotide
  Antisense strand to SEQ ID NO: 982104
ucguaucagcaguaagucu

SEQ ID NO: 982106 - RNA, 19 nt, Artificial Sequence
  Description of Artificial Sequence: Synthetic oligonucleotide
  Sense strand starting at position 2814 of SEQ ID NO: 914153
gaaagaaagguaugccuau

SEQ ID NO: 982107 - RNA, 19 nt, Artificial Sequence
  Description of Artificial Sequence: Synthetic oligonucleotide
  Antisense strand to SEQ ID NO: 982106
auaggcauaccuuucuuuc

SEQ ID NO: 982108 - RNA, 19 nt, Artificial Sequence
  Description of Artificial Sequence: Synthetic oligonucleotide
  Sense strand starting at position 659 of SEQ ID NO: 914153
gcuuuaugggaauaagcug

SEQ ID NO: 982109 - RNA, 19 nt, Artificial Sequence
  Description of Artificial Sequence: Synthetic oligonucleotide
  Antisense strand to SEQ ID NO: 982108
cagcuuauucccauaaagc

SEQ ID NO: 982110 - RNA, 19 nt, Artificial Sequence
  Description of Artificial Sequence: Synthetic oligonucleotide
  Sense strand starting at position 2636 of SEQ ID NO: 914153
accugacaugccuaaaguu

SEQ ID NO: 982111 - RNA, 19 nt, Artificial Sequence
  Description of Artificial Sequence: Synthetic oligonucleotide
  Antisense strand to SEQ ID NO: 982110
aacuuuaggcaugucaggu

SEQ ID NO: 982112 - RNA, 19 nt, Artificial Sequence
  Description of Artificial Sequence: Synthetic oligonucleotide
  Sense strand starting at position 2056 of SEQ ID NO: 914153
ggcagguuucggcuagcga

SEQ ID NO: 982113 - RNA, 19 nt, Artificial Sequence
  Description of Artificial Sequence: Synthetic oligonucleotide
  Antisense strand to SEQ ID NO: 982112
ucgcuagccgaaaccugcc

SEQ ID NO: 982114 - RNA, 19 nt, Artificial Sequence
  Description of Artificial Sequence: Synthetic oligonucleotide
  Sense strand starting at position 2309 of SEQ ID NO: 914153
gaagucuuacuguggaaau

SEQ ID NO: 982115 - RNA, 19 nt, Artificial Sequence
  Description of Artificial Sequence: Synthetic oligonucleotide
  Antisense strand to SEQ ID NO: 982114
auuuccacaguaagacuuc

SEQ ID NO: 982116 - RNA, 19 nt, Artificial Sequence
  Description of Artificial Sequence: Synthetic oligonucleotide
  Sense strand starting at position 79 of SEQ ID NO: 914153
ccaaaugaguuguuuaaau

SEQ ID NO: 982117 - RNA, 19 nt, Artificial Sequence
  Description of Artificial Sequence: Synthetic oligonucleotide
  Antisense strand to SEQ ID NO: 982116
auuuaaacaacucauuugg

SEQ ID NO: 982118 - RNA, 19 nt, Artificial Sequence
  Description of Artificial Sequence: Synthetic oligonucleotide
  Sense strand starting at position 984 of SEQ ID NO: 914153
augauuggcuauucugaua

SEQ ID NO: 982119 - RNA, 19 nt, Artificial Sequence
  Description of Artificial Sequence: Synthetic oligonucleotide
  Antisense strand to SEQ ID NO: 982118
uaucagaauagccaaucau

SEQ ID NO: 982120 - RNA, 19 nt, Artificial Sequence
  Description of Artificial Sequence: Synthetic oligonucleotide
  Sense strand starting at position 2572 of SEQ ID NO: 914153
cucuuuccacaguaaguua

SEQ ID NO: 982121 - RNA, 19 nt, Artificial Sequence
  Description of Artificial Sequence: Synthetic oligonucleotide
  Antisense strand to SEQ ID NO: 982120
uaacuuacuguggaaagag

SEQ ID NO: 982122 - RNA, 19 nt, Artificial Sequence
  Description of Artificial Sequence: Synthetic oligonucleotide
  Sense strand starting at position 2671 of SEQ ID NO: 914153
acgcaucuccaagaaaguu

SEQ ID NO: 982123 - RNA, 19 nt, Artificial Sequence
  Description of Artificial Sequence: Synthetic oligonucleotide
  Antisense strand to SEQ ID NO: 982122
aacuuucuuggagaugcgu

SEQ ID NO: 982124 - RNA, 19 nt, Artificial Sequence
  Description of Artificial Sequence: Synthetic oligonucleotide
  Sense strand starting at position 97 of SEQ ID NO: 914153
uguugacuacauggucaaa

SEQ ID NO: 982125 - RNA, 19 nt, Artificial Sequence
  Description of Artificial Sequence: Synthetic oligonucleotide
  Antisense strand to SEQ ID NO: 982124
uuugaccauguagucaaca

SEQ ID NO: 982126 - RNA, 19 nt, Artificial Sequence
  Description of Artificial Sequence: Synthetic oligonucleotide
  Sense strand starting at position 2351 of SEQ ID NO: 914153
ucccuuucuccugggagau

SEQ ID NO: 982127 - RNA, 19 nt, Artificial Sequence
  Description of Artificial Sequence: Synthetic oligonucleotide
  Antisense strand to SEQ ID NO: 982126
aucucccaggagaaaggga

SEQ ID NO: 982128 - RNA, 19 nt, Artificial Sequence
  Description of Artificial Sequence: Synthetic oligonucleotide
  Sense strand starting at position 2352 of SEQ ID NO: 914153
cccuuucuccugggagauu

SEQ ID NO: 982129 - RNA, 19 nt, Artificial Sequence
  Description of Artificial Sequence: Synthetic oligonucleotide
  Antisense strand to SEQ ID NO: 982128
aaucucccaggagaaaggg

SEQ ID NO: 982130 - RNA, 19 nt, Artificial Sequence
  Description of Artificial Sequence: Synthetic oligonucleotide
  Sense strand starting at position 3859 of SEQ ID NO: 914153
gucccuagccuguaaggaa

SEQ ID NO: 982131 - RNA, 19 nt, Artificial Sequence
  Description of Artificial Sequence: Synthetic oligonucleotide
  Antisense strand to SEQ ID NO: 982130
uuccuuacaggcuagggac

SEQ ID NO: 982132 - RNA, 19 nt, Artificial Sequence
  Description of Artificial Sequence: Synthetic oligonucleotide
  Sense strand starting at position 3109 of SEQ ID NO: 914153
auaaaucugcuauggugau

SEQ ID NO: 982133 - RNA, 19 nt, Artificial Sequence
  Description of Artificial Sequence: Synthetic oligonucleotide
  Antisense strand to SEQ ID NO: 982132
aucaccauagcagauuuau

SEQ ID NO: 982134 - RNA, 19 nt, Artificial Sequence
  Description of Artificial Sequence: Synthetic oligonucleotide
  Sense strand starting at position 3018 of SEQ ID NO: 914153
aguuauggugcuuaucaau

SEQ ID NO: 982135 - RNA, 19 nt, Artificial Sequence
  Description of Artificial Sequence: Synthetic oligonucleotide
  Antisense strand to SEQ ID NO: 982134
auugauaagcaccauaacu

SEQ ID NO: 982136 - RNA, 19 nt, Artificial Sequence
  Description of Artificial Sequence: Synthetic oligonucleotide
  Sense strand starting at position 2575 of SEQ ID NO: 914153
uuuccacaguaaguuauua

SEQ ID NO: 982137 - RNA, 19 nt, Artificial Sequence
  Description of Artificial Sequence: Synthetic oligonucleotide
  Antisense strand to SEQ ID NO: 982136
uaauaacuuacuguggaaa

SEQ ID NO: 982138 - RNA, 19 nt, Artificial Sequence
  Description of Artificial Sequence: Synthetic oligonucleotide
  Sense strand starting at position 146 of SEQ ID NO: 914153
agcacuuaccaccgaaauu

SEQ ID NO: 982139 - RNA, 19 nt, Artificial Sequence
  Description of Artificial Sequence: Synthetic oligonucleotide
  Antisense strand to SEQ ID NO: 982138
aauuucggugguaagugcu

SEQ ID NO: 982140 - RNA, 19 nt, Artificial Sequence
  Description of Artificial Sequence: Synthetic oligonucleotide
  Sense strand starting at position 2520 of SEQ ID NO: 914153
ccgaacagucauggaaguu

SEQ ID NO: 982141 - RNA, 19 nt, Artificial Sequence
  Description of Artificial Sequence: Synthetic oligonucleotide
  Antisense strand to SEQ ID NO: 982140
aacuuccaugacuguucgg

SEQ ID NO: 982142 - RNA, 19 nt, Artificial Sequence
  Description of Artificial Sequence: Synthetic oligonucleotide
  Sense strand starting at position 3557 of SEQ ID NO: 914153
ugcugauacgaagaacguu

SEQ ID NO: 982143 - RNA, 19 nt, Artificial Sequence
  Description of Artificial Sequence: Synthetic oligonucleotide
  Antisense strand to SEQ ID NO: 982142
aacguucuucguaucagca

SEQ ID NO: 982144 - RNA, 19 nt, Artificial Sequence
  Description of Artificial Sequence: Synthetic oligonucleotide
  Sense strand starting at position 2234 of SEQ ID NO: 914153
ggcugaacuuucucacuac

SEQ ID NO: 982145 - RNA, 19 nt, Artificial Sequence
  Description of Artificial Sequence: Synthetic oligonucleotide
  Antisense strand to SEQ ID NO: 982144
guagugagaaaguucagcc

SEQ ID NO: 982146 - RNA, 19 nt, Artificial Sequence
  Description of Artificial Sequence: Synthetic oligonucleotide
  Sense strand starting at position 2583 of SEQ ID NO: 914153
guaaguuauuagcucagga

SEQ ID NO: 982147 - RNA, 19 nt, Artificial Sequence
  Description of Artificial Sequence: Synthetic oligonucleotide
  Antisense strand to SEQ ID NO: 982146
uccugagcuaauaacuuac

SEQ ID NO: 982148 - RNA, 19 nt, Artificial Sequence
  Description of Artificial Sequence: Synthetic oligonucleotide
  Sense strand starting at position 980 of SEQ ID NO: 914153
gguaaugauuggcuauucu

SEQ ID NO: 982149 - RNA, 19 nt, Artificial Sequence
  Description of Artificial Sequence: Synthetic oligonucleotide
  Antisense strand to SEQ ID NO: 982148
agaauagccaaucauuacc

SEQ ID NO: 982150 - RNA, 19 nt, Artificial Sequence
  Description of Artificial Sequence: Synthetic oligonucleotide
  Sense strand starting at position 3143 of SEQ ID NO: 914153
aguugaaaucacuguugua

SEQ ID NO: 982151 - RNA, 19 nt, Artificial Sequence
  Description of Artificial Sequence: Synthetic oligonucleotide
  Antisense strand to SEQ ID NO: 982150
uacaacagugauuucaacu

SEQ ID NO: 982152 - RNA, 19 nt, Artificial Sequence
  Description of Artificial Sequence: Synthetic oligonucleotide
  Sense strand starting at position 326 of SEQ ID NO: 914154
aaagauagccggcaaacaa

SEQ ID NO: 982153 - RNA, 19 nt, Artificial Sequence
  Description of Artificial Sequence: Synthetic oligonucleotide
  Antisense strand to SEQ ID NO: 982152
uuguuugccggcuaucuuu

SEQ ID NO: 982154 - RNA, 19 nt, Artificial Sequence
  Description of Artificial Sequence: Synthetic oligonucleotide
  Sense strand starting at position 2213 of SEQ ID NO: 914154
gaauaucauguaggauuau

SEQ ID NO: 982155 - RNA, 19 nt, Artificial Sequence
  Description of Artificial Sequence: Synthetic oligonucleotide
  Antisense strand to SEQ ID NO: 982154
auaauccuacaugauauuc

SEQ ID NO: 982156 - RNA, 19 nt, Artificial Sequence
  Description of Artificial Sequence: Synthetic oligonucleotide
  Sense strand starting at position 2491 of SEQ ID NO: 914154
uaguuugguccauaaagau

SEQ ID NO: 982157 - RNA, 19 nt, Artificial Sequence
  Description of Artificial Sequence: Synthetic oligonucleotide
  Antisense strand to SEQ ID NO: 982156
aucuuuauggaccaaacua

SEQ ID NO: 982158 - RNA, 19 nt, Artificial Sequence
  Description of Artificial Sequence: Synthetic oligonucleotide
  Sense strand starting at position 651 of SEQ ID NO: 914154
uccaacucagcaugaaaga

SEQ ID NO: 982159 - RNA, 19 nt, Artificial Sequence
  Description of Artificial Sequence: Synthetic oligonucleotide
  Antisense strand to SEQ ID NO: 982158
ucuuucaugcugaguugga

SEQ ID NO: 982160 - RNA, 19 nt, Artificial Sequence
  Description of Artificial Sequence: Synthetic oligonucleotide
  Sense strand starting at position 3429 of SEQ ID NO: 914154
uuugauguggucuaugaaa

SEQ ID NO: 982161 - RNA, 19 nt, Artificial Sequence
  Description of Artificial Sequence: Synthetic oligonucleotide
  Antisense strand to SEQ ID NO: 982160
uuucauagaccacaucaaa

SEQ ID NO: 982162 - RNA, 19 nt, Artificial Sequence
  Description of Artificial Sequence: Synthetic oligonucleotide
  Sense strand starting at position 649 of SEQ ID NO: 914154
guuccaacucagcaugaaa

SEQ ID NO: 982163 - RNA, 19 nt, Artificial Sequence
  Description of Artificial Sequence: Synthetic oligonucleotide
  Antisense strand to SEQ ID NO: 982162
uuucaugcugaguuggaac

SEQ ID NO: 982164 - RNA, 19 nt, Artificial Sequence
  Description of Artificial Sequence: Synthetic oligonucleotide
  Sense strand starting at position 3836 of SEQ ID NO: 914154
cugacauauguauaaugca

SEQ ID NO: 982165 - RNA, 19 nt, Artificial Sequence
  Description of Artificial Sequence: Synthetic oligonucleotide
  Antisense strand to SEQ ID NO: 982164
ugcauuauacauaugucag

SEQ ID NO: 982166 - RNA, 19 nt, Artificial Sequence
  Description of Artificial Sequence: Synthetic oligonucleotide
  Sense strand starting at position 32 of SEQ ID NO: 914154
agucuuacuguugaauuaa

SEQ ID NO: 982167 - RNA, 19 nt, Artificial Sequence
  Description of Artificial Sequence: Synthetic oligonucleotide
  Antisense strand to SEQ ID NO: 982166
uuaauucaacaguaagacu

SEQ ID NO: 982168 - RNA, 19 nt, Artificial Sequence
  Description of Artificial Sequence: Synthetic oligonucleotide
  Sense strand starting at position 2923 of SEQ ID NO: 914154
gaugcuauacuagagucau

SEQ ID NO: 982169 - RNA, 19 nt, Artificial Sequence
  Description of Artificial Sequence: Synthetic oligonucleotide
  Antisense strand to SEQ ID NO: 982168
augacucuaguauagcauc

SEQ ID NO: 982170 - RNA, 19 nt, Artificial Sequence
  Description of Artificial Sequence: Synthetic oligonucleotide
  Sense strand starting at position 3514 of SEQ ID NO: 914154
agaagagguguaugguaga

SEQ ID NO: 982171 - RNA, 19 nt, Artificial Sequence
  Description of Artificial Sequence: Synthetic oligonucleotide
  Antisense strand to SEQ ID NO: 982170
ucuaccauacaccucuucu

SEQ ID NO: 982172 - RNA, 19 nt, Artificial Sequence
  Description of Artificial Sequence: Synthetic oligonucleotide
  Sense strand starting at position 2489 of SEQ ID NO: 914154
cuuaguuugguccauaaag

SEQ ID NO: 982173 - RNA, 19 nt, Artificial Sequence
  Description of Artificial Sequence: Synthetic oligonucleotide
  Antisense strand to SEQ ID NO: 982172
cuuuauggaccaaacuaag

SEQ ID NO: 982174 - RNA, 19 nt, Artificial Sequence
  Description of Artificial Sequence: Synthetic oligonucleotide
  Sense strand starting at position 3825 of SEQ ID NO: 914154
ccauguacacacugacaua

SEQ ID NO: 982175 - RNA, 19 nt, Artificial Sequence
  Description of Artificial Sequence: Synthetic oligonucleotide
  Antisense strand to SEQ ID NO: 982174
uaugucaguguguacaugg

SEQ ID NO: 982176 - RNA, 19 nt, Artificial Sequence
  Description of Artificial Sequence: Synthetic oligonucleotide
  Sense strand starting at position 2756 of SEQ ID NO: 914154
aguuaaauaucucuuggau

SEQ ID NO: 982177 - RNA, 19 nt, Artificial Sequence
  Description of Artificial Sequence: Synthetic oligonucleotide
  Antisense strand to SEQ ID NO: 982176
auccaagagauauuuaacu

SEQ ID NO: 982178 - RNA, 19 nt, Artificial Sequence
  Description of Artificial Sequence: Synthetic oligonucleotide
  Sense strand starting at position 2292 of SEQ ID NO: 914154
gaggcucauguugacgaaa

SEQ ID NO: 982179 - RNA, 19 nt, Artificial Sequence
  Description of Artificial Sequence: Synthetic oligonucleotide
  Antisense strand to SEQ ID NO: 982178
uuucgucaacaugagccuc

SEQ ID NO: 982180 - RNA, 19 nt, Artificial Sequence
  Description of Artificial Sequence: Synthetic oligonucleotide
  Sense strand starting at position 3924 of SEQ ID NO: 914154
ggaacuauauagucacagu

SEQ ID NO: 982181 - RNA, 19 nt, Artificial Sequence
  Description of Artificial Sequence: Synthetic oligonucleotide
  Antisense strand to SEQ ID NO: 982180
acugugacuauauaguucc

SEQ ID NO: 982182 - RNA, 19 nt, Artificial Sequence
  Description of Artificial Sequence: Synthetic oligonucleotide
  Sense strand starting at position 3844 of SEQ ID NO: 914154
uguauaaugcaugaagcaa

SEQ ID NO: 982183 - RNA, 19 nt, Artificial Sequence
  Description of Artificial Sequence: Synthetic oligonucleotide
  Antisense strand to SEQ ID NO: 982182
uugcuucaugcauuauaca

SEQ ID NO: 982184 - RNA, 19 nt, Artificial Sequence
  Description of Artificial Sequence: Synthetic oligonucleotide
  Sense strand starting at position 2627 of SEQ ID NO: 914154
augugucuggguuaagaua

SEQ ID NO: 982185 - RNA, 19 nt, Artificial Sequence
  Description of Artificial Sequence: Synthetic oligonucleotide
  Antisense strand to SEQ ID NO: 982184
uaucuuaacccagacacau

SEQ ID NO: 982186 - RNA, 19 nt, Artificial Sequence
  Description of Artificial Sequence: Synthetic oligonucleotide
  Sense strand starting at position 3349 of SEQ ID NO: 914154
guugcaugccugcuaaugu

SEQ ID NO: 982187 - RNA, 19 nt, Artificial Sequence
  Description of Artificial Sequence: Synthetic oligonucleotide
  Antisense strand to SEQ ID NO: 982186
acauuagcaggcaugcaac

SEQ ID NO: 982188 - RNA, 19 nt, Artificial Sequence
  Description of Artificial Sequence: Synthetic oligonucleotide
  Sense strand starting at position 1221 of SEQ ID NO: 914154
gauuuacugccuugcgaau

SEQ ID NO: 982189 - RNA, 19 nt, Artificial Sequence
  Description of Artificial Sequence: Synthetic oligonucleotide
  Antisense strand to SEQ ID NO: 982188
auucgcaaggcaguaaauc

SEQ ID NO: 982190 - RNA, 19 nt, Artificial Sequence
  Description of Artificial Sequence: Synthetic oligonucleotide
  Sense strand starting at position 3539 of SEQ ID NO: 914154
ccagauaacucagcuuuag

SEQ ID NO: 982191 - RNA, 19 nt, Artificial Sequence
  Description of Artificial Sequence: Synthetic oligonucleotide
  Antisense strand to SEQ ID NO: 982190
cuaaagcugaguuaucugg

SEQ ID NO: 982192 - RNA, 19 nt, Artificial Sequence
  Description of Artificial Sequence: Synthetic oligonucleotide
  Sense strand starting at position 2965 of SEQ ID NO: 914154
cuaagaagagucuguuaug

SEQ ID NO: 982193 - RNA, 19 nt, Artificial Sequence
  Description of Artificial Sequence: Synthetic oligonucleotide
  Antisense strand to SEQ ID NO: 982192
cauaacagacucuucuuag

SEQ ID NO: 982194 - RNA, 19 nt, Artificial Sequence
  Description of Artificial Sequence: Synthetic oligonucleotide
  Sense strand starting at position 1899 of SEQ ID NO: 914154
gugaauuaacacugguuag

SEQ ID NO: 982195 - RNA, 19 nt, Artificial Sequence
  Description of Artificial Sequence: Synthetic oligonucleotide
  Antisense strand to SEQ ID NO: 982194
cuaaccaguguuaauucac

SEQ ID NO: 982196 - RNA, 19 nt, Artificial Sequence
  Description of Artificial Sequence: Synthetic oligonucleotide
  Sense strand starting at position 3585 of SEQ ID NO: 914154
gugacuuugagaugacccu

SEQ ID NO: 982197 - RNA, 19 nt, Artificial Sequence
  Description of Artificial Sequence: Synthetic oligonucleotide
  Antisense strand to SEQ ID NO: 982196
agggucaucucaaagucac

SEQ ID NO: 982198 - RNA, 19 nt, Artificial Sequence
  Description of Artificial Sequence: Synthetic oligonucleotide
  Sense strand starting at position 503 of SEQ ID NO: 914154
gugguugucuuaguaauuu

SEQ ID NO: 982199 - RNA, 19 nt, Artificial Sequence
  Description of Artificial Sequence: Synthetic oligonucleotide
  Antisense strand to SEQ ID NO: 982198
aaauuacuaagacaaccac

SEQ ID NO: 982200 - RNA, 19 nt, Artificial Sequence
  Description of Artificial Sequence: Synthetic oligonucleotide
  Sense strand starting at position 3718 of SEQ ID NO: 914154
cugauuuggcaacguguua

SEQ ID NO: 982201 - RNA, 19 nt, Artificial Sequence
  Description of Artificial Sequence: Synthetic oligonucleotide
  Antisense strand to SEQ ID NO: 982200
uaacacguugccaaaucag

SEQ ID NO: 982202 - RNA, 19 nt, Artificial Sequence
  Description of Artificial Sequence: Synthetic oligonucleotide
  Sense strand starting at position 3009 of SEQ ID NO: 914154
uaauaauacuggucaguug

SEQ ID NO: 982203 - RNA, 19 nt, Artificial Sequence
  Description of Artificial Sequence: Synthetic oligonucleotide
  Antisense strand to SEQ ID NO: 982202
caacugaccaguauuauua

SEQ ID NO: 982204 - RNA, 19 nt, Artificial Sequence
  Description of Artificial Sequence: Synthetic oligonucleotide
  Sense strand starting at position 1219 of SEQ ID NO: 914154
uugauuuacugccuugcga

SEQ ID NO: 982205 - RNA, 19 nt, Artificial Sequence
  Description of Artificial Sequence: Synthetic oligonucleotide
  Antisense strand to SEQ ID NO: 982204
ucgcaaggcaguaaaucaa

SEQ ID NO: 982206 - RNA, 19 nt, Artificial Sequence
  Description of Artificial Sequence: Synthetic oligonucleotide
  Sense strand starting at position 2803 of SEQ ID NO: 914154
gucucuauagaauguagau

SEQ ID NO: 982207 - RNA, 19 nt, Artificial Sequence
  Description of Artificial Sequence: Synthetic oligonucleotide
  Antisense strand to SEQ ID NO: 982206
aucuacauucuauagagac

SEQ ID NO: 982208 - RNA, 19 nt, Artificial Sequence
  Description of Artificial Sequence: Synthetic oligonucleotide
  Sense strand starting at position 2364 of SEQ ID NO: 914154
gaccgugacccaugacaca

SEQ ID NO: 982209 - RNA, 19 nt, Artificial Sequence
  Description of Artificial Sequence: Synthetic oligonucleotide
  Antisense strand to SEQ ID NO: 982208
ugugucaugggucacgguc

SEQ ID NO: 982210 - RNA, 19 nt, Artificial Sequence
  Description of Artificial Sequence: Synthetic oligonucleotide
  Sense strand starting at position 3184 of SEQ ID NO: 914154
gguguuuacagucaauuau

SEQ ID NO: 982211 - RNA, 19 nt, Artificial Sequence
  Description of Artificial Sequence: Synthetic oligonucleotide
  Antisense strand to SEQ ID NO: 982210
auaauugacuguaaacacc

SEQ ID NO: 982212 - RNA, 19 nt, Artificial Sequence
  Description of Artificial Sequence: Synthetic oligonucleotide
  Sense strand starting at position 2660 of SEQ ID NO: 914154
guucuuauuauguagacga

SEQ ID NO: 982213 - RNA, 19 nt, Artificial Sequence
  Description of Artificial Sequence: Synthetic oligonucleotide
  Antisense strand to SEQ ID NO: 982212
ucgucuacauaauaagaac

SEQ ID NO: 982214 - RNA, 19 nt, Artificial Sequence
  Description of Artificial Sequence: Synthetic oligonucleotide
  Sense strand starting at position 3431 of SEQ ID NO: 914154
ugauguggucuaugaaauu

SEQ ID NO: 982215 - RNA, 19 nt, Artificial Sequence
  Description of Artificial Sequence: Synthetic oligonucleotide
  Antisense strand to SEQ ID NO: 982214
aauuucauagaccacauca

SEQ ID NO: 982216 - RNA, 19 nt, Artificial Sequence
  Description of Artificial Sequence: Synthetic oligonucleotide
  Sense strand starting at position 2113 of SEQ ID NO: 914154
cccugugugcgugcugaua

SEQ ID NO: 982217 - RNA, 19 nt, Artificial Sequence
  Description of Artificial Sequence: Synthetic oligonucleotide
  Antisense strand to SEQ ID NO: 982216
uaucagcacgcacacaggg

SEQ ID NO: 982218 - RNA, 19 nt, Artificial Sequence
  Description of Artificial Sequence: Synthetic oligonucleotide
  Sense strand starting at position 2953 of SEQ ID NO: 914154
gguaucuuauugcuaagaa

SEQ ID NO: 982219 - RNA, 19 nt, Artificial Sequence
  Description of Artificial Sequence: Synthetic oligonucleotide
  Antisense strand to SEQ ID NO: 982218
uucuuagcaauaagauacc

SEQ ID NO: 982220 - RNA, 19 nt, Artificial Sequence
  Description of Artificial Sequence: Synthetic oligonucleotide
  Sense strand starting at position 1763 of SEQ ID NO: 914154
caauaaggcuucccgaaug

SEQ ID NO: 982221 - RNA, 19 nt, Artificial Sequence
  Description of Artificial Sequence: Synthetic oligonucleotide
  Antisense strand to SEQ ID NO: 982220
cauucgggaagccuuauug

SEQ ID NO: 982222 - RNA, 19 nt, Artificial Sequence
  Description of Artificial Sequence: Synthetic oligonucleotide
  Sense strand starting at position 2625 of SEQ ID NO: 914154
gaaugugucuggguuaaga

SEQ ID NO: 982223 - RNA, 19 nt, Artificial Sequence
  Description of Artificial Sequence: Synthetic oligonucleotide
  Antisense strand to SEQ ID NO: 982222
ucuuaacccagacacauuc

SEQ ID NO: 982224 - RNA, 19 nt, Artificial Sequence
  Description of Artificial Sequence: Synthetic oligonucleotide
  Sense strand starting at position 2621 of SEQ ID NO: 914154
aaaggaaugugucuggguu

SEQ ID NO: 982225 - RNA, 19 nt, Artificial Sequence
  Description of Artificial Sequence: Synthetic oligonucleotide
  Antisense strand to SEQ ID NO: 982224
aacccagacacauuccuuu

SEQ ID NO: 982226 - RNA, 19 nt, Artificial Sequence
  Description of Artificial Sequence: Synthetic oligonucleotide
  Sense strand starting at position 86 of SEQ ID NO: 914154
cggcauuaugcucaagaau

SEQ ID NO: 982227 - RNA, 19 nt, Artificial Sequence
  Description of Artificial Sequence: Synthetic oligonucleotide
  Antisense strand to SEQ ID NO: 982226
auucuugagcauaaugccg

SEQ ID NO: 982228 - RNA, 19 nt, Artificial Sequence
  Description of Artificial Sequence: Synthetic oligonucleotide
  Sense strand starting at position 2340 of SEQ ID NO: 914154
gguuuauucugagcacaag

SEQ ID NO: 982229 - RNA, 19 nt, Artificial Sequence
  Description of Artificial Sequence: Synthetic oligonucleotide
  Antisense strand to SEQ ID NO: 982228
cuugugcucagaauaaacc

SEQ ID NO: 982230 - RNA, 19 nt, Artificial Sequence
  Description of Artificial Sequence: Synthetic oligonucleotide
  Sense strand starting at position 2622 of SEQ ID NO: 914154
aaggaaugugucuggguua

SEQ ID NO: 982231 - RNA, 19 nt, Artificial Sequence
  Description of Artificial Sequence: Synthetic oligonucleotide
  Antisense strand to SEQ ID NO: 982230
uaacccagacacauuccuu

SEQ ID NO: 982232 - RNA, 19 nt, Artificial Sequence
  Description of Artificial Sequence: Synthetic oligonucleotide
  Sense strand starting at position 1298 of SEQ ID NO: 914155
aggguacuugcccggauuu

SEQ ID NO: 982233 - RNA, 19 nt, Artificial Sequence
  Description of Artificial Sequence: Synthetic oligonucleotide
  Antisense strand to SEQ ID NO: 982232
aaauccgggcaaguacccu

SEQ ID NO: 982234 - RNA, 19 nt, Artificial Sequence
  Description of Artificial Sequence: Synthetic oligonucleotide
  Sense strand starting at position 908 of SEQ ID NO: 914155
ccgggacacucauuacaua

SEQ ID NO: 982235 - RNA, 19 nt, Artificial Sequence
  Description of Artificial Sequence: Synthetic oligonucleotide
  Antisense strand to SEQ ID NO: 982234
uauguaaugagugucccgg

SEQ ID NO: 982236 - RNA, 19 nt, Artificial Sequence
  Description of Artificial Sequence: Synthetic oligonucleotide
  Sense strand starting at position 3114 of SEQ ID NO: 914155
cguccucucgcuccugauu

SEQ ID NO: 982237 - RNA, 19 nt, Artificial Sequence
  Description of Artificial Sequence: Synthetic oligonucleotide
  Antisense strand to SEQ ID NO: 982236
aaucaggagcgagaggacg

SEQ ID NO: 982238 - RNA, 19 nt, Artificial Sequence
  Description of Artificial Sequence: Synthetic oligonucleotide
  Sense strand starting at position 3467 of SEQ ID NO: 914155
agagcuuuauccucagauc

SEQ ID NO: 982239 - RNA, 19 nt, Artificial Sequence
  Description of Artificial Sequence: Synthetic oligonucleotide
  Antisense strand to SEQ ID NO: 982238
gaucugaggauaaagcucu

SEQ ID NO: 982240 - RNA, 19 nt, Artificial Sequence
  Description of Artificial Sequence: Synthetic oligonucleotide
  Sense strand starting at position 331 of SEQ ID NO: 914155
gaaguauugccucagucca

SEQ ID NO: 982241 - RNA, 19 nt, Artificial Sequence
  Description of Artificial Sequence: Synthetic oligonucleotide
  Antisense strand to SEQ ID NO: 982240
uggacugaggcaauacuuc

SEQ ID NO: 982242 - RNA, 19 nt, Artificial Sequence
  Description of Artificial Sequence: Synthetic oligonucleotide
  Sense strand starting at position 3548 of SEQ ID NO: 914155
gccaucuugcgcguauuau

SEQ ID NO: 982243 - RNA, 19 nt, Artificial Sequence
  Description of Artificial Sequence: Synthetic oligonucleotide
  Antisense strand to SEQ ID NO: 982242
auaauacgcgcaagauggc

SEQ ID NO: 982244 - RNA, 19 nt, Artificial Sequence
  Description of Artificial Sequence: Synthetic oligonucleotide
  Sense strand starting at position 864 of SEQ ID NO: 914155
uugguaugccagcaucaug

SEQ ID NO: 982245 - RNA, 19 nt, Artificial Sequence
  Description of Artificial Sequence: Synthetic oligonucleotide
  Antisense strand to SEQ ID NO: 982244
caugaugcuggcauaccaa

SEQ ID NO: 982246 - RNA, 19 nt, Artificial Sequence
  Description of Artificial Sequence: Synthetic oligonucleotide
  Sense strand starting at position 852 of SEQ ID NO: 914155
uuuacuuccucauugguau

SEQ ID NO: 982247 - RNA, 19 nt, Artificial Sequence
  Description of Artificial Sequence: Synthetic oligonucleotide
  Antisense strand to SEQ ID NO: 982246
auaccaaugaggaaguaaa

SEQ ID NO: 982248 - RNA, 19 nt, Artificial Sequence
  Description of Artificial Sequence: Synthetic oligonucleotide
  Sense strand starting at position 222 of SEQ ID NO: 914155
agaggacuccucgguguca

SEQ ID NO: 982249 - RNA, 19 nt, Artificial Sequence
  Description of Artificial Sequence: Synthetic oligonucleotide
  Antisense strand to SEQ ID NO: 982248
ugacaccgaggaguccucu

SEQ ID NO: 982250 - RNA, 19 nt, Artificial Sequence
  Description of Artificial Sequence: Synthetic oligonucleotide
  Sense strand starting at position 684 of SEQ ID NO: 914155
gccggcucucgggaggaau

SEQ ID NO: 982251 - RNA, 19 nt, Artificial Sequence
  Description of Artificial Sequence: Synthetic oligonucleotide
  Antisense strand to SEQ ID NO: 982250
auuccucccgagagccggc

SEQ ID NO: 982252 - RNA, 19 nt, Artificial Sequence
  Description of Artificial Sequence: Synthetic oligonucleotide
  Sense strand starting at position 806 of SEQ ID NO: 914155
cccaguguguuuccaauag

SEQ ID NO: 982253 - RNA, 19 nt, Artificial Sequence
  Description of Artificial Sequence: Synthetic oligonucleotide
  Antisense strand to SEQ ID NO: 982252
cuauuggaaacacacuggg

SEQ ID NO: 982254 - RNA, 19 nt, Artificial Sequence
  Description of Artificial Sequence: Synthetic oligonucleotide
  Sense strand starting at position 328 of SEQ ID NO: 914155
acggaaguauugccucagu

SEQ ID NO: 982255 - RNA, 19 nt, Artificial Sequence
  Description of Artificial Sequence: Synthetic oligonucleotide
  Antisense strand to SEQ ID NO: 982254
acugaggcaauacuuccgu

SEQ ID NO: 982256 - RNA, 19 nt, Artificial Sequence
  Description of Artificial Sequence: Synthetic oligonucleotide
  Sense strand starting at position 2166 of SEQ ID NO: 914155
ggguccaaauuccauauaa

SEQ ID NO: 982257 - RNA, 19 nt, Artificial Sequence
  Description of Artificial Sequence: Synthetic oligonucleotide
  Antisense strand to SEQ ID NO: 982256
uuauauggaauuuggaccc

SEQ ID NO: 982258 - RNA, 19 nt, Artificial Sequence
  Description of Artificial Sequence: Synthetic oligonucleotide
  Sense strand starting at position 3549 of SEQ ID NO: 914155
ccaucuugcgcguauuauu

SEQ ID NO: 982259 - RNA, 19 nt, Artificial Sequence
  Description of Artificial Sequence: Synthetic oligonucleotide
  Antisense strand to SEQ ID NO: 982258
aauaauacgcgcaagaugg

SEQ ID NO: 982260 - RNA, 19 nt, Artificial Sequence
  Description of Artificial Sequence: Synthetic oligonucleotide
  Sense strand starting at position 430 of SEQ ID NO: 914155
ggacgcgguuccguaauca

SEQ ID NO: 982261 - RNA, 19 nt, Artificial Sequence
  Description of Artificial Sequence: Synthetic oligonucleotide
  Antisense strand to SEQ ID NO: 982260
ugauuacggaaccgcgucc

SEQ ID NO: 982262 - RNA, 19 nt, Artificial Sequence
  Description of Artificial Sequence: Synthetic oligonucleotide
  Sense strand starting at position 810 of SEQ ID NO: 914155
guguguuuccaauagcgcu

SEQ ID NO: 982263 - RNA, 19 nt, Artificial Sequence
  Description of Artificial Sequence: Synthetic oligonucleotide
  Antisense strand to SEQ ID NO: 982262
agcgcuauuggaaacacac

SEQ ID NO: 982264 - RNA, 19 nt, Artificial Sequence
  Description of Artificial Sequence: Synthetic oligonucleotide
  Sense strand starting at position 1108 of SEQ ID NO: 914155
gcgagaauguaccaaguag

SEQ ID NO: 982265 - RNA, 19 nt, Artificial Sequence
  Description of Artificial Sequence: Synthetic oligonucleotide
  Antisense strand to SEQ ID NO: 982264
cuacuugguacauucucgc

SEQ ID NO: 982266 - RNA, 19 nt, Artificial Sequence
  Description of Artificial Sequence: Synthetic oligonucleotide
  Sense strand starting at position 3547 of SEQ ID NO: 914155
agccaucuugcgcguauua

SEQ ID NO: 982267 - RNA, 19 nt, Artificial Sequence
  Description of Artificial Sequence: Synthetic oligonucleotide
  Antisense strand to SEQ ID NO: 982266
uaauacgcgcaagauggcu

SEQ ID NO: 982268 - RNA, 19 nt, Artificial Sequence
  Description of Artificial Sequence: Synthetic oligonucleotide
  Sense strand starting at position 3546 of SEQ ID NO: 914155
cagccaucuugcgcguauu

SEQ ID NO: 982269 - RNA, 19 nt, Artificial Sequence
  Description of Artificial Sequence: Synthetic oligonucleotide
  Antisense strand to SEQ ID NO: 982268
aauacgcgcaagauggcug

SEQ ID NO: 982270 - RNA, 19 nt, Artificial Sequence
  Description of Artificial Sequence: Synthetic oligonucleotide
  Sense strand starting at position 309 of SEQ ID NO: 914156
ucagaaacuugucugaaag

SEQ ID NO: 982271 - RNA, 19 nt, Artificial Sequence
  Description of Artificial Sequence: Synthetic oligonucleotide
  Antisense strand to SEQ ID NO: 982270
cuuucagacaaguuucuga

SEQ ID NO: 982272 - RNA, 19 nt, Artificial Sequence
  Description of Artificial Sequence: Synthetic oligonucleotide
  Sense strand starting at position 3394 of SEQ ID NO: 914156
aguguaggaccagaguuaa

SEQ ID NO: 982273 - RNA, 19 nt, Artificial Sequence
  Description of Artificial Sequence: Synthetic oligonucleotide
  Antisense strand to SEQ ID NO: 982272
uuaacucugguccuacacu

SEQ ID NO: 982274 - RNA, 19 nt, Artificial Sequence
  Description of Artificial Sequence: Synthetic oligonucleotide
  Sense strand starting at position 878 of SEQ ID NO: 914156
auuguauauguccaaugaa

SEQ ID NO: 982275 - RNA, 19 nt, Artificial Sequence
  Description of Artificial Sequence: Synthetic oligonucleotide
  Antisense strand to SEQ ID NO: 982274
uucauuggacauauacaau

SEQ ID NO: 982276 - RNA, 19 nt, Artificial Sequence
  Description of Artificial Sequence: Synthetic oligonucleotide
  Sense strand starting at position 1051 of SEQ ID NO: 914156
ucaaaugugguccauaaac

SEQ ID NO: 982277 - RNA, 19 nt, Artificial Sequence
  Description of Artificial Sequence: Synthetic oligonucleotide
  Antisense strand to SEQ ID NO: 982276
guuuauggaccacauuuga

SEQ ID NO: 982278 - RNA, 19 nt, Artificial Sequence
  Description of Artificial Sequence: Synthetic oligonucleotide
  Sense strand starting at position 3440 of SEQ ID NO: 914156
auauuucuugcauguuuga

SEQ ID NO: 982279 - RNA, 19 nt, Artificial Sequence
  Description of Artificial Sequence: Synthetic oligonucleotide
  Antisense strand to SEQ ID NO: 982278
ucaaacaugcaagaaauau

SEQ ID NO: 982280 - RNA, 19 nt, Artificial Sequence
  Description of Artificial Sequence: Synthetic oligonucleotide
  Sense strand starting at position 2248 of SEQ ID NO: 914156
aaaugugagcucuauuaga

SEQ ID NO: 982281 - RNA, 19 nt, Artificial Sequence
  Description of Artificial Sequence: Synthetic oligonucleotide
  Antisense strand to SEQ ID NO: 982280
ucuaauagagcucacauuu

SEQ ID NO: 982282 - RNA, 19 nt, Artificial Sequence
  Description of Artificial Sequence: Synthetic oligonucleotide
  Sense strand starting at position 558 of SEQ ID NO: 914156
auuaaacaucugcaggagu

SEQ ID NO: 982283 - RNA, 19 nt, Artificial Sequence
  Description of Artificial Sequence: Synthetic oligonucleotide
  Antisense strand to SEQ ID NO: 982282
acuccugcagauguuuaau

SEQ ID NO: 982284 - RNA, 19 nt, Artificial Sequence
  Description of Artificial Sequence: Synthetic oligonucleotide
  Sense strand starting at position 2114 of SEQ ID NO: 914156
gcccuuggacuuuaaauag

SEQ ID NO: 982285 - RNA, 19 nt, Artificial Sequence
  Description of Artificial Sequence: Synthetic oligonucleotide
  Antisense strand to SEQ ID NO: 982284
cuauuuaaaguccaagggc

SEQ ID NO: 982286 - RNA, 19 nt, Artificial Sequence
  Description of Artificial Sequence: Synthetic oligonucleotide
  Sense strand starting at position 2256 of SEQ ID NO: 914156
gcucuauuagagcaaggaa

SEQ ID NO: 982287 - RNA, 19 nt, Artificial Sequence
  Description of Artificial Sequence: Synthetic oligonucleotide
  Antisense strand to SEQ ID NO: 982286
uuccuugcucuaauagagc

SEQ ID NO: 982288 - RNA, 19 nt, Artificial Sequence
  Description of Artificial Sequence: Synthetic oligonucleotide
  Sense strand starting at position 793 of SEQ ID NO: 914156
agaaauuacuaggcuauca

SEQ ID NO: 982289 - RNA, 19 nt, Artificial Sequence
  Description of Artificial Sequence: Synthetic oligonucleotide
  Antisense strand to SEQ ID NO: 982288
ugauagccuaguaauuucu

SEQ ID NO: 982290 - RNA, 19 nt, Artificial Sequence
  Description of Artificial Sequence: Synthetic oligonucleotide
  Sense strand starting at position 182 of SEQ ID NO: 914156
ggauaaugagaaugucucu

SEQ ID NO: 982291 - RNA, 19 nt, Artificial Sequence
  Description of Artificial Sequence: Synthetic oligonucleotide
  Antisense strand to SEQ ID NO: 982290
agagacauucucauuaucc

SEQ ID NO: 982292 - RNA, 19 nt, Artificial Sequence
  Description of Artificial Sequence: Synthetic oligonucleotide
  Sense strand starting at position 3029 of SEQ ID NO: 914156
ggcauaucacaggauuagu

SEQ ID NO: 982293 - RNA, 19 nt, Artificial Sequence
  Description of Artificial Sequence: Synthetic oligonucleotide
  Antisense strand to SEQ ID NO: 982292
acuaauccugugauaugcc

SEQ ID NO: 982294 - RNA, 19 nt, Artificial Sequence
  Description of Artificial Sequence: Synthetic oligonucleotide
  Sense strand starting at position 265 of SEQ ID NO: 914156
aguucuuagaggcagauua

SEQ ID NO: 982295 - RNA, 19 nt, Artificial Sequence
  Description of Artificial Sequence: Synthetic oligonucleotide
  Antisense strand to SEQ ID NO: 982294
uaaucugccucuaagaacu

SEQ ID NO: 982296 - RNA, 19 nt, Artificial Sequence
  Description of Artificial Sequence: Synthetic oligonucleotide
  Sense strand starting at position 712 of SEQ ID NO: 914156
guuuaauggcgagacagaa

SEQ ID NO: 982297 - RNA, 19 nt, Artificial Sequence
  Description of Artificial Sequence: Synthetic oligonucleotide
  Antisense strand to SEQ ID NO: 982296
uucugucucgccauuaaac

SEQ ID NO: 982298 - RNA, 19 nt, Artificial Sequence
  Description of Artificial Sequence: Synthetic oligonucleotide
  Sense strand starting at position 1251 of SEQ ID NO: 914156
cgaaguauaucugcauuuc

SEQ ID NO: 982299 - RNA, 19 nt, Artificial Sequence
  Description of Artificial Sequence: Synthetic oligonucleotide
  Antisense strand to SEQ ID NO: 982298
gaaaugcagauauacuucg

SEQ ID NO: 982300 - RNA, 19 nt, Artificial Sequence
  Description of Artificial Sequence: Synthetic oligonucleotide
  Sense strand starting at position 3148 of SEQ ID NO: 914156
aggaaagaguucucuauuc

SEQ ID NO: 982301 - RNA, 19 nt, Artificial Sequence
  Description of Artificial Sequence: Synthetic oligonucleotide
  Antisense strand to SEQ ID NO: 982300
gaauagagaacucuuuccu

SEQ ID NO: 982302 - RNA, 19 nt, Artificial Sequence
  Description of Artificial Sequence: Synthetic oligonucleotide
  Sense strand starting at position 2259 of SEQ ID NO: 914156
cuauuagagcaaggaacuu

SEQ ID NO: 982303 - RNA, 19 nt, Artificial Sequence
  Description of Artificial Sequence: Synthetic oligonucleotide
  Antisense strand to SEQ ID NO: 982302
aaguuccuugcucuaauag

SEQ ID NO: 982304 - RNA, 19 nt, Artificial Sequence
  Description of Artificial Sequence: Synthetic oligonucleotide
  Sense strand starting at position 573 of SEQ ID NO: 914156
gaguguaccuauuugccca

SEQ ID NO: 982305 - RNA, 19 nt, Artificial Sequence
  Description of Artificial Sequence: Synthetic oligonucleotide
  Antisense strand to SEQ ID NO: 982304
ugggcaaauagguacacuc

SEQ ID NO: 982306 - RNA, 19 nt, Artificial Sequence
  Description of Artificial Sequence: Synthetic oligonucleotide
  Sense strand starting at position 3135 of SEQ ID NO: 914156
guccauuagccucaggaaa

SEQ ID NO: 982307 - RNA, 19 nt, Artificial Sequence
  Description of Artificial Sequence: Synthetic oligonucleotide
  Antisense strand to SEQ ID NO: 982306
uuuccugaggcuaauggac

SEQ ID NO: 982308 - RNA, 19 nt, Artificial Sequence
  Description of Artificial Sequence: Synthetic oligonucleotide
  Sense strand starting at position 188 of SEQ ID NO: 914156
ugagaaugucucuagcuaa

SEQ ID NO: 982309 - RNA, 19 nt, Artificial Sequence
  Description of Artificial Sequence: Synthetic oligonucleotide
  Antisense strand to SEQ ID NO: 982308
uuagcuagagacauucuca

SEQ ID NO: 982310 - RNA, 19 nt, Artificial Sequence
  Description of Artificial Sequence: Synthetic oligonucleotide
  Sense strand starting at position 3213 of SEQ ID NO: 914156
aggcuugaucaaugaugac

SEQ ID NO: 982311 - RNA, 19 nt, Artificial Sequence
  Description of Artificial Sequence: Synthetic oligonucleotide
  Antisense strand to SEQ ID NO: 982310
gucaucauugaucaagccu

SEQ ID NO: 982312 - RNA, 19 nt, Artificial Sequence
  Description of Artificial Sequence: Synthetic oligonucleotide
  Sense strand starting at position 1078 of SEQ ID NO: 914156
cuggaaucaccuggagcaa

SEQ ID NO: 982313 - RNA, 19 nt, Artificial Sequence
  Description of Artificial Sequence: Synthetic oligonucleotide
  Antisense strand to SEQ ID NO: 982312
uugcuccaggugauuccag

SEQ ID NO: 982314 - RNA, 19 nt, Artificial Sequence
  Description of Artificial Sequence: Synthetic oligonucleotide
  Sense strand starting at position 3028 of SEQ ID NO: 914156
uggcauaucacaggauuag

SEQ ID NO: 982315 - RNA, 19 nt, Artificial Sequence
  Description of Artificial Sequence: Synthetic oligonucleotide
  Antisense strand to SEQ ID NO: 982314
cuaauccugugauaugcca

SEQ ID NO: 982316 - RNA, 19 nt, Artificial Sequence
  Description of Artificial Sequence: Synthetic oligonucleotide
  Sense strand starting at position 2517 of SEQ ID NO: 914156
gguugaauuccuuaguaca

SEQ ID NO: 982317 - RNA, 19 nt, Artificial Sequence
  Description of Artificial Sequence: Synthetic oligonucleotide
  Antisense strand to SEQ ID NO: 982316
uguacuaaggaauucaacc

SEQ ID NO: 982318 - RNA, 19 nt, Artificial Sequence
  Description of Artificial Sequence: Synthetic oligonucleotide
  Sense strand starting at position 319 of SEQ ID NO: 914156
gucugaaagaaugguaauc

SEQ ID NO: 982319 - RNA, 19 nt, Artificial Sequence
  Description of Artificial Sequence: Synthetic oligonucleotide
  Antisense strand to SEQ ID NO: 982318
gauuaccauucuuucagac

SEQ ID NO: 982320 - RNA, 19 nt, Artificial Sequence
  Description of Artificial Sequence: Synthetic oligonucleotide
  Sense strand starting at position 1459 of SEQ ID NO: 914156
ccaaguaggcuacaagagu

SEQ ID NO: 982321 - RNA, 19 nt, Artificial Sequence
  Description of Artificial Sequence: Synthetic oligonucleotide
  Antisense strand to SEQ ID NO: 982320
acucuuguagccuacuugg

SEQ ID NO: 982322 - RNA, 19 nt, Artificial Sequence
  Description of Artificial Sequence: Synthetic oligonucleotide
  Sense strand starting at position 1473 of SEQ ID NO: 914156
agaguucgugccagggcaa

SEQ ID NO: 982323 - RNA, 19 nt, Artificial Sequence
  Description of Artificial Sequence: Synthetic oligonucleotide
  Antisense strand to SEQ ID NO: 982322
uugcccuggcacgaacucu

SEQ ID NO: 982324 - RNA, 19 nt, Artificial Sequence
  Description of Artificial Sequence: Synthetic oligonucleotide
  Sense strand starting at position 2797 of SEQ ID NO: 914156
ggacuuuaauaucuaguau

SEQ ID NO: 982325 - RNA, 19 nt, Artificial Sequence
  Description of Artificial Sequence: Synthetic oligonucleotide
  Antisense strand to SEQ ID NO: 982324
auacuagauauuaaagucc

SEQ ID NO: 982326 - RNA, 19 nt, Artificial Sequence
  Description of Artificial Sequence: Synthetic oligonucleotide
  Sense strand starting at position 330 of SEQ ID NO: 914156
ugguaaucauuaccuuaag

SEQ ID NO: 982327 - RNA, 19 nt, Artificial Sequence
  Description of Artificial Sequence: Synthetic oligonucleotide
  Antisense strand to SEQ ID NO: 982326
cuuaagguaaugauuacca

SEQ ID NO: 982328 - RNA, 19 nt, Artificial Sequence
  Description of Artificial Sequence: Synthetic oligonucleotide
  Sense strand starting at position 742 of SEQ ID NO: 914156
ucuggagggccuugaauaa

SEQ ID NO: 982329 - RNA, 19 nt, Artificial Sequence
  Description of Artificial Sequence: Synthetic oligonucleotide
  Antisense strand to SEQ ID NO: 982328
uuauucaaggcccuccaga

SEQ ID NO: 982330 - RNA, 19 nt, Artificial Sequence
  Description of Artificial Sequence: Synthetic oligonucleotide
  Sense strand starting at position 308 of SEQ ID NO: 914156
gucagaaacuugucugaaa

SEQ ID NO: 982331 - RNA, 19 nt, Artificial Sequence
  Description of Artificial Sequence: Synthetic oligonucleotide
  Antisense strand to SEQ ID NO: 982330
uuucagacaaguuucugac

SEQ ID NO: 982332 - RNA, 19 nt, Artificial Sequence
  Description of Artificial Sequence: Synthetic oligonucleotide
  Sense strand starting at position 489 of SEQ ID NO: 914156
cuguaugacccauacuuuc

SEQ ID NO: 982333 - RNA, 19 nt, Artificial Sequence
  Description of Artificial Sequence: Synthetic oligonucleotide
  Antisense strand to SEQ ID NO: 982332
gaaaguaugggucauacag

SEQ ID NO: 982334 - RNA, 19 nt, Artificial Sequence
  Description of Artificial Sequence: Synthetic oligonucleotide
  Sense strand starting at position 3625 of SEQ ID NO: 914156
gggcucuuuggucaacaga

SEQ ID NO: 982335 - RNA, 19 nt, Artificial Sequence
  Description of Artificial Sequence: Synthetic oligonucleotide
  Antisense strand to SEQ ID NO: 982334
ucuguugaccaaagagccc

SEQ ID NO: 982336 - RNA, 19 nt, Artificial Sequence
  Description of Artificial Sequence: Synthetic oligonucleotide
  Sense strand starting at position 2531 of SEQ ID NO: 914156
guacacuuuguuuagauau

SEQ ID NO: 982337 - RNA, 19 nt, Artificial Sequence
  Description of Artificial Sequence: Synthetic oligonucleotide
  Antisense strand to SEQ ID NO: 982336
auaucuaaacaaaguguac

SEQ ID NO: 982338 - RNA, 19 nt, Artificial Sequence
  Description of Artificial Sequence: Synthetic oligonucleotide
  Sense strand starting at position 3271 of SEQ ID NO: 914156
cccaauuguccggacauca

SEQ ID NO: 982339 - RNA, 19 nt, Artificial Sequence
  Description of Artificial Sequence: Synthetic oligonucleotide
  Antisense strand to SEQ ID NO: 982338
ugauguccggacaauuggg

SEQ ID NO: 982340 - RNA, 19 nt, Artificial Sequence
  Description of Artificial Sequence: Synthetic oligonucleotide
  Sense strand starting at position 1513 of SEQ ID NO: 914156
gauuccuguccagagcuaa

SEQ ID NO: 982341 - RNA, 19 nt, Artificial Sequence
  Description of Artificial Sequence: Synthetic oligonucleotide
  Antisense strand to SEQ ID NO: 982340
uuagcucuggacaggaauc

SEQ ID NO: 982342 - RNA, 19 nt, Artificial Sequence
  Description of Artificial Sequence: Synthetic oligonucleotide
  Sense strand starting at position 865 of SEQ ID NO: 914156
acagaccuggcuuauugua

SEQ ID NO: 982343 - RNA, 19 nt, Artificial Sequence
  Description of Artificial Sequence: Synthetic oligonucleotide
  Antisense strand to SEQ ID NO: 982342
uacaauaagccaggucugu

SEQ ID NO: 982344 - RNA, 19 nt, Artificial Sequence
  Description of Artificial Sequence: Synthetic oligonucleotide
  Sense strand starting at position 3234 of SEQ ID NO: 914156
ggaugacuccaaggcacuu

SEQ ID NO: 982345 - RNA, 19 nt, Artificial Sequence
  Description of Artificial Sequence: Synthetic oligonucleotide
  Antisense strand to SEQ ID NO: 982344
aagugccuuggagucaucc

SEQ ID NO: 982346 - RNA, 19 nt, Artificial Sequence
  Description of Artificial Sequence: Synthetic oligonucleotide
  Sense strand starting at position 900 of SEQ ID NO: 914156
aaggauccuggaugcuuua

SEQ ID NO: 982347 - RNA, 19 nt, Artificial Sequence
  Description of Artificial Sequence: Synthetic oligonucleotide
  Antisense strand to SEQ ID NO: 982346
uaaagcauccaggauccuu

SEQ ID NO: 982348 - RNA, 19 nt, Artificial Sequence
  Description of Artificial Sequence: Synthetic oligonucleotide
  Sense strand starting at position 1236 of SEQ ID NO: 914156
uuaagucuugguuaacgaa

SEQ ID NO: 982349 - RNA, 19 nt, Artificial Sequence
  Description of Artificial Sequence: Synthetic oligonucleotide
  Antisense strand to SEQ ID NO: 982348
uucguuaaccaagacuuaa

SEQ ID NO: 982350 - RNA, 19 nt, Artificial Sequence
  Description of Artificial Sequence: Synthetic oligonucleotide
  Sense strand starting at position 3401 of SEQ ID NO: 914157
uuuaauuaagagggaugca

SEQ ID NO: 982351 - RNA, 19 nt, Artificial Sequence
  Description of Artificial Sequence: Synthetic oligonucleotide
  Antisense strand to SEQ ID NO: 982350
ugcaucccucuuaauuaaa

SEQ ID NO: 982352 - RNA, 19 nt, Artificial Sequence
  Description of Artificial Sequence: Synthetic oligonucleotide
  Sense strand starting at position 373 of SEQ ID NO: 914157
ucacuauaacguuagggau

SEQ ID NO: 982353 - RNA, 19 nt, Artificial Sequence
  Description of Artificial Sequence: Synthetic oligonucleotide
  Antisense strand to SEQ ID NO: 982352
aucccuaacguuauaguga

SEQ ID NO: 982354 - RNA, 19 nt, Artificial Sequence
  Description of Artificial Sequence: Synthetic oligonucleotide
  Sense strand starting at position 2498 of SEQ ID NO: 914157
ggcugugguggagauaaga

SEQ ID NO: 982355 - RNA, 19 nt, Artificial Sequence
  Description of Artificial Sequence: Synthetic oligonucleotide
  Antisense strand to SEQ ID NO: 982354
ucuuaucuccaccacagcc

SEQ ID NO: 982356 - RNA, 19 nt, Artificial Sequence
  Description of Artificial Sequence: Synthetic oligonucleotide
  Sense strand starting at position 3930 of SEQ ID NO: 914157
gugucaaagaauggagacu

SEQ ID NO: 982357 - RNA, 19 nt, Artificial Sequence
  Description of Artificial Sequence: Synthetic oligonucleotide
  Antisense strand to SEQ ID NO: 982356
agucuccauucuuugacac

SEQ ID NO: 982358 - RNA, 19 nt, Artificial Sequence
  Description of Artificial Sequence: Synthetic oligonucleotide
  Sense strand starting at position 253 of SEQ ID NO: 914157
agcaguggaguucagagau

SEQ ID NO: 982359 - RNA, 19 nt, Artificial Sequence
  Description of Artificial Sequence: Synthetic oligonucleotide
  Antisense strand to SEQ ID NO: 982358
aucucugaacuccacugcu

SEQ ID NO: 982360 - RNA, 19 nt, Artificial Sequence
  Description of Artificial Sequence: Synthetic oligonucleotide
  Sense strand starting at position 3926 of SEQ ID NO: 914157
ggcugugucaaagaaugga

SEQ ID NO: 982361 - RNA, 19 nt, Artificial Sequence
  Description of Artificial Sequence: Synthetic oligonucleotide
  Antisense strand to SEQ ID NO: 982360
uccauucuuugacacagcc

SEQ ID NO: 982362 - RNA, 19 nt, Artificial Sequence
  Description of Artificial Sequence: Synthetic oligonucleotide
  Sense strand starting at position 2597 of SEQ ID NO: 914157
uuuguaaaccaaggaguaa

SEQ ID NO: 982363 - RNA, 19 nt, Artificial Sequence
  Description of Artificial Sequence: Synthetic oligonucleotide
  Antisense strand to SEQ ID NO: 982362
uuacuccuugguuuacaaa

SEQ ID NO: 982364 - RNA, 19 nt, Artificial Sequence
  Description of Artificial Sequence: Synthetic oligonucleotide
  Sense strand starting at position 2808 of SEQ ID NO: 914157
aagagauggcugggacgau

SEQ ID NO: 982365 - RNA, 19 nt, Artificial Sequence
  Description of Artificial Sequence: Synthetic oligonucleotide
  Antisense strand to SEQ ID NO: 982364
aucgucccagccaucucuu

SEQ ID NO: 982366 - RNA, 19 nt, Artificial Sequence
  Description of Artificial Sequence: Synthetic oligonucleotide
  Sense strand starting at position 2496 of SEQ ID NO: 914157
auggcugugguggagauaa

SEQ ID NO: 982367 - RNA, 19 nt, Artificial Sequence
  Description of Artificial Sequence: Synthetic oligonucleotide
  Antisense strand to SEQ ID NO: 982366
uuaucuccaccacagccau

SEQ ID NO: 982368 - RNA, 19 nt, Artificial Sequence
  Description of Artificial Sequence: Synthetic oligonucleotide
  Sense strand starting at position 3979 of SEQ ID NO: 914157
agacuaacauguucugauu

SEQ ID NO: 982369 - RNA, 19 nt, Artificial Sequence
  Description of Artificial Sequence: Synthetic oligonucleotide
  Antisense strand to SEQ ID NO: 982368
aaucagaacauguuagucu

SEQ ID NO: 982370 - RNA, 19 nt, Artificial Sequence
  Description of Artificial Sequence: Synthetic oligonucleotide
  Sense strand starting at position 3731 of SEQ ID NO: 914157
agaguaaggaguuagccuu

SEQ ID NO: 982371 - RNA, 19 nt, Artificial Sequence
  Description of Artificial Sequence: Synthetic oligonucleotide
  Antisense strand to SEQ ID NO: 982370
aaggcuaacuccuuacucu

SEQ ID NO: 982372 - RNA, 19 nt, Artificial Sequence
  Description of Artificial Sequence: Synthetic oligonucleotide
  Sense strand starting at position 1843 of SEQ ID NO: 914157
ggaagucggccucagacaa

SEQ ID NO: 982373 - RNA, 19 nt, Artificial Sequence
  Description of Artificial Sequence: Synthetic oligonucleotide
  Antisense strand to SEQ ID NO: 982372
uugucugaggccgacuucc

SEQ ID NO: 982374 - RNA, 19 nt, Artificial Sequence
  Description of Artificial Sequence: Synthetic oligonucleotide
  Sense strand starting at position 3737 of SEQ ID NO: 914157
aggaguuagccuugggaaa

SEQ ID NO: 982375 - RNA, 19 nt, Artificial Sequence
  Description of Artificial Sequence: Synthetic oligonucleotide
  Antisense strand to SEQ ID NO: 982374
uuucccaaggcuaacuccu

SEQ ID NO: 982376 - RNA, 19 nt, Artificial Sequence
  Description of Artificial Sequence: Synthetic oligonucleotide
  Sense strand starting at position 2794 of SEQ ID NO: 914157
ucaccuuuacgcuaaagag

SEQ ID NO: 982377 - RNA, 19 nt, Artificial Sequence
  Description of Artificial Sequence: Synthetic oligonucleotide
  Antisense strand to SEQ ID NO: 982376
cucuuuagcguaaagguga

SEQ ID NO: 982378 - RNA, 19 nt, Artificial Sequence
  Description of Artificial Sequence: Synthetic oligonucleotide
  Sense strand starting at position 3802 of SEQ ID NO: 914157
ggguaaguucuggaugggu

SEQ ID NO: 982379 - RNA, 19 nt, Artificial Sequence
  Description of Artificial Sequence: Synthetic oligonucleotide
  Antisense strand to SEQ ID NO: 982378
acccauccagaacuuaccc

SEQ ID NO: 982380 - RNA, 19 nt, Artificial Sequence
  Description of Artificial Sequence: Synthetic oligonucleotide
  Sense strand starting at position 3497 of SEQ ID NO: 914157
gucugagugccugauaaua

SEQ ID NO: 982381 - RNA, 19 nt, Artificial Sequence
  Description of Artificial Sequence: Synthetic oligonucleotide
  Antisense strand to SEQ ID NO: 982380
uauuaucaggcacucagac

SEQ ID NO: 982382 - RNA, 19 nt, Artificial Sequence
  Description of Artificial Sequence: Synthetic oligonucleotide
  Sense strand starting at position 2394 of SEQ ID NO: 914157
uggccuugucggagccgaa

SEQ ID NO: 982383 - RNA, 19 nt, Artificial Sequence
  Description of Artificial Sequence: Synthetic oligonucleotide
  Antisense strand to SEQ ID NO: 982382
uucggcuccgacaaggcca

SEQ ID NO: 982384 - RNA, 19 nt, Artificial Sequence
  Description of Artificial Sequence: Synthetic oligonucleotide
  Sense strand starting at position 3766 of SEQ ID NO: 914157
agacauuccucgcugagag

SEQ ID NO: 982385 - RNA, 19 nt, Artificial Sequence
  Description of Artificial Sequence: Synthetic oligonucleotide
  Antisense strand to SEQ ID NO: 982384
cucucagcgaggaaugucu

SEQ ID NO: 982386 - RNA, 19 nt, Artificial Sequence
  Description of Artificial Sequence: Synthetic oligonucleotide
  Sense strand starting at position 2495 of SEQ ID NO: 914157
aauggcugugguggagaua

SEQ ID NO: 982387 - RNA, 19 nt, Artificial Sequence
  Description of Artificial Sequence: Synthetic oligonucleotide
  Antisense strand to SEQ ID NO: 982386
uaucuccaccacagccauu

SEQ ID NO: 982388 - RNA, 19 nt, Artificial Sequence
  Description of Artificial Sequence: Synthetic oligonucleotide
  Sense strand starting at position 481 of SEQ ID NO: 914157
auuugaggcuaugaucaca

SEQ ID NO: 982389 - RNA, 19 nt, Artificial Sequence
  Description of Artificial Sequence: Synthetic oligonucleotide
  Antisense strand to SEQ ID NO: 982388
ugugaucauagccucaaau

SEQ ID NO: 982390 - RNA, 19 nt, Artificial Sequence
  Description of Artificial Sequence: Synthetic oligonucleotide
  Sense strand starting at position 3763 of SEQ ID NO: 914157
cagagacauuccucgcuga

SEQ ID NO: 982391 - RNA, 19 nt, Artificial Sequence
  Description of Artificial Sequence: Synthetic oligonucleotide
  Antisense strand to SEQ ID NO: 982390
ucagcgaggaaugucucug

SEQ ID NO: 982392 - RNA, 19 nt, Artificial Sequence
  Description of Artificial Sequence: Synthetic oligonucleotide
  Sense strand starting at position 3804 of SEQ ID NO: 914157
guaaguucuggauggguca

SEQ ID NO: 982393 - RNA, 19 nt, Artificial Sequence
  Description of Artificial Sequence: Synthetic oligonucleotide
  Antisense strand to SEQ ID NO: 982392
ugacccauccagaacuuac

SEQ ID NO: 982394 - RNA, 19 nt, Artificial Sequence
  Description of Artificial Sequence: Synthetic oligonucleotide
  Sense strand starting at position 3838 of SEQ ID NO: 914157
aucaguguggcugaaguuu

SEQ ID NO: 982395 - RNA, 19 nt, Artificial Sequence
  Description of Artificial Sequence: Synthetic oligonucleotide
  Antisense strand to SEQ ID NO: 982394
aaacuucagccacacugau

SEQ ID NO: 982396 - RNA, 19 nt, Artificial Sequence
  Description of Artificial Sequence: Synthetic oligonucleotide
  Sense strand starting at position 164 of SEQ ID NO: 914157
uggaauagugccugcaaca

SEQ ID NO: 982397 - RNA, 19 nt, Artificial Sequence
  Description of Artificial Sequence: Synthetic oligonucleotide
  Antisense strand to SEQ ID NO: 982396
uguugcaggcacuauucca

SEQ ID NO: 982398 - RNA, 19 nt, Artificial Sequence
  Description of Artificial Sequence: Synthetic oligonucleotide
  Sense strand starting at position 2925 of SEQ ID NO: 914157
aaacuuauucgguggcuga

SEQ ID NO: 982399 - RNA, 19 nt, Artificial Sequence
  Description of Artificial Sequence: Synthetic oligonucleotide
  Antisense strand to SEQ ID NO: 982398
ucagccaccgaauaaguuu

SEQ ID NO: 982400 - RNA, 19 nt, Artificial Sequence
  Description of Artificial Sequence: Synthetic oligonucleotide
  Sense strand starting at position 2660 of SEQ ID NO: 914157
uuuggaucguggcugagau

SEQ ID NO: 982401 - RNA, 19 nt, Artificial Sequence
  Description of Artificial Sequence: Synthetic oligonucleotide
  Antisense strand to SEQ ID NO: 982400
aucucagccacgauccaaa

SEQ ID NO: 982402 - RNA, 19 nt, Artificial Sequence
  Description of Artificial Sequence: Synthetic oligonucleotide
  Sense strand starting at position 2661 of SEQ ID NO: 914157
uuggaucguggcugagauu

SEQ ID NO: 982403 - RNA, 19 nt, Artificial Sequence
  Description of Artificial Sequence: Synthetic oligonucleotide
  Antisense strand to SEQ ID NO: 982402
aaucucagccacgauccaa

SEQ ID NO: 982404 - RNA, 19 nt, Artificial Sequence
  Description of Artificial Sequence: Synthetic oligonucleotide
  Sense strand starting at position 540 of SEQ ID NO: 914157
gguggagucugggcuucau

SEQ ID NO: 982405 - RNA, 19 nt, Artificial Sequence
  Description of Artificial Sequence: Synthetic oligonucleotide
  Antisense strand to SEQ ID NO: 982404
augaagcccagacuccacc

SEQ ID NO: 982406 - RNA, 19 nt, Artificial Sequence
  Description of Artificial Sequence: Synthetic oligonucleotide
  Sense strand starting at position 3415 of SEQ ID NO: 914157
augcaaccugucugugaca

SEQ ID NO: 982407 - RNA, 19 nt, Artificial Sequence
  Description of Artificial Sequence: Synthetic oligonucleotide
  Antisense strand to SEQ ID NO: 982406
ugucacagacagguugcau

SEQ ID NO: 982408 - RNA, 19 nt, Artificial Sequence
  Description of Artificial Sequence: Synthetic oligonucleotide
  Sense strand starting at position 3495 of SEQ ID NO: 914157
uugucugagugccugauaa

SEQ ID NO: 982409 - RNA, 19 nt, Artificial Sequence
  Description of Artificial Sequence: Synthetic oligonucleotide
  Antisense strand to SEQ ID NO: 982408
uuaucaggcacucagacaa

SEQ ID NO: 982410 - RNA, 19 nt, Artificial Sequence
  Description of Artificial Sequence: Synthetic oligonucleotide
  Sense strand starting at position 613 of SEQ ID NO: 914157
ccacucggcuagcugaaau

SEQ ID NO: 982411 - RNA, 19 nt, Artificial Sequence
  Description of Artificial Sequence: Synthetic oligonucleotide
  Antisense strand to SEQ ID NO: 982410
auuucagcuagccgagugg

SEQ ID NO: 982412 - RNA, 19 nt, Artificial Sequence
  Description of Artificial Sequence: Synthetic oligonucleotide
  Sense strand starting at position 1042 of SEQ ID NO: 914157
uguuucucgccggagauca

SEQ ID NO: 982413 - RNA, 19 nt, Artificial Sequence
  Description of Artificial Sequence: Synthetic oligonucleotide
  Antisense strand to SEQ ID NO: 982412
ugaucuccggcgagaaaca

SEQ ID NO: 982414 - RNA, 19 nt, Artificial Sequence
  Description of Artificial Sequence: Synthetic oligonucleotide
  Sense strand starting at position 3084 of SEQ ID NO: 914157
aguccauucccagguuugu

SEQ ID NO: 982415 - RNA, 19 nt, Artificial Sequence
  Description of Artificial Sequence: Synthetic oligonucleotide
  Antisense strand to SEQ ID NO: 982414
acaaaccugggaauggacu

SEQ ID NO: 982416 - RNA, 19 nt, Artificial Sequence
  Description of Artificial Sequence: Synthetic oligonucleotide
  Sense strand starting at position 3036 of SEQ ID NO: 914157
acagguuaauuccaaugga

SEQ ID NO: 982417 - RNA, 19 nt, Artificial Sequence
  Description of Artificial Sequence: Synthetic oligonucleotide
  Antisense strand to SEQ ID NO: 982416
uccauuggaauuaaccugu

SEQ ID NO: 982418 - RNA, 19 nt, Artificial Sequence
  Description of Artificial Sequence: Synthetic oligonucleotide
  Sense strand starting at position 3398 of SEQ ID NO: 914157
uuguuuaauuaagagggau

SEQ ID NO: 982419 - RNA, 19 nt, Artificial Sequence
  Description of Artificial Sequence: Synthetic oligonucleotide
  Antisense strand to SEQ ID NO: 982418
aucccucuuaauuaaacaa

SEQ ID NO: 982420 - RNA, 19 nt, Artificial Sequence
  Description of Artificial Sequence: Synthetic oligonucleotide
  Sense strand starting at position 1039 of SEQ ID NO: 914157
gacuguuucucgccggaga

SEQ ID NO: 982421 - RNA, 19 nt, Artificial Sequence
  Description of Artificial Sequence: Synthetic oligonucleotide
  Antisense strand to SEQ ID NO: 982420
ucuccggcgagaaacaguc

SEQ ID NO: 982422 - RNA, 19 nt, Artificial Sequence
  Description of Artificial Sequence: Synthetic oligonucleotide
  Sense strand starting at position 61 of SEQ ID NO: 914157
agaucaagcucagaucaau

SEQ ID NO: 982423 - RNA, 19 nt, Artificial Sequence
  Description of Artificial Sequence: Synthetic oligonucleotide
  Antisense strand to SEQ ID NO: 982422
auugaucugagcuugaucu

SEQ ID NO: 982424 - RNA, 19 nt, Artificial Sequence
  Description of Artificial Sequence: Synthetic oligonucleotide
  Sense strand starting at position 3288 of SEQ ID NO: 914157
guugccagugauggucuua

SEQ ID NO: 982425 - RNA, 19 nt, Artificial Sequence
  Description of Artificial Sequence: Synthetic oligonucleotide
  Antisense strand to SEQ ID NO: 982424
uaagaccaucacuggcaac

SEQ ID NO: 982426 - RNA, 19 nt, Artificial Sequence
  Description of Artificial Sequence: Synthetic oligonucleotide
  Sense strand starting at position 3480 of SEQ ID NO: 914157
gcagauagugaguguuugu

SEQ ID NO: 982427 - RNA, 19 nt, Artificial Sequence
  Description of Artificial Sequence: Synthetic oligonucleotide
  Antisense strand to SEQ ID NO: 982426
acaaacacucacuaucugc

SEQ ID NO: 982428 - RNA, 19 nt, Artificial Sequence
  Description of Artificial Sequence: Synthetic oligonucleotide
  Sense strand starting at position 2440 of SEQ ID NO: 914157
cggcgucucgagggauaca

SEQ ID NO: 982429 - RNA, 19 nt, Artificial Sequence
  Description of Artificial Sequence: Synthetic oligonucleotide
  Antisense strand to SEQ ID NO: 982428
uguaucccucgagacgccg

SEQ ID NO: 982430 - RNA, 19 nt, Artificial Sequence
  Description of Artificial Sequence: Synthetic oligonucleotide
  Sense strand starting at position 784 of SEQ ID NO: 914158
augaaacgcccuuacagaa

SEQ ID NO: 982431 - RNA, 19 nt, Artificial Sequence
  Description of Artificial Sequence: Synthetic oligonucleotide
  Antisense strand to SEQ ID NO: 982430
uucuguaagggcguuucau

SEQ ID NO: 982432 - RNA, 19 nt, Artificial Sequence
  Description of Artificial Sequence: Synthetic oligonucleotide
  Sense strand starting at position 117 of SEQ ID NO: 914158
cugacugcacacuagaauu

SEQ ID NO: 982433 - RNA, 19 nt, Artificial Sequence
  Description of Artificial Sequence: Synthetic oligonucleotide
  Antisense strand to SEQ ID NO: 982432
aauucuagugugcagucag

SEQ ID NO: 982434 - RNA, 19 nt, Artificial Sequence
  Description of Artificial Sequence: Synthetic oligonucleotide
  Sense strand starting at position 446 of SEQ ID NO: 914158
aagugacuugccuaagaua

SEQ ID NO: 982435 - RNA, 19 nt, Artificial Sequence
  Description of Artificial Sequence: Synthetic oligonucleotide
  Antisense strand to SEQ ID NO: 982434
uaucuuaggcaagucacuu

SEQ ID NO: 982436 - RNA, 19 nt, Artificial Sequence
  Description of Artificial Sequence: Synthetic oligonucleotide
  Sense strand starting at position 215 of SEQ ID NO: 914158
ugaugcaaccgcugauuua

SEQ ID NO: 982437 - RNA, 19 nt, Artificial Sequence
  Description of Artificial Sequence: Synthetic oligonucleotide
  Antisense strand to SEQ ID NO: 982436
uaaaucagcgguugcauca

SEQ ID NO: 982438 - RNA, 19 nt, Artificial Sequence
  Description of Artificial Sequence: Synthetic oligonucleotide
  Sense strand starting at position 454 of SEQ ID NO: 914158
ugccuaagauauccauaag

SEQ ID NO: 982439 - RNA, 19 nt, Artificial Sequence
  Description of Artificial Sequence: Synthetic oligonucleotide
  Antisense strand to SEQ ID NO: 982438
cuuauggauaucuuaggca

SEQ ID NO: 982440 - RNA, 19 nt, Artificial Sequence
  Description of Artificial Sequence: Synthetic oligonucleotide
  Sense strand starting at position 460 of SEQ ID NO: 914158
agauauccauaagucagua

SEQ ID NO: 982441 - RNA, 19 nt, Artificial Sequence
  Description of Artificial Sequence: Synthetic oligonucleotide
  Antisense strand to SEQ ID NO: 982440
uacugacuuauggauaucu

SEQ ID NO: 982442 - RNA, 19 nt, Artificial Sequence
  Description of Artificial Sequence: Synthetic oligonucleotide
  Sense strand starting at position 487 of SEQ ID NO: 914158
gaaucuggaucuccgauua

SEQ ID NO: 982443 - RNA, 19 nt, Artificial Sequence
  Description of Artificial Sequence: Synthetic oligonucleotide
  Antisense strand to SEQ ID NO: 982442
uaaucggagauccagauuc

SEQ ID NO: 982444 - RNA, 19 nt, Artificial Sequence
  Description of Artificial Sequence: Synthetic oligonucleotide
  Sense strand starting at position 444 of SEQ ID NO: 914158
gaaagugacuugccuaaga

SEQ ID NO: 982445 - RNA, 19 nt, Artificial Sequence
  Description of Artificial Sequence: Synthetic oligonucleotide
  Antisense strand to SEQ ID NO: 982444
ucuuaggcaagucacuuuc

SEQ ID NO: 982446 - RNA, 19 nt, Artificial Sequence
  Description of Artificial Sequence: Synthetic oligonucleotide
  Sense strand starting at position 2801 of SEQ ID NO: 914158
gcuugagucagggaaguca

SEQ ID NO: 982447 - RNA, 19 nt, Artificial Sequence
  Description of Artificial Sequence: Synthetic oligonucleotide
  Antisense strand to SEQ ID NO: 982446
ugacuucccugacucaagc

SEQ ID NO: 982448 - RNA, 19 nt, Artificial Sequence
  Description of Artificial Sequence: Synthetic oligonucleotide
  Sense strand starting at position 985 of SEQ ID NO: 914158
ggccgagaggaaugaagua

SEQ ID NO: 982449 - RNA, 19 nt, Artificial Sequence
  Description of Artificial Sequence: Synthetic oligonucleotide
  Antisense strand to SEQ ID NO: 982448
uacuucauuccucucggcc

SEQ ID NO: 982450 - RNA, 19 nt, Artificial Sequence
  Description of Artificial Sequence: Synthetic oligonucleotide
  Sense strand starting at position 2484 of SEQ ID NO: 914158
gugaaacagaucugcugaa

SEQ ID NO: 982451 - RNA, 19 nt, Artificial Sequence
  Description of Artificial Sequence: Synthetic oligonucleotide
  Antisense strand to SEQ ID NO: 982450
uucagcagaucuguuucac

SEQ ID NO: 982452 - RNA, 19 nt, Artificial Sequence
  Description of Artificial Sequence: Synthetic oligonucleotide
  Sense strand starting at position 389 of SEQ ID NO: 914158
ucagacuagucuucuagau

SEQ ID NO: 982453 - RNA, 19 nt, Artificial Sequence
  Description of Artificial Sequence: Synthetic oligonucleotide
  Antisense strand to SEQ ID NO: 982452
aucuagaagacuagucuga

SEQ ID NO: 982454 - RNA, 19 nt, Artificial Sequence
  Description of Artificial Sequence: Synthetic oligonucleotide
  Sense strand starting at position 2372 of SEQ ID NO: 914158
gcuaaacgugaauggaaua

SEQ ID NO: 982455 - RNA, 19 nt, Artificial Sequence
  Description of Artificial Sequence: Synthetic oligonucleotide
  Antisense strand to SEQ ID NO: 982454
uauuccauucacguuuagc

SEQ ID NO: 982456 - RNA, 19 nt, Artificial Sequence
  Description of Artificial Sequence: Synthetic oligonucleotide
  Sense strand starting at position 3441 of SEQ ID NO: 914158
auccauggcagaggucaua

SEQ ID NO: 982457 - RNA, 19 nt, Artificial Sequence
  Description of Artificial Sequence: Synthetic oligonucleotide
  Antisense strand to SEQ ID NO: 982456
uaugaccucugccauggau

SEQ ID NO: 982458 - RNA, 19 nt, Artificial Sequence
  Description of Artificial Sequence: Synthetic oligonucleotide
  Sense strand starting at position 2369 of SEQ ID NO: 914158
ugugcuaaacgugaaugga

SEQ ID NO: 982459 - RNA, 19 nt, Artificial Sequence
  Description of Artificial Sequence: Synthetic oligonucleotide
  Antisense strand to SEQ ID NO: 982458
uccauucacguuuagcaca

SEQ ID NO: 982460 - RNA, 19 nt, Artificial Sequence
  Description of Artificial Sequence: Synthetic oligonucleotide
  Sense strand starting at position 2474 of SEQ ID NO: 914158
aaguuugcucgugaaacag

SEQ ID NO: 982461 - RNA, 19 nt, Artificial Sequence
  Description of Artificial Sequence: Synthetic oligonucleotide
  Antisense strand to SEQ ID NO: 982460
cuguuucacgagcaaacuu

SEQ ID NO: 982462 - RNA, 19 nt, Artificial Sequence
  Description of Artificial Sequence: Synthetic oligonucleotide
  Sense strand starting at position 947 of SEQ ID NO: 914158
auauaauuacuguguccau

SEQ ID NO: 982463 - RNA, 19 nt, Artificial Sequence
  Description of Artificial Sequence: Synthetic oligonucleotide
  Antisense strand to SEQ ID NO: 982462
auggacacaguaauuauau

SEQ ID NO: 982464 - RNA, 19 nt, Artificial Sequence
  Description of Artificial Sequence: Synthetic oligonucleotide
  Sense strand starting at position 2332 of SEQ ID NO: 914158
aagaauuaaucgcccaggu

SEQ ID NO: 982465 - RNA, 19 nt, Artificial Sequence
  Description of Artificial Sequence: Synthetic oligonucleotide
  Antisense strand to SEQ ID NO: 982464
accugggcgauuaauucuu

SEQ ID NO: 982466 - RNA, 19 nt, Artificial Sequence
  Description of Artificial Sequence: Synthetic oligonucleotide
  Sense strand starting at position 2460 of SEQ ID NO: 914158
ggagcuggagucugaaguu

SEQ ID NO: 982467 - RNA, 19 nt, Artificial Sequence
  Description of Artificial Sequence: Synthetic oligonucleotide
  Antisense strand to SEQ ID NO: 982466
aacuucagacuccagcucc

SEQ ID NO: 982468 - RNA, 19 nt, Artificial Sequence
  Description of Artificial Sequence: Synthetic oligonucleotide
  Sense strand starting at position 2334 of SEQ ID NO: 914158
gaauuaaucgcccaggugu

SEQ ID NO: 982469 - RNA, 19 nt, Artificial Sequence
  Description of Artificial Sequence: Synthetic oligonucleotide
  Antisense strand to SEQ ID NO: 982468
acaccugggcgauuaauuc

SEQ ID NO: 982470 - RNA, 19 nt, Artificial Sequence
  Description of Artificial Sequence: Synthetic oligonucleotide
  Sense strand starting at position 2347 of SEQ ID NO: 914158
agguguugaaagugcaaau

SEQ ID NO: 982471 - RNA, 19 nt, Artificial Sequence
  Description of Artificial Sequence: Synthetic oligonucleotide
  Antisense strand to SEQ ID NO: 982470
auuugcacuuucaacaccu

SEQ ID NO: 982472 - RNA, 19 nt, Artificial Sequence
  Description of Artificial Sequence: Synthetic oligonucleotide
  Sense strand starting at position 3453 of SEQ ID NO: 914158
ggucauaagcucuagcagu

SEQ ID NO: 982473 - RNA, 19 nt, Artificial Sequence
  Description of Artificial Sequence: Synthetic oligonucleotide
  Antisense strand to SEQ ID NO: 982472
acugcuagagcuuaugacc

SEQ ID NO: 982474 - RNA, 19 nt, Artificial Sequence
  Description of Artificial Sequence: Synthetic oligonucleotide
  Sense strand starting at position 3572 of SEQ ID NO: 914158
aggacagacucagagacuu

SEQ ID NO: 982475 - RNA, 19 nt, Artificial Sequence
  Description of Artificial Sequence: Synthetic oligonucleotide
  Antisense strand to SEQ ID NO: 982474
aagucucugagucuguccu

SEQ ID NO: 982476 - RNA, 19 nt, Artificial Sequence
  Description of Artificial Sequence: Synthetic oligonucleotide
  Sense strand starting at position 386 of SEQ ID NO: 914158
gccucagacuagucuucua

SEQ ID NO: 982477 - RNA, 19 nt, Artificial Sequence
  Description of Artificial Sequence: Synthetic oligonucleotide
  Antisense strand to SEQ ID NO: 982476
uagaagacuagucugaggc

SEQ ID NO: 982478 - RNA, 19 nt, Artificial Sequence
  Description of Artificial Sequence: Synthetic oligonucleotide
  Sense strand starting at position 2360 of SEQ ID NO: 914158
gcaaaugagugugcuaaac

SEQ ID NO: 982479 - RNA, 19 nt, Artificial Sequence
  Description of Artificial Sequence: Synthetic oligonucleotide
  Antisense strand to SEQ ID NO: 982478
guuuagcacacucauuugc

SEQ ID NO: 982480 - RNA, 19 nt, Artificial Sequence
  Description of Artificial Sequence: Synthetic oligonucleotide
  Sense strand starting at position 2292 of SEQ ID NO: 914158
gcuuuccucuugucaagag

SEQ ID NO: 982481 - RNA, 19 nt, Artificial Sequence
  Description of Artificial Sequence: Synthetic oligonucleotide
  Antisense strand to SEQ ID NO: 982480
cucuugacaagaggaaagc

SEQ ID NO: 982482 - RNA, 19 nt, Artificial Sequence
  Description of Artificial Sequence: Synthetic oligonucleotide
  Sense strand starting at position 2359 of SEQ ID NO: 914158
ugcaaaugagugugcuaaa

SEQ ID NO: 982483 - RNA, 19 nt, Artificial Sequence
  Description of Artificial Sequence: Synthetic oligonucleotide
  Antisense strand to SEQ ID NO: 982482
uuuagcacacucauuugca

SEQ ID NO: 982484 - RNA, 19 nt, Artificial Sequence
  Description of Artificial Sequence: Synthetic oligonucleotide
  Sense strand starting at position 544 of SEQ ID NO: 914158
gccaguccugauggcaaau

SEQ ID NO: 982485 - RNA, 19 nt, Artificial Sequence
  Description of Artificial Sequence: Synthetic oligonucleotide
  Antisense strand to SEQ ID NO: 982484
auuugccaucaggacuggc

SEQ ID NO: 982486 - RNA, 19 nt, Artificial Sequence
  Description of Artificial Sequence: Synthetic oligonucleotide
  Sense strand starting at position 362 of SEQ ID NO: 914158
gucagagaauuggauugga

SEQ ID NO: 982487 - RNA, 19 nt, Artificial Sequence
  Description of Artificial Sequence: Synthetic oligonucleotide
  Antisense strand to SEQ ID NO: 982486
uccaauccaauucucugac

SEQ ID NO: 982488 - RNA, 19 nt, Artificial Sequence
  Description of Artificial Sequence: Synthetic oligonucleotide
  Sense strand starting at position 2366 of SEQ ID NO: 914158
gagugugcuaaacgugaau

SEQ ID NO: 982489 - RNA, 19 nt, Artificial Sequence
  Description of Artificial Sequence: Synthetic oligonucleotide
  Antisense strand to SEQ ID NO: 982488
auucacguuuagcacacuc

SEQ ID NO: 982490 - RNA, 19 nt, Artificial Sequence
  Description of Artificial Sequence: Synthetic oligonucleotide
  Sense strand starting at position 354 of SEQ ID NO: 914158
uaccuagagucagagaauu

SEQ ID NO: 982491 - RNA, 19 nt, Artificial Sequence
  Description of Artificial Sequence: Synthetic oligonucleotide
  Antisense strand to SEQ ID NO: 982490
aauucucugacucuaggua

SEQ ID NO: 982492 - RNA, 19 nt, Artificial Sequence
  Description of Artificial Sequence: Synthetic oligonucleotide
  Sense strand starting at position 2470 of SEQ ID NO: 914158
ucugaaguuugcucgugaa

SEQ ID NO: 982493 - RNA, 19 nt, Artificial Sequence
  Description of Artificial Sequence: Synthetic oligonucleotide
  Antisense strand to SEQ ID NO: 982492
uucacgagcaaacuucaga

SEQ ID NO: 982494 - RNA, 19 nt, Artificial Sequence
  Description of Artificial Sequence: Synthetic oligonucleotide
  Sense strand starting at position 2193 of SEQ ID NO: 914158
uggaaacgccugugcuaau

SEQ ID NO: 982495 - RNA, 19 nt, Artificial Sequence
  Description of Artificial Sequence: Synthetic oligonucleotide
  Antisense strand to SEQ ID NO: 982494
auuagcacaggcguuucca

SEQ ID NO: 982496 - RNA, 19 nt, Artificial Sequence
  Description of Artificial Sequence: Synthetic oligonucleotide
  Sense strand starting at position 2357 of SEQ ID NO: 914158
agugcaaaugagugugcua

SEQ ID NO: 982497 - RNA, 19 nt, Artificial Sequence
  Description of Artificial Sequence: Synthetic oligonucleotide
  Antisense strand to SEQ ID NO: 982496
uagcacacucauuugcacu

SEQ ID NO: 982498 - RNA, 19 nt, Artificial Sequence
  Description of Artificial Sequence: Synthetic oligonucleotide
  Sense strand starting at position 3362 of SEQ ID NO: 914158
guuguuuccugucucccaa

SEQ ID NO: 982499 - RNA, 19 nt, Artificial Sequence
  Description of Artificial Sequence: Synthetic oligonucleotide
  Antisense strand to SEQ ID NO: 982498
uugggagacaggaaacaac

SEQ ID NO: 982500 - RNA, 19 nt, Artificial Sequence
  Description of Artificial Sequence: Synthetic oligonucleotide
  Sense strand starting at position 3349 of SEQ ID NO: 914158
agcuuuacucacuguuguu

SEQ ID NO: 982501 - RNA, 19 nt, Artificial Sequence
  Description of Artificial Sequence: Synthetic oligonucleotide
  Antisense strand to SEQ ID NO: 982500
aacaacagugaguaaagcu

SEQ ID NO: 982502 - RNA, 19 nt, Artificial Sequence
  Description of Artificial Sequence: Synthetic oligonucleotide
  Sense strand starting at position 3317 of SEQ ID NO: 914158
cugugagccugucucucau

SEQ ID NO: 982503 - RNA, 19 nt, Artificial Sequence
  Description of Artificial Sequence: Synthetic oligonucleotide
  Antisense strand to SEQ ID NO: 982502
augagagacaggcucacag

SEQ ID NO: 982504 - RNA, 19 nt, Artificial Sequence
  Description of Artificial Sequence: Synthetic oligonucleotide
  Sense strand starting at position 2191 of SEQ ID NO: 914158
ucuggaaacgccugugcua

SEQ ID NO: 982505 - RNA, 19 nt, Artificial Sequence
  Description of Artificial Sequence: Synthetic oligonucleotide
  Antisense strand to SEQ ID NO: 982504
uagcacaggcguuuccaga

SEQ ID NO: 982506 - RNA, 19 nt, Artificial Sequence
  Description of Artificial Sequence: Synthetic oligonucleotide
  Sense strand starting at position 1987 of SEQ ID NO: 914158
gcguucucuccgggacuga

SEQ ID NO: 982507 - RNA, 19 nt, Artificial Sequence
  Description of Artificial Sequence: Synthetic oligonucleotide
  Antisense strand to SEQ ID NO: 982506
ucagucccggagagaacgc

SEQ ID NO: 982508 - RNA, 19 nt, Artificial Sequence
  Description of Artificial Sequence: Synthetic oligonucleotide
  Sense strand starting at position 2469 of SEQ ID NO: 914158
gucugaaguuugcucguga

SEQ ID NO: 982509 - RNA, 19 nt, Artificial Sequence
  Description of Artificial Sequence: Synthetic oligonucleotide
  Antisense strand to SEQ ID NO: 982508
ucacgagcaaacuucagac

SEQ ID NO: 982510 - RNA, 19 nt, Artificial Sequence
  Description of Artificial Sequence: Synthetic oligonucleotide
  Sense strand starting at position 1944 of SEQ ID NO: 914159
gcguguagucacuuaccau

SEQ ID NO: 982511 - RNA, 19 nt, Artificial Sequence
  Description of Artificial Sequence: Synthetic oligonucleotide
  Antisense strand to SEQ ID NO: 982510
augguaagugacuacacgc

SEQ ID NO: 982512 - RNA, 19 nt, Artificial Sequence
  Description of Artificial Sequence: Synthetic oligonucleotide
  Sense strand starting at position 2887 of SEQ ID NO: 914159
ccauguuaugaagagcaca

SEQ ID NO: 982513 - RNA, 19 nt, Artificial Sequence
  Description of Artificial Sequence: Synthetic oligonucleotide
  Antisense strand to SEQ ID NO: 982512
ugugcucuucauaacaugg

SEQ ID NO: 982514 - RNA, 19 nt, Artificial Sequence
  Description of Artificial Sequence: Synthetic oligonucleotide
  Sense strand starting at position 1577 of SEQ ID NO: 914159
gucugaaguccucagaaac

SEQ ID NO: 982515 - RNA, 19 nt, Artificial Sequence
  Description of Artificial Sequence: Synthetic oligonucleotide
  Antisense strand to SEQ ID NO: 982514
guuucugaggacuucagac

SEQ ID NO: 982516 - RNA, 19 nt, Artificial Sequence
  Description of Artificial Sequence: Synthetic oligonucleotide
  Sense strand starting at position 3485 of SEQ ID NO: 914159
uauaguuggguuuagauau

SEQ ID NO: 982517 - RNA, 19 nt, Artificial Sequence
  Description of Artificial Sequence: Synthetic oligonucleotide
  Antisense strand to SEQ ID NO: 982516
auaucuaaacccaacuaua

SEQ ID NO: 982518 - RNA, 19 nt, Artificial Sequence
  Description of Artificial Sequence: Synthetic oligonucleotide
  Sense strand starting at position 869 of SEQ ID NO: 914159
gguguagaagacuaucuuu

SEQ ID NO: 982519 - RNA, 19 nt, Artificial Sequence
  Description of Artificial Sequence: Synthetic oligonucleotide
  Antisense strand to SEQ ID NO: 982518
aaagauagucuucuacacc

SEQ ID NO: 982520 - RNA, 19 nt, Artificial Sequence
  Description of Artificial Sequence: Synthetic oligonucleotide
  Sense strand starting at position 1199 of SEQ ID NO: 914159
gaauguugacagugauaag

SEQ ID NO: 982521 - RNA, 19 nt, Artificial Sequence
  Description of Artificial Sequence: Synthetic oligonucleotide
  Antisense strand to SEQ ID NO: 982520
cuuaucacugucaacauuc

SEQ ID NO: 982522 - RNA, 19 nt, Artificial Sequence
  Description of Artificial Sequence: Synthetic oligonucleotide
  Sense strand starting at position 836 of SEQ ID NO: 914159
aggagcuuagcuuauaaca

SEQ ID NO: 982523 - RNA, 19 nt, Artificial Sequence
  Description of Artificial Sequence: Synthetic oligonucleotide
  Antisense strand to SEQ ID NO: 982522
uguuauaagcuaagcuccu

SEQ ID NO: 982524 - RNA, 19 nt, Artificial Sequence
  Description of Artificial Sequence: Synthetic oligonucleotide
  Sense strand starting at position 1081 of SEQ ID NO: 914159
gaggucuuuguagauugau

SEQ ID NO: 982525 - RNA, 19 nt, Artificial Sequence
  Description of Artificial Sequence: Synthetic oligonucleotide
  Antisense strand to SEQ ID NO: 982524
aucaaucuacaaagaccuc

SEQ ID NO: 982526 - RNA, 19 nt, Artificial Sequence
  Description of Artificial Sequence: Synthetic oligonucleotide
  Sense strand starting at position 981 of SEQ ID NO: 914159
gaacgucaacacugauaag

SEQ ID NO: 982527 - RNA, 19 nt, Artificial Sequence
  Description of Artificial Sequence: Synthetic oligonucleotide
  Antisense strand to SEQ ID NO: 982526
cuuaucaguguugacguuc

SEQ ID NO: 982528 - RNA, 19 nt, Artificial Sequence
  Description of Artificial Sequence: Synthetic oligonucleotide
  Sense strand starting at position 2150 of SEQ ID NO: 914159
gggauaaaguuuguacaca

SEQ ID NO: 982529 - RNA, 19 nt, Artificial Sequence
  Description of Artificial Sequence: Synthetic oligonucleotide
  Antisense strand to SEQ ID NO: 982528
uguguacaaacuuuauccc

SEQ ID NO: 982530 - RNA, 19 nt, Artificial Sequence
  Description of Artificial Sequence: Synthetic oligonucleotide
  Sense strand starting at position 592 of SEQ ID NO: 914159
uguagauuucucugucuuc

SEQ ID NO: 982531 - RNA, 19 nt, Artificial Sequence
  Description of Artificial Sequence: Synthetic oligonucleotide
  Antisense strand to SEQ ID NO: 982530
gaagacagagaaaucuaca

SEQ ID NO: 982532 - RNA, 19 nt, Artificial Sequence
  Description of Artificial Sequence: Synthetic oligonucleotide
  Sense strand starting at position 3823 of SEQ ID NO: 914159
cugguaguuccauauaaug

SEQ ID NO: 982533 - RNA, 19 nt, Artificial Sequence
  Description of Artificial Sequence: Synthetic oligonucleotide
  Antisense strand to SEQ ID NO: 982532
cauuauauggaacuaccag

SEQ ID NO: 982534 - RNA, 19 nt, Artificial Sequence
  Description of Artificial Sequence: Synthetic oligonucleotide
  Sense strand starting at position 104 of SEQ ID NO: 914159
ccacuagucagaggaaagu

SEQ ID NO: 982535 - RNA, 19 nt, Artificial Sequence
  Description of Artificial Sequence: Synthetic oligonucleotide
  Antisense strand to SEQ ID NO: 982534
acuuuccucugacuagugg

SEQ ID NO: 982536 - RNA, 19 nt, Artificial Sequence
  Description of Artificial Sequence: Synthetic oligonucleotide
  Sense strand starting at position 1903 of SEQ ID NO: 914159
ggccaaauaugauuaguaa

SEQ ID NO: 982537 - RNA, 19 nt, Artificial Sequence
  Description of Artificial Sequence: Synthetic oligonucleotide
  Antisense strand to SEQ ID NO: 982536
uuacuaaucauauuuggcc

SEQ ID NO: 982538 - RNA, 19 nt, Artificial Sequence
  Description of Artificial Sequence: Synthetic oligonucleotide
  Sense strand starting at position 1120 of SEQ ID NO: 914159
auaggaagaucccuugcau

SEQ ID NO: 982539 - RNA, 19 nt, Artificial Sequence
  Description of Artificial Sequence: Synthetic oligonucleotide
  Antisense strand to SEQ ID NO: 982538
augcaagggaucuuccuau

SEQ ID NO: 982540 - RNA, 19 nt, Artificial Sequence
  Description of Artificial Sequence: Synthetic oligonucleotide
  Sense strand starting at position 3397 of SEQ ID NO: 914159
cuuuguaugcaugauauaa

SEQ ID NO: 982541 - RNA, 19 nt, Artificial Sequence
  Description of Artificial Sequence: Synthetic oligonucleotide
  Antisense strand to SEQ ID NO: 982540
uuauaucaugcauacaaag

SEQ ID NO: 982542 - RNA, 19 nt, Artificial Sequence
  Description of Artificial Sequence: Synthetic oligonucleotide
  Sense strand starting at position 787 of SEQ ID NO: 914159
uugaaaucagcacgaauag

SEQ ID NO: 982543 - RNA, 19 nt, Artificial Sequence
  Description of Artificial Sequence: Synthetic oligonucleotide
  Antisense strand to SEQ ID NO: 982542
cuauucgugcugauuucaa

SEQ ID NO: 982544 - RNA, 19 nt, Artificial Sequence
  Description of Artificial Sequence: Synthetic oligonucleotide
  Sense strand starting at position 1740 of SEQ ID NO: 914159
ugagcuuuaccuugaaaga

SEQ ID NO: 982545 - RNA, 19 nt, Artificial Sequence
  Description of Artificial Sequence: Synthetic oligonucleotide
  Antisense strand to SEQ ID NO: 982544
ucuuucaagguaaagcuca

SEQ ID NO: 982546 - RNA, 19 nt, Artificial Sequence
  Description of Artificial Sequence: Synthetic oligonucleotide
  Sense strand starting at position 2352 of SEQ ID NO: 914159
guacuaugugaauaucuuc

SEQ ID NO: 982547 - RNA, 19 nt, Artificial Sequence
  Description of Artificial Sequence: Synthetic oligonucleotide
  Antisense strand to SEQ ID NO: 982546
gaagauauucacauaguac

SEQ ID NO: 982548 - RNA, 19 nt, Artificial Sequence
  Description of Artificial Sequence: Synthetic oligonucleotide
  Sense strand starting at position 3482 of SEQ ID NO: 914159
uaauauaguuggguuuaga

SEQ ID NO: 982549 - RNA, 19 nt, Artificial Sequence
  Description of Artificial Sequence: Synthetic oligonucleotide
  Antisense strand to SEQ ID NO: 982548
ucuaaacccaacuauauua

SEQ ID NO: 982550 - RNA, 19 nt, Artificial Sequence
  Description of Artificial Sequence: Synthetic oligonucleotide
  Sense strand starting at position 2184 of SEQ ID NO: 914159
cugagagcuuauccaaauc

SEQ ID NO: 982551 - RNA, 19 nt, Artificial Sequence
  Description of Artificial Sequence: Synthetic oligonucleotide
  Antisense strand to SEQ ID NO: 982550
gauuuggauaagcucucag

SEQ ID NO: 982552 - RNA, 19 nt, Artificial Sequence
  Description of Artificial Sequence: Synthetic oligonucleotide
  Sense strand starting at position 1478 of SEQ ID NO: 914159
cauuguggugcccaaagaa

SEQ ID NO: 982553 - RNA, 19 nt, Artificial Sequence
  Description of Artificial Sequence: Synthetic oligonucleotide
  Antisense strand to SEQ ID NO: 982552
uucuuugggcaccacaaug

SEQ ID NO: 982554 - RNA, 19 nt, Artificial Sequence
  Description of Artificial Sequence: Synthetic oligonucleotide
  Sense strand starting at position 275 of SEQ ID NO: 914159
gcuuccaucuuguuuauuu

SEQ ID NO: 982555 - RNA, 19 nt, Artificial Sequence
  Description of Artificial Sequence: Synthetic oligonucleotide
  Antisense strand to SEQ ID NO: 982554
aaauaaacaagauggaagc

SEQ ID NO: 982556 - RNA, 19 nt, Artificial Sequence
  Description of Artificial Sequence: Synthetic oligonucleotide
  Sense strand starting at position 635 of SEQ ID NO: 914159
uguuacagugacgaguaaa

SEQ ID NO: 982557 - RNA, 19 nt, Artificial Sequence
  Description of Artificial Sequence: Synthetic oligonucleotide
  Antisense strand to SEQ ID NO: 982556
uuuacucgucacuguaaca

SEQ ID NO: 982558 - RNA, 19 nt, Artificial Sequence
  Description of Artificial Sequence: Synthetic oligonucleotide
  Sense strand starting at position 3648 of SEQ ID NO: 914159
ucaagaaucuugguuucua

SEQ ID NO: 982559 - RNA, 19 nt, Artificial Sequence
  Description of Artificial Sequence: Synthetic oligonucleotide
  Antisense strand to SEQ ID NO: 982558
uagaaaccaagauucuuga

SEQ ID NO: 982560 - RNA, 19 nt, Artificial Sequence
  Description of Artificial Sequence: Synthetic oligonucleotide
  Sense strand starting at position 3437 of SEQ ID NO: 914159
guauuugaauuggagaauu

SEQ ID NO: 982561 - RNA, 19 nt, Artificial Sequence
  Description of Artificial Sequence: Synthetic oligonucleotide
  Antisense strand to SEQ ID NO: 982560
aauucuccaauucaaauac

SEQ ID NO: 982562 - RNA, 19 nt, Artificial Sequence
  Description of Artificial Sequence: Synthetic oligonucleotide
  Sense strand starting at position 834 of SEQ ID NO: 914159
gaaggagcuuagcuuauaa

SEQ ID NO: 982563 - RNA, 19 nt, Artificial Sequence
  Description of Artificial Sequence: Synthetic oligonucleotide
  Antisense strand to SEQ ID NO: 982562
uuauaagcuaagcuccuuc

SEQ ID NO: 982564 - RNA, 19 nt, Artificial Sequence
  Description of Artificial Sequence: Synthetic oligonucleotide
  Sense strand starting at position 2660 of SEQ ID NO: 914159
aauauuccaugaguguuga

SEQ ID NO: 982565 - RNA, 19 nt, Artificial Sequence
  Description of Artificial Sequence: Synthetic oligonucleotide
  Antisense strand to SEQ ID NO: 982564
ucaacacucauggaauauu

SEQ ID NO: 982566 - RNA, 19 nt, Artificial Sequence
  Description of Artificial Sequence: Synthetic oligonucleotide
  Sense strand starting at position 3963 of SEQ ID NO: 914159
cagauaaugugaguaucuc

SEQ ID NO: 982567 - RNA, 19 nt, Artificial Sequence
  Description of Artificial Sequence: Synthetic oligonucleotide
  Antisense strand to SEQ ID NO: 982566
gagauacucacauuaucug

SEQ ID NO: 982568 - RNA, 19 nt, Artificial Sequence
  Description of Artificial Sequence: Synthetic oligonucleotide
  Sense strand starting at position 797 of SEQ ID NO: 914159
cacgaauagccuggacuaa

SEQ ID NO: 982569 - RNA, 19 nt, Artificial Sequence
  Description of Artificial Sequence: Synthetic oligonucleotide
  Antisense strand to SEQ ID NO: 982568
uuaguccaggcuauucgug

SEQ ID NO: 982570 - RNA, 19 nt, Artificial Sequence
  Description of Artificial Sequence: Synthetic oligonucleotide
  Sense strand starting at position 2661 of SEQ ID NO: 914159
auauuccaugaguguugaa

SEQ ID NO: 982571 - RNA, 19 nt, Artificial Sequence
  Description of Artificial Sequence: Synthetic oligonucleotide
  Antisense strand to SEQ ID NO: 982570
uucaacacucauggaauau

SEQ ID NO: 982572 - RNA, 19 nt, Artificial Sequence
  Description of Artificial Sequence: Synthetic oligonucleotide
  Sense strand starting at position 1340 of SEQ ID NO: 914159
caagaagcaguucgaaaug

SEQ ID NO: 982573 - RNA, 19 nt, Artificial Sequence
  Description of Artificial Sequence: Synthetic oligonucleotide
  Antisense strand to SEQ ID NO: 982572
cauuucgaacugcuucuug

SEQ ID NO: 982574 - RNA, 19 nt, Artificial Sequence
  Description of Artificial Sequence: Synthetic oligonucleotide
  Sense strand starting at position 874 of SEQ ID NO: 914159
agaagacuaucuuugccuu

SEQ ID NO: 982575 - RNA, 19 nt, Artificial Sequence
  Description of Artificial Sequence: Synthetic oligonucleotide
  Antisense strand to SEQ ID NO: 982574
aaggcaaagauagucuucu

SEQ ID NO: 982576 - RNA, 19 nt, Artificial Sequence
  Description of Artificial Sequence: Synthetic oligonucleotide
  Sense strand starting at position 2013 of SEQ ID NO: 914159
ccagcugagcuuuaucaca

SEQ ID NO: 982577 - RNA, 19 nt, Artificial Sequence
  Description of Artificial Sequence: Synthetic oligonucleotide
  Antisense strand to SEQ ID NO: 982576
ugugauaaagcucagcugg

SEQ ID NO: 982578 - RNA, 19 nt, Artificial Sequence
  Description of Artificial Sequence: Synthetic oligonucleotide
  Sense strand starting at position 2338 of SEQ ID NO: 914159
uuucuauugcaugaguacu

SEQ ID NO: 982579 - RNA, 19 nt, Artificial Sequence
  Description of Artificial Sequence: Synthetic oligonucleotide
  Antisense strand to SEQ ID NO: 982578
aguacucaugcaauagaaa

SEQ ID NO: 982580 - RNA, 19 nt, Artificial Sequence
  Description of Artificial Sequence: Synthetic oligonucleotide
  Sense strand starting at position 1084 of SEQ ID NO: 914159
gucuuuguagauugauaug

SEQ ID NO: 982581 - RNA, 19 nt, Artificial Sequence
  Description of Artificial Sequence: Synthetic oligonucleotide
  Antisense strand to SEQ ID NO: 982580
cauaucaaucuacaaagac

SEQ ID NO: 982582 - RNA, 19 nt, Artificial Sequence
  Description of Artificial Sequence: Synthetic oligonucleotide
  Sense strand starting at position 826 of SEQ ID NO: 914159
ucgucuuugaaggagcuua

SEQ ID NO: 982583 - RNA, 19 nt, Artificial Sequence
  Description of Artificial Sequence: Synthetic oligonucleotide
  Antisense strand to SEQ ID NO: 982582
uaagcuccuucaaagacga

SEQ ID NO: 982584 - RNA, 19 nt, Artificial Sequence
  Description of Artificial Sequence: Synthetic oligonucleotide
  Sense strand starting at position 1565 of SEQ ID NO: 914159
acgguuaccuaagucugaa

SEQ ID NO: 982585 - RNA, 19 nt, Artificial Sequence
  Description of Artificial Sequence: Synthetic oligonucleotide
  Antisense strand to SEQ ID NO: 982584
uucagacuuagguaaccgu

SEQ ID NO: 982586 - RNA, 19 nt, Artificial Sequence
  Description of Artificial Sequence: Synthetic oligonucleotide
  Sense strand starting at position 1357 of SEQ ID NO: 914159
uguugcuuccauugaagaa

SEQ ID NO: 982587 - RNA, 19 nt, Artificial Sequence
  Description of Artificial Sequence: Synthetic oligonucleotide
  Antisense strand to SEQ ID NO: 982586
uucuucaauggaagcaaca

SEQ ID NO: 982588 - RNA, 19 nt, Artificial Sequence
  Description of Artificial Sequence: Synthetic oligonucleotide
  Sense strand starting at position 1018 of SEQ ID NO: 914159
cgcugcuauaaggauuauu

SEQ ID NO: 982589 - RNA, 19 nt, Artificial Sequence
  Description of Artificial Sequence: Synthetic oligonucleotide
  Antisense strand to SEQ ID NO: 982588
aauaauccuuauagcagcg

SEQ ID NO: 982590 - RNA, 19 nt, Artificial Sequence
  Description of Artificial Sequence: Synthetic oligonucleotide
  Sense strand starting at position 688 of SEQ ID NO: 914160
ggaucuuacugagcagaag

SEQ ID NO: 982591 - RNA, 19 nt, Artificial Sequence
  Description of Artificial Sequence: Synthetic oligonucleotide
  Antisense strand to SEQ ID NO: 982590
cuucugcucaguaagaucc

SEQ ID NO: 982592 - RNA, 19 nt, Artificial Sequence
  Description of Artificial Sequence: Synthetic oligonucleotide
  Sense strand starting at position 3676 of SEQ ID NO: 914160
agggaaucaucucucuuau

SEQ ID NO: 982593 - RNA, 19 nt, Artificial Sequence
  Description of Artificial Sequence: Synthetic oligonucleotide
  Antisense strand to SEQ ID NO: 982592
auaagagagaugauucccu

SEQ ID NO: 982594 - RNA, 19 nt, Artificial Sequence
  Description of Artificial Sequence: Synthetic oligonucleotide
  Sense strand starting at position 512 of SEQ ID NO: 914160
ggucuuggaacauauguca

SEQ ID NO: 982595 - RNA, 19 nt, Artificial Sequence
  Description of Artificial Sequence: Synthetic oligonucleotide
  Antisense strand to SEQ ID NO: 982594
ugacauauguuccaagacc

SEQ ID NO: 982596 - RNA, 19 nt, Artificial Sequence
  Description of Artificial Sequence: Synthetic oligonucleotide
  Sense strand starting at position 2930 of SEQ ID NO: 914160
agucaugucaggcacaaag

SEQ ID NO: 982597 - RNA, 19 nt, Artificial Sequence
  Description of Artificial Sequence: Synthetic oligonucleotide
  Antisense strand to SEQ ID NO: 982596
cuuugugccugacaugacu

SEQ ID NO: 982598 - RNA, 19 nt, Artificial Sequence
  Description of Artificial Sequence: Synthetic oligonucleotide
  Sense strand starting at position 686 of SEQ ID NO: 914160
ccggaucuuacugagcaga

SEQ ID NO: 982599 - RNA, 19 nt, Artificial Sequence
  Description of Artificial Sequence: Synthetic oligonucleotide
  Antisense strand to SEQ ID NO: 982598
ucugcucaguaagauccgg

SEQ ID NO: 982600 - RNA, 19 nt, Artificial Sequence
  Description of Artificial Sequence: Synthetic oligonucleotide
  Sense strand starting at position 2555 of SEQ ID NO: 914160
uggagucuucuuuagagua

SEQ ID NO: 982601 - RNA, 19 nt, Artificial Sequence
  Description of Artificial Sequence: Synthetic oligonucleotide
  Antisense strand to SEQ ID NO: 982600
uacucuaaagaagacucca

SEQ ID NO: 982602 - RNA, 19 nt, Artificial Sequence
  Description of Artificial Sequence: Synthetic oligonucleotide
  Sense strand starting at position 2831 of SEQ ID NO: 914160
aaggcuuccggguaaauua

SEQ ID NO: 982603 - RNA, 19 nt, Artificial Sequence
  Description of Artificial Sequence: Synthetic oligonucleotide
  Antisense strand to SEQ ID NO: 982602
uaauuuacccggaagccuu

SEQ ID NO: 982604 - RNA, 19 nt, Artificial Sequence
  Description of Artificial Sequence: Synthetic oligonucleotide
  Sense strand starting at position 2560 of SEQ ID NO: 914160
ucuucuuuagaguaggguu

SEQ ID NO: 982605 - RNA, 19 nt, Artificial Sequence
  Description of Artificial Sequence: Synthetic oligonucleotide
  Antisense strand to SEQ ID NO: 982604
aacccuacucuaaagaaga

SEQ ID NO: 982606 - RNA, 19 nt, Artificial Sequence
  Description of Artificial Sequence: Synthetic oligonucleotide
  Sense strand starting at position 3678 of SEQ ID NO: 914160
ggaaucaucucucuuaugu

SEQ ID NO: 982607 - RNA, 19 nt, Artificial Sequence
  Description of Artificial Sequence: Synthetic oligonucleotide
  Antisense strand to SEQ ID NO: 982606
acauaagagagaugauucc

SEQ ID NO: 982608 - RNA, 19 nt, Artificial Sequence
  Description of Artificial Sequence: Synthetic oligonucleotide
  Sense strand starting at position 2600 of SEQ ID NO: 914160
gacuguggucuccagcaga

SEQ ID NO: 982609 - RNA, 19 nt, Artificial Sequence
  Description of Artificial Sequence: Synthetic oligonucleotide
  Antisense strand to SEQ ID NO: 982608
ucugcuggagaccacaguc

SEQ ID NO: 982610 - RNA, 19 nt, Artificial Sequence
  Description of Artificial Sequence: Synthetic oligonucleotide
  Sense strand starting at position 3664 of SEQ ID NO: 914160
uugggaugguccagggaau

SEQ ID NO: 982611 - RNA, 19 nt, Artificial Sequence
  Description of Artificial Sequence: Synthetic oligonucleotide
  Antisense strand to SEQ ID NO: 982610
auucccuggaccaucccaa

SEQ ID NO: 982612 - RNA, 19 nt, Artificial Sequence
  Description of Artificial Sequence: Synthetic oligonucleotide
  Sense strand starting at position 2793 of SEQ ID NO: 914160
gucaguaagcauuagcaaa

SEQ ID NO: 982613 - RNA, 19 nt, Artificial Sequence
  Description of Artificial Sequence: Synthetic oligonucleotide
  Antisense strand to SEQ ID NO: 982612
uuugcuaaugcuuacugac

SEQ ID NO: 982614 - RNA, 19 nt, Artificial Sequence
  Description of Artificial Sequence: Synthetic oligonucleotide
  Sense strand starting at position 3364 of SEQ ID NO: 914160
aaaucugaacgauguugua

SEQ ID NO: 982615 - RNA, 19 nt, Artificial Sequence
  Description of Artificial Sequence: Synthetic oligonucleotide
  Antisense strand to SEQ ID NO: 982614
uacaacaucguucagauuu

SEQ ID NO: 982616 - RNA, 19 nt, Artificial Sequence
  Description of Artificial Sequence: Synthetic oligonucleotide
  Sense strand starting at position 1151 of SEQ ID NO: 914160
gguucuugcagggaguuua

SEQ ID NO: 982617 - RNA, 19 nt, Artificial Sequence
  Description of Artificial Sequence: Synthetic oligonucleotide
  Antisense strand to SEQ ID NO: 982616
uaaacucccugcaagaacc

SEQ ID NO: 982618 - RNA, 19 nt, Artificial Sequence
  Description of Artificial Sequence: Synthetic oligonucleotide
  Sense strand starting at position 2513 of SEQ ID NO: 914160
auaagcuauggguguuaga

SEQ ID NO: 982619 - RNA, 19 nt, Artificial Sequence
  Description of Artificial Sequence: Synthetic oligonucleotide
  Antisense strand to SEQ ID NO: 982618
ucuaacacccauagcuuau

SEQ ID NO: 982620 - RNA, 19 nt, Artificial Sequence
  Description of Artificial Sequence: Synthetic oligonucleotide
  Sense strand starting at position 2553 of SEQ ID NO: 914160
gcuggagucuucuuuagag

SEQ ID NO: 982621 - RNA, 19 nt, Artificial Sequence
  Description of Artificial Sequence: Synthetic oligonucleotide
  Antisense strand to SEQ ID NO: 982620
cucuaaagaagacuccagc

SEQ ID NO: 982622 - RNA, 19 nt, Artificial Sequence
  Description of Artificial Sequence: Synthetic oligonucleotide
  Sense strand starting at position 2185 of SEQ ID NO: 914160
cgcugaacaucuguuggaa

SEQ ID NO: 982623 - RNA, 19 nt, Artificial Sequence
  Description of Artificial Sequence: Synthetic oligonucleotide
  Antisense strand to SEQ ID NO: 982622
uuccaacagauguucagcg

SEQ ID NO: 982624 - RNA, 19 nt, Artificial Sequence
  Description of Artificial Sequence: Synthetic oligonucleotide
  Sense strand starting at position 2842 of SEQ ID NO: 914160
guaaauuagaguggccagu

SEQ ID NO: 982625 - RNA, 19 nt, Artificial Sequence
  Description of Artificial Sequence: Synthetic oligonucleotide
  Antisense strand to SEQ ID NO: 982624
acuggccacucuaauuuac

SEQ ID NO: 982626 - RNA, 19 nt, Artificial Sequence
  Description of Artificial Sequence: Synthetic oligonucleotide
  Sense strand starting at position 3173 of SEQ ID NO: 914160
aggguauucuggcccaguu

SEQ ID NO: 982627 - RNA, 19 nt, Artificial Sequence
  Description of Artificial Sequence: Synthetic oligonucleotide
  Antisense strand to SEQ ID NO: 982626
aacugggccagaauacccu

SEQ ID NO: 982628 - RNA, 19 nt, Artificial Sequence
  Description of Artificial Sequence: Synthetic oligonucleotide
  Sense strand starting at position 531 of SEQ ID NO: 914160
uacagagcuucguuaucua

SEQ ID NO: 982629 - RNA, 19 nt, Artificial Sequence
  Description of Artificial Sequence: Synthetic oligonucleotide
  Antisense strand to SEQ ID NO: 982628
uagauaacgaagcucugua

SEQ ID NO: 982630 - RNA, 19 nt, Artificial Sequence
  Description of Artificial Sequence: Synthetic oligonucleotide
  Sense strand starting at position 529 of SEQ ID NO: 914160
cauacagagcuucguuauc

SEQ ID NO: 982631 - RNA, 19 nt, Artificial Sequence
  Description of Artificial Sequence: Synthetic oligonucleotide
  Antisense strand to SEQ ID NO: 982630
gauaacgaagcucuguaug

SEQ ID NO: 982632 - RNA, 19 nt, Artificial Sequence
  Description of Artificial Sequence: Synthetic oligonucleotide
  Sense strand starting at position 519 of SEQ ID NO: 914160
gaacauaugucauacagag

SEQ ID NO: 982633 - RNA, 19 nt, Artificial Sequence
  Description of Artificial Sequence: Synthetic oligonucleotide
  Antisense strand to SEQ ID NO: 982632
cucuguaugacauauguuc

SEQ ID NO: 982634 - RNA, 19 nt, Artificial Sequence
  Description of Artificial Sequence: Synthetic oligonucleotide
  Sense strand starting at position 2663 of SEQ ID NO: 914160
auacgccugcugugaaaga

SEQ ID NO: 982635 - RNA, 19 nt, Artificial Sequence
  Description of Artificial Sequence: Synthetic oligonucleotide
  Antisense strand to SEQ ID NO: 982634
ucuuucacagcaggcguau

SEQ ID NO: 982636 - RNA, 19 nt, Artificial Sequence
  Description of Artificial Sequence: Synthetic oligonucleotide
  Sense strand starting at position 2242 of SEQ ID NO: 914160
aaagcugcucgcuggagaa

SEQ ID NO: 982637 - RNA, 19 nt, Artificial Sequence
  Description of Artificial Sequence: Synthetic oligonucleotide
  Antisense strand to SEQ ID NO: 982636
uucuccagcgagcagcuuu

SEQ ID NO: 982638 - RNA, 19 nt, Artificial Sequence
  Description of Artificial Sequence: Synthetic oligonucleotide
  Sense strand starting at position 2241 of SEQ ID NO: 914160
gaaagcugcucgcuggaga

SEQ ID NO: 982639 - RNA, 19 nt, Artificial Sequence
  Description of Artificial Sequence: Synthetic oligonucleotide
  Antisense strand to SEQ ID NO: 982638
ucuccagcgagcagcuuuc

SEQ ID NO: 982640 - RNA, 19 nt, Artificial Sequence
  Description of Artificial Sequence: Synthetic oligonucleotide
  Sense strand starting at position 3563 of SEQ ID NO: 914160
aggcuugugccuugauuga

SEQ ID NO: 982641 - RNA, 19 nt, Artificial Sequence
  Description of Artificial Sequence: Synthetic oligonucleotide
  Antisense strand to SEQ ID NO: 982640
ucaaucaaggcacaagccu

SEQ ID NO: 982642 - RNA, 19 nt, Artificial Sequence
  Description of Artificial Sequence: Synthetic oligonucleotide
  Sense strand starting at position 3691 of SEQ ID NO: 914160
uuaugucuggccugcuaga

SEQ ID NO: 982643 - RNA, 19 nt, Artificial Sequence
  Description of Artificial Sequence: Synthetic oligonucleotide
  Antisense strand to SEQ ID NO: 982642
ucuagcaggccagacauaa

SEQ ID NO: 982644 - RNA, 19 nt, Artificial Sequence
  Description of Artificial Sequence: Synthetic oligonucleotide
  Sense strand starting at position 1308 of SEQ ID NO: 914160
uuagcacacuccuggauuu

SEQ ID NO: 982645 - RNA, 19 nt, Artificial Sequence
  Description of Artificial Sequence: Synthetic oligonucleotide
  Antisense strand to SEQ ID NO: 982644
aaauccaggagugugcuaa

SEQ ID NO: 982646 - RNA, 19 nt, Artificial Sequence
  Description of Artificial Sequence: Synthetic oligonucleotide
  Sense strand starting at position 2617 of SEQ ID NO: 914160
gagugaaggucauauugga

SEQ ID NO: 982647 - RNA, 19 nt, Artificial Sequence
  Description of Artificial Sequence: Synthetic oligonucleotide
  Antisense strand to SEQ ID NO: 982646
uccaauaugaccuucacuc

SEQ ID NO: 982648 - RNA, 19 nt, Artificial Sequence
  Description of Artificial Sequence: Synthetic oligonucleotide
  Sense strand starting at position 3689 of SEQ ID NO: 914160
ucuuaugucuggccugcua

SEQ ID NO: 982649 - RNA, 19 nt, Artificial Sequence
  Description of Artificial Sequence: Synthetic oligonucleotide
  Antisense strand to SEQ ID NO: 982648
uagcaggccagacauaaga

SEQ ID NO: 982650 - RNA, 19 nt, Artificial Sequence
  Description of Artificial Sequence: Synthetic oligonucleotide
  Sense strand starting at position 2187 of SEQ ID NO: 914160
cugaacaucuguuggaaag

SEQ ID NO: 982651 - RNA, 19 nt, Artificial Sequence
  Description of Artificial Sequence: Synthetic oligonucleotide
  Antisense strand to SEQ ID NO: 982650
cuuuccaacagauguucag

SEQ ID NO: 982652 - RNA, 19 nt, Artificial Sequence
  Description of Artificial Sequence: Synthetic oligonucleotide
  Sense strand starting at position 2189 of SEQ ID NO: 914160
gaacaucuguuggaaagcu

SEQ ID NO: 982653 - RNA, 19 nt, Artificial Sequence
  Description of Artificial Sequence: Synthetic oligonucleotide
  Antisense strand to SEQ ID NO: 982652
agcuuuccaacagauguuc

SEQ ID NO: 982654 - RNA, 19 nt, Artificial Sequence
  Description of Artificial Sequence: Synthetic oligonucleotide
  Sense strand starting at position 2117 of SEQ ID NO: 914160
ggauucggcucccagaaua

SEQ ID NO: 982655 - RNA, 19 nt, Artificial Sequence
  Description of Artificial Sequence: Synthetic oligonucleotide
  Antisense strand to SEQ ID NO: 982654
uauucugggagccgaaucc

SEQ ID NO: 982656 - RNA, 19 nt, Artificial Sequence
  Description of Artificial Sequence: Synthetic oligonucleotide
  Sense strand starting at position 1243 of SEQ ID NO: 914160
cgacucgacucggaggaua

SEQ ID NO: 982657 - RNA, 19 nt, Artificial Sequence
  Description of Artificial Sequence: Synthetic oligonucleotide
  Antisense strand to SEQ ID NO: 982656
uauccuccgagucgagucg

SEQ ID NO: 982658 - RNA, 19 nt, Artificial Sequence
  Description of Artificial Sequence: Synthetic oligonucleotide
  Sense strand starting at position 2783 of SEQ ID NO: 914160
cagugaaggugucaguaag

SEQ ID NO: 982659 - RNA, 19 nt, Artificial Sequence
  Description of Artificial Sequence: Synthetic oligonucleotide
  Antisense strand to SEQ ID NO: 982658
cuuacugacaccuucacug

SEQ ID NO: 982660 - RNA, 19 nt, Artificial Sequence
  Description of Artificial Sequence: Synthetic oligonucleotide
  Sense strand starting at position 2827 of SEQ ID NO: 914160
cagaaaggcuuccggguaa

SEQ ID NO: 982661 - RNA, 19 nt, Artificial Sequence
  Description of Artificial Sequence: Synthetic oligonucleotide
  Antisense strand to SEQ ID NO: 982660
uuacccggaagccuuucug

SEQ ID NO: 982662 - RNA, 19 nt, Artificial Sequence
  Description of Artificial Sequence: Synthetic oligonucleotide
  Sense strand starting at position 2928 of SEQ ID NO: 914160
ugagucaugucaggcacaa

SEQ ID NO: 982663 - RNA, 19 nt, Artificial Sequence
  Description of Artificial Sequence: Synthetic oligonucleotide
  Antisense strand to SEQ ID NO: 982662
uugugccugacaugacuca

SEQ ID NO: 982664 - RNA, 19 nt, Artificial Sequence
  Description of Artificial Sequence: Synthetic oligonucleotide
  Sense strand starting at position 2510 of SEQ ID NO: 914160
acaauaagcuauggguguu

SEQ ID NO: 982665 - RNA, 19 nt, Artificial Sequence
  Description of Artificial Sequence: Synthetic oligonucleotide
  Antisense strand to SEQ ID NO: 982664
aacacccauagcuuauugu

SEQ ID NO: 982666 - RNA, 19 nt, Artificial Sequence
  Description of Artificial Sequence: Synthetic oligonucleotide
  Sense strand starting at position 3576 of SEQ ID NO: 914160
gauugauucucuugugcua

SEQ ID NO: 982667 - RNA, 19 nt, Artificial Sequence
  Description of Artificial Sequence: Synthetic oligonucleotide
  Antisense strand to SEQ ID NO: 982666
uagcacaagagaaucaauc

SEQ ID NO: 982668 - RNA, 19 nt, Artificial Sequence
  Description of Artificial Sequence: Synthetic oligonucleotide
  Sense strand starting at position 2661 of SEQ ID NO: 914160
ggauacgccugcugugaaa

SEQ ID NO: 982669 - RNA, 19 nt, Artificial Sequence
  Description of Artificial Sequence: Synthetic oligonucleotide
  Antisense strand to SEQ ID NO: 982668
uuucacagcaggcguaucc

SEQ ID NO: 982670 - RNA, 19 nt, Artificial Sequence
  Description of Artificial Sequence: Synthetic oligonucleotide
  Sense strand starting at position 3585 of SEQ ID NO: 914161
gacaaagcuguugauuaac

SEQ ID NO: 982671 - RNA, 19 nt, Artificial Sequence
  Description of Artificial Sequence: Synthetic oligonucleotide
  Antisense strand to SEQ ID NO: 982670
guuaaucaacagcuuuguc

SEQ ID NO: 982672 - RNA, 19 nt, Artificial Sequence
  Description of Artificial Sequence: Synthetic oligonucleotide
  Sense strand starting at position 1204 of SEQ ID NO: 914161
gggccuuugaacuaaagua

SEQ ID NO: 982673 - RNA, 19 nt, Artificial Sequence
  Description of Artificial Sequence: Synthetic oligonucleotide
  Antisense strand to SEQ ID NO: 982672
uacuuuaguucaaaggccc

SEQ ID NO: 982674 - RNA, 19 nt, Artificial Sequence
  Description of Artificial Sequence: Synthetic oligonucleotide
  Sense strand starting at position 893 of SEQ ID NO: 914161
cgcagcgaucuaucagcua

SEQ ID NO: 982675 - RNA, 19 nt, Artificial Sequence
  Description of Artificial Sequence: Synthetic oligonucleotide
  Antisense strand to SEQ ID NO: 982674
uagcugauagaucgcugcg

SEQ ID NO: 982676 - RNA, 19 nt, Artificial Sequence
  Description of Artificial Sequence: Synthetic oligonucleotide
  Sense strand starting at position 1286 of SEQ ID NO: 914161
uccaguucgcgacugguuu

SEQ ID NO: 982677 - RNA, 19 nt, Artificial Sequence
  Description of Artificial Sequence: Synthetic oligonucleotide
  Antisense strand to SEQ ID NO: 982676
aaaccagucgcgaacugga

SEQ ID NO: 982678 - RNA, 19 nt, Artificial Sequence
  Description of Artificial Sequence: Synthetic oligonucleotide
  Sense strand starting at position 600 of SEQ ID NO: 914161
aagagaaacguaugguuac

SEQ ID NO: 982679 - RNA, 19 nt, Artificial Sequence
  Description of Artificial Sequence: Synthetic oligonucleotide
  Antisense strand to SEQ ID NO: 982678
guaaccauacguuucucuu

SEQ ID NO: 982680 - RNA, 19 nt, Artificial Sequence
  Description of Artificial Sequence: Synthetic oligonucleotide
  Sense strand starting at position 3617 of SEQ ID NO: 914161
gagugcacucugggaaaua

SEQ ID NO: 982681 - RNA, 19 nt, Artificial Sequence
  Description of Artificial Sequence: Synthetic oligonucleotide
  Antisense strand to SEQ ID NO: 982680
uauuucccagagugcacuc

SEQ ID NO: 982682 - RNA, 19 nt, Artificial Sequence
  Description of Artificial Sequence: Synthetic oligonucleotide
  Sense strand starting at position 3615 of SEQ ID NO: 914161
uagagugcacucugggaaa

SEQ ID NO: 982683 - RNA, 19 nt, Artificial Sequence
  Description of Artificial Sequence: Synthetic oligonucleotide
  Antisense strand to SEQ ID NO: 982682
uuucccagagugcacucua

SEQ ID NO: 982684 - RNA, 19 nt, Artificial Sequence
  Description of Artificial Sequence: Synthetic oligonucleotide
  Sense strand starting at position 1041 of SEQ ID NO: 914161
uuaauuaggugacucuuua

SEQ ID NO: 982685 - RNA, 19 nt, Artificial Sequence
  Description of Artificial Sequence: Synthetic oligonucleotide
  Antisense strand to SEQ ID NO: 982684
uaaagagucaccuaauuaa

SEQ ID NO: 982686 - RNA, 19 nt, Artificial Sequence
  Description of Artificial Sequence: Synthetic oligonucleotide
  Sense strand starting at position 3920 of SEQ ID NO: 914161
guagguaugagcuaccaug

SEQ ID NO: 982687 - RNA, 19 nt, Artificial Sequence
  Description of Artificial Sequence: Synthetic oligonucleotide
  Antisense strand to SEQ ID NO: 982686
caugguagcucauaccuac

SEQ ID NO: 982688 - RNA, 19 nt, Artificial Sequence
  Description of Artificial Sequence: Synthetic oligonucleotide
  Sense strand starting at position 30 of SEQ ID NO: 914161
cuugaugcuccugaauucu

SEQ ID NO: 982689 - RNA, 19 nt, Artificial Sequence
  Description of Artificial Sequence: Synthetic oligonucleotide
  Antisense strand to SEQ ID NO: 982688
agaauucaggagcaucaag

SEQ ID NO: 982690 - RNA, 19 nt, Artificial Sequence
  Description of Artificial Sequence: Synthetic oligonucleotide
  Sense strand starting at position 620 of SEQ ID NO: 914161
ugauuuccuucugugcgau

SEQ ID NO: 982691 - RNA, 19 nt, Artificial Sequence
  Description of Artificial Sequence: Synthetic oligonucleotide
  Antisense strand to SEQ ID NO: 982690
aucgcacagaaggaaauca

SEQ ID NO: 982692 - RNA, 19 nt, Artificial Sequence
  Description of Artificial Sequence: Synthetic oligonucleotide
  Sense strand starting at position 3581 of SEQ ID NO: 914161
ugaugacaaagcuguugau

SEQ ID NO: 982693 - RNA, 19 nt, Artificial Sequence
  Description of Artificial Sequence: Synthetic oligonucleotide
  Antisense strand to SEQ ID NO: 982692
aucaacagcuuugucauca

SEQ ID NO: 982694 - RNA, 19 nt, Artificial Sequence
  Description of Artificial Sequence: Synthetic oligonucleotide
  Sense strand starting at position 388 of SEQ ID NO: 914161
agaaaugccuggccaacau

SEQ ID NO: 982695 - RNA, 19 nt, Artificial Sequence
  Description of Artificial Sequence: Synthetic oligonucleotide
  Antisense strand to SEQ ID NO: 982694
auguuggccaggcauuucu

SEQ ID NO: 982696 - RNA, 19 nt, Artificial Sequence
  Description of Artificial Sequence: Synthetic oligonucleotide
  Sense strand starting at position 3201 of SEQ ID NO: 914161
ugcauagacggucagacuu

SEQ ID NO: 982697 - RNA, 19 nt, Artificial Sequence
  Description of Artificial Sequence: Synthetic oligonucleotide
  Antisense strand to SEQ ID NO: 982696
aagucugaccgucuaugca

SEQ ID NO: 982698 - RNA, 19 nt, Artificial Sequence
  Description of Artificial Sequence: Synthetic oligonucleotide
  Sense strand starting at position 3569 of SEQ ID NO: 914161
cgcauaugaacuugaugac

SEQ ID NO: 982699 - RNA, 19 nt, Artificial Sequence
  Description of Artificial Sequence: Synthetic oligonucleotide
  Antisense strand to SEQ ID NO: 982698
gucaucaaguucauaugcg

SEQ ID NO: 982700 - RNA, 19 nt, Artificial Sequence
  Description of Artificial Sequence: Synthetic oligonucleotide
  Sense strand starting at position 386 of SEQ ID NO: 914161
ugagaaaugccuggccaac

SEQ ID NO: 982701 - RNA, 19 nt, Artificial Sequence
  Description of Artificial Sequence: Synthetic oligonucleotide
  Antisense strand to SEQ ID NO: 982700
guuggccaggcauuucuca

SEQ ID NO: 982702 - RNA, 19 nt, Artificial Sequence
  Description of Artificial Sequence: Synthetic oligonucleotide
  Sense strand starting at position 385 of SEQ ID NO: 914161
cugagaaaugccuggccaa

SEQ ID NO: 982703 - RNA, 19 nt, Artificial Sequence
  Description of Artificial Sequence: Synthetic oligonucleotide
  Antisense strand to SEQ ID NO: 982702
uuggccaggcauuucucag

SEQ ID NO: 982704 - RNA, 19 nt, Artificial Sequence
  Description of Artificial Sequence: Synthetic oligonucleotide
  Sense strand starting at position 1045 of SEQ ID NO: 914161
uuaggugacucuuuacucu

SEQ ID NO: 982705 - RNA, 19 nt, Artificial Sequence
  Description of Artificial Sequence: Synthetic oligonucleotide
  Antisense strand to SEQ ID NO: 982704
agaguaaagagucaccuaa

SEQ ID NO: 982706 - RNA, 19 nt, Artificial Sequence
  Description of Artificial Sequence: Synthetic oligonucleotide
  Sense strand starting at position 3209 of SEQ ID NO: 914161
cggucagacuuauuaagca

SEQ ID NO: 982707 - RNA, 19 nt, Artificial Sequence
  Description of Artificial Sequence: Synthetic oligonucleotide
  Antisense strand to SEQ ID NO: 982706
ugcuuaauaagucugaccg

SEQ ID NO: 982708 - RNA, 19 nt, Artificial Sequence
  Description of Artificial Sequence: Synthetic oligonucleotide
  Sense strand starting at position 978 of SEQ ID NO: 914161
gcccauucucugcaguaga

SEQ ID NO: 982709 - RNA, 19 nt, Artificial Sequence
  Description of Artificial Sequence: Synthetic oligonucleotide
  Antisense strand to SEQ ID NO: 982708
ucuacugcagagaaugggc

SEQ ID NO: 982710 - RNA, 19 nt, Artificial Sequence
  Description of Artificial Sequence: Synthetic oligonucleotide
  Sense strand starting at position 3628 of SEQ ID NO: 914161
gggaaauacuuccaggaac

SEQ ID NO: 982711 - RNA, 19 nt, Artificial Sequence
  Description of Artificial Sequence: Synthetic oligonucleotide
  Antisense strand to SEQ ID NO: 982710
guuccuggaaguauuuccc

SEQ ID NO: 982712 - RNA, 19 nt, Artificial Sequence
  Description of Artificial Sequence: Synthetic oligonucleotide
  Sense strand starting at position 896 of SEQ ID NO: 914161
agcgaucuaucagcuauga

SEQ ID NO: 982713 - RNA, 19 nt, Artificial Sequence
  Description of Artificial Sequence: Synthetic oligonucleotide
  Antisense strand to SEQ ID NO: 982712
ucauagcugauagaucgcu

SEQ ID NO: 982714 - RNA, 19 nt, Artificial Sequence
  Description of Artificial Sequence: Synthetic oligonucleotide
  Sense strand starting at position 3227 of SEQ ID NO: 914161
acuugugugucaccuaaug

SEQ ID NO: 982715 - RNA, 19 nt, Artificial Sequence
  Description of Artificial Sequence: Synthetic oligonucleotide
  Antisense strand to SEQ ID NO: 982714
cauuaggugacacacaagu

SEQ ID NO: 982716 - RNA, 19 nt, Artificial Sequence
  Description of Artificial Sequence: Synthetic oligonucleotide
  Sense strand starting at position 2460 of SEQ ID NO: 914161
caccuagccuguuugugaa

SEQ ID NO: 982717 - RNA, 19 nt, Artificial Sequence
  Description of Artificial Sequence: Synthetic oligonucleotide
  Antisense strand to SEQ ID NO: 982716
uucacaaacaggcuaggug

SEQ ID NO: 982718 - RNA, 19 nt, Artificial Sequence
  Description of Artificial Sequence: Synthetic oligonucleotide
  Sense strand starting at position 3602 of SEQ ID NO: 914161
acauguuccugccuagagu

SEQ ID NO: 982719 - RNA, 19 nt, Artificial Sequence
  Description of Artificial Sequence: Synthetic oligonucleotide
  Antisense strand to SEQ ID NO: 982718
acucuaggcaggaacaugu

SEQ ID NO: 982720 - RNA, 19 nt, Artificial Sequence
  Description of Artificial Sequence: Synthetic oligonucleotide
  Sense strand starting at position 1065 of SEQ ID NO: 914161
acgucugucucuccuacaa

SEQ ID NO: 982721 - RNA, 19 nt, Artificial Sequence
  Description of Artificial Sequence: Synthetic oligonucleotide
  Antisense strand to SEQ ID NO: 982720
uuguaggagagacagacgu

SEQ ID NO: 982722 - RNA, 19 nt, Artificial Sequence
  Description of Artificial Sequence: Synthetic oligonucleotide
  Sense strand starting at position 2525 of SEQ ID NO: 914161
ggcuuuauuggacgucuca

SEQ ID NO: 982723 - RNA, 19 nt, Artificial Sequence
  Description of Artificial Sequence: Synthetic oligonucleotide
  Antisense strand to SEQ ID NO: 982722
ugagacguccaauaaagcc

SEQ ID NO: 982724 - RNA, 19 nt, Artificial Sequence
  Description of Artificial Sequence: Synthetic oligonucleotide
  Sense strand starting at position 976 of SEQ ID NO: 914161
gggcccauucucugcagua

SEQ ID NO: 982725 - RNA, 19 nt, Artificial Sequence
  Description of Artificial Sequence: Synthetic oligonucleotide
  Antisense strand to SEQ ID NO: 982724
uacugcagagaaugggccc

SEQ ID NO: 982726 - RNA, 19 nt, Artificial Sequence
  Description of Artificial Sequence: Synthetic oligonucleotide
  Sense strand starting at position 770 of SEQ ID NO: 914161
cagagauauuuguguaucu

SEQ ID NO: 982727 - RNA, 19 nt, Artificial Sequence
  Description of Artificial Sequence: Synthetic oligonucleotide
  Antisense strand to SEQ ID NO: 982726
agauacacaaauaucucug

SEQ ID NO: 982728 - RNA, 19 nt, Artificial Sequence
  Description of Artificial Sequence: Synthetic oligonucleotide
  Sense strand starting at position 3696 of SEQ ID NO: 914161
aguguaguggugugaugua

SEQ ID NO: 982729 - RNA, 19 nt, Artificial Sequence
  Description of Artificial Sequence: Synthetic oligonucleotide
  Antisense strand to SEQ ID NO: 982728
uacaucacaccacuacacu

SEQ ID NO: 982730 - RNA, 19 nt, Artificial Sequence
  Description of Artificial Sequence: Synthetic oligonucleotide
  Sense strand starting at position 377 of SEQ ID NO: 914161
ucaacauucugagaaaugc

SEQ ID NO: 982731 - RNA, 19 nt, Artificial Sequence
  Description of Artificial Sequence: Synthetic oligonucleotide
  Antisense strand to SEQ ID NO: 982730
gcauuucucagaauguuga

SEQ ID NO: 982732 - RNA, 19 nt, Artificial Sequence
  Description of Artificial Sequence: Synthetic oligonucleotide
  Sense strand starting at position 623 of SEQ ID NO: 914161
uuuccuucugugcgaucau

SEQ ID NO: 982733 - RNA, 19 nt, Artificial Sequence
  Description of Artificial Sequence: Synthetic oligonucleotide
  Antisense strand to SEQ ID NO: 982732
augaucgcacagaaggaaa

SEQ ID NO: 982734 - RNA, 19 nt, Artificial Sequence
  Description of Artificial Sequence: Synthetic oligonucleotide
  Sense strand starting at position 3559 of SEQ ID NO: 914161
guugguugugcgcauauga

SEQ ID NO: 982735 - RNA, 19 nt, Artificial Sequence
  Description of Artificial Sequence: Synthetic oligonucleotide
  Antisense strand to SEQ ID NO: 982734
ucauaugcgcacaaccaac

SEQ ID NO: 982736 - RNA, 19 nt, Artificial Sequence
  Description of Artificial Sequence: Synthetic oligonucleotide
  Sense strand starting at position 3203 of SEQ ID NO: 914161
cauagacggucagacuuau

SEQ ID NO: 982737 - RNA, 19 nt, Artificial Sequence
  Description of Artificial Sequence: Synthetic oligonucleotide
  Antisense strand to SEQ ID NO: 982736
auaagucugaccgucuaug

SEQ ID NO: 982738 - RNA, 19 nt, Artificial Sequence
  Description of Artificial Sequence: Synthetic oligonucleotide
  Sense strand starting at position 1287 of SEQ ID NO: 914161
ccaguucgcgacugguuua

SEQ ID NO: 982739 - RNA, 19 nt, Artificial Sequence
  Description of Artificial Sequence: Synthetic oligonucleotide
  Antisense strand to SEQ ID NO: 982738
uaaaccagucgcgaacugg

SEQ ID NO: 982740 - RNA, 19 nt, Artificial Sequence
  Description of Artificial Sequence: Synthetic oligonucleotide
  Sense strand starting at position 1294 of SEQ ID NO: 914161
gcgacugguuuagagggaa

SEQ ID NO: 982741 - RNA, 19 nt, Artificial Sequence
  Description of Artificial Sequence: Synthetic oligonucleotide
  Antisense strand to SEQ ID NO: 982740
uucccucuaaaccagucgc

SEQ ID NO: 982742 - RNA, 19 nt, Artificial Sequence
  Description of Artificial Sequence: Synthetic oligonucleotide
  Sense strand starting at position 606 of SEQ ID NO: 914161
aacguaugguuacaugauu

SEQ ID NO: 982743 - RNA, 19 nt, Artificial Sequence
  Description of Artificial Sequence: Synthetic oligonucleotide
  Antisense strand to SEQ ID NO: 982742
aaucauguaaccauacguu

SEQ ID NO: 982744 - RNA, 19 nt, Artificial Sequence
  Description of Artificial Sequence: Synthetic oligonucleotide
  Sense strand starting at position 601 of SEQ ID NO: 914161
agagaaacguaugguuaca

SEQ ID NO: 982745 - RNA, 19 nt, Artificial Sequence
  Description of Artificial Sequence: Synthetic oligonucleotide
  Antisense strand to SEQ ID NO: 982744
uguaaccauacguuucucu

SEQ ID NO: 982746 - RNA, 19 nt, Artificial Sequence
  Description of Artificial Sequence: Synthetic oligonucleotide
  Sense strand starting at position 619 of SEQ ID NO: 914161
augauuuccuucugugcga

SEQ ID NO: 982747 - RNA, 19 nt, Artificial Sequence
  Description of Artificial Sequence: Synthetic oligonucleotide
  Antisense strand to SEQ ID NO: 982746
ucgcacagaaggaaaucau

SEQ ID NO: 982748 - RNA, 19 nt, Artificial Sequence
  Description of Artificial Sequence: Synthetic oligonucleotide
  Sense strand starting at position 3584 of SEQ ID NO: 914161
ugacaaagcuguugauuaa

SEQ ID NO: 982749 - RNA, 19 nt, Artificial Sequence
  Description of Artificial Sequence: Synthetic oligonucleotide
  Antisense strand to SEQ ID NO: 982748
uuaaucaacagcuuuguca

SEQ ID NO: 982750 - RNA, 19 nt, Artificial Sequence
  Description of Artificial Sequence: Synthetic oligonucleotide
  Sense strand starting at position 3616 of SEQ ID NO: 914162
acgauuauccaugauagua

SEQ ID NO: 982751 - RNA, 19 nt, Artificial Sequence
  Description of Artificial Sequence: Synthetic oligonucleotide
  Antisense strand to SEQ ID NO: 982750
uacuaucauggauaaucgu

SEQ ID NO: 982752 - RNA, 19 nt, Artificial Sequence
  Description of Artificial Sequence: Synthetic oligonucleotide
  Sense strand starting at position 1869 of SEQ ID NO: 914162
gagcuucuccgagaaacag

SEQ ID NO: 982753 - RNA, 19 nt, Artificial Sequence
  Description of Artificial Sequence: Synthetic oligonucleotide
  Antisense strand to SEQ ID NO: 982752
cuguuucucggagaagcuc

SEQ ID NO: 982754 - RNA, 19 nt, Artificial Sequence
  Description of Artificial Sequence: Synthetic oligonucleotide
  Sense strand starting at position 3630 of SEQ ID NO: 914162
uaguaugaggcaggaauaa

SEQ ID NO: 982755 - RNA, 19 nt, Artificial Sequence
  Description of Artificial Sequence: Synthetic oligonucleotide
  Antisense strand to SEQ ID NO: 982754
uuauuccugccucauacua

SEQ ID NO: 982756 - RNA, 19 nt, Artificial Sequence
  Description of Artificial Sequence: Synthetic oligonucleotide
  Sense strand starting at position 1135 of SEQ ID NO: 914162
gcguguugagaaagauguc

SEQ ID NO: 982757 - RNA, 19 nt, Artificial Sequence
  Description of Artificial Sequence: Synthetic oligonucleotide
  Antisense strand to SEQ ID NO: 982756
gacaucuuucucaacacgc

SEQ ID NO: 982758 - RNA, 19 nt, Artificial Sequence
  Description of Artificial Sequence: Synthetic oligonucleotide
  Sense strand starting at position 2947 of SEQ ID NO: 914162
ucuaguguacacuaacaua

SEQ ID NO: 982759 - RNA, 19 nt, Artificial Sequence
  Description of Artificial Sequence: Synthetic oligonucleotide
  Antisense strand to SEQ ID NO: 982758
uauguuaguguacacuaga

SEQ ID NO: 982760 - RNA, 19 nt, Artificial Sequence
  Description of Artificial Sequence: Synthetic oligonucleotide
  Sense strand starting at position 2985 of SEQ ID NO: 914162
agaaguacgcuuuaggaca

SEQ ID NO: 982761 - RNA, 19 nt, Artificial Sequence
  Description of Artificial Sequence: Synthetic oligonucleotide
  Antisense strand to SEQ ID NO: 982760
uguccuaaagcguacuucu

SEQ ID NO: 982762 - RNA, 19 nt, Artificial Sequence
  Description of Artificial Sequence: Synthetic oligonucleotide
  Sense strand starting at position 1127 of SEQ ID NO: 914162
gcagcucagcguguugaga

SEQ ID NO: 982763 - RNA, 19 nt, Artificial Sequence
  Description of Artificial Sequence: Synthetic oligonucleotide
  Antisense strand to SEQ ID NO: 982762
ucucaacacgcugagcugc

SEQ ID NO: 982764 - RNA, 19 nt, Artificial Sequence
  Description of Artificial Sequence: Synthetic oligonucleotide
  Sense strand starting at position 2360 of SEQ ID NO: 914162
aggaaauccuuggccaauu

SEQ ID NO: 982765 - RNA, 19 nt, Artificial Sequence
  Description of Artificial Sequence: Synthetic oligonucleotide
  Antisense strand to SEQ ID NO: 982764
aauuggccaaggauuuccu

SEQ ID NO: 982766 - RNA, 19 nt, Artificial Sequence
  Description of Artificial Sequence: Synthetic oligonucleotide
  Sense strand starting at position 3707 of SEQ ID NO: 914162
gcuugaucacagcacaauu

SEQ ID NO: 982767 - RNA, 19 nt, Artificial Sequence
  Description of Artificial Sequence: Synthetic oligonucleotide
  Antisense strand to SEQ ID NO: 982766
aauugugcugugaucaagc

SEQ ID NO: 982768 - RNA, 19 nt, Artificial Sequence
  Description of Artificial Sequence: Synthetic oligonucleotide
  Sense strand starting at position 3615 of SEQ ID NO: 914162
aacgauuauccaugauagu

SEQ ID NO: 982769 - RNA, 19 nt, Artificial Sequence
  Description of Artificial Sequence: Synthetic oligonucleotide
  Antisense strand to SEQ ID NO: 982768
acuaucauggauaaucguu

SEQ ID NO: 982770 - RNA, 19 nt, Artificial Sequence
  Description of Artificial Sequence: Synthetic oligonucleotide
  Sense strand starting at position 161 of SEQ ID NO: 914162
ccuucugauuacguagaaa

SEQ ID NO: 982771 - RNA, 19 nt, Artificial Sequence
  Description of Artificial Sequence: Synthetic oligonucleotide
  Antisense strand to SEQ ID NO: 982770
uuucuacguaaucagaagg

SEQ ID NO: 982772 - RNA, 19 nt, Artificial Sequence
  Description of Artificial Sequence: Synthetic oligonucleotide
  Sense strand starting at position 3562 of SEQ ID NO: 914162
acaggauaaugcucccagu

SEQ ID NO: 982773 - RNA, 19 nt, Artificial Sequence
  Description of Artificial Sequence: Synthetic oligonucleotide
  Antisense strand to SEQ ID NO: 982772
acugggagcauuauccugu

SEQ ID NO: 982774 - RNA, 19 nt, Artificial Sequence
  Description of Artificial Sequence: Synthetic oligonucleotide
  Sense strand starting at position 2259 of SEQ ID NO: 914162
cgcugacgugccuagauuu

SEQ ID NO: 982775 - RNA, 19 nt, Artificial Sequence
  Description of Artificial Sequence: Synthetic oligonucleotide
  Antisense strand to SEQ ID NO: 982774
aaaucuaggcacgucagcg

SEQ ID NO: 982776 - RNA, 19 nt, Artificial Sequence
  Description of Artificial Sequence: Synthetic oligonucleotide
  Sense strand starting at position 2331 of SEQ ID NO: 914162
gccucugacccuugggaua

SEQ ID NO: 982777 - RNA, 19 nt, Artificial Sequence
  Description of Artificial Sequence: Synthetic oligonucleotide
  Antisense strand to SEQ ID NO: 982776
uaucccaagggucagaggc

SEQ ID NO: 982778 - RNA, 19 nt, Artificial Sequence
  Description of Artificial Sequence: Synthetic oligonucleotide
  Sense strand starting at position 3531 of SEQ ID NO: 914162
uuaacacugcuugguauaa

SEQ ID NO: 982779 - RNA, 19 nt, Artificial Sequence
  Description of Artificial Sequence: Synthetic oligonucleotide
  Antisense strand to SEQ ID NO: 982778
uuauaccaagcaguguuaa

SEQ ID NO: 982780 - RNA, 19 nt, Artificial Sequence
  Description of Artificial Sequence: Synthetic oligonucleotide
  Sense strand starting at position 3097 of SEQ ID NO: 914162
cugcuuuaucacugaauug

SEQ ID NO: 982781 - RNA, 19 nt, Artificial Sequence
  Description of Artificial Sequence: Synthetic oligonucleotide
  Antisense strand to SEQ ID NO: 982780
caauucagugauaaagcag

SEQ ID NO: 982782 - RNA, 19 nt, Artificial Sequence
  Description of Artificial Sequence: Synthetic oligonucleotide
  Sense strand starting at position 3428 of SEQ ID NO: 914162
guacccggccaucauuaau

SEQ ID NO: 982783 - RNA, 19 nt, Artificial Sequence
  Description of Artificial Sequence: Synthetic oligonucleotide
  Antisense strand to SEQ ID NO: 982782
auuaaugauggccggguac

SEQ ID NO: 982784 - RNA, 19 nt, Artificial Sequence
  Description of Artificial Sequence: Synthetic oligonucleotide
  Sense strand starting at position 2937 of SEQ ID NO: 914162
guuuaccaucucuagugua

SEQ ID NO: 982785 - RNA, 19 nt, Artificial Sequence
  Description of Artificial Sequence: Synthetic oligonucleotide
  Antisense strand to SEQ ID NO: 982784
uacacuagagaugguaaac

SEQ ID NO: 982786 - RNA, 19 nt, Artificial Sequence
  Description of Artificial Sequence: Synthetic oligonucleotide
  Sense strand starting at position 3087 of SEQ ID NO: 914162
uuacaaaggucugcuuuau

SEQ ID NO: 982787 - RNA, 19 nt, Artificial Sequence
  Description of Artificial Sequence: Synthetic oligonucleotide
  Antisense strand to SEQ ID NO: 982786
auaaagcagaccuuuguaa

SEQ ID NO: 982788 - RNA, 19 nt, Artificial Sequence
  Description of Artificial Sequence: Synthetic oligonucleotide
  Sense strand starting at position 3086 of SEQ ID NO: 914162
uuuacaaaggucugcuuua

SEQ ID NO: 982789 - RNA, 19 nt, Artificial Sequence
  Description of Artificial Sequence: Synthetic oligonucleotide
  Antisense strand to SEQ ID NO: 982788
uaaagcagaccuuuguaaa

SEQ ID NO: 982790 - RNA, 19 nt, Artificial Sequence
  Description of Artificial Sequence: Synthetic oligonucleotide
  Sense strand starting at position 3093 of SEQ ID NO: 914162
aggucugcuuuaucacuga

SEQ ID NO: 982791 - RNA, 19 nt, Artificial Sequence
  Description of Artificial Sequence: Synthetic oligonucleotide
  Antisense strand to SEQ ID NO: 982790
ucagugauaaagcagaccu

SEQ ID NO: 982792 - RNA, 19 nt, Artificial Sequence
  Description of Artificial Sequence: Synthetic oligonucleotide
  Sense strand starting at position 3461 of SEQ ID NO: 914162
cuguauugcuuaccauaua

SEQ ID NO: 982793 - RNA, 19 nt, Artificial Sequence
  Description of Artificial Sequence: Synthetic oligonucleotide
  Antisense strand to SEQ ID NO: 982792
uauaugguaagcaauacag

SEQ ID NO: 982794 - RNA, 19 nt, Artificial Sequence
  Description of Artificial Sequence: Synthetic oligonucleotide
  Sense strand starting at position 157 of SEQ ID NO: 914162
ccuaccuucugauuacgua

SEQ ID NO: 982795 - RNA, 19 nt, Artificial Sequence
  Description of Artificial Sequence: Synthetic oligonucleotide
  Antisense strand to SEQ ID NO: 982794
uacguaaucagaagguagg

SEQ ID NO: 982796 - RNA, 19 nt, Artificial Sequence
  Description of Artificial Sequence: Synthetic oligonucleotide
  Sense strand starting at position 1865 of SEQ ID NO: 914162
ucgggagcuucuccgagaa

SEQ ID NO: 982797 - RNA, 19 nt, Artificial Sequence
  Description of Artificial Sequence: Synthetic oligonucleotide
  Antisense strand to SEQ ID NO: 982796
uucucggagaagcucccga

SEQ ID NO: 982798 - RNA, 19 nt, Artificial Sequence
  Description of Artificial Sequence: Synthetic oligonucleotide
  Sense strand starting at position 2054 of SEQ ID NO: 914162
uuggcuuccuauucugauu

SEQ ID NO: 982799 - RNA, 19 nt, Artificial Sequence
  Description of Artificial Sequence: Synthetic oligonucleotide
  Antisense strand to SEQ ID NO: 982798
aaucagaauaggaagccaa

SEQ ID NO: 982800 - RNA, 19 nt, Artificial Sequence
  Description of Artificial Sequence: Synthetic oligonucleotide
  Sense strand starting at position 3529 of SEQ ID NO: 914162
aguuaacacugcuugguau

SEQ ID NO: 982801 - RNA, 19 nt, Artificial Sequence
  Description of Artificial Sequence: Synthetic oligonucleotide
  Antisense strand to SEQ ID NO: 982800
auaccaagcaguguuaacu

SEQ ID NO: 982802 - RNA, 19 nt, Artificial Sequence
  Description of Artificial Sequence: Synthetic oligonucleotide
  Sense strand starting at position 3530 of SEQ ID NO: 914162
guuaacacugcuugguaua

SEQ ID NO: 982803 - RNA, 19 nt, Artificial Sequence
  Description of Artificial Sequence: Synthetic oligonucleotide
  Antisense strand to SEQ ID NO: 982802
uauaccaagcaguguuaac

SEQ ID NO: 982804 - RNA, 19 nt, Artificial Sequence
  Description of Artificial Sequence: Synthetic oligonucleotide
  Sense strand starting at position 2480 of SEQ ID NO: 914162
acacaaaucuccgagaaac

SEQ ID NO: 982805 - RNA, 19 nt, Artificial Sequence
  Description of Artificial Sequence: Synthetic oligonucleotide
  Antisense strand to SEQ ID NO: 982804
guuucucggagauuugugu

SEQ ID NO: 982806 - RNA, 19 nt, Artificial Sequence
  Description of Artificial Sequence: Synthetic oligonucleotide
  Sense strand starting at position 3591 of SEQ ID NO: 914162
acacaaaccugcuagagaa

SEQ ID NO: 982807 - RNA, 19 nt, Artificial Sequence
  Description of Artificial Sequence: Synthetic oligonucleotide
  Antisense strand to SEQ ID NO: 982806
uucucuagcagguuugugu

SEQ ID NO: 982808 - RNA, 19 nt, Artificial Sequence
  Description of Artificial Sequence: Synthetic oligonucleotide
  Sense strand starting at position 2334 of SEQ ID NO: 914162
ucugacccuugggauaaua

SEQ ID NO: 982809 - RNA, 19 nt, Artificial Sequence
  Description of Artificial Sequence: Synthetic oligonucleotide
  Antisense strand to SEQ ID NO: 982808
uauuaucccaagggucaga

SEQ ID NO: 982810 - RNA, 19 nt, Artificial Sequence
  Description of Artificial Sequence: Synthetic oligonucleotide
  Sense strand starting at position 570 of SEQ ID NO: 914162
aaagcauccgcgugacaca

SEQ ID NO: 982811 - RNA, 19 nt, Artificial Sequence
  Description of Artificial Sequence: Synthetic oligonucleotide
  Antisense strand to SEQ ID NO: 982810
ugugucacgcggaugcuuu

SEQ ID NO: 982812 - RNA, 19 nt, Artificial Sequence
  Description of Artificial Sequence: Synthetic oligonucleotide
  Sense strand starting at position 3618 of SEQ ID NO: 914162
gauuauccaugauaguaug

SEQ ID NO: 982813 - RNA, 19 nt, Artificial Sequence
  Description of Artificial Sequence: Synthetic oligonucleotide
  Antisense strand to SEQ ID NO: 982812
cauacuaucauggauaauc

SEQ ID NO: 982814 - RNA, 19 nt, Artificial Sequence
  Description of Artificial Sequence: Synthetic oligonucleotide
  Sense strand starting at position 3684 of SEQ ID NO: 914162
uugguucuaugacacagaa

SEQ ID NO: 982815 - RNA, 19 nt, Artificial Sequence
  Description of Artificial Sequence: Synthetic oligonucleotide
  Antisense strand to SEQ ID NO: 982814
uucugugucauagaaccaa

SEQ ID NO: 982816 - RNA, 19 nt, Artificial Sequence
  Description of Artificial Sequence: Synthetic oligonucleotide
  Sense strand starting at position 1867 of SEQ ID NO: 914162
gggagcuucuccgagaaac

SEQ ID NO: 982817 - RNA, 19 nt, Artificial Sequence
  Description of Artificial Sequence: Synthetic oligonucleotide
  Antisense strand to SEQ ID NO: 982816
guuucucggagaagcuccc

SEQ ID NO: 982818 - RNA, 19 nt, Artificial Sequence
  Description of Artificial Sequence: Synthetic oligonucleotide
  Sense strand starting at position 2333 of SEQ ID NO: 914162
cucugacccuugggauaau

SEQ ID NO: 982819 - RNA, 19 nt, Artificial Sequence
  Description of Artificial Sequence: Synthetic oligonucleotide
  Antisense strand to SEQ ID NO: 982818
auuaucccaagggucagag

SEQ ID NO: 982820 - RNA, 19 nt, Artificial Sequence
  Description of Artificial Sequence: Synthetic oligonucleotide
  Sense strand starting at position 3565 of SEQ ID NO: 914162
ggauaaugcucccaguacu

SEQ ID NO: 982821 - RNA, 19 nt, Artificial Sequence
  Description of Artificial Sequence: Synthetic oligonucleotide
  Antisense strand to SEQ ID NO: 982820
aguacugggagcauuaucc

SEQ ID NO: 982822 - RNA, 19 nt, Artificial Sequence
  Description of Artificial Sequence: Synthetic oligonucleotide
  Sense strand starting at position 160 of SEQ ID NO: 914162
accuucugauuacguagaa

SEQ ID NO: 982823 - RNA, 19 nt, Artificial Sequence
  Description of Artificial Sequence: Synthetic oligonucleotide
  Antisense strand to SEQ ID NO: 982822
uucuacguaaucagaaggu

SEQ ID NO: 982824 - RNA, 19 nt, Artificial Sequence
  Description of Artificial Sequence: Synthetic oligonucleotide
  Sense strand starting at position 1129 of SEQ ID NO: 914162
agcucagcguguugagaaa

SEQ ID NO: 982825 - RNA, 19 nt, Artificial Sequence
  Description of Artificial Sequence: Synthetic oligonucleotide
  Antisense strand to SEQ ID NO: 982824
uuucucaacacgcugagcu

SEQ ID NO: 982826 - RNA, 19 nt, Artificial Sequence
  Description of Artificial Sequence: Synthetic oligonucleotide
  Sense strand starting at position 2601 of SEQ ID NO: 914163
uugacagucccugaccaau

SEQ ID NO: 982827 - RNA, 19 nt, Artificial Sequence
  Description of Artificial Sequence: Synthetic oligonucleotide
  Antisense strand to SEQ ID NO: 982826
auuggucagggacugucaa

SEQ ID NO: 982828 - RNA, 19 nt, Artificial Sequence
  Description of Artificial Sequence: Synthetic oligonucleotide
  Sense strand starting at position 901 of SEQ ID NO: 914163
caggguugagauggguaaa

SEQ ID NO: 982829 - RNA, 19 nt, Artificial Sequence
  Description of Artificial Sequence: Synthetic oligonucleotide
  Antisense strand to SEQ ID NO: 982828
uuuacccaucucaacccug

SEQ ID NO: 982830 - RNA, 19 nt, Artificial Sequence
  Description of Artificial Sequence: Synthetic oligonucleotide
  Sense strand starting at position 2506 of SEQ ID NO: 914163
cauugucugcucguaggua

SEQ ID NO: 982831 - RNA, 19 nt, Artificial Sequence
  Description of Artificial Sequence: Synthetic oligonucleotide
  Antisense strand to SEQ ID NO: 982830
uaccuacgagcagacaaug

SEQ ID NO: 982832 - RNA, 19 nt, Artificial Sequence
  Description of Artificial Sequence: Synthetic oligonucleotide
  Sense strand starting at position 1335 of SEQ ID NO: 914163
ccggguaagcaagaacaua

SEQ ID NO: 982833 - RNA, 19 nt, Artificial Sequence
  Description of Artificial Sequence: Synthetic oligonucleotide
  Antisense strand to SEQ ID NO: 982832
uauguucuugcuuacccgg

SEQ ID NO: 982834 - RNA, 19 nt, Artificial Sequence
  Description of Artificial Sequence: Synthetic oligonucleotide
  Sense strand starting at position 295 of SEQ ID NO: 914163
agguaugguaaagaugcua

SEQ ID NO: 982835 - RNA, 19 nt, Artificial Sequence
  Description of Artificial Sequence: Synthetic oligonucleotide
  Antisense strand to SEQ ID NO: 982834
uagcaucuuuaccauaccu

SEQ ID NO: 982836 - RNA, 19 nt, Artificial Sequence
  Description of Artificial Sequence: Synthetic oligonucleotide
  Sense strand starting at position 3170 of SEQ ID NO: 914163
uuaggaugcagguaucuga

SEQ ID NO: 982837 - RNA, 19 nt, Artificial Sequence
  Description of Artificial Sequence: Synthetic oligonucleotide
  Antisense strand to SEQ ID NO: 982836
ucagauaccugcauccuaa

SEQ ID NO: 982838 - RNA, 19 nt, Artificial Sequence
  Description of Artificial Sequence: Synthetic oligonucleotide
  Sense strand starting at position 3153 of SEQ ID NO: 914163
acaaacuucccaggaaguu

SEQ ID NO: 982839 - RNA, 19 nt, Artificial Sequence
  Description of Artificial Sequence: Synthetic oligonucleotide
  Antisense strand to SEQ ID NO: 982838
aacuuccugggaaguuugu

SEQ ID NO: 982840 - RNA, 19 nt, Artificial Sequence
  Description of Artificial Sequence: Synthetic oligonucleotide
  Sense strand starting at position 3397 of SEQ ID NO: 914163
guaagcuuacaagauuauu

SEQ ID NO: 982841 - RNA, 19 nt, Artificial Sequence
  Description of Artificial Sequence: Synthetic oligonucleotide
  Antisense strand to SEQ ID NO: 982840
aauaaucuuguaagcuuac

SEQ ID NO: 982842 - RNA, 19 nt, Artificial Sequence
  Description of Artificial Sequence: Synthetic oligonucleotide
  Sense strand starting at position 2607 of SEQ ID NO: 914163
gucccugaccaauagucaa

SEQ ID NO: 982843 - RNA, 19 nt, Artificial Sequence
  Description of Artificial Sequence: Synthetic oligonucleotide
  Antisense strand to SEQ ID NO: 982842
uugacuauuggucagggac

SEQ ID NO: 982844 - RNA, 19 nt, Artificial Sequence
  Description of Artificial Sequence: Synthetic oligonucleotide
  Sense strand starting at position 3003 of SEQ ID NO: 914163
auaagacuccuaggugauu

SEQ ID NO: 982845 - RNA, 19 nt, Artificial Sequence
  Description of Artificial Sequence: Synthetic oligonucleotide
  Antisense strand to SEQ ID NO: 982844
aaucaccuaggagucuuau

SEQ ID NO: 982846 - RNA, 19 nt, Artificial Sequence
  Description of Artificial Sequence: Synthetic oligonucleotide
  Sense strand starting at position 916 of SEQ ID NO: 914163
uaaacaguuguuggaugaa

SEQ ID NO: 982847 - RNA, 19 nt, Artificial Sequence
  Description of Artificial Sequence: Synthetic oligonucleotide
  Antisense strand to SEQ ID NO: 982846
uucauccaacaacuguuua

SEQ ID NO: 982848 - RNA, 19 nt, Artificial Sequence
  Description of Artificial Sequence: Synthetic oligonucleotide
  Sense strand starting at position 830 of SEQ ID NO: 914163
cugaauucugaaggauguu

SEQ ID NO: 982849 - RNA, 19 nt, Artificial Sequence
  Description of Artificial Sequence: Synthetic oligonucleotide
  Antisense strand to SEQ ID NO: 982848
aacauccuucagaauucag

SEQ ID NO: 982850 - RNA, 19 nt, Artificial Sequence
  Description of Artificial Sequence: Synthetic oligonucleotide
  Sense strand starting at position 919 of SEQ ID NO: 914163
acaguuguuggaugaagau

SEQ ID NO: 982851 - RNA, 19 nt, Artificial Sequence
  Description of Artificial Sequence: Synthetic oligonucleotide
  Antisense strand to SEQ ID NO: 982850
aucuucauccaacaacugu

SEQ ID NO: 982852 - RNA, 19 nt, Artificial Sequence
  Description of Artificial Sequence: Synthetic oligonucleotide
  Sense strand starting at position 270 of SEQ ID NO: 914163
uuacuucgucauuaauaag

SEQ ID NO: 982853 - RNA, 19 nt, Artificial Sequence
  Description of Artificial Sequence: Synthetic oligonucleotide
  Antisense strand to SEQ ID NO: 982852
cuuauuaaugacgaaguaa

SEQ ID NO: 982854 - RNA, 19 nt, Artificial Sequence
  Description of Artificial Sequence: Synthetic oligonucleotide
  Sense strand starting at position 3953 of SEQ ID NO: 914163
ugugaucaacugcauaacu

SEQ ID NO: 982855 - RNA, 19 nt, Artificial Sequence
  Description of Artificial Sequence: Synthetic oligonucleotide
  Antisense strand to SEQ ID NO: 982854
aguuaugcaguugaucaca

SEQ ID NO: 982856 - RNA, 19 nt, Artificial Sequence
  Description of Artificial Sequence: Synthetic oligonucleotide
  Sense strand starting at position 347 of SEQ ID NO: 914163
uguguaauugcgcuaccuu

SEQ ID NO: 982857 - RNA, 19 nt, Artificial Sequence
  Description of Artificial Sequence: Synthetic oligonucleotide
  Antisense strand to SEQ ID NO: 982856
aagguagcgcaauuacaca

SEQ ID NO: 982858 - RNA, 19 nt, Artificial Sequence
  Description of Artificial Sequence: Synthetic oligonucleotide
  Sense strand starting at position 813 of SEQ ID NO: 914163
gaaagaaaugcccgaaucu

SEQ ID NO: 982859 - RNA, 19 nt, Artificial Sequence
  Description of Artificial Sequence: Synthetic oligonucleotide
  Antisense strand to SEQ ID NO: 982858
agauucgggcauuucuuuc

SEQ ID NO: 982860 - RNA, 19 nt, Artificial Sequence
  Description of Artificial Sequence: Synthetic oligonucleotide
  Sense strand starting at position 2177 of SEQ ID NO: 914163
ggaauuagccucuacaguc

SEQ ID NO: 982861 - RNA, 19 nt, Artificial Sequence
  Description of Artificial Sequence: Synthetic oligonucleotide
  Antisense strand to SEQ ID NO: 982860
gacuguagaggcuaauucc

SEQ ID NO: 982862 - RNA, 19 nt, Artificial Sequence
  Description of Artificial Sequence: Synthetic oligonucleotide
  Sense strand starting at position 3130 of SEQ ID NO: 914163
agcucuggagucuaaacuu

SEQ ID NO: 982863 - RNA, 19 nt, Artificial Sequence
  Description of Artificial Sequence: Synthetic oligonucleotide
  Antisense strand to SEQ ID NO: 982862
aaguuuagacuccagagcu

SEQ ID NO: 982864 - RNA, 19 nt, Artificial Sequence
  Description of Artificial Sequence: Synthetic oligonucleotide
  Sense strand starting at position 2372 of SEQ ID NO: 914163
auauauggauugucucacu

SEQ ID NO: 982865 - RNA, 19 nt, Artificial Sequence
  Description of Artificial Sequence: Synthetic oligonucleotide
  Antisense strand to SEQ ID NO: 982864
agugagacaauccauauau

SEQ ID NO: 982866 - RNA, 19 nt, Artificial Sequence
  Description of Artificial Sequence: Synthetic oligonucleotide
  Sense strand starting at position 2896 of SEQ ID NO: 914163
auauguggccucuaaaucu

SEQ ID NO: 982867 - RNA, 19 nt, Artificial Sequence
  Description of Artificial Sequence: Synthetic oligonucleotide
  Antisense strand to SEQ ID NO: 982866
agauuuagaggccacauau

SEQ ID NO: 982868 - RNA, 19 nt, Artificial Sequence
  Description of Artificial Sequence: Synthetic oligonucleotide
  Sense strand starting at position 3125 of SEQ ID NO: 914163
ggugaagcucuggagucua

SEQ ID NO: 982869 - RNA, 19 nt, Artificial Sequence
  Description of Artificial Sequence: Synthetic oligonucleotide
  Antisense strand to SEQ ID NO: 982868
uagacuccagagcuucacc

SEQ ID NO: 982870 - RNA, 19 nt, Artificial Sequence
  Description of Artificial Sequence: Synthetic oligonucleotide
  Sense strand starting at position 2281 of SEQ ID NO: 914163
ucuaaaucaucaguuagua

SEQ ID NO: 982871 - RNA, 19 nt, Artificial Sequence
  Description of Artificial Sequence: Synthetic oligonucleotide
  Antisense strand to SEQ ID NO: 982870
uacuaacugaugauuuaga

SEQ ID NO: 982872 - RNA, 19 nt, Artificial Sequence
  Description of Artificial Sequence: Synthetic oligonucleotide
  Sense strand starting at position 983 of SEQ ID NO: 914163
caauuuauuugcgacaguu

SEQ ID NO: 982873 - RNA, 19 nt, Artificial Sequence
  Description of Artificial Sequence: Synthetic oligonucleotide
  Antisense strand to SEQ ID NO: 982872
aacugucgcaaauaaauug

SEQ ID NO: 982874 - RNA, 19 nt, Artificial Sequence
  Description of Artificial Sequence: Synthetic oligonucleotide
  Sense strand starting at position 745 of SEQ ID NO: 914163
ugugaacuguaacuguaaa

SEQ ID NO: 982875 - RNA, 19 nt, Artificial Sequence
  Description of Artificial Sequence: Synthetic oligonucleotide
  Antisense strand to SEQ ID NO: 982874
uuuacaguuacaguucaca

SEQ ID NO: 982876 - RNA, 19 nt, Artificial Sequence
  Description of Artificial Sequence: Synthetic oligonucleotide
  Sense strand starting at position 3946 of SEQ ID NO: 914163
cauaguuugugaucaacug

SEQ ID NO: 982877 - RNA, 19 nt, Artificial Sequence
  Description of Artificial Sequence: Synthetic oligonucleotide
  Antisense strand to SEQ ID NO: 982876
caguugaucacaaacuaug

SEQ ID NO: 982878 - RNA, 19 nt, Artificial Sequence
  Description of Artificial Sequence: Synthetic oligonucleotide
  Sense strand starting at position 912 of SEQ ID NO: 914163
uggguaaacaguuguugga

SEQ ID NO: 982879 - RNA, 19 nt, Artificial Sequence
  Description of Artificial Sequence: Synthetic oligonucleotide
  Antisense strand to SEQ ID NO: 982878
uccaacaacuguuuaccca

SEQ ID NO: 982880 - RNA, 19 nt, Artificial Sequence
  Description of Artificial Sequence: Synthetic oligonucleotide
  Sense strand starting at position 2600 of SEQ ID NO: 914163
guugacagucccugaccaa

SEQ ID NO: 982881 - RNA, 19 nt, Artificial Sequence
  Description of Artificial Sequence: Synthetic oligonucleotide
  Antisense strand to SEQ ID NO: 982880
uuggucagggacugucaac

SEQ ID NO: 982882 - RNA, 19 nt, Artificial Sequence
  Description of Artificial Sequence: Synthetic oligonucleotide
  Sense strand starting at position 2289 of SEQ ID NO: 914163
aucaguuaguaauuccuua

SEQ ID NO: 982883 - RNA, 19 nt, Artificial Sequence
  Description of Artificial Sequence: Synthetic oligonucleotide
  Antisense strand to SEQ ID NO: 982882
uaaggaauuacuaacugau

SEQ ID NO: 982884 - RNA, 19 nt, Artificial Sequence
  Description of Artificial Sequence: Synthetic oligonucleotide
  Sense strand starting at position 405 of SEQ ID NO: 914163
gauuguuaacuguauguuu

SEQ ID NO: 982885 - RNA, 19 nt, Artificial Sequence
  Description of Artificial Sequence: Synthetic oligonucleotide
  Antisense strand to SEQ ID NO: 982884
aaacauacaguuaacaauc

SEQ ID NO: 982886 - RNA, 19 nt, Artificial Sequence
  Description of Artificial Sequence: Synthetic oligonucleotide
  Sense strand starting at position 2821 of SEQ ID NO: 914163
gucaguaccugggugauaa

SEQ ID NO: 982887 - RNA, 19 nt, Artificial Sequence
  Description of Artificial Sequence: Synthetic oligonucleotide
  Antisense strand to SEQ ID NO: 982886
uuaucacccagguacugac

SEQ ID NO: 982888 - RNA, 19 nt, Artificial Sequence
  Description of Artificial Sequence: Synthetic oligonucleotide
  Sense strand starting at position 3890 of SEQ ID NO: 914163
guaguucaguguguuauuu

SEQ ID NO: 982889 - RNA, 19 nt, Artificial Sequence
  Description of Artificial Sequence: Synthetic oligonucleotide
  Antisense strand to SEQ ID NO: 982888
aaauaacacacugaacuac

SEQ ID NO: 982890 - RNA, 19 nt, Artificial Sequence
  Description of Artificial Sequence: Synthetic oligonucleotide
  Sense strand starting at position 518 of SEQ ID NO: 914163
uguccucuguaccuaaaga

SEQ ID NO: 982891 - RNA, 19 nt, Artificial Sequence
  Description of Artificial Sequence: Synthetic oligonucleotide
  Antisense strand to SEQ ID NO: 982890
ucuuuagguacagaggaca

SEQ ID NO: 982892 - RNA, 19 nt, Artificial Sequence
  Description of Artificial Sequence: Synthetic oligonucleotide
  Sense strand starting at position 742 of SEQ ID NO: 914163
cagugugaacuguaacugu

SEQ ID NO: 982893 - RNA, 19 nt, Artificial Sequence
  Description of Artificial Sequence: Synthetic oligonucleotide
  Antisense strand to SEQ ID NO: 982892
acaguuacaguucacacug

SEQ ID NO: 982894 - RNA, 19 nt, Artificial Sequence
  Description of Artificial Sequence: Synthetic oligonucleotide
  Sense strand starting at position 3918 of SEQ ID NO: 914163
cucuuucucccaggaugua

SEQ ID NO: 982895 - RNA, 19 nt, Artificial Sequence
  Description of Artificial Sequence: Synthetic oligonucleotide
  Antisense strand to SEQ ID NO: 982894
uacauccugggagaaagag

SEQ ID NO: 982896 - RNA, 19 nt, Artificial Sequence
  Description of Artificial Sequence: Synthetic oligonucleotide
  Sense strand starting at position 982 of SEQ ID NO: 914163
acaauuuauuugcgacagu

SEQ ID NO: 982897 - RNA, 19 nt, Artificial Sequence
  Description of Artificial Sequence: Synthetic oligonucleotide
  Antisense strand to SEQ ID NO: 982896
acugucgcaaauaaauugu

SEQ ID NO: 982898 - RNA, 19 nt, Artificial Sequence
  Description of Artificial Sequence: Synthetic oligonucleotide
  Sense strand starting at position 3868 of SEQ ID NO: 914163
gcaaauacaugugcaacau

SEQ ID NO: 982899 - RNA, 19 nt, Artificial Sequence
  Description of Artificial Sequence: Synthetic oligonucleotide
  Antisense strand to SEQ ID NO: 982898
auguugcacauguauuugc

SEQ ID NO: 982900 - RNA, 19 nt, Artificial Sequence
  Description of Artificial Sequence: Synthetic oligonucleotide
  Sense strand starting at position 2293 of SEQ ID NO: 914163
guuaguaauuccuuaucca

SEQ ID NO: 982901 - RNA, 19 nt, Artificial Sequence
  Description of Artificial Sequence: Synthetic oligonucleotide
  Antisense strand to SEQ ID NO: 982900
uggauaaggaauuacuaac

SEQ ID NO: 982902 - RNA, 19 nt, Artificial Sequence
  Description of Artificial Sequence: Synthetic oligonucleotide
  Sense strand starting at position 288 of SEQ ID NO: 914163
guaugcaagguaugguaaa

SEQ ID NO: 982903 - RNA, 19 nt, Artificial Sequence
  Description of Artificial Sequence: Synthetic oligonucleotide
  Antisense strand to SEQ ID NO: 982902
uuuaccauaccuugcauac

SEQ ID NO: 982904 - RNA, 19 nt, Artificial Sequence
  Description of Artificial Sequence: Synthetic oligonucleotide
  Sense strand starting at position 953 of SEQ ID NO: 914163
auucuauacccauguguca

SEQ ID NO: 982905 - RNA, 19 nt, Artificial Sequence
  Description of Artificial Sequence: Synthetic oligonucleotide
  Antisense strand to SEQ ID NO: 982904
ugacacauggguauagaau

SEQ ID NO: 982906 - RNA, 19 nt, Artificial Sequence
  Description of Artificial Sequence: Synthetic oligonucleotide
  Sense strand starting at position 370 of SEQ ID NO: 914164
ucuccucagccagaagaau

SEQ ID NO: 982907 - RNA, 19 nt, Artificial Sequence
  Description of Artificial Sequence: Synthetic oligonucleotide
  Antisense strand to SEQ ID NO: 982906
auucuucuggcugaggaga

SEQ ID NO: 982908 - RNA, 19 nt, Artificial Sequence
  Description of Artificial Sequence: Synthetic oligonucleotide
  Sense strand starting at position 3545 of SEQ ID NO: 914164
gugaaucugcuagaaauau

SEQ ID NO: 982909 - RNA, 19 nt, Artificial Sequence
  Description of Artificial Sequence: Synthetic oligonucleotide
  Antisense strand to SEQ ID NO: 982908
auauuucuagcagauucac

SEQ ID NO: 982910 - RNA, 19 nt, Artificial Sequence
  Description of Artificial Sequence: Synthetic oligonucleotide
  Sense strand starting at position 848 of SEQ ID NO: 914164
gaaggaagugaguguaaga

SEQ ID NO: 982911 - RNA, 19 nt, Artificial Sequence
  Description of Artificial Sequence: Synthetic oligonucleotide
  Antisense strand to SEQ ID NO: 982910
ucuuacacucacuuccuuc

SEQ ID NO: 982912 - RNA, 19 nt, Artificial Sequence
  Description of Artificial Sequence: Synthetic oligonucleotide
  Sense strand starting at position 2702 of SEQ ID NO: 914164
gugacuuugagagauuggu

SEQ ID NO: 982913 - RNA, 19 nt, Artificial Sequence
  Description of Artificial Sequence: Synthetic oligonucleotide
  Antisense strand to SEQ ID NO: 982912
accaaucucucaaagucac

SEQ ID NO: 982914 - RNA, 19 nt, Artificial Sequence
  Description of Artificial Sequence: Synthetic oligonucleotide
  Sense strand starting at position 97 of SEQ ID NO: 914164
agauuucucugggagagag

SEQ ID NO: 982915 - RNA, 19 nt, Artificial Sequence
  Description of Artificial Sequence: Synthetic oligonucleotide
  Antisense strand to SEQ ID NO: 982914
cucucucccagagaaaucu

SEQ ID NO: 982916 - RNA, 19 nt, Artificial Sequence
  Description of Artificial Sequence: Synthetic oligonucleotide
  Sense strand starting at position 2979 of SEQ ID NO: 914164
gcuguuugugggagguuga

SEQ ID NO: 982917 - RNA, 19 nt, Artificial Sequence
  Description of Artificial Sequence: Synthetic oligonucleotide
  Antisense strand to SEQ ID NO: 982916
ucaaccucccacaaacagc

SEQ ID NO: 982918 - RNA, 19 nt, Artificial Sequence
  Description of Artificial Sequence: Synthetic oligonucleotide
  Sense strand starting at position 258 of SEQ ID NO: 914164
gagaguugucaacagcaaa

SEQ ID NO: 982919 - RNA, 19 nt, Artificial Sequence
  Description of Artificial Sequence: Synthetic oligonucleotide
  Antisense strand to SEQ ID NO: 982918
uuugcuguugacaacucuc

SEQ ID NO: 982920 - RNA, 19 nt, Artificial Sequence
  Description of Artificial Sequence: Synthetic oligonucleotide
  Sense strand starting at position 59 of SEQ ID NO: 914164
ggguauucccaauggacaa

SEQ ID NO: 982921 - RNA, 19 nt, Artificial Sequence
  Description of Artificial Sequence: Synthetic oligonucleotide
  Antisense strand to SEQ ID NO: 982920
uuguccauugggaauaccc

SEQ ID NO: 982922 - RNA, 19 nt, Artificial Sequence
  Description of Artificial Sequence: Synthetic oligonucleotide
  Sense strand starting at position 2708 of SEQ ID NO: 914164
uugagagauuggucucaag

SEQ ID NO: 982923 - RNA, 19 nt, Artificial Sequence
  Description of Artificial Sequence: Synthetic oligonucleotide
  Antisense strand to SEQ ID NO: 982922
cuugagaccaaucucucaa

SEQ ID NO: 982924 - RNA, 19 nt, Artificial Sequence
  Description of Artificial Sequence: Synthetic oligonucleotide
  Sense strand starting at position 3511 of SEQ ID NO: 914164
cguauuaaccuuuagaaua

SEQ ID NO: 982925 - RNA, 19 nt, Artificial Sequence
  Description of Artificial Sequence: Synthetic oligonucleotide
  Antisense strand to SEQ ID NO: 982924
uauucuaaagguuaauacg

SEQ ID NO: 982926 - RNA, 19 nt, Artificial Sequence
  Description of Artificial Sequence: Synthetic oligonucleotide
  Sense strand starting at position 743 of SEQ ID NO: 914164
ugggcuuugacacagagua

SEQ ID NO: 982927 - RNA, 19 nt, Artificial Sequence
  Description of Artificial Sequence: Synthetic oligonucleotide
  Antisense strand to SEQ ID NO: 982926
uacucugugucaaagccca

SEQ ID NO: 982928 - RNA, 19 nt, Artificial Sequence
  Description of Artificial Sequence: Synthetic oligonucleotide
  Sense strand starting at position 75 of SEQ ID NO: 914164
caaagaguugugggacuga

SEQ ID NO: 982929 - RNA, 19 nt, Artificial Sequence
  Description of Artificial Sequence: Synthetic oligonucleotide
  Antisense strand to SEQ ID NO: 982928
ucagucccacaacucuuug

SEQ ID NO: 982930 - RNA, 19 nt, Artificial Sequence
  Description of Artificial Sequence: Synthetic oligonucleotide
  Sense strand starting at position 3454 of SEQ ID NO: 914164
uuuggaaauuucguaugcu

SEQ ID NO: 982931 - RNA, 19 nt, Artificial Sequence
  Description of Artificial Sequence: Synthetic oligonucleotide
  Antisense strand to SEQ ID NO: 982930
agcauacgaaauuuccaaa

SEQ ID NO: 982932 - RNA, 19 nt, Artificial Sequence
  Description of Artificial Sequence: Synthetic oligonucleotide
  Sense strand starting at position 3748 of SEQ ID NO: 914164
guaguuuggaagcaucaag

SEQ ID NO: 982933 - RNA, 19 nt, Artificial Sequence
  Description of Artificial Sequence: Synthetic oligonucleotide
  Antisense strand to SEQ ID NO: 982932
cuugaugcuuccaaacuac

SEQ ID NO: 982934 - RNA, 19 nt, Artificial Sequence
  Description of Artificial Sequence: Synthetic oligonucleotide
  Sense strand starting at position 801 of SEQ ID NO: 914164
ucaagucuacgauauuauu

SEQ ID NO: 982935 - RNA, 19 nt, Artificial Sequence
  Description of Artificial Sequence: Synthetic oligonucleotide
  Antisense strand to SEQ ID NO: 982934
aauaauaucguagacuuga

SEQ ID NO: 982936 - RNA, 19 nt, Artificial Sequence
  Description of Artificial Sequence: Synthetic oligonucleotide
  Sense strand starting at position 3606 of SEQ ID NO: 914164
gccacuauuguugaauaca

SEQ ID NO: 982937 - RNA, 19 nt, Artificial Sequence
  Description of Artificial Sequence: Synthetic oligonucleotide
  Antisense strand to SEQ ID NO: 982936
uguauucaacaauaguggc

SEQ ID NO: 982938 - RNA, 19 nt, Artificial Sequence
  Description of Artificial Sequence: Synthetic oligonucleotide
  Sense strand starting at position 3501 of SEQ ID NO: 914164
ggauauugagcguauuaac

SEQ ID NO: 982939 - RNA, 19 nt, Artificial Sequence
  Description of Artificial Sequence: Synthetic oligonucleotide
  Antisense strand to SEQ ID NO: 982938
guuaauacgcucaauaucc

SEQ ID NO: 982940 - RNA, 19 nt, Artificial Sequence
  Description of Artificial Sequence: Synthetic oligonucleotide
  Sense strand starting at position 2706 of SEQ ID NO: 914164
cuuugagagauuggucuca

SEQ ID NO: 982941 - RNA, 19 nt, Artificial Sequence
  Description of Artificial Sequence: Synthetic oligonucleotide
  Antisense strand to SEQ ID NO: 982940
ugagaccaaucucucaaag

SEQ ID NO: 982942 - RNA, 19 nt, Artificial Sequence
  Description of Artificial Sequence: Synthetic oligonucleotide
  Sense strand starting at position 738 of SEQ ID NO: 914164
ggaucugggcuuugacaca

SEQ ID NO: 982943 - RNA, 19 nt, Artificial Sequence
  Description of Artificial Sequence: Synthetic oligonucleotide
  Antisense strand to SEQ ID NO: 982942
ugugucaaagcccagaucc

SEQ ID NO: 982944 - RNA, 19 nt, Artificial Sequence
  Description of Artificial Sequence: Synthetic oligonucleotide
  Sense strand starting at position 3131 of SEQ ID NO: 914164
ggguguccuccuuaagacu

SEQ ID NO: 982945 - RNA, 19 nt, Artificial Sequence
  Description of Artificial Sequence: Synthetic oligonucleotide
  Antisense strand to SEQ ID NO: 982944
agucuuaaggaggacaccc

SEQ ID NO: 982946 - RNA, 19 nt, Artificial Sequence
  Description of Artificial Sequence: Synthetic oligonucleotide
  Sense strand starting at position 252 of SEQ ID NO: 914164
guaggagagaguugucaac

SEQ ID NO: 982947 - RNA, 19 nt, Artificial Sequence
  Description of Artificial Sequence: Synthetic oligonucleotide
  Antisense strand to SEQ ID NO: 982946
guugacaacucucuccuac

SEQ ID NO: 982948 - RNA, 19 nt, Artificial Sequence
  Description of Artificial Sequence: Synthetic oligonucleotide
  Sense strand starting at position 243 of SEQ ID NO: 914164
gaaugucucguaggagaga

SEQ ID NO: 982949 - RNA, 19 nt, Artificial Sequence
  Description of Artificial Sequence: Synthetic oligonucleotide
  Antisense strand to SEQ ID NO: 982948
ucucuccuacgagacauuc

SEQ ID NO: 982950 - RNA, 19 nt, Artificial Sequence
  Description of Artificial Sequence: Synthetic oligonucleotide
  Sense strand starting at position 3069 of SEQ ID NO: 914164
cucugacuggcuggaauua

SEQ ID NO: 982951 - RNA, 19 nt, Artificial Sequence
  Description of Artificial Sequence: Synthetic oligonucleotide
  Antisense strand to SEQ ID NO: 982950
uaauuccagccagucagag

SEQ ID NO: 982952 - RNA, 19 nt, Artificial Sequence
  Description of Artificial Sequence: Synthetic oligonucleotide
  Sense strand starting at position 785 of SEQ ID NO: 914164
agacaaguuugagcucuca

SEQ ID NO: 982953 - RNA, 19 nt, Artificial Sequence
  Description of Artificial Sequence: Synthetic oligonucleotide
  Antisense strand to SEQ ID NO: 982952
ugagagcucaaacuugucu

SEQ ID NO: 982954 - RNA, 19 nt, Artificial Sequence
  Description of Artificial Sequence: Synthetic oligonucleotide
  Sense strand starting at position 2748 of SEQ ID NO: 914164
gguucagagccguaacaag

SEQ ID NO: 982955 - RNA, 19 nt, Artificial Sequence
  Description of Artificial Sequence: Synthetic oligonucleotide
  Antisense strand to SEQ ID NO: 982954
cuuguuacggcucugaacc

SEQ ID NO: 982956 - RNA, 19 nt, Artificial Sequence
  Description of Artificial Sequence: Synthetic oligonucleotide
  Sense strand starting at position 3331 of SEQ ID NO: 914164
agacuuugcucuucuagga

SEQ ID NO: 982957 - RNA, 19 nt, Artificial Sequence
  Description of Artificial Sequence: Synthetic oligonucleotide
  Antisense strand to SEQ ID NO: 982956
uccuagaagagcaaagucu

SEQ ID NO: 982958 - RNA, 19 nt, Artificial Sequence
  Description of Artificial Sequence: Synthetic oligonucleotide
  Sense strand starting at position 95 of SEQ ID NO: 914164
caagauuucucugggagag

SEQ ID NO: 982959 - RNA, 19 nt, Artificial Sequence
  Description of Artificial Sequence: Synthetic oligonucleotide
  Antisense strand to SEQ ID NO: 982958
cucucccagagaaaucuug

SEQ ID NO: 982960 - RNA, 19 nt, Artificial Sequence
  Description of Artificial Sequence: Synthetic oligonucleotide
  Sense strand starting at position 796 of SEQ ID NO: 914164
agcucucaagucuacgaua

SEQ ID NO: 982961 - RNA, 19 nt, Artificial Sequence
  Description of Artificial Sequence: Synthetic oligonucleotide
  Antisense strand to SEQ ID NO: 982960
uaucguagacuugagagcu

SEQ ID NO: 982962 - RNA, 19 nt, Artificial Sequence
  Description of Artificial Sequence: Synthetic oligonucleotide
  Sense strand starting at position 3827 of SEQ ID NO: 914164
guuaucaguguuuacaauu

SEQ ID NO: 982963 - RNA, 19 nt, Artificial Sequence
  Description of Artificial Sequence: Synthetic oligonucleotide
  Antisense strand to SEQ ID NO: 982962
aauuguaaacacugauaac

SEQ ID NO: 982964 - RNA, 19 nt, Artificial Sequence
  Description of Artificial Sequence: Synthetic oligonucleotide
  Sense strand starting at position 3165 of SEQ ID NO: 914164
gcuaaaguucuugauuagu

SEQ ID NO: 982965 - RNA, 19 nt, Artificial Sequence
  Description of Artificial Sequence: Synthetic oligonucleotide
  Antisense strand to SEQ ID NO: 982964
acuaaucaagaacuuuagc

SEQ ID NO: 982966 - RNA, 19 nt, Artificial Sequence
  Description of Artificial Sequence: Synthetic oligonucleotide
  Sense strand starting at position 3490 of SEQ ID NO: 914164
acauuucucuuggauauug

SEQ ID NO: 982967 - RNA, 19 nt, Artificial Sequence
  Description of Artificial Sequence: Synthetic oligonucleotide
  Antisense strand to SEQ ID NO: 982966
caauauccaagagaaaugu

SEQ ID NO: 982968 - RNA, 19 nt, Artificial Sequence
  Description of Artificial Sequence: Synthetic oligonucleotide
  Sense strand starting at position 3604 of SEQ ID NO: 914164
augccacuauuguugaaua

SEQ ID NO: 982969 - RNA, 19 nt, Artificial Sequence
  Description of Artificial Sequence: Synthetic oligonucleotide
  Antisense strand to SEQ ID NO: 982968
uauucaacaauaguggcau

SEQ ID NO: 982970 - RNA, 19 nt, Artificial Sequence
  Description of Artificial Sequence: Synthetic oligonucleotide
  Sense strand starting at position 2257 of SEQ ID NO: 914164
gggaauuauucgcccucaa

SEQ ID NO: 982971 - RNA, 19 nt, Artificial Sequence
  Description of Artificial Sequence: Synthetic oligonucleotide
  Antisense strand to SEQ ID NO: 982970
uugagggcgaauaauuccc

SEQ ID NO: 982972 - RNA, 19 nt, Artificial Sequence
  Description of Artificial Sequence: Synthetic oligonucleotide
  Sense strand starting at position 3163 of SEQ ID NO: 914164
uugcuaaaguucuugauua

SEQ ID NO: 982973 - RNA, 19 nt, Artificial Sequence
  Description of Artificial Sequence: Synthetic oligonucleotide
  Antisense strand to SEQ ID NO: 982972
uaaucaagaacuuuagcaa

SEQ ID NO: 982974 - RNA, 19 nt, Artificial Sequence
  Description of Artificial Sequence: Synthetic oligonucleotide
  Sense strand starting at position 3328 of SEQ ID NO: 914164
cugagacuuugcucuucua

SEQ ID NO: 982975 - RNA, 19 nt, Artificial Sequence
  Description of Artificial Sequence: Synthetic oligonucleotide
  Antisense strand to SEQ ID NO: 982974
uagaagagcaaagucucag

SEQ ID NO: 982976 - RNA, 19 nt, Artificial Sequence
  Description of Artificial Sequence: Synthetic oligonucleotide
  Sense strand starting at position 798 of SEQ ID NO: 914164
cucucaagucuacgauauu

SEQ ID NO: 982977 - RNA, 19 nt, Artificial Sequence
  Description of Artificial Sequence: Synthetic oligonucleotide
  Antisense strand to SEQ ID NO: 982976
aauaucguagacuugagag

SEQ ID NO: 982978 - RNA, 19 nt, Artificial Sequence
  Description of Artificial Sequence: Synthetic oligonucleotide
  Sense strand starting at position 3176 of SEQ ID NO: 914164
ugauuaguuugcuccauga

SEQ ID NO: 982979 - RNA, 19 nt, Artificial Sequence
  Description of Artificial Sequence: Synthetic oligonucleotide
  Antisense strand to SEQ ID NO: 982978
ucauggagcaaacuaauca

SEQ ID NO: 982980 - RNA, 19 nt, Artificial Sequence
  Description of Artificial Sequence: Synthetic oligonucleotide
  Sense strand starting at position 2256 of SEQ ID NO: 914164
ugggaauuauucgcccuca

SEQ ID NO: 982981 - RNA, 19 nt, Artificial Sequence
  Description of Artificial Sequence: Synthetic oligonucleotide
  Antisense strand to SEQ ID NO: 982980
ugagggcgaauaauuccca

SEQ ID NO: 982982 - RNA, 19 nt, Artificial Sequence
  Description of Artificial Sequence: Synthetic oligonucleotide
  Sense strand starting at position 3845 of SEQ ID NO: 914164
uuacaaguacagugucuua

SEQ ID NO: 982983 - RNA, 19 nt, Artificial Sequence
  Description of Artificial Sequence: Synthetic oligonucleotide
  Antisense strand to SEQ ID NO: 982982
uaagacacuguacuuguaa

SEQ ID NO: 982984 - RNA, 19 nt, Artificial Sequence
  Description of Artificial Sequence: Synthetic oligonucleotide
  Sense strand starting at position 1098 of SEQ ID NO: 914164
agauuucuuucccagaguc

SEQ ID NO: 982985 - RNA, 19 nt, Artificial Sequence
  Description of Artificial Sequence: Synthetic oligonucleotide
  Antisense strand to SEQ ID NO: 982984
gacucugggaaagaaaucu

SEQ ID NO: 982986 - RNA, 19 nt, Artificial Sequence
  Description of Artificial Sequence: Synthetic oligonucleotide
  Sense strand starting at position 1271 of SEQ ID NO: 914165
aucugauuccugcaugaaa

SEQ ID NO: 982987 - RNA, 19 nt, Artificial Sequence
  Description of Artificial Sequence: Synthetic oligonucleotide
  Antisense strand to SEQ ID NO: 982986
uuucaugcaggaaucagau

SEQ ID NO: 982988 - RNA, 19 nt, Artificial Sequence
  Description of Artificial Sequence: Synthetic oligonucleotide
  Sense strand starting at position 3483 of SEQ ID NO: 914165
agccuucuggcaucguuua

SEQ ID NO: 982989 - RNA, 19 nt, Artificial Sequence
  Description of Artificial Sequence: Synthetic oligonucleotide
  Antisense strand to SEQ ID NO: 982988
uaaacgaugccagaaggcu

SEQ ID NO: 982990 - RNA, 19 nt, Artificial Sequence
  Description of Artificial Sequence: Synthetic oligonucleotide
  Sense strand starting at position 1037 of SEQ ID NO: 914165
caggaaauaggguguaauu

SEQ ID NO: 982991 - RNA, 19 nt, Artificial Sequence
  Description of Artificial Sequence: Synthetic oligonucleotide
  Antisense strand to SEQ ID NO: 982990
aauuacacccuauuuccug

SEQ ID NO: 982992 - RNA, 19 nt, Artificial Sequence
  Description of Artificial Sequence: Synthetic oligonucleotide
  Sense strand starting at position 2428 of SEQ ID NO: 914165
gcucauaaugacuggaaua

SEQ ID NO: 982993 - RNA, 19 nt, Artificial Sequence
  Description of Artificial Sequence: Synthetic oligonucleotide
  Antisense strand to SEQ ID NO: 982992
uauuccagucauuaugagc

SEQ ID NO: 982994 - RNA, 19 nt, Artificial Sequence
  Description of Artificial Sequence: Synthetic oligonucleotide
  Sense strand starting at position 2427 of SEQ ID NO: 914165
ggcucauaaugacuggaau

SEQ ID NO: 982995 - RNA, 19 nt, Artificial Sequence
  Description of Artificial Sequence: Synthetic oligonucleotide
  Antisense strand to SEQ ID NO: 982994
auuccagucauuaugagcc

SEQ ID NO: 982996 - RNA, 19 nt, Artificial Sequence
  Description of Artificial Sequence: Synthetic oligonucleotide
  Sense strand starting at position 2406 of SEQ ID NO: 914165
aucuaaaugucagucaaga

SEQ ID NO: 982997 - RNA, 19 nt, Artificial Sequence
  Description of Artificial Sequence: Synthetic oligonucleotide
  Antisense strand to SEQ ID NO: 982996
ucuugacugacauuuagau

SEQ ID NO: 982998 - RNA, 19 nt, Artificial Sequence
  Description of Artificial Sequence: Synthetic oligonucleotide
  Sense strand starting at position 2253 of SEQ ID NO: 914165
ugggaaggcucauccuaac

SEQ ID NO: 982999 - RNA, 19 nt, Artificial Sequence
  Description of Artificial Sequence: Synthetic oligonucleotide
  Antisense strand to SEQ ID NO: 982998
guuaggaugagccuuccca

SEQ ID NO: 983000 - RNA, 19 nt, Artificial Sequence
  Description of Artificial Sequence: Synthetic oligonucleotide
  Sense strand starting at position 1256 of SEQ ID NO: 914165
gaggaaauucgaggcaucu

SEQ ID NO: 983001 - RNA, 19 nt, Artificial Sequence
  Description of Artificial Sequence: Synthetic oligonucleotide
  Antisense strand to SEQ ID NO: 983000
agaugccucgaauuuccuc

SEQ ID NO: 983002 - RNA, 19 nt, Artificial Sequence
  Description of Artificial Sequence: Synthetic oligonucleotide
  Sense strand starting at position 2571 of SEQ ID NO: 914165
cccagagcccuuuaaaguc

SEQ ID NO: 983003 - RNA, 19 nt, Artificial Sequence
  Description of Artificial Sequence: Synthetic oligonucleotide
  Antisense strand to SEQ ID NO: 983002
gacuuuaaagggcucuggg

SEQ ID NO: 983004 - RNA, 19 nt, Artificial Sequence
  Description of Artificial Sequence: Synthetic oligonucleotide
  Sense strand starting at position 2157 of SEQ ID NO: 914165
uggcaaaugucuccagaag

SEQ ID NO: 983005 - RNA, 19 nt, Artificial Sequence
  Description of Artificial Sequence: Synthetic oligonucleotide
  Antisense strand to SEQ ID NO: 983004
cuucuggagacauuugcca

SEQ ID NO: 983006 - RNA, 19 nt, Artificial Sequence
  Description of Artificial Sequence: Synthetic oligonucleotide
  Sense strand starting at position 77 of SEQ ID NO: 914165
agcuauuugccuggccuaa

SEQ ID NO: 983007 - RNA, 19 nt, Artificial Sequence
  Description of Artificial Sequence: Synthetic oligonucleotide
  Antisense strand to SEQ ID NO: 983006
uuaggccaggcaaauagcu

SEQ ID NO: 983008 - RNA, 19 nt, Artificial Sequence
  Description of Artificial Sequence: Synthetic oligonucleotide
  Sense strand starting at position 1817 of SEQ ID NO: 914165
guaagucucccuuaccaug

SEQ ID NO: 983009 - RNA, 19 nt, Artificial Sequence
  Description of Artificial Sequence: Synthetic oligonucleotide
  Antisense strand to SEQ ID NO: 983008
caugguaagggagacuuac

SEQ ID NO: 983010 - RNA, 19 nt, Artificial Sequence
  Description of Artificial Sequence: Synthetic oligonucleotide
  Sense strand starting at position 2158 of SEQ ID NO: 914165
ggcaaaugucuccagaagc

SEQ ID NO: 983011 - RNA, 19 nt, Artificial Sequence
  Description of Artificial Sequence: Synthetic oligonucleotide
  Antisense strand to SEQ ID NO: 983010
gcuucuggagacauuugcc

SEQ ID NO: 983012 - RNA, 19 nt, Artificial Sequence
  Description of Artificial Sequence: Synthetic oligonucleotide
  Sense strand starting at position 222 of SEQ ID NO: 914165
guaugaggccuggagguuu

SEQ ID NO: 983013 - RNA, 19 nt, Artificial Sequence
  Description of Artificial Sequence: Synthetic oligonucleotide
  Antisense strand to SEQ ID NO: 983012
aaaccuccaggccucauac

SEQ ID NO: 983014 - RNA, 19 nt, Artificial Sequence
  Description of Artificial Sequence: Synthetic oligonucleotide
  Sense strand starting at position 3504 of SEQ ID NO: 914165
guuugucuaaugggaacca

SEQ ID NO: 983015 - RNA, 19 nt, Artificial Sequence
  Description of Artificial Sequence: Synthetic oligonucleotide
  Antisense strand to SEQ ID NO: 983014
ugguucccauuagacaaac

SEQ ID NO: 983016 - RNA, 19 nt, Artificial Sequence
  Description of Artificial Sequence: Synthetic oligonucleotide
  Sense strand starting at position 439 of SEQ ID NO: 914165
gggagauacugucugagcu

SEQ ID NO: 983017 - RNA, 19 nt, Artificial Sequence
  Description of Artificial Sequence: Synthetic oligonucleotide
  Antisense strand to SEQ ID NO: 983016
agcucagacaguaucuccc

SEQ ID NO: 983018 - RNA, 19 nt, Artificial Sequence
  Description of Artificial Sequence: Synthetic oligonucleotide
  Sense strand starting at position 926 of SEQ ID NO: 914165
guagcaucauggccaagaa

SEQ ID NO: 983019 - RNA, 19 nt, Artificial Sequence
  Description of Artificial Sequence: Synthetic oligonucleotide
  Antisense strand to SEQ ID NO: 983018
uucuuggccaugaugcuac

SEQ ID NO: 983020 - RNA, 19 nt, Artificial Sequence
  Description of Artificial Sequence: Synthetic oligonucleotide
  Sense strand starting at position 1922 of SEQ ID NO: 914165
ccaagucaucuuugcagag

SEQ ID NO: 983021 - RNA, 19 nt, Artificial Sequence
  Description of Artificial Sequence: Synthetic oligonucleotide
  Antisense strand to SEQ ID NO: 983020
cucugcaaagaugacuugg

SEQ ID NO: 983022 - RNA, 19 nt, Artificial Sequence
  Description of Artificial Sequence: Synthetic oligonucleotide
  Sense strand starting at position 3430 of SEQ ID NO: 914165
ggagauguguuccuaaugu

SEQ ID NO: 983023 - RNA, 19 nt, Artificial Sequence
  Description of Artificial Sequence: Synthetic oligonucleotide
  Antisense strand to SEQ ID NO: 983022
acauuaggaacacaucucc

SEQ ID NO: 983024 - RNA, 19 nt, Artificial Sequence
  Description of Artificial Sequence: Synthetic oligonucleotide
  Sense strand starting at position 1815 of SEQ ID NO: 914165
ugguaagucucccuuacca

SEQ ID NO: 983025 - RNA, 19 nt, Artificial Sequence
  Description of Artificial Sequence: Synthetic oligonucleotide
  Antisense strand to SEQ ID NO: 983024
ugguaagggagacuuacca

SEQ ID NO: 983026 - RNA, 19 nt, Artificial Sequence
  Description of Artificial Sequence: Synthetic oligonucleotide
  Sense strand starting at position 3579 of SEQ ID NO: 914165
uuauguuagcuaggcaaag

SEQ ID NO: 983027 - RNA, 19 nt, Artificial Sequence
  Description of Artificial Sequence: Synthetic oligonucleotide
  Antisense strand to SEQ ID NO: 983026
cuuugccuagcuaacauaa

SEQ ID NO: 983028 - RNA, 19 nt, Artificial Sequence
  Description of Artificial Sequence: Synthetic oligonucleotide
  Sense strand starting at position 364 of SEQ ID NO: 914165
ugcugagugcccugaagaa

SEQ ID NO: 983029 - RNA, 19 nt, Artificial Sequence
  Description of Artificial Sequence: Synthetic oligonucleotide
  Antisense strand to SEQ ID NO: 983028
uucuucagggcacucagca

SEQ ID NO: 983030 - RNA, 19 nt, Artificial Sequence
  Description of Artificial Sequence: Synthetic oligonucleotide
  Sense strand starting at position 3497 of SEQ ID NO: 914165
guuuaauguuugucuaaug

SEQ ID NO: 983031 - RNA, 19 nt, Artificial Sequence
  Description of Artificial Sequence: Synthetic oligonucleotide
  Antisense strand to SEQ ID NO: 983030
cauuagacaaacauuaaac

SEQ ID NO: 983032 - RNA, 19 nt, Artificial Sequence
  Description of Artificial Sequence: Synthetic oligonucleotide
  Sense strand starting at position 3444 of SEQ ID NO: 914165
aauguugccuuuguuagga

SEQ ID NO: 983033 - RNA, 19 nt, Artificial Sequence
  Description of Artificial Sequence: Synthetic oligonucleotide
  Antisense strand to SEQ ID NO: 983032
uccuaacaaaggcaacauu

SEQ ID NO: 983034 - RNA, 19 nt, Artificial Sequence
  Description of Artificial Sequence: Synthetic oligonucleotide
  Sense strand starting at position 2171 of SEQ ID NO: 914165
agaagcagagcuuguaguu

SEQ ID NO: 983035 - RNA, 19 nt, Artificial Sequence
  Description of Artificial Sequence: Synthetic oligonucleotide
  Antisense strand to SEQ ID NO: 983034
aacuacaagcucugcuucu

SEQ ID NO: 983036 - RNA, 19 nt, Artificial Sequence
  Description of Artificial Sequence: Synthetic oligonucleotide
  Sense strand starting at position 3580 of SEQ ID NO: 914165
uauguuagcuaggcaaagu

SEQ ID NO: 983037 - RNA, 19 nt, Artificial Sequence
  Description of Artificial Sequence: Synthetic oligonucleotide
  Antisense strand to SEQ ID NO: 983036
acuuugccuagcuaacaua

SEQ ID NO: 983038 - RNA, 19 nt, Artificial Sequence
  Description of Artificial Sequence: Synthetic oligonucleotide
  Sense strand starting at position 3488 of SEQ ID NO: 914165
ucuggcaucguuuaauguu

SEQ ID NO: 983039 - RNA, 19 nt, Artificial Sequence
  Description of Artificial Sequence: Synthetic oligonucleotide
  Antisense strand to SEQ ID NO: 983038
aacauuaaacgaugccaga

SEQ ID NO: 983040 - RNA, 19 nt, Artificial Sequence
  Description of Artificial Sequence: Synthetic oligonucleotide
  Sense strand starting at position 1714 of SEQ ID NO: 914165
auugcauuguguccuacau

SEQ ID NO: 983041 - RNA, 19 nt, Artificial Sequence
  Description of Artificial Sequence: Synthetic oligonucleotide
  Antisense strand to SEQ ID NO: 983040
auguaggacacaaugcaau

SEQ ID NO: 983042 - RNA, 19 nt, Artificial Sequence
  Description of Artificial Sequence: Synthetic oligonucleotide
  Sense strand starting at position 915 of SEQ ID NO: 914165
guguguuuaauguagcauc

SEQ ID NO: 983043 - RNA, 19 nt, Artificial Sequence
  Description of Artificial Sequence: Synthetic oligonucleotide
  Antisense strand to SEQ ID NO: 983042
gaugcuacauuaaacacac

SEQ ID NO: 983044 - RNA, 19 nt, Artificial Sequence
  Description of Artificial Sequence: Synthetic oligonucleotide
  Sense strand starting at position 907 of SEQ ID NO: 914165
ccuguuagguguguuuaau

SEQ ID NO: 983045 - RNA, 19 nt, Artificial Sequence
  Description of Artificial Sequence: Synthetic oligonucleotide
  Antisense strand to SEQ ID NO: 983044
auuaaacacaccuaacagg

SEQ ID NO: 983046 - RNA, 19 nt, Artificial Sequence
  Description of Artificial Sequence: Synthetic oligonucleotide
  Sense strand starting at position 906 of SEQ ID NO: 914165
cccuguuagguguguuuaa

SEQ ID NO: 983047 - RNA, 19 nt, Artificial Sequence
  Description of Artificial Sequence: Synthetic oligonucleotide
  Antisense strand to SEQ ID NO: 983046
uuaaacacaccuaacaggg

SEQ ID NO: 983048 - RNA, 19 nt, Artificial Sequence
  Description of Artificial Sequence: Synthetic oligonucleotide
  Sense strand starting at position 3494 of SEQ ID NO: 914165
aucguuuaauguuugucua

SEQ ID NO: 983049 - RNA, 19 nt, Artificial Sequence
  Description of Artificial Sequence: Synthetic oligonucleotide
  Antisense strand to SEQ ID NO: 983048
uagacaaacauuaaacgau

SEQ ID NO: 983050 - RNA, 19 nt, Artificial Sequence
  Description of Artificial Sequence: Synthetic oligonucleotide
  Sense strand starting at position 3496 of SEQ ID NO: 914165
cguuuaauguuugucuaau

SEQ ID NO: 983051 - RNA, 19 nt, Artificial Sequence
  Description of Artificial Sequence: Synthetic oligonucleotide
  Antisense strand to SEQ ID NO: 983050
auuagacaaacauuaaacg

SEQ ID NO: 983052 - RNA, 19 nt, Artificial Sequence
  Description of Artificial Sequence: Synthetic oligonucleotide
  Sense strand starting at position 3495 of SEQ ID NO: 914165
ucguuuaauguuugucuaa

SEQ ID NO: 983053 - RNA, 19 nt, Artificial Sequence
  Description of Artificial Sequence: Synthetic oligonucleotide
  Antisense strand to SEQ ID NO: 983052
uuagacaaacauuaaacga

SEQ ID NO: 983054 - RNA, 19 nt, Artificial Sequence
  Description of Artificial Sequence: Synthetic oligonucleotide
  Sense strand starting at position 1027 of SEQ ID NO: 914165
gaccuacagucaggaaaua

SEQ ID NO: 983055 - RNA, 19 nt, Artificial Sequence
  Description of Artificial Sequence: Synthetic oligonucleotide
  Antisense strand to SEQ ID NO: 983054
uauuuccugacuguagguc

SEQ ID NO: 983056 - RNA, 19 nt, Artificial Sequence
  Description of Artificial Sequence: Synthetic oligonucleotide
  Sense strand starting at position 3316 of SEQ ID NO: 914165
cugcaucucuaggaagaca

SEQ ID NO: 983057 - RNA, 19 nt, Artificial Sequence
  Description of Artificial Sequence: Synthetic oligonucleotide
  Antisense strand to SEQ ID NO: 983056
ugucuuccuagagaugcag

SEQ ID NO: 983058 - RNA, 19 nt, Artificial Sequence
  Description of Artificial Sequence: Synthetic oligonucleotide
  Sense strand starting at position 113 of SEQ ID NO: 914165
cuggaagucugccagaaga

SEQ ID NO: 983059 - RNA, 19 nt, Artificial Sequence
  Description of Artificial Sequence: Synthetic oligonucleotide
  Antisense strand to SEQ ID NO: 983058
ucuucuggcagacuuccag

SEQ ID NO: 983060 - RNA, 19 nt, Artificial Sequence
  Description of Artificial Sequence: Synthetic oligonucleotide
  Sense strand starting at position 775 of SEQ ID NO: 914165
cgaugcuguugcucuuaua

SEQ ID NO: 983061 - RNA, 19 nt, Artificial Sequence
  Description of Artificial Sequence: Synthetic oligonucleotide
  Antisense strand to SEQ ID NO: 983060
uauaagagcaacagcaucg

SEQ ID NO: 983062 - RNA, 19 nt, Artificial Sequence
  Description of Artificial Sequence: Synthetic oligonucleotide
  Sense strand starting at position 2404 of SEQ ID NO: 914165
ugaucuaaaugucagucaa

SEQ ID NO: 983063 - RNA, 19 nt, Artificial Sequence
  Description of Artificial Sequence: Synthetic oligonucleotide
  Antisense strand to SEQ ID NO: 983062
uugacugacauuuagauca

SEQ ID NO: 983064 - RNA, 19 nt, Artificial Sequence
  Description of Artificial Sequence: Synthetic oligonucleotide
  Sense strand starting at position 3484 of SEQ ID NO: 914165
gccuucuggcaucguuuaa

SEQ ID NO: 983065 - RNA, 19 nt, Artificial Sequence
  Description of Artificial Sequence: Synthetic oligonucleotide
  Antisense strand to SEQ ID NO: 983064
uuaaacgaugccagaaggc

SEQ ID NO: 983066 - RNA, 19 nt, Artificial Sequence
  Description of Artificial Sequence: Synthetic oligonucleotide
  Sense strand starting at position 3531 of SEQ ID NO: 914166
gacagagucaggugagaac

SEQ ID NO: 983067 - RNA, 19 nt, Artificial Sequence
  Description of Artificial Sequence: Synthetic oligonucleotide
  Antisense strand to SEQ ID NO: 983066
guucucaccugacucuguc

SEQ ID NO: 983068 - RNA, 19 nt, Artificial Sequence
  Description of Artificial Sequence: Synthetic oligonucleotide
  Sense strand starting at position 3401 of SEQ ID NO: 914166
ugcggaguugggaguuuau

SEQ ID NO: 983069 - RNA, 19 nt, Artificial Sequence
  Description of Artificial Sequence: Synthetic oligonucleotide
  Antisense strand to SEQ ID NO: 983068
auaaacucccaacuccgca

SEQ ID NO: 983070 - RNA, 19 nt, Artificial Sequence
  Description of Artificial Sequence: Synthetic oligonucleotide
  Sense strand starting at position 594 of SEQ ID NO: 914166
uuaagauuucucugcaguc

SEQ ID NO: 983071 - RNA, 19 nt, Artificial Sequence
  Description of Artificial Sequence: Synthetic oligonucleotide
  Antisense strand to SEQ ID NO: 983070
gacugcagagaaaucuuaa

SEQ ID NO: 983072 - RNA, 19 nt, Artificial Sequence
  Description of Artificial Sequence: Synthetic oligonucleotide
  Sense strand starting at position 1541 of SEQ ID NO: 914166
gaaagagggucucucuaua

SEQ ID NO: 983073 - RNA, 19 nt, Artificial Sequence
  Description of Artificial Sequence: Synthetic oligonucleotide
  Antisense strand to SEQ ID NO: 983072
uauagagagacccucuuuc

SEQ ID NO: 983074 - RNA, 19 nt, Artificial Sequence
  Description of Artificial Sequence: Synthetic oligonucleotide
  Sense strand starting at position 2727 of SEQ ID NO: 914166
accagaggucuggagguuu

SEQ ID NO: 983075 - RNA, 19 nt, Artificial Sequence
  Description of Artificial Sequence: Synthetic oligonucleotide
  Antisense strand to SEQ ID NO: 983074
aaaccuccagaccucuggu

SEQ ID NO: 983076 - RNA, 19 nt, Artificial Sequence
  Description of Artificial Sequence: Synthetic oligonucleotide
  Sense strand starting at position 2874 of SEQ ID NO: 914166
ggccucaugguuuagaaag

SEQ ID NO: 983077 - RNA, 19 nt, Artificial Sequence
  Description of Artificial Sequence: Synthetic oligonucleotide
  Antisense strand to SEQ ID NO: 983076
cuuucuaaaccaugaggcc

SEQ ID NO: 983078 - RNA, 19 nt, Artificial Sequence
  Description of Artificial Sequence: Synthetic oligonucleotide
  Sense strand starting at position 443 of SEQ ID NO: 914166
uuguuuaggguuuauagga

SEQ ID NO: 983079 - RNA, 19 nt, Artificial Sequence
  Description of Artificial Sequence: Synthetic oligonucleotide
  Antisense strand to SEQ ID NO: 983078
uccuauaaacccuaaacaa

SEQ ID NO: 983080 - RNA, 19 nt, Artificial Sequence
  Description of Artificial Sequence: Synthetic oligonucleotide
  Sense strand starting at position 2709 of SEQ ID NO: 914166
gacagcaggucaucauaca

SEQ ID NO: 983081 - RNA, 19 nt, Artificial Sequence
  Description of Artificial Sequence: Synthetic oligonucleotide
  Antisense strand to SEQ ID NO: 983080
uguaugaugaccugcuguc

SEQ ID NO: 983082 - RNA, 19 nt, Artificial Sequence
  Description of Artificial Sequence: Synthetic oligonucleotide
  Sense strand starting at position 3715 of SEQ ID NO: 914166
uuuaaagcccaugagcauu

SEQ ID NO: 983083 - RNA, 19 nt, Artificial Sequence
  Description of Artificial Sequence: Synthetic oligonucleotide
  Antisense strand to SEQ ID NO: 983082
aaugcucaugggcuuuaaa

SEQ ID NO: 983084 - RNA, 19 nt, Artificial Sequence
  Description of Artificial Sequence: Synthetic oligonucleotide
  Sense strand starting at position 3408 of SEQ ID NO: 914166
uugggaguuuauuccauau

SEQ ID NO: 983085 - RNA, 19 nt, Artificial Sequence
  Description of Artificial Sequence: Synthetic oligonucleotide
  Antisense strand to SEQ ID NO: 983084
auauggaauaaacucccaa

SEQ ID NO: 983086 - RNA, 19 nt, Artificial Sequence
  Description of Artificial Sequence: Synthetic oligonucleotide
  Sense strand starting at position 1554 of SEQ ID NO: 914166
ucuauaccaacgugggaau

SEQ ID NO: 983087 - RNA, 19 nt, Artificial Sequence
  Description of Artificial Sequence: Synthetic oligonucleotide
  Antisense strand to SEQ ID NO: 983086
auucccacguugguauaga

SEQ ID NO: 983088 - RNA, 19 nt, Artificial Sequence
  Description of Artificial Sequence: Synthetic oligonucleotide
  Sense strand starting at position 2872 of SEQ ID NO: 914166
agggccucaugguuuagaa

SEQ ID NO: 983089 - RNA, 19 nt, Artificial Sequence
  Description of Artificial Sequence: Synthetic oligonucleotide
  Antisense strand to SEQ ID NO: 983088
uucuaaaccaugaggcccu

SEQ ID NO: 983090 - RNA, 19 nt, Artificial Sequence
  Description of Artificial Sequence: Synthetic oligonucleotide
  Sense strand starting at position 2795 of SEQ ID NO: 914166
gaggacuuacuguguacca

SEQ ID NO: 983091 - RNA, 19 nt, Artificial Sequence
  Description of Artificial Sequence: Synthetic oligonucleotide
  Antisense strand to SEQ ID NO: 983090
ugguacacaguaaguccuc

SEQ ID NO: 983092 - RNA, 19 nt, Artificial Sequence
  Description of Artificial Sequence: Synthetic oligonucleotide
  Sense strand starting at position 1443 of SEQ ID NO: 914166
aacugucuccgaggacuga

SEQ ID NO: 983093 - RNA, 19 nt, Artificial Sequence
  Description of Artificial Sequence: Synthetic oligonucleotide
  Antisense strand to SEQ ID NO: 983092
ucaguccucggagacaguu

SEQ ID NO: 983094 - RNA, 19 nt, Artificial Sequence
  Description of Artificial Sequence: Synthetic oligonucleotide
  Sense strand starting at position 741 of SEQ ID NO: 914166
cgaggaugcuguaaagaga

SEQ ID NO: 983095 - RNA, 19 nt, Artificial Sequence
  Description of Artificial Sequence: Synthetic oligonucleotide
  Antisense strand to SEQ ID NO: 983094
ucucuuuacagcauccucg

SEQ ID NO: 983096 - RNA, 19 nt, Artificial Sequence
  Description of Artificial Sequence: Synthetic oligonucleotide
  Sense strand starting at position 189 of SEQ ID NO: 914166
cgguugugaggguauugaa

SEQ ID NO: 983097 - RNA, 19 nt, Artificial Sequence
  Description of Artificial Sequence: Synthetic oligonucleotide
  Antisense strand to SEQ ID NO: 983096
uucaauacccucacaaccg

SEQ ID NO: 983098 - RNA, 19 nt, Artificial Sequence
  Description of Artificial Sequence: Synthetic oligonucleotide
  Sense strand starting at position 3664 of SEQ ID NO: 914166
ugaauuccugcaggugaag

SEQ ID NO: 983099 - RNA, 19 nt, Artificial Sequence
  Description of Artificial Sequence: Synthetic oligonucleotide
  Antisense strand to SEQ ID NO: 983098
cuucaccugcaggaauuca

SEQ ID NO: 983100 - RNA, 19 nt, Artificial Sequence
  Description of Artificial Sequence: Synthetic oligonucleotide
  Sense strand starting at position 2338 of SEQ ID NO: 914166
acucuccuucuguaaaugu

SEQ ID NO: 983101 - RNA, 19 nt, Artificial Sequence
  Description of Artificial Sequence: Synthetic oligonucleotide
  Antisense strand to SEQ ID NO: 983100
acauuuacagaaggagagu

SEQ ID NO: 983102 - RNA, 19 nt, Artificial Sequence
  Description of Artificial Sequence: Synthetic oligonucleotide
  Sense strand starting at position 1326 of SEQ ID NO: 914166
agguuuguggcacagguaa

SEQ ID NO: 983103 - RNA, 19 nt, Artificial Sequence
  Description of Artificial Sequence: Synthetic oligonucleotide
  Antisense strand to SEQ ID NO: 983102
uuaccugugccacaaaccu

SEQ ID NO: 983104 - RNA, 19 nt, Artificial Sequence
  Description of Artificial Sequence: Synthetic oligonucleotide
  Sense strand starting at position 2259 of SEQ ID NO: 914166
gaagcagugucuuugaaga

SEQ ID NO: 983105 - RNA, 19 nt, Artificial Sequence
  Description of Artificial Sequence: Synthetic oligonucleotide
  Antisense strand to SEQ ID NO: 983104
ucuucaaagacacugcuuc

SEQ ID NO: 983106 - RNA, 19 nt, Artificial Sequence
  Description of Artificial Sequence: Synthetic oligonucleotide
  Sense strand starting at position 630 of SEQ ID NO: 914166
ggcaccaucuaguuauuaa

SEQ ID NO: 983107 - RNA, 19 nt, Artificial Sequence
  Description of Artificial Sequence: Synthetic oligonucleotide
  Antisense strand to SEQ ID NO: 983106
uuaauaacuagauggugcc

SEQ ID NO: 983108 - RNA, 19 nt, Artificial Sequence
  Description of Artificial Sequence: Synthetic oligonucleotide
  Sense strand starting at position 1998 of SEQ ID NO: 914166
gguggaucguaauuccaga

SEQ ID NO: 983109 - RNA, 19 nt, Artificial Sequence
  Description of Artificial Sequence: Synthetic oligonucleotide
  Antisense strand to SEQ ID NO: 983108
ucuggaauuacgauccacc

SEQ ID NO: 983110 - RNA, 19 nt, Artificial Sequence
  Description of Artificial Sequence: Synthetic oligonucleotide
  Sense strand starting at position 3233 of SEQ ID NO: 914166
aguccugucuacucaagac

SEQ ID NO: 983111 - RNA, 19 nt, Artificial Sequence
  Description of Artificial Sequence: Synthetic oligonucleotide
  Antisense strand to SEQ ID NO: 983110
gucuugaguagacaggacu

SEQ ID NO: 983112 - RNA, 19 nt, Artificial Sequence
  Description of Artificial Sequence: Synthetic oligonucleotide
  Sense strand starting at position 564 of SEQ ID NO: 914166
gccauauucuuggugaaac

SEQ ID NO: 983113 - RNA, 19 nt, Artificial Sequence
  Description of Artificial Sequence: Synthetic oligonucleotide
  Antisense strand to SEQ ID NO: 983112
guuucaccaagaauauggc

SEQ ID NO: 983114 - RNA, 19 nt, Artificial Sequence
  Description of Artificial Sequence: Synthetic oligonucleotide
  Sense strand starting at position 1102 of SEQ ID NO: 914166
guaggaguuagccauugua

SEQ ID NO: 983115 - RNA, 19 nt, Artificial Sequence
  Description of Artificial Sequence: Synthetic oligonucleotide
  Antisense strand to SEQ ID NO: 983114
uacaauggcuaacuccuac

SEQ ID NO: 983116 - RNA, 19 nt, Artificial Sequence
  Description of Artificial Sequence: Synthetic oligonucleotide
  Sense strand starting at position 3230 of SEQ ID NO: 914166
agcaguccugucuacucaa

SEQ ID NO: 983117 - RNA, 19 nt, Artificial Sequence
  Description of Artificial Sequence: Synthetic oligonucleotide
  Antisense strand to SEQ ID NO: 983116
uugaguagacaggacugcu

SEQ ID NO: 983118 - RNA, 19 nt, Artificial Sequence
  Description of Artificial Sequence: Synthetic oligonucleotide
  Sense strand starting at position 563 of SEQ ID NO: 914166
ugccauauucuuggugaaa

SEQ ID NO: 983119 - RNA, 19 nt, Artificial Sequence
  Description of Artificial Sequence: Synthetic oligonucleotide
  Antisense strand to SEQ ID NO: 983118
uuucaccaagaauauggca

SEQ ID NO: 983120 - RNA, 19 nt, Artificial Sequence
  Description of Artificial Sequence: Synthetic oligonucleotide
  Sense strand starting at position 1575 of SEQ ID NO: 914166
gauugugccucccugagaa

SEQ ID NO: 983121 - RNA, 19 nt, Artificial Sequence
  Description of Artificial Sequence: Synthetic oligonucleotide
  Antisense strand to SEQ ID NO: 983120
uucucagggaggcacaauc

SEQ ID NO: 983122 - RNA, 19 nt, Artificial Sequence
  Description of Artificial Sequence: Synthetic oligonucleotide
  Sense strand starting at position 2573 of SEQ ID NO: 914166
acgaaaguuuaagauuucu

SEQ ID NO: 983123 - RNA, 19 nt, Artificial Sequence
  Description of Artificial Sequence: Synthetic oligonucleotide
  Antisense strand to SEQ ID NO: 983122
agaaaucuuaaacuuucgu

SEQ ID NO: 983124 - RNA, 19 nt, Artificial Sequence
  Description of Artificial Sequence: Synthetic oligonucleotide
  Sense strand starting at position 1439 of SEQ ID NO: 914166
uguaaacugucuccgagga

SEQ ID NO: 983125 - RNA, 19 nt, Artificial Sequence
  Description of Artificial Sequence: Synthetic oligonucleotide
  Antisense strand to SEQ ID NO: 983124
uccucggagacaguuuaca

SEQ ID NO: 983126 - RNA, 19 nt, Artificial Sequence
  Description of Artificial Sequence: Synthetic oligonucleotide
  Sense strand starting at position 552 of SEQ ID NO: 914166
uuggacucuucugccauau

SEQ ID NO: 983127 - RNA, 19 nt, Artificial Sequence
  Description of Artificial Sequence: Synthetic oligonucleotide
  Antisense strand to SEQ ID NO: 983126
auauggcagaagaguccaa

SEQ ID NO: 983128 - RNA, 19 nt, Artificial Sequence
  Description of Artificial Sequence: Synthetic oligonucleotide
  Sense strand starting at position 3714 of SEQ ID NO: 914166
cuuuaaagcccaugagcau

SEQ ID NO: 983129 - RNA, 19 nt, Artificial Sequence
  Description of Artificial Sequence: Synthetic oligonucleotide
  Antisense strand to SEQ ID NO: 983128
augcucaugggcuuuaaag

SEQ ID NO: 983130 - RNA, 19 nt, Artificial Sequence
  Description of Artificial Sequence: Synthetic oligonucleotide
  Sense strand starting at position 3723 of SEQ ID NO: 914166
ccaugagcauuuggaggaa

SEQ ID NO: 983131 - RNA, 19 nt, Artificial Sequence
  Description of Artificial Sequence: Synthetic oligonucleotide
  Antisense strand to SEQ ID NO: 983130
uuccuccaaaugcucaugg

SEQ ID NO: 983132 - RNA, 19 nt, Artificial Sequence
  Description of Artificial Sequence: Synthetic oligonucleotide
  Sense strand starting at position 3662 of SEQ ID NO: 914166
cgugaauuccugcagguga

SEQ ID NO: 983133 - RNA, 19 nt, Artificial Sequence
  Description of Artificial Sequence: Synthetic oligonucleotide
  Antisense strand to SEQ ID NO: 983132
ucaccugcaggaauucacg

SEQ ID NO: 983134 - RNA, 19 nt, Artificial Sequence
  Description of Artificial Sequence: Synthetic oligonucleotide
  Sense strand starting at position 2552 of SEQ ID NO: 914166
ccguacccucagugaaaca

SEQ ID NO: 983135 - RNA, 19 nt, Artificial Sequence
  Description of Artificial Sequence: Synthetic oligonucleotide
  Antisense strand to SEQ ID NO: 983134
uguuucacugaggguacgg

SEQ ID NO: 983136 - RNA, 19 nt, Artificial Sequence
  Description of Artificial Sequence: Synthetic oligonucleotide
  Sense strand starting at position 2782 of SEQ ID NO: 914166
uccuauauuuauugaggac

SEQ ID NO: 983137 - RNA, 19 nt, Artificial Sequence
  Description of Artificial Sequence: Synthetic oligonucleotide
  Antisense strand to SEQ ID NO: 983136
guccucaauaaauauagga

SEQ ID NO: 983138 - RNA, 19 nt, Artificial Sequence
  Description of Artificial Sequence: Synthetic oligonucleotide
  Sense strand starting at position 325 of SEQ ID NO: 914166
auguaaggguucuuugcaa

SEQ ID NO: 983139 - RNA, 19 nt, Artificial Sequence
  Description of Artificial Sequence: Synthetic oligonucleotide
  Antisense strand to SEQ ID NO: 983138
uugcaaagaacccuuacau

SEQ ID NO: 983140 - RNA, 19 nt, Artificial Sequence
  Description of Artificial Sequence: Synthetic oligonucleotide
  Sense strand starting at position 1023 of SEQ ID NO: 914166
guggcuaugcuugggaaag

SEQ ID NO: 983141 - RNA, 19 nt, Artificial Sequence
  Description of Artificial Sequence: Synthetic oligonucleotide
  Antisense strand to SEQ ID NO: 983140
cuuucccaagcauagccac

SEQ ID NO: 983142 - RNA, 19 nt, Artificial Sequence
  Description of Artificial Sequence: Synthetic oligonucleotide
  Sense strand starting at position 1022 of SEQ ID NO: 914166
gguggcuaugcuugggaaa

SEQ ID NO: 983143 - RNA, 19 nt, Artificial Sequence
  Description of Artificial Sequence: Synthetic oligonucleotide
  Antisense strand to SEQ ID NO: 983142
uuucccaagcauagccacc

SEQ ID NO: 983144 - RNA, 19 nt, Artificial Sequence
  Description of Artificial Sequence: Synthetic oligonucleotide
  Sense strand starting at position 2285 of SEQ ID NO: 914166
ugcugaucuuaguucuaac

SEQ ID NO: 983145 - RNA, 19 nt, Artificial Sequence
  Description of Artificial Sequence: Synthetic oligonucleotide
  Antisense strand to SEQ ID NO: 983144
guuagaacuaagaucagca

SEQ ID NO: 983146 - RNA, 19 nt, Artificial Sequence
  Description of Artificial Sequence: Synthetic oligonucleotide
  Sense strand starting at position 2850 of SEQ ID NO: 914167
acaggugagguuugaagga

SEQ ID NO: 983147 - RNA, 19 nt, Artificial Sequence
  Description of Artificial Sequence: Synthetic oligonucleotide
  Antisense strand to SEQ ID NO: 983146
uccuucaaaccucaccugu

SEQ ID NO: 983148 - RNA, 19 nt, Artificial Sequence
  Description of Artificial Sequence: Synthetic oligonucleotide
  Sense strand starting at position 2525 of SEQ ID NO: 914167
ugauccugcguuguuguaa

SEQ ID NO: 983149 - RNA, 19 nt, Artificial Sequence
  Description of Artificial Sequence: Synthetic oligonucleotide
  Antisense strand to SEQ ID NO: 983148
uuacaacaacgcaggauca

SEQ ID NO: 983150 - RNA, 19 nt, Artificial Sequence
  Description of Artificial Sequence: Synthetic oligonucleotide
  Sense strand starting at position 1988 of SEQ ID NO: 914167
gccggagugaguucgccaa

SEQ ID NO: 983151 - RNA, 19 nt, Artificial Sequence
  Description of Artificial Sequence: Synthetic oligonucleotide
  Antisense strand to SEQ ID NO: 983150
uuggcgaacucacuccggc

SEQ ID NO: 983152 - RNA, 19 nt, Artificial Sequence
  Description of Artificial Sequence: Synthetic oligonucleotide
  Sense strand starting at position 730 of SEQ ID NO: 914167
aaaggaaacuccgcaggau

SEQ ID NO: 983153 - RNA, 19 nt, Artificial Sequence
  Description of Artificial Sequence: Synthetic oligonucleotide
  Antisense strand to SEQ ID NO: 983152
auccugcggaguuuccuuu

SEQ ID NO: 983154 - RNA, 19 nt, Artificial Sequence
  Description of Artificial Sequence: Synthetic oligonucleotide
  Sense strand starting at position 2421 of SEQ ID NO: 914167
auaugaagcuggguauaga

SEQ ID NO: 983155 - RNA, 19 nt, Artificial Sequence
  Description of Artificial Sequence: Synthetic oligonucleotide
  Antisense strand to SEQ ID NO: 983154
ucuauacccagcuucauau

SEQ ID NO: 983156 - RNA, 19 nt, Artificial Sequence
  Description of Artificial Sequence: Synthetic oligonucleotide
  Sense strand starting at position 257 of SEQ ID NO: 914167
aggaaucuuuggcuaugga

SEQ ID NO: 983157 - RNA, 19 nt, Artificial Sequence
  Description of Artificial Sequence: Synthetic oligonucleotide
  Antisense strand to SEQ ID NO: 983156
uccauagccaaagauuccu

SEQ ID NO: 983158 - RNA, 19 nt, Artificial Sequence
  Description of Artificial Sequence: Synthetic oligonucleotide
  Sense strand starting at position 133 of SEQ ID NO: 914167
gaucaaaugguugaguguu

SEQ ID NO: 983159 - RNA, 19 nt, Artificial Sequence
  Description of Artificial Sequence: Synthetic oligonucleotide
  Antisense strand to SEQ ID NO: 983158
aacacucaaccauuugauc

SEQ ID NO: 983160 - RNA, 19 nt, Artificial Sequence
  Description of Artificial Sequence: Synthetic oligonucleotide
  Sense strand starting at position 2472 of SEQ ID NO: 914167
uaugaucuccggcagaacu

SEQ ID NO: 983161 - RNA, 19 nt, Artificial Sequence
  Description of Artificial Sequence: Synthetic oligonucleotide
  Antisense strand to SEQ ID NO: 983160
aguucugccggagaucaua

SEQ ID NO: 983162 - RNA, 19 nt, Artificial Sequence
  Description of Artificial Sequence: Synthetic oligonucleotide
  Sense strand starting at position 2410 of SEQ ID NO: 914167
ggcuuacagcgauaugaag

SEQ ID NO: 983163 - RNA, 19 nt, Artificial Sequence
  Description of Artificial Sequence: Synthetic oligonucleotide
  Antisense strand to SEQ ID NO: 983162
cuucauaucgcuguaagcc

SEQ ID NO: 983164 - RNA, 19 nt, Artificial Sequence
  Description of Artificial Sequence: Synthetic oligonucleotide
  Sense strand starting at position 3688 of SEQ ID NO: 914167
accaaagauguaugccuaa

SEQ ID NO: 983165 - RNA, 19 nt, Artificial Sequence
  Description of Artificial Sequence: Synthetic oligonucleotide
  Antisense strand to SEQ ID NO: 983164
uuaggcauacaucuuuggu

SEQ ID NO: 983166 - RNA, 19 nt, Artificial Sequence
  Description of Artificial Sequence: Synthetic oligonucleotide
  Sense strand starting at position 330 of SEQ ID NO: 914167
gcgucaucucguccacuuu

SEQ ID NO: 983167 - RNA, 19 nt, Artificial Sequence
  Description of Artificial Sequence: Synthetic oligonucleotide
  Antisense strand to SEQ ID NO: 983166
aaaguggacgagaugacgc

SEQ ID NO: 983168 - RNA, 19 nt, Artificial Sequence
  Description of Artificial Sequence: Synthetic oligonucleotide
  Sense strand starting at position 229 of SEQ ID NO: 914167
ggccgugggaaucacuaau

SEQ ID NO: 983169 - RNA, 19 nt, Artificial Sequence
  Description of Artificial Sequence: Synthetic oligonucleotide
  Antisense strand to SEQ ID NO: 983168
auuagugauucccacggcc

SEQ ID NO: 983170 - RNA, 19 nt, Artificial Sequence
  Description of Artificial Sequence: Synthetic oligonucleotide
  Sense strand starting at position 707 of SEQ ID NO: 914167
cgagaaugucagugaccaa

SEQ ID NO: 983171 - RNA, 19 nt, Artificial Sequence
  Description of Artificial Sequence: Synthetic oligonucleotide
  Antisense strand to SEQ ID NO: 983170
uuggucacugacauucucg

SEQ ID NO: 983172 - RNA, 19 nt, Artificial Sequence
  Description of Artificial Sequence: Synthetic oligonucleotide
  Sense strand starting at position 132 of SEQ ID NO: 914167
ggaucaaaugguugagugu

SEQ ID NO: 983173 - RNA, 19 nt, Artificial Sequence
  Description of Artificial Sequence: Synthetic oligonucleotide
  Antisense strand to SEQ ID NO: 983172
acacucaaccauuugaucc

SEQ ID NO: 983174 - RNA, 19 nt, Artificial Sequence
  Description of Artificial Sequence: Synthetic oligonucleotide
  Sense strand starting at position 102 of SEQ ID NO: 914167
accagagucugcccaaauc

SEQ ID NO: 983175 - RNA, 19 nt, Artificial Sequence
  Description of Artificial Sequence: Synthetic oligonucleotide
  Antisense strand to SEQ ID NO: 983174
gauuugggcagacucuggu

SEQ ID NO: 983176 - RNA, 19 nt, Artificial Sequence
  Description of Artificial Sequence: Synthetic oligonucleotide
  Sense strand starting at position 2419 of SEQ ID NO: 914167
cgauaugaagcuggguaua

SEQ ID NO: 983177 - RNA, 19 nt, Artificial Sequence
  Description of Artificial Sequence: Synthetic oligonucleotide
  Antisense strand to SEQ ID NO: 983176
uauacccagcuucauaucg

SEQ ID NO: 983178 - RNA, 19 nt, Artificial Sequence
  Description of Artificial Sequence: Synthetic oligonucleotide
  Sense strand starting at position 2577 of SEQ ID NO: 914167
uuuggcucaguguaaacuu

SEQ ID NO: 983179 - RNA, 19 nt, Artificial Sequence
  Description of Artificial Sequence: Synthetic oligonucleotide
  Antisense strand to SEQ ID NO: 983178
aaguuuacacugagccaaa

SEQ ID NO: 983180 - RNA, 19 nt, Artificial Sequence
  Description of Artificial Sequence: Synthetic oligonucleotide
  Sense strand starting at position 895 of SEQ ID NO: 914167
aagcuaugugugcaagacu

SEQ ID NO: 983181 - RNA, 19 nt, Artificial Sequence
  Description of Artificial Sequence: Synthetic oligonucleotide
  Antisense strand to SEQ ID NO: 983180
agucuugcacacauagcuu

SEQ ID NO: 983182 - RNA, 19 nt, Artificial Sequence
  Description of Artificial Sequence: Synthetic oligonucleotide
  Sense strand starting at position 2959 of SEQ ID NO: 914167
cuaagcacucuguaugcau

SEQ ID NO: 983183 - RNA, 19 nt, Artificial Sequence
  Description of Artificial Sequence: Synthetic oligonucleotide
  Antisense strand to SEQ ID NO: 983182
augcauacagagugcuuag

SEQ ID NO: 983184 - RNA, 19 nt, Artificial Sequence
  Description of Artificial Sequence: Synthetic oligonucleotide
  Sense strand starting at position 2966 of SEQ ID NO: 914167
cucuguaugcaucauguca

SEQ ID NO: 983185 - RNA, 19 nt, Artificial Sequence
  Description of Artificial Sequence: Synthetic oligonucleotide
  Antisense strand to SEQ ID NO: 983184
ugacaugaugcauacagag

SEQ ID NO: 983186 - RNA, 19 nt, Artificial Sequence
  Description of Artificial Sequence: Synthetic oligonucleotide
  Sense strand starting at position 706 of SEQ ID NO: 914167
gcgagaaugucagugacca

SEQ ID NO: 983187 - RNA, 19 nt, Artificial Sequence
  Description of Artificial Sequence: Synthetic oligonucleotide
  Antisense strand to SEQ ID NO: 983186
uggucacugacauucucgc

SEQ ID NO: 983188 - RNA, 19 nt, Artificial Sequence
  Description of Artificial Sequence: Synthetic oligonucleotide
  Sense strand starting at position 893 of SEQ ID NO: 914167
gaaagcuaugugugcaaga

SEQ ID NO: 983189 - RNA, 19 nt, Artificial Sequence
  Description of Artificial Sequence: Synthetic oligonucleotide
  Antisense strand to SEQ ID NO: 983188
ucuugcacacauagcuuuc

SEQ ID NO: 983190 - RNA, 19 nt, Artificial Sequence
  Description of Artificial Sequence: Synthetic oligonucleotide
  Sense strand starting at position 891 of SEQ ID NO: 914167
gggaaagcuaugugugcaa

SEQ ID NO: 983191 - RNA, 19 nt, Artificial Sequence
  Description of Artificial Sequence: Synthetic oligonucleotide
  Antisense strand to SEQ ID NO: 983190
uugcacacauagcuuuccc

SEQ ID NO: 983192 - RNA, 19 nt, Artificial Sequence
  Description of Artificial Sequence: Synthetic oligonucleotide
  Sense strand starting at position 1992 of SEQ ID NO: 914167
gagugaguucgccaaccga

SEQ ID NO: 983193 - RNA, 19 nt, Artificial Sequence
  Description of Artificial Sequence: Synthetic oligonucleotide
  Antisense strand to SEQ ID NO: 983192
ucgguuggcgaacucacuc

SEQ ID NO: 983194 - RNA, 19 nt, Artificial Sequence
  Description of Artificial Sequence: Synthetic oligonucleotide
  Sense strand starting at position 2460 of SEQ ID NO: 914167
ucugcuugucuguaugauc

SEQ ID NO: 983195 - RNA, 19 nt, Artificial Sequence
  Description of Artificial Sequence: Synthetic oligonucleotide
  Antisense strand to SEQ ID NO: 983194
gaucauacagacaagcaga

SEQ ID NO: 983196 - RNA, 19 nt, Artificial Sequence
  Description of Artificial Sequence: Synthetic oligonucleotide
  Sense strand starting at position 2469 of SEQ ID NO: 914167
cuguaugaucuccggcaga

SEQ ID NO: 983197 - RNA, 19 nt, Artificial Sequence
  Description of Artificial Sequence: Synthetic oligonucleotide
  Antisense strand to SEQ ID NO: 983196
ucugccggagaucauacag

SEQ ID NO: 983198 - RNA, 19 nt, Artificial Sequence
  Description of Artificial Sequence: Synthetic oligonucleotide
  Sense strand starting at position 2735 of SEQ ID NO: 914167
uggaaauugcagugcaagu

SEQ ID NO: 983199 - RNA, 19 nt, Artificial Sequence
  Description of Artificial Sequence: Synthetic oligonucleotide
  Antisense strand to SEQ ID NO: 983198
acuugcacugcaauuucca

SEQ ID NO: 983200 - RNA, 19 nt, Artificial Sequence
  Description of Artificial Sequence: Synthetic oligonucleotide
  Sense strand starting at position 2537 of SEQ ID NO: 914167
guuguaaacuagccuccua

SEQ ID NO: 983201 - RNA, 19 nt, Artificial Sequence
  Description of Artificial Sequence: Synthetic oligonucleotide
  Antisense strand to SEQ ID NO: 983200
uaggaggcuaguuuacaac

SEQ ID NO: 983202 - RNA, 19 nt, Artificial Sequence
  Description of Artificial Sequence: Synthetic oligonucleotide
  Sense strand starting at position 2973 of SEQ ID NO: 914167
ugcaucaugucaguuaauu

SEQ ID NO: 983203 - RNA, 19 nt, Artificial Sequence
  Description of Artificial Sequence: Synthetic oligonucleotide
  Antisense strand to SEQ ID NO: 983202
aauuaacugacaugaugca

SEQ ID NO: 983204 - RNA, 19 nt, Artificial Sequence
  Description of Artificial Sequence: Synthetic oligonucleotide
  Sense strand starting at position 1000 of SEQ ID NO: 914167
ucccucuagucugcagauu

SEQ ID NO: 983205 - RNA, 19 nt, Artificial Sequence
  Description of Artificial Sequence: Synthetic oligonucleotide
  Antisense strand to SEQ ID NO: 983204
aaucugcagacuagaggga

SEQ ID NO: 983206 - RNA, 19 nt, Artificial Sequence
  Description of Artificial Sequence: Synthetic oligonucleotide
  Sense strand starting at position 222 of SEQ ID NO: 914167
cacuccuggccgugggaau

SEQ ID NO: 983207 - RNA, 19 nt, Artificial Sequence
  Description of Artificial Sequence: Synthetic oligonucleotide
  Antisense strand to SEQ ID NO: 983206
auucccacggccaggagug

SEQ ID NO: 983208 - RNA, 19 nt, Artificial Sequence
  Description of Artificial Sequence: Synthetic oligonucleotide
  Sense strand starting at position 2418 of SEQ ID NO: 914167
gcgauaugaagcuggguau

SEQ ID NO: 983209 - RNA, 19 nt, Artificial Sequence
  Description of Artificial Sequence: Synthetic oligonucleotide
  Antisense strand to SEQ ID NO: 983208
auacccagcuucauaucgc

SEQ ID NO: 983210 - RNA, 19 nt, Artificial Sequence
  Description of Artificial Sequence: Synthetic oligonucleotide
  Sense strand starting at position 739 of SEQ ID NO: 914167
uccgcaggaucgcuaagaa

SEQ ID NO: 983211 - RNA, 19 nt, Artificial Sequence
  Description of Artificial Sequence: Synthetic oligonucleotide
  Antisense strand to SEQ ID NO: 983210
uucuuagcgauccugcgga

SEQ ID NO: 983212 - RNA, 19 nt, Artificial Sequence
  Description of Artificial Sequence: Synthetic oligonucleotide
  Sense strand starting at position 576 of SEQ ID NO: 914167
guauucauccacggcgaga

SEQ ID NO: 983213 - RNA, 19 nt, Artificial Sequence
  Description of Artificial Sequence: Synthetic oligonucleotide
  Antisense strand to SEQ ID NO: 983212
ucucgccguggaugaauac

SEQ ID NO: 983214 - RNA, 19 nt, Artificial Sequence
  Description of Artificial Sequence: Synthetic oligonucleotide
  Sense strand starting at position 608 of SEQ ID NO: 914167
gacuuuauuucggagccca

SEQ ID NO: 983215 - RNA, 19 nt, Artificial Sequence
  Description of Artificial Sequence: Synthetic oligonucleotide
  Antisense strand to SEQ ID NO: 983214
ugggcuccgaaauaaaguc

SEQ ID NO: 983216 - RNA, 19 nt, Artificial Sequence
  Description of Artificial Sequence: Synthetic oligonucleotide
  Sense strand starting at position 1012 of SEQ ID NO: 914167
gcagauugcugucccuaua

SEQ ID NO: 983217 - RNA, 19 nt, Artificial Sequence
  Description of Artificial Sequence: Synthetic oligonucleotide
  Antisense strand to SEQ ID NO: 983216
uauagggacagcaaucugc

SEQ ID NO: 983218 - RNA, 19 nt, Artificial Sequence
  Description of Artificial Sequence: Synthetic oligonucleotide
  Sense strand starting at position 1104 of SEQ ID NO: 914167
uuauguagccaauguucuu

SEQ ID NO: 983219 - RNA, 19 nt, Artificial Sequence
  Description of Artificial Sequence: Synthetic oligonucleotide
  Antisense strand to SEQ ID NO: 983218
aagaacauuggcuacauaa

SEQ ID NO: 983220 - RNA, 19 nt, Artificial Sequence
  Description of Artificial Sequence: Synthetic oligonucleotide
  Sense strand starting at position 2432 of SEQ ID NO: 914167
gguauagauuaggaucauc

SEQ ID NO: 983221 - RNA, 19 nt, Artificial Sequence
  Description of Artificial Sequence: Synthetic oligonucleotide
  Antisense strand to SEQ ID NO: 983220
gaugauccuaaucuauacc

SEQ ID NO: 983222 - RNA, 19 nt, Artificial Sequence
  Description of Artificial Sequence: Synthetic oligonucleotide
  Sense strand starting at position 2459 of SEQ ID NO: 914167
cucugcuugucuguaugau

SEQ ID NO: 983223 - RNA, 19 nt, Artificial Sequence
  Description of Artificial Sequence: Synthetic oligonucleotide
  Antisense strand to SEQ ID NO: 983222
aucauacagacaagcagag

SEQ ID NO: 983224 - RNA, 19 nt, Artificial Sequence
  Description of Artificial Sequence: Synthetic oligonucleotide
  Sense strand starting at position 3750 of SEQ ID NO: 914167
gcagaugacucccaagaca

SEQ ID NO: 983225 - RNA, 19 nt, Artificial Sequence
  Description of Artificial Sequence: Synthetic oligonucleotide
  Antisense strand to SEQ ID NO: 983224
ugucuugggagucaucugc

SEQ ID NO: 983226 - RNA, 19 nt, Artificial Sequence
  Description of Artificial Sequence: Synthetic oligonucleotide
  Sense strand starting at position 732 of SEQ ID NO: 914168
auggauuauguaugaaauc

SEQ ID NO: 983227 - RNA, 19 nt, Artificial Sequence
  Description of Artificial Sequence: Synthetic oligonucleotide
  Antisense strand to SEQ ID NO: 983226
gauuucauacauaauccau

SEQ ID NO: 983228 - RNA, 19 nt, Artificial Sequence
  Description of Artificial Sequence: Synthetic oligonucleotide
  Sense strand starting at position 719 of SEQ ID NO: 914168
ugcaaaguaccauauggau

SEQ ID NO: 983229 - RNA, 19 nt, Artificial Sequence
  Description of Artificial Sequence: Synthetic oligonucleotide
  Antisense strand to SEQ ID NO: 983228
auccauaugguacuuugca

SEQ ID NO: 983230 - RNA, 19 nt, Artificial Sequence
  Description of Artificial Sequence: Synthetic oligonucleotide
  Sense strand starting at position 1177 of SEQ ID NO: 914168
gagugcuuggcgccuugaa

SEQ ID NO: 983231 - RNA, 19 nt, Artificial Sequence
  Description of Artificial Sequence: Synthetic oligonucleotide
  Antisense strand to SEQ ID NO: 983230
uucaaggcgccaagcacuc

SEQ ID NO: 983232 - RNA, 19 nt, Artificial Sequence
  Description of Artificial Sequence: Synthetic oligonucleotide
  Sense strand starting at position 1179 of SEQ ID NO: 914168
gugcuuggcgccuugaaga

SEQ ID NO: 983233 - RNA, 19 nt, Artificial Sequence
  Description of Artificial Sequence: Synthetic oligonucleotide
  Antisense strand to SEQ ID NO: 983232
ucuucaaggcgccaagcac

SEQ ID NO: 983234 - RNA, 19 nt, Artificial Sequence
  Description of Artificial Sequence: Synthetic oligonucleotide
  Sense strand starting at position 2954 of SEQ ID NO: 914168
cgucgacauuucuucugaa

SEQ ID NO: 983235 - RNA, 19 nt, Artificial Sequence
  Description of Artificial Sequence: Synthetic oligonucleotide
  Antisense strand to SEQ ID NO: 983234
uucagaagaaaugucgacg

SEQ ID NO: 983236 - RNA, 19 nt, Artificial Sequence
  Description of Artificial Sequence: Synthetic oligonucleotide
  Sense strand starting at position 2719 of SEQ ID NO: 914168
uaggaaugggucuagucuu

SEQ ID NO: 983237 - RNA, 19 nt, Artificial Sequence
  Description of Artificial Sequence: Synthetic oligonucleotide
  Antisense strand to SEQ ID NO: 983236
aagacuagacccauuccua

SEQ ID NO: 983238 - RNA, 19 nt, Artificial Sequence
  Description of Artificial Sequence: Synthetic oligonucleotide
  Sense strand starting at position 3335 of SEQ ID NO: 914168
ugcugcuuccuguauuuaa

SEQ ID NO: 983239 - RNA, 19 nt, Artificial Sequence
  Description of Artificial Sequence: Synthetic oligonucleotide
  Antisense strand to SEQ ID NO: 983238
uuaaauacaggaagcagca

SEQ ID NO: 983240 - RNA, 19 nt, Artificial Sequence
  Description of Artificial Sequence: Synthetic oligonucleotide
  Sense strand starting at position 1861 of SEQ ID NO: 914168
ccauuuccucccgaucguu

SEQ ID NO: 983241 - RNA, 19 nt, Artificial Sequence
  Description of Artificial Sequence: Synthetic oligonucleotide
  Antisense strand to SEQ ID NO: 983240
aacgaucgggaggaaaugg

SEQ ID NO: 983242 - RNA, 19 nt, Artificial Sequence
  Description of Artificial Sequence: Synthetic oligonucleotide
  Sense strand starting at position 2505 of SEQ ID NO: 914168
ggaagugugguggaauagu

SEQ ID NO: 983243 - RNA, 19 nt, Artificial Sequence
  Description of Artificial Sequence: Synthetic oligonucleotide
  Antisense strand to SEQ ID NO: 983242
acuauuccaccacacuucc

SEQ ID NO: 983244 - RNA, 19 nt, Artificial Sequence
  Description of Artificial Sequence: Synthetic oligonucleotide
  Sense strand starting at position 2388 of SEQ ID NO: 914168
uggauuggucgccaggaaa

SEQ ID NO: 983245 - RNA, 19 nt, Artificial Sequence
  Description of Artificial Sequence: Synthetic oligonucleotide
  Antisense strand to SEQ ID NO: 983244
uuuccuggcgaccaaucca

SEQ ID NO: 983246 - RNA, 19 nt, Artificial Sequence
  Description of Artificial Sequence: Synthetic oligonucleotide
  Sense strand starting at position 2575 of SEQ ID NO: 914168
gggcguuuccuggugcgaa

SEQ ID NO: 983247 - RNA, 19 nt, Artificial Sequence
  Description of Artificial Sequence: Synthetic oligonucleotide
  Antisense strand to SEQ ID NO: 983246
uucgcaccaggaaacgccc

SEQ ID NO: 983248 - RNA, 19 nt, Artificial Sequence
  Description of Artificial Sequence: Synthetic oligonucleotide
  Sense strand starting at position 413 of SEQ ID NO: 914168
guccuuucucaagauagug

SEQ ID NO: 983249 - RNA, 19 nt, Artificial Sequence
  Description of Artificial Sequence: Synthetic oligonucleotide
  Antisense strand to SEQ ID NO: 983248
cacuaucuugagaaaggac

SEQ ID NO: 983250 - RNA, 19 nt, Artificial Sequence
  Description of Artificial Sequence: Synthetic oligonucleotide
  Sense strand starting at position 2905 of SEQ ID NO: 914168
agacuucccugaguuauca

SEQ ID NO: 983251 - RNA, 19 nt, Artificial Sequence
  Description of Artificial Sequence: Synthetic oligonucleotide
  Antisense strand to SEQ ID NO: 983250
ugauaacucagggaagucu

SEQ ID NO: 983252 - RNA, 19 nt, Artificial Sequence
  Description of Artificial Sequence: Synthetic oligonucleotide
  Sense strand starting at position 409 of SEQ ID NO: 914168
auagguccuuucucaagau

SEQ ID NO: 983253 - RNA, 19 nt, Artificial Sequence
  Description of Artificial Sequence: Synthetic oligonucleotide
  Antisense strand to SEQ ID NO: 983252
aucuugagaaaggaccuau

SEQ ID NO: 983254 - RNA, 19 nt, Artificial Sequence
  Description of Artificial Sequence: Synthetic oligonucleotide
  Sense strand starting at position 846 of SEQ ID NO: 914168
ggaacacuaucucccaguu

SEQ ID NO: 983255 - RNA, 19 nt, Artificial Sequence
  Description of Artificial Sequence: Synthetic oligonucleotide
  Antisense strand to SEQ ID NO: 983254
aacugggagauaguguucc

SEQ ID NO: 983256 - RNA, 19 nt, Artificial Sequence
  Description of Artificial Sequence: Synthetic oligonucleotide
  Sense strand starting at position 1041 of SEQ ID NO: 914168
guguaaguccucuaagaug

SEQ ID NO: 983257 - RNA, 19 nt, Artificial Sequence
  Description of Artificial Sequence: Synthetic oligonucleotide
  Antisense strand to SEQ ID NO: 983256
caucuuagaggacuuacac

SEQ ID NO: 983258 - RNA, 19 nt, Artificial Sequence
  Description of Artificial Sequence: Synthetic oligonucleotide
  Sense strand starting at position 893 of SEQ ID NO: 914168
uaguauaaaggacguauua

SEQ ID NO: 983259 - RNA, 19 nt, Artificial Sequence
  Description of Artificial Sequence: Synthetic oligonucleotide
  Antisense strand to SEQ ID NO: 983258
uaauacguccuuuauacua

SEQ ID NO: 983260 - RNA, 19 nt, Artificial Sequence
  Description of Artificial Sequence: Synthetic oligonucleotide
  Sense strand starting at position 2856 of SEQ ID NO: 914168
uagaaaguaccugguucua

SEQ ID NO: 983261 - RNA, 19 nt, Artificial Sequence
  Description of Artificial Sequence: Synthetic oligonucleotide
  Antisense strand to SEQ ID NO: 983260
uagaaccagguacuuucua

SEQ ID NO: 983262 - RNA, 19 nt, Artificial Sequence
  Description of Artificial Sequence: Synthetic oligonucleotide
  Sense strand starting at position 48 of SEQ ID NO: 914168
augaaagauuuguaaaguc

SEQ ID NO: 983263 - RNA, 19 nt, Artificial Sequence
  Description of Artificial Sequence: Synthetic oligonucleotide
  Antisense strand to SEQ ID NO: 983262
gacuuuacaaaucuuucau

SEQ ID NO: 983264 - RNA, 19 nt, Artificial Sequence
  Description of Artificial Sequence: Synthetic oligonucleotide
  Sense strand starting at position 477 of SEQ ID NO: 914168
acaaauuaguuugcugaau

SEQ ID NO: 983265 - RNA, 19 nt, Artificial Sequence
  Description of Artificial Sequence: Synthetic oligonucleotide
  Antisense strand to SEQ ID NO: 983264
auucagcaaacuaauuugu

SEQ ID NO: 983266 - RNA, 19 nt, Artificial Sequence
  Description of Artificial Sequence: Synthetic oligonucleotide
  Sense strand starting at position 2299 of SEQ ID NO: 914168
acuggcaauacguaaggua

SEQ ID NO: 983267 - RNA, 19 nt, Artificial Sequence
  Description of Artificial Sequence: Synthetic oligonucleotide
  Antisense strand to SEQ ID NO: 983266
uaccuuacguauugccagu

SEQ ID NO: 983268 - RNA, 19 nt, Artificial Sequence
  Description of Artificial Sequence: Synthetic oligonucleotide
  Sense strand starting at position 3029 of SEQ ID NO: 914168
ccuccugaauugcugaaau

SEQ ID NO: 983269 - RNA, 19 nt, Artificial Sequence
  Description of Artificial Sequence: Synthetic oligonucleotide
  Antisense strand to SEQ ID NO: 983268
auuucagcaauucaggagg

SEQ ID NO: 983270 - RNA, 19 nt, Artificial Sequence
  Description of Artificial Sequence: Synthetic oligonucleotide
  Sense strand starting at position 3139 of SEQ ID NO: 914168
gaaacuggucuugacguuu

SEQ ID NO: 983271 - RNA, 19 nt, Artificial Sequence
  Description of Artificial Sequence: Synthetic oligonucleotide
  Antisense strand to SEQ ID NO: 983270
aaacgucaagaccaguuuc

SEQ ID NO: 983272 - RNA, 19 nt, Artificial Sequence
  Description of Artificial Sequence: Synthetic oligonucleotide
  Sense strand starting at position 3236 of SEQ ID NO: 914168
ccagguucccuaugacuca

SEQ ID NO: 983273 - RNA, 19 nt, Artificial Sequence
  Description of Artificial Sequence: Synthetic oligonucleotide
  Antisense strand to SEQ ID NO: 983272
ugagucauagggaaccugg

SEQ ID NO: 983274 - RNA, 19 nt, Artificial Sequence
  Description of Artificial Sequence: Synthetic oligonucleotide
  Sense strand starting at position 905 of SEQ ID NO: 914168
cguauuaagaacuguuaga

SEQ ID NO: 983275 - RNA, 19 nt, Artificial Sequence
  Description of Artificial Sequence: Synthetic oligonucleotide
  Antisense strand to SEQ ID NO: 983274
ucuaacaguucuuaauacg

SEQ ID NO: 983276 - RNA, 19 nt, Artificial Sequence
  Description of Artificial Sequence: Synthetic oligonucleotide
  Sense strand starting at position 2360 of SEQ ID NO: 914168
gaguguuccgaggacccga

SEQ ID NO: 983277 - RNA, 19 nt, Artificial Sequence
  Description of Artificial Sequence: Synthetic oligonucleotide
  Antisense strand to SEQ ID NO: 983276
ucggguccucggaacacuc

SEQ ID NO: 983278 - RNA, 19 nt, Artificial Sequence
  Description of Artificial Sequence: Synthetic oligonucleotide
  Sense strand starting at position 2707 of SEQ ID NO: 914168
gugggagucgcuuaggaau

SEQ ID NO: 983279 - RNA, 19 nt, Artificial Sequence
  Description of Artificial Sequence: Synthetic oligonucleotide
  Antisense strand to SEQ ID NO: 983278
auuccuaagcgacucccac

SEQ ID NO: 983280 - RNA, 19 nt, Artificial Sequence
  Description of Artificial Sequence: Synthetic oligonucleotide
  Sense strand starting at position 752 of SEQ ID NO: 914168
caaucagagugcuccgaaa

SEQ ID NO: 983281 - RNA, 19 nt, Artificial Sequence
  Description of Artificial Sequence: Synthetic oligonucleotide
  Antisense strand to SEQ ID NO: 983280
uuucggagcacucugauug

SEQ ID NO: 983282 - RNA, 19 nt, Artificial Sequence
  Description of Artificial Sequence: Synthetic oligonucleotide
  Sense strand starting at position 2406 of SEQ ID NO: 914168
agggaaagcgccugaauug

SEQ ID NO: 983283 - RNA, 19 nt, Artificial Sequence
  Description of Artificial Sequence: Synthetic oligonucleotide
  Antisense strand to SEQ ID NO: 983282
caauucaggcgcuuucccu

SEQ ID NO: 983284 - RNA, 19 nt, Artificial Sequence
  Description of Artificial Sequence: Synthetic oligonucleotide
  Sense strand starting at position 289 of SEQ ID NO: 914168
agcacuaagugauauuuaa

SEQ ID NO: 983285 - RNA, 19 nt, Artificial Sequence
  Description of Artificial Sequence: Synthetic oligonucleotide
  Antisense strand to SEQ ID NO: 983284
uuaaauaucacuuagugcu

SEQ ID NO: 983286 - RNA, 19 nt, Artificial Sequence
  Description of Artificial Sequence: Synthetic oligonucleotide
  Sense strand starting at position 2902 of SEQ ID NO: 914168
gcaagacuucccugaguua

SEQ ID NO: 983287 - RNA, 19 nt, Artificial Sequence
  Description of Artificial Sequence: Synthetic oligonucleotide
  Antisense strand to SEQ ID NO: 983286
uaacucagggaagucuugc

SEQ ID NO: 983288 - RNA, 19 nt, Artificial Sequence
  Description of Artificial Sequence: Synthetic oligonucleotide
  Sense strand starting at position 2900 of SEQ ID NO: 914168
uggcaagacuucccugagu

SEQ ID NO: 983289 - RNA, 19 nt, Artificial Sequence
  Description of Artificial Sequence: Synthetic oligonucleotide
  Antisense strand to SEQ ID NO: 983288
acucagggaagucuugcca

SEQ ID NO: 983290 - RNA, 19 nt, Artificial Sequence
  Description of Artificial Sequence: Synthetic oligonucleotide
  Sense strand starting at position 3002 of SEQ ID NO: 914168
guaucaguuuauccacacu

SEQ ID NO: 983291 - RNA, 19 nt, Artificial Sequence
  Description of Artificial Sequence: Synthetic oligonucleotide
  Antisense strand to SEQ ID NO: 983290
aguguggauaaacugauac

SEQ ID NO: 983292 - RNA, 19 nt, Artificial Sequence
  Description of Artificial Sequence: Synthetic oligonucleotide
  Sense strand starting at position 858 of SEQ ID NO: 914168
cccaguuucugacuuuauu

SEQ ID NO: 983293 - RNA, 19 nt, Artificial Sequence
  Description of Artificial Sequence: Synthetic oligonucleotide
  Antisense strand to SEQ ID NO: 983292
aauaaagucagaaacuggg

SEQ ID NO: 983294 - RNA, 19 nt, Artificial Sequence
  Description of Artificial Sequence: Synthetic oligonucleotide
  Sense strand starting at position 3150 of SEQ ID NO: 914168
ugacguuugcuugacuuga

SEQ ID NO: 983295 - RNA, 19 nt, Artificial Sequence
  Description of Artificial Sequence: Synthetic oligonucleotide
  Antisense strand to SEQ ID NO: 983294
ucaagucaagcaaacguca

SEQ ID NO: 983296 - RNA, 19 nt, Artificial Sequence
  Description of Artificial Sequence: Synthetic oligonucleotide
  Sense strand starting at position 1218 of SEQ ID NO: 914168
ucaaccagccuaugugauu

SEQ ID NO: 983297 - RNA, 19 nt, Artificial Sequence
  Description of Artificial Sequence: Synthetic oligonucleotide
  Antisense strand to SEQ ID NO: 983296
aaucacauaggcugguuga

SEQ ID NO: 983298 - RNA, 19 nt, Artificial Sequence
  Description of Artificial Sequence: Synthetic oligonucleotide
  Sense strand starting at position 1027 of SEQ ID NO: 914168
caucguuucgugucgugua

SEQ ID NO: 983299 - RNA, 19 nt, Artificial Sequence
  Description of Artificial Sequence: Synthetic oligonucleotide
  Antisense strand to SEQ ID NO: 983298
uacacgacacgaaacgaug

SEQ ID NO: 983300 - RNA, 19 nt, Artificial Sequence
  Description of Artificial Sequence: Synthetic oligonucleotide
  Sense strand starting at position 3732 of SEQ ID NO: 914168
gcuauucugcagcauugau

SEQ ID NO: 983301 - RNA, 19 nt, Artificial Sequence
  Description of Artificial Sequence: Synthetic oligonucleotide
  Antisense strand to SEQ ID NO: 983300
aucaaugcugcagaauagc

SEQ ID NO: 983302 - RNA, 19 nt, Artificial Sequence
  Description of Artificial Sequence: Synthetic oligonucleotide
  Sense strand starting at position 2387 of SEQ ID NO: 914168
guggauuggucgccaggaa

SEQ ID NO: 983303 - RNA, 19 nt, Artificial Sequence
  Description of Artificial Sequence: Synthetic oligonucleotide
  Antisense strand to SEQ ID NO: 983302
uuccuggcgaccaauccac

SEQ ID NO: 983304 - RNA, 19 nt, Artificial Sequence
  Description of Artificial Sequence: Synthetic oligonucleotide
  Sense strand starting at position 3729 of SEQ ID NO: 914168
acugcuauucugcagcauu

SEQ ID NO: 983305 - RNA, 19 nt, Artificial Sequence
  Description of Artificial Sequence: Synthetic oligonucleotide
  Antisense strand to SEQ ID NO: 983304
aaugcugcagaauagcagu

SEQ ID NO: 983306 - RNA, 19 nt, Artificial Sequence
  Description of Artificial Sequence: Synthetic oligonucleotide
  Sense strand starting at position 403 of SEQ ID NO: 914169
auggauuauguaugaaauc

SEQ ID NO: 983307 - RNA, 19 nt, Artificial Sequence
  Description of Artificial Sequence: Synthetic oligonucleotide
  Antisense strand to SEQ ID NO: 983306
gauuucauacauaauccau

SEQ ID NO: 983308 - RNA, 19 nt, Artificial Sequence
  Description of Artificial Sequence: Synthetic oligonucleotide
  Sense strand starting at position 390 of SEQ ID NO: 914169
ugcaaaguaccauauggau

SEQ ID NO: 983309 - RNA, 19 nt, Artificial Sequence
  Description of Artificial Sequence: Synthetic oligonucleotide
  Antisense strand to SEQ ID NO: 983308
auccauaugguacuuugca

SEQ ID NO: 983310 - RNA, 19 nt, Artificial Sequence
  Description of Artificial Sequence: Synthetic oligonucleotide
  Sense strand starting at position 848 of SEQ ID NO: 914169
gagugcuuggcgccuugaa

SEQ ID NO: 983311 - RNA, 19 nt, Artificial Sequence
  Description of Artificial Sequence: Synthetic oligonucleotide
  Antisense strand to SEQ ID NO: 983310
uucaaggcgccaagcacuc

SEQ ID NO: 983312 - RNA, 19 nt, Artificial Sequence
  Description of Artificial Sequence: Synthetic oligonucleotide
  Sense strand starting at position 850 of SEQ ID NO: 914169
gugcuuggcgccuugaaga

SEQ ID NO: 983313 - RNA, 19 nt, Artificial Sequence
  Description of Artificial Sequence: Synthetic oligonucleotide
  Antisense strand to SEQ ID NO: 983312
ucuucaaggcgccaagcac

SEQ ID NO: 983314 - RNA, 19 nt, Artificial Sequence
  Description of Artificial Sequence: Synthetic oligonucleotide
  Sense strand starting at position 2625 of SEQ ID NO: 914169
cgucgacauuucuucugaa

SEQ ID NO: 983315 - RNA, 19 nt, Artificial Sequence
  Description of Artificial Sequence: Synthetic oligonucleotide
  Antisense strand to SEQ ID NO: 983314
uucagaagaaaugucgacg

SEQ ID NO: 983316 - RNA, 19 nt, Artificial Sequence
  Description of Artificial Sequence: Synthetic oligonucleotide
  Sense strand starting at position 2390 of SEQ ID NO: 914169
uaggaaugggucuagucuu

SEQ ID NO: 983317 - RNA, 19 nt, Artificial Sequence
  Description of Artificial Sequence: Synthetic oligonucleotide
  Antisense strand to SEQ ID NO: 983316
aagacuagacccauuccua

SEQ ID NO: 983318 - RNA, 19 nt, Artificial Sequence
  Description of Artificial Sequence: Synthetic oligonucleotide
  Sense strand starting at position 3006 of SEQ ID NO: 914169
ugcugcuuccuguauuuaa

SEQ ID NO: 983319 - RNA, 19 nt, Artificial Sequence
  Description of Artificial Sequence: Synthetic oligonucleotide
  Antisense strand to SEQ ID NO: 983318
uuaaauacaggaagcagca

SEQ ID NO: 983320 - RNA, 19 nt, Artificial Sequence
  Description of Artificial Sequence: Synthetic oligonucleotide
  Sense strand starting at position 1532 of SEQ ID NO: 914169
ccauuuccucccgaucguu

SEQ ID NO: 983321 - RNA, 19 nt, Artificial Sequence
  Description of Artificial Sequence: Synthetic oligonucleotide
  Antisense strand to SEQ ID NO: 983320
aacgaucgggaggaaaugg

SEQ ID NO: 983322 - RNA, 19 nt, Artificial Sequence
  Description of Artificial Sequence: Synthetic oligonucleotide
  Sense strand starting at position 2176 of SEQ ID NO: 914169
ggaagugugguggaauagu

SEQ ID NO: 983323 - RNA, 19 nt, Artificial Sequence
  Description of Artificial Sequence: Synthetic oligonucleotide
  Antisense strand to SEQ ID NO: 983322
acuauuccaccacacuucc

SEQ ID NO: 983324 - RNA, 19 nt, Artificial Sequence
  Description of Artificial Sequence: Synthetic oligonucleotide
  Sense strand starting at position 2059 of SEQ ID NO: 914169
uggauuggucgccaggaaa

SEQ ID NO: 983325 - RNA, 19 nt, Artificial Sequence
  Description of Artificial Sequence: Synthetic oligonucleotide
  Antisense strand to SEQ ID NO: 983324
uuuccuggcgaccaaucca

SEQ ID NO: 983326 - RNA, 19 nt, Artificial Sequence
  Description of Artificial Sequence: Synthetic oligonucleotide
  Sense strand starting at position 2246 of SEQ ID NO: 914169
gggcguuuccuggugcgaa

SEQ ID NO: 983327 - RNA, 19 nt, Artificial Sequence
  Description of Artificial Sequence: Synthetic oligonucleotide
  Antisense strand to SEQ ID NO: 983326
uucgcaccaggaaacgccc

SEQ ID NO: 983328 - RNA, 19 nt, Artificial Sequence
  Description of Artificial Sequence: Synthetic oligonucleotide
  Sense strand starting at position 84 of SEQ ID NO: 914169
guccuuucucaagauagug

SEQ ID NO: 983329 - RNA, 19 nt, Artificial Sequence
  Description of Artificial Sequence: Synthetic oligonucleotide
  Antisense strand to SEQ ID NO: 983328
cacuaucuugagaaaggac

SEQ ID NO: 983330 - RNA, 19 nt, Artificial Sequence
  Description of Artificial Sequence: Synthetic oligonucleotide
  Sense strand starting at position 517 of SEQ ID NO: 914169
ggaacacuaucucccaguu

SEQ ID NO: 983331 - RNA, 19 nt, Artificial Sequence
  Description of Artificial Sequence: Synthetic oligonucleotide
  Antisense strand to SEQ ID NO: 983330
aacugggagauaguguucc

SEQ ID NO: 983332 - RNA, 19 nt, Artificial Sequence
  Description of Artificial Sequence: Synthetic oligonucleotide
  Sense strand starting at position 2576 of SEQ ID NO: 914169
agacuucccugaguuauca

SEQ ID NO: 983333 - RNA, 19 nt, Artificial Sequence
  Description of Artificial Sequence: Synthetic oligonucleotide
  Antisense strand to SEQ ID NO: 983332
ugauaacucagggaagucu

SEQ ID NO: 983334 - RNA, 19 nt, Artificial Sequence
  Description of Artificial Sequence: Synthetic oligonucleotide
  Sense strand starting at position 80 of SEQ ID NO: 914169
auagguccuuucucaagau

SEQ ID NO: 983335 - RNA, 19 nt, Artificial Sequence
  Description of Artificial Sequence: Synthetic oligonucleotide
  Antisense strand to SEQ ID NO: 983334
aucuugagaaaggaccuau

SEQ ID NO: 983336 - RNA, 19 nt, Artificial Sequence
  Description of Artificial Sequence: Synthetic oligonucleotide
  Sense strand starting at position 712 of SEQ ID NO: 914169
guguaaguccucuaagaug

SEQ ID NO: 983337 - RNA, 19 nt, Artificial Sequence
  Description of Artificial Sequence: Synthetic oligonucleotide
  Antisense strand to SEQ ID NO: 983336
caucuuagaggacuuacac

SEQ ID NO: 983338 - RNA, 19 nt, Artificial Sequence
  Description of Artificial Sequence: Synthetic oligonucleotide
  Sense strand starting at position 564 of SEQ ID NO: 914169
uaguauaaaggacguauua

SEQ ID NO: 983339 - RNA, 19 nt, Artificial Sequence
  Description of Artificial Sequence: Synthetic oligonucleotide
  Antisense strand to SEQ ID NO: 983338
uaauacguccuuuauacua

SEQ ID NO: 983340 - RNA, 19 nt, Artificial Sequence
  Description of Artificial Sequence: Synthetic oligonucleotide
  Sense strand starting at position 2527 of SEQ ID NO: 914169
uagaaaguaccugguucua

SEQ ID NO: 983341 - RNA, 19 nt, Artificial Sequence
  Description of Artificial Sequence: Synthetic oligonucleotide
  Antisense strand to SEQ ID NO: 983340
uagaaccagguacuuucua

SEQ ID NO: 983342 - RNA, 19 nt, Artificial Sequence
  Description of Artificial Sequence: Synthetic oligonucleotide
  Sense strand starting at position 148 of SEQ ID NO: 914169
acaaauuaguuugcugaau

SEQ ID NO: 983343 - RNA, 19 nt, Artificial Sequence
  Description of Artificial Sequence: Synthetic oligonucleotide
  Antisense strand to SEQ ID NO: 983342
auucagcaaacuaauuugu

SEQ ID NO: 983344 - RNA, 19 nt, Artificial Sequence
  Description of Artificial Sequence: Synthetic oligonucleotide
  Sense strand starting at position 1970 of SEQ ID NO: 914169
acuggcaauacguaaggua

SEQ ID NO: 983345 - RNA, 19 nt, Artificial Sequence
  Description of Artificial Sequence: Synthetic oligonucleotide
  Antisense strand to SEQ ID NO: 983344
uaccuuacguauugccagu

SEQ ID NO: 983346 - RNA, 19 nt, Artificial Sequence
  Description of Artificial Sequence: Synthetic oligonucleotide
  Sense strand starting at position 2700 of SEQ ID NO: 914169
ccuccugaauugcugaaau

SEQ ID NO: 983347 - RNA, 19 nt, Artificial Sequence
  Description of Artificial Sequence: Synthetic oligonucleotide
  Antisense strand to SEQ ID NO: 983346
auuucagcaauucaggagg

SEQ ID NO: 983348 - RNA, 19 nt, Artificial Sequence
  Description of Artificial Sequence: Synthetic oligonucleotide
  Sense strand starting at position 2810 of SEQ ID NO: 914169
gaaacuggucuugacguuu

SEQ ID NO: 983349 - RNA, 19 nt, Artificial Sequence
  Description of Artificial Sequence: Synthetic oligonucleotide
  Antisense strand to SEQ ID NO: 983348
aaacgucaagaccaguuuc

SEQ ID NO: 983350 - RNA, 19 nt, Artificial Sequence
  Description of Artificial Sequence: Synthetic oligonucleotide
  Sense strand starting at position 2907 of SEQ ID NO: 914169
ccagguucccuaugacuca

SEQ ID NO: 983351 - RNA, 19 nt, Artificial Sequence
  Description of Artificial Sequence: Synthetic oligonucleotide
  Antisense strand to SEQ ID NO: 983350
ugagucauagggaaccugg

SEQ ID NO: 983352 - RNA, 19 nt, Artificial Sequence
  Description of Artificial Sequence: Synthetic oligonucleotide
  Sense strand starting at position 576 of SEQ ID NO: 914169
cguauuaagaacuguuaga

SEQ ID NO: 983353 - RNA, 19 nt, Artificial Sequence
  Description of Artificial Sequence: Synthetic oligonucleotide
  Antisense strand to SEQ ID NO: 983352
ucuaacaguucuuaauacg

SEQ ID NO: 983354 - RNA, 19 nt, Artificial Sequence
  Description of Artificial Sequence: Synthetic oligonucleotide
  Sense strand starting at position 2031 of SEQ ID NO: 914169
gaguguuccgaggacccga

SEQ ID NO: 983355 - RNA, 19 nt, Artificial Sequence
  Description of Artificial Sequence: Synthetic oligonucleotide
  Antisense strand to SEQ ID NO: 983354
ucggguccucggaacacuc

SEQ ID NO: 983356 - RNA, 19 nt, Artificial Sequence
  Description of Artificial Sequence: Synthetic oligonucleotide
  Sense strand starting at position 2378 of SEQ ID NO: 914169
gugggagucgcuuaggaau

SEQ ID NO: 983357 - RNA, 19 nt, Artificial Sequence
  Description of Artificial Sequence: Synthetic oligonucleotide
  Antisense strand to SEQ ID NO: 983356
auuccuaagcgacucccac

SEQ ID NO: 983358 - RNA, 19 nt, Artificial Sequence
  Description of Artificial Sequence: Synthetic oligonucleotide
  Sense strand starting at position 423 of SEQ ID NO: 914169
caaucagagugcuccgaaa

SEQ ID NO: 983359 - RNA, 19 nt, Artificial Sequence
  Description of Artificial Sequence: Synthetic oligonucleotide
  Antisense strand to SEQ ID NO: 983358
uuucggagcacucugauug

SEQ ID NO: 983360 - RNA, 19 nt, Artificial Sequence
  Description of Artificial Sequence: Synthetic oligonucleotide
  Sense strand starting at position 2077 of SEQ ID NO: 914169
agggaaagcgccugaauug

SEQ ID NO: 983361 - RNA, 19 nt, Artificial Sequence
  Description of Artificial Sequence: Synthetic oligonucleotide
  Antisense strand to SEQ ID NO: 983360
caauucaggcgcuuucccu

SEQ ID NO: 983362 - RNA, 19 nt, Artificial Sequence
  Description of Artificial Sequence: Synthetic oligonucleotide
  Sense strand starting at position 2573 of SEQ ID NO: 914169
gcaagacuucccugaguua

SEQ ID NO: 983363 - RNA, 19 nt, Artificial Sequence
  Description of Artificial Sequence: Synthetic oligonucleotide
  Antisense strand to SEQ ID NO: 983362
uaacucagggaagucuugc

SEQ ID NO: 983364 - RNA, 19 nt, Artificial Sequence
  Description of Artificial Sequence: Synthetic oligonucleotide
  Sense strand starting at position 2571 of SEQ ID NO: 914169
uggcaagacuucccugagu

SEQ ID NO: 983365 - RNA, 19 nt, Artificial Sequence
  Description of Artificial Sequence: Synthetic oligonucleotide
  Antisense strand to SEQ ID NO: 983364
acucagggaagucuugcca

SEQ ID NO: 983366 - RNA, 19 nt, Artificial Sequence
  Description of Artificial Sequence: Synthetic oligonucleotide
  Sense strand starting at position 3906 of SEQ ID NO: 914169
agucaaccuuugucuuuaa

SEQ ID NO: 983367 - RNA, 19 nt, Artificial Sequence
  Description of Artificial Sequence: Synthetic oligonucleotide
  Antisense strand to SEQ ID NO: 983366
uuaaagacaaagguugacu

SEQ ID NO: 983368 - RNA, 19 nt, Artificial Sequence
  Description of Artificial Sequence: Synthetic oligonucleotide
  Sense strand starting at position 2673 of SEQ ID NO: 914169
guaucaguuuauccacacu

SEQ ID NO: 983369 - RNA, 19 nt, Artificial Sequence
  Description of Artificial Sequence: Synthetic oligonucleotide
  Antisense strand to SEQ ID NO: 983368
aguguggauaaacugauac

SEQ ID NO: 983370 - RNA, 19 nt, Artificial Sequence
  Description of Artificial Sequence: Synthetic oligonucleotide
  Sense strand starting at position 529 of SEQ ID NO: 914169
cccaguuucugacuuuauu

SEQ ID NO: 983371 - RNA, 19 nt, Artificial Sequence
  Description of Artificial Sequence: Synthetic oligonucleotide
  Antisense strand to SEQ ID NO: 983370
aauaaagucagaaacuggg

SEQ ID NO: 983372 - RNA, 19 nt, Artificial Sequence
  Description of Artificial Sequence: Synthetic oligonucleotide
  Sense strand starting at position 2821 of SEQ ID NO: 914169
ugacguuugcuugacuuga

SEQ ID NO: 983373 - RNA, 19 nt, Artificial Sequence
  Description of Artificial Sequence: Synthetic oligonucleotide
  Antisense strand to SEQ ID NO: 983372
ucaagucaagcaaacguca

SEQ ID NO: 983374 - RNA, 19 nt, Artificial Sequence
  Description of Artificial Sequence: Synthetic oligonucleotide
  Sense strand starting at position 889 of SEQ ID NO: 914169
ucaaccagccuaugugauu

SEQ ID NO: 983375 - RNA, 19 nt, Artificial Sequence
  Description of Artificial Sequence: Synthetic oligonucleotide
  Antisense strand to SEQ ID NO: 983374
aaucacauaggcugguuga

SEQ ID NO: 983376 - RNA, 19 nt, Artificial Sequence
  Description of Artificial Sequence: Synthetic oligonucleotide
  Sense strand starting at position 3907 of SEQ ID NO: 914169
gucaaccuuugucuuuaau

SEQ ID NO: 983377 - RNA, 19 nt, Artificial Sequence
  Description of Artificial Sequence: Synthetic oligonucleotide
  Antisense strand to SEQ ID NO: 983376
auuaaagacaaagguugac

SEQ ID NO: 983378 - RNA, 19 nt, Artificial Sequence
  Description of Artificial Sequence: Synthetic oligonucleotide
  Sense strand starting at position 698 of SEQ ID NO: 914169
caucguuucgugucgugua

SEQ ID NO: 983379 - RNA, 19 nt, Artificial Sequence
  Description of Artificial Sequence: Synthetic oligonucleotide
  Antisense strand to SEQ ID NO: 983378
uacacgacacgaaacgaug

SEQ ID NO: 983380 - RNA, 19 nt, Artificial Sequence
  Description of Artificial Sequence: Synthetic oligonucleotide
  Sense strand starting at position 3403 of SEQ ID NO: 914169
gcuauucugcagcauugau

SEQ ID NO: 983381 - RNA, 19 nt, Artificial Sequence
  Description of Artificial Sequence: Synthetic oligonucleotide
  Antisense strand to SEQ ID NO: 983380
aucaaugcugcagaauagc

SEQ ID NO: 983382 - RNA, 19 nt, Artificial Sequence
  Description of Artificial Sequence: Synthetic oligonucleotide
  Sense strand starting at position 2058 of SEQ ID NO: 914169
guggauuggucgccaggaa

SEQ ID NO: 983383 - RNA, 19 nt, Artificial Sequence
  Description of Artificial Sequence: Synthetic oligonucleotide
  Antisense strand to SEQ ID NO: 983382
uuccuggcgaccaauccac

SEQ ID NO: 983384 - RNA, 19 nt, Artificial Sequence
  Description of Artificial Sequence: Synthetic oligonucleotide
  Sense strand starting at position 3400 of SEQ ID NO: 914169
acugcuauucugcagcauu

SEQ ID NO: 983385 - RNA, 19 nt, Artificial Sequence
  Description of Artificial Sequence: Synthetic oligonucleotide
  Antisense strand to SEQ ID NO: 983384
aaugcugcagaauagcagu

SEQ ID NO: 983386 - RNA, 19 nt, Artificial Sequence
  Description of Artificial Sequence: Synthetic oligonucleotide
  Sense strand starting at position 2643 of SEQ ID NO: 914170
ggucuaguccgguccaguu

SEQ ID NO: 983387 - RNA, 19 nt, Artificial Sequence
  Description of Artificial Sequence: Synthetic oligonucleotide
  Antisense strand to SEQ ID NO: 983386
aacuggaccggacuagacc

SEQ ID NO: 983388 - RNA, 19 nt, Artificial Sequence
  Description of Artificial Sequence: Synthetic oligonucleotide
  Sense strand starting at position 2021 of SEQ ID NO: 914170
agagguuagauggguugaa

SEQ ID NO: 983389 - RNA, 19 nt, Artificial Sequence
  Description of Artificial Sequence: Synthetic oligonucleotide
  Antisense strand to SEQ ID NO: 983388
uucaacccaucuaaccucu

SEQ ID NO: 983390 - RNA, 19 nt, Artificial Sequence
  Description of Artificial Sequence: Synthetic oligonucleotide
  Sense strand starting at position 3473 of SEQ ID NO: 914170
agagaucuuauaggucuga

SEQ ID NO: 983391 - RNA, 19 nt, Artificial Sequence
  Description of Artificial Sequence: Synthetic oligonucleotide
  Antisense strand to SEQ ID NO: 983390
ucagaccuauaagaucucu

SEQ ID NO: 983392 - RNA, 19 nt, Artificial Sequence
  Description of Artificial Sequence: Synthetic oligonucleotide
  Sense strand starting at position 718 of SEQ ID NO: 914170
ucucguacugaugaaggau

SEQ ID NO: 983393 - RNA, 19 nt, Artificial Sequence
  Description of Artificial Sequence: Synthetic oligonucleotide
  Antisense strand to SEQ ID NO: 983392
auccuucaucaguacgaga

SEQ ID NO: 983394 - RNA, 19 nt, Artificial Sequence
  Description of Artificial Sequence: Synthetic oligonucleotide
  Sense strand starting at position 3513 of SEQ ID NO: 914170
gcugcauuggcuuucuagu

SEQ ID NO: 983395 - RNA, 19 nt, Artificial Sequence
  Description of Artificial Sequence: Synthetic oligonucleotide
  Antisense strand to SEQ ID NO: 983394
acuagaaagccaaugcagc

SEQ ID NO: 983396 - RNA, 19 nt, Artificial Sequence
  Description of Artificial Sequence: Synthetic oligonucleotide
  Sense strand starting at position 3338 of SEQ ID NO: 914170
uaauucugagaccaucgua

SEQ ID NO: 983397 - RNA, 19 nt, Artificial Sequence
  Description of Artificial Sequence: Synthetic oligonucleotide
  Antisense strand to SEQ ID NO: 983396
uacgauggucucagaauua

SEQ ID NO: 983398 - RNA, 19 nt, Artificial Sequence
  Description of Artificial Sequence: Synthetic oligonucleotide
  Sense strand starting at position 3637 of SEQ ID NO: 914170
agguaaucaugagucauga

SEQ ID NO: 983399 - RNA, 19 nt, Artificial Sequence
  Description of Artificial Sequence: Synthetic oligonucleotide
  Antisense strand to SEQ ID NO: 983398
ucaugacucaugauuaccu

SEQ ID NO: 983400 - RNA, 19 nt, Artificial Sequence
  Description of Artificial Sequence: Synthetic oligonucleotide
  Sense strand starting at position 854 of SEQ ID NO: 914170
uugagaaccgcagaucuua

SEQ ID NO: 983401 - RNA, 19 nt, Artificial Sequence
  Description of Artificial Sequence: Synthetic oligonucleotide
  Antisense strand to SEQ ID NO: 983400
uaagaucugcgguucucaa

SEQ ID NO: 983402 - RNA, 19 nt, Artificial Sequence
  Description of Artificial Sequence: Synthetic oligonucleotide
  Sense strand starting at position 3474 of SEQ ID NO: 914170
gagaucuuauaggucugau

SEQ ID NO: 983403 - RNA, 19 nt, Artificial Sequence
  Description of Artificial Sequence: Synthetic oligonucleotide
  Antisense strand to SEQ ID NO: 983402
aucagaccuauaagaucuc

SEQ ID NO: 983404 - RNA, 19 nt, Artificial Sequence
  Description of Artificial Sequence: Synthetic oligonucleotide
  Sense strand starting at position 2870 of SEQ ID NO: 914170
ccgcguucuaccguagaag

SEQ ID NO: 983405 - RNA, 19 nt, Artificial Sequence
  Description of Artificial Sequence: Synthetic oligonucleotide
  Antisense strand to SEQ ID NO: 983404
cuucuacgguagaacgcgg

SEQ ID NO: 983406 - RNA, 19 nt, Artificial Sequence
  Description of Artificial Sequence: Synthetic oligonucleotide
  Sense strand starting at position 2060 of SEQ ID NO: 914170
gaagcuuugggaggaguga

SEQ ID NO: 983407 - RNA, 19 nt, Artificial Sequence
  Description of Artificial Sequence: Synthetic oligonucleotide
  Antisense strand to SEQ ID NO: 983406
ucacuccucccaaagcuuc

SEQ ID NO: 983408 - RNA, 19 nt, Artificial Sequence
  Description of Artificial Sequence: Synthetic oligonucleotide
  Sense strand starting at position 3647 of SEQ ID NO: 914170
gagucaugaugagcaugga

SEQ ID NO: 983409 - RNA, 19 nt, Artificial Sequence
  Description of Artificial Sequence: Synthetic oligonucleotide
  Antisense strand to SEQ ID NO: 983408
uccaugcucaucaugacuc

SEQ ID NO: 983410 - RNA, 19 nt, Artificial Sequence
  Description of Artificial Sequence: Synthetic oligonucleotide
  Sense strand starting at position 3717 of SEQ ID NO: 914170
uggguaugugaucaaucuu

SEQ ID NO: 983411 - RNA, 19 nt, Artificial Sequence
  Description of Artificial Sequence: Synthetic oligonucleotide
  Antisense strand to SEQ ID NO: 983410
aagauugaucacauaccca

SEQ ID NO: 983412 - RNA, 19 nt, Artificial Sequence
  Description of Artificial Sequence: Synthetic oligonucleotide
  Sense strand starting at position 2574 of SEQ ID NO: 914170
gagauaaguucuuucucag

SEQ ID NO: 983413 - RNA, 19 nt, Artificial Sequence
  Description of Artificial Sequence: Synthetic oligonucleotide
  Antisense strand to SEQ ID NO: 983412
cugagaaagaacuuaucuc

SEQ ID NO: 983414 - RNA, 19 nt, Artificial Sequence
  Description of Artificial Sequence: Synthetic oligonucleotide
  Sense strand starting at position 2573 of SEQ ID NO: 914170
ggagauaaguucuuucuca

SEQ ID NO: 983415 - RNA, 19 nt, Artificial Sequence
  Description of Artificial Sequence: Synthetic oligonucleotide
  Antisense strand to SEQ ID NO: 983414
ugagaaagaacuuaucucc

SEQ ID NO: 983416 - RNA, 19 nt, Artificial Sequence
  Description of Artificial Sequence: Synthetic oligonucleotide
  Sense strand starting at position 3851 of SEQ ID NO: 914170
uguguuaacaugggaaauc

SEQ ID NO: 983417 - RNA, 19 nt, Artificial Sequence
  Description of Artificial Sequence: Synthetic oligonucleotide
  Antisense strand to SEQ ID NO: 983416
gauuucccauguuaacaca

SEQ ID NO: 983418 - RNA, 19 nt, Artificial Sequence
  Description of Artificial Sequence: Synthetic oligonucleotide
  Sense strand starting at position 3850 of SEQ ID NO: 914170
uuguguuaacaugggaaau

SEQ ID NO: 983419 - RNA, 19 nt, Artificial Sequence
  Description of Artificial Sequence: Synthetic oligonucleotide
  Antisense strand to SEQ ID NO: 983418
auuucccauguuaacacaa

SEQ ID NO: 983420 - RNA, 19 nt, Artificial Sequence
  Description of Artificial Sequence: Synthetic oligonucleotide
  Sense strand starting at position 120 of SEQ ID NO: 914170
gaagaauauuguguuacuc

SEQ ID NO: 983421 - RNA, 19 nt, Artificial Sequence
  Description of Artificial Sequence: Synthetic oligonucleotide
  Antisense strand to SEQ ID NO: 983420
gaguaacacaauauucuuc

SEQ ID NO: 983422 - RNA, 19 nt, Artificial Sequence
  Description of Artificial Sequence: Synthetic oligonucleotide
  Sense strand starting at position 8 of SEQ ID NO: 914170
cuauacaugcaauggagua

SEQ ID NO: 983423 - RNA, 19 nt, Artificial Sequence
  Description of Artificial Sequence: Synthetic oligonucleotide
  Antisense strand to SEQ ID NO: 983422
uacuccauugcauguauag

SEQ ID NO: 983424 - RNA, 19 nt, Artificial Sequence
  Description of Artificial Sequence: Synthetic oligonucleotide
  Sense strand starting at position 2477 of SEQ ID NO: 914170
guugguuuauaccugagaa

SEQ ID NO: 983425 - RNA, 19 nt, Artificial Sequence
  Description of Artificial Sequence: Synthetic oligonucleotide
  Antisense strand to SEQ ID NO: 983424
uucucagguauaaaccaac

SEQ ID NO: 983426 - RNA, 19 nt, Artificial Sequence
  Description of Artificial Sequence: Synthetic oligonucleotide
  Sense strand starting at position 2442 of SEQ ID NO: 914170
ggucauugacgaggugaga

SEQ ID NO: 983427 - RNA, 19 nt, Artificial Sequence
  Description of Artificial Sequence: Synthetic oligonucleotide
  Antisense strand to SEQ ID NO: 983426
ucucaccucgucaaugacc

SEQ ID NO: 983428 - RNA, 19 nt, Artificial Sequence
  Description of Artificial Sequence: Synthetic oligonucleotide
  Sense strand starting at position 252 of SEQ ID NO: 914170
gaguucugccaauggauag

SEQ ID NO: 983429 - RNA, 19 nt, Artificial Sequence
  Description of Artificial Sequence: Synthetic oligonucleotide
  Antisense strand to SEQ ID NO: 983428
cuauccauuggcagaacuc

SEQ ID NO: 983430 - RNA, 19 nt, Artificial Sequence
  Description of Artificial Sequence: Synthetic oligonucleotide
  Sense strand starting at position 670 of SEQ ID NO: 914170
acacgauuaugggcaaucu

SEQ ID NO: 983431 - RNA, 19 nt, Artificial Sequence
  Description of Artificial Sequence: Synthetic oligonucleotide
  Antisense strand to SEQ ID NO: 983430
agauugcccauaaucgugu

SEQ ID NO: 983432 - RNA, 19 nt, Artificial Sequence
  Description of Artificial Sequence: Synthetic oligonucleotide
  Sense strand starting at position 307 of SEQ ID NO: 914170
gccacugaacuguaucuuu

SEQ ID NO: 983433 - RNA, 19 nt, Artificial Sequence
  Description of Artificial Sequence: Synthetic oligonucleotide
  Antisense strand to SEQ ID NO: 983432
aaagauacaguucaguggc

SEQ ID NO: 983434 - RNA, 19 nt, Artificial Sequence
  Description of Artificial Sequence: Synthetic oligonucleotide
  Sense strand starting at position 738 of SEQ ID NO: 914170
acugauuuaucagauguua

SEQ ID NO: 983435 - RNA, 19 nt, Artificial Sequence
  Description of Artificial Sequence: Synthetic oligonucleotide
  Antisense strand to SEQ ID NO: 983434
uaacaucugauaaaucagu

SEQ ID NO: 983436 - RNA, 19 nt, Artificial Sequence
  Description of Artificial Sequence: Synthetic oligonucleotide
  Sense strand starting at position 3145 of SEQ ID NO: 914170
agccuuaacuuguccaaag

SEQ ID NO: 983437 - RNA, 19 nt, Artificial Sequence
  Description of Artificial Sequence: Synthetic oligonucleotide
  Antisense strand to SEQ ID NO: 983436
cuuuggacaaguuaaggcu

SEQ ID NO: 983438 - RNA, 19 nt, Artificial Sequence
  Description of Artificial Sequence: Synthetic oligonucleotide
  Sense strand starting at position 2979 of SEQ ID NO: 914170
ccaagucguggguaaaucu

SEQ ID NO: 983439 - RNA, 19 nt, Artificial Sequence
  Description of Artificial Sequence: Synthetic oligonucleotide
  Antisense strand to SEQ ID NO: 983438
agauuuacccacgacuugg

SEQ ID NO: 983440 - RNA, 19 nt, Artificial Sequence
  Description of Artificial Sequence: Synthetic oligonucleotide
  Sense strand starting at position 636 of SEQ ID NO: 914170
acaagagacucccaggaaa

SEQ ID NO: 983441 - RNA, 19 nt, Artificial Sequence
  Description of Artificial Sequence: Synthetic oligonucleotide
  Antisense strand to SEQ ID NO: 983440
uuuccugggagucucuugu

SEQ ID NO: 983442 - RNA, 19 nt, Artificial Sequence
  Description of Artificial Sequence: Synthetic oligonucleotide
  Sense strand starting at position 212 of SEQ ID NO: 914170
ggaguuguuuaacuacagu

SEQ ID NO: 983443 - RNA, 19 nt, Artificial Sequence
  Description of Artificial Sequence: Synthetic oligonucleotide
  Antisense strand to SEQ ID NO: 983442
acuguaguuaaacaacucc

SEQ ID NO: 983444 - RNA, 19 nt, Artificial Sequence
  Description of Artificial Sequence: Synthetic oligonucleotide
  Sense strand starting at position 74 of SEQ ID NO: 914170
gggauaaacuuugaagaca

SEQ ID NO: 983445 - RNA, 19 nt, Artificial Sequence
  Description of Artificial Sequence: Synthetic oligonucleotide
  Antisense strand to SEQ ID NO: 983444
ugucuucaaaguuuauccc

SEQ ID NO: 983446 - RNA, 19 nt, Artificial Sequence
  Description of Artificial Sequence: Synthetic oligonucleotide
  Sense strand starting at position 862 of SEQ ID NO: 914170
cgcagaucuuauuccuaga

SEQ ID NO: 983447 - RNA, 19 nt, Artificial Sequence
  Description of Artificial Sequence: Synthetic oligonucleotide
  Antisense strand to SEQ ID NO: 983446
ucuaggaauaagaucugcg

SEQ ID NO: 983448 - RNA, 19 nt, Artificial Sequence
  Description of Artificial Sequence: Synthetic oligonucleotide
  Sense strand starting at position 3716 of SEQ ID NO: 914170
guggguaugugaucaaucu

SEQ ID NO: 983449 - RNA, 19 nt, Artificial Sequence
  Description of Artificial Sequence: Synthetic oligonucleotide
  Antisense strand to SEQ ID NO: 983448
agauugaucacauacccac

SEQ ID NO: 983450 - RNA, 19 nt, Artificial Sequence
  Description of Artificial Sequence: Synthetic oligonucleotide
  Sense strand starting at position 2987 of SEQ ID NO: 914170
uggguaaaucuuugguuuc

SEQ ID NO: 983451 - RNA, 19 nt, Artificial Sequence
  Description of Artificial Sequence: Synthetic oligonucleotide
  Antisense strand to SEQ ID NO: 983450
gaaaccaaagauuuaccca

SEQ ID NO: 983452 - RNA, 19 nt, Artificial Sequence
  Description of Artificial Sequence: Synthetic oligonucleotide
  Sense strand starting at position 2577 of SEQ ID NO: 914170
auaaguucuuucucagguu

SEQ ID NO: 983453 - RNA, 19 nt, Artificial Sequence
  Description of Artificial Sequence: Synthetic oligonucleotide
  Antisense strand to SEQ ID NO: 983452
aaccugagaaagaacuuau

SEQ ID NO: 983454 - RNA, 19 nt, Artificial Sequence
  Description of Artificial Sequence: Synthetic oligonucleotide
  Sense strand starting at position 2976 of SEQ ID NO: 914170
ugaccaagucguggguaaa

SEQ ID NO: 983455 - RNA, 19 nt, Artificial Sequence
  Description of Artificial Sequence: Synthetic oligonucleotide
  Antisense strand to SEQ ID NO: 983454
uuuacccacgacuugguca

SEQ ID NO: 983456 - RNA, 19 nt, Artificial Sequence
  Description of Artificial Sequence: Synthetic oligonucleotide
  Sense strand starting at position 2977 of SEQ ID NO: 914170
gaccaagucguggguaaau

SEQ ID NO: 983457 - RNA, 19 nt, Artificial Sequence
  Description of Artificial Sequence: Synthetic oligonucleotide
  Antisense strand to SEQ ID NO: 983456
auuuacccacgacuugguc

SEQ ID NO: 983458 - RNA, 19 nt, Artificial Sequence
  Description of Artificial Sequence: Synthetic oligonucleotide
  Sense strand starting at position 3949 of SEQ ID NO: 914170
gcugaagccauguggagau

SEQ ID NO: 983459 - RNA, 19 nt, Artificial Sequence
  Description of Artificial Sequence: Synthetic oligonucleotide
  Antisense strand to SEQ ID NO: 983458
aucuccacauggcuucagc

SEQ ID NO: 983460 - RNA, 19 nt, Artificial Sequence
  Description of Artificial Sequence: Synthetic oligonucleotide
  Sense strand starting at position 253 of SEQ ID NO: 914170
aguucugccaauggauagu

SEQ ID NO: 983461 - RNA, 19 nt, Artificial Sequence
  Description of Artificial Sequence: Synthetic oligonucleotide
  Antisense strand to SEQ ID NO: 983460
acuauccauuggcagaacu

SEQ ID NO: 983462 - RNA, 19 nt, Artificial Sequence
  Description of Artificial Sequence: Synthetic oligonucleotide
  Sense strand starting at position 2645 of SEQ ID NO: 914170
ucuaguccgguccaguuaa

SEQ ID NO: 983463 - RNA, 19 nt, Artificial Sequence
  Description of Artificial Sequence: Synthetic oligonucleotide
  Antisense strand to SEQ ID NO: 983462
uuaacuggaccggacuaga

SEQ ID NO: 983464 - RNA, 19 nt, Artificial Sequence
  Description of Artificial Sequence: Synthetic oligonucleotide
  Sense strand starting at position 2986 of SEQ ID NO: 914170
guggguaaaucuuugguuu

SEQ ID NO: 983465 - RNA, 19 nt, Artificial Sequence
  Description of Artificial Sequence: Synthetic oligonucleotide
  Antisense strand to SEQ ID NO: 983464
aaaccaaagauuuacccac

SEQ ID NO: 983466 - RNA, 19 nt, Artificial Sequence
  Description of Artificial Sequence: Synthetic oligonucleotide
  Sense strand starting at position 622 of SEQ ID NO: 914171
uggugagauaauggaguaa

SEQ ID NO: 983467 - RNA, 19 nt, Artificial Sequence
  Description of Artificial Sequence: Synthetic oligonucleotide
  Antisense strand to SEQ ID NO: 983466
uuacuccauuaucucacca

SEQ ID NO: 983468 - RNA, 19 nt, Artificial Sequence
  Description of Artificial Sequence: Synthetic oligonucleotide
  Sense strand starting at position 3822 of SEQ ID NO: 914171
ugucucuugcccguugaua

SEQ ID NO: 983469 - RNA, 19 nt, Artificial Sequence
  Description of Artificial Sequence: Synthetic oligonucleotide
  Antisense strand to SEQ ID NO: 983468
uaucaacgggcaagagaca

SEQ ID NO: 983470 - RNA, 19 nt, Artificial Sequence
  Description of Artificial Sequence: Synthetic oligonucleotide
  Sense strand starting at position 1239 of SEQ ID NO: 914171
uggugagaucacgagguaa

SEQ ID NO: 983471 - RNA, 19 nt, Artificial Sequence
  Description of Artificial Sequence: Synthetic oligonucleotide
  Antisense strand to SEQ ID NO: 983470
uuaccucgugaucucacca

SEQ ID NO: 983472 - RNA, 19 nt, Artificial Sequence
  Description of Artificial Sequence: Synthetic oligonucleotide
  Sense strand starting at position 681 of SEQ ID NO: 914171
guuacuuuagggcaaagau

SEQ ID NO: 983473 - RNA, 19 nt, Artificial Sequence
  Description of Artificial Sequence: Synthetic oligonucleotide
  Antisense strand to SEQ ID NO: 983472
aucuuugcccuaaaguaac

SEQ ID NO: 983474 - RNA, 19 nt, Artificial Sequence
  Description of Artificial Sequence: Synthetic oligonucleotide
  Sense strand starting at position 2122 of SEQ ID NO: 914171
gaagaauugcacuggacug

SEQ ID NO: 983475 - RNA, 19 nt, Artificial Sequence
  Description of Artificial Sequence: Synthetic oligonucleotide
  Antisense strand to SEQ ID NO: 983474
caguccagugcaauucuuc

SEQ ID NO: 983476 - RNA, 19 nt, Artificial Sequence
  Description of Artificial Sequence: Synthetic oligonucleotide
  Sense strand starting at position 3579 of SEQ ID NO: 914171
uuugaaggcagaggauuau

SEQ ID NO: 983477 - RNA, 19 nt, Artificial Sequence
  Description of Artificial Sequence: Synthetic oligonucleotide
  Antisense strand to SEQ ID NO: 983476
auaauccucugccuucaaa

SEQ ID NO: 983478 - RNA, 19 nt, Artificial Sequence
  Description of Artificial Sequence: Synthetic oligonucleotide
  Sense strand starting at position 3271 of SEQ ID NO: 914171
guugaauaauuccucagag

SEQ ID NO: 983479 - RNA, 19 nt, Artificial Sequence
  Description of Artificial Sequence: Synthetic oligonucleotide
  Antisense strand to SEQ ID NO: 983478
cucugaggaauuauucaac

SEQ ID NO: 983480 - RNA, 19 nt, Artificial Sequence
  Description of Artificial Sequence: Synthetic oligonucleotide
  Sense strand starting at position 571 of SEQ ID NO: 914171
ggacucuugagaggcucaa

SEQ ID NO: 983481 - RNA, 19 nt, Artificial Sequence
  Description of Artificial Sequence: Synthetic oligonucleotide
  Antisense strand to SEQ ID NO: 983480
uugagccucucaagagucc

SEQ ID NO: 983482 - RNA, 19 nt, Artificial Sequence
  Description of Artificial Sequence: Synthetic oligonucleotide
  Sense strand starting at position 3262 of SEQ ID NO: 914171
aguggucuaguugaauaau

SEQ ID NO: 983483 - RNA, 19 nt, Artificial Sequence
  Description of Artificial Sequence: Synthetic oligonucleotide
  Antisense strand to SEQ ID NO: 983482
auuauucaacuagaccacu

SEQ ID NO: 983484 - RNA, 19 nt, Artificial Sequence
  Description of Artificial Sequence: Synthetic oligonucleotide
  Sense strand starting at position 2842 of SEQ ID NO: 914171
ucgcuuucccugcuuaagu

SEQ ID NO: 983485 - RNA, 19 nt, Artificial Sequence
  Description of Artificial Sequence: Synthetic oligonucleotide
  Antisense strand to SEQ ID NO: 983484
acuuaagcagggaaagcga

SEQ ID NO: 983486 - RNA, 19 nt, Artificial Sequence
  Description of Artificial Sequence: Synthetic oligonucleotide
  Sense strand starting at position 3310 of SEQ ID NO: 914171
aguuguuugauagggaaau

SEQ ID NO: 983487 - RNA, 19 nt, Artificial Sequence
  Description of Artificial Sequence: Synthetic oligonucleotide
  Antisense strand to SEQ ID NO: 983486
auuucccuaucaaacaacu

SEQ ID NO: 983488 - RNA, 19 nt, Artificial Sequence
  Description of Artificial Sequence: Synthetic oligonucleotide
  Sense strand starting at position 1131 of SEQ ID NO: 914171
cugugagaugggcacuuua

SEQ ID NO: 983489 - RNA, 19 nt, Artificial Sequence
  Description of Artificial Sequence: Synthetic oligonucleotide
  Antisense strand to SEQ ID NO: 983488
uaaagugcccaucucacag

SEQ ID NO: 983490 - RNA, 19 nt, Artificial Sequence
  Description of Artificial Sequence: Synthetic oligonucleotide
  Sense strand starting at position 491 of SEQ ID NO: 914171
gacuaauucugauugcagg

SEQ ID NO: 983491 - RNA, 19 nt, Artificial Sequence
  Description of Artificial Sequence: Synthetic oligonucleotide
  Antisense strand to SEQ ID NO: 983490
ccugcaaucagaauuaguc

SEQ ID NO: 983492 - RNA, 19 nt, Artificial Sequence
  Description of Artificial Sequence: Synthetic oligonucleotide
  Sense strand starting at position 1660 of SEQ ID NO: 914171
aucuaagggucuucggaaa

SEQ ID NO: 983493 - RNA, 19 nt, Artificial Sequence
  Description of Artificial Sequence: Synthetic oligonucleotide
  Antisense strand to SEQ ID NO: 983492
uuuccgaagacccuuagau

SEQ ID NO: 983494 - RNA, 19 nt, Artificial Sequence
  Description of Artificial Sequence: Synthetic oligonucleotide
  Sense strand starting at position 2471 of SEQ ID NO: 914171
gugaaauuaucagcaaacu

SEQ ID NO: 983495 - RNA, 19 nt, Artificial Sequence
  Description of Artificial Sequence: Synthetic oligonucleotide
  Antisense strand to SEQ ID NO: 983494
aguuugcugauaauuucac

SEQ ID NO: 983496 - RNA, 19 nt, Artificial Sequence
  Description of Artificial Sequence: Synthetic oligonucleotide
  Sense strand starting at position 3651 of SEQ ID NO: 914171
gaguaugugcuacauugaa

SEQ ID NO: 983497 - RNA, 19 nt, Artificial Sequence
  Description of Artificial Sequence: Synthetic oligonucleotide
  Antisense strand to SEQ ID NO: 983496
uucaauguagcacauacuc

SEQ ID NO: 983498 - RNA, 19 nt, Artificial Sequence
  Description of Artificial Sequence: Synthetic oligonucleotide
  Sense strand starting at position 614 of SEQ ID NO: 914171
auuguugcuggugagauaa

SEQ ID NO: 983499 - RNA, 19 nt, Artificial Sequence
  Description of Artificial Sequence: Synthetic oligonucleotide
  Antisense strand to SEQ ID NO: 983498
uuaucucaccagcaacaau

SEQ ID NO: 983500 - RNA, 19 nt, Artificial Sequence
  Description of Artificial Sequence: Synthetic oligonucleotide
  Sense strand starting at position 2001 of SEQ ID NO: 914171
gcgauucggccuaaugcga

SEQ ID NO: 983501 - RNA, 19 nt, Artificial Sequence
  Description of Artificial Sequence: Synthetic oligonucleotide
  Antisense strand to SEQ ID NO: 983500
ucgcauuaggccgaaucgc

SEQ ID NO: 983502 - RNA, 19 nt, Artificial Sequence
  Description of Artificial Sequence: Synthetic oligonucleotide
  Sense strand starting at position 2384 of SEQ ID NO: 914171
cggaaaguagccuaaguau

SEQ ID NO: 983503 - RNA, 19 nt, Artificial Sequence
  Description of Artificial Sequence: Synthetic oligonucleotide
  Antisense strand to SEQ ID NO: 983502
auacuuaggcuacuuuccg

SEQ ID NO: 983504 - RNA, 19 nt, Artificial Sequence
  Description of Artificial Sequence: Synthetic oligonucleotide
  Sense strand starting at position 2052 of SEQ ID NO: 914171
gauuccugucucuagguca

SEQ ID NO: 983505 - RNA, 19 nt, Artificial Sequence
  Description of Artificial Sequence: Synthetic oligonucleotide
  Antisense strand to SEQ ID NO: 983504
ugaccuagagacaggaauc

SEQ ID NO: 983506 - RNA, 19 nt, Artificial Sequence
  Description of Artificial Sequence: Synthetic oligonucleotide
  Sense strand starting at position 2588 of SEQ ID NO: 914171
uguagagucuuauuaccaa

SEQ ID NO: 983507 - RNA, 19 nt, Artificial Sequence
  Description of Artificial Sequence: Synthetic oligonucleotide
  Antisense strand to SEQ ID NO: 983506
uugguaauaagacucuaca

SEQ ID NO: 983508 - RNA, 19 nt, Artificial Sequence
  Description of Artificial Sequence: Synthetic oligonucleotide
  Sense strand starting at position 509 of SEQ ID NO: 914171
ggaagugcaugguucaaga

SEQ ID NO: 983509 - RNA, 19 nt, Artificial Sequence
  Description of Artificial Sequence: Synthetic oligonucleotide
  Antisense strand to SEQ ID NO: 983508
ucuugaaccaugcacuucc

SEQ ID NO: 983510 - RNA, 19 nt, Artificial Sequence
  Description of Artificial Sequence: Synthetic oligonucleotide
  Sense strand starting at position 507 of SEQ ID NO: 914171
agggaagugcaugguucaa

SEQ ID NO: 983511 - RNA, 19 nt, Artificial Sequence
  Description of Artificial Sequence: Synthetic oligonucleotide
  Antisense strand to SEQ ID NO: 983510
uugaaccaugcacuucccu

SEQ ID NO: 983512 - RNA, 19 nt, Artificial Sequence
  Description of Artificial Sequence: Synthetic oligonucleotide
  Sense strand starting at position 1368 of SEQ ID NO: 914171
ucgucuauagacugaaauc

SEQ ID NO: 983513 - RNA, 19 nt, Artificial Sequence
  Description of Artificial Sequence: Synthetic oligonucleotide
  Antisense strand to SEQ ID NO: 983512
gauuucagucuauagacga

SEQ ID NO: 983514 - RNA, 19 nt, Artificial Sequence
  Description of Artificial Sequence: Synthetic oligonucleotide
  Sense strand starting at position 731 of SEQ ID NO: 914171
uaagacuccuaguugugau

SEQ ID NO: 983515 - RNA, 19 nt, Artificial Sequence
  Description of Artificial Sequence: Synthetic oligonucleotide
  Antisense strand to SEQ ID NO: 983514
aucacaacuaggagucuua

SEQ ID NO: 983516 - RNA, 19 nt, Artificial Sequence
  Description of Artificial Sequence: Synthetic oligonucleotide
  Sense strand starting at position 3789 of SEQ ID NO: 914171
cugaauguugucuagcaua

SEQ ID NO: 983517 - RNA, 19 nt, Artificial Sequence
  Description of Artificial Sequence: Synthetic oligonucleotide
  Antisense strand to SEQ ID NO: 983516
uaugcuagacaacauucag

SEQ ID NO: 983518 - RNA, 19 nt, Artificial Sequence
  Description of Artificial Sequence: Synthetic oligonucleotide
  Sense strand starting at position 3492 of SEQ ID NO: 914171
uccuacaucuuugugauca

SEQ ID NO: 983519 - RNA, 19 nt, Artificial Sequence
  Description of Artificial Sequence: Synthetic oligonucleotide
  Antisense strand to SEQ ID NO: 983518
ugaucacaaagauguagga

SEQ ID NO: 983520 - RNA, 19 nt, Artificial Sequence
  Description of Artificial Sequence: Synthetic oligonucleotide
  Sense strand starting at position 286 of SEQ ID NO: 914171
cuucuuaggguuugaagua

SEQ ID NO: 983521 - RNA, 19 nt, Artificial Sequence
  Description of Artificial Sequence: Synthetic oligonucleotide
  Antisense strand to SEQ ID NO: 983520
uacuucaaacccuaagaag

SEQ ID NO: 983522 - RNA, 19 nt, Artificial Sequence
  Description of Artificial Sequence: Synthetic oligonucleotide
  Sense strand starting at position 3327 of SEQ ID NO: 914171
auugcugguguuuauugaa

SEQ ID NO: 983523 - RNA, 19 nt, Artificial Sequence
  Description of Artificial Sequence: Synthetic oligonucleotide
  Antisense strand to SEQ ID NO: 983522
uucaauaaacaccagcaau

SEQ ID NO: 983524 - RNA, 19 nt, Artificial Sequence
  Description of Artificial Sequence: Synthetic oligonucleotide
  Sense strand starting at position 3767 of SEQ ID NO: 914171
cuaaaccaucuauguugua

SEQ ID NO: 983525 - RNA, 19 nt, Artificial Sequence
  Description of Artificial Sequence: Synthetic oligonucleotide
  Antisense strand to SEQ ID NO: 983524
uacaacauagaugguuuag

SEQ ID NO: 983526 - RNA, 19 nt, Artificial Sequence
  Description of Artificial Sequence: Synthetic oligonucleotide
  Sense strand starting at position 2802 of SEQ ID NO: 914171
aucuauagccugcaguaua

SEQ ID NO: 983527 - RNA, 19 nt, Artificial Sequence
  Description of Artificial Sequence: Synthetic oligonucleotide
  Antisense strand to SEQ ID NO: 983526
uauacugcaggcuauagau

SEQ ID NO: 983528 - RNA, 19 nt, Artificial Sequence
  Description of Artificial Sequence: Synthetic oligonucleotide
  Sense strand starting at position 3257 of SEQ ID NO: 914171
cucccaguggucuaguuga

SEQ ID NO: 983529 - RNA, 19 nt, Artificial Sequence
  Description of Artificial Sequence: Synthetic oligonucleotide
  Antisense strand to SEQ ID NO: 983528
ucaacuagaccacugggag

SEQ ID NO: 983530 - RNA, 19 nt, Artificial Sequence
  Description of Artificial Sequence: Synthetic oligonucleotide
  Sense strand starting at position 2601 of SEQ ID NO: 914171
uaccaagugucugucagaa

SEQ ID NO: 983531 - RNA, 19 nt, Artificial Sequence
  Description of Artificial Sequence: Synthetic oligonucleotide
  Antisense strand to SEQ ID NO: 983530
uucugacagacacuuggua

SEQ ID NO: 983532 - RNA, 19 nt, Artificial Sequence
  Description of Artificial Sequence: Synthetic oligonucleotide
  Sense strand starting at position 545 of SEQ ID NO: 914171
aaguuagucugggucuuaa

SEQ ID NO: 983533 - RNA, 19 nt, Artificial Sequence
  Description of Artificial Sequence: Synthetic oligonucleotide
  Antisense strand to SEQ ID NO: 983532
uuaagacccagacuaacuu

SEQ ID NO: 983534 - RNA, 19 nt, Artificial Sequence
  Description of Artificial Sequence: Synthetic oligonucleotide
  Sense strand starting at position 1590 of SEQ ID NO: 914171
auauuacgucacuggguga

SEQ ID NO: 983535 - RNA, 19 nt, Artificial Sequence
  Description of Artificial Sequence: Synthetic oligonucleotide
  Antisense strand to SEQ ID NO: 983534
ucacccagugacguaauau

SEQ ID NO: 983536 - RNA, 19 nt, Artificial Sequence
  Description of Artificial Sequence: Synthetic oligonucleotide
  Sense strand starting at position 3619 of SEQ ID NO: 914171
guguaucucugacuuaacu

SEQ ID NO: 983537 - RNA, 19 nt, Artificial Sequence
  Description of Artificial Sequence: Synthetic oligonucleotide
  Antisense strand to SEQ ID NO: 983536
aguuaagucagagauacac

SEQ ID NO: 983538 - RNA, 19 nt, Artificial Sequence
  Description of Artificial Sequence: Synthetic oligonucleotide
  Sense strand starting at position 3491 of SEQ ID NO: 914171
uuccuacaucuuugugauc

SEQ ID NO: 983539 - RNA, 19 nt, Artificial Sequence
  Description of Artificial Sequence: Synthetic oligonucleotide
  Antisense strand to SEQ ID NO: 983538
gaucacaaagauguaggaa

SEQ ID NO: 983540 - RNA, 19 nt, Artificial Sequence
  Description of Artificial Sequence: Synthetic oligonucleotide
  Sense strand starting at position 3745 of SEQ ID NO: 914171
uggauuauuccgggccuga

SEQ ID NO: 983541 - RNA, 19 nt, Artificial Sequence
  Description of Artificial Sequence: Synthetic oligonucleotide
  Antisense strand to SEQ ID NO: 983540
ucaggcccggaauaaucca

SEQ ID NO: 983542 - RNA, 19 nt, Artificial Sequence
  Description of Artificial Sequence: Synthetic oligonucleotide
  Sense strand starting at position 1576 of SEQ ID NO: 914171
cuaguccucguccaauauu

SEQ ID NO: 983543 - RNA, 19 nt, Artificial Sequence
  Description of Artificial Sequence: Synthetic oligonucleotide
  Antisense strand to SEQ ID NO: 983542
aauauuggacgaggacuag

SEQ ID NO: 983544 - RNA, 19 nt, Artificial Sequence
  Description of Artificial Sequence: Synthetic oligonucleotide
  Sense strand starting at position 3252 of SEQ ID NO: 914171
uuaaucucccaguggucua

SEQ ID NO: 983545 - RNA, 19 nt, Artificial Sequence
  Description of Artificial Sequence: Synthetic oligonucleotide
  Antisense strand to SEQ ID NO: 983544
uagaccacugggagauuaa

SEQ ID NO: 983546 - RNA, 19 nt, Artificial Sequence
  Description of Artificial Sequence: Synthetic oligonucleotide
  Sense strand starting at position 552 of SEQ ID NO: 914172
uaggguagauaaucaacuu

SEQ ID NO: 983547 - RNA, 19 nt, Artificial Sequence
  Description of Artificial Sequence: Synthetic oligonucleotide
  Antisense strand to SEQ ID NO: 983546
aaguugauuaucuacccua

SEQ ID NO: 983548 - RNA, 19 nt, Artificial Sequence
  Description of Artificial Sequence: Synthetic oligonucleotide
  Sense strand starting at position 3420 of SEQ ID NO: 914172
guauguucccuggaaggaa

SEQ ID NO: 983549 - RNA, 19 nt, Artificial Sequence
  Description of Artificial Sequence: Synthetic oligonucleotide
  Antisense strand to SEQ ID NO: 983548
uuccuuccagggaacauac

SEQ ID NO: 983550 - RNA, 19 nt, Artificial Sequence
  Description of Artificial Sequence: Synthetic oligonucleotide
  Sense strand starting at position 3211 of SEQ ID NO: 914172
caugcaguccaagagaacu

SEQ ID NO: 983551 - RNA, 19 nt, Artificial Sequence
  Description of Artificial Sequence: Synthetic oligonucleotide
  Antisense strand to SEQ ID NO: 983550
aguucucuuggacugcaug

SEQ ID NO: 983552 - RNA, 19 nt, Artificial Sequence
  Description of Artificial Sequence: Synthetic oligonucleotide
  Sense strand starting at position 3609 of SEQ ID NO: 914172
uuaaucauucucugggaga

SEQ ID NO: 983553 - RNA, 19 nt, Artificial Sequence
  Description of Artificial Sequence: Synthetic oligonucleotide
  Antisense strand to SEQ ID NO: 983552
ucucccagagaaugauuaa

SEQ ID NO: 983554 - RNA, 19 nt, Artificial Sequence
  Description of Artificial Sequence: Synthetic oligonucleotide
  Sense strand starting at position 2383 of SEQ ID NO: 914172
cuucuuauggacugaagau

SEQ ID NO: 983555 - RNA, 19 nt, Artificial Sequence
  Description of Artificial Sequence: Synthetic oligonucleotide
  Antisense strand to SEQ ID NO: 983554
aucuucaguccauaagaag

SEQ ID NO: 983556 - RNA, 19 nt, Artificial Sequence
  Description of Artificial Sequence: Synthetic oligonucleotide
  Sense strand starting at position 2078 of SEQ ID NO: 914172
uccagaauuuagugaauuu

SEQ ID NO: 983557 - RNA, 19 nt, Artificial Sequence
  Description of Artificial Sequence: Synthetic oligonucleotide
  Antisense strand to SEQ ID NO: 983556
aaauucacuaaauucugga

SEQ ID NO: 983558 - RNA, 19 nt, Artificial Sequence
  Description of Artificial Sequence: Synthetic oligonucleotide
  Sense strand starting at position 3145 of SEQ ID NO: 914172
aucuguucugaguaaagau

SEQ ID NO: 983559 - RNA, 19 nt, Artificial Sequence
  Description of Artificial Sequence: Synthetic oligonucleotide
  Antisense strand to SEQ ID NO: 983558
aucuuuacucagaacagau

SEQ ID NO: 983560 - RNA, 19 nt, Artificial Sequence
  Description of Artificial Sequence: Synthetic oligonucleotide
  Sense strand starting at position 602 of SEQ ID NO: 914172
aguguaucugacuagacac

SEQ ID NO: 983561 - RNA, 19 nt, Artificial Sequence
  Description of Artificial Sequence: Synthetic oligonucleotide
  Antisense strand to SEQ ID NO: 983560
gugucuagucagauacacu

SEQ ID NO: 983562 - RNA, 19 nt, Artificial Sequence
  Description of Artificial Sequence: Synthetic oligonucleotide
  Sense strand starting at position 3178 of SEQ ID NO: 914172
aacacugauggcgaguaaa

SEQ ID NO: 983563 - RNA, 19 nt, Artificial Sequence
  Description of Artificial Sequence: Synthetic oligonucleotide
  Antisense strand to SEQ ID NO: 983562
uuuacucgccaucaguguu

SEQ ID NO: 983564 - RNA, 19 nt, Artificial Sequence
  Description of Artificial Sequence: Synthetic oligonucleotide
  Sense strand starting at position 3826 of SEQ ID NO: 914172
gucauaauaugacuacaug

SEQ ID NO: 983565 - RNA, 19 nt, Artificial Sequence
  Description of Artificial Sequence: Synthetic oligonucleotide
  Antisense strand to SEQ ID NO: 983564
cauguagucauauuaugac

SEQ ID NO: 983566 - RNA, 19 nt, Artificial Sequence
  Description of Artificial Sequence: Synthetic oligonucleotide
  Sense strand starting at position 491 of SEQ ID NO: 914172
gacagaaagcuuugggauu

SEQ ID NO: 983567 - RNA, 19 nt, Artificial Sequence
  Description of Artificial Sequence: Synthetic oligonucleotide
  Antisense strand to SEQ ID NO: 983566
aaucccaaagcuuucuguc

SEQ ID NO: 983568 - RNA, 19 nt, Artificial Sequence
  Description of Artificial Sequence: Synthetic oligonucleotide
  Sense strand starting at position 2979 of SEQ ID NO: 914172
ccaguaucaggcuaacaca

SEQ ID NO: 983569 - RNA, 19 nt, Artificial Sequence
  Description of Artificial Sequence: Synthetic oligonucleotide
  Antisense strand to SEQ ID NO: 983568
uguguuagccugauacugg

SEQ ID NO: 983570 - RNA, 19 nt, Artificial Sequence
  Description of Artificial Sequence: Synthetic oligonucleotide
  Sense strand starting at position 3086 of SEQ ID NO: 914172
ccaugaauaugcuuaugaa

SEQ ID NO: 983571 - RNA, 19 nt, Artificial Sequence
  Description of Artificial Sequence: Synthetic oligonucleotide
  Antisense strand to SEQ ID NO: 983570
uucauaagcauauucaugg

SEQ ID NO: 983572 - RNA, 19 nt, Artificial Sequence
  Description of Artificial Sequence: Synthetic oligonucleotide
  Sense strand starting at position 2790 of SEQ ID NO: 914172
cuugaaaccuuggcaaaca

SEQ ID NO: 983573 - RNA, 19 nt, Artificial Sequence
  Description of Artificial Sequence: Synthetic oligonucleotide
  Antisense strand to SEQ ID NO: 983572
uguuugccaagguuucaag

SEQ ID NO: 983574 - RNA, 19 nt, Artificial Sequence
  Description of Artificial Sequence: Synthetic oligonucleotide
  Sense strand starting at position 3874 of SEQ ID NO: 914172
ugcuaaacacgauacuuau

SEQ ID NO: 983575 - RNA, 19 nt, Artificial Sequence
  Description of Artificial Sequence: Synthetic oligonucleotide
  Antisense strand to SEQ ID NO: 983574
auaaguaucguguuuagca

SEQ ID NO: 983576 - RNA, 19 nt, Artificial Sequence
  Description of Artificial Sequence: Synthetic oligonucleotide
  Sense strand starting at position 1675 of SEQ ID NO: 914172
uaaagugacuugccaaaga

SEQ ID NO: 983577 - RNA, 19 nt, Artificial Sequence
  Description of Artificial Sequence: Synthetic oligonucleotide
  Antisense strand to SEQ ID NO: 983576
ucuuuggcaagucacuuua

SEQ ID NO: 983578 - RNA, 19 nt, Artificial Sequence
  Description of Artificial Sequence: Synthetic oligonucleotide
  Sense strand starting at position 3607 of SEQ ID NO: 914172
ucuuaaucauucucuggga

SEQ ID NO: 983579 - RNA, 19 nt, Artificial Sequence
  Description of Artificial Sequence: Synthetic oligonucleotide
  Antisense strand to SEQ ID NO: 983578
ucccagagaaugauuaaga

SEQ ID NO: 983580 - RNA, 19 nt, Artificial Sequence
  Description of Artificial Sequence: Synthetic oligonucleotide
  Sense strand starting at position 601 of SEQ ID NO: 914172
aaguguaucugacuagaca

SEQ ID NO: 983581 - RNA, 19 nt, Artificial Sequence
  Description of Artificial Sequence: Synthetic oligonucleotide
  Antisense strand to SEQ ID NO: 983580
ugucuagucagauacacuu

SEQ ID NO: 983582 - RNA, 19 nt, Artificial Sequence
  Description of Artificial Sequence: Synthetic oligonucleotide
  Sense strand starting at position 2536 of SEQ ID NO: 914172
caagaagaagccuguuuga

SEQ ID NO: 983583 - RNA, 19 nt, Artificial Sequence
  Description of Artificial Sequence: Synthetic oligonucleotide
  Antisense strand to SEQ ID NO: 983582
ucaaacaggcuucuucuug

SEQ ID NO: 983584 - RNA, 19 nt, Artificial Sequence
  Description of Artificial Sequence: Synthetic oligonucleotide
  Sense strand starting at position 3675 of SEQ ID NO: 914172
ggaauauuaaaugguugca

SEQ ID NO: 983585 - RNA, 19 nt, Artificial Sequence
  Description of Artificial Sequence: Synthetic oligonucleotide
  Antisense strand to SEQ ID NO: 983584
ugcaaccauuuaauauucc

SEQ ID NO: 983586 - RNA, 19 nt, Artificial Sequence
  Description of Artificial Sequence: Synthetic oligonucleotide
  Sense strand starting at position 2293 of SEQ ID NO: 914172
ccauaaaguccuggugaag

SEQ ID NO: 983587 - RNA, 19 nt, Artificial Sequence
  Description of Artificial Sequence: Synthetic oligonucleotide
  Antisense strand to SEQ ID NO: 983586
cuucaccaggacuuuaugg

SEQ ID NO: 983588 - RNA, 19 nt, Artificial Sequence
  Description of Artificial Sequence: Synthetic oligonucleotide
  Sense strand starting at position 1130 of SEQ ID NO: 914172
cugugauugggccacuaua

SEQ ID NO: 983589 - RNA, 19 nt, Artificial Sequence
  Description of Artificial Sequence: Synthetic oligonucleotide
  Antisense strand to SEQ ID NO: 983588
uauaguggcccaaucacag

SEQ ID NO: 983590 - RNA, 19 nt, Artificial Sequence
  Description of Artificial Sequence: Synthetic oligonucleotide
  Sense strand starting at position 733 of SEQ ID NO: 914172
accugaaagucuuugacuu

SEQ ID NO: 983591 - RNA, 19 nt, Artificial Sequence
  Description of Artificial Sequence: Synthetic oligonucleotide
  Antisense strand to SEQ ID NO: 983590
aagucaaagacuuucaggu

SEQ ID NO: 983592 - RNA, 19 nt, Artificial Sequence
  Description of Artificial Sequence: Synthetic oligonucleotide
  Sense strand starting at position 2375 of SEQ ID NO: 914172
ugauaaugcuucuuaugga

SEQ ID NO: 983593 - RNA, 19 nt, Artificial Sequence
  Description of Artificial Sequence: Synthetic oligonucleotide
  Antisense strand to SEQ ID NO: 983592
uccauaagaagcauuauca

SEQ ID NO: 983594 - RNA, 19 nt, Artificial Sequence
  Description of Artificial Sequence: Synthetic oligonucleotide
  Sense strand starting at position 3418 of SEQ ID NO: 914172
aaguauguucccuggaagg

SEQ ID NO: 983595 - RNA, 19 nt, Artificial Sequence
  Description of Artificial Sequence: Synthetic oligonucleotide
  Antisense strand to SEQ ID NO: 983594
ccuuccagggaacauacuu

SEQ ID NO: 983596 - RNA, 19 nt, Artificial Sequence
  Description of Artificial Sequence: Synthetic oligonucleotide
  Sense strand starting at position 2150 of SEQ ID NO: 914172
ggacucagguauccuccua

SEQ ID NO: 983597 - RNA, 19 nt, Artificial Sequence
  Description of Artificial Sequence: Synthetic oligonucleotide
  Antisense strand to SEQ ID NO: 983596
uaggaggauaccugagucc

SEQ ID NO: 983598 - RNA, 19 nt, Artificial Sequence
  Description of Artificial Sequence: Synthetic oligonucleotide
  Sense strand starting at position 2539 of SEQ ID NO: 914172
gaagaagccuguuugaauc

SEQ ID NO: 983599 - RNA, 19 nt, Artificial Sequence
  Description of Artificial Sequence: Synthetic oligonucleotide
  Antisense strand to SEQ ID NO: 983598
gauucaaacaggcuucuuc

SEQ ID NO: 983600 - RNA, 19 nt, Artificial Sequence
  Description of Artificial Sequence: Synthetic oligonucleotide
  Sense strand starting at position 2130 of SEQ ID NO: 914172
auaucaucuguguagucaa

SEQ ID NO: 983601 - RNA, 19 nt, Artificial Sequence
  Description of Artificial Sequence: Synthetic oligonucleotide
  Antisense strand to SEQ ID NO: 983600
uugacuacacagaugauau

SEQ ID NO: 983602 - RNA, 19 nt, Artificial Sequence
  Description of Artificial Sequence: Synthetic oligonucleotide
  Sense strand starting at position 3129 of SEQ ID NO: 914172
auguuagcagucuaagauc

SEQ ID NO: 983603 - RNA, 19 nt, Artificial Sequence
  Description of Artificial Sequence: Synthetic oligonucleotide
  Antisense strand to SEQ ID NO: 983602
gaucuuagacugcuaacau

SEQ ID NO: 983604 - RNA, 19 nt, Artificial Sequence
  Description of Artificial Sequence: Synthetic oligonucleotide
  Sense strand starting at position 3417 of SEQ ID NO: 914172
caaguauguucccuggaag

SEQ ID NO: 983605 - RNA, 19 nt, Artificial Sequence
  Description of Artificial Sequence: Synthetic oligonucleotide
  Antisense strand to SEQ ID NO: 983604
cuuccagggaacauacuug

SEQ ID NO: 983606 - RNA, 19 nt, Artificial Sequence
  Description of Artificial Sequence: Synthetic oligonucleotide
  Sense strand starting at position 734 of SEQ ID NO: 914172
ccugaaagucuuugacuug

SEQ ID NO: 983607 - RNA, 19 nt, Artificial Sequence
  Description of Artificial Sequence: Synthetic oligonucleotide
  Antisense strand to SEQ ID NO: 983606
caagucaaagacuuucagg

SEQ ID NO: 983608 - RNA, 19 nt, Artificial Sequence
  Description of Artificial Sequence: Synthetic oligonucleotide
  Sense strand starting at position 360 of SEQ ID NO: 914172
aauuaucuuggguggcaaa

SEQ ID NO: 983609 - RNA, 19 nt, Artificial Sequence
  Description of Artificial Sequence: Synthetic oligonucleotide
  Antisense strand to SEQ ID NO: 983608
uuugccacccaagauaauu

SEQ ID NO: 983610 - RNA, 19 nt, Artificial Sequence
  Description of Artificial Sequence: Synthetic oligonucleotide
  Sense strand starting at position 3847 of SEQ ID NO: 914172
augaaauaguagcuacagu

SEQ ID NO: 983611 - RNA, 19 nt, Artificial Sequence
  Description of Artificial Sequence: Synthetic oligonucleotide
  Antisense strand to SEQ ID NO: 983610
acuguagcuacuauuucau

SEQ ID NO: 983612 - RNA, 19 nt, Artificial Sequence
  Description of Artificial Sequence: Synthetic oligonucleotide
  Sense strand starting at position 263 of SEQ ID NO: 914172
ggaccauuguucuuuauac

SEQ ID NO: 983613 - RNA, 19 nt, Artificial Sequence
  Description of Artificial Sequence: Synthetic oligonucleotide
  Antisense strand to SEQ ID NO: 983612
guauaaagaacaauggucc

SEQ ID NO: 983614 - RNA, 19 nt, Artificial Sequence
  Description of Artificial Sequence: Synthetic oligonucleotide
  Sense strand starting at position 2474 of SEQ ID NO: 914172
gucucaucauccucugaag

SEQ ID NO: 983615 - RNA, 19 nt, Artificial Sequence
  Description of Artificial Sequence: Synthetic oligonucleotide
  Antisense strand to SEQ ID NO: 983614
cuucagaggaugaugagac

SEQ ID NO: 983616 - RNA, 19 nt, Artificial Sequence
  Description of Artificial Sequence: Synthetic oligonucleotide
  Sense strand starting at position 137 of SEQ ID NO: 914172
cuagauaagcuuggcaaca

SEQ ID NO: 983617 - RNA, 19 nt, Artificial Sequence
  Description of Artificial Sequence: Synthetic oligonucleotide
  Antisense strand to SEQ ID NO: 983616
uguugccaagcuuaucuag

SEQ ID NO: 983618 - RNA, 19 nt, Artificial Sequence
  Description of Artificial Sequence: Synthetic oligonucleotide
  Sense strand starting at position 3137 of SEQ ID NO: 914172
agucuaagaucuguucuga

SEQ ID NO: 983619 - RNA, 19 nt, Artificial Sequence
  Description of Artificial Sequence: Synthetic oligonucleotide
  Antisense strand to SEQ ID NO: 983618
ucagaacagaucuuagacu

SEQ ID NO: 983620 - RNA, 19 nt, Artificial Sequence
  Description of Artificial Sequence: Synthetic oligonucleotide
  Sense strand starting at position 359 of SEQ ID NO: 914172
uaauuaucuuggguggcaa

SEQ ID NO: 983621 - RNA, 19 nt, Artificial Sequence
  Description of Artificial Sequence: Synthetic oligonucleotide
  Antisense strand to SEQ ID NO: 983620
uugccacccaagauaauua

SEQ ID NO: 983622 - RNA, 19 nt, Artificial Sequence
  Description of Artificial Sequence: Synthetic oligonucleotide
  Sense strand starting at position 2304 of SEQ ID NO: 914172
uggugaaguggauguaauu

SEQ ID NO: 983623 - RNA, 19 nt, Artificial Sequence
  Description of Artificial Sequence: Synthetic oligonucleotide
  Antisense strand to SEQ ID NO: 983622
aauuacauccacuucacca

SEQ ID NO: 983624 - RNA, 19 nt, Artificial Sequence
  Description of Artificial Sequence: Synthetic oligonucleotide
  Sense strand starting at position 3869 of SEQ ID NO: 914172
guaugugcuaaacacgaua

SEQ ID NO: 983625 - RNA, 19 nt, Artificial Sequence
  Description of Artificial Sequence: Synthetic oligonucleotide
  Antisense strand to SEQ ID NO: 983624
uaucguguuuagcacauac

SEQ ID NO: 983626 - RNA, 19 nt, Artificial Sequence
  Description of Artificial Sequence: Synthetic oligonucleotide
  Sense strand starting at position 1509 of SEQ ID NO: 914173
agaagauauuuggauacuc

SEQ ID NO: 983627 - RNA, 19 nt, Artificial Sequence
  Description of Artificial Sequence: Synthetic oligonucleotide
  Antisense strand to SEQ ID NO: 983626
gaguauccaaauaucuucu

SEQ ID NO: 983628 - RNA, 19 nt, Artificial Sequence
  Description of Artificial Sequence: Synthetic oligonucleotide
  Sense strand starting at position 182 of SEQ ID NO: 914173
ggacuucuuauuggaauug

SEQ ID NO: 983629 - RNA, 19 nt, Artificial Sequence
  Description of Artificial Sequence: Synthetic oligonucleotide
  Antisense strand to SEQ ID NO: 983628
caauuccaauaagaagucc

SEQ ID NO: 983630 - RNA, 19 nt, Artificial Sequence
  Description of Artificial Sequence: Synthetic oligonucleotide
  Sense strand starting at position 1523 of SEQ ID NO: 914173
uacucaaguguguaggaaa

SEQ ID NO: 983631 - RNA, 19 nt, Artificial Sequence
  Description of Artificial Sequence: Synthetic oligonucleotide
  Antisense strand to SEQ ID NO: 983630
uuuccuacacacuugagua

SEQ ID NO: 983632 - RNA, 19 nt, Artificial Sequence
  Description of Artificial Sequence: Synthetic oligonucleotide
  Sense strand starting at position 1530 of SEQ ID NO: 914173
guguguaggaaauacucaa

SEQ ID NO: 983633 - RNA, 19 nt, Artificial Sequence
  Description of Artificial Sequence: Synthetic oligonucleotide
  Antisense strand to SEQ ID NO: 983632
uugaguauuuccuacacac

SEQ ID NO: 983634 - RNA, 19 nt, Artificial Sequence
  Description of Artificial Sequence: Synthetic oligonucleotide
  Sense strand starting at position 3291 of SEQ ID NO: 914173
gcaagacaucaccagcuaa

SEQ ID NO: 983635 - RNA, 19 nt, Artificial Sequence
  Description of Artificial Sequence: Synthetic oligonucleotide
  Antisense strand to SEQ ID NO: 983634
uuagcuggugaugucuugc

SEQ ID NO: 983636 - RNA, 19 nt, Artificial Sequence
  Description of Artificial Sequence: Synthetic oligonucleotide
  Sense strand starting at position 3479 of SEQ ID NO: 914173
gugguaagucaugugcugu

SEQ ID NO: 983637 - RNA, 19 nt, Artificial Sequence
  Description of Artificial Sequence: Synthetic oligonucleotide
  Antisense strand to SEQ ID NO: 983636
acagcacaugacuuaccac

SEQ ID NO: 983638 - RNA, 19 nt, Artificial Sequence
  Description of Artificial Sequence: Synthetic oligonucleotide
  Sense strand starting at position 180 of SEQ ID NO: 914173
cuggacuucuuauuggaau

SEQ ID NO: 983639 - RNA, 19 nt, Artificial Sequence
  Description of Artificial Sequence: Synthetic oligonucleotide
  Antisense strand to SEQ ID NO: 983638
auuccaauaagaaguccag

SEQ ID NO: 983640 - RNA, 19 nt, Artificial Sequence
  Description of Artificial Sequence: Synthetic oligonucleotide
  Sense strand starting at position 223 of SEQ ID NO: 914173
uugggagaaguaugaugua

SEQ ID NO: 983641 - RNA, 19 nt, Artificial Sequence
  Description of Artificial Sequence: Synthetic oligonucleotide
  Antisense strand to SEQ ID NO: 983640
uacaucauacuucucccaa

SEQ ID NO: 983642 - RNA, 19 nt, Artificial Sequence
  Description of Artificial Sequence: Synthetic oligonucleotide
  Sense strand starting at position 1945 of SEQ ID NO: 914173
guccucauagaguaacuua

SEQ ID NO: 983643 - RNA, 19 nt, Artificial Sequence
  Description of Artificial Sequence: Synthetic oligonucleotide
  Antisense strand to SEQ ID NO: 983642
uaaguuacucuaugaggac

SEQ ID NO: 983644 - RNA, 19 nt, Artificial Sequence
  Description of Artificial Sequence: Synthetic oligonucleotide
  Sense strand starting at position 1845 of SEQ ID NO: 914173
uugacagaugaacguuaaa

SEQ ID NO: 983645 - RNA, 19 nt, Artificial Sequence
  Description of Artificial Sequence: Synthetic oligonucleotide
  Antisense strand to SEQ ID NO: 983644
uuuaacguucaucugucaa

SEQ ID NO: 983646 - RNA, 19 nt, Artificial Sequence
  Description of Artificial Sequence: Synthetic oligonucleotide
  Sense strand starting at position 308 of SEQ ID NO: 914173
agaaaugucuuaucccuga

SEQ ID NO: 983647 - RNA, 19 nt, Artificial Sequence
  Description of Artificial Sequence: Synthetic oligonucleotide
  Antisense strand to SEQ ID NO: 983646
ucagggauaagacauuucu

SEQ ID NO: 983648 - RNA, 19 nt, Artificial Sequence
  Description of Artificial Sequence: Synthetic oligonucleotide
  Sense strand starting at position 2200 of SEQ ID NO: 914173
aucauuguugagggugaaa

SEQ ID NO: 983649 - RNA, 19 nt, Artificial Sequence
  Description of Artificial Sequence: Synthetic oligonucleotide
  Antisense strand to SEQ ID NO: 983648
uuucacccucaacaaugau

SEQ ID NO: 983650 - RNA, 19 nt, Artificial Sequence
  Description of Artificial Sequence: Synthetic oligonucleotide
  Sense strand starting at position 1988 of SEQ ID NO: 914173
uuuauaguucucgaacaca

SEQ ID NO: 983651 - RNA, 19 nt, Artificial Sequence
  Description of Artificial Sequence: Synthetic oligonucleotide
  Antisense strand to SEQ ID NO: 983650
uguguucgagaacuauaaa

SEQ ID NO: 983652 - RNA, 19 nt, Artificial Sequence
  Description of Artificial Sequence: Synthetic oligonucleotide
  Sense strand starting at position 576 of SEQ ID NO: 914173
gucugaaguuuauuaagaa

SEQ ID NO: 983653 - RNA, 19 nt, Artificial Sequence
  Description of Artificial Sequence: Synthetic oligonucleotide
  Antisense strand to SEQ ID NO: 983652
uucuuaauaaacuucagac

SEQ ID NO: 983654 - RNA, 19 nt, Artificial Sequence
  Description of Artificial Sequence: Synthetic oligonucleotide
  Sense strand starting at position 420 of SEQ ID NO: 914173
aaaucuguuucucugagga

SEQ ID NO: 983655 - RNA, 19 nt, Artificial Sequence
  Description of Artificial Sequence: Synthetic oligonucleotide
  Antisense strand to SEQ ID NO: 983654
uccucagagaaacagauuu

SEQ ID NO: 983656 - RNA, 19 nt, Artificial Sequence
  Description of Artificial Sequence: Synthetic oligonucleotide
  Sense strand starting at position 565 of SEQ ID NO: 914173
cauacuaucuggucugaag

SEQ ID NO: 983657 - RNA, 19 nt, Artificial Sequence
  Description of Artificial Sequence: Synthetic oligonucleotide
  Antisense strand to SEQ ID NO: 983656
cuucagaccagauaguaug

SEQ ID NO: 983658 - RNA, 19 nt, Artificial Sequence
  Description of Artificial Sequence: Synthetic oligonucleotide
  Sense strand starting at position 944 of SEQ ID NO: 914173
aagaguaaucaguguuaaa

SEQ ID NO: 983659 - RNA, 19 nt, Artificial Sequence
  Description of Artificial Sequence: Synthetic oligonucleotide
  Antisense strand to SEQ ID NO: 983658
uuuaacacugauuacucuu

SEQ ID NO: 983660 - RNA, 19 nt, Artificial Sequence
  Description of Artificial Sequence: Synthetic oligonucleotide
  Sense strand starting at position 719 of SEQ ID NO: 914173
ugcacaugugaacaaaguu

SEQ ID NO: 983661 - RNA, 19 nt, Artificial Sequence
  Description of Artificial Sequence: Synthetic oligonucleotide
  Antisense strand to SEQ ID NO: 983660
aacuuuguucacaugugca

SEQ ID NO: 983662 - RNA, 19 nt, Artificial Sequence
  Description of Artificial Sequence: Synthetic oligonucleotide
  Sense strand starting at position 940 of SEQ ID NO: 914173
auuaaagaguaaucagugu

SEQ ID NO: 983663 - RNA, 19 nt, Artificial Sequence
  Description of Artificial Sequence: Synthetic oligonucleotide
  Antisense strand to SEQ ID NO: 983662
acacugauuacucuuuaau

SEQ ID NO: 983664 - RNA, 19 nt, Artificial Sequence
  Description of Artificial Sequence: Synthetic oligonucleotide
  Sense strand starting at position 842 of SEQ ID NO: 914173
guuuaugcucucguugcau

SEQ ID NO: 983665 - RNA, 19 nt, Artificial Sequence
  Description of Artificial Sequence: Synthetic oligonucleotide
  Antisense strand to SEQ ID NO: 983664
augcaacgagagcauaaac

SEQ ID NO: 983666 - RNA, 19 nt, Artificial Sequence
  Description of Artificial Sequence: Synthetic oligonucleotide
  Sense strand starting at position 1522 of SEQ ID NO: 914173
auacucaaguguguaggaa

SEQ ID NO: 983667 - RNA, 19 nt, Artificial Sequence
  Description of Artificial Sequence: Synthetic oligonucleotide
  Antisense strand to SEQ ID NO: 983666
uuccuacacacuugaguau

SEQ ID NO: 983668 - RNA, 19 nt, Artificial Sequence
  Description of Artificial Sequence: Synthetic oligonucleotide
  Sense strand starting at position 3187 of SEQ ID NO: 914173
gagauugcccugcaucaug

SEQ ID NO: 983669 - RNA, 19 nt, Artificial Sequence
  Description of Artificial Sequence: Synthetic oligonucleotide
  Antisense strand to SEQ ID NO: 983668
caugaugcagggcaaucuc

SEQ ID NO: 983670 - RNA, 19 nt, Artificial Sequence
  Description of Artificial Sequence: Synthetic oligonucleotide
  Sense strand starting at position 537 of SEQ ID NO: 914173
uaggguuugcuauaguuaa

SEQ ID NO: 983671 - RNA, 19 nt, Artificial Sequence
  Description of Artificial Sequence: Synthetic oligonucleotide
  Antisense strand to SEQ ID NO: 983670
uuaacuauagcaaacccua

SEQ ID NO: 983672 - RNA, 19 nt, Artificial Sequence
  Description of Artificial Sequence: Synthetic oligonucleotide
  Sense strand starting at position 1891 of SEQ ID NO: 914173
acuuuacccuuugugagau

SEQ ID NO: 983673 - RNA, 19 nt, Artificial Sequence
  Description of Artificial Sequence: Synthetic oligonucleotide
  Antisense strand to SEQ ID NO: 983672
aucucacaaaggguaaagu

SEQ ID NO: 983674 - RNA, 19 nt, Artificial Sequence
  Description of Artificial Sequence: Synthetic oligonucleotide
  Sense strand starting at position 600 of SEQ ID NO: 914173
cuagaauacuuccuuuggu

SEQ ID NO: 983675 - RNA, 19 nt, Artificial Sequence
  Description of Artificial Sequence: Synthetic oligonucleotide
  Antisense strand to SEQ ID NO: 983674
accaaaggaaguauucuag

SEQ ID NO: 983676 - RNA, 19 nt, Artificial Sequence
  Description of Artificial Sequence: Synthetic oligonucleotide
  Sense strand starting at position 2192 of SEQ ID NO: 914173
caaagcugaucauuguuga

SEQ ID NO: 983677 - RNA, 19 nt, Artificial Sequence
  Description of Artificial Sequence: Synthetic oligonucleotide
  Antisense strand to SEQ ID NO: 983676
ucaacaaugaucagcuuug

SEQ ID NO: 983678 - RNA, 19 nt, Artificial Sequence
  Description of Artificial Sequence: Synthetic oligonucleotide
  Sense strand starting at position 3045 of SEQ ID NO: 914173
gauauuacaagguguggua

SEQ ID NO: 983679 - RNA, 19 nt, Artificial Sequence
  Description of Artificial Sequence: Synthetic oligonucleotide
  Antisense strand to SEQ ID NO: 983678
uaccacaccuuguaauauc

SEQ ID NO: 983680 - RNA, 19 nt, Artificial Sequence
  Description of Artificial Sequence: Synthetic oligonucleotide
  Sense strand starting at position 1721 of SEQ ID NO: 914173
cagguauuguaucuuaaug

SEQ ID NO: 983681 - RNA, 19 nt, Artificial Sequence
  Description of Artificial Sequence: Synthetic oligonucleotide
  Antisense strand to SEQ ID NO: 983680
cauuaagauacaauaccug

SEQ ID NO: 983682 - RNA, 19 nt, Artificial Sequence
  Description of Artificial Sequence: Synthetic oligonucleotide
  Sense strand starting at position 313 of SEQ ID NO: 914173
ugucuuaucccugaguuac

SEQ ID NO: 983683 - RNA, 19 nt, Artificial Sequence
  Description of Artificial Sequence: Synthetic oligonucleotide
  Antisense strand to SEQ ID NO: 983682
guaacucagggauaagaca

SEQ ID NO: 983684 - RNA, 19 nt, Artificial Sequence
  Description of Artificial Sequence: Synthetic oligonucleotide
  Sense strand starting at position 1009 of SEQ ID NO: 914173
ugugcagaaauauguagau

SEQ ID NO: 983685 - RNA, 19 nt, Artificial Sequence
  Description of Artificial Sequence: Synthetic oligonucleotide
  Antisense strand to SEQ ID NO: 983684
aucuacauauuucugcaca

SEQ ID NO: 983686 - RNA, 19 nt, Artificial Sequence
  Description of Artificial Sequence: Synthetic oligonucleotide
  Sense strand starting at position 2767 of SEQ ID NO: 914173
gaggcaugccuauggacau

SEQ ID NO: 983687 - RNA, 19 nt, Artificial Sequence
  Description of Artificial Sequence: Synthetic oligonucleotide
  Antisense strand to SEQ ID NO: 983686
auguccauaggcaugccuc

SEQ ID NO: 983688 - RNA, 19 nt, Artificial Sequence
  Description of Artificial Sequence: Synthetic oligonucleotide
  Sense strand starting at position 767 of SEQ ID NO: 914173
uugguugguacuuauguca

SEQ ID NO: 983689 - RNA, 19 nt, Artificial Sequence
  Description of Artificial Sequence: Synthetic oligonucleotide
  Antisense strand to SEQ ID NO: 983688
ugacauaaguaccaaccaa

SEQ ID NO: 983690 - RNA, 19 nt, Artificial Sequence
  Description of Artificial Sequence: Synthetic oligonucleotide
  Sense strand starting at position 1519 of SEQ ID NO: 914173
uggauacucaaguguguag

SEQ ID NO: 983691 - RNA, 19 nt, Artificial Sequence
  Description of Artificial Sequence: Synthetic oligonucleotide
  Antisense strand to SEQ ID NO: 983690
cuacacacuugaguaucca

SEQ ID NO: 983692 - RNA, 19 nt, Artificial Sequence
  Description of Artificial Sequence: Synthetic oligonucleotide
  Sense strand starting at position 678 of SEQ ID NO: 914173
agugacugcaaacgauuau

SEQ ID NO: 983693 - RNA, 19 nt, Artificial Sequence
  Description of Artificial Sequence: Synthetic oligonucleotide
  Antisense strand to SEQ ID NO: 983692
auaaucguuugcagucacu

SEQ ID NO: 983694 - RNA, 19 nt, Artificial Sequence
  Description of Artificial Sequence: Synthetic oligonucleotide
  Sense strand starting at position 3527 of SEQ ID NO: 914173
guuuacugccuaugaaaug

SEQ ID NO: 983695 - RNA, 19 nt, Artificial Sequence
  Description of Artificial Sequence: Synthetic oligonucleotide
  Antisense strand to SEQ ID NO: 983694
cauuucauaggcaguaaac

SEQ ID NO: 983696 - RNA, 19 nt, Artificial Sequence
  Description of Artificial Sequence: Synthetic oligonucleotide
  Sense strand starting at position 1906 of SEQ ID NO: 914173
agauaaucagucuggccuu

SEQ ID NO: 983697 - RNA, 19 nt, Artificial Sequence
  Description of Artificial Sequence: Synthetic oligonucleotide
  Antisense strand to SEQ ID NO: 983696
aaggccagacugauuaucu

SEQ ID NO: 983698 - RNA, 19 nt, Artificial Sequence
  Description of Artificial Sequence: Synthetic oligonucleotide
  Sense strand starting at position 567 of SEQ ID NO: 914173
uacuaucuggucugaaguu

SEQ ID NO: 983699 - RNA, 19 nt, Artificial Sequence
  Description of Artificial Sequence: Synthetic oligonucleotide
  Antisense strand to SEQ ID NO: 983698
aacuucagaccagauagua

SEQ ID NO: 983700 - RNA, 19 nt, Artificial Sequence
  Description of Artificial Sequence: Synthetic oligonucleotide
  Sense strand starting at position 1912 of SEQ ID NO: 914173
ucagucuggccuugggaau

SEQ ID NO: 983701 - RNA, 19 nt, Artificial Sequence
  Description of Artificial Sequence: Synthetic oligonucleotide
  Antisense strand to SEQ ID NO: 983700
auucccaaggccagacuga

SEQ ID NO: 983702 - RNA, 19 nt, Artificial Sequence
  Description of Artificial Sequence: Synthetic oligonucleotide
  Sense strand starting at position 1913 of SEQ ID NO: 914173
cagucuggccuugggaauu

SEQ ID NO: 983703 - RNA, 19 nt, Artificial Sequence
  Description of Artificial Sequence: Synthetic oligonucleotide
  Antisense strand to SEQ ID NO: 983702
aauucccaaggccagacug

SEQ ID NO: 983704 - RNA, 19 nt, Artificial Sequence
  Description of Artificial Sequence: Synthetic oligonucleotide
  Sense strand starting at position 3185 of SEQ ID NO: 914173
cagagauugcccugcauca

SEQ ID NO: 983705 - RNA, 19 nt, Artificial Sequence
  Description of Artificial Sequence: Synthetic oligonucleotide
  Antisense strand to SEQ ID NO: 983704
ugaugcagggcaaucucug

SEQ ID NO: 983706 - RNA, 19 nt, Artificial Sequence
  Description of Artificial Sequence: Synthetic oligonucleotide
  Sense strand starting at position 133 of SEQ ID NO: 914174
ggacuagucuuaccagaaa

SEQ ID NO: 983707 - RNA, 19 nt, Artificial Sequence
  Description of Artificial Sequence: Synthetic oligonucleotide
  Antisense strand to SEQ ID NO: 983706
uuucugguaagacuagucc

SEQ ID NO: 983708 - RNA, 19 nt, Artificial Sequence
  Description of Artificial Sequence: Synthetic oligonucleotide
  Sense strand starting at position 10 of SEQ ID NO: 914174
gccagaggaugaucaauca

SEQ ID NO: 983709 - RNA, 19 nt, Artificial Sequence
  Description of Artificial Sequence: Synthetic oligonucleotide
  Antisense strand to SEQ ID NO: 983708
ugauugaucauccucuggc

SEQ ID NO: 983710 - RNA, 19 nt, Artificial Sequence
  Description of Artificial Sequence: Synthetic oligonucleotide
  Sense strand starting at position 739 of SEQ ID NO: 914174
aucccaaagguguaauuau

SEQ ID NO: 983711 - RNA, 19 nt, Artificial Sequence
  Description of Artificial Sequence: Synthetic oligonucleotide
  Antisense strand to SEQ ID NO: 983710
auaauuacaccuuugggau

SEQ ID NO: 983712 - RNA, 19 nt, Artificial Sequence
  Description of Artificial Sequence: Synthetic oligonucleotide
  Sense strand starting at position 94 of SEQ ID NO: 914174
gagcuauuugcaugucaaa

SEQ ID NO: 983713 - RNA, 19 nt, Artificial Sequence
  Description of Artificial Sequence: Synthetic oligonucleotide
  Antisense strand to SEQ ID NO: 983712
uuugacaugcaaauagcuc

SEQ ID NO: 983714 - RNA, 19 nt, Artificial Sequence
  Description of Artificial Sequence: Synthetic oligonucleotide
  Sense strand starting at position 2937 of SEQ ID NO: 914174
ugagaacugugacucagau

SEQ ID NO: 983715 - RNA, 19 nt, Artificial Sequence
  Description of Artificial Sequence: Synthetic oligonucleotide
  Antisense strand to SEQ ID NO: 983714
aucugagucacaguucuca

SEQ ID NO: 983716 - RNA, 19 nt, Artificial Sequence
  Description of Artificial Sequence: Synthetic oligonucleotide
  Sense strand starting at position 846 of SEQ ID NO: 914174
uccauucgucucgcacuau

SEQ ID NO: 983717 - RNA, 19 nt, Artificial Sequence
  Description of Artificial Sequence: Synthetic oligonucleotide
  Antisense strand to SEQ ID NO: 983716
auagugcgagacgaaugga

SEQ ID NO: 983718 - RNA, 19 nt, Artificial Sequence
  Description of Artificial Sequence: Synthetic oligonucleotide
  Sense strand starting at position 3199 of SEQ ID NO: 914174
gugcaauacaaugggaaga

SEQ ID NO: 983719 - RNA, 19 nt, Artificial Sequence
  Description of Artificial Sequence: Synthetic oligonucleotide
  Antisense strand to SEQ ID NO: 983718
ucuucccauuguauugcac

SEQ ID NO: 983720 - RNA, 19 nt, Artificial Sequence
  Description of Artificial Sequence: Synthetic oligonucleotide
  Sense strand starting at position 3451 of SEQ ID NO: 914174
cagguuucugaagacuagu

SEQ ID NO: 983721 - RNA, 19 nt, Artificial Sequence
  Description of Artificial Sequence: Synthetic oligonucleotide
  Antisense strand to SEQ ID NO: 983720
acuagucuucagaaaccug

SEQ ID NO: 983722 - RNA, 19 nt, Artificial Sequence
  Description of Artificial Sequence: Synthetic oligonucleotide
  Sense strand starting at position 682 of SEQ ID NO: 914174
cagggugaucucuaaaguu

SEQ ID NO: 983723 - RNA, 19 nt, Artificial Sequence
  Description of Artificial Sequence: Synthetic oligonucleotide
  Antisense strand to SEQ ID NO: 983722
aacuuuagagaucacccug

SEQ ID NO: 983724 - RNA, 19 nt, Artificial Sequence
  Description of Artificial Sequence: Synthetic oligonucleotide
  Sense strand starting at position 3020 of SEQ ID NO: 914174
agcaauacagucugagaaa

SEQ ID NO: 983725 - RNA, 19 nt, Artificial Sequence
  Description of Artificial Sequence: Synthetic oligonucleotide
  Antisense strand to SEQ ID NO: 983724
uuucucagacuguauugcu

SEQ ID NO: 983726 - RNA, 19 nt, Artificial Sequence
  Description of Artificial Sequence: Synthetic oligonucleotide
  Sense strand starting at position 3561 of SEQ ID NO: 914174
ccaaauacuucuccgaaag

SEQ ID NO: 983727 - RNA, 19 nt, Artificial Sequence
  Description of Artificial Sequence: Synthetic oligonucleotide
  Antisense strand to SEQ ID NO: 983726
cuuucggagaaguauuugg

SEQ ID NO: 983728 - RNA, 19 nt, Artificial Sequence
  Description of Artificial Sequence: Synthetic oligonucleotide
  Sense strand starting at position 573 of SEQ ID NO: 914174
cuugcugcuggcuaauuua

SEQ ID NO: 983729 - RNA, 19 nt, Artificial Sequence
  Description of Artificial Sequence: Synthetic oligonucleotide
  Antisense strand to SEQ ID NO: 983728
uaaauuagccagcagcaag

SEQ ID NO: 983730 - RNA, 19 nt, Artificial Sequence
  Description of Artificial Sequence: Synthetic oligonucleotide
  Sense strand starting at position 3454 of SEQ ID NO: 914174
guuucugaagacuaguauu

SEQ ID NO: 983731 - RNA, 19 nt, Artificial Sequence
  Description of Artificial Sequence: Synthetic oligonucleotide
  Antisense strand to SEQ ID NO: 983730
aauacuagucuucagaaac

SEQ ID NO: 983732 - RNA, 19 nt, Artificial Sequence
  Description of Artificial Sequence: Synthetic oligonucleotide
  Sense strand starting at position 3585 of SEQ ID NO: 914174
ggauucccagguuagcaau

SEQ ID NO: 983733 - RNA, 19 nt, Artificial Sequence
  Description of Artificial Sequence: Synthetic oligonucleotide
  Antisense strand to SEQ ID NO: 983732
auugcuaaccugggaaucc

SEQ ID NO: 983734 - RNA, 19 nt, Artificial Sequence
  Description of Artificial Sequence: Synthetic oligonucleotide
  Sense strand starting at position 125 of SEQ ID NO: 914174
cugguaauggacuagucuu

SEQ ID NO: 983735 - RNA, 19 nt, Artificial Sequence
  Description of Artificial Sequence: Synthetic oligonucleotide
  Antisense strand to SEQ ID NO: 983734
aagacuaguccauuaccag

SEQ ID NO: 983736 - RNA, 19 nt, Artificial Sequence
  Description of Artificial Sequence: Synthetic oligonucleotide
  Sense strand starting at position 1642 of SEQ ID NO: 914174
aauggaaguuaccucagua

SEQ ID NO: 983737 - RNA, 19 nt, Artificial Sequence
  Description of Artificial Sequence: Synthetic oligonucleotide
  Antisense strand to SEQ ID NO: 983736
uacugagguaacuuccauu

SEQ ID NO: 983738 - RNA, 19 nt, Artificial Sequence
  Description of Artificial Sequence: Synthetic oligonucleotide
  Sense strand starting at position 2726 of SEQ ID NO: 914174
aaaguuaggguguacaagu

SEQ ID NO: 983739 - RNA, 19 nt, Artificial Sequence
  Description of Artificial Sequence: Synthetic oligonucleotide
  Antisense strand to SEQ ID NO: 983738
acuuguacacccuaacuuu

SEQ ID NO: 983740 - RNA, 19 nt, Artificial Sequence
  Description of Artificial Sequence: Synthetic oligonucleotide
  Sense strand starting at position 412 of SEQ ID NO: 914174
auugucuacguagaauaca

SEQ ID NO: 983741 - RNA, 19 nt, Artificial Sequence
  Description of Artificial Sequence: Synthetic oligonucleotide
  Antisense strand to SEQ ID NO: 983740
uguauucuacguagacaau

SEQ ID NO: 983742 - RNA, 19 nt, Artificial Sequence
  Description of Artificial Sequence: Synthetic oligonucleotide
  Sense strand starting at position 3744 of SEQ ID NO: 914174
guggucucccaucacuaaa

SEQ ID NO: 983743 - RNA, 19 nt, Artificial Sequence
  Description of Artificial Sequence: Synthetic oligonucleotide
  Antisense strand to SEQ ID NO: 983742
uuuagugaugggagaccac

SEQ ID NO: 983744 - RNA, 19 nt, Artificial Sequence
  Description of Artificial Sequence: Synthetic oligonucleotide
  Sense strand starting at position 2934 of SEQ ID NO: 914174
cuuugagaacugugacuca

SEQ ID NO: 983745 - RNA, 19 nt, Artificial Sequence
  Description of Artificial Sequence: Synthetic oligonucleotide
  Antisense strand to SEQ ID NO: 983744
ugagucacaguucucaaag

SEQ ID NO: 983746 - RNA, 19 nt, Artificial Sequence
  Description of Artificial Sequence: Synthetic oligonucleotide
  Sense strand starting at position 3247 of SEQ ID NO: 914174
cacauugggcuauaauguu

SEQ ID NO: 983747 - RNA, 19 nt, Artificial Sequence
  Description of Artificial Sequence: Synthetic oligonucleotide
  Antisense strand to SEQ ID NO: 983746
aacauuauagcccaaugug

SEQ ID NO: 983748 - RNA, 19 nt, Artificial Sequence
  Description of Artificial Sequence: Synthetic oligonucleotide
  Sense strand starting at position 215 of SEQ ID NO: 914174
gggcccaaauucuuaauau

SEQ ID NO: 983749 - RNA, 19 nt, Artificial Sequence
  Description of Artificial Sequence: Synthetic oligonucleotide
  Antisense strand to SEQ ID NO: 983748
auauuaagaauuugggccc

SEQ ID NO: 983750 - RNA, 19 nt, Artificial Sequence
  Description of Artificial Sequence: Synthetic oligonucleotide
  Sense strand starting at position 3243 of SEQ ID NO: 914174
guaacacauugggcuauaa

SEQ ID NO: 983751 - RNA, 19 nt, Artificial Sequence
  Description of Artificial Sequence: Synthetic oligonucleotide
  Antisense strand to SEQ ID NO: 983750
uuauagcccaauguguuac

SEQ ID NO: 983752 - RNA, 19 nt, Artificial Sequence
  Description of Artificial Sequence: Synthetic oligonucleotide
  Sense strand starting at position 90 of SEQ ID NO: 914174
guaggagcuauuugcaugu

SEQ ID NO: 983753 - RNA, 19 nt, Artificial Sequence
  Description of Artificial Sequence: Synthetic oligonucleotide
  Antisense strand to SEQ ID NO: 983752
acaugcaaauagcuccuac

SEQ ID NO: 983754 - RNA, 19 nt, Artificial Sequence
  Description of Artificial Sequence: Synthetic oligonucleotide
  Sense strand starting at position 3280 of SEQ ID NO: 914174
aucgcuaguccauaggaau

SEQ ID NO: 983755 - RNA, 19 nt, Artificial Sequence
  Description of Artificial Sequence: Synthetic oligonucleotide
  Antisense strand to SEQ ID NO: 983754
auuccuauggacuagcgau

SEQ ID NO: 983756 - RNA, 19 nt, Artificial Sequence
  Description of Artificial Sequence: Synthetic oligonucleotide
  Sense strand starting at position 226 of SEQ ID NO: 914174
cuuaauauuuggcaaagga

SEQ ID NO: 983757 - RNA, 19 nt, Artificial Sequence
  Description of Artificial Sequence: Synthetic oligonucleotide
  Antisense strand to SEQ ID NO: 983756
uccuuugccaaauauuaag

SEQ ID NO: 983758 - RNA, 19 nt, Artificial Sequence
  Description of Artificial Sequence: Synthetic oligonucleotide
  Sense strand starting at position 240 of SEQ ID NO: 914174
aaggauguuucuuugagug

SEQ ID NO: 983759 - RNA, 19 nt, Artificial Sequence
  Description of Artificial Sequence: Synthetic oligonucleotide
  Antisense strand to SEQ ID NO: 983758
cacucaaagaaacauccuu

SEQ ID NO: 983760 - RNA, 19 nt, Artificial Sequence
  Description of Artificial Sequence: Synthetic oligonucleotide
  Sense strand starting at position 3457 of SEQ ID NO: 914174
ucugaagacuaguauuuau

SEQ ID NO: 983761 - RNA, 19 nt, Artificial Sequence
  Description of Artificial Sequence: Synthetic oligonucleotide
  Antisense strand to SEQ ID NO: 983760
auaaauacuagucuucaga

SEQ ID NO: 983762 - RNA, 19 nt, Artificial Sequence
  Description of Artificial Sequence: Synthetic oligonucleotide
  Sense strand starting at position 3386 of SEQ ID NO: 914174
guauacgcuguuuaagaaa

SEQ ID NO: 983763 - RNA, 19 nt, Artificial Sequence
  Description of Artificial Sequence: Synthetic oligonucleotide
  Antisense strand to SEQ ID NO: 983762
uuucuuaaacagcguauac

SEQ ID NO: 983764 - RNA, 19 nt, Artificial Sequence
  Description of Artificial Sequence: Synthetic oligonucleotide
  Sense strand starting at position 3158 of SEQ ID NO: 914174
aaaccuguucugcauguga

SEQ ID NO: 983765 - RNA, 19 nt, Artificial Sequence
  Description of Artificial Sequence: Synthetic oligonucleotide
  Antisense strand to SEQ ID NO: 983764
ucacaugcagaacagguuu

SEQ ID NO: 983766 - RNA, 19 nt, Artificial Sequence
  Description of Artificial Sequence: Synthetic oligonucleotide
  Sense strand starting at position 948 of SEQ ID NO: 914174
cuaucugcggauuaaaugu

SEQ ID NO: 983767 - RNA, 19 nt, Artificial Sequence
  Description of Artificial Sequence: Synthetic oligonucleotide
  Antisense strand to SEQ ID NO: 983766
acauuuaauccgcagauag

SEQ ID NO: 983768 - RNA, 19 nt, Artificial Sequence
  Description of Artificial Sequence: Synthetic oligonucleotide
  Sense strand starting at position 2952 of SEQ ID NO: 914174
agauuagguuuggucucua

SEQ ID NO: 983769 - RNA, 19 nt, Artificial Sequence
  Description of Artificial Sequence: Synthetic oligonucleotide
  Antisense strand to SEQ ID NO: 983768
uagagaccaaaccuaaucu

SEQ ID NO: 983770 - RNA, 19 nt, Artificial Sequence
  Description of Artificial Sequence: Synthetic oligonucleotide
  Sense strand starting at position 3051 of SEQ ID NO: 914174
caauuucgugauugugcga

SEQ ID NO: 983771 - RNA, 19 nt, Artificial Sequence
  Description of Artificial Sequence: Synthetic oligonucleotide
  Antisense strand to SEQ ID NO: 983770
ucgcacaaucacgaaauug

SEQ ID NO: 983772 - RNA, 19 nt, Artificial Sequence
  Description of Artificial Sequence: Synthetic oligonucleotide
  Sense strand starting at position 323 of SEQ ID NO: 914174
ggauaccuguacuugcaau

SEQ ID NO: 983773 - RNA, 19 nt, Artificial Sequence
  Description of Artificial Sequence: Synthetic oligonucleotide
  Antisense strand to SEQ ID NO: 983772
auugcaaguacagguaucc

SEQ ID NO: 983774 - RNA, 19 nt, Artificial Sequence
  Description of Artificial Sequence: Synthetic oligonucleotide
  Sense strand starting at position 672 of SEQ ID NO: 914174
gggaguuggccagggugau

SEQ ID NO: 983775 - RNA, 19 nt, Artificial Sequence
  Description of Artificial Sequence: Synthetic oligonucleotide
  Antisense strand to SEQ ID NO: 983774
aucacccuggccaacuccc

SEQ ID NO: 983776 - RNA, 19 nt, Artificial Sequence
  Description of Artificial Sequence: Synthetic oligonucleotide
  Sense strand starting at position 2957 of SEQ ID NO: 914174
agguuuggucucuaaggcu

SEQ ID NO: 983777 - RNA, 19 nt, Artificial Sequence
  Description of Artificial Sequence: Synthetic oligonucleotide
  Antisense strand to SEQ ID NO: 983776
agccuuagagaccaaaccu

SEQ ID NO: 983778 - RNA, 19 nt, Artificial Sequence
  Description of Artificial Sequence: Synthetic oligonucleotide
  Sense strand starting at position 3273 of SEQ ID NO: 914174
cuaugacaucgcuagucca

SEQ ID NO: 983779 - RNA, 19 nt, Artificial Sequence
  Description of Artificial Sequence: Synthetic oligonucleotide
  Antisense strand to SEQ ID NO: 983778
uggacuagcgaugucauag

SEQ ID NO: 983780 - RNA, 19 nt, Artificial Sequence
  Description of Artificial Sequence: Synthetic oligonucleotide
  Sense strand starting at position 409 of SEQ ID NO: 914174
uuaauugucuacguagaau

SEQ ID NO: 983781 - RNA, 19 nt, Artificial Sequence
  Description of Artificial Sequence: Synthetic oligonucleotide
  Antisense strand to SEQ ID NO: 983780
auucuacguagacaauuaa

SEQ ID NO: 983782 - RNA, 19 nt, Artificial Sequence
  Description of Artificial Sequence: Synthetic oligonucleotide
  Sense strand starting at position 3124 of SEQ ID NO: 914174
ggcuauaaggugugacuua

SEQ ID NO: 983783 - RNA, 19 nt, Artificial Sequence
  Description of Artificial Sequence: Synthetic oligonucleotide
  Antisense strand to SEQ ID NO: 983782
uaagucacaccuuauagcc

SEQ ID NO: 983784 - RNA, 19 nt, Artificial Sequence
  Description of Artificial Sequence: Synthetic oligonucleotide
  Sense strand starting at position 161 of SEQ ID NO: 914174
caaagagucuggcugcaua

SEQ ID NO: 983785 - RNA, 19 nt, Artificial Sequence
  Description of Artificial Sequence: Synthetic oligonucleotide
  Antisense strand to SEQ ID NO: 983784
uaugcagccagacucuuug

SEQ ID NO: 983786 - RNA, 19 nt, Artificial Sequence
  Description of Artificial Sequence: Synthetic oligonucleotide
  Sense strand starting at position 3787 of SEQ ID NO: 914175
gagacugaccugggcaaua

SEQ ID NO: 983787 - RNA, 19 nt, Artificial Sequence
  Description of Artificial Sequence: Synthetic oligonucleotide
  Antisense strand to SEQ ID NO: 983786
uauugcccaggucagucuc

SEQ ID NO: 983788 - RNA, 19 nt, Artificial Sequence
  Description of Artificial Sequence: Synthetic oligonucleotide
  Sense strand starting at position 3115 of SEQ ID NO: 914175
ugggcucguguauauuuau

SEQ ID NO: 983789 - RNA, 19 nt, Artificial Sequence
  Description of Artificial Sequence: Synthetic oligonucleotide
  Antisense strand to SEQ ID NO: 983788
auaaauauacacgagccca

SEQ ID NO: 983790 - RNA, 19 nt, Artificial Sequence
  Description of Artificial Sequence: Synthetic oligonucleotide
  Sense strand starting at position 3110 of SEQ ID NO: 914175
cagugugggcucguguaua

SEQ ID NO: 983791 - RNA, 19 nt, Artificial Sequence
  Description of Artificial Sequence: Synthetic oligonucleotide
  Antisense strand to SEQ ID NO: 983790
uauacacgagcccacacug

SEQ ID NO: 983792 - RNA, 19 nt, Artificial Sequence
  Description of Artificial Sequence: Synthetic oligonucleotide
  Sense strand starting at position 3096 of SEQ ID NO: 914175
gucauuuauuucuacagug

SEQ ID NO: 983793 - RNA, 19 nt, Artificial Sequence
  Description of Artificial Sequence: Synthetic oligonucleotide
  Antisense strand to SEQ ID NO: 983792
cacuguagaaauaaaugac

SEQ ID NO: 983794 - RNA, 19 nt, Artificial Sequence
  Description of Artificial Sequence: Synthetic oligonucleotide
  Sense strand starting at position 3047 of SEQ ID NO: 914175
gggauucuucuguaagguu

SEQ ID NO: 983795 - RNA, 19 nt, Artificial Sequence
  Description of Artificial Sequence: Synthetic oligonucleotide
  Antisense strand to SEQ ID NO: 983794
aaccuuacagaagaauccc

SEQ ID NO: 983796 - RNA, 19 nt, Artificial Sequence
  Description of Artificial Sequence: Synthetic oligonucleotide
  Sense strand starting at position 8 of SEQ ID NO: 914175
cucuauugcuacuuggaaa

SEQ ID NO: 983797 - RNA, 19 nt, Artificial Sequence
  Description of Artificial Sequence: Synthetic oligonucleotide
  Antisense strand to SEQ ID NO: 983796
uuuccaaguagcaauagag

SEQ ID NO: 983798 - RNA, 19 nt, Artificial Sequence
  Description of Artificial Sequence: Synthetic oligonucleotide
  Sense strand starting at position 3046 of SEQ ID NO: 914175
ugggauucuucuguaaggu

SEQ ID NO: 983799 - RNA, 19 nt, Artificial Sequence
  Description of Artificial Sequence: Synthetic oligonucleotide
  Antisense strand to SEQ ID NO: 983798
accuuacagaagaauccca

SEQ ID NO: 983800 - RNA, 19 nt, Artificial Sequence
  Description of Artificial Sequence: Synthetic oligonucleotide
  Sense strand starting at position 2235 of SEQ ID NO: 914175
ggaguucuguucuuagacc

SEQ ID NO: 983801 - RNA, 19 nt, Artificial Sequence
  Description of Artificial Sequence: Synthetic oligonucleotide
  Antisense strand to SEQ ID NO: 983800
ggucuaagaacagaacucc

SEQ ID NO: 983802 - RNA, 19 nt, Artificial Sequence
  Description of Artificial Sequence: Synthetic oligonucleotide
  Sense strand starting at position 284 of SEQ ID NO: 914175
caugcuacuccugggucaa

SEQ ID NO: 983803 - RNA, 19 nt, Artificial Sequence
  Description of Artificial Sequence: Synthetic oligonucleotide
  Antisense strand to SEQ ID NO: 983802
uugacccaggaguagcaug

SEQ ID NO: 983804 - RNA, 19 nt, Artificial Sequence
  Description of Artificial Sequence: Synthetic oligonucleotide
  Sense strand starting at position 477 of SEQ ID NO: 914175
uugagaaccgaguguguga

SEQ ID NO: 983805 - RNA, 19 nt, Artificial Sequence
  Description of Artificial Sequence: Synthetic oligonucleotide
  Antisense strand to SEQ ID NO: 983804
ucacacacucgguucucaa

SEQ ID NO: 983806 - RNA, 19 nt, Artificial Sequence
  Description of Artificial Sequence: Synthetic oligonucleotide
  Sense strand starting at position 2952 of SEQ ID NO: 914175
cugcucuggucacuggaau

SEQ ID NO: 983807 - RNA, 19 nt, Artificial Sequence
  Description of Artificial Sequence: Synthetic oligonucleotide
  Antisense strand to SEQ ID NO: 983806
auuccagugaccagagcag

SEQ ID NO: 983808 - RNA, 19 nt, Artificial Sequence
  Description of Artificial Sequence: Synthetic oligonucleotide
  Sense strand starting at position 3918 of SEQ ID NO: 914175
agguuaagccugcagugua

SEQ ID NO: 983809 - RNA, 19 nt, Artificial Sequence
  Description of Artificial Sequence: Synthetic oligonucleotide
  Antisense strand to SEQ ID NO: 983808
uacacugcaggcuuaaccu

SEQ ID NO: 983810 - RNA, 19 nt, Artificial Sequence
  Description of Artificial Sequence: Synthetic oligonucleotide
  Sense strand starting at position 3533 of SEQ ID NO: 914175
ugcuuuggccauugaaagu

SEQ ID NO: 983811 - RNA, 19 nt, Artificial Sequence
  Description of Artificial Sequence: Synthetic oligonucleotide
  Antisense strand to SEQ ID NO: 983810
acuuucaauggccaaagca

SEQ ID NO: 983812 - RNA, 19 nt, Artificial Sequence
  Description of Artificial Sequence: Synthetic oligonucleotide
  Sense strand starting at position 2784 of SEQ ID NO: 914175
ccuggugucuuccugugau

SEQ ID NO: 983813 - RNA, 19 nt, Artificial Sequence
  Description of Artificial Sequence: Synthetic oligonucleotide
  Antisense strand to SEQ ID NO: 983812
aucacaggaagacaccagg

SEQ ID NO: 983814 - RNA, 19 nt, Artificial Sequence
  Description of Artificial Sequence: Synthetic oligonucleotide
  Sense strand starting at position 3146 of SEQ ID NO: 914175
gucauaacccgaugcuguu

SEQ ID NO: 983815 - RNA, 19 nt, Artificial Sequence
  Description of Artificial Sequence: Synthetic oligonucleotide
  Antisense strand to SEQ ID NO: 983814
aacagcaucggguuaugac

SEQ ID NO: 983816 - RNA, 19 nt, Artificial Sequence
  Description of Artificial Sequence: Synthetic oligonucleotide
  Sense strand starting at position 3155 of SEQ ID NO: 914175
cgaugcuguuauuauuuau

SEQ ID NO: 983817 - RNA, 19 nt, Artificial Sequence
  Description of Artificial Sequence: Synthetic oligonucleotide
  Antisense strand to SEQ ID NO: 983816
auaaauaauaacagcaucg

SEQ ID NO: 983818 - RNA, 19 nt, Artificial Sequence
  Description of Artificial Sequence: Synthetic oligonucleotide
  Sense strand starting at position 3069 of SEQ ID NO: 914175
cucucugccuguugauuua

SEQ ID NO: 983819 - RNA, 19 nt, Artificial Sequence
  Description of Artificial Sequence: Synthetic oligonucleotide
  Antisense strand to SEQ ID NO: 983818
uaaaucaacaggcagagag

SEQ ID NO: 983820 - RNA, 19 nt, Artificial Sequence
  Description of Artificial Sequence: Synthetic oligonucleotide
  Sense strand starting at position 3045 of SEQ ID NO: 914175
cugggauucuucuguaagg

SEQ ID NO: 983821 - RNA, 19 nt, Artificial Sequence
  Description of Artificial Sequence: Synthetic oligonucleotide
  Antisense strand to SEQ ID NO: 983820
ccuuacagaagaaucccag

SEQ ID NO: 983822 - RNA, 19 nt, Artificial Sequence
  Description of Artificial Sequence: Synthetic oligonucleotide
  Sense strand starting at position 2529 of SEQ ID NO: 914175
gggaaugggugucggaauu

SEQ ID NO: 983823 - RNA, 19 nt, Artificial Sequence
  Description of Artificial Sequence: Synthetic oligonucleotide
  Antisense strand to SEQ ID NO: 983822
aauuccgacacccauuccc

SEQ ID NO: 983824 - RNA, 19 nt, Artificial Sequence
  Description of Artificial Sequence: Synthetic oligonucleotide
  Sense strand starting at position 3681 of SEQ ID NO: 914175
caagaaaucugugguuccu

SEQ ID NO: 983825 - RNA, 19 nt, Artificial Sequence
  Description of Artificial Sequence: Synthetic oligonucleotide
  Antisense strand to SEQ ID NO: 983824
aggaaccacagauuucuug

SEQ ID NO: 983826 - RNA, 19 nt, Artificial Sequence
  Description of Artificial Sequence: Synthetic oligonucleotide
  Sense strand starting at position 3152 of SEQ ID NO: 914175
acccgaugcuguuauuauu

SEQ ID NO: 983827 - RNA, 19 nt, Artificial Sequence
  Description of Artificial Sequence: Synthetic oligonucleotide
  Antisense strand to SEQ ID NO: 983826
aauaauaacagcaucgggu

SEQ ID NO: 983828 - RNA, 19 nt, Artificial Sequence
  Description of Artificial Sequence: Synthetic oligonucleotide
  Sense strand starting at position 2788 of SEQ ID NO: 914175
gugucuuccugugauccga

SEQ ID NO: 983829 - RNA, 19 nt, Artificial Sequence
  Description of Artificial Sequence: Synthetic oligonucleotide
  Antisense strand to SEQ ID NO: 983828
ucggaucacaggaagacac

SEQ ID NO: 983830 - RNA, 19 nt, Artificial Sequence
  Description of Artificial Sequence: Synthetic oligonucleotide
  Sense strand starting at position 2970 of SEQ ID NO: 914176
ccaguaauccaauaagagc

SEQ ID NO: 983831 - RNA, 19 nt, Artificial Sequence
  Description of Artificial Sequence: Synthetic oligonucleotide
  Antisense strand to SEQ ID NO: 983830
gcucuuauuggauuacugg

SEQ ID NO: 983832 - RNA, 19 nt, Artificial Sequence
  Description of Artificial Sequence: Synthetic oligonucleotide
  Sense strand starting at position 2983 of SEQ ID NO: 914176
aagagcauugauuaggcua

SEQ ID NO: 983833 - RNA, 19 nt, Artificial Sequence
  Description of Artificial Sequence: Synthetic oligonucleotide
  Antisense strand to SEQ ID NO: 983832
uagccuaaucaaugcucuu

SEQ ID NO: 983834 - RNA, 19 nt, Artificial Sequence
  Description of Artificial Sequence: Synthetic oligonucleotide
  Sense strand starting at position 3946 of SEQ ID NO: 914176
gaagauguagagugggauu

SEQ ID NO: 983835 - RNA, 19 nt, Artificial Sequence
  Description of Artificial Sequence: Synthetic oligonucleotide
  Antisense strand to SEQ ID NO: 983834
aaucccacucuacaucuuc

SEQ ID NO: 983836 - RNA, 19 nt, Artificial Sequence
  Description of Artificial Sequence: Synthetic oligonucleotide
  Sense strand starting at position 3313 of SEQ ID NO: 914176
ggagguuuggcugagaauu

SEQ ID NO: 983837 - RNA, 19 nt, Artificial Sequence
  Description of Artificial Sequence: Synthetic oligonucleotide
  Antisense strand to SEQ ID NO: 983836
aauucucagccaaaccucc

SEQ ID NO: 983838 - RNA, 19 nt, Artificial Sequence
  Description of Artificial Sequence: Synthetic oligonucleotide
  Sense strand starting at position 2240 of SEQ ID NO: 914176
acacuaaauuguuuggaua

SEQ ID NO: 983839 - RNA, 19 nt, Artificial Sequence
  Description of Artificial Sequence: Synthetic oligonucleotide
  Antisense strand to SEQ ID NO: 983838
uauccaaacaauuuagugu

SEQ ID NO: 983840 - RNA, 19 nt, Artificial Sequence
  Description of Artificial Sequence: Synthetic oligonucleotide
  Sense strand starting at position 578 of SEQ ID NO: 914176
uguagaguccuccagacag

SEQ ID NO: 983841 - RNA, 19 nt, Artificial Sequence
  Description of Artificial Sequence: Synthetic oligonucleotide
  Antisense strand to SEQ ID NO: 983840
cugucuggaggacucuaca

SEQ ID NO: 983842 - RNA, 19 nt, Artificial Sequence
  Description of Artificial Sequence: Synthetic oligonucleotide
  Sense strand starting at position 2224 of SEQ ID NO: 914176
cgguuaccucaugaauaca

SEQ ID NO: 983843 - RNA, 19 nt, Artificial Sequence
  Description of Artificial Sequence: Synthetic oligonucleotide
  Antisense strand to SEQ ID NO: 983842
uguauucaugagguaaccg

SEQ ID NO: 983844 - RNA, 19 nt, Artificial Sequence
  Description of Artificial Sequence: Synthetic oligonucleotide
  Sense strand starting at position 329 of SEQ ID NO: 914176
ggaugaucucucggaugga

SEQ ID NO: 983845 - RNA, 19 nt, Artificial Sequence
  Description of Artificial Sequence: Synthetic oligonucleotide
  Antisense strand to SEQ ID NO: 983844
uccauccgagagaucaucc

SEQ ID NO: 983846 - RNA, 19 nt, Artificial Sequence
  Description of Artificial Sequence: Synthetic oligonucleotide
  Sense strand starting at position 2942 of SEQ ID NO: 914176
gcuacaauaucuuugagaa

SEQ ID NO: 983847 - RNA, 19 nt, Artificial Sequence
  Description of Artificial Sequence: Synthetic oligonucleotide
  Antisense strand to SEQ ID NO: 983846
uucucaaagauauuguagc

SEQ ID NO: 983848 - RNA, 19 nt, Artificial Sequence
  Description of Artificial Sequence: Synthetic oligonucleotide
  Sense strand starting at position 2310 of SEQ ID NO: 914176
gguuuagccagugaauaaa

SEQ ID NO: 983849 - RNA, 19 nt, Artificial Sequence
  Description of Artificial Sequence: Synthetic oligonucleotide
  Antisense strand to SEQ ID NO: 983848
uuuauucacuggcuaaacc

SEQ ID NO: 983850 - RNA, 19 nt, Artificial Sequence
  Description of Artificial Sequence: Synthetic oligonucleotide
  Sense strand starting at position 2173 of SEQ ID NO: 914176
gcacacucgcuguugcaau

SEQ ID NO: 983851 - RNA, 19 nt, Artificial Sequence
  Description of Artificial Sequence: Synthetic oligonucleotide
  Antisense strand to SEQ ID NO: 983850
auugcaacagcgagugugc

SEQ ID NO: 983852 - RNA, 19 nt, Artificial Sequence
  Description of Artificial Sequence: Synthetic oligonucleotide
  Sense strand starting at position 2258 of SEQ ID NO: 914176
aauauaucagaucguaaug

SEQ ID NO: 983853 - RNA, 19 nt, Artificial Sequence
  Description of Artificial Sequence: Synthetic oligonucleotide
  Antisense strand to SEQ ID NO: 983852
cauuacgaucugauauauu

SEQ ID NO: 983854 - RNA, 19 nt, Artificial Sequence
  Description of Artificial Sequence: Synthetic oligonucleotide
  Sense strand starting at position 2503 of SEQ ID NO: 914176
gccagauagagcugaauga

SEQ ID NO: 983855 - RNA, 19 nt, Artificial Sequence
  Description of Artificial Sequence: Synthetic oligonucleotide
  Antisense strand to SEQ ID NO: 983854
ucauucagcucuaucuggc

SEQ ID NO: 983856 - RNA, 19 nt, Artificial Sequence
  Description of Artificial Sequence: Synthetic oligonucleotide
  Sense strand starting at position 3146 of SEQ ID NO: 914176
gcaauuaucuaauuggacu

SEQ ID NO: 983857 - RNA, 19 nt, Artificial Sequence
  Description of Artificial Sequence: Synthetic oligonucleotide
  Antisense strand to SEQ ID NO: 983856
aguccaauuagauaauugc

SEQ ID NO: 983858 - RNA, 19 nt, Artificial Sequence
  Description of Artificial Sequence: Synthetic oligonucleotide
  Sense strand starting at position 2327 of SEQ ID NO: 914176
aacggaaaugauuggucuu

SEQ ID NO: 983859 - RNA, 19 nt, Artificial Sequence
  Description of Artificial Sequence: Synthetic oligonucleotide
  Antisense strand to SEQ ID NO: 983858
aagaccaaucauuuccguu

SEQ ID NO: 983860 - RNA, 19 nt, Artificial Sequence
  Description of Artificial Sequence: Synthetic oligonucleotide
  Sense strand starting at position 1534 of SEQ ID NO: 914176
gcaguaauccggguccgcu

SEQ ID NO: 983861 - RNA, 19 nt, Artificial Sequence
  Description of Artificial Sequence: Synthetic oligonucleotide
  Antisense strand to SEQ ID NO: 983860
agcggacccggauuacugc

SEQ ID NO: 983862 - RNA, 19 nt, Artificial Sequence
  Description of Artificial Sequence: Synthetic oligonucleotide
  Sense strand starting at position 171 of SEQ ID NO: 914176
cugggucucggagagguua

SEQ ID NO: 983863 - RNA, 19 nt, Artificial Sequence
  Description of Artificial Sequence: Synthetic oligonucleotide
  Antisense strand to SEQ ID NO: 983862
uaaccucuccgagacccag

SEQ ID NO: 983864 - RNA, 19 nt, Artificial Sequence
  Description of Artificial Sequence: Synthetic oligonucleotide
  Sense strand starting at position 2986 of SEQ ID NO: 914176
agcauugauuaggcuacaa

SEQ ID NO: 983865 - RNA, 19 nt, Artificial Sequence
  Description of Artificial Sequence: Synthetic oligonucleotide
  Antisense strand to SEQ ID NO: 983864
uuguagccuaaucaaugcu

SEQ ID NO: 983866 - RNA, 19 nt, Artificial Sequence
  Description of Artificial Sequence: Synthetic oligonucleotide
  Sense strand starting at position 2330 of SEQ ID NO: 914176
ggaaaugauuggucuugcu

SEQ ID NO: 983867 - RNA, 19 nt, Artificial Sequence
  Description of Artificial Sequence: Synthetic oligonucleotide
  Antisense strand to SEQ ID NO: 983866
agcaagaccaaucauuucc

SEQ ID NO: 983868 - RNA, 19 nt, Artificial Sequence
  Description of Artificial Sequence: Synthetic oligonucleotide
  Sense strand starting at position 326 of SEQ ID NO: 914176
gcaggaugaucucucggau

SEQ ID NO: 983869 - RNA, 19 nt, Artificial Sequence
  Description of Artificial Sequence: Synthetic oligonucleotide
  Antisense strand to SEQ ID NO: 983868
auccgagagaucauccugc

SEQ ID NO: 983870 - RNA, 19 nt, Artificial Sequence
  Description of Artificial Sequence: Synthetic oligonucleotide
  Sense strand starting at position 65 of SEQ ID NO: 914176
aaggguaguucuguccaga

SEQ ID NO: 983871 - RNA, 19 nt, Artificial Sequence
  Description of Artificial Sequence: Synthetic oligonucleotide
  Antisense strand to SEQ ID NO: 983870
ucuggacagaacuacccuu

SEQ ID NO: 983872 - RNA, 19 nt, Artificial Sequence
  Description of Artificial Sequence: Synthetic oligonucleotide
  Sense strand starting at position 3310 of SEQ ID NO: 914176
gugggagguuuggcugaga

SEQ ID NO: 983873 - RNA, 19 nt, Artificial Sequence
  Description of Artificial Sequence: Synthetic oligonucleotide
  Antisense strand to SEQ ID NO: 983872
ucucagccaaaccucccac

SEQ ID NO: 983874 - RNA, 19 nt, Artificial Sequence
  Description of Artificial Sequence: Synthetic oligonucleotide
  Sense strand starting at position 2309 of SEQ ID NO: 914176
ggguuuagccagugaauaa

SEQ ID NO: 983875 - RNA, 19 nt, Artificial Sequence
  Description of Artificial Sequence: Synthetic oligonucleotide
  Antisense strand to SEQ ID NO: 983874
uuauucacuggcuaaaccc

SEQ ID NO: 983876 - RNA, 19 nt, Artificial Sequence
  Description of Artificial Sequence: Synthetic oligonucleotide
  Sense strand starting at position 2407 of SEQ ID NO: 914176
ccugaauuguuaguaccau

SEQ ID NO: 983877 - RNA, 19 nt, Artificial Sequence
  Description of Artificial Sequence: Synthetic oligonucleotide
  Antisense strand to SEQ ID NO: 983876
augguacuaacaauucagg

SEQ ID NO: 983878 - RNA, 19 nt, Artificial Sequence
  Description of Artificial Sequence: Synthetic oligonucleotide
  Sense strand starting at position 576 of SEQ ID NO: 914176
uuuguagaguccuccagac

SEQ ID NO: 983879 - RNA, 19 nt, Artificial Sequence
  Description of Artificial Sequence: Synthetic oligonucleotide
  Antisense strand to SEQ ID NO: 983878
gucuggaggacucuacaaa

SEQ ID NO: 983880 - RNA, 19 nt, Artificial Sequence
  Description of Artificial Sequence: Synthetic oligonucleotide
  Sense strand starting at position 68 of SEQ ID NO: 914176
gguaguucuguccagagca

SEQ ID NO: 983881 - RNA, 19 nt, Artificial Sequence
  Description of Artificial Sequence: Synthetic oligonucleotide
  Antisense strand to SEQ ID NO: 983880
ugcucuggacagaacuacc

SEQ ID NO: 983882 - RNA, 19 nt, Artificial Sequence
  Description of Artificial Sequence: Synthetic oligonucleotide
  Sense strand starting at position 2419 of SEQ ID NO: 914176
guaccauuagcaggcauua

SEQ ID NO: 983883 - RNA, 19 nt, Artificial Sequence
  Description of Artificial Sequence: Synthetic oligonucleotide
  Antisense strand to SEQ ID NO: 983882
uaaugccugcuaaugguac

SEQ ID NO: 983884 - RNA, 19 nt, Artificial Sequence
  Description of Artificial Sequence: Synthetic oligonucleotide
  Sense strand starting at position 2585 of SEQ ID NO: 914176
aaagcaguugucugggagu

SEQ ID NO: 983885 - RNA, 19 nt, Artificial Sequence
  Description of Artificial Sequence: Synthetic oligonucleotide
  Antisense strand to SEQ ID NO: 983884
acucccagacaacugcuuu

SEQ ID NO: 983886 - RNA, 19 nt, Artificial Sequence
  Description of Artificial Sequence: Synthetic oligonucleotide
  Sense strand starting at position 369 of SEQ ID NO: 914176
ggagaugucagccgccaga

SEQ ID NO: 983887 - RNA, 19 nt, Artificial Sequence
  Description of Artificial Sequence: Synthetic oligonucleotide
  Antisense strand to SEQ ID NO: 983886
ucuggcggcugacaucucc

SEQ ID NO: 983888 - RNA, 19 nt, Artificial Sequence
  Description of Artificial Sequence: Synthetic oligonucleotide
  Sense strand starting at position 1736 of SEQ ID NO: 914176
uugucugguuucccgaaca

SEQ ID NO: 983889 - RNA, 19 nt, Artificial Sequence
  Description of Artificial Sequence: Synthetic oligonucleotide
  Antisense strand to SEQ ID NO: 983888
uguucgggaaaccagacaa

SEQ ID NO: 983890 - RNA, 19 nt, Artificial Sequence
  Description of Artificial Sequence: Synthetic oligonucleotide
  Sense strand starting at position 2216 of SEQ ID NO: 914176
ccacguuucgguuaccuca

SEQ ID NO: 983891 - RNA, 19 nt, Artificial Sequence
  Description of Artificial Sequence: Synthetic oligonucleotide
  Antisense strand to SEQ ID NO: 983890
ugagguaaccgaaacgugg

SEQ ID NO: 983892 - RNA, 19 nt, Artificial Sequence
  Description of Artificial Sequence: Synthetic oligonucleotide
  Sense strand starting at position 2814 of SEQ ID NO: 914176
gcagcuuuguacucagagu

SEQ ID NO: 983893 - RNA, 19 nt, Artificial Sequence
  Description of Artificial Sequence: Synthetic oligonucleotide
  Antisense strand to SEQ ID NO: 983892
acucugaguacaaagcugc

SEQ ID NO: 983894 - RNA, 19 nt, Artificial Sequence
  Description of Artificial Sequence: Synthetic oligonucleotide
  Sense strand starting at position 3135 of SEQ ID NO: 914176
agugaaagauggcaauuau

SEQ ID NO: 983895 - RNA, 19 nt, Artificial Sequence
  Description of Artificial Sequence: Synthetic oligonucleotide
  Antisense strand to SEQ ID NO: 983894
auaauugccaucuuucacu

SEQ ID NO: 983896 - RNA, 19 nt, Artificial Sequence
  Description of Artificial Sequence: Synthetic oligonucleotide
  Sense strand starting at position 2255 of SEQ ID NO: 914176
gauaauauaucagaucgua

SEQ ID NO: 983897 - RNA, 19 nt, Artificial Sequence
  Description of Artificial Sequence: Synthetic oligonucleotide
  Antisense strand to SEQ ID NO: 983896
uacgaucugauauauuauc

SEQ ID NO: 983898 - RNA, 19 nt, Artificial Sequence
  Description of Artificial Sequence: Synthetic oligonucleotide
  Sense strand starting at position 330 of SEQ ID NO: 914176
gaugaucucucggauggac

SEQ ID NO: 983899 - RNA, 19 nt, Artificial Sequence
  Description of Artificial Sequence: Synthetic oligonucleotide
  Antisense strand to SEQ ID NO: 983898
guccauccgagagaucauc

SEQ ID NO: 983900 - RNA, 19 nt, Artificial Sequence
  Description of Artificial Sequence: Synthetic oligonucleotide
  Sense strand starting at position 2180 of SEQ ID NO: 914176
cgcuguugcaauugauuac

SEQ ID NO: 983901 - RNA, 19 nt, Artificial Sequence
  Description of Artificial Sequence: Synthetic oligonucleotide
  Antisense strand to SEQ ID NO: 983900
guaaucaauugcaacagcg

SEQ ID NO: 983902 - RNA, 19 nt, Artificial Sequence
  Description of Artificial Sequence: Synthetic oligonucleotide
  Sense strand starting at position 2260 of SEQ ID NO: 914176
uauaucagaucguaaugga

SEQ ID NO: 983903 - RNA, 19 nt, Artificial Sequence
  Description of Artificial Sequence: Synthetic oligonucleotide
  Antisense strand to SEQ ID NO: 983902
uccauuacgaucugauaua

SEQ ID NO: 983904 - RNA, 19 nt, Artificial Sequence
  Description of Artificial Sequence: Synthetic oligonucleotide
  Sense strand starting at position 3103 of SEQ ID NO: 914176
ucauuccuuuaugggaaau

SEQ ID NO: 983905 - RNA, 19 nt, Artificial Sequence
  Description of Artificial Sequence: Synthetic oligonucleotide
  Antisense strand to SEQ ID NO: 983904
auuucccauaaaggaauga

SEQ ID NO: 983906 - RNA, 19 nt, Artificial Sequence
  Description of Artificial Sequence: Synthetic oligonucleotide
  Sense strand starting at position 2408 of SEQ ID NO: 914176
cugaauuguuaguaccauu

SEQ ID NO: 983907 - RNA, 19 nt, Artificial Sequence
  Description of Artificial Sequence: Synthetic oligonucleotide
  Antisense strand to SEQ ID NO: 983906
aaugguacuaacaauucag

SEQ ID NO: 983908 - RNA, 19 nt, Artificial Sequence
  Description of Artificial Sequence: Synthetic oligonucleotide
  Sense strand starting at position 2141 of SEQ ID NO: 914176
gcgaguuguaguuguccga

SEQ ID NO: 983909 - RNA, 19 nt, Artificial Sequence
  Description of Artificial Sequence: Synthetic oligonucleotide
  Antisense strand to SEQ ID NO: 983908
ucggacaacuacaacucgc

SEQ ID NO: 983910 - RNA, 19 nt, Artificial Sequence
  Description of Artificial Sequence: Synthetic oligonucleotide
  Sense strand starting at position 2705 of SEQ ID NO: 914177
augauugcccuugauuaaa

SEQ ID NO: 983911 - RNA, 19 nt, Artificial Sequence
  Description of Artificial Sequence: Synthetic oligonucleotide
  Antisense strand to SEQ ID NO: 983910
uuuaaucaagggcaaucau

SEQ ID NO: 983912 - RNA, 19 nt, Artificial Sequence
  Description of Artificial Sequence: Synthetic oligonucleotide
  Sense strand starting at position 2766 of SEQ ID NO: 914177
ucuuaaugacugcaugaua

SEQ ID NO: 983913 - RNA, 19 nt, Artificial Sequence
  Description of Artificial Sequence: Synthetic oligonucleotide
  Antisense strand to SEQ ID NO: 983912
uaucaugcagucauuaaga

SEQ ID NO: 983914 - RNA, 19 nt, Artificial Sequence
  Description of Artificial Sequence: Synthetic oligonucleotide
  Sense strand starting at position 159 of SEQ ID NO: 914177
auuguuuccuauuuguuga

SEQ ID NO: 983915 - RNA, 19 nt, Artificial Sequence
  Description of Artificial Sequence: Synthetic oligonucleotide
  Antisense strand to SEQ ID NO: 983914
ucaacaaauaggaaacaau

SEQ ID NO: 983916 - RNA, 19 nt, Artificial Sequence
  Description of Artificial Sequence: Synthetic oligonucleotide
  Sense strand starting at position 2624 of SEQ ID NO: 914177
ucuagacuugucuauagau

SEQ ID NO: 983917 - RNA, 19 nt, Artificial Sequence
  Description of Artificial Sequence: Synthetic oligonucleotide
  Antisense strand to SEQ ID NO: 983916
aucuauagacaagucuaga

SEQ ID NO: 983918 - RNA, 19 nt, Artificial Sequence
  Description of Artificial Sequence: Synthetic oligonucleotide
  Sense strand starting at position 1453 of SEQ ID NO: 914177
gaggcacuccacgaauaau

SEQ ID NO: 983919 - RNA, 19 nt, Artificial Sequence
  Description of Artificial Sequence: Synthetic oligonucleotide
  Antisense strand to SEQ ID NO: 983918
auuauucguggagugccuc

SEQ ID NO: 983920 - RNA, 19 nt, Artificial Sequence
  Description of Artificial Sequence: Synthetic oligonucleotide
  Sense strand starting at position 3833 of SEQ ID NO: 914177
aguugagugauggaacgau

SEQ ID NO: 983921 - RNA, 19 nt, Artificial Sequence
  Description of Artificial Sequence: Synthetic oligonucleotide
  Antisense strand to SEQ ID NO: 983920
aucguuccaucacucaacu

SEQ ID NO: 983922 - RNA, 19 nt, Artificial Sequence
  Description of Artificial Sequence: Synthetic oligonucleotide
  Sense strand starting at position 343 of SEQ ID NO: 914177
gaagaaagaucaggaauuu

SEQ ID NO: 983923 - RNA, 19 nt, Artificial Sequence
  Description of Artificial Sequence: Synthetic oligonucleotide
  Antisense strand to SEQ ID NO: 983922
aaauuccugaucuuucuuc

SEQ ID NO: 983924 - RNA, 19 nt, Artificial Sequence
  Description of Artificial Sequence: Synthetic oligonucleotide
  Sense strand starting at position 276 of SEQ ID NO: 914177
acaaguagacauugugaau

SEQ ID NO: 983925 - RNA, 19 nt, Artificial Sequence
  Description of Artificial Sequence: Synthetic oligonucleotide
  Antisense strand to SEQ ID NO: 983924
auucacaaugucuacuugu

SEQ ID NO: 983926 - RNA, 19 nt, Artificial Sequence
  Description of Artificial Sequence: Synthetic oligonucleotide
  Sense strand starting at position 1239 of SEQ ID NO: 914177
gacaacguggcucaaauaa

SEQ ID NO: 983927 - RNA, 19 nt, Artificial Sequence
  Description of Artificial Sequence: Synthetic oligonucleotide
  Antisense strand to SEQ ID NO: 983926
uuauuugagccacguuguc

SEQ ID NO: 983928 - RNA, 19 nt, Artificial Sequence
  Description of Artificial Sequence: Synthetic oligonucleotide
  Sense strand starting at position 2902 of SEQ ID NO: 914177
ugugcaucuguguauuuau

SEQ ID NO: 983929 - RNA, 19 nt, Artificial Sequence
  Description of Artificial Sequence: Synthetic oligonucleotide
  Antisense strand to SEQ ID NO: 983928
auaaauacacagaugcaca

SEQ ID NO: 983930 - RNA, 19 nt, Artificial Sequence
  Description of Artificial Sequence: Synthetic oligonucleotide
  Sense strand starting at position 1138 of SEQ ID NO: 914177
gagugaggcaagugaauaa

SEQ ID NO: 983931 - RNA, 19 nt, Artificial Sequence
  Description of Artificial Sequence: Synthetic oligonucleotide
  Antisense strand to SEQ ID NO: 983930
uuauucacuugccucacuc

SEQ ID NO: 983932 - RNA, 19 nt, Artificial Sequence
  Description of Artificial Sequence: Synthetic oligonucleotide
  Sense strand starting at position 2905 of SEQ ID NO: 914177
gcaucuguguauuuaucua

SEQ ID NO: 983933 - RNA, 19 nt, Artificial Sequence
  Description of Artificial Sequence: Synthetic oligonucleotide
  Antisense strand to SEQ ID NO: 983932
uagauaaauacacagaugc

SEQ ID NO: 983934 - RNA, 19 nt, Artificial Sequence
  Description of Artificial Sequence: Synthetic oligonucleotide
  Sense strand starting at position 2869 of SEQ ID NO: 914177
acaauucugcaugaauugu

SEQ ID NO: 983935 - RNA, 19 nt, Artificial Sequence
  Description of Artificial Sequence: Synthetic oligonucleotide
  Antisense strand to SEQ ID NO: 983934
acaauucaugcagaauugu

SEQ ID NO: 983936 - RNA, 19 nt, Artificial Sequence
  Description of Artificial Sequence: Synthetic oligonucleotide
  Sense strand starting at position 299 of SEQ ID NO: 914177
acagcauucuuacugaaug

SEQ ID NO: 983937 - RNA, 19 nt, Artificial Sequence
  Description of Artificial Sequence: Synthetic oligonucleotide
  Antisense strand to SEQ ID NO: 983936
cauucaguaagaaugcugu

SEQ ID NO: 983938 - RNA, 19 nt, Artificial Sequence
  Description of Artificial Sequence: Synthetic oligonucleotide
  Sense strand starting at position 1077 of SEQ ID NO: 914177
gugagagugccagaggagu

SEQ ID NO: 983939 - RNA, 19 nt, Artificial Sequence
  Description of Artificial Sequence: Synthetic oligonucleotide
  Antisense strand to SEQ ID NO: 983938
acuccucuggcacucucac

SEQ ID NO: 983940 - RNA, 19 nt, Artificial Sequence
  Description of Artificial Sequence: Synthetic oligonucleotide
  Sense strand starting at position 399 of SEQ ID NO: 914177
uccuaaauugcuugagaca

SEQ ID NO: 983941 - RNA, 19 nt, Artificial Sequence
  Description of Artificial Sequence: Synthetic oligonucleotide
  Antisense strand to SEQ ID NO: 983940
ugucucaagcaauuuagga

SEQ ID NO: 983942 - RNA, 19 nt, Artificial Sequence
  Description of Artificial Sequence: Synthetic oligonucleotide
  Sense strand starting at position 355 of SEQ ID NO: 914177
ggaauuuggucgguggugu

SEQ ID NO: 983943 - RNA, 19 nt, Artificial Sequence
  Description of Artificial Sequence: Synthetic oligonucleotide
  Antisense strand to SEQ ID NO: 983942
acaccaccgaccaaauucc

SEQ ID NO: 983944 - RNA, 19 nt, Artificial Sequence
  Description of Artificial Sequence: Synthetic oligonucleotide
  Sense strand starting at position 223 of SEQ ID NO: 914177
gaauguacucuggaguguu

SEQ ID NO: 983945 - RNA, 19 nt, Artificial Sequence
  Description of Artificial Sequence: Synthetic oligonucleotide
  Antisense strand to SEQ ID NO: 983944
aacacuccagaguacauuc

SEQ ID NO: 983946 - RNA, 19 nt, Artificial Sequence
  Description of Artificial Sequence: Synthetic oligonucleotide
  Sense strand starting at position 742 of SEQ ID NO: 914177
ggaaucaccucgguuauga

SEQ ID NO: 983947 - RNA, 19 nt, Artificial Sequence
  Description of Artificial Sequence: Synthetic oligonucleotide
  Antisense strand to SEQ ID NO: 983946
ucauaaccgaggugauucc

SEQ ID NO: 983948 - RNA, 19 nt, Artificial Sequence
  Description of Artificial Sequence: Synthetic oligonucleotide
  Sense strand starting at position 2910 of SEQ ID NO: 914177
uguguauuuaucuagcgca

SEQ ID NO: 983949 - RNA, 19 nt, Artificial Sequence
  Description of Artificial Sequence: Synthetic oligonucleotide
  Antisense strand to SEQ ID NO: 983948
ugcgcuagauaaauacaca

SEQ ID NO: 983950 - RNA, 19 nt, Artificial Sequence
  Description of Artificial Sequence: Synthetic oligonucleotide
  Sense strand starting at position 397 of SEQ ID NO: 914177
ucuccuaaauugcuugaga

SEQ ID NO: 983951 - RNA, 19 nt, Artificial Sequence
  Description of Artificial Sequence: Synthetic oligonucleotide
  Antisense strand to SEQ ID NO: 983950
ucucaagcaauuuaggaga

SEQ ID NO: 983952 - RNA, 19 nt, Artificial Sequence
  Description of Artificial Sequence: Synthetic oligonucleotide
  Sense strand starting at position 398 of SEQ ID NO: 914177
cuccuaaauugcuugagac

SEQ ID NO: 983953 - RNA, 19 nt, Artificial Sequence
  Description of Artificial Sequence: Synthetic oligonucleotide
  Antisense strand to SEQ ID NO: 983952
gucucaagcaauuuaggag

SEQ ID NO: 983954 - RNA, 19 nt, Artificial Sequence
  Description of Artificial Sequence: Synthetic oligonucleotide
  Sense strand starting at position 741 of SEQ ID NO: 914177
aggaaucaccucgguuaug

SEQ ID NO: 983955 - RNA, 19 nt, Artificial Sequence
  Description of Artificial Sequence: Synthetic oligonucleotide
  Antisense strand to SEQ ID NO: 983954
cauaaccgaggugauuccu

SEQ ID NO: 983956 - RNA, 19 nt, Artificial Sequence
  Description of Artificial Sequence: Synthetic oligonucleotide
  Sense strand starting at position 1064 of SEQ ID NO: 914177
acugcauaaaggugugaga

SEQ ID NO: 983957 - RNA, 19 nt, Artificial Sequence
  Description of Artificial Sequence: Synthetic oligonucleotide
  Antisense strand to SEQ ID NO: 983956
ucucacaccuuuaugcagu

SEQ ID NO: 983958 - RNA, 19 nt, Artificial Sequence
  Description of Artificial Sequence: Synthetic oligonucleotide
  Sense strand starting at position 2622 of SEQ ID NO: 914177
cuucuagacuugucuauag

SEQ ID NO: 983959 - RNA, 19 nt, Artificial Sequence
  Description of Artificial Sequence: Synthetic oligonucleotide
  Antisense strand to SEQ ID NO: 983958
cuauagacaagucuagaag

SEQ ID NO: 983960 - RNA, 19 nt, Artificial Sequence
  Description of Artificial Sequence: Synthetic oligonucleotide
  Sense strand starting at position 2764 of SEQ ID NO: 914177
cuucuuaaugacugcauga

SEQ ID NO: 983961 - RNA, 19 nt, Artificial Sequence
  Description of Artificial Sequence: Synthetic oligonucleotide
  Antisense strand to SEQ ID NO: 983960
ucaugcagucauuaagaag

SEQ ID NO: 983962 - RNA, 19 nt, Artificial Sequence
  Description of Artificial Sequence: Synthetic oligonucleotide
  Sense strand starting at position 3009 of SEQ ID NO: 914177
ucacgcuuuguauaagaca

SEQ ID NO: 983963 - RNA, 19 nt, Artificial Sequence
  Description of Artificial Sequence: Synthetic oligonucleotide
  Antisense strand to SEQ ID NO: 983962
ugucuuauacaaagcguga

SEQ ID NO: 983964 - RNA, 19 nt, Artificial Sequence
  Description of Artificial Sequence: Synthetic oligonucleotide
  Sense strand starting at position 1237 of SEQ ID NO: 914177
aggacaacguggcucaaau

SEQ ID NO: 983965 - RNA, 19 nt, Artificial Sequence
  Description of Artificial Sequence: Synthetic oligonucleotide
  Antisense strand to SEQ ID NO: 983964
auuugagccacguuguccu

SEQ ID NO: 983966 - RNA, 19 nt, Artificial Sequence
  Description of Artificial Sequence: Synthetic oligonucleotide
  Sense strand starting at position 2901 of SEQ ID NO: 914177
cugugcaucuguguauuua

SEQ ID NO: 983967 - RNA, 19 nt, Artificial Sequence
  Description of Artificial Sequence: Synthetic oligonucleotide
  Antisense strand to SEQ ID NO: 983966
uaaauacacagaugcacag

SEQ ID NO: 983968 - RNA, 19 nt, Artificial Sequence
  Description of Artificial Sequence: Synthetic oligonucleotide
  Sense strand starting at position 740 of SEQ ID NO: 914177
caggaaucaccucgguuau

SEQ ID NO: 983969 - RNA, 19 nt, Artificial Sequence
  Description of Artificial Sequence: Synthetic oligonucleotide
  Antisense strand to SEQ ID NO: 983968
auaaccgaggugauuccug

SEQ ID NO: 983970 - RNA, 19 nt, Artificial Sequence
  Description of Artificial Sequence: Synthetic oligonucleotide
  Sense strand starting at position 189 of SEQ ID NO: 914177
cuggaaugcagccauguua

SEQ ID NO: 983971 - RNA, 19 nt, Artificial Sequence
  Description of Artificial Sequence: Synthetic oligonucleotide
  Antisense strand to SEQ ID NO: 983970
uaacauggcugcauuccag

SEQ ID NO: 983972 - RNA, 19 nt, Artificial Sequence
  Description of Artificial Sequence: Synthetic oligonucleotide
  Sense strand starting at position 1452 of SEQ ID NO: 914177
cgaggcacuccacgaauaa

SEQ ID NO: 983973 - RNA, 19 nt, Artificial Sequence
  Description of Artificial Sequence: Synthetic oligonucleotide
  Antisense strand to SEQ ID NO: 983972
uuauucguggagugccucg

SEQ ID NO: 983974 - RNA, 19 nt, Artificial Sequence
  Description of Artificial Sequence: Synthetic oligonucleotide
  Sense strand starting at position 2701 of SEQ ID NO: 914177
agguaugauugcccuugau

SEQ ID NO: 983975 - RNA, 19 nt, Artificial Sequence
  Description of Artificial Sequence: Synthetic oligonucleotide
  Antisense strand to SEQ ID NO: 983974
aucaagggcaaucauaccu

SEQ ID NO: 983976 - RNA, 19 nt, Artificial Sequence
  Description of Artificial Sequence: Synthetic oligonucleotide
  Sense strand starting at position 2700 of SEQ ID NO: 914177
uagguaugauugcccuuga

SEQ ID NO: 983977 - RNA, 19 nt, Artificial Sequence
  Description of Artificial Sequence: Synthetic oligonucleotide
  Antisense strand to SEQ ID NO: 983976
ucaagggcaaucauaccua

SEQ ID NO: 983978 - RNA, 19 nt, Artificial Sequence
  Description of Artificial Sequence: Synthetic oligonucleotide
  Sense strand starting at position 3499 of SEQ ID NO: 914177
ccauuacuuuguguuaaua

SEQ ID NO: 983979 - RNA, 19 nt, Artificial Sequence
  Description of Artificial Sequence: Synthetic oligonucleotide
  Antisense strand to SEQ ID NO: 983978
uauuaacacaaaguaaugg

SEQ ID NO: 983980 - RNA, 19 nt, Artificial Sequence
  Description of Artificial Sequence: Synthetic oligonucleotide
  Sense strand starting at position 970 of SEQ ID NO: 914177
cagguaacgccaggugaaa

SEQ ID NO: 983981 - RNA, 19 nt, Artificial Sequence
  Description of Artificial Sequence: Synthetic oligonucleotide
  Antisense strand to SEQ ID NO: 983980
uuucaccuggcguuaccug

SEQ ID NO: 983982 - RNA, 19 nt, Artificial Sequence
  Description of Artificial Sequence: Synthetic oligonucleotide
  Sense strand starting at position 1066 of SEQ ID NO: 914177
ugcauaaaggugugagagu

SEQ ID NO: 983983 - RNA, 19 nt, Artificial Sequence
  Description of Artificial Sequence: Synthetic oligonucleotide
  Antisense strand to SEQ ID NO: 983982
acucucacaccuuuaugca

SEQ ID NO: 983984 - RNA, 19 nt, Artificial Sequence
  Description of Artificial Sequence: Synthetic oligonucleotide
  Sense strand starting at position 474 of SEQ ID NO: 914177
gcacuaaagugcucaaauc

SEQ ID NO: 983985 - RNA, 19 nt, Artificial Sequence
  Description of Artificial Sequence: Synthetic oligonucleotide
  Antisense strand to SEQ ID NO: 983984
gauuugagcacuuuagugc

SEQ ID NO: 983986 - RNA, 19 nt, Artificial Sequence
  Description of Artificial Sequence: Synthetic oligonucleotide
  Sense strand starting at position 1464 of SEQ ID NO: 914177
cgaauaauaccucgccaua

SEQ ID NO: 983987 - RNA, 19 nt, Artificial Sequence
  Description of Artificial Sequence: Synthetic oligonucleotide
  Antisense strand to SEQ ID NO: 983986
uauggcgagguauuauucg

SEQ ID NO: 983988 - RNA, 19 nt, Artificial Sequence
  Description of Artificial Sequence: Synthetic oligonucleotide
  Sense strand starting at position 3518 of SEQ ID NO: 914177
guauaaauauuugggugau

SEQ ID NO: 983989 - RNA, 19 nt, Artificial Sequence
  Description of Artificial Sequence: Synthetic oligonucleotide
  Antisense strand to SEQ ID NO: 983988
aucacccaaauauuuauac

SEQ ID NO: 983990 - RNA, 19 nt, Artificial Sequence
  Description of Artificial Sequence: Synthetic oligonucleotide
  Sense strand starting at position 614 of SEQ ID NO: 914178
aaguauuuguguguaugga

SEQ ID NO: 983991 - RNA, 19 nt, Artificial Sequence
  Description of Artificial Sequence: Synthetic oligonucleotide
  Antisense strand to SEQ ID NO: 983990
uccauacacacaaauacuu

SEQ ID NO: 983992 - RNA, 19 nt, Artificial Sequence
  Description of Artificial Sequence: Synthetic oligonucleotide
  Sense strand starting at position 2554 of SEQ ID NO: 914178
ggauuaugggccuggagaa

SEQ ID NO: 983993 - RNA, 19 nt, Artificial Sequence
  Description of Artificial Sequence: Synthetic oligonucleotide
  Antisense strand to SEQ ID NO: 983992
uucuccaggcccauaaucc

SEQ ID NO: 983994 - RNA, 19 nt, Artificial Sequence
  Description of Artificial Sequence: Synthetic oligonucleotide
  Sense strand starting at position 1096 of SEQ ID NO: 914178
acuucuauacgucaaagac

SEQ ID NO: 983995 - RNA, 19 nt, Artificial Sequence
  Description of Artificial Sequence: Synthetic oligonucleotide
  Antisense strand to SEQ ID NO: 983994
gucuuugacguauagaagu

SEQ ID NO: 983996 - RNA, 19 nt, Artificial Sequence
  Description of Artificial Sequence: Synthetic oligonucleotide
  Sense strand starting at position 382 of SEQ ID NO: 914178
ugacccacugcugauauua

SEQ ID NO: 983997 - RNA, 19 nt, Artificial Sequence
  Description of Artificial Sequence: Synthetic oligonucleotide
  Antisense strand to SEQ ID NO: 983996
uaauaucagcaguggguca

SEQ ID NO: 983998 - RNA, 19 nt, Artificial Sequence
  Description of Artificial Sequence: Synthetic oligonucleotide
  Sense strand starting at position 16 of SEQ ID NO: 914178
aggaaagaugaucgcuuga

SEQ ID NO: 983999 - RNA, 19 nt, Artificial Sequence
  Description of Artificial Sequence: Synthetic oligonucleotide
  Antisense strand to SEQ ID NO: 983998
ucaagcgaucaucuuuccu

SEQ ID NO: 984000 - RNA, 19 nt, Artificial Sequence
  Description of Artificial Sequence: Synthetic oligonucleotide
  Sense strand starting at position 2181 of SEQ ID NO: 914178
gggagucagcugagcguua

SEQ ID NO: 984001 - RNA, 19 nt, Artificial Sequence
  Description of Artificial Sequence: Synthetic oligonucleotide
  Antisense strand to SEQ ID NO: 984000
uaacgcucagcugacuccc

SEQ ID NO: 984002 - RNA, 19 nt, Artificial Sequence
  Description of Artificial Sequence: Synthetic oligonucleotide
  Sense strand starting at position 2665 of SEQ ID NO: 914178
augggagaccguuaguuua

SEQ ID NO: 984003 - RNA, 19 nt, Artificial Sequence
  Description of Artificial Sequence: Synthetic oligonucleotide
  Antisense strand to SEQ ID NO: 984002
uaaacuaacggucucccau

SEQ ID NO: 984004 - RNA, 19 nt, Artificial Sequence
  Description of Artificial Sequence: Synthetic oligonucleotide
  Sense strand starting at position 775 of SEQ ID NO: 914178
agaauuuaauacugggaau

SEQ ID NO: 984005 - RNA, 19 nt, Artificial Sequence
  Description of Artificial Sequence: Synthetic oligonucleotide
  Antisense strand to SEQ ID NO: 984004
auucccaguauuaaauucu

SEQ ID NO: 984006 - RNA, 19 nt, Artificial Sequence
  Description of Artificial Sequence: Synthetic oligonucleotide
  Sense strand starting at position 160 of SEQ ID NO: 914178
ugcaaugauugaucugauu

SEQ ID NO: 984007 - RNA, 19 nt, Artificial Sequence
  Description of Artificial Sequence: Synthetic oligonucleotide
  Antisense strand to SEQ ID NO: 984006
aaucagaucaaucauugca

SEQ ID NO: 984008 - RNA, 19 nt, Artificial Sequence
  Description of Artificial Sequence: Synthetic oligonucleotide
  Sense strand starting at position 719 of SEQ ID NO: 914178
ugauacguccuuuaauauc

SEQ ID NO: 984009 - RNA, 19 nt, Artificial Sequence
  Description of Artificial Sequence: Synthetic oligonucleotide
  Antisense strand to SEQ ID NO: 984008
gauauuaaaggacguauca

SEQ ID NO: 984010 - RNA, 19 nt, Artificial Sequence
  Description of Artificial Sequence: Synthetic oligonucleotide
  Sense strand starting at position 304 of SEQ ID NO: 914178
auacacauugcugguagaa

SEQ ID NO: 984011 - RNA, 19 nt, Artificial Sequence
  Description of Artificial Sequence: Synthetic oligonucleotide
  Antisense strand to SEQ ID NO: 984010
uucuaccagcaauguguau

SEQ ID NO: 984012 - RNA, 19 nt, Artificial Sequence
  Description of Artificial Sequence: Synthetic oligonucleotide
  Sense strand starting at position 2694 of SEQ ID NO: 914178
cugcauuaggcccaucaga

SEQ ID NO: 984013 - RNA, 19 nt, Artificial Sequence
  Description of Artificial Sequence: Synthetic oligonucleotide
  Antisense strand to SEQ ID NO: 984012
ucugaugggccuaaugcag

SEQ ID NO: 984014 - RNA, 19 nt, Artificial Sequence
  Description of Artificial Sequence: Synthetic oligonucleotide
  Sense strand starting at position 3848 of SEQ ID NO: 914178
cgaagugaucuuuaauagc

SEQ ID NO: 984015 - RNA, 19 nt, Artificial Sequence
  Description of Artificial Sequence: Synthetic oligonucleotide
  Antisense strand to SEQ ID NO: 984014
gcuauuaaagaucacuucg

SEQ ID NO: 984016 - RNA, 19 nt, Artificial Sequence
  Description of Artificial Sequence: Synthetic oligonucleotide
  Sense strand starting at position 2667 of SEQ ID NO: 914178
gggagaccguuaguuuaga

SEQ ID NO: 984017 - RNA, 19 nt, Artificial Sequence
  Description of Artificial Sequence: Synthetic oligonucleotide
  Antisense strand to SEQ ID NO: 984016
ucuaaacuaacggucuccc

SEQ ID NO: 984018 - RNA, 19 nt, Artificial Sequence
  Description of Artificial Sequence: Synthetic oligonucleotide
  Sense strand starting at position 2915 of SEQ ID NO: 914178
ccagccuaggcauaguaau

SEQ ID NO: 984019 - RNA, 19 nt, Artificial Sequence
  Description of Artificial Sequence: Synthetic oligonucleotide
  Antisense strand to SEQ ID NO: 984018
auuacuaugccuaggcugg

SEQ ID NO: 984020 - RNA, 19 nt, Artificial Sequence
  Description of Artificial Sequence: Synthetic oligonucleotide
  Sense strand starting at position 438 of SEQ ID NO: 914178
gcggucaggagcuacaaua

SEQ ID NO: 984021 - RNA, 19 nt, Artificial Sequence
  Description of Artificial Sequence: Synthetic oligonucleotide
  Antisense strand to SEQ ID NO: 984020
uauuguagcuccugaccgc

SEQ ID NO: 984022 - RNA, 19 nt, Artificial Sequence
  Description of Artificial Sequence: Synthetic oligonucleotide
  Sense strand starting at position 18 of SEQ ID NO: 914178
gaaagaugaucgcuugagc

SEQ ID NO: 984023 - RNA, 19 nt, Artificial Sequence
  Description of Artificial Sequence: Synthetic oligonucleotide
  Antisense strand to SEQ ID NO: 984022
gcucaagcgaucaucuuuc

SEQ ID NO: 984024 - RNA, 19 nt, Artificial Sequence
  Description of Artificial Sequence: Synthetic oligonucleotide
  Sense strand starting at position 717 of SEQ ID NO: 914178
ccugauacguccuuuaaua

SEQ ID NO: 984025 - RNA, 19 nt, Artificial Sequence
  Description of Artificial Sequence: Synthetic oligonucleotide
  Antisense strand to SEQ ID NO: 984024
uauuaaaggacguaucagg

SEQ ID NO: 984026 - RNA, 19 nt, Artificial Sequence
  Description of Artificial Sequence: Synthetic oligonucleotide
  Sense strand starting at position 3921 of SEQ ID NO: 914178
gaaagccaugucugcucaa

SEQ ID NO: 984027 - RNA, 19 nt, Artificial Sequence
  Description of Artificial Sequence: Synthetic oligonucleotide
  Antisense strand to SEQ ID NO: 984026
uugagcagacauggcuuuc

SEQ ID NO: 984028 - RNA, 19 nt, Artificial Sequence
  Description of Artificial Sequence: Synthetic oligonucleotide
  Sense strand starting at position 3871 of SEQ ID NO: 914178
agccauagucucugagcaa

SEQ ID NO: 984029 - RNA, 19 nt, Artificial Sequence
  Description of Artificial Sequence: Synthetic oligonucleotide
  Antisense strand to SEQ ID NO: 984028
uugcucagagacuauggcu

SEQ ID NO: 984030 - RNA, 19 nt, Artificial Sequence
  Description of Artificial Sequence: Synthetic oligonucleotide
  Sense strand starting at position 708 of SEQ ID NO: 914178
gcccuuuacccugauacgu

SEQ ID NO: 984031 - RNA, 19 nt, Artificial Sequence
  Description of Artificial Sequence: Synthetic oligonucleotide
  Antisense strand to SEQ ID NO: 984030
acguaucaggguaaagggc

SEQ ID NO: 984032 - RNA, 19 nt, Artificial Sequence
  Description of Artificial Sequence: Synthetic oligonucleotide
  Sense strand starting at position 727 of SEQ ID NO: 914178
ccuuuaauaucuucgcuga

SEQ ID NO: 984033 - RNA, 19 nt, Artificial Sequence
  Description of Artificial Sequence: Synthetic oligonucleotide
  Antisense strand to SEQ ID NO: 984032
ucagcgaagauauuaaagg

SEQ ID NO: 984034 - RNA, 19 nt, Artificial Sequence
  Description of Artificial Sequence: Synthetic oligonucleotide
  Sense strand starting at position 3924 of SEQ ID NO: 914178
agccaugucugcucaaaug

SEQ ID NO: 984035 - RNA, 19 nt, Artificial Sequence
  Description of Artificial Sequence: Synthetic oligonucleotide
  Antisense strand to SEQ ID NO: 984034
cauuugagcagacauggcu

SEQ ID NO: 984036 - RNA, 19 nt, Artificial Sequence
  Description of Artificial Sequence: Synthetic oligonucleotide
  Sense strand starting at position 3870 of SEQ ID NO: 914178
cagccauagucucugagca

SEQ ID NO: 984037 - RNA, 19 nt, Artificial Sequence
  Description of Artificial Sequence: Synthetic oligonucleotide
  Antisense strand to SEQ ID NO: 984036
ugcucagagacuauggcug

SEQ ID NO: 984038 - RNA, 19 nt, Artificial Sequence
  Description of Artificial Sequence: Synthetic oligonucleotide
  Sense strand starting at position 3171 of SEQ ID NO: 914178
ucccguguucuuuaaccuu

SEQ ID NO: 984039 - RNA, 19 nt, Artificial Sequence
  Description of Artificial Sequence: Synthetic oligonucleotide
  Antisense strand to SEQ ID NO: 984038
aagguuaaagaacacggga

SEQ ID NO: 984040 - RNA, 19 nt, Artificial Sequence
  Description of Artificial Sequence: Synthetic oligonucleotide
  Sense strand starting at position 3323 of SEQ ID NO: 914178
auuguagaauuggaacuaa

SEQ ID NO: 984041 - RNA, 19 nt, Artificial Sequence
  Description of Artificial Sequence: Synthetic oligonucleotide
  Antisense strand to SEQ ID NO: 984040
uuaguuccaauucuacaau

SEQ ID NO: 984042 - RNA, 19 nt, Artificial Sequence
  Description of Artificial Sequence: Synthetic oligonucleotide
  Sense strand starting at position 3164 of SEQ ID NO: 914178
gaagaagucccguguucuu

SEQ ID NO: 984043 - RNA, 19 nt, Artificial Sequence
  Description of Artificial Sequence: Synthetic oligonucleotide
  Antisense strand to SEQ ID NO: 984042
aagaacacgggacuucuuc

SEQ ID NO: 984044 - RNA, 19 nt, Artificial Sequence
  Description of Artificial Sequence: Synthetic oligonucleotide
  Sense strand starting at position 3307 of SEQ ID NO: 914178
aaugaagcguugcccaauu

SEQ ID NO: 984045 - RNA, 19 nt, Artificial Sequence
  Description of Artificial Sequence: Synthetic oligonucleotide
  Antisense strand to SEQ ID NO: 984044
aauugggcaacgcuucauu

SEQ ID NO: 984046 - RNA, 19 nt, Artificial Sequence
  Description of Artificial Sequence: Synthetic oligonucleotide
  Sense strand starting at position 413 of SEQ ID NO: 914178
ucccauuuguuggaauguu

SEQ ID NO: 984047 - RNA, 19 nt, Artificial Sequence
  Description of Artificial Sequence: Synthetic oligonucleotide
  Antisense strand to SEQ ID NO: 984046
aacauuccaacaaauggga

SEQ ID NO: 984048 - RNA, 19 nt, Artificial Sequence
  Description of Artificial Sequence: Synthetic oligonucleotide
  Sense strand starting at position 336 of SEQ ID NO: 914178
guguuaaugucucuauucu

SEQ ID NO: 984049 - RNA, 19 nt, Artificial Sequence
  Description of Artificial Sequence: Synthetic oligonucleotide
  Antisense strand to SEQ ID NO: 984048
agaauagagacauuaacac

SEQ ID NO: 984050 - RNA, 19 nt, Artificial Sequence
  Description of Artificial Sequence: Synthetic oligonucleotide
  Sense strand starting at position 3167 of SEQ ID NO: 914178
gaagucccguguucuuuaa

SEQ ID NO: 984051 - RNA, 19 nt, Artificial Sequence
  Description of Artificial Sequence: Synthetic oligonucleotide
  Antisense strand to SEQ ID NO: 984050
uuaaagaacacgggacuuc

SEQ ID NO: 984052 - RNA, 19 nt, Artificial Sequence
  Description of Artificial Sequence: Synthetic oligonucleotide
  Sense strand starting at position 3474 of SEQ ID NO: 914178
caauaaugucgccgguaga

SEQ ID NO: 984053 - RNA, 19 nt, Artificial Sequence
  Description of Artificial Sequence: Synthetic oligonucleotide
  Antisense strand to SEQ ID NO: 984052
ucuaccggcgacauuauug

SEQ ID NO: 984054 - RNA, 19 nt, Artificial Sequence
  Description of Artificial Sequence: Synthetic oligonucleotide
  Sense strand starting at position 2192 of SEQ ID NO: 914178
gagcguuacccacguccau

SEQ ID NO: 984055 - RNA, 19 nt, Artificial Sequence
  Description of Artificial Sequence: Synthetic oligonucleotide
  Antisense strand to SEQ ID NO: 984054
auggacguggguaacgcuc

SEQ ID NO: 984056 - RNA, 19 nt, Artificial Sequence
  Description of Artificial Sequence: Synthetic oligonucleotide
  Sense strand starting at position 3977 of SEQ ID NO: 914178
aggauaggcuuccacaguu

SEQ ID NO: 984057 - RNA, 19 nt, Artificial Sequence
  Description of Artificial Sequence: Synthetic oligonucleotide
  Antisense strand to SEQ ID NO: 984056
aacuguggaagccuauccu

SEQ ID NO: 984058 - RNA, 19 nt, Artificial Sequence
  Description of Artificial Sequence: Synthetic oligonucleotide
  Sense strand starting at position 3851 of SEQ ID NO: 914178
agugaucuuuaauagccau

SEQ ID NO: 984059 - RNA, 19 nt, Artificial Sequence
  Description of Artificial Sequence: Synthetic oligonucleotide
  Antisense strand to SEQ ID NO: 984058
auggcuauuaaagaucacu

SEQ ID NO: 984060 - RNA, 19 nt, Artificial Sequence
  Description of Artificial Sequence: Synthetic oligonucleotide
  Sense strand starting at position 3415 of SEQ ID NO: 914178
ugagcagucuaaugaaaua

SEQ ID NO: 984061 - RNA, 19 nt, Artificial Sequence
  Description of Artificial Sequence: Synthetic oligonucleotide
  Antisense strand to SEQ ID NO: 984060
uauuucauuagacugcuca

SEQ ID NO: 984062 - RNA, 19 nt, Artificial Sequence
  Description of Artificial Sequence: Synthetic oligonucleotide
  Sense strand starting at position 3872 of SEQ ID NO: 914178
gccauagucucugagcaaa

SEQ ID NO: 984063 - RNA, 19 nt, Artificial Sequence
  Description of Artificial Sequence: Synthetic oligonucleotide
  Antisense strand to SEQ ID NO: 984062
uuugcucagagacuauggc

SEQ ID NO: 984064 - RNA, 19 nt, Artificial Sequence
  Description of Artificial Sequence: Synthetic oligonucleotide
  Sense strand starting at position 3315 of SEQ ID NO: 914178
guugcccaauuguagaauu

SEQ ID NO: 984065 - RNA, 19 nt, Artificial Sequence
  Description of Artificial Sequence: Synthetic oligonucleotide
  Antisense strand to SEQ ID NO: 984064
aauucuacaauugggcaac

SEQ ID NO: 984066 - RNA, 19 nt, Artificial Sequence
  Description of Artificial Sequence: Synthetic oligonucleotide
  Sense strand starting at position 3935 of SEQ ID NO: 914178
cucaaaugcucucaacguu

SEQ ID NO: 984067 - RNA, 19 nt, Artificial Sequence
  Description of Artificial Sequence: Synthetic oligonucleotide
  Antisense strand to SEQ ID NO: 984066
aacguugagagcauuugag

SEQ ID NO: 984068 - RNA, 19 nt, Artificial Sequence
  Description of Artificial Sequence: Synthetic oligonucleotide
  Sense strand starting at position 2727 of SEQ ID NO: 914178
gguuacucaugcugaaguu

SEQ ID NO: 984069 - RNA, 19 nt, Artificial Sequence
  Description of Artificial Sequence: Synthetic oligonucleotide
  Antisense strand to SEQ ID NO: 984068
aacuucagcaugaguaacc

SEQ ID NO: 984070 - RNA, 19 nt, Artificial Sequence
  Description of Artificial Sequence: Synthetic oligonucleotide
  Sense strand starting at position 226 of SEQ ID NO: 914179
aaguauuuguguguaugga

SEQ ID NO: 984071 - RNA, 19 nt, Artificial Sequence
  Description of Artificial Sequence: Synthetic oligonucleotide
  Antisense strand to SEQ ID NO: 984070
uccauacacacaaauacuu

SEQ ID NO: 984072 - RNA, 19 nt, Artificial Sequence
  Description of Artificial Sequence: Synthetic oligonucleotide
  Sense strand starting at position 2166 of SEQ ID NO: 914179
ggauuaugggccuggagaa

SEQ ID NO: 984073 - RNA, 19 nt, Artificial Sequence
  Description of Artificial Sequence: Synthetic oligonucleotide
  Antisense strand to SEQ ID NO: 984072
uucuccaggcccauaaucc

SEQ ID NO: 984074 - RNA, 19 nt, Artificial Sequence
  Description of Artificial Sequence: Synthetic oligonucleotide
  Sense strand starting at position 708 of SEQ ID NO: 914179
acuucuauacgucaaagac

SEQ ID NO: 984075 - RNA, 19 nt, Artificial Sequence
  Description of Artificial Sequence: Synthetic oligonucleotide
  Antisense strand to SEQ ID NO: 984074
gucuuugacguauagaagu

SEQ ID NO: 984076 - RNA, 19 nt, Artificial Sequence
  Description of Artificial Sequence: Synthetic oligonucleotide
  Sense strand starting at position 3783 of SEQ ID NO: 914179
gucgguuugcagucauccu

SEQ ID NO: 984077 - RNA, 19 nt, Artificial Sequence
  Description of Artificial Sequence: Synthetic oligonucleotide
  Antisense strand to SEQ ID NO: 984076
aggaugacugcaaaccgac

SEQ ID NO: 984078 - RNA, 19 nt, Artificial Sequence
  Description of Artificial Sequence: Synthetic oligonucleotide
  Sense strand starting at position 1793 of SEQ ID NO: 914179
gggagucagcugagcguua

SEQ ID NO: 984079 - RNA, 19 nt, Artificial Sequence
  Description of Artificial Sequence: Synthetic oligonucleotide
  Antisense strand to SEQ ID NO: 984078
uaacgcucagcugacuccc

SEQ ID NO: 984080 - RNA, 19 nt, Artificial Sequence
  Description of Artificial Sequence: Synthetic oligonucleotide
  Sense strand starting at position 2277 of SEQ ID NO: 914179
augggagaccguuaguuua

SEQ ID NO: 984081 - RNA, 19 nt, Artificial Sequence
  Description of Artificial Sequence: Synthetic oligonucleotide
  Antisense strand to SEQ ID NO: 984080
uaaacuaacggucucccau

SEQ ID NO: 984082 - RNA, 19 nt, Artificial Sequence
  Description of Artificial Sequence: Synthetic oligonucleotide
  Sense strand starting at position 3810 of SEQ ID NO: 914179
ugggaaauagucugguaug

SEQ ID NO: 984083 - RNA, 19 nt, Artificial Sequence
  Description of Artificial Sequence: Synthetic oligonucleotide
  Antisense strand to SEQ ID NO: 984082
cauaccagacuauuuccca

SEQ ID NO: 984084 - RNA, 19 nt, Artificial Sequence
  Description of Artificial Sequence: Synthetic oligonucleotide
  Sense strand starting at position 387 of SEQ ID NO: 914179
agaauuuaauacugggaau

SEQ ID NO: 984085 - RNA, 19 nt, Artificial Sequence
  Description of Artificial Sequence: Synthetic oligonucleotide
  Antisense strand to SEQ ID NO: 984084
auucccaguauuaaauucu

SEQ ID NO: 984086 - RNA, 19 nt, Artificial Sequence
  Description of Artificial Sequence: Synthetic oligonucleotide
  Sense strand starting at position 331 of SEQ ID NO: 914179
ugauacguccuuuaauauc

SEQ ID NO: 984087 - RNA, 19 nt, Artificial Sequence
  Description of Artificial Sequence: Synthetic oligonucleotide
  Antisense strand to SEQ ID NO: 984086
gauauuaaaggacguauca

SEQ ID NO: 984088 - RNA, 19 nt, Artificial Sequence
  Description of Artificial Sequence: Synthetic oligonucleotide
  Sense strand starting at position 2306 of SEQ ID NO: 914179
cugcauuaggcccaucaga

SEQ ID NO: 984089 - RNA, 19 nt, Artificial Sequence
  Description of Artificial Sequence: Synthetic oligonucleotide
  Antisense strand to SEQ ID NO: 984088
ucugaugggccuaaugcag

SEQ ID NO: 984090 - RNA, 19 nt, Artificial Sequence
  Description of Artificial Sequence: Synthetic oligonucleotide
  Sense strand starting at position 3460 of SEQ ID NO: 914179
cgaagugaucuuuaauagc

SEQ ID NO: 984091 - RNA, 19 nt, Artificial Sequence
  Description of Artificial Sequence: Synthetic oligonucleotide
  Antisense strand to SEQ ID NO: 984090
gcuauuaaagaucacuucg

SEQ ID NO: 984092 - RNA, 19 nt, Artificial Sequence
  Description of Artificial Sequence: Synthetic oligonucleotide
  Sense strand starting at position 3800 of SEQ ID NO: 914179
cuggcucuucugggaaaua

SEQ ID NO: 984093 - RNA, 19 nt, Artificial Sequence
  Description of Artificial Sequence: Synthetic oligonucleotide
  Antisense strand to SEQ ID NO: 984092
uauuucccagaagagccag

SEQ ID NO: 984094 - RNA, 19 nt, Artificial Sequence
  Description of Artificial Sequence: Synthetic oligonucleotide
  Sense strand starting at position 2279 of SEQ ID NO: 914179
gggagaccguuaguuuaga

SEQ ID NO: 984095 - RNA, 19 nt, Artificial Sequence
  Description of Artificial Sequence: Synthetic oligonucleotide
  Antisense strand to SEQ ID NO: 984094
ucuaaacuaacggucuccc

SEQ ID NO: 984096 - RNA, 19 nt, Artificial Sequence
  Description of Artificial Sequence: Synthetic oligonucleotide
  Sense strand starting at position 2527 of SEQ ID NO: 914179
ccagccuaggcauaguaau

SEQ ID NO: 984097 - RNA, 19 nt, Artificial Sequence
  Description of Artificial Sequence: Synthetic oligonucleotide
  Antisense strand to SEQ ID NO: 984096
auuacuaugccuaggcugg

SEQ ID NO: 984098 - RNA, 19 nt, Artificial Sequence
  Description of Artificial Sequence: Synthetic oligonucleotide
  Sense strand starting at position 3623 of SEQ ID NO: 914179
agcugcagccuggaagauu

SEQ ID NO: 984099 - RNA, 19 nt, Artificial Sequence
  Description of Artificial Sequence: Synthetic oligonucleotide
  Antisense strand to SEQ ID NO: 984098
aaucuuccaggcugcagcu

SEQ ID NO: 984100 - RNA, 19 nt, Artificial Sequence
  Description of Artificial Sequence: Synthetic oligonucleotide
  Sense strand starting at position 50 of SEQ ID NO: 914179
gcggucaggagcuacaaua

SEQ ID NO: 984101 - RNA, 19 nt, Artificial Sequence
  Description of Artificial Sequence: Synthetic oligonucleotide
  Antisense strand to SEQ ID NO: 984100
uauuguagcuccugaccgc

SEQ ID NO: 984102 - RNA, 19 nt, Artificial Sequence
  Description of Artificial Sequence: Synthetic oligonucleotide
  Sense strand starting at position 329 of SEQ ID NO: 914179
ccugauacguccuuuaaua

SEQ ID NO: 984103 - RNA, 19 nt, Artificial Sequence
  Description of Artificial Sequence: Synthetic oligonucleotide
  Antisense strand to SEQ ID NO: 984102
uauuaaaggacguaucagg

SEQ ID NO: 984104 - RNA, 19 nt, Artificial Sequence
  Description of Artificial Sequence: Synthetic oligonucleotide
  Sense strand starting at position 3815 of SEQ ID NO: 914179
aauagucugguauguuuga

SEQ ID NO: 984105 - RNA, 19 nt, Artificial Sequence
  Description of Artificial Sequence: Synthetic oligonucleotide
  Antisense strand to SEQ ID NO: 984104
ucaaacauaccagacuauu

SEQ ID NO: 984106 - RNA, 19 nt, Artificial Sequence
  Description of Artificial Sequence: Synthetic oligonucleotide
  Sense strand starting at position 3533 of SEQ ID NO: 914179
gaaagccaugucugcucaa

SEQ ID NO: 984107 - RNA, 19 nt, Artificial Sequence
  Description of Artificial Sequence: Synthetic oligonucleotide
  Antisense strand to SEQ ID NO: 984106
uugagcagacauggcuuuc

SEQ ID NO: 984108 - RNA, 19 nt, Artificial Sequence
  Description of Artificial Sequence: Synthetic oligonucleotide
  Sense strand starting at position 3483 of SEQ ID NO: 914179
agccauagucucugagcaa

SEQ ID NO: 984109 - RNA, 19 nt, Artificial Sequence
  Description of Artificial Sequence: Synthetic oligonucleotide
  Antisense strand to SEQ ID NO: 984108
uugcucagagacuauggcu

SEQ ID NO: 984110 - RNA, 19 nt, Artificial Sequence
  Description of Artificial Sequence: Synthetic oligonucleotide
  Sense strand starting at position 320 of SEQ ID NO: 914179
gcccuuuacccugauacgu

SEQ ID NO: 984111 - RNA, 19 nt, Artificial Sequence
  Description of Artificial Sequence: Synthetic oligonucleotide
  Antisense strand to SEQ ID NO: 984110
acguaucaggguaaagggc

SEQ ID NO: 984112 - RNA, 19 nt, Artificial Sequence
  Description of Artificial Sequence: Synthetic oligonucleotide
  Sense strand starting at position 339 of SEQ ID NO: 914179
ccuuuaauaucuucgcuga

SEQ ID NO: 984113 - RNA, 19 nt, Artificial Sequence
  Description of Artificial Sequence: Synthetic oligonucleotide
  Antisense strand to SEQ ID NO: 984112
ucagcgaagauauuaaagg

SEQ ID NO: 984114 - RNA, 19 nt, Artificial Sequence
  Description of Artificial Sequence: Synthetic oligonucleotide
  Sense strand starting at position 3536 of SEQ ID NO: 914179
agccaugucugcucaaaug

SEQ ID NO: 984115 - RNA, 19 nt, Artificial Sequence
  Description of Artificial Sequence: Synthetic oligonucleotide
  Antisense strand to SEQ ID NO: 984114
cauuugagcagacauggcu

SEQ ID NO: 984116 - RNA, 19 nt, Artificial Sequence
  Description of Artificial Sequence: Synthetic oligonucleotide
  Sense strand starting at position 3482 of SEQ ID NO: 914179
cagccauagucucugagca

SEQ ID NO: 984117 - RNA, 19 nt, Artificial Sequence
  Description of Artificial Sequence: Synthetic oligonucleotide
  Antisense strand to SEQ ID NO: 984116
ugcucagagacuauggcug

SEQ ID NO: 984118 - RNA, 19 nt, Artificial Sequence
  Description of Artificial Sequence: Synthetic oligonucleotide
  Sense strand starting at position 2783 of SEQ ID NO: 914179
ucccguguucuuuaaccuu

SEQ ID NO: 984119 - RNA, 19 nt, Artificial Sequence
  Description of Artificial Sequence: Synthetic oligonucleotide
  Antisense strand to SEQ ID NO: 984118
aagguuaaagaacacggga

SEQ ID NO: 984120 - RNA, 19 nt, Artificial Sequence
  Description of Artificial Sequence: Synthetic oligonucleotide
  Sense strand starting at position 2935 of SEQ ID NO: 914179
auuguagaauuggaacuaa

SEQ ID NO: 984121 - RNA, 19 nt, Artificial Sequence
  Description of Artificial Sequence: Synthetic oligonucleotide
  Antisense strand to SEQ ID NO: 984120
uuaguuccaauucuacaau

SEQ ID NO: 984122 - RNA, 19 nt, Artificial Sequence
  Description of Artificial Sequence: Synthetic oligonucleotide
  Sense strand starting at position 2776 of SEQ ID NO: 914179
gaagaagucccguguucuu

SEQ ID NO: 984123 - RNA, 19 nt, Artificial Sequence
  Description of Artificial Sequence: Synthetic oligonucleotide
  Antisense strand to SEQ ID NO: 984122
aagaacacgggacuucuuc

SEQ ID NO: 984124 - RNA, 19 nt, Artificial Sequence
  Description of Artificial Sequence: Synthetic oligonucleotide
  Sense strand starting at position 2919 of SEQ ID NO: 914179
aaugaagcguugcccaauu

SEQ ID NO: 984125 - RNA, 19 nt, Artificial Sequence
  Description of Artificial Sequence: Synthetic oligonucleotide
  Antisense strand to SEQ ID NO: 984124
aauugggcaacgcuucauu

SEQ ID NO: 984126 - RNA, 19 nt, Artificial Sequence
  Description of Artificial Sequence: Synthetic oligonucleotide
  Sense strand starting at position 25 of SEQ ID NO: 914179
ucccauuuguuggaauguu

SEQ ID NO: 984127 - RNA, 19 nt, Artificial Sequence
  Description of Artificial Sequence: Synthetic oligonucleotide
  Antisense strand to SEQ ID NO: 984126
aacauuccaacaaauggga

SEQ ID NO: 984128 - RNA, 19 nt, Artificial Sequence
  Description of Artificial Sequence: Synthetic oligonucleotide
  Sense strand starting at position 2779 of SEQ ID NO: 914179
gaagucccguguucuuuaa

SEQ ID NO: 984129 - RNA, 19 nt, Artificial Sequence
  Description of Artificial Sequence: Synthetic oligonucleotide
  Antisense strand to SEQ ID NO: 984128
uuaaagaacacgggacuuc

SEQ ID NO: 984130 - RNA, 19 nt, Artificial Sequence
  Description of Artificial Sequence: Synthetic oligonucleotide
  Sense strand starting at position 3086 of SEQ ID NO: 914179
caauaaugucgccgguaga

SEQ ID NO: 984131 - RNA, 19 nt, Artificial Sequence
  Description of Artificial Sequence: Synthetic oligonucleotide
  Antisense strand to SEQ ID NO: 984130
ucuaccggcgacauuauug

SEQ ID NO: 984132 - RNA, 19 nt, Artificial Sequence
  Description of Artificial Sequence: Synthetic oligonucleotide
  Sense strand starting at position 3801 of SEQ ID NO: 914179
uggcucuucugggaaauag

SEQ ID NO: 984133 - RNA, 19 nt, Artificial Sequence
  Description of Artificial Sequence: Synthetic oligonucleotide
  Antisense strand to SEQ ID NO: 984132
cuauuucccagaagagcca

SEQ ID NO: 984134 - RNA, 19 nt, Artificial Sequence
  Description of Artificial Sequence: Synthetic oligonucleotide
  Sense strand starting at position 1804 of SEQ ID NO: 914179
gagcguuacccacguccau

SEQ ID NO: 984135 - RNA, 19 nt, Artificial Sequence
  Description of Artificial Sequence: Synthetic oligonucleotide
  Antisense strand to SEQ ID NO: 984134
auggacguggguaacgcuc

SEQ ID NO: 984136 - RNA, 19 nt, Artificial Sequence
  Description of Artificial Sequence: Synthetic oligonucleotide
  Sense strand starting at position 3666 of SEQ ID NO: 914179
agcugucuugccuggucau

SEQ ID NO: 984137 - RNA, 19 nt, Artificial Sequence
  Description of Artificial Sequence: Synthetic oligonucleotide
  Antisense strand to SEQ ID NO: 984136
augaccaggcaagacagcu

SEQ ID NO: 984138 - RNA, 19 nt, Artificial Sequence
  Description of Artificial Sequence: Synthetic oligonucleotide
  Sense strand starting at position 3589 of SEQ ID NO: 914179
aggauaggcuuccacaguu

SEQ ID NO: 984139 - RNA, 19 nt, Artificial Sequence
  Description of Artificial Sequence: Synthetic oligonucleotide
  Antisense strand to SEQ ID NO: 984138
aacuguggaagccuauccu

SEQ ID NO: 984140 - RNA, 19 nt, Artificial Sequence
  Description of Artificial Sequence: Synthetic oligonucleotide
  Sense strand starting at position 3463 of SEQ ID NO: 914179
agugaucuuuaauagccau

SEQ ID NO: 984141 - RNA, 19 nt, Artificial Sequence
  Description of Artificial Sequence: Synthetic oligonucleotide
  Antisense strand to SEQ ID NO: 984140
auggcuauuaaagaucacu

SEQ ID NO: 984142 - RNA, 19 nt, Artificial Sequence
  Description of Artificial Sequence: Synthetic oligonucleotide
  Sense strand starting at position 3027 of SEQ ID NO: 914179
ugagcagucuaaugaaaua

SEQ ID NO: 984143 - RNA, 19 nt, Artificial Sequence
  Description of Artificial Sequence: Synthetic oligonucleotide
  Antisense strand to SEQ ID NO: 984142
uauuucauuagacugcuca

SEQ ID NO: 984144 - RNA, 19 nt, Artificial Sequence
  Description of Artificial Sequence: Synthetic oligonucleotide
  Sense strand starting at position 3813 of SEQ ID NO: 914179
gaaauagucugguauguuu

SEQ ID NO: 984145 - RNA, 19 nt, Artificial Sequence
  Description of Artificial Sequence: Synthetic oligonucleotide
  Antisense strand to SEQ ID NO: 984144
aaacauaccagacuauuuc

SEQ ID NO: 984146 - RNA, 19 nt, Artificial Sequence
  Description of Artificial Sequence: Synthetic oligonucleotide
  Sense strand starting at position 3831 of SEQ ID NO: 914179
ugauguuauugugaggcua

SEQ ID NO: 984147 - RNA, 19 nt, Artificial Sequence
  Description of Artificial Sequence: Synthetic oligonucleotide
  Antisense strand to SEQ ID NO: 984146
uagccucacaauaacauca

SEQ ID NO: 984148 - RNA, 19 nt, Artificial Sequence
  Description of Artificial Sequence: Synthetic oligonucleotide
  Sense strand starting at position 3484 of SEQ ID NO: 914179
gccauagucucugagcaaa

SEQ ID NO: 984149 - RNA, 19 nt, Artificial Sequence
  Description of Artificial Sequence: Synthetic oligonucleotide
  Antisense strand to SEQ ID NO: 984148
uuugcucagagacuauggc

SEQ ID NO: 984150 - RNA, 19 nt, Artificial Sequence
  Description of Artificial Sequence: Synthetic oligonucleotide
  Sense strand starting at position 2546 of SEQ ID NO: 914180
aggcuuucccgggaaagag

SEQ ID NO: 984151 - RNA, 19 nt, Artificial Sequence
  Description of Artificial Sequence: Synthetic oligonucleotide
  Antisense strand to SEQ ID NO: 984150
cucuuucccgggaaagccu

SEQ ID NO: 984152 - RNA, 19 nt, Artificial Sequence
  Description of Artificial Sequence: Synthetic oligonucleotide
  Sense strand starting at position 2138 of SEQ ID NO: 914180
cgccuaauugccuucgauu

SEQ ID NO: 984153 - RNA, 19 nt, Artificial Sequence
  Description of Artificial Sequence: Synthetic oligonucleotide
  Antisense strand to SEQ ID NO: 984152
aaucgaaggcaauuaggcg

SEQ ID NO: 984154 - RNA, 19 nt, Artificial Sequence
  Description of Artificial Sequence: Synthetic oligonucleotide
  Sense strand starting at position 551 of SEQ ID NO: 914180
guaagaauccauuauaugc

SEQ ID NO: 984155 - RNA, 19 nt, Artificial Sequence
  Description of Artificial Sequence: Synthetic oligonucleotide
  Antisense strand to SEQ ID NO: 984154
gcauauaauggauucuuac

SEQ ID NO: 984156 - RNA, 19 nt, Artificial Sequence
  Description of Artificial Sequence: Synthetic oligonucleotide
  Sense strand starting at position 1377 of SEQ ID NO: 914180
uggcaaaucaucgagacuu

SEQ ID NO: 984157 - RNA, 19 nt, Artificial Sequence
  Description of Artificial Sequence: Synthetic oligonucleotide
  Antisense strand to SEQ ID NO: 984156
aagucucgaugauuugcca

SEQ ID NO: 984158 - RNA, 19 nt, Artificial Sequence
  Description of Artificial Sequence: Synthetic oligonucleotide
  Sense strand starting at position 822 of SEQ ID NO: 914180
ggaguuucugcggaaggaa

SEQ ID NO: 984159 - RNA, 19 nt, Artificial Sequence
  Description of Artificial Sequence: Synthetic oligonucleotide
  Antisense strand to SEQ ID NO: 984158
uuccuuccgcagaaacucc

SEQ ID NO: 984160 - RNA, 19 nt, Artificial Sequence
  Description of Artificial Sequence: Synthetic oligonucleotide
  Sense strand starting at position 778 of SEQ ID NO: 914180
aaucgagcucgacauuaaa

SEQ ID NO: 984161 - RNA, 19 nt, Artificial Sequence
  Description of Artificial Sequence: Synthetic oligonucleotide
  Antisense strand to SEQ ID NO: 984160
uuuaaugucgagcucgauu

SEQ ID NO: 984162 - RNA, 19 nt, Artificial Sequence
  Description of Artificial Sequence: Synthetic oligonucleotide
  Sense strand starting at position 1179 of SEQ ID NO: 914180
uuguucucagcagacaaca

SEQ ID NO: 984163 - RNA, 19 nt, Artificial Sequence
  Description of Artificial Sequence: Synthetic oligonucleotide
  Antisense strand to SEQ ID NO: 984162
uguugucugcugagaacaa

SEQ ID NO: 984164 - RNA, 19 nt, Artificial Sequence
  Description of Artificial Sequence: Synthetic oligonucleotide
  Sense strand starting at position 1379 of SEQ ID NO: 914180
gcaaaucaucgagacuuuc

SEQ ID NO: 984165 - RNA, 19 nt, Artificial Sequence
  Description of Artificial Sequence: Synthetic oligonucleotide
  Antisense strand to SEQ ID NO: 984164
gaaagucucgaugauuugc

SEQ ID NO: 984166 - RNA, 19 nt, Artificial Sequence
  Description of Artificial Sequence: Synthetic oligonucleotide
  Sense strand starting at position 1033 of SEQ ID NO: 914180
aguacaaagucacuccaua

SEQ ID NO: 984167 - RNA, 19 nt, Artificial Sequence
  Description of Artificial Sequence: Synthetic oligonucleotide
  Antisense strand to SEQ ID NO: 984166
uauggagugacuuuguacu

SEQ ID NO: 984168 - RNA, 19 nt, Artificial Sequence
  Description of Artificial Sequence: Synthetic oligonucleotide
  Sense strand starting at position 872 of SEQ ID NO: 914180
ccugaaagcacaugguaga

SEQ ID NO: 984169 - RNA, 19 nt, Artificial Sequence
  Description of Artificial Sequence: Synthetic oligonucleotide
  Antisense strand to SEQ ID NO: 984168
ucuaccaugugcuuucagg

SEQ ID NO: 984170 - RNA, 19 nt, Artificial Sequence
  Description of Artificial Sequence: Synthetic oligonucleotide
  Sense strand starting at position 2545 of SEQ ID NO: 914180
gaggcuuucccgggaaaga

SEQ ID NO: 984171 - RNA, 19 nt, Artificial Sequence
  Description of Artificial Sequence: Synthetic oligonucleotide
  Antisense strand to SEQ ID NO: 984170
ucuuucccgggaaagccuc

SEQ ID NO: 984172 - RNA, 19 nt, Artificial Sequence
  Description of Artificial Sequence: Synthetic oligonucleotide
  Sense strand starting at position 1177 of SEQ ID NO: 914180
cuuuguucucagcagacaa

SEQ ID NO: 984173 - RNA, 19 nt, Artificial Sequence
  Description of Artificial Sequence: Synthetic oligonucleotide
  Antisense strand to SEQ ID NO: 984172
uugucugcugagaacaaag

SEQ ID NO: 984174 - RNA, 19 nt, Artificial Sequence
  Description of Artificial Sequence: Synthetic oligonucleotide
  Sense strand starting at position 2115 of SEQ ID NO: 914180
acggcuaaugcccagauaa

SEQ ID NO: 984175 - RNA, 19 nt, Artificial Sequence
  Description of Artificial Sequence: Synthetic oligonucleotide
  Antisense strand to SEQ ID NO: 984174
uuaucugggcauuagccgu

SEQ ID NO: 984176 - RNA, 19 nt, Artificial Sequence
  Description of Artificial Sequence: Synthetic oligonucleotide
  Sense strand starting at position 2544 of SEQ ID NO: 914180
ggaggcuuucccgggaaag

SEQ ID NO: 984177 - RNA, 19 nt, Artificial Sequence
  Description of Artificial Sequence: Synthetic oligonucleotide
  Antisense strand to SEQ ID NO: 984176
cuuucccgggaaagccucc

SEQ ID NO: 984178 - RNA, 19 nt, Artificial Sequence
  Description of Artificial Sequence: Synthetic oligonucleotide
  Sense strand starting at position 776 of SEQ ID NO: 914180
ccaaucgagcucgacauua

SEQ ID NO: 984179 - RNA, 19 nt, Artificial Sequence
  Description of Artificial Sequence: Synthetic oligonucleotide
  Antisense strand to SEQ ID NO: 984178
uaaugucgagcucgauugg

SEQ ID NO: 984180 - RNA, 19 nt, Artificial Sequence
  Description of Artificial Sequence: Synthetic oligonucleotide
  Sense strand starting at position 1376 of SEQ ID NO: 914180
uuggcaaaucaucgagacu

SEQ ID NO: 984181 - RNA, 19 nt, Artificial Sequence
  Description of Artificial Sequence: Synthetic oligonucleotide
  Antisense strand to SEQ ID NO: 984180
agucucgaugauuugccaa

SEQ ID NO: 984182 - RNA, 19 nt, Artificial Sequence
  Description of Artificial Sequence: Synthetic oligonucleotide
  Sense strand starting at position 863 of SEQ ID NO: 914180
uaacguuagccugaaagca

SEQ ID NO: 984183 - RNA, 19 nt, Artificial Sequence
  Description of Artificial Sequence: Synthetic oligonucleotide
  Antisense strand to SEQ ID NO: 984182
ugcuuucaggcuaacguua

SEQ ID NO: 984184 - RNA, 19 nt, Artificial Sequence
  Description of Artificial Sequence: Synthetic oligonucleotide
  Sense strand starting at position 1272 of SEQ ID NO: 914180
ccugcaggcucuuuaaaga

SEQ ID NO: 984185 - RNA, 19 nt, Artificial Sequence
  Description of Artificial Sequence: Synthetic oligonucleotide
  Antisense strand to SEQ ID NO: 984184
ucuuuaaagagccugcagg

SEQ ID NO: 984186 - RNA, 19 nt, Artificial Sequence
  Description of Artificial Sequence: Synthetic oligonucleotide
  Sense strand starting at position 669 of SEQ ID NO: 914180
ucaagucuguuuccuaauu

SEQ ID NO: 984187 - RNA, 19 nt, Artificial Sequence
  Description of Artificial Sequence: Synthetic oligonucleotide
  Antisense strand to SEQ ID NO: 984186
aauuaggaaacagacuuga

SEQ ID NO: 984188 - RNA, 19 nt, Artificial Sequence
  Description of Artificial Sequence: Synthetic oligonucleotide
  Sense strand starting at position 860 of SEQ ID NO: 914180
ucuuaacguuagccugaaa

SEQ ID NO: 984189 - RNA, 19 nt, Artificial Sequence
  Description of Artificial Sequence: Synthetic oligonucleotide
  Antisense strand to SEQ ID NO: 984188
uuucaggcuaacguuaaga

SEQ ID NO: 984190 - RNA, 19 nt, Artificial Sequence
  Description of Artificial Sequence: Synthetic oligonucleotide
  Sense strand starting at position 667 of SEQ ID NO: 914180
ggucaagucuguuuccuaa

SEQ ID NO: 984191 - RNA, 19 nt, Artificial Sequence
  Description of Artificial Sequence: Synthetic oligonucleotide
  Antisense strand to SEQ ID NO: 984190
uuaggaaacagacuugacc

SEQ ID NO: 984192 - RNA, 19 nt, Artificial Sequence
  Description of Artificial Sequence: Synthetic oligonucleotide
  Sense strand starting at position 859 of SEQ ID NO: 914180
gucuuaacguuagccugaa

SEQ ID NO: 984193 - RNA, 19 nt, Artificial Sequence
  Description of Artificial Sequence: Synthetic oligonucleotide
  Antisense strand to SEQ ID NO: 984192
uucaggcuaacguuaagac

SEQ ID NO: 984194 - RNA, 19 nt, Artificial Sequence
  Description of Artificial Sequence: Synthetic oligonucleotide
  Sense strand starting at position 775 of SEQ ID NO: 914180
gccaaucgagcucgacauu

SEQ ID NO: 984195 - RNA, 19 nt, Artificial Sequence
  Description of Artificial Sequence: Synthetic oligonucleotide
  Antisense strand to SEQ ID NO: 984194
aaugucgagcucgauuggc

SEQ ID NO: 984196 - RNA, 19 nt, Artificial Sequence
  Description of Artificial Sequence: Synthetic oligonucleotide
  Sense strand starting at position 1135 of SEQ ID NO: 914180
uggugaugaugucacaaag

SEQ ID NO: 984197 - RNA, 19 nt, Artificial Sequence
  Description of Artificial Sequence: Synthetic oligonucleotide
  Antisense strand to SEQ ID NO: 984196
cuuugugacaucaucacca

SEQ ID NO: 984198 - RNA, 19 nt, Artificial Sequence
  Description of Artificial Sequence: Synthetic oligonucleotide
  Sense strand starting at position 746 of SEQ ID NO: 914180
gggucugggucccaggaaa

SEQ ID NO: 984199 - RNA, 19 nt, Artificial Sequence
  Description of Artificial Sequence: Synthetic oligonucleotide
  Antisense strand to SEQ ID NO: 984198
uuuccugggacccagaccc

SEQ ID NO: 984200 - RNA, 19 nt, Artificial Sequence
  Description of Artificial Sequence: Synthetic oligonucleotide
  Sense strand starting at position 332 of SEQ ID NO: 914180
ggcagaucuucucaccuga

SEQ ID NO: 984201 - RNA, 19 nt, Artificial Sequence
  Description of Artificial Sequence: Synthetic oligonucleotide
  Antisense strand to SEQ ID NO: 984200
ucaggugagaagaucugcc

SEQ ID NO: 984202 - RNA, 19 nt, Artificial Sequence
  Description of Artificial Sequence: Synthetic oligonucleotide
  Sense strand starting at position 2137 of SEQ ID NO: 914180
gcgccuaauugccuucgau

SEQ ID NO: 984203 - RNA, 19 nt, Artificial Sequence
  Description of Artificial Sequence: Synthetic oligonucleotide
  Antisense strand to SEQ ID NO: 984202
aucgaaggcaauuaggcgc

SEQ ID NO: 984204 - RNA, 19 nt, Artificial Sequence
  Description of Artificial Sequence: Synthetic oligonucleotide
  Sense strand starting at position 1560 of SEQ ID NO: 914180
ggcuuugguuccgagggaa

SEQ ID NO: 984205 - RNA, 19 nt, Artificial Sequence
  Description of Artificial Sequence: Synthetic oligonucleotide
  Antisense strand to SEQ ID NO: 984204
uucccucggaaccaaagcc

SEQ ID NO: 984206 - RNA, 19 nt, Artificial Sequence
  Description of Artificial Sequence: Synthetic oligonucleotide
  Sense strand starting at position 821 of SEQ ID NO: 914180
uggaguuucugcggaagga

SEQ ID NO: 984207 - RNA, 19 nt, Artificial Sequence
  Description of Artificial Sequence: Synthetic oligonucleotide
  Antisense strand to SEQ ID NO: 984206
uccuuccgcagaaacucca

SEQ ID NO: 984208 - RNA, 19 nt, Artificial Sequence
  Description of Artificial Sequence: Synthetic oligonucleotide
  Sense strand starting at position 1559 of SEQ ID NO: 914180
aggcuuugguuccgaggga

SEQ ID NO: 984209 - RNA, 19 nt, Artificial Sequence
  Description of Artificial Sequence: Synthetic oligonucleotide
  Antisense strand to SEQ ID NO: 984208
ucccucggaaccaaagccu

SEQ ID NO: 984210 - RNA, 19 nt, Artificial Sequence
  Description of Artificial Sequence: Synthetic oligonucleotide
  Sense strand starting at position 2538 of SEQ ID NO: 914181
uuaaccuuucuagggaaau

SEQ ID NO: 984211 - RNA, 19 nt, Artificial Sequence
  Description of Artificial Sequence: Synthetic oligonucleotide
  Antisense strand to SEQ ID NO: 984210
auuucccuagaaagguuaa

SEQ ID NO: 984212 - RNA, 19 nt, Artificial Sequence
  Description of Artificial Sequence: Synthetic oligonucleotide
  Sense strand starting at position 2214 of SEQ ID NO: 914181
gguggaagucauuaaaggu

SEQ ID NO: 984213 - RNA, 19 nt, Artificial Sequence
  Description of Artificial Sequence: Synthetic oligonucleotide
  Antisense strand to SEQ ID NO: 984212
accuuuaaugacuuccacc

SEQ ID NO: 984214 - RNA, 19 nt, Artificial Sequence
  Description of Artificial Sequence: Synthetic oligonucleotide
  Sense strand starting at position 2817 of SEQ ID NO: 914181
gcagguuacuugguauuua

SEQ ID NO: 984215 - RNA, 19 nt, Artificial Sequence
  Description of Artificial Sequence: Synthetic oligonucleotide
  Antisense strand to SEQ ID NO: 984214
uaaauaccaaguaaccugc

SEQ ID NO: 984216 - RNA, 19 nt, Artificial Sequence
  Description of Artificial Sequence: Synthetic oligonucleotide
  Sense strand starting at position 3485 of SEQ ID NO: 914181
guuugaugcauauagaaug

SEQ ID NO: 984217 - RNA, 19 nt, Artificial Sequence
  Description of Artificial Sequence: Synthetic oligonucleotide
  Antisense strand to SEQ ID NO: 984216
cauucuauaugcaucaaac

SEQ ID NO: 984218 - RNA, 19 nt, Artificial Sequence
  Description of Artificial Sequence: Synthetic oligonucleotide
  Sense strand starting at position 2535 of SEQ ID NO: 914181
accuuaaccuuucuaggga

SEQ ID NO: 984219 - RNA, 19 nt, Artificial Sequence
  Description of Artificial Sequence: Synthetic oligonucleotide
  Antisense strand to SEQ ID NO: 984218
ucccuagaaagguuaaggu

SEQ ID NO: 984220 - RNA, 19 nt, Artificial Sequence
  Description of Artificial Sequence: Synthetic oligonucleotide
  Sense strand starting at position 2710 of SEQ ID NO: 914181
gguguacugaaaggauuaa

SEQ ID NO: 984221 - RNA, 19 nt, Artificial Sequence
  Description of Artificial Sequence: Synthetic oligonucleotide
  Antisense strand to SEQ ID NO: 984220
uuaauccuuucaguacacc

SEQ ID NO: 984222 - RNA, 19 nt, Artificial Sequence
  Description of Artificial Sequence: Synthetic oligonucleotide
  Sense strand starting at position 2952 of SEQ ID NO: 914181
gguggaauuacaggacucu

SEQ ID NO: 984223 - RNA, 19 nt, Artificial Sequence
  Description of Artificial Sequence: Synthetic oligonucleotide
  Antisense strand to SEQ ID NO: 984222
agaguccuguaauuccacc

SEQ ID NO: 984224 - RNA, 19 nt, Artificial Sequence
  Description of Artificial Sequence: Synthetic oligonucleotide
  Sense strand starting at position 1424 of SEQ ID NO: 914181
ugaagucgcggagaaagaa

SEQ ID NO: 984225 - RNA, 19 nt, Artificial Sequence
  Description of Artificial Sequence: Synthetic oligonucleotide
  Antisense strand to SEQ ID NO: 984224
uucuuucuccgcgacuuca

SEQ ID NO: 984226 - RNA, 19 nt, Artificial Sequence
  Description of Artificial Sequence: Synthetic oligonucleotide
  Sense strand starting at position 2435 of SEQ ID NO: 914181
aaagaauucgugcaauuga

SEQ ID NO: 984227 - RNA, 19 nt, Artificial Sequence
  Description of Artificial Sequence: Synthetic oligonucleotide
  Antisense strand to SEQ ID NO: 984226
ucaauugcacgaauucuuu

SEQ ID NO: 984228 - RNA, 19 nt, Artificial Sequence
  Description of Artificial Sequence: Synthetic oligonucleotide
  Sense strand starting at position 3483 of SEQ ID NO: 914181
uuguuugaugcauauagaa

SEQ ID NO: 984229 - RNA, 19 nt, Artificial Sequence
  Description of Artificial Sequence: Synthetic oligonucleotide
  Antisense strand to SEQ ID NO: 984228
uucuauaugcaucaaacaa

SEQ ID NO: 984230 - RNA, 19 nt, Artificial Sequence
  Description of Artificial Sequence: Synthetic oligonucleotide
  Sense strand starting at position 3872 of SEQ ID NO: 914181
agaagugaaaguugcagaa

SEQ ID NO: 984231 - RNA, 19 nt, Artificial Sequence
  Description of Artificial Sequence: Synthetic oligonucleotide
  Antisense strand to SEQ ID NO: 984230
uucugcaacuuucacuucu

SEQ ID NO: 984232 - RNA, 19 nt, Artificial Sequence
  Description of Artificial Sequence: Synthetic oligonucleotide
  Sense strand starting at position 2869 of SEQ ID NO: 914181
uucugacuucuuuggacaa

SEQ ID NO: 984233 - RNA, 19 nt, Artificial Sequence
  Description of Artificial Sequence: Synthetic oligonucleotide
  Antisense strand to SEQ ID NO: 984232
uuguccaaagaagucagaa

SEQ ID NO: 984234 - RNA, 19 nt, Artificial Sequence
  Description of Artificial Sequence: Synthetic oligonucleotide
  Sense strand starting at position 2492 of SEQ ID NO: 914181
aaacuucguguccaagaca

SEQ ID NO: 984235 - RNA, 19 nt, Artificial Sequence
  Description of Artificial Sequence: Synthetic oligonucleotide
  Antisense strand to SEQ ID NO: 984234
ugucuuggacacgaaguuu

SEQ ID NO: 984236 - RNA, 19 nt, Artificial Sequence
  Description of Artificial Sequence: Synthetic oligonucleotide
  Sense strand starting at position 2653 of SEQ ID NO: 914181
ucucgugauuuaguagcaa

SEQ ID NO: 984237 - RNA, 19 nt, Artificial Sequence
  Description of Artificial Sequence: Synthetic oligonucleotide
  Antisense strand to SEQ ID NO: 984236
uugcuacuaaaucacgaga

SEQ ID NO: 984238 - RNA, 19 nt, Artificial Sequence
  Description of Artificial Sequence: Synthetic oligonucleotide
  Sense strand starting at position 3965 of SEQ ID NO: 914181
ucaaucaaugggugauagu

SEQ ID NO: 984239 - RNA, 19 nt, Artificial Sequence
  Description of Artificial Sequence: Synthetic oligonucleotide
  Antisense strand to SEQ ID NO: 984238
acuaucacccauugauuga

SEQ ID NO: 984240 - RNA, 19 nt, Artificial Sequence
  Description of Artificial Sequence: Synthetic oligonucleotide
  Sense strand starting at position 3865 of SEQ ID NO: 914181
cugcaagagaagugaaagu

SEQ ID NO: 984241 - RNA, 19 nt, Artificial Sequence
  Description of Artificial Sequence: Synthetic oligonucleotide
  Antisense strand to SEQ ID NO: 984240
acuuucacuucucuugcag

SEQ ID NO: 984242 - RNA, 19 nt, Artificial Sequence
  Description of Artificial Sequence: Synthetic oligonucleotide
  Sense strand starting at position 2825 of SEQ ID NO: 914181
cuugguauuuaagaaacau

SEQ ID NO: 984243 - RNA, 19 nt, Artificial Sequence
  Description of Artificial Sequence: Synthetic oligonucleotide
  Antisense strand to SEQ ID NO: 984242
auguuucuuaaauaccaag

SEQ ID NO: 984244 - RNA, 19 nt, Artificial Sequence
  Description of Artificial Sequence: Synthetic oligonucleotide
  Sense strand starting at position 2649 of SEQ ID NO: 914181
gucuucucgugauuuagua

SEQ ID NO: 984245 - RNA, 19 nt, Artificial Sequence
  Description of Artificial Sequence: Synthetic oligonucleotide
  Antisense strand to SEQ ID NO: 984244
uacuaaaucacgagaagac

SEQ ID NO: 984246 - RNA, 19 nt, Artificial Sequence
  Description of Artificial Sequence: Synthetic oligonucleotide
  Sense strand starting at position 2332 of SEQ ID NO: 914181
aaucuuuggcggcaauaga

SEQ ID NO: 984247 - RNA, 19 nt, Artificial Sequence
  Description of Artificial Sequence: Synthetic oligonucleotide
  Antisense strand to SEQ ID NO: 984246
ucuauugccgccaaagauu

SEQ ID NO: 984248 - RNA, 19 nt, Artificial Sequence
  Description of Artificial Sequence: Synthetic oligonucleotide
  Sense strand starting at position 3473 of SEQ ID NO: 914181
agacauauguuuguuugau

SEQ ID NO: 984249 - RNA, 19 nt, Artificial Sequence
  Description of Artificial Sequence: Synthetic oligonucleotide
  Antisense strand to SEQ ID NO: 984248
aucaaacaaacauaugucu

SEQ ID NO: 984250 - RNA, 19 nt, Artificial Sequence
  Description of Artificial Sequence: Synthetic oligonucleotide
  Sense strand starting at position 3472 of SEQ ID NO: 914181
cagacauauguuuguuuga

SEQ ID NO: 984251 - RNA, 19 nt, Artificial Sequence
  Description of Artificial Sequence: Synthetic oligonucleotide
  Antisense strand to SEQ ID NO: 984250
ucaaacaaacauaugucug

SEQ ID NO: 984252 - RNA, 19 nt, Artificial Sequence
  Description of Artificial Sequence: Synthetic oligonucleotide
  Sense strand starting at position 3474 of SEQ ID NO: 914181
gacauauguuuguuugaug

SEQ ID NO: 984253 - RNA, 19 nt, Artificial Sequence
  Description of Artificial Sequence: Synthetic oligonucleotide
  Antisense strand to SEQ ID NO: 984252
caucaaacaaacauauguc

SEQ ID NO: 984254 - RNA, 19 nt, Artificial Sequence
  Description of Artificial Sequence: Synthetic oligonucleotide
  Sense strand starting at position 3962 of SEQ ID NO: 914181
gccucaaucaaugggugau

SEQ ID NO: 984255 - RNA, 19 nt, Artificial Sequence
  Description of Artificial Sequence: Synthetic oligonucleotide
  Antisense strand to SEQ ID NO: 984254
aucacccauugauugaggc

SEQ ID NO: 984256 - RNA, 19 nt, Artificial Sequence
  Description of Artificial Sequence: Synthetic oligonucleotide
  Sense strand starting at position 3481 of SEQ ID NO: 914181
guuuguuugaugcauauag

SEQ ID NO: 984257 - RNA, 19 nt, Artificial Sequence
  Description of Artificial Sequence: Synthetic oligonucleotide
  Antisense strand to SEQ ID NO: 984256
cuauaugcaucaaacaaac

SEQ ID NO: 984258 - RNA, 19 nt, Artificial Sequence
  Description of Artificial Sequence: Synthetic oligonucleotide
  Sense strand starting at position 2230 of SEQ ID NO: 914181
gguauaauaugagccaguu

SEQ ID NO: 984259 - RNA, 19 nt, Artificial Sequence
  Description of Artificial Sequence: Synthetic oligonucleotide
  Antisense strand to SEQ ID NO: 984258
aacuggcucauauuauacc

SEQ ID NO: 984260 - RNA, 19 nt, Artificial Sequence
  Description of Artificial Sequence: Synthetic oligonucleotide
  Sense strand starting at position 1579 of SEQ ID NO: 914181
cuugccuuggcggagagau

SEQ ID NO: 984261 - RNA, 19 nt, Artificial Sequence
  Description of Artificial Sequence: Synthetic oligonucleotide
  Antisense strand to SEQ ID NO: 984260
aucucuccgccaaggcaag

SEQ ID NO: 984262 - RNA, 19 nt, Artificial Sequence
  Description of Artificial Sequence: Synthetic oligonucleotide
  Sense strand starting at position 1421 of SEQ ID NO: 914181
aucugaagucgcggagaaa

SEQ ID NO: 984263 - RNA, 19 nt, Artificial Sequence
  Description of Artificial Sequence: Synthetic oligonucleotide
  Antisense strand to SEQ ID NO: 984262
uuucuccgcgacuucagau

SEQ ID NO: 984264 - RNA, 19 nt, Artificial Sequence
  Description of Artificial Sequence: Synthetic oligonucleotide
  Sense strand starting at position 2858 of SEQ ID NO: 914181
ugaagagcguauucugacu

SEQ ID NO: 984265 - RNA, 19 nt, Artificial Sequence
  Description of Artificial Sequence: Synthetic oligonucleotide
  Antisense strand to SEQ ID NO: 984264
agucagaauacgcucuuca

SEQ ID NO: 984266 - RNA, 19 nt, Artificial Sequence
  Description of Artificial Sequence: Synthetic oligonucleotide
  Sense strand starting at position 2330 of SEQ ID NO: 914181
agaaucuuuggcggcaaua

SEQ ID NO: 984267 - RNA, 19 nt, Artificial Sequence
  Description of Artificial Sequence: Synthetic oligonucleotide
  Antisense strand to SEQ ID NO: 984266
uauugccgccaaagauucu

SEQ ID NO: 984268 - RNA, 19 nt, Artificial Sequence
  Description of Artificial Sequence: Synthetic oligonucleotide
  Sense strand starting at position 1613 of SEQ ID NO: 914181
gguucugucgagggaccua

SEQ ID NO: 984269 - RNA, 19 nt, Artificial Sequence
  Description of Artificial Sequence: Synthetic oligonucleotide
  Antisense strand to SEQ ID NO: 984268
uaggucccucgacagaacc

SEQ ID NO: 984270 - RNA, 19 nt, Artificial Sequence
  Description of Artificial Sequence: Synthetic oligonucleotide
  Sense strand starting at position 3468 of SEQ ID NO: 914181
gucacagacauauguuugu

SEQ ID NO: 984271 - RNA, 19 nt, Artificial Sequence
  Description of Artificial Sequence: Synthetic oligonucleotide
  Antisense strand to SEQ ID NO: 984270
acaaacauaugucugugac

SEQ ID NO: 984272 - RNA, 19 nt, Artificial Sequence
  Description of Artificial Sequence: Synthetic oligonucleotide
  Sense strand starting at position 2818 of SEQ ID NO: 914181
cagguuacuugguauuuaa

SEQ ID NO: 984273 - RNA, 19 nt, Artificial Sequence
  Description of Artificial Sequence: Synthetic oligonucleotide
  Antisense strand to SEQ ID NO: 984272
uuaaauaccaaguaaccug

SEQ ID NO: 984274 - RNA, 19 nt, Artificial Sequence
  Description of Artificial Sequence: Synthetic oligonucleotide
  Sense strand starting at position 2643 of SEQ ID NO: 914181
aaaucagucuucucgugau

SEQ ID NO: 984275 - RNA, 19 nt, Artificial Sequence
  Description of Artificial Sequence: Synthetic oligonucleotide
  Antisense strand to SEQ ID NO: 984274
aucacgagaagacugauuu

SEQ ID NO: 984276 - RNA, 19 nt, Artificial Sequence
  Description of Artificial Sequence: Synthetic oligonucleotide
  Sense strand starting at position 3437 of SEQ ID NO: 914181
aagucucugggcugugaua

SEQ ID NO: 984277 - RNA, 19 nt, Artificial Sequence
  Description of Artificial Sequence: Synthetic oligonucleotide
  Antisense strand to SEQ ID NO: 984276
uaucacagcccagagacuu

SEQ ID NO: 984278 - RNA, 19 nt, Artificial Sequence
  Description of Artificial Sequence: Synthetic oligonucleotide
  Sense strand starting at position 2398 of SEQ ID NO: 914181
ugauuugucugggaaaugc

SEQ ID NO: 984279 - RNA, 19 nt, Artificial Sequence
  Description of Artificial Sequence: Synthetic oligonucleotide
  Antisense strand to SEQ ID NO: 984278
gcauuucccagacaaauca

SEQ ID NO: 984280 - RNA, 19 nt, Artificial Sequence
  Description of Artificial Sequence: Synthetic oligonucleotide
  Sense strand starting at position 1199 of SEQ ID NO: 914181
gggcuuuccggaugauagu

SEQ ID NO: 984281 - RNA, 19 nt, Artificial Sequence
  Description of Artificial Sequence: Synthetic oligonucleotide
  Antisense strand to SEQ ID NO: 984280
acuaucauccggaaagccc

SEQ ID NO: 984282 - RNA, 19 nt, Artificial Sequence
  Description of Artificial Sequence: Synthetic oligonucleotide
  Sense strand starting at position 2602 of SEQ ID NO: 914181
cugaguacuuacccgccaa

SEQ ID NO: 984283 - RNA, 19 nt, Artificial Sequence
  Description of Artificial Sequence: Synthetic oligonucleotide
  Antisense strand to SEQ ID NO: 984282
uuggcggguaaguacucag

SEQ ID NO: 984284 - RNA, 19 nt, Artificial Sequence
  Description of Artificial Sequence: Synthetic oligonucleotide
  Sense strand starting at position 3091 of SEQ ID NO: 914181
guuacaucuugcuuucuga

SEQ ID NO: 984285 - RNA, 19 nt, Artificial Sequence
  Description of Artificial Sequence: Synthetic oligonucleotide
  Antisense strand to SEQ ID NO: 984284
ucagaaagcaagauguaac

SEQ ID NO: 984286 - RNA, 19 nt, Artificial Sequence
  Description of Artificial Sequence: Synthetic oligonucleotide
  Sense strand starting at position 3076 of SEQ ID NO: 914181
aagccuaugcucugaguua

SEQ ID NO: 984287 - RNA, 19 nt, Artificial Sequence
  Description of Artificial Sequence: Synthetic oligonucleotide
  Antisense strand to SEQ ID NO: 984286
uaacucagagcauaggcuu

SEQ ID NO: 984288 - RNA, 19 nt, Artificial Sequence
  Description of Artificial Sequence: Synthetic oligonucleotide
  Sense strand starting at position 1408 of SEQ ID NO: 914181
aggaaucccucagaucuga

SEQ ID NO: 984289 - RNA, 19 nt, Artificial Sequence
  Description of Artificial Sequence: Synthetic oligonucleotide
  Antisense strand to SEQ ID NO: 984288
ucagaucugagggauuccu

SEQ ID NO: 984290 - RNA, 19 nt, Artificial Sequence
  Description of Artificial Sequence: Synthetic oligonucleotide
  Sense strand starting at position 3906 of SEQ ID NO: 914182
cgaagccagguauaaauaa

SEQ ID NO: 984291 - RNA, 19 nt, Artificial Sequence
  Description of Artificial Sequence: Synthetic oligonucleotide
  Antisense strand to SEQ ID NO: 984290
uuauuuauaccuggcuucg

SEQ ID NO: 984292 - RNA, 19 nt, Artificial Sequence
  Description of Artificial Sequence: Synthetic oligonucleotide
  Sense strand starting at position 841 of SEQ ID NO: 914182
gaacaugaaugucuggauu

SEQ ID NO: 984293 - RNA, 19 nt, Artificial Sequence
  Description of Artificial Sequence: Synthetic oligonucleotide
  Antisense strand to SEQ ID NO: 984292
aauccagacauucauguuc

SEQ ID NO: 984294 - RNA, 19 nt, Artificial Sequence
  Description of Artificial Sequence: Synthetic oligonucleotide
  Sense strand starting at position 3042 of SEQ ID NO: 914182
ccaaaucucuaggucaaag

SEQ ID NO: 984295 - RNA, 19 nt, Artificial Sequence
  Description of Artificial Sequence: Synthetic oligonucleotide
  Antisense strand to SEQ ID NO: 984294
cuuugaccuagagauuugg

SEQ ID NO: 984296 - RNA, 19 nt, Artificial Sequence
  Description of Artificial Sequence: Synthetic oligonucleotide
  Sense strand starting at position 1281 of SEQ ID NO: 914182
ugucucuggaguuaaagau

SEQ ID NO: 984297 - RNA, 19 nt, Artificial Sequence
  Description of Artificial Sequence: Synthetic oligonucleotide
  Antisense strand to SEQ ID NO: 984296
aucuuuaacuccagagaca

SEQ ID NO: 984298 - RNA, 19 nt, Artificial Sequence
  Description of Artificial Sequence: Synthetic oligonucleotide
  Sense strand starting at position 1006 of SEQ ID NO: 914182
guaguauuaggagagcaua

SEQ ID NO: 984299 - RNA, 19 nt, Artificial Sequence
  Description of Artificial Sequence: Synthetic oligonucleotide
  Antisense strand to SEQ ID NO: 984298
uaugcucuccuaauacuac

SEQ ID NO: 984300 - RNA, 19 nt, Artificial Sequence
  Description of Artificial Sequence: Synthetic oligonucleotide
  Sense strand starting at position 2922 of SEQ ID NO: 914182
ccucaaauuuaagaggauu

SEQ ID NO: 984301 - RNA, 19 nt, Artificial Sequence
  Description of Artificial Sequence: Synthetic oligonucleotide
  Antisense strand to SEQ ID NO: 984300
aauccucuuaaauuugagg

SEQ ID NO: 984302 - RNA, 19 nt, Artificial Sequence
  Description of Artificial Sequence: Synthetic oligonucleotide
  Sense strand starting at position 1031 of SEQ ID NO: 914182
gcgcuaaaugaagagaacu

SEQ ID NO: 984303 - RNA, 19 nt, Artificial Sequence
  Description of Artificial Sequence: Synthetic oligonucleotide
  Antisense strand to SEQ ID NO: 984302
aguucucuucauuuagcgc

SEQ ID NO: 984304 - RNA, 19 nt, Artificial Sequence
  Description of Artificial Sequence: Synthetic oligonucleotide
  Sense strand starting at position 2957 of SEQ ID NO: 914182
cucuaaccgcaauagaauu

SEQ ID NO: 984305 - RNA, 19 nt, Artificial Sequence
  Description of Artificial Sequence: Synthetic oligonucleotide
  Antisense strand to SEQ ID NO: 984304
aauucuauugcgguuagag

SEQ ID NO: 984306 - RNA, 19 nt, Artificial Sequence
  Description of Artificial Sequence: Synthetic oligonucleotide
  Sense strand starting at position 964 of SEQ ID NO: 914182
ucucaagcagucuauugaa

SEQ ID NO: 984307 - RNA, 19 nt, Artificial Sequence
  Description of Artificial Sequence: Synthetic oligonucleotide
  Antisense strand to SEQ ID NO: 984306
uucaauagacugcuugaga

SEQ ID NO: 984308 - RNA, 19 nt, Artificial Sequence
  Description of Artificial Sequence: Synthetic oligonucleotide
  Sense strand starting at position 790 of SEQ ID NO: 914182
ggcacaccugagcaauuau

SEQ ID NO: 984309 - RNA, 19 nt, Artificial Sequence
  Description of Artificial Sequence: Synthetic oligonucleotide
  Antisense strand to SEQ ID NO: 984308
auaauugcucaggugugcc

SEQ ID NO: 984310 - RNA, 19 nt, Artificial Sequence
  Description of Artificial Sequence: Synthetic oligonucleotide
  Sense strand starting at position 431 of SEQ ID NO: 914182
auauuacaucugugaccau

SEQ ID NO: 984311 - RNA, 19 nt, Artificial Sequence
  Description of Artificial Sequence: Synthetic oligonucleotide
  Antisense strand to SEQ ID NO: 984310
auggucacagauguaauau

SEQ ID NO: 984312 - RNA, 19 nt, Artificial Sequence
  Description of Artificial Sequence: Synthetic oligonucleotide
  Sense strand starting at position 2817 of SEQ ID NO: 914182
cccugaacgcacuauaauu

SEQ ID NO: 984313 - RNA, 19 nt, Artificial Sequence
  Description of Artificial Sequence: Synthetic oligonucleotide
  Antisense strand to SEQ ID NO: 984312
aauuauagugcguucaggg

SEQ ID NO: 984314 - RNA, 19 nt, Artificial Sequence
  Description of Artificial Sequence: Synthetic oligonucleotide
  Sense strand starting at position 3398 of SEQ ID NO: 914182
uggcucacagucuauaauu

SEQ ID NO: 984315 - RNA, 19 nt, Artificial Sequence
  Description of Artificial Sequence: Synthetic oligonucleotide
  Antisense strand to SEQ ID NO: 984314
aauuauagacugugagcca

SEQ ID NO: 984316 - RNA, 19 nt, Artificial Sequence
  Description of Artificial Sequence: Synthetic oligonucleotide
  Sense strand starting at position 481 of SEQ ID NO: 914182
cuguuuggguaacuugaaa

SEQ ID NO: 984317 - RNA, 19 nt, Artificial Sequence
  Description of Artificial Sequence: Synthetic oligonucleotide
  Antisense strand to SEQ ID NO: 984316
uuucaaguuacccaaacag

SEQ ID NO: 984318 - RNA, 19 nt, Artificial Sequence
  Description of Artificial Sequence: Synthetic oligonucleotide
  Sense strand starting at position 3904 of SEQ ID NO: 914182
agcgaagccagguauaaau

SEQ ID NO: 984319 - RNA, 19 nt, Artificial Sequence
  Description of Artificial Sequence: Synthetic oligonucleotide
  Antisense strand to SEQ ID NO: 984318
auuuauaccuggcuucgcu

SEQ ID NO: 984320 - RNA, 19 nt, Artificial Sequence
  Description of Artificial Sequence: Synthetic oligonucleotide
  Sense strand starting at position 789 of SEQ ID NO: 914182
aggcacaccugagcaauua

SEQ ID NO: 984321 - RNA, 19 nt, Artificial Sequence
  Description of Artificial Sequence: Synthetic oligonucleotide
  Antisense strand to SEQ ID NO: 984320
uaauugcucaggugugccu

SEQ ID NO: 984322 - RNA, 19 nt, Artificial Sequence
  Description of Artificial Sequence: Synthetic oligonucleotide
  Sense strand starting at position 3167 of SEQ ID NO: 914182
acacgaguaucucuugaau

SEQ ID NO: 984323 - RNA, 19 nt, Artificial Sequence
  Description of Artificial Sequence: Synthetic oligonucleotide
  Antisense strand to SEQ ID NO: 984322
auucaagagauacucgugu

SEQ ID NO: 984324 - RNA, 19 nt, Artificial Sequence
  Description of Artificial Sequence: Synthetic oligonucleotide
  Sense strand starting at position 3158 of SEQ ID NO: 914182
ugaggucagacacgaguau

SEQ ID NO: 984325 - RNA, 19 nt, Artificial Sequence
  Description of Artificial Sequence: Synthetic oligonucleotide
  Antisense strand to SEQ ID NO: 984324
auacucgugucugaccuca

SEQ ID NO: 984326 - RNA, 19 nt, Artificial Sequence
  Description of Artificial Sequence: Synthetic oligonucleotide
  Sense strand starting at position 2903 of SEQ ID NO: 914182
acuuaauccucagugugag

SEQ ID NO: 984327 - RNA, 19 nt, Artificial Sequence
  Description of Artificial Sequence: Synthetic oligonucleotide
  Antisense strand to SEQ ID NO: 984326
cucacacugaggauuaagu

SEQ ID NO: 984328 - RNA, 19 nt, Artificial Sequence
  Description of Artificial Sequence: Synthetic oligonucleotide
  Sense strand starting at position 1023 of SEQ ID NO: 914182
uacaguaggcgcuaaauga

SEQ ID NO: 984329 - RNA, 19 nt, Artificial Sequence
  Description of Artificial Sequence: Synthetic oligonucleotide
  Antisense strand to SEQ ID NO: 984328
ucauuuagcgccuacugua

SEQ ID NO: 984330 - RNA, 19 nt, Artificial Sequence
  Description of Artificial Sequence: Synthetic oligonucleotide
  Sense strand starting at position 660 of SEQ ID NO: 914182
uucuuaguaucugucacaa

SEQ ID NO: 984331 - RNA, 19 nt, Artificial Sequence
  Description of Artificial Sequence: Synthetic oligonucleotide
  Antisense strand to SEQ ID NO: 984330
uugugacagauacuaagaa

SEQ ID NO: 984332 - RNA, 19 nt, Artificial Sequence
  Description of Artificial Sequence: Synthetic oligonucleotide
  Sense strand starting at position 3705 of SEQ ID NO: 914182
gucuguuugaacugugaaa

SEQ ID NO: 984333 - RNA, 19 nt, Artificial Sequence
  Description of Artificial Sequence: Synthetic oligonucleotide
  Antisense strand to SEQ ID NO: 984332
uuucacaguucaaacagac

SEQ ID NO: 984334 - RNA, 19 nt, Artificial Sequence
  Description of Artificial Sequence: Synthetic oligonucleotide
  Sense strand starting at position 3327 of SEQ ID NO: 914182
uguggaaugcagugacacu

SEQ ID NO: 984335 - RNA, 19 nt, Artificial Sequence
  Description of Artificial Sequence: Synthetic oligonucleotide
  Antisense strand to SEQ ID NO: 984334
agugucacugcauuccaca

SEQ ID NO: 984336 - RNA, 19 nt, Artificial Sequence
  Description of Artificial Sequence: Synthetic oligonucleotide
  Sense strand starting at position 2249 of SEQ ID NO: 914182
ccaguuccucuuugugaaa

SEQ ID NO: 984337 - RNA, 19 nt, Artificial Sequence
  Description of Artificial Sequence: Synthetic oligonucleotide
  Antisense strand to SEQ ID NO: 984336
uuucacaaagaggaacugg

SEQ ID NO: 984338 - RNA, 19 nt, Artificial Sequence
  Description of Artificial Sequence: Synthetic oligonucleotide
  Sense strand starting at position 2248 of SEQ ID NO: 914182
cccaguuccucuuugugaa

SEQ ID NO: 984339 - RNA, 19 nt, Artificial Sequence
  Description of Artificial Sequence: Synthetic oligonucleotide
  Antisense strand to SEQ ID NO: 984338
uucacaaagaggaacuggg

SEQ ID NO: 984340 - RNA, 19 nt, Artificial Sequence
  Description of Artificial Sequence: Synthetic oligonucleotide
  Sense strand starting at position 1226 of SEQ ID NO: 914182
auagcuugcggacggaaau

SEQ ID NO: 984341 - RNA, 19 nt, Artificial Sequence
  Description of Artificial Sequence: Synthetic oligonucleotide
  Antisense strand to SEQ ID NO: 984340
auuuccguccgcaagcuau

SEQ ID NO: 984342 - RNA, 19 nt, Artificial Sequence
  Description of Artificial Sequence: Synthetic oligonucleotide
  Sense strand starting at position 2699 of SEQ ID NO: 914182
ucccuaguguaagccuaua

SEQ ID NO: 984343 - RNA, 19 nt, Artificial Sequence
  Description of Artificial Sequence: Synthetic oligonucleotide
  Antisense strand to SEQ ID NO: 984342
uauaggcuuacacuaggga

SEQ ID NO: 984344 - RNA, 19 nt, Artificial Sequence
  Description of Artificial Sequence: Synthetic oligonucleotide
  Sense strand starting at position 3696 of SEQ ID NO: 914182
gauauuguugucuguuuga

SEQ ID NO: 984345 - RNA, 19 nt, Artificial Sequence
  Description of Artificial Sequence: Synthetic oligonucleotide
  Antisense strand to SEQ ID NO: 984344
ucaaacagacaacaauauc

SEQ ID NO: 984346 - RNA, 19 nt, Artificial Sequence
  Description of Artificial Sequence: Synthetic oligonucleotide
  Sense strand starting at position 474 of SEQ ID NO: 914182
uuaguuucuguuuggguaa

SEQ ID NO: 984347 - RNA, 19 nt, Artificial Sequence
  Description of Artificial Sequence: Synthetic oligonucleotide
  Antisense strand to SEQ ID NO: 984346
uuacccaaacagaaacuaa

SEQ ID NO: 984348 - RNA, 19 nt, Artificial Sequence
  Description of Artificial Sequence: Synthetic oligonucleotide
  Sense strand starting at position 2618 of SEQ ID NO: 914182
gccguucugagagggcaaa

SEQ ID NO: 984349 - RNA, 19 nt, Artificial Sequence
  Description of Artificial Sequence: Synthetic oligonucleotide
  Antisense strand to SEQ ID NO: 984348
uuugcccucucagaacggc

SEQ ID NO: 984350 - RNA, 19 nt, Artificial Sequence
  Description of Artificial Sequence: Synthetic oligonucleotide
  Sense strand starting at position 3699 of SEQ ID NO: 914182
auuguugucuguuugaacu

SEQ ID NO: 984351 - RNA, 19 nt, Artificial Sequence
  Description of Artificial Sequence: Synthetic oligonucleotide
  Antisense strand to SEQ ID NO: 984350
aguucaaacagacaacaau

SEQ ID NO: 984352 - RNA, 19 nt, Artificial Sequence
  Description of Artificial Sequence: Synthetic oligonucleotide
  Sense strand starting at position 3011 of SEQ ID NO: 914182
ccggaaauauuggaaauua

SEQ ID NO: 984353 - RNA, 19 nt, Artificial Sequence
  Description of Artificial Sequence: Synthetic oligonucleotide
  Antisense strand to SEQ ID NO: 984352
uaauuuccaauauuuccgg

SEQ ID NO: 984354 - RNA, 19 nt, Artificial Sequence
  Description of Artificial Sequence: Synthetic oligonucleotide
  Sense strand starting at position 1418 of SEQ ID NO: 914182
guuuaucaaguucgugaca

SEQ ID NO: 984355 - RNA, 19 nt, Artificial Sequence
  Description of Artificial Sequence: Synthetic oligonucleotide
  Antisense strand to SEQ ID NO: 984354
ugucacgaacuugauaaac

SEQ ID NO: 984356 - RNA, 19 nt, Artificial Sequence
  Description of Artificial Sequence: Synthetic oligonucleotide
  Sense strand starting at position 473 of SEQ ID NO: 914182
uuuaguuucuguuugggua

SEQ ID NO: 984357 - RNA, 19 nt, Artificial Sequence
  Description of Artificial Sequence: Synthetic oligonucleotide
  Antisense strand to SEQ ID NO: 984356
uacccaaacagaaacuaaa

SEQ ID NO: 984358 - RNA, 19 nt, Artificial Sequence
  Description of Artificial Sequence: Synthetic oligonucleotide
  Sense strand starting at position 477 of SEQ ID NO: 914182
guuucuguuuggguaacuu

SEQ ID NO: 984359 - RNA, 19 nt, Artificial Sequence
  Description of Artificial Sequence: Synthetic oligonucleotide
  Antisense strand to SEQ ID NO: 984358
aaguuacccaaacagaaac

SEQ ID NO: 984360 - RNA, 19 nt, Artificial Sequence
  Description of Artificial Sequence: Synthetic oligonucleotide
  Sense strand starting at position 1207 of SEQ ID NO: 914182
gagcguuaaguucagcgaa

SEQ ID NO: 984361 - RNA, 19 nt, Artificial Sequence
  Description of Artificial Sequence: Synthetic oligonucleotide
  Antisense strand to SEQ ID NO: 984360
uucgcugaacuuaacgcuc

SEQ ID NO: 984362 - RNA, 19 nt, Artificial Sequence
  Description of Artificial Sequence: Synthetic oligonucleotide
  Sense strand starting at position 2366 of SEQ ID NO: 914182
uuccuuaggccucgcaaga

SEQ ID NO: 984363 - RNA, 19 nt, Artificial Sequence
  Description of Artificial Sequence: Synthetic oligonucleotide
  Antisense strand to SEQ ID NO: 984362
ucuugcgaggccuaaggaa

SEQ ID NO: 984364 - RNA, 19 nt, Artificial Sequence
  Description of Artificial Sequence: Synthetic oligonucleotide
  Sense strand starting at position 1210 of SEQ ID NO: 914182
cguuaaguucagcgaaaua

SEQ ID NO: 984365 - RNA, 19 nt, Artificial Sequence
  Description of Artificial Sequence: Synthetic oligonucleotide
  Antisense strand to SEQ ID NO: 984364
uauuucgcugaacuuaacg

SEQ ID NO: 984366 - RNA, 19 nt, Artificial Sequence
  Description of Artificial Sequence: Synthetic oligonucleotide
  Sense strand starting at position 3694 of SEQ ID NO: 914182
cugauauuguugucuguuu

SEQ ID NO: 984367 - RNA, 19 nt, Artificial Sequence
  Description of Artificial Sequence: Synthetic oligonucleotide
  Antisense strand to SEQ ID NO: 984366
aaacagacaacaauaucag

SEQ ID NO: 984368 - RNA, 19 nt, Artificial Sequence
  Description of Artificial Sequence: Synthetic oligonucleotide
  Sense strand starting at position 346 of SEQ ID NO: 914182
uugcauuucugagguggaa

SEQ ID NO: 984369 - RNA, 19 nt, Artificial Sequence
  Description of Artificial Sequence: Synthetic oligonucleotide
  Antisense strand to SEQ ID NO: 984368
uuccaccucagaaaugcaa

SEQ ID NO: 984370 - RNA, 19 nt, Artificial Sequence
  Description of Artificial Sequence: Synthetic oligonucleotide
  Sense strand starting at position 638 of SEQ ID NO: 914183
guacauuucccgcagcaag

SEQ ID NO: 984371 - RNA, 19 nt, Artificial Sequence
  Description of Artificial Sequence: Synthetic oligonucleotide
  Antisense strand to SEQ ID NO: 984370
cuugcugcgggaaauguac

SEQ ID NO: 984372 - RNA, 19 nt, Artificial Sequence
  Description of Artificial Sequence: Synthetic oligonucleotide
  Sense strand starting at position 3256 of SEQ ID NO: 914183
aggagacucaucuguggac

SEQ ID NO: 984373 - RNA, 19 nt, Artificial Sequence
  Description of Artificial Sequence: Synthetic oligonucleotide
  Antisense strand to SEQ ID NO: 984372
guccacagaugagucuccu

SEQ ID NO: 984374 - RNA, 19 nt, Artificial Sequence
  Description of Artificial Sequence: Synthetic oligonucleotide
  Sense strand starting at position 267 of SEQ ID NO: 914183
aggagucaugaaugaggca

SEQ ID NO: 984375 - RNA, 19 nt, Artificial Sequence
  Description of Artificial Sequence: Synthetic oligonucleotide
  Antisense strand to SEQ ID NO: 984374
ugccucauucaugacuccu

SEQ ID NO: 984376 - RNA, 19 nt, Artificial Sequence
  Description of Artificial Sequence: Synthetic oligonucleotide
  Sense strand starting at position 1092 of SEQ ID NO: 914183
agucauuauuacuuggaag

SEQ ID NO: 984377 - RNA, 19 nt, Artificial Sequence
  Description of Artificial Sequence: Synthetic oligonucleotide
  Antisense strand to SEQ ID NO: 984376
cuuccaaguaauaaugacu

SEQ ID NO: 984378 - RNA, 19 nt, Artificial Sequence
  Description of Artificial Sequence: Synthetic oligonucleotide
  Sense strand starting at position 2504 of SEQ ID NO: 914183
agcccagaauauguggaaa

SEQ ID NO: 984379 - RNA, 19 nt, Artificial Sequence
  Description of Artificial Sequence: Synthetic oligonucleotide
  Antisense strand to SEQ ID NO: 984378
uuuccacauauucugggcu

SEQ ID NO: 984380 - RNA, 19 nt, Artificial Sequence
  Description of Artificial Sequence: Synthetic oligonucleotide
  Sense strand starting at position 2756 of SEQ ID NO: 914183
gucagugaacacuacuauu

SEQ ID NO: 984381 - RNA, 19 nt, Artificial Sequence
  Description of Artificial Sequence: Synthetic oligonucleotide
  Antisense strand to SEQ ID NO: 984380
aauaguaguguucacugac

SEQ ID NO: 984382 - RNA, 19 nt, Artificial Sequence
  Description of Artificial Sequence: Synthetic oligonucleotide
  Sense strand starting at position 3258 of SEQ ID NO: 914183
gagacucaucuguggacca

SEQ ID NO: 984383 - RNA, 19 nt, Artificial Sequence
  Description of Artificial Sequence: Synthetic oligonucleotide
  Antisense strand to SEQ ID NO: 984382
ugguccacagaugagucuc

SEQ ID NO: 984384 - RNA, 19 nt, Artificial Sequence
  Description of Artificial Sequence: Synthetic oligonucleotide
  Sense strand starting at position 2957 of SEQ ID NO: 914183
aggagaggucuuuguggag

SEQ ID NO: 984385 - RNA, 19 nt, Artificial Sequence
  Description of Artificial Sequence: Synthetic oligonucleotide
  Antisense strand to SEQ ID NO: 984384
cuccacaaagaccucuccu

SEQ ID NO: 984386 - RNA, 19 nt, Artificial Sequence
  Description of Artificial Sequence: Synthetic oligonucleotide
  Sense strand starting at position 2615 of SEQ ID NO: 914183
gggacaguucuguaaucuc

SEQ ID NO: 984387 - RNA, 19 nt, Artificial Sequence
  Description of Artificial Sequence: Synthetic oligonucleotide
  Antisense strand to SEQ ID NO: 984386
gagauuacagaacuguccc

SEQ ID NO: 984388 - RNA, 19 nt, Artificial Sequence
  Description of Artificial Sequence: Synthetic oligonucleotide
  Sense strand starting at position 1474 of SEQ ID NO: 914183
ggaguaacucuccgaagag

SEQ ID NO: 984389 - RNA, 19 nt, Artificial Sequence
  Description of Artificial Sequence: Synthetic oligonucleotide
  Antisense strand to SEQ ID NO: 984388
cucuucggagaguuacucc

SEQ ID NO: 984390 - RNA, 19 nt, Artificial Sequence
  Description of Artificial Sequence: Synthetic oligonucleotide
  Sense strand starting at position 1315 of SEQ ID NO: 914183
agaaguuguccucaaagca

SEQ ID NO: 984391 - RNA, 19 nt, Artificial Sequence
  Description of Artificial Sequence: Synthetic oligonucleotide
  Antisense strand to SEQ ID NO: 984390
ugcuuugaggacaacuucu

SEQ ID NO: 984392 - RNA, 19 nt, Artificial Sequence
  Description of Artificial Sequence: Synthetic oligonucleotide
  Sense strand starting at position 1288 of SEQ ID NO: 914183
ccgaaugaaagccauuagu

SEQ ID NO: 984393 - RNA, 19 nt, Artificial Sequence
  Description of Artificial Sequence: Synthetic oligonucleotide
  Antisense strand to SEQ ID NO: 984392
acuaauggcuuucauucgg

SEQ ID NO: 984394 - RNA, 19 nt, Artificial Sequence
  Description of Artificial Sequence: Synthetic oligonucleotide
  Sense strand starting at position 1031 of SEQ ID NO: 914183
uggugagauuaaccaaguu

SEQ ID NO: 984395 - RNA, 19 nt, Artificial Sequence
  Description of Artificial Sequence: Synthetic oligonucleotide
  Antisense strand to SEQ ID NO: 984394
aacuugguuaaucucacca

SEQ ID NO: 984396 - RNA, 19 nt, Artificial Sequence
  Description of Artificial Sequence: Synthetic oligonucleotide
  Sense strand starting at position 1094 of SEQ ID NO: 914183
ucauuauuacuuggaagug

SEQ ID NO: 984397 - RNA, 19 nt, Artificial Sequence
  Description of Artificial Sequence: Synthetic oligonucleotide
  Antisense strand to SEQ ID NO: 984396
cacuuccaaguaauaauga

SEQ ID NO: 984398 - RNA, 19 nt, Artificial Sequence
  Description of Artificial Sequence: Synthetic oligonucleotide
  Sense strand starting at position 415 of SEQ ID NO: 914183
gggcucuggaaaugugaga

SEQ ID NO: 984399 - RNA, 19 nt, Artificial Sequence
  Description of Artificial Sequence: Synthetic oligonucleotide
  Antisense strand to SEQ ID NO: 984398
ucucacauuuccagagccc

SEQ ID NO: 984400 - RNA, 19 nt, Artificial Sequence
  Description of Artificial Sequence: Synthetic oligonucleotide
  Sense strand starting at position 819 of SEQ ID NO: 914183
augacuucugagcaucagu

SEQ ID NO: 984401 - RNA, 19 nt, Artificial Sequence
  Description of Artificial Sequence: Synthetic oligonucleotide
  Antisense strand to SEQ ID NO: 984400
acugaugcucagaagucau

SEQ ID NO: 984402 - RNA, 19 nt, Artificial Sequence
  Description of Artificial Sequence: Synthetic oligonucleotide
  Sense strand starting at position 2947 of SEQ ID NO: 914183
ugugucuaucaggagaggu

SEQ ID NO: 984403 - RNA, 19 nt, Artificial Sequence
  Description of Artificial Sequence: Synthetic oligonucleotide
  Antisense strand to SEQ ID NO: 984402
accucuccugauagacaca

SEQ ID NO: 984404 - RNA, 19 nt, Artificial Sequence
  Description of Artificial Sequence: Synthetic oligonucleotide
  Sense strand starting at position 3388 of SEQ ID NO: 914183
aaagguacuuggcuaugau

SEQ ID NO: 984405 - RNA, 19 nt, Artificial Sequence
  Description of Artificial Sequence: Synthetic oligonucleotide
  Antisense strand to SEQ ID NO: 984404
aucauagccaaguaccuuu

SEQ ID NO: 984406 - RNA, 19 nt, Artificial Sequence
  Description of Artificial Sequence: Synthetic oligonucleotide
  Sense strand starting at position 3375 of SEQ ID NO: 914183
gugaguuggcaacaaaggu

SEQ ID NO: 984407 - RNA, 19 nt, Artificial Sequence
  Description of Artificial Sequence: Synthetic oligonucleotide
  Antisense strand to SEQ ID NO: 984406
accuuuguugccaacucac

SEQ ID NO: 984408 - RNA, 19 nt, Artificial Sequence
  Description of Artificial Sequence: Synthetic oligonucleotide
  Sense strand starting at position 3371 of SEQ ID NO: 914183
gauagugaguuggcaacaa

SEQ ID NO: 984409 - RNA, 19 nt, Artificial Sequence
  Description of Artificial Sequence: Synthetic oligonucleotide
  Antisense strand to SEQ ID NO: 984408
uuguugccaacucacuauc

SEQ ID NO: 984410 - RNA, 19 nt, Artificial Sequence
  Description of Artificial Sequence: Synthetic oligonucleotide
  Sense strand starting at position 2332 of SEQ ID NO: 914183
gaaccucuggccugagacu

SEQ ID NO: 984411 - RNA, 19 nt, Artificial Sequence
  Description of Artificial Sequence: Synthetic oligonucleotide
  Antisense strand to SEQ ID NO: 984410
agucucaggccagagguuc

SEQ ID NO: 984412 - RNA, 19 nt, Artificial Sequence
  Description of Artificial Sequence: Synthetic oligonucleotide
  Sense strand starting at position 257 of SEQ ID NO: 914183
gaucguggugaggagucau

SEQ ID NO: 984413 - RNA, 19 nt, Artificial Sequence
  Description of Artificial Sequence: Synthetic oligonucleotide
  Antisense strand to SEQ ID NO: 984412
augacuccucaccacgauc

SEQ ID NO: 984414 - RNA, 19 nt, Artificial Sequence
  Description of Artificial Sequence: Synthetic oligonucleotide
  Sense strand starting at position 2750 of SEQ ID NO: 914183
acgggugucagugaacacu

SEQ ID NO: 984415 - RNA, 19 nt, Artificial Sequence
  Description of Artificial Sequence: Synthetic oligonucleotide
  Antisense strand to SEQ ID NO: 984414
aguguucacugacacccgu

SEQ ID NO: 984416 - RNA, 19 nt, Artificial Sequence
  Description of Artificial Sequence: Synthetic oligonucleotide
  Sense strand starting at position 426 of SEQ ID NO: 914183
augugagaaugcccuugau

SEQ ID NO: 984417 - RNA, 19 nt, Artificial Sequence
  Description of Artificial Sequence: Synthetic oligonucleotide
  Antisense strand to SEQ ID NO: 984416
aucaagggcauucucacau

SEQ ID NO: 984418 - RNA, 19 nt, Artificial Sequence
  Description of Artificial Sequence: Synthetic oligonucleotide
  Sense strand starting at position 1473 of SEQ ID NO: 914183
cggaguaacucuccgaaga

SEQ ID NO: 984419 - RNA, 19 nt, Artificial Sequence
  Description of Artificial Sequence: Synthetic oligonucleotide
  Antisense strand to SEQ ID NO: 984418
ucuucggagaguuacuccg

SEQ ID NO: 984420 - RNA, 19 nt, Artificial Sequence
  Description of Artificial Sequence: Synthetic oligonucleotide
  Sense strand starting at position 2614 of SEQ ID NO: 914183
ugggacaguucuguaaucu

SEQ ID NO: 984421 - RNA, 19 nt, Artificial Sequence
  Description of Artificial Sequence: Synthetic oligonucleotide
  Antisense strand to SEQ ID NO: 984420
agauuacagaacuguccca

SEQ ID NO: 984422 - RNA, 19 nt, Artificial Sequence
  Description of Artificial Sequence: Synthetic oligonucleotide
  Sense strand starting at position 2958 of SEQ ID NO: 914183
ggagaggucuuuguggagu

SEQ ID NO: 984423 - RNA, 19 nt, Artificial Sequence
  Description of Artificial Sequence: Synthetic oligonucleotide
  Antisense strand to SEQ ID NO: 984422
acuccacaaagaccucucc

SEQ ID NO: 984424 - RNA, 19 nt, Artificial Sequence
  Description of Artificial Sequence: Synthetic oligonucleotide
  Sense strand starting at position 490 of SEQ ID NO: 914183
gcaauuagaagguggucau

SEQ ID NO: 984425 - RNA, 19 nt, Artificial Sequence
  Description of Artificial Sequence: Synthetic oligonucleotide
  Antisense strand to SEQ ID NO: 984424
augaccaccuucuaauugc

SEQ ID NO: 984426 - RNA, 19 nt, Artificial Sequence
  Description of Artificial Sequence: Synthetic oligonucleotide
  Sense strand starting at position 1157 of SEQ ID NO: 914183
gaccaucgauaccuguauu

SEQ ID NO: 984427 - RNA, 19 nt, Artificial Sequence
  Description of Artificial Sequence: Synthetic oligonucleotide
  Antisense strand to SEQ ID NO: 984426
aauacagguaucgaugguc

SEQ ID NO: 984428 - RNA, 19 nt, Artificial Sequence
  Description of Artificial Sequence: Synthetic oligonucleotide
  Sense strand starting at position 409 of SEQ ID NO: 914183
ucccgagggcucuggaaau

SEQ ID NO: 984429 - RNA, 19 nt, Artificial Sequence
  Description of Artificial Sequence: Synthetic oligonucleotide
  Antisense strand to SEQ ID NO: 984428
auuuccagagcccucggga

SEQ ID NO: 984430 - RNA, 19 nt, Artificial Sequence
  Description of Artificial Sequence: Synthetic oligonucleotide
  Sense strand starting at position 3019 of SEQ ID NO: 914183
ggagugggucccuguagga

SEQ ID NO: 984431 - RNA, 19 nt, Artificial Sequence
  Description of Artificial Sequence: Synthetic oligonucleotide
  Antisense strand to SEQ ID NO: 984430
uccuacagggacccacucc

SEQ ID NO: 984432 - RNA, 19 nt, Artificial Sequence
  Description of Artificial Sequence: Synthetic oligonucleotide
  Sense strand starting at position 1086 of SEQ ID NO: 914183
uguuguagucauuauuacu

SEQ ID NO: 984433 - RNA, 19 nt, Artificial Sequence
  Description of Artificial Sequence: Synthetic oligonucleotide
  Antisense strand to SEQ ID NO: 984432
aguaauaaugacuacaaca

SEQ ID NO: 984434 - RNA, 19 nt, Artificial Sequence
  Description of Artificial Sequence: Synthetic oligonucleotide
  Sense strand starting at position 760 of SEQ ID NO: 914183
uggauuaaugcuggcucaa

SEQ ID NO: 984435 - RNA, 19 nt, Artificial Sequence
  Description of Artificial Sequence: Synthetic oligonucleotide
  Antisense strand to SEQ ID NO: 984434
uugagccagcauuaaucca

SEQ ID NO: 984436 - RNA, 19 nt, Artificial Sequence
  Description of Artificial Sequence: Synthetic oligonucleotide
  Sense strand starting at position 864 of SEQ ID NO: 914183
acaguuuagugguuauuga

SEQ ID NO: 984437 - RNA, 19 nt, Artificial Sequence
  Description of Artificial Sequence: Synthetic oligonucleotide
  Antisense strand to SEQ ID NO: 984436
ucaauaaccacuaaacugu

SEQ ID NO: 984438 - RNA, 19 nt, Artificial Sequence
  Description of Artificial Sequence: Synthetic oligonucleotide
  Sense strand starting at position 2618 of SEQ ID NO: 914183
acaguucuguaaucuccau

SEQ ID NO: 984439 - RNA, 19 nt, Artificial Sequence
  Description of Artificial Sequence: Synthetic oligonucleotide
  Antisense strand to SEQ ID NO: 984438
auggagauuacagaacugu

SEQ ID NO: 984440 - RNA, 19 nt, Artificial Sequence
  Description of Artificial Sequence: Synthetic oligonucleotide
  Sense strand starting at position 212 of SEQ ID NO: 914183
agcuguacuuauguauaaa

SEQ ID NO: 984441 - RNA, 19 nt, Artificial Sequence
  Description of Artificial Sequence: Synthetic oligonucleotide
  Antisense strand to SEQ ID NO: 984440
uuuauacauaaguacagcu

SEQ ID NO: 984442 - RNA, 19 nt, Artificial Sequence
  Description of Artificial Sequence: Synthetic oligonucleotide
  Sense strand starting at position 1466 of SEQ ID NO: 914183
uugucuucggaguaacucu

SEQ ID NO: 984443 - RNA, 19 nt, Artificial Sequence
  Description of Artificial Sequence: Synthetic oligonucleotide
  Antisense strand to SEQ ID NO: 984442
agaguuacuccgaagacaa

SEQ ID NO: 984444 - RNA, 19 nt, Artificial Sequence
  Description of Artificial Sequence: Synthetic oligonucleotide
  Sense strand starting at position 1099 of SEQ ID NO: 914183
auuacuuggaaguguugua

SEQ ID NO: 984445 - RNA, 19 nt, Artificial Sequence
  Description of Artificial Sequence: Synthetic oligonucleotide
  Antisense strand to SEQ ID NO: 984444
uacaacacuuccaaguaau

SEQ ID NO: 984446 - RNA, 19 nt, Artificial Sequence
  Description of Artificial Sequence: Synthetic oligonucleotide
  Sense strand starting at position 98 of SEQ ID NO: 914183
guaaauauauugucuguca

SEQ ID NO: 984447 - RNA, 19 nt, Artificial Sequence
  Description of Artificial Sequence: Synthetic oligonucleotide
  Antisense strand to SEQ ID NO: 984446
ugacagacaauauauuuac

SEQ ID NO: 984448 - RNA, 19 nt, Artificial Sequence
  Description of Artificial Sequence: Synthetic oligonucleotide
  Sense strand starting at position 3905 of SEQ ID NO: 914183
uugguauccuugguaaccu

SEQ ID NO: 984449 - RNA, 19 nt, Artificial Sequence
  Description of Artificial Sequence: Synthetic oligonucleotide
  Antisense strand to SEQ ID NO: 984448
agguuaccaaggauaccaa

SEQ ID NO: 984450 - RNA, 19 nt, Artificial Sequence
  Description of Artificial Sequence: Synthetic oligonucleotide
  Sense strand starting at position 710 of SEQ ID NO: 914184
acaugaaacuggguuauac

SEQ ID NO: 984451 - RNA, 19 nt, Artificial Sequence
  Description of Artificial Sequence: Synthetic oligonucleotide
  Antisense strand to SEQ ID NO: 984450
guauaacccaguuucaugu

SEQ ID NO: 984452 - RNA, 19 nt, Artificial Sequence
  Description of Artificial Sequence: Synthetic oligonucleotide
  Sense strand starting at position 3251 of SEQ ID NO: 914184
uguuguguagguguuuauu

SEQ ID NO: 984453 - RNA, 19 nt, Artificial Sequence
  Description of Artificial Sequence: Synthetic oligonucleotide
  Antisense strand to SEQ ID NO: 984452
aauaaacaccuacacaaca

SEQ ID NO: 984454 - RNA, 19 nt, Artificial Sequence
  Description of Artificial Sequence: Synthetic oligonucleotide
  Sense strand starting at position 885 of SEQ ID NO: 914184
cccauuuacuaagaaggaa

SEQ ID NO: 984455 - RNA, 19 nt, Artificial Sequence
  Description of Artificial Sequence: Synthetic oligonucleotide
  Antisense strand to SEQ ID NO: 984454
uuccuucuuaguaaauggg

SEQ ID NO: 984456 - RNA, 19 nt, Artificial Sequence
  Description of Artificial Sequence: Synthetic oligonucleotide
  Sense strand starting at position 3479 of SEQ ID NO: 914184
ggacuuguggcacauggaa

SEQ ID NO: 984457 - RNA, 19 nt, Artificial Sequence
  Description of Artificial Sequence: Synthetic oligonucleotide
  Antisense strand to SEQ ID NO: 984456
uuccaugugccacaagucc

SEQ ID NO: 984458 - RNA, 19 nt, Artificial Sequence
  Description of Artificial Sequence: Synthetic oligonucleotide
  Sense strand starting at position 3134 of SEQ ID NO: 914184
cguguauccaguuugcaug

SEQ ID NO: 984459 - RNA, 19 nt, Artificial Sequence
  Description of Artificial Sequence: Synthetic oligonucleotide
  Antisense strand to SEQ ID NO: 984458
caugcaaacuggauacacg

SEQ ID NO: 984460 - RNA, 19 nt, Artificial Sequence
  Description of Artificial Sequence: Synthetic oligonucleotide
  Sense strand starting at position 2193 of SEQ ID NO: 914184
ccaugacggagucauccaa

SEQ ID NO: 984461 - RNA, 19 nt, Artificial Sequence
  Description of Artificial Sequence: Synthetic oligonucleotide
  Antisense strand to SEQ ID NO: 984460
uuggaugacuccgucaugg

SEQ ID NO: 984462 - RNA, 19 nt, Artificial Sequence
  Description of Artificial Sequence: Synthetic oligonucleotide
  Sense strand starting at position 3745 of SEQ ID NO: 914184
gauaaauuggacugucaug

SEQ ID NO: 984463 - RNA, 19 nt, Artificial Sequence
  Description of Artificial Sequence: Synthetic oligonucleotide
  Antisense strand to SEQ ID NO: 984462
caugacaguccaauuuauc

SEQ ID NO: 984464 - RNA, 19 nt, Artificial Sequence
  Description of Artificial Sequence: Synthetic oligonucleotide
  Sense strand starting at position 227 of SEQ ID NO: 914184
aacuuagguccgggagaaa

SEQ ID NO: 984465 - RNA, 19 nt, Artificial Sequence
  Description of Artificial Sequence: Synthetic oligonucleotide
  Antisense strand to SEQ ID NO: 984464
uuucucccggaccuaaguu

SEQ ID NO: 984466 - RNA, 19 nt, Artificial Sequence
  Description of Artificial Sequence: Synthetic oligonucleotide
  Sense strand starting at position 3841 of SEQ ID NO: 914184
ucuguaagacaaugaacuu

SEQ ID NO: 984467 - RNA, 19 nt, Artificial Sequence
  Description of Artificial Sequence: Synthetic oligonucleotide
  Antisense strand to SEQ ID NO: 984466
aaguucauugucuuacaga

SEQ ID NO: 984468 - RNA, 19 nt, Artificial Sequence
  Description of Artificial Sequence: Synthetic oligonucleotide
  Sense strand starting at position 2299 of SEQ ID NO: 914184
gagucaaggcagggaauau

SEQ ID NO: 984469 - RNA, 19 nt, Artificial Sequence
  Description of Artificial Sequence: Synthetic oligonucleotide
  Antisense strand to SEQ ID NO: 984468
auauucccugccuugacuc

SEQ ID NO: 984470 - RNA, 19 nt, Artificial Sequence
  Description of Artificial Sequence: Synthetic oligonucleotide
  Sense strand starting at position 3133 of SEQ ID NO: 914184
ucguguauccaguuugcau

SEQ ID NO: 984471 - RNA, 19 nt, Artificial Sequence
  Description of Artificial Sequence: Synthetic oligonucleotide
  Antisense strand to SEQ ID NO: 984470
augcaaacuggauacacga

SEQ ID NO: 984472 - RNA, 19 nt, Artificial Sequence
  Description of Artificial Sequence: Synthetic oligonucleotide
  Sense strand starting at position 2403 of SEQ ID NO: 914184
ucuuccuugggugaggauu

SEQ ID NO: 984473 - RNA, 19 nt, Artificial Sequence
  Description of Artificial Sequence: Synthetic oligonucleotide
  Antisense strand to SEQ ID NO: 984472
aauccucacccaaggaaga

SEQ ID NO: 984474 - RNA, 19 nt, Artificial Sequence
  Description of Artificial Sequence: Synthetic oligonucleotide
  Sense strand starting at position 3199 of SEQ ID NO: 914184
uuugacauuugacaagaua

SEQ ID NO: 984475 - RNA, 19 nt, Artificial Sequence
  Description of Artificial Sequence: Synthetic oligonucleotide
  Antisense strand to SEQ ID NO: 984474
uaucuugucaaaugucaaa

SEQ ID NO: 984476 - RNA, 19 nt, Artificial Sequence
  Description of Artificial Sequence: Synthetic oligonucleotide
  Sense strand starting at position 917 of SEQ ID NO: 914184
uaagaagucuguuuaagag

SEQ ID NO: 984477 - RNA, 19 nt, Artificial Sequence
  Description of Artificial Sequence: Synthetic oligonucleotide
  Antisense strand to SEQ ID NO: 984476
cucuuaaacagacuucuua

SEQ ID NO: 984478 - RNA, 19 nt, Artificial Sequence
  Description of Artificial Sequence: Synthetic oligonucleotide
  Sense strand starting at position 1165 of SEQ ID NO: 914184
auuguagauccauaggcua

SEQ ID NO: 984479 - RNA, 19 nt, Artificial Sequence
  Description of Artificial Sequence: Synthetic oligonucleotide
  Antisense strand to SEQ ID NO: 984478
uagccuauggaucuacaau

SEQ ID NO: 984480 - RNA, 19 nt, Artificial Sequence
  Description of Artificial Sequence: Synthetic oligonucleotide
  Sense strand starting at position 927 of SEQ ID NO: 914184
guuuaagaggcacaacuuu

SEQ ID NO: 984481 - RNA, 19 nt, Artificial Sequence
  Description of Artificial Sequence: Synthetic oligonucleotide
  Antisense strand to SEQ ID NO: 984480
aaaguugugccucuuaaac

SEQ ID NO: 984482 - RNA, 19 nt, Artificial Sequence
  Description of Artificial Sequence: Synthetic oligonucleotide
  Sense strand starting at position 3447 of SEQ ID NO: 914184
gcuugaaggcaugacaauu

SEQ ID NO: 984483 - RNA, 19 nt, Artificial Sequence
  Description of Artificial Sequence: Synthetic oligonucleotide
  Antisense strand to SEQ ID NO: 984482
aauugucaugccuucaagc

SEQ ID NO: 984484 - RNA, 19 nt, Artificial Sequence
  Description of Artificial Sequence: Synthetic oligonucleotide
  Sense strand starting at position 1275 of SEQ ID NO: 914184
gguuaugcaaguuacaaga

SEQ ID NO: 984485 - RNA, 19 nt, Artificial Sequence
  Description of Artificial Sequence: Synthetic oligonucleotide
  Antisense strand to SEQ ID NO: 984484
ucuuguaacuugcauaacc

SEQ ID NO: 984486 - RNA, 19 nt, Artificial Sequence
  Description of Artificial Sequence: Synthetic oligonucleotide
  Sense strand starting at position 3751 of SEQ ID NO: 914184
uuggacugucaugauucuu

SEQ ID NO: 984487 - RNA, 19 nt, Artificial Sequence
  Description of Artificial Sequence: Synthetic oligonucleotide
  Antisense strand to SEQ ID NO: 984486
aagaaucaugacaguccaa

SEQ ID NO: 984488 - RNA, 19 nt, Artificial Sequence
  Description of Artificial Sequence: Synthetic oligonucleotide
  Sense strand starting at position 429 of SEQ ID NO: 914184
cuacucuaaucuguagaga

SEQ ID NO: 984489 - RNA, 19 nt, Artificial Sequence
  Description of Artificial Sequence: Synthetic oligonucleotide
  Antisense strand to SEQ ID NO: 984488
ucucuacagauuagaguag

SEQ ID NO: 984490 - RNA, 19 nt, Artificial Sequence
  Description of Artificial Sequence: Synthetic oligonucleotide
  Sense strand starting at position 3372 of SEQ ID NO: 914184
ggauucuccuaguuaagau

SEQ ID NO: 984491 - RNA, 19 nt, Artificial Sequence
  Description of Artificial Sequence: Synthetic oligonucleotide
  Antisense strand to SEQ ID NO: 984490
aucuuaacuaggagaaucc

SEQ ID NO: 984492 - RNA, 19 nt, Artificial Sequence
  Description of Artificial Sequence: Synthetic oligonucleotide
  Sense strand starting at position 273 of SEQ ID NO: 914184
aagugaagugcccaccaau

SEQ ID NO: 984493 - RNA, 19 nt, Artificial Sequence
  Description of Artificial Sequence: Synthetic oligonucleotide
  Antisense strand to SEQ ID NO: 984492
auuggugggcacuucacuu

SEQ ID NO: 984494 - RNA, 19 nt, Artificial Sequence
  Description of Artificial Sequence: Synthetic oligonucleotide
  Sense strand starting at position 3922 of SEQ ID NO: 914184
acuguuuguccucacagag

SEQ ID NO: 984495 - RNA, 19 nt, Artificial Sequence
  Description of Artificial Sequence: Synthetic oligonucleotide
  Antisense strand to SEQ ID NO: 984494
cucugugaggacaaacagu

SEQ ID NO: 984496 - RNA, 19 nt, Artificial Sequence
  Description of Artificial Sequence: Synthetic oligonucleotide
  Sense strand starting at position 458 of SEQ ID NO: 914184
ccgaaucaacauuguacaa

SEQ ID NO: 984497 - RNA, 19 nt, Artificial Sequence
  Description of Artificial Sequence: Synthetic oligonucleotide
  Antisense strand to SEQ ID NO: 984496
uuguacaauguugauucgg

SEQ ID NO: 984498 - RNA, 19 nt, Artificial Sequence
  Description of Artificial Sequence: Synthetic oligonucleotide
  Sense strand starting at position 3270 of SEQ ID NO: 914184
guaguuaacaaguauggua

SEQ ID NO: 984499 - RNA, 19 nt, Artificial Sequence
  Description of Artificial Sequence: Synthetic oligonucleotide
  Antisense strand to SEQ ID NO: 984498
uaccauacuuguuaacuac

SEQ ID NO: 984500 - RNA, 19 nt, Artificial Sequence
  Description of Artificial Sequence: Synthetic oligonucleotide
  Sense strand starting at position 283 of SEQ ID NO: 914184
cccaccaauccgcagauua

SEQ ID NO: 984501 - RNA, 19 nt, Artificial Sequence
  Description of Artificial Sequence: Synthetic oligonucleotide
  Antisense strand to SEQ ID NO: 984500
uaaucugcggauugguggg

SEQ ID NO: 984502 - RNA, 19 nt, Artificial Sequence
  Description of Artificial Sequence: Synthetic oligonucleotide
  Sense strand starting at position 240 of SEQ ID NO: 914184
gagaaauuauugcuaguac

SEQ ID NO: 984503 - RNA, 19 nt, Artificial Sequence
  Description of Artificial Sequence: Synthetic oligonucleotide
  Antisense strand to SEQ ID NO: 984502
guacuagcaauaauuucuc

SEQ ID NO: 984504 - RNA, 19 nt, Artificial Sequence
  Description of Artificial Sequence: Synthetic oligonucleotide
  Sense strand starting at position 2485 of SEQ ID NO: 914184
cugcgugguagucuguauu

SEQ ID NO: 984505 - RNA, 19 nt, Artificial Sequence
  Description of Artificial Sequence: Synthetic oligonucleotide
  Antisense strand to SEQ ID NO: 984504
aauacagacuaccacgcag

SEQ ID NO: 984506 - RNA, 19 nt, Artificial Sequence
  Description of Artificial Sequence: Synthetic oligonucleotide
  Sense strand starting at position 3666 of SEQ ID NO: 914184
cuaccauggccaugauuga

SEQ ID NO: 984507 - RNA, 19 nt, Artificial Sequence
  Description of Artificial Sequence: Synthetic oligonucleotide
  Antisense strand to SEQ ID NO: 984506
ucaaucauggccaugguag

SEQ ID NO: 984508 - RNA, 19 nt, Artificial Sequence
  Description of Artificial Sequence: Synthetic oligonucleotide
  Sense strand starting at position 3696 of SEQ ID NO: 914184
gguauuggcccuuacauac

SEQ ID NO: 984509 - RNA, 19 nt, Artificial Sequence
  Description of Artificial Sequence: Synthetic oligonucleotide
  Antisense strand to SEQ ID NO: 984508
guauguaagggccaauacc

SEQ ID NO: 984510 - RNA, 19 nt, Artificial Sequence
  Description of Artificial Sequence: Synthetic oligonucleotide
  Sense strand starting at position 3741 of SEQ ID NO: 914184
uguugauaaauuggacugu

SEQ ID NO: 984511 - RNA, 19 nt, Artificial Sequence
  Description of Artificial Sequence: Synthetic oligonucleotide
  Antisense strand to SEQ ID NO: 984510
acaguccaauuuaucaaca

SEQ ID NO: 984512 - RNA, 19 nt, Artificial Sequence
  Description of Artificial Sequence: Synthetic oligonucleotide
  Sense strand starting at position 294 of SEQ ID NO: 914184
gcagauuaaugagcacauc

SEQ ID NO: 984513 - RNA, 19 nt, Artificial Sequence
  Description of Artificial Sequence: Synthetic oligonucleotide
  Antisense strand to SEQ ID NO: 984512
gaugugcucauuaaucugc

SEQ ID NO: 984514 - RNA, 19 nt, Artificial Sequence
  Description of Artificial Sequence: Synthetic oligonucleotide
  Sense strand starting at position 3493 of SEQ ID NO: 914184
uggaaaugugcgcacagaa

SEQ ID NO: 984515 - RNA, 19 nt, Artificial Sequence
  Description of Artificial Sequence: Synthetic oligonucleotide
  Antisense strand to SEQ ID NO: 984514
uucugugcgcacauuucca

SEQ ID NO: 984516 - RNA, 19 nt, Artificial Sequence
  Description of Artificial Sequence: Synthetic oligonucleotide
  Sense strand starting at position 3278 of SEQ ID NO: 914184
caaguaugguaugcaauaa

SEQ ID NO: 984517 - RNA, 19 nt, Artificial Sequence
  Description of Artificial Sequence: Synthetic oligonucleotide
  Antisense strand to SEQ ID NO: 984516
uuauugcauaccauacuug

SEQ ID NO: 984518 - RNA, 19 nt, Artificial Sequence
  Description of Artificial Sequence: Synthetic oligonucleotide
  Sense strand starting at position 3126 of SEQ ID NO: 914184
uuuggaaucguguauccag

SEQ ID NO: 984519 - RNA, 19 nt, Artificial Sequence
  Description of Artificial Sequence: Synthetic oligonucleotide
  Antisense strand to SEQ ID NO: 984518
cuggauacacgauuccaaa

SEQ ID NO: 984520 - RNA, 19 nt, Artificial Sequence
  Description of Artificial Sequence: Synthetic oligonucleotide
  Sense strand starting at position 2854 of SEQ ID NO: 914184
ugacucauacuuggcuuaa

SEQ ID NO: 984521 - RNA, 19 nt, Artificial Sequence
  Description of Artificial Sequence: Synthetic oligonucleotide
  Antisense strand to SEQ ID NO: 984520
uuaagccaaguaugaguca

SEQ ID NO: 984522 - RNA, 19 nt, Artificial Sequence
  Description of Artificial Sequence: Synthetic oligonucleotide
  Sense strand starting at position 324 of SEQ ID NO: 914184
acuuuauauccuggagcua

SEQ ID NO: 984523 - RNA, 19 nt, Artificial Sequence
  Description of Artificial Sequence: Synthetic oligonucleotide
  Antisense strand to SEQ ID NO: 984522
uagcuccaggauauaaagu

SEQ ID NO: 984524 - RNA, 19 nt, Artificial Sequence
  Description of Artificial Sequence: Synthetic oligonucleotide
  Sense strand starting at position 3277 of SEQ ID NO: 914184
acaaguaugguaugcaaua

SEQ ID NO: 984525 - RNA, 19 nt, Artificial Sequence
  Description of Artificial Sequence: Synthetic oligonucleotide
  Antisense strand to SEQ ID NO: 984524
uauugcauaccauacuugu

SEQ ID NO: 984526 - RNA, 19 nt, Artificial Sequence
  Description of Artificial Sequence: Synthetic oligonucleotide
  Sense strand starting at position 2384 of SEQ ID NO: 914184
ccuggcuuaccaggauauu

SEQ ID NO: 984527 - RNA, 19 nt, Artificial Sequence
  Description of Artificial Sequence: Synthetic oligonucleotide
  Antisense strand to SEQ ID NO: 984526
aauauccugguaagccagg

SEQ ID NO: 984528 - RNA, 19 nt, Artificial Sequence
  Description of Artificial Sequence: Synthetic oligonucleotide
  Sense strand starting at position 2838 of SEQ ID NO: 914184
uggcauagaccaugucuga

SEQ ID NO: 984529 - RNA, 19 nt, Artificial Sequence
  Description of Artificial Sequence: Synthetic oligonucleotide
  Antisense strand to SEQ ID NO: 984528
ucagacauggucuaugcca

SEQ ID NO: 984530 - RNA, 19 nt, Artificial Sequence
  Description of Artificial Sequence: Synthetic oligonucleotide
  Sense strand starting at position 2066 of SEQ ID NO: 914185
ucuauuugucauggcaauu

SEQ ID NO: 984531 - RNA, 19 nt, Artificial Sequence
  Description of Artificial Sequence: Synthetic oligonucleotide
  Antisense strand to SEQ ID NO: 984530
aauugccaugacaaauaga

SEQ ID NO: 984532 - RNA, 19 nt, Artificial Sequence
  Description of Artificial Sequence: Synthetic oligonucleotide
  Sense strand starting at position 227 of SEQ ID NO: 914185
cuaugauucggauauccca

SEQ ID NO: 984533 - RNA, 19 nt, Artificial Sequence
  Description of Artificial Sequence: Synthetic oligonucleotide
  Antisense strand to SEQ ID NO: 984532
ugggauauccgaaucauag

SEQ ID NO: 984534 - RNA, 19 nt, Artificial Sequence
  Description of Artificial Sequence: Synthetic oligonucleotide
  Sense strand starting at position 3736 of SEQ ID NO: 914185
uggaaauucuaccuuugac

SEQ ID NO: 984535 - RNA, 19 nt, Artificial Sequence
  Description of Artificial Sequence: Synthetic oligonucleotide
  Antisense strand to SEQ ID NO: 984534
gucaaagguagaauuucca

SEQ ID NO: 984536 - RNA, 19 nt, Artificial Sequence
  Description of Artificial Sequence: Synthetic oligonucleotide
  Sense strand starting at position 3940 of SEQ ID NO: 914185
gcauaaauacagugaagau

SEQ ID NO: 984537 - RNA, 19 nt, Artificial Sequence
  Description of Artificial Sequence: Synthetic oligonucleotide
  Antisense strand to SEQ ID NO: 984536
aucuucacuguauuuaugc

SEQ ID NO: 984538 - RNA, 19 nt, Artificial Sequence
  Description of Artificial Sequence: Synthetic oligonucleotide
  Sense strand starting at position 2898 of SEQ ID NO: 914185
ugcaaaccucauugaagga

SEQ ID NO: 984539 - RNA, 19 nt, Artificial Sequence
  Description of Artificial Sequence: Synthetic oligonucleotide
  Antisense strand to SEQ ID NO: 984538
uccuucaaugagguuugca

SEQ ID NO: 984540 - RNA, 19 nt, Artificial Sequence
  Description of Artificial Sequence: Synthetic oligonucleotide
  Sense strand starting at position 3221 of SEQ ID NO: 914185
ccggaacauuaucucaaca

SEQ ID NO: 984541 - RNA, 19 nt, Artificial Sequence
  Description of Artificial Sequence: Synthetic oligonucleotide
  Antisense strand to SEQ ID NO: 984540
uguugagauaauguuccgg

SEQ ID NO: 984542 - RNA, 19 nt, Artificial Sequence
  Description of Artificial Sequence: Synthetic oligonucleotide
  Sense strand starting at position 2655 of SEQ ID NO: 914185
aagguaaauuucuaggaua

SEQ ID NO: 984543 - RNA, 19 nt, Artificial Sequence
  Description of Artificial Sequence: Synthetic oligonucleotide
  Antisense strand to SEQ ID NO: 984542
uauccuagaaauuuaccuu

SEQ ID NO: 984544 - RNA, 19 nt, Artificial Sequence
  Description of Artificial Sequence: Synthetic oligonucleotide
  Sense strand starting at position 3858 of SEQ ID NO: 914185
aaguauuuggcaugucuuu

SEQ ID NO: 984545 - RNA, 19 nt, Artificial Sequence
  Description of Artificial Sequence: Synthetic oligonucleotide
  Antisense strand to SEQ ID NO: 984544
aaagacaugccaaauacuu

SEQ ID NO: 984546 - RNA, 19 nt, Artificial Sequence
  Description of Artificial Sequence: Synthetic oligonucleotide
  Sense strand starting at position 2710 of SEQ ID NO: 914185
aucuaauuguccucaagga

SEQ ID NO: 984547 - RNA, 19 nt, Artificial Sequence
  Description of Artificial Sequence: Synthetic oligonucleotide
  Antisense strand to SEQ ID NO: 984546
uccuugaggacaauuagau

SEQ ID NO: 984548 - RNA, 19 nt, Artificial Sequence
  Description of Artificial Sequence: Synthetic oligonucleotide
  Sense strand starting at position 216 of SEQ ID NO: 914185
ugggcuucugacuaugauu

SEQ ID NO: 984549 - RNA, 19 nt, Artificial Sequence
  Description of Artificial Sequence: Synthetic oligonucleotide
  Antisense strand to SEQ ID NO: 984548
aaucauagucagaagccca

SEQ ID NO: 984550 - RNA, 19 nt, Artificial Sequence
  Description of Artificial Sequence: Synthetic oligonucleotide
  Sense strand starting at position 3813 of SEQ ID NO: 914185
caggcuuaccuuggagaag

SEQ ID NO: 984551 - RNA, 19 nt, Artificial Sequence
  Description of Artificial Sequence: Synthetic oligonucleotide
  Antisense strand to SEQ ID NO: 984550
cuucuccaagguaagccug

SEQ ID NO: 984552 - RNA, 19 nt, Artificial Sequence
  Description of Artificial Sequence: Synthetic oligonucleotide
  Sense strand starting at position 2895 of SEQ ID NO: 914185
uguugcaaaccucauugaa

SEQ ID NO: 984553 - RNA, 19 nt, Artificial Sequence
  Description of Artificial Sequence: Synthetic oligonucleotide
  Antisense strand to SEQ ID NO: 984552
uucaaugagguuugcaaca

SEQ ID NO: 984554 - RNA, 19 nt, Artificial Sequence
  Description of Artificial Sequence: Synthetic oligonucleotide
  Sense strand starting at position 223 of SEQ ID NO: 914185
cugacuaugauucggauau

SEQ ID NO: 984555 - RNA, 19 nt, Artificial Sequence
  Description of Artificial Sequence: Synthetic oligonucleotide
  Antisense strand to SEQ ID NO: 984554
auauccgaaucauagucag

SEQ ID NO: 984556 - RNA, 19 nt, Artificial Sequence
  Description of Artificial Sequence: Synthetic oligonucleotide
  Sense strand starting at position 270 of SEQ ID NO: 914185
gggaaauacuggcuguaau

SEQ ID NO: 984557 - RNA, 19 nt, Artificial Sequence
  Description of Artificial Sequence: Synthetic oligonucleotide
  Antisense strand to SEQ ID NO: 984556
auuacagccaguauuuccc

SEQ ID NO: 984558 - RNA, 19 nt, Artificial Sequence
  Description of Artificial Sequence: Synthetic oligonucleotide
  Sense strand starting at position 3812 of SEQ ID NO: 914185
ucaggcuuaccuuggagaa

SEQ ID NO: 984559 - RNA, 19 nt, Artificial Sequence
  Description of Artificial Sequence: Synthetic oligonucleotide
  Antisense strand to SEQ ID NO: 984558
uucuccaagguaagccuga

SEQ ID NO: 984560 - RNA, 19 nt, Artificial Sequence
  Description of Artificial Sequence: Synthetic oligonucleotide
  Sense strand starting at position 2658 of SEQ ID NO: 914185
guaaauuucuaggauacag

SEQ ID NO: 984561 - RNA, 19 nt, Artificial Sequence
  Description of Artificial Sequence: Synthetic oligonucleotide
  Antisense strand to SEQ ID NO: 984560
cuguauccuagaaauuuac

SEQ ID NO: 984562 - RNA, 19 nt, Artificial Sequence
  Description of Artificial Sequence: Synthetic oligonucleotide
  Sense strand starting at position 975 of SEQ ID NO: 914185
ggcuuagcuagggaaaguu

SEQ ID NO: 984563 - RNA, 19 nt, Artificial Sequence
  Description of Artificial Sequence: Synthetic oligonucleotide
  Antisense strand to SEQ ID NO: 984562
aacuuucccuagcuaagcc

SEQ ID NO: 984564 - RNA, 19 nt, Artificial Sequence
  Description of Artificial Sequence: Synthetic oligonucleotide
  Sense strand starting at position 221 of SEQ ID NO: 914185
uucugacuaugauucggau

SEQ ID NO: 984565 - RNA, 19 nt, Artificial Sequence
  Description of Artificial Sequence: Synthetic oligonucleotide
  Antisense strand to SEQ ID NO: 984564
auccgaaucauagucagaa

SEQ ID NO: 984566 - RNA, 19 nt, Artificial Sequence
  Description of Artificial Sequence: Synthetic oligonucleotide
  Sense strand starting at position 215 of SEQ ID NO: 914185
augggcuucugacuaugau

SEQ ID NO: 984567 - RNA, 19 nt, Artificial Sequence
  Description of Artificial Sequence: Synthetic oligonucleotide
  Antisense strand to SEQ ID NO: 984566
aucauagucagaagcccau

SEQ ID NO: 984568 - RNA, 19 nt, Artificial Sequence
  Description of Artificial Sequence: Synthetic oligonucleotide
  Sense strand starting at position 13 of SEQ ID NO: 914185
ugugaacuuugggucauaa

SEQ ID NO: 984569 - RNA, 19 nt, Artificial Sequence
  Description of Artificial Sequence: Synthetic oligonucleotide
  Antisense strand to SEQ ID NO: 984568
uuaugacccaaaguucaca

SEQ ID NO: 984570 - RNA, 19 nt, Artificial Sequence
  Description of Artificial Sequence: Synthetic oligonucleotide
  Sense strand starting at position 271 of SEQ ID NO: 914185
ggaaauacuggcuguaauc

SEQ ID NO: 984571 - RNA, 19 nt, Artificial Sequence
  Description of Artificial Sequence: Synthetic oligonucleotide
  Antisense strand to SEQ ID NO: 984570
gauuacagccaguauuucc

SEQ ID NO: 984572 - RNA, 19 nt, Artificial Sequence
  Description of Artificial Sequence: Synthetic oligonucleotide
  Sense strand starting at position 2121 of SEQ ID NO: 914185
ggguaauaagccgaccuuu

SEQ ID NO: 984573 - RNA, 19 nt, Artificial Sequence
  Description of Artificial Sequence: Synthetic oligonucleotide
  Antisense strand to SEQ ID NO: 984572
aaaggucggcuuauuaccc

SEQ ID NO: 984574 - RNA, 19 nt, Artificial Sequence
  Description of Artificial Sequence: Synthetic oligonucleotide
  Sense strand starting at position 2240 of SEQ ID NO: 914185
cucaaugaacguugacuau

SEQ ID NO: 984575 - RNA, 19 nt, Artificial Sequence
  Description of Artificial Sequence: Synthetic oligonucleotide
  Antisense strand to SEQ ID NO: 984574
auagucaacguucauugag

SEQ ID NO: 984576 - RNA, 19 nt, Artificial Sequence
  Description of Artificial Sequence: Synthetic oligonucleotide
  Sense strand starting at position 2561 of SEQ ID NO: 914185
ucugcuauuguugaauauu

SEQ ID NO: 984577 - RNA, 19 nt, Artificial Sequence
  Description of Artificial Sequence: Synthetic oligonucleotide
  Antisense strand to SEQ ID NO: 984576
aauauucaacaauagcaga

SEQ ID NO: 984578 - RNA, 19 nt, Artificial Sequence
  Description of Artificial Sequence: Synthetic oligonucleotide
  Sense strand starting at position 2250 of SEQ ID NO: 914185
guugacuaugacugcacaa

SEQ ID NO: 984579 - RNA, 19 nt, Artificial Sequence
  Description of Artificial Sequence: Synthetic oligonucleotide
  Antisense strand to SEQ ID NO: 984578
uugugcagucauagucaac

SEQ ID NO: 984580 - RNA, 19 nt, Artificial Sequence
  Description of Artificial Sequence: Synthetic oligonucleotide
  Sense strand starting at position 2112 of SEQ ID NO: 914185
guugcaguuggguaauaag

SEQ ID NO: 984581 - RNA, 19 nt, Artificial Sequence
  Description of Artificial Sequence: Synthetic oligonucleotide
  Antisense strand to SEQ ID NO: 984580
cuuauuacccaacugcaac

SEQ ID NO: 984582 - RNA, 19 nt, Artificial Sequence
  Description of Artificial Sequence: Synthetic oligonucleotide
  Sense strand starting at position 3084 of SEQ ID NO: 914185
ggucucugccucuagauca

SEQ ID NO: 984583 - RNA, 19 nt, Artificial Sequence
  Description of Artificial Sequence: Synthetic oligonucleotide
  Antisense strand to SEQ ID NO: 984582
ugaucuagaggcagagacc

SEQ ID NO: 984584 - RNA, 19 nt, Artificial Sequence
  Description of Artificial Sequence: Synthetic oligonucleotide
  Sense strand starting at position 1323 of SEQ ID NO: 914185
gcagcuuggguuuaauaca

SEQ ID NO: 984585 - RNA, 19 nt, Artificial Sequence
  Description of Artificial Sequence: Synthetic oligonucleotide
  Antisense strand to SEQ ID NO: 984584
uguauuaaacccaagcugc

SEQ ID NO: 984586 - RNA, 19 nt, Artificial Sequence
  Description of Artificial Sequence: Synthetic oligonucleotide
  Sense strand starting at position 3845 of SEQ ID NO: 914185
cugguuguuccugaaguau

SEQ ID NO: 984587 - RNA, 19 nt, Artificial Sequence
  Description of Artificial Sequence: Synthetic oligonucleotide
  Antisense strand to SEQ ID NO: 984586
auacuucaggaacaaccag

SEQ ID NO: 984588 - RNA, 19 nt, Artificial Sequence
  Description of Artificial Sequence: Synthetic oligonucleotide
  Sense strand starting at position 994 of SEQ ID NO: 914185
uuguuagccuuauuggaag

SEQ ID NO: 984589 - RNA, 19 nt, Artificial Sequence
  Description of Artificial Sequence: Synthetic oligonucleotide
  Antisense strand to SEQ ID NO: 984588
cuuccaauaaggcuaacaa

SEQ ID NO: 984590 - RNA, 19 nt, Artificial Sequence
  Description of Artificial Sequence: Synthetic oligonucleotide
  Sense strand starting at position 3650 of SEQ ID NO: 914185
uuaagugcuguauagucaa

SEQ ID NO: 984591 - RNA, 19 nt, Artificial Sequence
  Description of Artificial Sequence: Synthetic oligonucleotide
  Antisense strand to SEQ ID NO: 984590
uugacuauacagcacuuaa

SEQ ID NO: 984592 - RNA, 19 nt, Artificial Sequence
  Description of Artificial Sequence: Synthetic oligonucleotide
  Sense strand starting at position 2858 of SEQ ID NO: 914185
gacagcuuccagugaaagu

SEQ ID NO: 984593 - RNA, 19 nt, Artificial Sequence
  Description of Artificial Sequence: Synthetic oligonucleotide
  Antisense strand to SEQ ID NO: 984592
acuuucacuggaagcuguc

SEQ ID NO: 984594 - RNA, 19 nt, Artificial Sequence
  Description of Artificial Sequence: Synthetic oligonucleotide
  Sense strand starting at position 2211 of SEQ ID NO: 914185
ugagcaugaugcuuuauau

SEQ ID NO: 984595 - RNA, 19 nt, Artificial Sequence
  Description of Artificial Sequence: Synthetic oligonucleotide
  Antisense strand to SEQ ID NO: 984594
auauaaagcaucaugcuca

SEQ ID NO: 984596 - RNA, 19 nt, Artificial Sequence
  Description of Artificial Sequence: Synthetic oligonucleotide
  Sense strand starting at position 2156 of SEQ ID NO: 914185
uuaagauuggagggcguuu

SEQ ID NO: 984597 - RNA, 19 nt, Artificial Sequence
  Description of Artificial Sequence: Synthetic oligonucleotide
  Antisense strand to SEQ ID NO: 984596
aaacgcccuccaaucuuaa

SEQ ID NO: 984598 - RNA, 19 nt, Artificial Sequence
  Description of Artificial Sequence: Synthetic oligonucleotide
  Sense strand starting at position 3081 of SEQ ID NO: 914185
gauggucucugccucuaga

SEQ ID NO: 984599 - RNA, 19 nt, Artificial Sequence
  Description of Artificial Sequence: Synthetic oligonucleotide
  Antisense strand to SEQ ID NO: 984598
ucuagaggcagagaccauc

SEQ ID NO: 984600 - RNA, 19 nt, Artificial Sequence
  Description of Artificial Sequence: Synthetic oligonucleotide
  Sense strand starting at position 2425 of SEQ ID NO: 914185
augucauucuaccuaugca

SEQ ID NO: 984601 - RNA, 19 nt, Artificial Sequence
  Description of Artificial Sequence: Synthetic oligonucleotide
  Antisense strand to SEQ ID NO: 984600
ugcauagguagaaugacau

SEQ ID NO: 984602 - RNA, 19 nt, Artificial Sequence
  Description of Artificial Sequence: Synthetic oligonucleotide
  Sense strand starting at position 282 of SEQ ID NO: 914185
cuguaaucucuguacggua

SEQ ID NO: 984603 - RNA, 19 nt, Artificial Sequence
  Description of Artificial Sequence: Synthetic oligonucleotide
  Antisense strand to SEQ ID NO: 984602
uaccguacagagauuacag

SEQ ID NO: 984604 - RNA, 19 nt, Artificial Sequence
  Description of Artificial Sequence: Synthetic oligonucleotide
  Sense strand starting at position 3771 of SEQ ID NO: 914185
cccuuaugcuguuuaacag

SEQ ID NO: 984605 - RNA, 19 nt, Artificial Sequence
  Description of Artificial Sequence: Synthetic oligonucleotide
  Antisense strand to SEQ ID NO: 984604
cuguuaaacagcauaaggg

SEQ ID NO: 984606 - RNA, 19 nt, Artificial Sequence
  Description of Artificial Sequence: Synthetic oligonucleotide
  Sense strand starting at position 1320 of SEQ ID NO: 914185
agggcagcuuggguuuaau

SEQ ID NO: 984607 - RNA, 19 nt, Artificial Sequence
  Description of Artificial Sequence: Synthetic oligonucleotide
  Antisense strand to SEQ ID NO: 984606
auuaaacccaagcugcccu

SEQ ID NO: 984608 - RNA, 19 nt, Artificial Sequence
  Description of Artificial Sequence: Synthetic oligonucleotide
  Sense strand starting at position 2202 of SEQ ID NO: 914185
gcacaaugcugagcaugau

SEQ ID NO: 984609 - RNA, 19 nt, Artificial Sequence
  Description of Artificial Sequence: Synthetic oligonucleotide
  Antisense strand to SEQ ID NO: 984608
aucaugcucagcauugugc

SEQ ID NO: 984610 - RNA, 19 nt, Artificial Sequence
  Description of Artificial Sequence: Synthetic oligonucleotide
  Sense strand starting at position 775 of SEQ ID NO: 914186
gguuaacaaucauuaugag

SEQ ID NO: 984611 - RNA, 19 nt, Artificial Sequence
  Description of Artificial Sequence: Synthetic oligonucleotide
  Antisense strand to SEQ ID NO: 984610
cucauaaugauuguuaacc

SEQ ID NO: 984612 - RNA, 19 nt, Artificial Sequence
  Description of Artificial Sequence: Synthetic oligonucleotide
  Sense strand starting at position 898 of SEQ ID NO: 914186
ucagaaugauuauccaagu

SEQ ID NO: 984613 - RNA, 19 nt, Artificial Sequence
  Description of Artificial Sequence: Synthetic oligonucleotide
  Antisense strand to SEQ ID NO: 984612
acuuggauaaucauucuga

SEQ ID NO: 984614 - RNA, 19 nt, Artificial Sequence
  Description of Artificial Sequence: Synthetic oligonucleotide
  Sense strand starting at position 3254 of SEQ ID NO: 914186
agaugaguuccuugggaac

SEQ ID NO: 984615 - RNA, 19 nt, Artificial Sequence
  Description of Artificial Sequence: Synthetic oligonucleotide
  Antisense strand to SEQ ID NO: 984614
guucccaaggaacucaucu

SEQ ID NO: 984616 - RNA, 19 nt, Artificial Sequence
  Description of Artificial Sequence: Synthetic oligonucleotide
  Sense strand starting at position 728 of SEQ ID NO: 914186
ucucuaguccuuuaagaug

SEQ ID NO: 984617 - RNA, 19 nt, Artificial Sequence
  Description of Artificial Sequence: Synthetic oligonucleotide
  Antisense strand to SEQ ID NO: 984616
caucuuaaaggacuagaga

SEQ ID NO: 984618 - RNA, 19 nt, Artificial Sequence
  Description of Artificial Sequence: Synthetic oligonucleotide
  Sense strand starting at position 608 of SEQ ID NO: 914186
cuaugcuuuggaggacaga

SEQ ID NO: 984619 - RNA, 19 nt, Artificial Sequence
  Description of Artificial Sequence: Synthetic oligonucleotide
  Antisense strand to SEQ ID NO: 984618
ucuguccuccaaagcauag

SEQ ID NO: 984620 - RNA, 19 nt, Artificial Sequence
  Description of Artificial Sequence: Synthetic oligonucleotide
  Sense strand starting at position 3239 of SEQ ID NO: 914186
acuggaaauuuagggagau

SEQ ID NO: 984621 - RNA, 19 nt, Artificial Sequence
  Description of Artificial Sequence: Synthetic oligonucleotide
  Antisense strand to SEQ ID NO: 984620
aucucccuaaauuuccagu

SEQ ID NO: 984622 - RNA, 19 nt, Artificial Sequence
  Description of Artificial Sequence: Synthetic oligonucleotide
  Sense strand starting at position 1034 of SEQ ID NO: 914186
aguuguaagucauuuagcu

SEQ ID NO: 984623 - RNA, 19 nt, Artificial Sequence
  Description of Artificial Sequence: Synthetic oligonucleotide
  Antisense strand to SEQ ID NO: 984622
agcuaaaugacuuacaacu

SEQ ID NO: 984624 - RNA, 19 nt, Artificial Sequence
  Description of Artificial Sequence: Synthetic oligonucleotide
  Sense strand starting at position 3240 of SEQ ID NO: 914186
cuggaaauuuagggagaug

SEQ ID NO: 984625 - RNA, 19 nt, Artificial Sequence
  Description of Artificial Sequence: Synthetic oligonucleotide
  Antisense strand to SEQ ID NO: 984624
caucucccuaaauuuccag

SEQ ID NO: 984626 - RNA, 19 nt, Artificial Sequence
  Description of Artificial Sequence: Synthetic oligonucleotide
  Sense strand starting at position 1330 of SEQ ID NO: 914186
cgcggugcuaguuucagau

SEQ ID NO: 984627 - RNA, 19 nt, Artificial Sequence
  Description of Artificial Sequence: Synthetic oligonucleotide
  Antisense strand to SEQ ID NO: 984626
aucugaaacuagcaccgcg

SEQ ID NO: 984628 - RNA, 19 nt, Artificial Sequence
  Description of Artificial Sequence: Synthetic oligonucleotide
  Sense strand starting at position 3336 of SEQ ID NO: 914186
gcugucguccagucugagu

SEQ ID NO: 984629 - RNA, 19 nt, Artificial Sequence
  Description of Artificial Sequence: Synthetic oligonucleotide
  Antisense strand to SEQ ID NO: 984628
acucagacuggacgacagc

SEQ ID NO: 984630 - RNA, 19 nt, Artificial Sequence
  Description of Artificial Sequence: Synthetic oligonucleotide
  Sense strand starting at position 765 of SEQ ID NO: 914186
gucaucugaugguuaacaa

SEQ ID NO: 984631 - RNA, 19 nt, Artificial Sequence
  Description of Artificial Sequence: Synthetic oligonucleotide
  Antisense strand to SEQ ID NO: 984630
uuguuaaccaucagaugac

SEQ ID NO: 984632 - RNA, 19 nt, Artificial Sequence
  Description of Artificial Sequence: Synthetic oligonucleotide
  Sense strand starting at position 716 of SEQ ID NO: 914186
uuagaaaccugcucucuag

SEQ ID NO: 984633 - RNA, 19 nt, Artificial Sequence
  Description of Artificial Sequence: Synthetic oligonucleotide
  Antisense strand to SEQ ID NO: 984632
cuagagagcagguuucuaa

SEQ ID NO: 984634 - RNA, 19 nt, Artificial Sequence
  Description of Artificial Sequence: Synthetic oligonucleotide
  Sense strand starting at position 1204 of SEQ ID NO: 914186
ucuuucuggcugcaaauga

SEQ ID NO: 984635 - RNA, 19 nt, Artificial Sequence
  Description of Artificial Sequence: Synthetic oligonucleotide
  Antisense strand to SEQ ID NO: 984634
ucauuugcagccagaaaga

SEQ ID NO: 984636 - RNA, 19 nt, Artificial Sequence
  Description of Artificial Sequence: Synthetic oligonucleotide
  Sense strand starting at position 763 of SEQ ID NO: 914186
cagucaucugaugguuaac

SEQ ID NO: 984637 - RNA, 19 nt, Artificial Sequence
  Description of Artificial Sequence: Synthetic oligonucleotide
  Antisense strand to SEQ ID NO: 984636
guuaaccaucagaugacug

SEQ ID NO: 984638 - RNA, 19 nt, Artificial Sequence
  Description of Artificial Sequence: Synthetic oligonucleotide
  Sense strand starting at position 3743 of SEQ ID NO: 914186
augugaaaguucucaggug

SEQ ID NO: 984639 - RNA, 19 nt, Artificial Sequence
  Description of Artificial Sequence: Synthetic oligonucleotide
  Antisense strand to SEQ ID NO: 984638
caccugagaacuuucacau

SEQ ID NO: 984640 - RNA, 19 nt, Artificial Sequence
  Description of Artificial Sequence: Synthetic oligonucleotide
  Sense strand starting at position 1272 of SEQ ID NO: 914186
gucacuaaaccuugcugga

SEQ ID NO: 984641 - RNA, 19 nt, Artificial Sequence
  Description of Artificial Sequence: Synthetic oligonucleotide
  Antisense strand to SEQ ID NO: 984640
uccagcaagguuuagugac

SEQ ID NO: 984642 - RNA, 19 nt, Artificial Sequence
  Description of Artificial Sequence: Synthetic oligonucleotide
  Sense strand starting at position 604 of SEQ ID NO: 914186
ucagcuaugcuuuggagga

SEQ ID NO: 984643 - RNA, 19 nt, Artificial Sequence
  Description of Artificial Sequence: Synthetic oligonucleotide
  Antisense strand to SEQ ID NO: 984642
uccuccaaagcauagcuga

SEQ ID NO: 984644 - RNA, 19 nt, Artificial Sequence
  Description of Artificial Sequence: Synthetic oligonucleotide
  Sense strand starting at position 3715 of SEQ ID NO: 914186
gcugaaguccauuggugaa

SEQ ID NO: 984645 - RNA, 19 nt, Artificial Sequence
  Description of Artificial Sequence: Synthetic oligonucleotide
  Antisense strand to SEQ ID NO: 984644
uucaccaauggacuucagc

SEQ ID NO: 984646 - RNA, 19 nt, Artificial Sequence
  Description of Artificial Sequence: Synthetic oligonucleotide
  Sense strand starting at position 3861 of SEQ ID NO: 914186
ugguauucgggugauuggu

SEQ ID NO: 984647 - RNA, 19 nt, Artificial Sequence
  Description of Artificial Sequence: Synthetic oligonucleotide
  Antisense strand to SEQ ID NO: 984646
accaaucacccgaauacca

SEQ ID NO: 984648 - RNA, 19 nt, Artificial Sequence
  Description of Artificial Sequence: Synthetic oligonucleotide
  Sense strand starting at position 101 of SEQ ID NO: 914186
augcuuaagcguuacaaua

SEQ ID NO: 984649 - RNA, 19 nt, Artificial Sequence
  Description of Artificial Sequence: Synthetic oligonucleotide
  Antisense strand to SEQ ID NO: 984648
uauuguaacgcuuaagcau

SEQ ID NO: 984650 - RNA, 19 nt, Artificial Sequence
  Description of Artificial Sequence: Synthetic oligonucleotide
  Sense strand starting at position 3757 of SEQ ID NO: 914186
agguguguuaagugaaauu

SEQ ID NO: 984651 - RNA, 19 nt, Artificial Sequence
  Description of Artificial Sequence: Synthetic oligonucleotide
  Antisense strand to SEQ ID NO: 984650
aauuucacuuaacacaccu

SEQ ID NO: 984652 - RNA, 19 nt, Artificial Sequence
  Description of Artificial Sequence: Synthetic oligonucleotide
  Sense strand starting at position 3229 of SEQ ID NO: 914186
ggcgcuugagacuggaaau

SEQ ID NO: 984653 - RNA, 19 nt, Artificial Sequence
  Description of Artificial Sequence: Synthetic oligonucleotide
  Antisense strand to SEQ ID NO: 984652
auuuccagucucaagcgcc

SEQ ID NO: 984654 - RNA, 19 nt, Artificial Sequence
  Description of Artificial Sequence: Synthetic oligonucleotide
  Sense strand starting at position 3130 of SEQ ID NO: 914186
ggguucuguguucaaggca

SEQ ID NO: 984655 - RNA, 19 nt, Artificial Sequence
  Description of Artificial Sequence: Synthetic oligonucleotide
  Antisense strand to SEQ ID NO: 984654
ugccuugaacacagaaccc

SEQ ID NO: 984656 - RNA, 19 nt, Artificial Sequence
  Description of Artificial Sequence: Synthetic oligonucleotide
  Sense strand starting at position 3847 of SEQ ID NO: 914186
uuaguugagagugguggua

SEQ ID NO: 984657 - RNA, 19 nt, Artificial Sequence
  Description of Artificial Sequence: Synthetic oligonucleotide
  Antisense strand to SEQ ID NO: 984656
uaccaccacucucaacuaa

SEQ ID NO: 984658 - RNA, 19 nt, Artificial Sequence
  Description of Artificial Sequence: Synthetic oligonucleotide
  Sense strand starting at position 578 of SEQ ID NO: 914186
auguacuaaucuguugcaa

SEQ ID NO: 984659 - RNA, 19 nt, Artificial Sequence
  Description of Artificial Sequence: Synthetic oligonucleotide
  Antisense strand to SEQ ID NO: 984658
uugcaacagauuaguacau

SEQ ID NO: 984660 - RNA, 19 nt, Artificial Sequence
  Description of Artificial Sequence: Synthetic oligonucleotide
  Sense strand starting at position 1025 of SEQ ID NO: 914186
cgacuugaaaguuguaagu

SEQ ID NO: 984661 - RNA, 19 nt, Artificial Sequence
  Description of Artificial Sequence: Synthetic oligonucleotide
  Antisense strand to SEQ ID NO: 984660
acuuacaacuuucaagucg

SEQ ID NO: 984662 - RNA, 19 nt, Artificial Sequence
  Description of Artificial Sequence: Synthetic oligonucleotide
  Sense strand starting at position 3840 of SEQ ID NO: 914186
acaaccguuaguugagagu

SEQ ID NO: 984663 - RNA, 19 nt, Artificial Sequence
  Description of Artificial Sequence: Synthetic oligonucleotide
  Antisense strand to SEQ ID NO: 984662
acucucaacuaacgguugu

SEQ ID NO: 984664 - RNA, 19 nt, Artificial Sequence
  Description of Artificial Sequence: Synthetic oligonucleotide
  Sense strand starting at position 3230 of SEQ ID NO: 914186
gcgcuugagacuggaaauu

SEQ ID NO: 984665 - RNA, 19 nt, Artificial Sequence
  Description of Artificial Sequence: Synthetic oligonucleotide
  Antisense strand to SEQ ID NO: 984664
aauuuccagucucaagcgc

SEQ ID NO: 984666 - RNA, 19 nt, Artificial Sequence
  Description of Artificial Sequence: Synthetic oligonucleotide
  Sense strand starting at position 726 of SEQ ID NO: 914186
gcucucuaguccuuuaaga

SEQ ID NO: 984667 - RNA, 19 nt, Artificial Sequence
  Description of Artificial Sequence: Synthetic oligonucleotide
  Antisense strand to SEQ ID NO: 984666
ucuuaaaggacuagagagc

SEQ ID NO: 984668 - RNA, 19 nt, Artificial Sequence
  Description of Artificial Sequence: Synthetic oligonucleotide
  Sense strand starting at position 3804 of SEQ ID NO: 914186
cagguacauugagagaaga

SEQ ID NO: 984669 - RNA, 19 nt, Artificial Sequence
  Description of Artificial Sequence: Synthetic oligonucleotide
  Antisense strand to SEQ ID NO: 984668
ucuucucucaauguaccug

SEQ ID NO: 984670 - RNA, 19 nt, Artificial Sequence
  Description of Artificial Sequence: Synthetic oligonucleotide
  Sense strand starting at position 1125 of SEQ ID NO: 914186
auaaauaagccucguaagu

SEQ ID NO: 984671 - RNA, 19 nt, Artificial Sequence
  Description of Artificial Sequence: Synthetic oligonucleotide
  Antisense strand to SEQ ID NO: 984670
acuuacgaggcuuauuuau

SEQ ID NO: 984672 - RNA, 19 nt, Artificial Sequence
  Description of Artificial Sequence: Synthetic oligonucleotide
  Sense strand starting at position 536 of SEQ ID NO: 914186
aucguuuagcuuuauucua

SEQ ID NO: 984673 - RNA, 19 nt, Artificial Sequence
  Description of Artificial Sequence: Synthetic oligonucleotide
  Antisense strand to SEQ ID NO: 984672
uagaauaaagcuaaacgau

SEQ ID NO: 984674 - RNA, 19 nt, Artificial Sequence
  Description of Artificial Sequence: Synthetic oligonucleotide
  Sense strand starting at position 3867 of SEQ ID NO: 914186
ucgggugauugguugacuu

SEQ ID NO: 984675 - RNA, 19 nt, Artificial Sequence
  Description of Artificial Sequence: Synthetic oligonucleotide
  Antisense strand to SEQ ID NO: 984674
aagucaaccaaucacccga

SEQ ID NO: 984676 - RNA, 19 nt, Artificial Sequence
  Description of Artificial Sequence: Synthetic oligonucleotide
  Sense strand starting at position 3981 of SEQ ID NO: 914186
guaaacaagucagaagaaa

SEQ ID NO: 984677 - RNA, 19 nt, Artificial Sequence
  Description of Artificial Sequence: Synthetic oligonucleotide
  Antisense strand to SEQ ID NO: 984676
uuucuucugacuuguuuac

SEQ ID NO: 984678 - RNA, 19 nt, Artificial Sequence
  Description of Artificial Sequence: Synthetic oligonucleotide
  Sense strand starting at position 3041 of SEQ ID NO: 914186
gcccuuuagacguaagucu

SEQ ID NO: 984679 - RNA, 19 nt, Artificial Sequence
  Description of Artificial Sequence: Synthetic oligonucleotide
  Antisense strand to SEQ ID NO: 984678
agacuuacgucuaaagggc

SEQ ID NO: 984680 - RNA, 19 nt, Artificial Sequence
  Description of Artificial Sequence: Synthetic oligonucleotide
  Sense strand starting at position 1134 of SEQ ID NO: 914186
ccucguaagucaccuauca

SEQ ID NO: 984681 - RNA, 19 nt, Artificial Sequence
  Description of Artificial Sequence: Synthetic oligonucleotide
  Antisense strand to SEQ ID NO: 984680
ugauaggugacuuacgagg

SEQ ID NO: 984682 - RNA, 19 nt, Artificial Sequence
  Description of Artificial Sequence: Synthetic oligonucleotide
  Sense strand starting at position 3750 of SEQ ID NO: 914186
aguucucagguguguuaag

SEQ ID NO: 984683 - RNA, 19 nt, Artificial Sequence
  Description of Artificial Sequence: Synthetic oligonucleotide
  Antisense strand to SEQ ID NO: 984682
cuuaacacaccugagaacu

SEQ ID NO: 984684 - RNA, 19 nt, Artificial Sequence
  Description of Artificial Sequence: Synthetic oligonucleotide
  Sense strand starting at position 1201 of SEQ ID NO: 914186
aggucuuucuggcugcaaa

SEQ ID NO: 984685 - RNA, 19 nt, Artificial Sequence
  Description of Artificial Sequence: Synthetic oligonucleotide
  Antisense strand to SEQ ID NO: 984684
uuugcagccagaaagaccu

SEQ ID NO: 984686 - RNA, 19 nt, Artificial Sequence
  Description of Artificial Sequence: Synthetic oligonucleotide
  Sense strand starting at position 3952 of SEQ ID NO: 914186
uuaggugauuaacacagaa

SEQ ID NO: 984687 - RNA, 19 nt, Artificial Sequence
  Description of Artificial Sequence: Synthetic oligonucleotide
  Antisense strand to SEQ ID NO: 984686
uucuguguuaaucaccuaa

SEQ ID NO: 984688 - RNA, 19 nt, Artificial Sequence
  Description of Artificial Sequence: Synthetic oligonucleotide
  Sense strand starting at position 2391 of SEQ ID NO: 914186
cgggaaaccucggcaguuu

SEQ ID NO: 984689 - RNA, 19 nt, Artificial Sequence
  Description of Artificial Sequence: Synthetic oligonucleotide
  Antisense strand to SEQ ID NO: 984688
aaacugccgagguuucccg

SEQ ID NO: 984690 - RNA, 19 nt, Artificial Sequence
  Description of Artificial Sequence: Synthetic oligonucleotide
  Sense strand starting at position 3363 of SEQ ID NO: 914187
auugacagugacugaaauu

SEQ ID NO: 984691 - RNA, 19 nt, Artificial Sequence
  Description of Artificial Sequence: Synthetic oligonucleotide
  Antisense strand to SEQ ID NO: 984690
aauuucagucacugucaau

SEQ ID NO: 984692 - RNA, 19 nt, Artificial Sequence
  Description of Artificial Sequence: Synthetic oligonucleotide
  Sense strand starting at position 3435 of SEQ ID NO: 914187
uagugaauccauugaagac

SEQ ID NO: 984693 - RNA, 19 nt, Artificial Sequence
  Description of Artificial Sequence: Synthetic oligonucleotide
  Antisense strand to SEQ ID NO: 984692
gucuucaauggauucacua

SEQ ID NO: 984694 - RNA, 19 nt, Artificial Sequence
  Description of Artificial Sequence: Synthetic oligonucleotide
  Sense strand starting at position 3131 of SEQ ID NO: 914187
cuugguauccaagaaguua

SEQ ID NO: 984695 - RNA, 19 nt, Artificial Sequence
  Description of Artificial Sequence: Synthetic oligonucleotide
  Antisense strand to SEQ ID NO: 984694
uaacuucuuggauaccaag

SEQ ID NO: 984696 - RNA, 19 nt, Artificial Sequence
  Description of Artificial Sequence: Synthetic oligonucleotide
  Sense strand starting at position 2350 of SEQ ID NO: 914187
agaugaguuccuugggaac

SEQ ID NO: 984697 - RNA, 19 nt, Artificial Sequence
  Description of Artificial Sequence: Synthetic oligonucleotide
  Antisense strand to SEQ ID NO: 984696
guucccaaggaacucaucu

SEQ ID NO: 984698 - RNA, 19 nt, Artificial Sequence
  Description of Artificial Sequence: Synthetic oligonucleotide
  Sense strand starting at position 3180 of SEQ ID NO: 914187
auggaaugauguagggaga

SEQ ID NO: 984699 - RNA, 19 nt, Artificial Sequence
  Description of Artificial Sequence: Synthetic oligonucleotide
  Antisense strand to SEQ ID NO: 984698
ucucccuacaucauuccau

SEQ ID NO: 984700 - RNA, 19 nt, Artificial Sequence
  Description of Artificial Sequence: Synthetic oligonucleotide
  Sense strand starting at position 3527 of SEQ ID NO: 914187
guuugauaacuagaugucu

SEQ ID NO: 984701 - RNA, 19 nt, Artificial Sequence
  Description of Artificial Sequence: Synthetic oligonucleotide
  Antisense strand to SEQ ID NO: 984700
agacaucuaguuaucaaac

SEQ ID NO: 984702 - RNA, 19 nt, Artificial Sequence
  Description of Artificial Sequence: Synthetic oligonucleotide
  Sense strand starting at position 3127 of SEQ ID NO: 914187
uuuacuugguauccaagaa

SEQ ID NO: 984703 - RNA, 19 nt, Artificial Sequence
  Description of Artificial Sequence: Synthetic oligonucleotide
  Antisense strand to SEQ ID NO: 984702
uucuuggauaccaaguaaa

SEQ ID NO: 984704 - RNA, 19 nt, Artificial Sequence
  Description of Artificial Sequence: Synthetic oligonucleotide
  Sense strand starting at position 2335 of SEQ ID NO: 914187
acuggaaauuuagggagau

SEQ ID NO: 984705 - RNA, 19 nt, Artificial Sequence
  Description of Artificial Sequence: Synthetic oligonucleotide
  Antisense strand to SEQ ID NO: 984704
aucucccuaaauuuccagu

SEQ ID NO: 984706 - RNA, 19 nt, Artificial Sequence
  Description of Artificial Sequence: Synthetic oligonucleotide
  Sense strand starting at position 3524 of SEQ ID NO: 914187
uuuguuugauaacuagaug

SEQ ID NO: 984707 - RNA, 19 nt, Artificial Sequence
  Description of Artificial Sequence: Synthetic oligonucleotide
  Antisense strand to SEQ ID NO: 984706
caucuaguuaucaaacaaa

SEQ ID NO: 984708 - RNA, 19 nt, Artificial Sequence
  Description of Artificial Sequence: Synthetic oligonucleotide
  Sense strand starting at position 130 of SEQ ID NO: 914187
aguuguaagucauuuagcu

SEQ ID NO: 984709 - RNA, 19 nt, Artificial Sequence
  Description of Artificial Sequence: Synthetic oligonucleotide
  Antisense strand to SEQ ID NO: 984708
agcuaaaugacuuacaacu

SEQ ID NO: 984710 - RNA, 19 nt, Artificial Sequence
  Description of Artificial Sequence: Synthetic oligonucleotide
  Sense strand starting at position 2336 of SEQ ID NO: 914187
cuggaaauuuagggagaug

SEQ ID NO: 984711 - RNA, 19 nt, Artificial Sequence
  Description of Artificial Sequence: Synthetic oligonucleotide
  Antisense strand to SEQ ID NO: 984710
caucucccuaaauuuccag

SEQ ID NO: 984712 - RNA, 19 nt, Artificial Sequence
  Description of Artificial Sequence: Synthetic oligonucleotide
  Sense strand starting at position 426 of SEQ ID NO: 914187
cgcggugcuaguuucagau

SEQ ID NO: 984713 - RNA, 19 nt, Artificial Sequence
  Description of Artificial Sequence: Synthetic oligonucleotide
  Antisense strand to SEQ ID NO: 984712
aucugaaacuagcaccgcg

SEQ ID NO: 984714 - RNA, 19 nt, Artificial Sequence
  Description of Artificial Sequence: Synthetic oligonucleotide
  Sense strand starting at position 2432 of SEQ ID NO: 914187
gcugucguccagucugagu

SEQ ID NO: 984715 - RNA, 19 nt, Artificial Sequence
  Description of Artificial Sequence: Synthetic oligonucleotide
  Antisense strand to SEQ ID NO: 984714
acucagacuggacgacagc

SEQ ID NO: 984716 - RNA, 19 nt, Artificial Sequence
  Description of Artificial Sequence: Synthetic oligonucleotide
  Sense strand starting at position 3149 of SEQ ID NO: 914187
acguuauugcuagaccuaa

SEQ ID NO: 984717 - RNA, 19 nt, Artificial Sequence
  Description of Artificial Sequence: Synthetic oligonucleotide
  Antisense strand to SEQ ID NO: 984716
uuaggucuagcaauaacgu

SEQ ID NO: 984718 - RNA, 19 nt, Artificial Sequence
  Description of Artificial Sequence: Synthetic oligonucleotide
  Sense strand starting at position 3533 of SEQ ID NO: 914187
uaacuagaugucugcugaa

SEQ ID NO: 984719 - RNA, 19 nt, Artificial Sequence
  Description of Artificial Sequence: Synthetic oligonucleotide
  Antisense strand to SEQ ID NO: 984718
uucagcagacaucuaguua

SEQ ID NO: 984720 - RNA, 19 nt, Artificial Sequence
  Description of Artificial Sequence: Synthetic oligonucleotide
  Sense strand starting at position 300 of SEQ ID NO: 914187
ucuuucuggcugcaaauga

SEQ ID NO: 984721 - RNA, 19 nt, Artificial Sequence
  Description of Artificial Sequence: Synthetic oligonucleotide
  Antisense strand to SEQ ID NO: 984720
ucauuugcagccagaaaga

SEQ ID NO: 984722 - RNA, 19 nt, Artificial Sequence
  Description of Artificial Sequence: Synthetic oligonucleotide
  Sense strand starting at position 3631 of SEQ ID NO: 914187
gcugaacaaucacuuuagu

SEQ ID NO: 984723 - RNA, 19 nt, Artificial Sequence
  Description of Artificial Sequence: Synthetic oligonucleotide
  Antisense strand to SEQ ID NO: 984722
acuaaagugauuguucagc

SEQ ID NO: 984724 - RNA, 19 nt, Artificial Sequence
  Description of Artificial Sequence: Synthetic oligonucleotide
  Sense strand starting at position 2839 of SEQ ID NO: 914187
augugaaaguucucaggug

SEQ ID NO: 984725 - RNA, 19 nt, Artificial Sequence
  Description of Artificial Sequence: Synthetic oligonucleotide
  Antisense strand to SEQ ID NO: 984724
caccugagaacuuucacau

SEQ ID NO: 984726 - RNA, 19 nt, Artificial Sequence
  Description of Artificial Sequence: Synthetic oligonucleotide
  Sense strand starting at position 3139 of SEQ ID NO: 914187
ccaagaaguuacguuauug

SEQ ID NO: 984727 - RNA, 19 nt, Artificial Sequence
  Description of Artificial Sequence: Synthetic oligonucleotide
  Antisense strand to SEQ ID NO: 984726
caauaacguaacuucuugg

SEQ ID NO: 984728 - RNA, 19 nt, Artificial Sequence
  Description of Artificial Sequence: Synthetic oligonucleotide
  Sense strand starting at position 368 of SEQ ID NO: 914187
gucacuaaaccuugcugga

SEQ ID NO: 984729 - RNA, 19 nt, Artificial Sequence
  Description of Artificial Sequence: Synthetic oligonucleotide
  Antisense strand to SEQ ID NO: 984728
uccagcaagguuuagugac

SEQ ID NO: 984730 - RNA, 19 nt, Artificial Sequence
  Description of Artificial Sequence: Synthetic oligonucleotide
  Sense strand starting at position 3124 of SEQ ID NO: 914187
ugauuuacuugguauccaa

SEQ ID NO: 984731 - RNA, 19 nt, Artificial Sequence
  Description of Artificial Sequence: Synthetic oligonucleotide
  Antisense strand to SEQ ID NO: 984730
uuggauaccaaguaaauca

SEQ ID NO: 984732 - RNA, 19 nt, Artificial Sequence
  Description of Artificial Sequence: Synthetic oligonucleotide
  Sense strand starting at position 3423 of SEQ ID NO: 914187
cugacauauuuguagugaa

SEQ ID NO: 984733 - RNA, 19 nt, Artificial Sequence
  Description of Artificial Sequence: Synthetic oligonucleotide
  Antisense strand to SEQ ID NO: 984732
uucacuacaaauaugucag

SEQ ID NO: 984734 - RNA, 19 nt, Artificial Sequence
  Description of Artificial Sequence: Synthetic oligonucleotide
  Sense strand starting at position 2811 of SEQ ID NO: 914187
gcugaaguccauuggugaa

SEQ ID NO: 984735 - RNA, 19 nt, Artificial Sequence
  Description of Artificial Sequence: Synthetic oligonucleotide
  Antisense strand to SEQ ID NO: 984734
uucaccaauggacuucagc

SEQ ID NO: 984736 - RNA, 19 nt, Artificial Sequence
  Description of Artificial Sequence: Synthetic oligonucleotide
  Sense strand starting at position 2957 of SEQ ID NO: 914187
ugguauucgggugauuggu

SEQ ID NO: 984737 - RNA, 19 nt, Artificial Sequence
  Description of Artificial Sequence: Synthetic oligonucleotide
  Antisense strand to SEQ ID NO: 984736
accaaucacccgaauacca

SEQ ID NO: 984738 - RNA, 19 nt, Artificial Sequence
  Description of Artificial Sequence: Synthetic oligonucleotide
  Sense strand starting at position 2853 of SEQ ID NO: 914187
agguguguuaagugaaauu

SEQ ID NO: 984739 - RNA, 19 nt, Artificial Sequence
  Description of Artificial Sequence: Synthetic oligonucleotide
  Antisense strand to SEQ ID NO: 984738
aauuucacuuaacacaccu

SEQ ID NO: 984740 - RNA, 19 nt, Artificial Sequence
  Description of Artificial Sequence: Synthetic oligonucleotide
  Sense strand starting at position 2325 of SEQ ID NO: 914187
ggcgcuugagacuggaaau

SEQ ID NO: 984741 - RNA, 19 nt, Artificial Sequence
  Description of Artificial Sequence: Synthetic oligonucleotide
  Antisense strand to SEQ ID NO: 984740
auuuccagucucaagcgcc

SEQ ID NO: 984742 - RNA, 19 nt, Artificial Sequence
  Description of Artificial Sequence: Synthetic oligonucleotide
  Sense strand starting at position 2226 of SEQ ID NO: 914187
ggguucuguguucaaggca

SEQ ID NO: 984743 - RNA, 19 nt, Artificial Sequence
  Description of Artificial Sequence: Synthetic oligonucleotide
  Antisense strand to SEQ ID NO: 984742
ugccuugaacacagaaccc

SEQ ID NO: 984744 - RNA, 19 nt, Artificial Sequence
  Description of Artificial Sequence: Synthetic oligonucleotide
  Sense strand starting at position 3450 of SEQ ID NO: 914187
agacaaacaucagaggagu

SEQ ID NO: 984745 - RNA, 19 nt, Artificial Sequence
  Description of Artificial Sequence: Synthetic oligonucleotide
  Antisense strand to SEQ ID NO: 984744
acuccucugauguuugucu

SEQ ID NO: 984746 - RNA, 19 nt, Artificial Sequence
  Description of Artificial Sequence: Synthetic oligonucleotide
  Sense strand starting at position 3542 of SEQ ID NO: 914187
gucugcugaaauugguaua

SEQ ID NO: 984747 - RNA, 19 nt, Artificial Sequence
  Description of Artificial Sequence: Synthetic oligonucleotide
  Antisense strand to SEQ ID NO: 984746
uauaccaauuucagcagac

SEQ ID NO: 984748 - RNA, 19 nt, Artificial Sequence
  Description of Artificial Sequence: Synthetic oligonucleotide
  Sense strand starting at position 2943 of SEQ ID NO: 914187
uuaguugagagugguggua

SEQ ID NO: 984749 - RNA, 19 nt, Artificial Sequence
  Description of Artificial Sequence: Synthetic oligonucleotide
  Antisense strand to SEQ ID NO: 984748
uaccaccacucucaacuaa

SEQ ID NO: 984750 - RNA, 19 nt, Artificial Sequence
  Description of Artificial Sequence: Synthetic oligonucleotide
  Sense strand starting at position 2936 of SEQ ID NO: 914187
acaaccguuaguugagagu

SEQ ID NO: 984751 - RNA, 19 nt, Artificial Sequence
  Description of Artificial Sequence: Synthetic oligonucleotide
  Antisense strand to SEQ ID NO: 984750
acucucaacuaacgguugu

SEQ ID NO: 984752 - RNA, 19 nt, Artificial Sequence
  Description of Artificial Sequence: Synthetic oligonucleotide
  Sense strand starting at position 121 of SEQ ID NO: 914187
cgacuugaaaguuguaagu

SEQ ID NO: 984753 - RNA, 19 nt, Artificial Sequence
  Description of Artificial Sequence: Synthetic oligonucleotide
  Antisense strand to SEQ ID NO: 984752
acuuacaacuuucaagucg

SEQ ID NO: 984754 - RNA, 19 nt, Artificial Sequence
  Description of Artificial Sequence: Synthetic oligonucleotide
  Sense strand starting at position 2326 of SEQ ID NO: 914187
gcgcuugagacuggaaauu

SEQ ID NO: 984755 - RNA, 19 nt, Artificial Sequence
  Description of Artificial Sequence: Synthetic oligonucleotide
  Antisense strand to SEQ ID NO: 984754
aauuuccagucucaagcgc

SEQ ID NO: 984756 - RNA, 19 nt, Artificial Sequence
  Description of Artificial Sequence: Synthetic oligonucleotide
  Sense strand starting at position 2900 of SEQ ID NO: 914187
cagguacauugagagaaga

SEQ ID NO: 984757 - RNA, 19 nt, Artificial Sequence
  Description of Artificial Sequence: Synthetic oligonucleotide
  Antisense strand to SEQ ID NO: 984756
ucuucucucaauguaccug

SEQ ID NO: 984758 - RNA, 19 nt, Artificial Sequence
  Description of Artificial Sequence: Synthetic oligonucleotide
  Sense strand starting at position 221 of SEQ ID NO: 914187
auaaauaagccucguaagu

SEQ ID NO: 984759 - RNA, 19 nt, Artificial Sequence
  Description of Artificial Sequence: Synthetic oligonucleotide
  Antisense strand to SEQ ID NO: 984758
acuuacgaggcuuauuuau

SEQ ID NO: 984760 - RNA, 19 nt, Artificial Sequence
  Description of Artificial Sequence: Synthetic oligonucleotide
  Sense strand starting at position 2963 of SEQ ID NO: 914187
ucgggugauugguugacuu

SEQ ID NO: 984761 - RNA, 19 nt, Artificial Sequence
  Description of Artificial Sequence: Synthetic oligonucleotide
  Antisense strand to SEQ ID NO: 984760
aagucaaccaaucacccga

SEQ ID NO: 984762 - RNA, 19 nt, Artificial Sequence
  Description of Artificial Sequence: Synthetic oligonucleotide
  Sense strand starting at position 3077 of SEQ ID NO: 914187
guaaacaagucagaagaaa

SEQ ID NO: 984763 - RNA, 19 nt, Artificial Sequence
  Description of Artificial Sequence: Synthetic oligonucleotide
  Antisense strand to SEQ ID NO: 984762
uuucuucugacuuguuuac

SEQ ID NO: 984764 - RNA, 19 nt, Artificial Sequence
  Description of Artificial Sequence: Synthetic oligonucleotide
  Sense strand starting at position 2137 of SEQ ID NO: 914187
gcccuuuagacguaagucu

SEQ ID NO: 984765 - RNA, 19 nt, Artificial Sequence
  Description of Artificial Sequence: Synthetic oligonucleotide
  Antisense strand to SEQ ID NO: 984764
agacuuacgucuaaagggc

SEQ ID NO: 984766 - RNA, 19 nt, Artificial Sequence
  Description of Artificial Sequence: Synthetic oligonucleotide
  Sense strand starting at position 230 of SEQ ID NO: 914187
ccucguaagucaccuauca

SEQ ID NO: 984767 - RNA, 19 nt, Artificial Sequence
  Description of Artificial Sequence: Synthetic oligonucleotide
  Antisense strand to SEQ ID NO: 984766
ugauaggugacuuacgagg

SEQ ID NO: 984768 - RNA, 19 nt, Artificial Sequence
  Description of Artificial Sequence: Synthetic oligonucleotide
  Sense strand starting at position 2846 of SEQ ID NO: 914187
aguucucagguguguuaag

SEQ ID NO: 984769 - RNA, 19 nt, Artificial Sequence
  Description of Artificial Sequence: Synthetic oligonucleotide
  Antisense strand to SEQ ID NO: 984768
cuuaacacaccugagaacu

SEQ ID NO: 984770 - RNA, 19 nt, Artificial Sequence
  Description of Artificial Sequence: Synthetic oligonucleotide
  Sense strand starting at position 590 of SEQ ID NO: 914188
gaaauaacgucagcgauuu

SEQ ID NO: 984771 - RNA, 19 nt, Artificial Sequence
  Description of Artificial Sequence: Synthetic oligonucleotide
  Antisense strand to SEQ ID NO: 984770
aaaucgcugacguuauuuc

SEQ ID NO: 984772 - RNA, 19 nt, Artificial Sequence
  Description of Artificial Sequence: Synthetic oligonucleotide
  Sense strand starting at position 2622 of SEQ ID NO: 914188
gaugguauugagcaauuau

SEQ ID NO: 984773 - RNA, 19 nt, Artificial Sequence
  Description of Artificial Sequence: Synthetic oligonucleotide
  Antisense strand to SEQ ID NO: 984772
auaauugcucaauaccauc

SEQ ID NO: 984774 - RNA, 19 nt, Artificial Sequence
  Description of Artificial Sequence: Synthetic oligonucleotide
  Sense strand starting at position 3776 of SEQ ID NO: 914188
accaaaggauaugucuauu

SEQ ID NO: 984775 - RNA, 19 nt, Artificial Sequence
  Description of Artificial Sequence: Synthetic oligonucleotide
  Antisense strand to SEQ ID NO: 984774
aauagacauauccuuuggu

SEQ ID NO: 984776 - RNA, 19 nt, Artificial Sequence
  Description of Artificial Sequence: Synthetic oligonucleotide
  Sense strand starting at position 2619 of SEQ ID NO: 914188
uuggaugguauugagcaau

SEQ ID NO: 984777 - RNA, 19 nt, Artificial Sequence
  Description of Artificial Sequence: Synthetic oligonucleotide
  Antisense strand to SEQ ID NO: 984776
auugcucaauaccauccaa

SEQ ID NO: 984778 - RNA, 19 nt, Artificial Sequence
  Description of Artificial Sequence: Synthetic oligonucleotide
  Sense strand starting at position 3663 of SEQ ID NO: 914188
ugguaauuaaaggguaauu

SEQ ID NO: 984779 - RNA, 19 nt, Artificial Sequence
  Description of Artificial Sequence: Synthetic oligonucleotide
  Antisense strand to SEQ ID NO: 984778
aauuacccuuuaauuacca

SEQ ID NO: 984780 - RNA, 19 nt, Artificial Sequence
  Description of Artificial Sequence: Synthetic oligonucleotide
  Sense strand starting at position 3662 of SEQ ID NO: 914188
gugguaauuaaaggguaau

SEQ ID NO: 984781 - RNA, 19 nt, Artificial Sequence
  Description of Artificial Sequence: Synthetic oligonucleotide
  Antisense strand to SEQ ID NO: 984780
auuacccuuuaauuaccac

SEQ ID NO: 984782 - RNA, 19 nt, Artificial Sequence
  Description of Artificial Sequence: Synthetic oligonucleotide
  Sense strand starting at position 751 of SEQ ID NO: 914188
uugcaauggcauuaucuaa

SEQ ID NO: 984783 - RNA, 19 nt, Artificial Sequence
  Description of Artificial Sequence: Synthetic oligonucleotide
  Antisense strand to SEQ ID NO: 984782
uuagauaaugccauugcaa

SEQ ID NO: 984784 - RNA, 19 nt, Artificial Sequence
  Description of Artificial Sequence: Synthetic oligonucleotide
  Sense strand starting at position 3904 of SEQ ID NO: 914188
gguuguguuaaguaaugaa

SEQ ID NO: 984785 - RNA, 19 nt, Artificial Sequence
  Description of Artificial Sequence: Synthetic oligonucleotide
  Antisense strand to SEQ ID NO: 984784
uucauuacuuaacacaacc

SEQ ID NO: 984786 - RNA, 19 nt, Artificial Sequence
  Description of Artificial Sequence: Synthetic oligonucleotide
  Sense strand starting at position 80 of SEQ ID NO: 914188
agacuugaguuccuuuaug

SEQ ID NO: 984787 - RNA, 19 nt, Artificial Sequence
  Description of Artificial Sequence: Synthetic oligonucleotide
  Antisense strand to SEQ ID NO: 984786
cauaaaggaacucaagucu

SEQ ID NO: 984788 - RNA, 19 nt, Artificial Sequence
  Description of Artificial Sequence: Synthetic oligonucleotide
  Sense strand starting at position 3336 of SEQ ID NO: 914188
agaggaauuuaagguggau

SEQ ID NO: 984789 - RNA, 19 nt, Artificial Sequence
  Description of Artificial Sequence: Synthetic oligonucleotide
  Antisense strand to SEQ ID NO: 984788
auccaccuuaaauuccucu

SEQ ID NO: 984790 - RNA, 19 nt, Artificial Sequence
  Description of Artificial Sequence: Synthetic oligonucleotide
  Sense strand starting at position 588 of SEQ ID NO: 914188
augaaauaacgucagcgau

SEQ ID NO: 984791 - RNA, 19 nt, Artificial Sequence
  Description of Artificial Sequence: Synthetic oligonucleotide
  Antisense strand to SEQ ID NO: 984790
aucgcugacguuauuucau

SEQ ID NO: 984792 - RNA, 19 nt, Artificial Sequence
  Description of Artificial Sequence: Synthetic oligonucleotide
  Sense strand starting at position 3466 of SEQ ID NO: 914188
ucuucuguaguuuauauga

SEQ ID NO: 984793 - RNA, 19 nt, Artificial Sequence
  Description of Artificial Sequence: Synthetic oligonucleotide
  Antisense strand to SEQ ID NO: 984792
ucauauaaacuacagaaga

SEQ ID NO: 984794 - RNA, 19 nt, Artificial Sequence
  Description of Artificial Sequence: Synthetic oligonucleotide
  Sense strand starting at position 3852 of SEQ ID NO: 914188
aguggaagggcuuauuguu

SEQ ID NO: 984795 - RNA, 19 nt, Artificial Sequence
  Description of Artificial Sequence: Synthetic oligonucleotide
  Antisense strand to SEQ ID NO: 984794
aacaauaagcccuuccacu

SEQ ID NO: 984796 - RNA, 19 nt, Artificial Sequence
  Description of Artificial Sequence: Synthetic oligonucleotide
  Sense strand starting at position 965 of SEQ ID NO: 914188
agaagugcgcugugauuua

SEQ ID NO: 984797 - RNA, 19 nt, Artificial Sequence
  Description of Artificial Sequence: Synthetic oligonucleotide
  Antisense strand to SEQ ID NO: 984796
uaaaucacagcgcacuucu

SEQ ID NO: 984798 - RNA, 19 nt, Artificial Sequence
  Description of Artificial Sequence: Synthetic oligonucleotide
  Sense strand starting at position 3916 of SEQ ID NO: 914188
uaaugaaacuuaguagugu

SEQ ID NO: 984799 - RNA, 19 nt, Artificial Sequence
  Description of Artificial Sequence: Synthetic oligonucleotide
  Antisense strand to SEQ ID NO: 984798
acacuacuaaguuucauua

SEQ ID NO: 984800 - RNA, 19 nt, Artificial Sequence
  Description of Artificial Sequence: Synthetic oligonucleotide
  Sense strand starting at position 769 of SEQ ID NO: 914188
agcguaaagcacuacagau

SEQ ID NO: 984801 - RNA, 19 nt, Artificial Sequence
  Description of Artificial Sequence: Synthetic oligonucleotide
  Antisense strand to SEQ ID NO: 984800
aucuguagugcuuuacgcu

SEQ ID NO: 984802 - RNA, 19 nt, Artificial Sequence
  Description of Artificial Sequence: Synthetic oligonucleotide
  Sense strand starting at position 2851 of SEQ ID NO: 914188
ucuuuacuuguguaucuga

SEQ ID NO: 984803 - RNA, 19 nt, Artificial Sequence
  Description of Artificial Sequence: Synthetic oligonucleotide
  Antisense strand to SEQ ID NO: 984802
ucagauacacaaguaaaga

SEQ ID NO: 984804 - RNA, 19 nt, Artificial Sequence
  Description of Artificial Sequence: Synthetic oligonucleotide
  Sense strand starting at position 761 of SEQ ID NO: 914188
auuaucuaagcguaaagca

SEQ ID NO: 984805 - RNA, 19 nt, Artificial Sequence
  Description of Artificial Sequence: Synthetic oligonucleotide
  Antisense strand to SEQ ID NO: 984804
ugcuuuacgcuuagauaau

SEQ ID NO: 984806 - RNA, 19 nt, Artificial Sequence
  Description of Artificial Sequence: Synthetic oligonucleotide
  Sense strand starting at position 2827 of SEQ ID NO: 914188
agcauaugugcucaucaua

SEQ ID NO: 984807 - RNA, 19 nt, Artificial Sequence
  Description of Artificial Sequence: Synthetic oligonucleotide
  Antisense strand to SEQ ID NO: 984806
uaugaugagcacauaugcu

SEQ ID NO: 984808 - RNA, 19 nt, Artificial Sequence
  Description of Artificial Sequence: Synthetic oligonucleotide
  Sense strand starting at position 3595 of SEQ ID NO: 914188
guuuaaagaucuucuggca

SEQ ID NO: 984809 - RNA, 19 nt, Artificial Sequence
  Description of Artificial Sequence: Synthetic oligonucleotide
  Antisense strand to SEQ ID NO: 984808
ugccagaagaucuuuaaac

SEQ ID NO: 984810 - RNA, 19 nt, Artificial Sequence
  Description of Artificial Sequence: Synthetic oligonucleotide
  Sense strand starting at position 3858 of SEQ ID NO: 914188
agggcuuauuguuuagacu

SEQ ID NO: 984811 - RNA, 19 nt, Artificial Sequence
  Description of Artificial Sequence: Synthetic oligonucleotide
  Antisense strand to SEQ ID NO: 984810
agucuaaacaauaagcccu

SEQ ID NO: 984812 - RNA, 19 nt, Artificial Sequence
  Description of Artificial Sequence: Synthetic oligonucleotide
  Sense strand starting at position 1712 of SEQ ID NO: 914188
cucugcuuucgguaaauag

SEQ ID NO: 984813 - RNA, 19 nt, Artificial Sequence
  Description of Artificial Sequence: Synthetic oligonucleotide
  Antisense strand to SEQ ID NO: 984812
cuauuuaccgaaagcagag

SEQ ID NO: 984814 - RNA, 19 nt, Artificial Sequence
  Description of Artificial Sequence: Synthetic oligonucleotide
  Sense strand starting at position 3733 of SEQ ID NO: 914188
auugcaagaucuuccugua

SEQ ID NO: 984815 - RNA, 19 nt, Artificial Sequence
  Description of Artificial Sequence: Synthetic oligonucleotide
  Antisense strand to SEQ ID NO: 984814
uacaggaagaucuugcaau

SEQ ID NO: 984816 - RNA, 19 nt, Artificial Sequence
  Description of Artificial Sequence: Synthetic oligonucleotide
  Sense strand starting at position 802 of SEQ ID NO: 914188
gcagacguccuugaaguua

SEQ ID NO: 984817 - RNA, 19 nt, Artificial Sequence
  Description of Artificial Sequence: Synthetic oligonucleotide
  Antisense strand to SEQ ID NO: 984816
uaacuucaaggacgucugc

SEQ ID NO: 984818 - RNA, 19 nt, Artificial Sequence
  Description of Artificial Sequence: Synthetic oligonucleotide
  Sense strand starting at position 2815 of SEQ ID NO: 914188
cugcgugaugcgagcauau

SEQ ID NO: 984819 - RNA, 19 nt, Artificial Sequence
  Description of Artificial Sequence: Synthetic oligonucleotide
  Antisense strand to SEQ ID NO: 984818
auaugcucgcaucacgcag

SEQ ID NO: 984820 - RNA, 19 nt, Artificial Sequence
  Description of Artificial Sequence: Synthetic oligonucleotide
  Sense strand starting at position 651 of SEQ ID NO: 914188
guuuaauagucacugcuaa

SEQ ID NO: 984821 - RNA, 19 nt, Artificial Sequence
  Description of Artificial Sequence: Synthetic oligonucleotide
  Antisense strand to SEQ ID NO: 984820
uuagcagugacuauuaaac

SEQ ID NO: 984822 - RNA, 19 nt, Artificial Sequence
  Description of Artificial Sequence: Synthetic oligonucleotide
  Sense strand starting at position 2856 of SEQ ID NO: 914188
acuuguguaucugaaauuu

SEQ ID NO: 984823 - RNA, 19 nt, Artificial Sequence
  Description of Artificial Sequence: Synthetic oligonucleotide
  Antisense strand to SEQ ID NO: 984822
aaauuucagauacacaagu

SEQ ID NO: 984824 - RNA, 19 nt, Artificial Sequence
  Description of Artificial Sequence: Synthetic oligonucleotide
  Sense strand starting at position 1905 of SEQ ID NO: 914188
gugaauggucagugcugga

SEQ ID NO: 984825 - RNA, 19 nt, Artificial Sequence
  Description of Artificial Sequence: Synthetic oligonucleotide
  Antisense strand to SEQ ID NO: 984824
uccagcacugaccauucac

SEQ ID NO: 984826 - RNA, 19 nt, Artificial Sequence
  Description of Artificial Sequence: Synthetic oligonucleotide
  Sense strand starting at position 2665 of SEQ ID NO: 914188
cgguaaugugguuaugguu

SEQ ID NO: 984827 - RNA, 19 nt, Artificial Sequence
  Description of Artificial Sequence: Synthetic oligonucleotide
  Antisense strand to SEQ ID NO: 984826
aaccauaaccacauuaccg

SEQ ID NO: 984828 - RNA, 19 nt, Artificial Sequence
  Description of Artificial Sequence: Synthetic oligonucleotide
  Sense strand starting at position 3464 of SEQ ID NO: 914188
cuucuucuguaguuuauau

SEQ ID NO: 984829 - RNA, 19 nt, Artificial Sequence
  Description of Artificial Sequence: Synthetic oligonucleotide
  Antisense strand to SEQ ID NO: 984828
auauaaacuacagaagaag

SEQ ID NO: 984830 - RNA, 19 nt, Artificial Sequence
  Description of Artificial Sequence: Synthetic oligonucleotide
  Sense strand starting at position 3460 of SEQ ID NO: 914188
ucaacuucuucuguaguuu

SEQ ID NO: 984831 - RNA, 19 nt, Artificial Sequence
  Description of Artificial Sequence: Synthetic oligonucleotide
  Antisense strand to SEQ ID NO: 984830
aaacuacagaagaaguuga

SEQ ID NO: 984832 - RNA, 19 nt, Artificial Sequence
  Description of Artificial Sequence: Synthetic oligonucleotide
  Sense strand starting at position 758 of SEQ ID NO: 914188
ggcauuaucuaagcguaaa

SEQ ID NO: 984833 - RNA, 19 nt, Artificial Sequence
  Description of Artificial Sequence: Synthetic oligonucleotide
  Antisense strand to SEQ ID NO: 984832
uuuacgcuuagauaaugcc

SEQ ID NO: 984834 - RNA, 19 nt, Artificial Sequence
  Description of Artificial Sequence: Synthetic oligonucleotide
  Sense strand starting at position 2826 of SEQ ID NO: 914188
gagcauaugugcucaucau

SEQ ID NO: 984835 - RNA, 19 nt, Artificial Sequence
  Description of Artificial Sequence: Synthetic oligonucleotide
  Antisense strand to SEQ ID NO: 984834
augaugagcacauaugcuc

SEQ ID NO: 984836 - RNA, 19 nt, Artificial Sequence
  Description of Artificial Sequence: Synthetic oligonucleotide
  Sense strand starting at position 759 of SEQ ID NO: 914188
gcauuaucuaagcguaaag

SEQ ID NO: 984837 - RNA, 19 nt, Artificial Sequence
  Description of Artificial Sequence: Synthetic oligonucleotide
  Antisense strand to SEQ ID NO: 984836
cuuuacgcuuagauaaugc

SEQ ID NO: 984838 - RNA, 19 nt, Artificial Sequence
  Description of Artificial Sequence: Synthetic oligonucleotide
  Sense strand starting at position 3672 of SEQ ID NO: 914188
aaggguaauuaucaucaga

SEQ ID NO: 984839 - RNA, 19 nt, Artificial Sequence
  Description of Artificial Sequence: Synthetic oligonucleotide
  Antisense strand to SEQ ID NO: 984838
ucugaugauaauuacccuu

SEQ ID NO: 984840 - RNA, 19 nt, Artificial Sequence
  Description of Artificial Sequence: Synthetic oligonucleotide
  Sense strand starting at position 714 of SEQ ID NO: 914188
ccugauugccuuuaucguu

SEQ ID NO: 984841 - RNA, 19 nt, Artificial Sequence
  Description of Artificial Sequence: Synthetic oligonucleotide
  Antisense strand to SEQ ID NO: 984840
aacgauaaaggcaaucagg

SEQ ID NO: 984842 - RNA, 19 nt, Artificial Sequence
  Description of Artificial Sequence: Synthetic oligonucleotide
  Sense strand starting at position 2645 of SEQ ID NO: 914188
aacuuuguuggguguggua

SEQ ID NO: 984843 - RNA, 19 nt, Artificial Sequence
  Description of Artificial Sequence: Synthetic oligonucleotide
  Antisense strand to SEQ ID NO: 984842
uaccacacccaacaaaguu

SEQ ID NO: 984844 - RNA, 19 nt, Artificial Sequence
  Description of Artificial Sequence: Synthetic oligonucleotide
  Sense strand starting at position 2846 of SEQ ID NO: 914188
cagucucuuuacuugugua

SEQ ID NO: 984845 - RNA, 19 nt, Artificial Sequence
  Description of Artificial Sequence: Synthetic oligonucleotide
  Antisense strand to SEQ ID NO: 984844
uacacaaguaaagagacug

SEQ ID NO: 984846 - RNA, 19 nt, Artificial Sequence
  Description of Artificial Sequence: Synthetic oligonucleotide
  Sense strand starting at position 2664 of SEQ ID NO: 914188
acgguaaugugguuauggu

SEQ ID NO: 984847 - RNA, 19 nt, Artificial Sequence
  Description of Artificial Sequence: Synthetic oligonucleotide
  Antisense strand to SEQ ID NO: 984846
accauaaccacauuaccgu

SEQ ID NO: 984848 - RNA, 19 nt, Artificial Sequence
  Description of Artificial Sequence: Synthetic oligonucleotide
  Sense strand starting at position 3895 of SEQ ID NO: 914188
uuaugugaugguuguguua

SEQ ID NO: 984849 - RNA, 19 nt, Artificial Sequence
  Description of Artificial Sequence: Synthetic oligonucleotide
  Antisense strand to SEQ ID NO: 984848
uaacacaaccaucacauaa

SEQ ID NO: 984850 - RNA, 19 nt, Artificial Sequence
  Description of Artificial Sequence: Synthetic oligonucleotide
  Sense strand starting at position 2349 of SEQ ID NO: 914189
gaguguggcggaaguacua

SEQ ID NO: 984851 - RNA, 19 nt, Artificial Sequence
  Description of Artificial Sequence: Synthetic oligonucleotide
  Antisense strand to SEQ ID NO: 984850
uaguacuuccgccacacuc

SEQ ID NO: 984852 - RNA, 19 nt, Artificial Sequence
  Description of Artificial Sequence: Synthetic oligonucleotide
  Sense strand starting at position 61 of SEQ ID NO: 914189
uccugagggcuauaacauu

SEQ ID NO: 984853 - RNA, 19 nt, Artificial Sequence
  Description of Artificial Sequence: Synthetic oligonucleotide
  Antisense strand to SEQ ID NO: 984852
aauguuauagcccucagga

SEQ ID NO: 984854 - RNA, 19 nt, Artificial Sequence
  Description of Artificial Sequence: Synthetic oligonucleotide
  Sense strand starting at position 284 of SEQ ID NO: 914189
uaaauugugguuuacagau

SEQ ID NO: 984855 - RNA, 19 nt, Artificial Sequence
  Description of Artificial Sequence: Synthetic oligonucleotide
  Antisense strand to SEQ ID NO: 984854
aucuguaaaccacaauuua

SEQ ID NO: 984856 - RNA, 19 nt, Artificial Sequence
  Description of Artificial Sequence: Synthetic oligonucleotide
  Sense strand starting at position 2592 of SEQ ID NO: 914189
agaagauaguaccuuuauc

SEQ ID NO: 984857 - RNA, 19 nt, Artificial Sequence
  Description of Artificial Sequence: Synthetic oligonucleotide
  Antisense strand to SEQ ID NO: 984856
gauaaagguacuaucuucu

SEQ ID NO: 984858 - RNA, 19 nt, Artificial Sequence
  Description of Artificial Sequence: Synthetic oligonucleotide
  Sense strand starting at position 59 of SEQ ID NO: 914189
gguccugagggcuauaaca

SEQ ID NO: 984859 - RNA, 19 nt, Artificial Sequence
  Description of Artificial Sequence: Synthetic oligonucleotide
  Antisense strand to SEQ ID NO: 984858
uguuauagcccucaggacc

SEQ ID NO: 984860 - RNA, 19 nt, Artificial Sequence
  Description of Artificial Sequence: Synthetic oligonucleotide
  Sense strand starting at position 357 of SEQ ID NO: 914189
guggaugggccuuauaaac

SEQ ID NO: 984861 - RNA, 19 nt, Artificial Sequence
  Description of Artificial Sequence: Synthetic oligonucleotide
  Antisense strand to SEQ ID NO: 984860
guuuauaaggcccauccac

SEQ ID NO: 984862 - RNA, 19 nt, Artificial Sequence
  Description of Artificial Sequence: Synthetic oligonucleotide
  Sense strand starting at position 419 of SEQ ID NO: 914189
uaggaucccguuuauauaa

SEQ ID NO: 984863 - RNA, 19 nt, Artificial Sequence
  Description of Artificial Sequence: Synthetic oligonucleotide
  Antisense strand to SEQ ID NO: 984862
uuauauaaacgggauccua

SEQ ID NO: 984864 - RNA, 19 nt, Artificial Sequence
  Description of Artificial Sequence: Synthetic oligonucleotide
  Sense strand starting at position 309 of SEQ ID NO: 914189
auguuacuuggucaugaac

SEQ ID NO: 984865 - RNA, 19 nt, Artificial Sequence
  Description of Artificial Sequence: Synthetic oligonucleotide
  Antisense strand to SEQ ID NO: 984864
guucaugaccaaguaacau

SEQ ID NO: 984866 - RNA, 19 nt, Artificial Sequence
  Description of Artificial Sequence: Synthetic oligonucleotide
  Sense strand starting at position 3171 of SEQ ID NO: 914189
ucaaccagagcuugaucaa

SEQ ID NO: 984867 - RNA, 19 nt, Artificial Sequence
  Description of Artificial Sequence: Synthetic oligonucleotide
  Antisense strand to SEQ ID NO: 984866
uugaucaagcucugguuga

SEQ ID NO: 984868 - RNA, 19 nt, Artificial Sequence
  Description of Artificial Sequence: Synthetic oligonucleotide
  Sense strand starting at position 282 of SEQ ID NO: 914189
aauaaauugugguuuacag

SEQ ID NO: 984869 - RNA, 19 nt, Artificial Sequence
  Description of Artificial Sequence: Synthetic oligonucleotide
  Antisense strand to SEQ ID NO: 984868
cuguaaaccacaauuuauu

SEQ ID NO: 984870 - RNA, 19 nt, Artificial Sequence
  Description of Artificial Sequence: Synthetic oligonucleotide
  Sense strand starting at position 510 of SEQ ID NO: 914189
gacagagaguaacugcuua

SEQ ID NO: 984871 - RNA, 19 nt, Artificial Sequence
  Description of Artificial Sequence: Synthetic oligonucleotide
  Antisense strand to SEQ ID NO: 984870
uaagcaguuacucucuguc

SEQ ID NO: 984872 - RNA, 19 nt, Artificial Sequence
  Description of Artificial Sequence: Synthetic oligonucleotide
  Sense strand starting at position 2128 of SEQ ID NO: 914189
uuguccauugaucaaugua

SEQ ID NO: 984873 - RNA, 19 nt, Artificial Sequence
  Description of Artificial Sequence: Synthetic oligonucleotide
  Antisense strand to SEQ ID NO: 984872
uacauugaucaauggacaa

SEQ ID NO: 984874 - RNA, 19 nt, Artificial Sequence
  Description of Artificial Sequence: Synthetic oligonucleotide
  Sense strand starting at position 304 of SEQ ID NO: 914189
acagaauguuacuugguca

SEQ ID NO: 984875 - RNA, 19 nt, Artificial Sequence
  Description of Artificial Sequence: Synthetic oligonucleotide
  Antisense strand to SEQ ID NO: 984874
ugaccaaguaacauucugu

SEQ ID NO: 984876 - RNA, 19 nt, Artificial Sequence
  Description of Artificial Sequence: Synthetic oligonucleotide
  Sense strand starting at position 308 of SEQ ID NO: 914189
aauguuacuuggucaugaa

SEQ ID NO: 984877 - RNA, 19 nt, Artificial Sequence
  Description of Artificial Sequence: Synthetic oligonucleotide
  Antisense strand to SEQ ID NO: 984876
uucaugaccaaguaacauu

SEQ ID NO: 984878 - RNA, 19 nt, Artificial Sequence
  Description of Artificial Sequence: Synthetic oligonucleotide
  Sense strand starting at position 307 of SEQ ID NO: 914189
gaauguuacuuggucauga

SEQ ID NO: 984879 - RNA, 19 nt, Artificial Sequence
  Description of Artificial Sequence: Synthetic oligonucleotide
  Antisense strand to SEQ ID NO: 984878
ucaugaccaaguaacauuc

SEQ ID NO: 984880 - RNA, 19 nt, Artificial Sequence
  Description of Artificial Sequence: Synthetic oligonucleotide
  Sense strand starting at position 3174 of SEQ ID NO: 914189
accagagcuugaucaaugu

SEQ ID NO: 984881 - RNA, 19 nt, Artificial Sequence
  Description of Artificial Sequence: Synthetic oligonucleotide
  Antisense strand to SEQ ID NO: 984880
acauugaucaagcucuggu

SEQ ID NO: 984882 - RNA, 19 nt, Artificial Sequence
  Description of Artificial Sequence: Synthetic oligonucleotide
  Sense strand starting at position 2141 of SEQ ID NO: 914189
aauguagcugucgaucaaa

SEQ ID NO: 984883 - RNA, 19 nt, Artificial Sequence
  Description of Artificial Sequence: Synthetic oligonucleotide
  Antisense strand to SEQ ID NO: 984882
uuugaucgacagcuacauu

SEQ ID NO: 984884 - RNA, 19 nt, Artificial Sequence
  Description of Artificial Sequence: Synthetic oligonucleotide
  Sense strand starting at position 1656 of SEQ ID NO: 914189
acaggugucccucagcuaa

SEQ ID NO: 984885 - RNA, 19 nt, Artificial Sequence
  Description of Artificial Sequence: Synthetic oligonucleotide
  Antisense strand to SEQ ID NO: 984884
uuagcugagggacaccugu

SEQ ID NO: 984886 - RNA, 19 nt, Artificial Sequence
  Description of Artificial Sequence: Synthetic oligonucleotide
  Sense strand starting at position 2402 of SEQ ID NO: 914189
gguuuaauguuucucaagg

SEQ ID NO: 984887 - RNA, 19 nt, Artificial Sequence
  Description of Artificial Sequence: Synthetic oligonucleotide
  Antisense strand to SEQ ID NO: 984886
ccuugagaaacauuaaacc

SEQ ID NO: 984888 - RNA, 19 nt, Artificial Sequence
  Description of Artificial Sequence: Synthetic oligonucleotide
  Sense strand starting at position 514 of SEQ ID NO: 914189
gagaguaacugcuuaguag

SEQ ID NO: 984889 - RNA, 19 nt, Artificial Sequence
  Description of Artificial Sequence: Synthetic oligonucleotide
  Antisense strand to SEQ ID NO: 984888
cuacuaagcaguuacucuc

SEQ ID NO: 984890 - RNA, 19 nt, Artificial Sequence
  Description of Artificial Sequence: Synthetic oligonucleotide
  Sense strand starting at position 2547 of SEQ ID NO: 914189
ggucucaacugcccaaaua

SEQ ID NO: 984891 - RNA, 19 nt, Artificial Sequence
  Description of Artificial Sequence: Synthetic oligonucleotide
  Antisense strand to SEQ ID NO: 984890
uauuugggcaguugagacc

SEQ ID NO: 984892 - RNA, 19 nt, Artificial Sequence
  Description of Artificial Sequence: Synthetic oligonucleotide
  Sense strand starting at position 2577 of SEQ ID NO: 914189
ccguuugaauucccuagaa

SEQ ID NO: 984893 - RNA, 19 nt, Artificial Sequence
  Description of Artificial Sequence: Synthetic oligonucleotide
  Antisense strand to SEQ ID NO: 984892
uucuagggaauucaaacgg

SEQ ID NO: 984894 - RNA, 19 nt, Artificial Sequence
  Description of Artificial Sequence: Synthetic oligonucleotide
  Sense strand starting at position 56 of SEQ ID NO: 914189
acugguccugagggcuaua

SEQ ID NO: 984895 - RNA, 19 nt, Artificial Sequence
  Description of Artificial Sequence: Synthetic oligonucleotide
  Antisense strand to SEQ ID NO: 984894
uauagcccucaggaccagu

SEQ ID NO: 984896 - RNA, 19 nt, Artificial Sequence
  Description of Artificial Sequence: Synthetic oligonucleotide
  Sense strand starting at position 1365 of SEQ ID NO: 914189
cuaagaugcccucggaacu

SEQ ID NO: 984897 - RNA, 19 nt, Artificial Sequence
  Description of Artificial Sequence: Synthetic oligonucleotide
  Antisense strand to SEQ ID NO: 984896
aguuccgagggcaucuuag

SEQ ID NO: 984898 - RNA, 19 nt, Artificial Sequence
  Description of Artificial Sequence: Synthetic oligonucleotide
  Sense strand starting at position 1366 of SEQ ID NO: 914189
uaagaugcccucggaacuu

SEQ ID NO: 984899 - RNA, 19 nt, Artificial Sequence
  Description of Artificial Sequence: Synthetic oligonucleotide
  Antisense strand to SEQ ID NO: 984898
aaguuccgagggcaucuua

SEQ ID NO: 984900 - RNA, 19 nt, Artificial Sequence
  Description of Artificial Sequence: Synthetic oligonucleotide
  Sense strand starting at position 2144 of SEQ ID NO: 914189
guagcugucgaucaaauau

SEQ ID NO: 984901 - RNA, 19 nt, Artificial Sequence
  Description of Artificial Sequence: Synthetic oligonucleotide
  Antisense strand to SEQ ID NO: 984900
auauuugaucgacagcuac

SEQ ID NO: 984902 - RNA, 19 nt, Artificial Sequence
  Description of Artificial Sequence: Synthetic oligonucleotide
  Sense strand starting at position 30 of SEQ ID NO: 914189
uguugucaauaccuauacu

SEQ ID NO: 984903 - RNA, 19 nt, Artificial Sequence
  Description of Artificial Sequence: Synthetic oligonucleotide
  Antisense strand to SEQ ID NO: 984902
aguauagguauugacaaca

SEQ ID NO: 984904 - RNA, 19 nt, Artificial Sequence
  Description of Artificial Sequence: Synthetic oligonucleotide
  Sense strand starting at position 3011 of SEQ ID NO: 914189
agauacaguucccugcuua

SEQ ID NO: 984905 - RNA, 19 nt, Artificial Sequence
  Description of Artificial Sequence: Synthetic oligonucleotide
  Antisense strand to SEQ ID NO: 984904
uaagcagggaacuguaucu

SEQ ID NO: 984906 - RNA, 19 nt, Artificial Sequence
  Description of Artificial Sequence: Synthetic oligonucleotide
  Sense strand starting at position 114 of SEQ ID NO: 914189
guuuaugauuuccacugga

SEQ ID NO: 984907 - RNA, 19 nt, Artificial Sequence
  Description of Artificial Sequence: Synthetic oligonucleotide
  Antisense strand to SEQ ID NO: 984906
uccaguggaaaucauaaac

SEQ ID NO: 984908 - RNA, 19 nt, Artificial Sequence
  Description of Artificial Sequence: Synthetic oligonucleotide
  Sense strand starting at position 2131 of SEQ ID NO: 914189
uccauugaucaauguagcu

SEQ ID NO: 984909 - RNA, 19 nt, Artificial Sequence
  Description of Artificial Sequence: Synthetic oligonucleotide
  Antisense strand to SEQ ID NO: 984908
agcuacauugaucaaugga

SEQ ID NO: 984910 - RNA, 19 nt, Artificial Sequence
  Description of Artificial Sequence: Synthetic oligonucleotide
  Sense strand starting at position 1194 of SEQ ID NO: 914189
acagcaagagcuuguuaca

SEQ ID NO: 984911 - RNA, 19 nt, Artificial Sequence
  Description of Artificial Sequence: Synthetic oligonucleotide
  Antisense strand to SEQ ID NO: 984910
uguaacaagcucuugcugu

SEQ ID NO: 984912 - RNA, 19 nt, Artificial Sequence
  Description of Artificial Sequence: Synthetic oligonucleotide
  Sense strand starting at position 811 of SEQ ID NO: 914189
cgcuaaguuguauaaacuu

SEQ ID NO: 984913 - RNA, 19 nt, Artificial Sequence
  Description of Artificial Sequence: Synthetic oligonucleotide
  Antisense strand to SEQ ID NO: 984912
aaguuuauacaacuuagcg

SEQ ID NO: 984914 - RNA, 19 nt, Artificial Sequence
  Description of Artificial Sequence: Synthetic oligonucleotide
  Sense strand starting at position 2227 of SEQ ID NO: 914189
ucuugaaugcugcgaagaa

SEQ ID NO: 984915 - RNA, 19 nt, Artificial Sequence
  Description of Artificial Sequence: Synthetic oligonucleotide
  Antisense strand to SEQ ID NO: 984914
uucuucgcagcauucaaga

SEQ ID NO: 984916 - RNA, 19 nt, Artificial Sequence
  Description of Artificial Sequence: Synthetic oligonucleotide
  Sense strand starting at position 1480 of SEQ ID NO: 914189
ugcauuacugccugggaca

SEQ ID NO: 984917 - RNA, 19 nt, Artificial Sequence
  Description of Artificial Sequence: Synthetic oligonucleotide
  Antisense strand to SEQ ID NO: 984916
ugucccaggcaguaaugca

SEQ ID NO: 984918 - RNA, 19 nt, Artificial Sequence
  Description of Artificial Sequence: Synthetic oligonucleotide
  Sense strand starting at position 2323 of SEQ ID NO: 914189
aagucuauuucugauguag

SEQ ID NO: 984919 - RNA, 19 nt, Artificial Sequence
  Description of Artificial Sequence: Synthetic oligonucleotide
  Antisense strand to SEQ ID NO: 984918
cuacaucagaaauagacuu

SEQ ID NO: 984920 - RNA, 19 nt, Artificial Sequence
  Description of Artificial Sequence: Synthetic oligonucleotide
  Sense strand starting at position 2407 of SEQ ID NO: 914189
aauguuucucaaggguguu

SEQ ID NO: 984921 - RNA, 19 nt, Artificial Sequence
  Description of Artificial Sequence: Synthetic oligonucleotide
  Antisense strand to SEQ ID NO: 984920
aacacccuugagaaacauu

SEQ ID NO: 984922 - RNA, 19 nt, Artificial Sequence
  Description of Artificial Sequence: Synthetic oligonucleotide
  Sense strand starting at position 3178 of SEQ ID NO: 914189
gagcuugaucaauguuggu

SEQ ID NO: 984923 - RNA, 19 nt, Artificial Sequence
  Description of Artificial Sequence: Synthetic oligonucleotide
  Antisense strand to SEQ ID NO: 984922
accaacauugaucaagcuc

SEQ ID NO: 984924 - RNA, 19 nt, Artificial Sequence
  Description of Artificial Sequence: Synthetic oligonucleotide
  Sense strand starting at position 1658 of SEQ ID NO: 914189
aggugucccucagcuaaau

SEQ ID NO: 984925 - RNA, 19 nt, Artificial Sequence
  Description of Artificial Sequence: Synthetic oligonucleotide
  Antisense strand to SEQ ID NO: 984924
auuuagcugagggacaccu

SEQ ID NO: 984926 - RNA, 19 nt, Artificial Sequence
  Description of Artificial Sequence: Synthetic oligonucleotide
  Sense strand starting at position 1152 of SEQ ID NO: 914189
agaucagcauccgugacuu

SEQ ID NO: 984927 - RNA, 19 nt, Artificial Sequence
  Description of Artificial Sequence: Synthetic oligonucleotide
  Antisense strand to SEQ ID NO: 984926
aagucacggaugcugaucu

SEQ ID NO: 984928 - RNA, 19 nt, Artificial Sequence
  Description of Artificial Sequence: Synthetic oligonucleotide
  Sense strand starting at position 1039 of SEQ ID NO: 914189
gcuucucugccuggauaaa

SEQ ID NO: 984929 - RNA, 19 nt, Artificial Sequence
  Description of Artificial Sequence: Synthetic oligonucleotide
  Antisense strand to SEQ ID NO: 984928
uuuauccaggcagagaagc

SEQ ID NO: 984930 - RNA, 19 nt, Artificial Sequence
  Description of Artificial Sequence: Synthetic oligonucleotide
  Sense strand starting at position 3543 of SEQ ID NO: 914190
cuguuugaucauuagaauc

SEQ ID NO: 984931 - RNA, 19 nt, Artificial Sequence
  Description of Artificial Sequence: Synthetic oligonucleotide
  Antisense strand to SEQ ID NO: 984930
gauucuaaugaucaaacag

SEQ ID NO: 984932 - RNA, 19 nt, Artificial Sequence
  Description of Artificial Sequence: Synthetic oligonucleotide
  Sense strand starting at position 730 of SEQ ID NO: 914190
gggagaguuguccaccuag

SEQ ID NO: 984933 - RNA, 19 nt, Artificial Sequence
  Description of Artificial Sequence: Synthetic oligonucleotide
  Antisense strand to SEQ ID NO: 984932
cuagguggacaacucuccc

SEQ ID NO: 984934 - RNA, 19 nt, Artificial Sequence
  Description of Artificial Sequence: Synthetic oligonucleotide
  Sense strand starting at position 3798 of SEQ ID NO: 914190
ucaagacauggucagucua

SEQ ID NO: 984935 - RNA, 19 nt, Artificial Sequence
  Description of Artificial Sequence: Synthetic oligonucleotide
  Antisense strand to SEQ ID NO: 984934
uagacugaccaugucuuga

SEQ ID NO: 984936 - RNA, 19 nt, Artificial Sequence
  Description of Artificial Sequence: Synthetic oligonucleotide
  Sense strand starting at position 1482 of SEQ ID NO: 914190
acuggucagcccuagagaa

SEQ ID NO: 984937 - RNA, 19 nt, Artificial Sequence
  Description of Artificial Sequence: Synthetic oligonucleotide
  Antisense strand to SEQ ID NO: 984936
uucucuagggcugaccagu

SEQ ID NO: 984938 - RNA, 19 nt, Artificial Sequence
  Description of Artificial Sequence: Synthetic oligonucleotide
  Sense strand starting at position 28 of SEQ ID NO: 914190
ugaccucagagaugagguu

SEQ ID NO: 984939 - RNA, 19 nt, Artificial Sequence
  Description of Artificial Sequence: Synthetic oligonucleotide
  Antisense strand to SEQ ID NO: 984938
aaccucaucucugagguca

SEQ ID NO: 984940 - RNA, 19 nt, Artificial Sequence
  Description of Artificial Sequence: Synthetic oligonucleotide
  Sense strand starting at position 698 of SEQ ID NO: 914190
gcuuccuuugaacagaacu

SEQ ID NO: 984941 - RNA, 19 nt, Artificial Sequence
  Description of Artificial Sequence: Synthetic oligonucleotide
  Antisense strand to SEQ ID NO: 984940
aguucuguucaaaggaagc

SEQ ID NO: 984942 - RNA, 19 nt, Artificial Sequence
  Description of Artificial Sequence: Synthetic oligonucleotide
  Sense strand starting at position 2238 of SEQ ID NO: 914190
ggaacacugcucugaauaa

SEQ ID NO: 984943 - RNA, 19 nt, Artificial Sequence
  Description of Artificial Sequence: Synthetic oligonucleotide
  Antisense strand to SEQ ID NO: 984942
uuauucagagcaguguucc

SEQ ID NO: 984944 - RNA, 19 nt, Artificial Sequence
  Description of Artificial Sequence: Synthetic oligonucleotide
  Sense strand starting at position 2916 of SEQ ID NO: 914190
cauguuuggguucggauuu

SEQ ID NO: 984945 - RNA, 19 nt, Artificial Sequence
  Description of Artificial Sequence: Synthetic oligonucleotide
  Antisense strand to SEQ ID NO: 984944
aaauccgaacccaaacaug

SEQ ID NO: 984946 - RNA, 19 nt, Artificial Sequence
  Description of Artificial Sequence: Synthetic oligonucleotide
  Sense strand starting at position 3425 of SEQ ID NO: 914190
cugggcaugauccauguaa

SEQ ID NO: 984947 - RNA, 19 nt, Artificial Sequence
  Description of Artificial Sequence: Synthetic oligonucleotide
  Antisense strand to SEQ ID NO: 984946
uuacauggaucaugcccag

SEQ ID NO: 984948 - RNA, 19 nt, Artificial Sequence
  Description of Artificial Sequence: Synthetic oligonucleotide
  Sense strand starting at position 3542 of SEQ ID NO: 914190
acuguuugaucauuagaau

SEQ ID NO: 984949 - RNA, 19 nt, Artificial Sequence
  Description of Artificial Sequence: Synthetic oligonucleotide
  Antisense strand to SEQ ID NO: 984948
auucuaaugaucaaacagu

SEQ ID NO: 984950 - RNA, 19 nt, Artificial Sequence
  Description of Artificial Sequence: Synthetic oligonucleotide
  Sense strand starting at position 3432 of SEQ ID NO: 914190
ugauccauguaagucagaa

SEQ ID NO: 984951 - RNA, 19 nt, Artificial Sequence
  Description of Artificial Sequence: Synthetic oligonucleotide
  Antisense strand to SEQ ID NO: 984950
uucugacuuacauggauca

SEQ ID NO: 984952 - RNA, 19 nt, Artificial Sequence
  Description of Artificial Sequence: Synthetic oligonucleotide
  Sense strand starting at position 2726 of SEQ ID NO: 914190
agacaagaguucucuaacg

SEQ ID NO: 984953 - RNA, 19 nt, Artificial Sequence
  Description of Artificial Sequence: Synthetic oligonucleotide
  Antisense strand to SEQ ID NO: 984952
cguuagagaacucuugucu

SEQ ID NO: 984954 - RNA, 19 nt, Artificial Sequence
  Description of Artificial Sequence: Synthetic oligonucleotide
  Sense strand starting at position 692 of SEQ ID NO: 914190
agaggagcuuccuuugaac

SEQ ID NO: 984955 - RNA, 19 nt, Artificial Sequence
  Description of Artificial Sequence: Synthetic oligonucleotide
  Antisense strand to SEQ ID NO: 984954
guucaaaggaagcuccucu

SEQ ID NO: 984956 - RNA, 19 nt, Artificial Sequence
  Description of Artificial Sequence: Synthetic oligonucleotide
  Sense strand starting at position 2688 of SEQ ID NO: 914190
agguuugucgugcuuucuu

SEQ ID NO: 984957 - RNA, 19 nt, Artificial Sequence
  Description of Artificial Sequence: Synthetic oligonucleotide
  Antisense strand to SEQ ID NO: 984956
aagaaagcacgacaaaccu

SEQ ID NO: 984958 - RNA, 19 nt, Artificial Sequence
  Description of Artificial Sequence: Synthetic oligonucleotide
  Sense strand starting at position 2728 of SEQ ID NO: 914190
acaagaguucucuaacgca

SEQ ID NO: 984959 - RNA, 19 nt, Artificial Sequence
  Description of Artificial Sequence: Synthetic oligonucleotide
  Antisense strand to SEQ ID NO: 984958
ugcguuagagaacucuugu

SEQ ID NO: 984960 - RNA, 19 nt, Artificial Sequence
  Description of Artificial Sequence: Synthetic oligonucleotide
  Sense strand starting at position 3800 of SEQ ID NO: 914190
aagacauggucagucuauc

SEQ ID NO: 984961 - RNA, 19 nt, Artificial Sequence
  Description of Artificial Sequence: Synthetic oligonucleotide
  Antisense strand to SEQ ID NO: 984960
gauagacugaccaugucuu

SEQ ID NO: 984962 - RNA, 19 nt, Artificial Sequence
  Description of Artificial Sequence: Synthetic oligonucleotide
  Sense strand starting at position 2827 of SEQ ID NO: 914190
ggcuacccucccugaaaca

SEQ ID NO: 984963 - RNA, 19 nt, Artificial Sequence
  Description of Artificial Sequence: Synthetic oligonucleotide
  Antisense strand to SEQ ID NO: 984962
uguuucagggaggguagcc

SEQ ID NO: 984964 - RNA, 19 nt, Artificial Sequence
  Description of Artificial Sequence: Synthetic oligonucleotide
  Sense strand starting at position 233 of SEQ ID NO: 914190
ucacucugcccauagguua

SEQ ID NO: 984965 - RNA, 19 nt, Artificial Sequence
  Description of Artificial Sequence: Synthetic oligonucleotide
  Antisense strand to SEQ ID NO: 984964
uaaccuaugggcagaguga

SEQ ID NO: 984966 - RNA, 19 nt, Artificial Sequence
  Description of Artificial Sequence: Synthetic oligonucleotide
  Sense strand starting at position 2285 of SEQ ID NO: 914190
guuucuccucccugggaaa

SEQ ID NO: 984967 - RNA, 19 nt, Artificial Sequence
  Description of Artificial Sequence: Synthetic oligonucleotide
  Antisense strand to SEQ ID NO: 984966
uuucccagggaggagaaac

SEQ ID NO: 984968 - RNA, 19 nt, Artificial Sequence
  Description of Artificial Sequence: Synthetic oligonucleotide
  Sense strand starting at position 1575 of SEQ ID NO: 914190
uggaaaguucuguguggga

SEQ ID NO: 984969 - RNA, 19 nt, Artificial Sequence
  Description of Artificial Sequence: Synthetic oligonucleotide
  Antisense strand to SEQ ID NO: 984968
ucccacacagaacuuucca

SEQ ID NO: 984970 - RNA, 19 nt, Artificial Sequence
  Description of Artificial Sequence: Synthetic oligonucleotide
  Sense strand starting at position 2514 of SEQ ID NO: 914190
gcuuccaccggagaguuua

SEQ ID NO: 984971 - RNA, 19 nt, Artificial Sequence
  Description of Artificial Sequence: Synthetic oligonucleotide
  Antisense strand to SEQ ID NO: 984970
uaaacucuccgguggaagc

SEQ ID NO: 984972 - RNA, 19 nt, Artificial Sequence
  Description of Artificial Sequence: Synthetic oligonucleotide
  Sense strand starting at position 2 of SEQ ID NO: 914190
auacauucuuucguggaau

SEQ ID NO: 984973 - RNA, 19 nt, Artificial Sequence
  Description of Artificial Sequence: Synthetic oligonucleotide
  Antisense strand to SEQ ID NO: 984972
auuccacgaaagaauguau

SEQ ID NO: 984974 - RNA, 19 nt, Artificial Sequence
  Description of Artificial Sequence: Synthetic oligonucleotide
  Sense strand starting at position 3981 of SEQ ID NO: 914190
gcacuaacuuuggcaauca

SEQ ID NO: 984975 - RNA, 19 nt, Artificial Sequence
  Description of Artificial Sequence: Synthetic oligonucleotide
  Antisense strand to SEQ ID NO: 984974
ugauugccaaaguuagugc

SEQ ID NO: 984976 - RNA, 19 nt, Artificial Sequence
  Description of Artificial Sequence: Synthetic oligonucleotide
  Sense strand starting at position 3427 of SEQ ID NO: 914190
gggcaugauccauguaagu

SEQ ID NO: 984977 - RNA, 19 nt, Artificial Sequence
  Description of Artificial Sequence: Synthetic oligonucleotide
  Antisense strand to SEQ ID NO: 984976
acuuacauggaucaugccc

SEQ ID NO: 984978 - RNA, 19 nt, Artificial Sequence
  Description of Artificial Sequence: Synthetic oligonucleotide
  Sense strand starting at position 2362 of SEQ ID NO: 914190
agagucggugcucaguaaa

SEQ ID NO: 984979 - RNA, 19 nt, Artificial Sequence
  Description of Artificial Sequence: Synthetic oligonucleotide
  Antisense strand to SEQ ID NO: 984978
uuuacugagcaccgacucu

SEQ ID NO: 984980 - RNA, 19 nt, Artificial Sequence
  Description of Artificial Sequence: Synthetic oligonucleotide
  Sense strand starting at position 2365 of SEQ ID NO: 914190
gucggugcucaguaaauaa

SEQ ID NO: 984981 - RNA, 19 nt, Artificial Sequence
  Description of Artificial Sequence: Synthetic oligonucleotide
  Antisense strand to SEQ ID NO: 984980
uuauuuacugagcaccgac

SEQ ID NO: 984982 - RNA, 19 nt, Artificial Sequence
  Description of Artificial Sequence: Synthetic oligonucleotide
  Sense strand starting at position 2744 of SEQ ID NO: 914190
gcaagcuuugcacaagcaa

SEQ ID NO: 984983 - RNA, 19 nt, Artificial Sequence
  Description of Artificial Sequence: Synthetic oligonucleotide
  Antisense strand to SEQ ID NO: 984982
uugcuugugcaaagcuugc

SEQ ID NO: 984984 - RNA, 19 nt, Artificial Sequence
  Description of Artificial Sequence: Synthetic oligonucleotide
  Sense strand starting at position 14 of SEQ ID NO: 914190
guggaaucccugugugacc

SEQ ID NO: 984985 - RNA, 19 nt, Artificial Sequence
  Description of Artificial Sequence: Synthetic oligonucleotide
  Antisense strand to SEQ ID NO: 984984
ggucacacagggauuccac

SEQ ID NO: 984986 - RNA, 19 nt, Artificial Sequence
  Description of Artificial Sequence: Synthetic oligonucleotide
  Sense strand starting at position 2512 of SEQ ID NO: 914190
ucgcuuccaccggagaguu

SEQ ID NO: 984987 - RNA, 19 nt, Artificial Sequence
  Description of Artificial Sequence: Synthetic oligonucleotide
  Antisense strand to SEQ ID NO: 984986
aacucuccgguggaagcga

SEQ ID NO: 984988 - RNA, 19 nt, Artificial Sequence
  Description of Artificial Sequence: Synthetic oligonucleotide
  Sense strand starting at position 3617 of SEQ ID NO: 914190
ugacuuuccugacaagaaa

SEQ ID NO: 984989 - RNA, 19 nt, Artificial Sequence
  Description of Artificial Sequence: Synthetic oligonucleotide
  Antisense strand to SEQ ID NO: 984988
uuucuugucaggaaaguca

SEQ ID NO: 984990 - RNA, 19 nt, Artificial Sequence
  Description of Artificial Sequence: Synthetic oligonucleotide
  Sense strand starting at position 1427 of SEQ ID NO: 914190
cuguuucuccgugaaguuu

SEQ ID NO: 984991 - RNA, 19 nt, Artificial Sequence
  Description of Artificial Sequence: Synthetic oligonucleotide
  Antisense strand to SEQ ID NO: 984990
aaacuucacggagaaacag

SEQ ID NO: 984992 - RNA, 19 nt, Artificial Sequence
  Description of Artificial Sequence: Synthetic oligonucleotide
  Sense strand starting at position 2063 of SEQ ID NO: 914190
cuggaauacugaggaggau

SEQ ID NO: 984993 - RNA, 19 nt, Artificial Sequence
  Description of Artificial Sequence: Synthetic oligonucleotide
  Antisense strand to SEQ ID NO: 984992
auccuccucaguauuccag

SEQ ID NO: 984994 - RNA, 19 nt, Artificial Sequence
  Description of Artificial Sequence: Synthetic oligonucleotide
  Sense strand starting at position 2913 of SEQ ID NO: 914190
guccauguuuggguucgga

SEQ ID NO: 984995 - RNA, 19 nt, Artificial Sequence
  Description of Artificial Sequence: Synthetic oligonucleotide
  Antisense strand to SEQ ID NO: 984994
uccgaacccaaacauggac

SEQ ID NO: 984996 - RNA, 19 nt, Artificial Sequence
  Description of Artificial Sequence: Synthetic oligonucleotide
  Sense strand starting at position 1026 of SEQ ID NO: 914190
uugcuacuguucucucauu

SEQ ID NO: 984997 - RNA, 19 nt, Artificial Sequence
  Description of Artificial Sequence: Synthetic oligonucleotide
  Antisense strand to SEQ ID NO: 984996
aaugagagaacaguagcaa

SEQ ID NO: 984998 - RNA, 19 nt, Artificial Sequence
  Description of Artificial Sequence: Synthetic oligonucleotide
  Sense strand starting at position 2361 of SEQ ID NO: 914190
cagagucggugcucaguaa

SEQ ID NO: 984999 - RNA, 19 nt, Artificial Sequence
  Description of Artificial Sequence: Synthetic oligonucleotide
  Antisense strand to SEQ ID NO: 984998
uuacugagcaccgacucug

SEQ ID NO: 985000 - RNA, 19 nt, Artificial Sequence
  Description of Artificial Sequence: Synthetic oligonucleotide
  Sense strand starting at position 37 of SEQ ID NO: 914190
agaugagguucagaacagu

SEQ ID NO: 985001 - RNA, 19 nt, Artificial Sequence
  Description of Artificial Sequence: Synthetic oligonucleotide
  Antisense strand to SEQ ID NO: 985000
acuguucugaaccucaucu

SEQ ID NO: 985002 - RNA, 19 nt, Artificial Sequence
  Description of Artificial Sequence: Synthetic oligonucleotide
  Sense strand starting at position 3436 of SEQ ID NO: 914190
ccauguaagucagaaauga

SEQ ID NO: 985003 - RNA, 19 nt, Artificial Sequence
  Description of Artificial Sequence: Synthetic oligonucleotide
  Antisense strand to SEQ ID NO: 985002
ucauuucugacuuacaugg

SEQ ID NO: 985004 - RNA, 19 nt, Artificial Sequence
  Description of Artificial Sequence: Synthetic oligonucleotide
  Sense strand starting at position 3545 of SEQ ID NO: 914190
guuugaucauuagaaucca

SEQ ID NO: 985005 - RNA, 19 nt, Artificial Sequence
  Description of Artificial Sequence: Synthetic oligonucleotide
  Antisense strand to SEQ ID NO: 985004
uggauucuaaugaucaaac

SEQ ID NO: 985006 - RNA, 19 nt, Artificial Sequence
  Description of Artificial Sequence: Synthetic oligonucleotide
  Sense strand starting at position 1423 of SEQ ID NO: 914190
ucagcuguuucuccgugaa

SEQ ID NO: 985007 - RNA, 19 nt, Artificial Sequence
  Description of Artificial Sequence: Synthetic oligonucleotide
  Antisense strand to SEQ ID NO: 985006
uucacggagaaacagcuga

SEQ ID NO: 985008 - RNA, 19 nt, Artificial Sequence
  Description of Artificial Sequence: Synthetic oligonucleotide
  Sense strand starting at position 2794 of SEQ ID NO: 914190
ucccuagucggugguguaa

SEQ ID NO: 985009 - RNA, 19 nt, Artificial Sequence
  Description of Artificial Sequence: Synthetic oligonucleotide
  Antisense strand to SEQ ID NO: 985008
uuacaccaccgacuaggga

SEQ ID NO: 985010 - RNA, 19 nt, Artificial Sequence
  Description of Artificial Sequence: Synthetic oligonucleotide
  Sense strand starting at position 1002 of SEQ ID NO: 914191
ggugaaagaugggcaugaa

SEQ ID NO: 985011 - RNA, 19 nt, Artificial Sequence
  Description of Artificial Sequence: Synthetic oligonucleotide
  Antisense strand to SEQ ID NO: 985010
uucaugcccaucuuucacc

SEQ ID NO: 985012 - RNA, 19 nt, Artificial Sequence
  Description of Artificial Sequence: Synthetic oligonucleotide
  Sense strand starting at position 552 of SEQ ID NO: 914191
ugacgauauguacaaccua

SEQ ID NO: 985013 - RNA, 19 nt, Artificial Sequence
  Description of Artificial Sequence: Synthetic oligonucleotide
  Antisense strand to SEQ ID NO: 985012
uagguuguacauaucguca

SEQ ID NO: 985014 - RNA, 19 nt, Artificial Sequence
  Description of Artificial Sequence: Synthetic oligonucleotide
  Sense strand starting at position 3780 of SEQ ID NO: 914191
augguaagagcggauuaga

SEQ ID NO: 985015 - RNA, 19 nt, Artificial Sequence
  Description of Artificial Sequence: Synthetic oligonucleotide
  Antisense strand to SEQ ID NO: 985014
ucuaauccgcucuuaccau

SEQ ID NO: 985016 - RNA, 19 nt, Artificial Sequence
  Description of Artificial Sequence: Synthetic oligonucleotide
  Sense strand starting at position 269 of SEQ ID NO: 914191
cagguaacccgaugagaaa

SEQ ID NO: 985017 - RNA, 19 nt, Artificial Sequence
  Description of Artificial Sequence: Synthetic oligonucleotide
  Antisense strand to SEQ ID NO: 985016
uuucucaucggguuaccug

SEQ ID NO: 985018 - RNA, 19 nt, Artificial Sequence
  Description of Artificial Sequence: Synthetic oligonucleotide
  Sense strand starting at position 54 of SEQ ID NO: 914191
uggagaauuucuuagauaa

SEQ ID NO: 985019 - RNA, 19 nt, Artificial Sequence
  Description of Artificial Sequence: Synthetic oligonucleotide
  Antisense strand to SEQ ID NO: 985018
uuaucuaagaaauucucca

SEQ ID NO: 985020 - RNA, 19 nt, Artificial Sequence
  Description of Artificial Sequence: Synthetic oligonucleotide
  Sense strand starting at position 1762 of SEQ ID NO: 914191
cacuuuagaugaguuggga

SEQ ID NO: 985021 - RNA, 19 nt, Artificial Sequence
  Description of Artificial Sequence: Synthetic oligonucleotide
  Antisense strand to SEQ ID NO: 985020
ucccaacucaucuaaagug

SEQ ID NO: 985022 - RNA, 19 nt, Artificial Sequence
  Description of Artificial Sequence: Synthetic oligonucleotide
  Sense strand starting at position 2913 of SEQ ID NO: 914191
gagaacaaugaugguguua

SEQ ID NO: 985023 - RNA, 19 nt, Artificial Sequence
  Description of Artificial Sequence: Synthetic oligonucleotide
  Antisense strand to SEQ ID NO: 985022
uaacaccaucauuguucuc

SEQ ID NO: 985024 - RNA, 19 nt, Artificial Sequence
  Description of Artificial Sequence: Synthetic oligonucleotide
  Sense strand starting at position 3440 of SEQ ID NO: 914191
cuccaagauugguuuaaag

SEQ ID NO: 985025 - RNA, 19 nt, Artificial Sequence
  Description of Artificial Sequence: Synthetic oligonucleotide
  Antisense strand to SEQ ID NO: 985024
cuuuaaaccaaucuuggag

SEQ ID NO: 985026 - RNA, 19 nt, Artificial Sequence
  Description of Artificial Sequence: Synthetic oligonucleotide
  Sense strand starting at position 983 of SEQ ID NO: 914191
gcugcuucugaagagggaa

SEQ ID NO: 985027 - RNA, 19 nt, Artificial Sequence
  Description of Artificial Sequence: Synthetic oligonucleotide
  Antisense strand to SEQ ID NO: 985026
uucccucuucagaagcagc

SEQ ID NO: 985028 - RNA, 19 nt, Artificial Sequence
  Description of Artificial Sequence: Synthetic oligonucleotide
  Sense strand starting at position 3304 of SEQ ID NO: 914191
gcacuuguuagcgcuaaug

SEQ ID NO: 985029 - RNA, 19 nt, Artificial Sequence
  Description of Artificial Sequence: Synthetic oligonucleotide
  Antisense strand to SEQ ID NO: 985028
cauuagcgcuaacaagugc

SEQ ID NO: 985030 - RNA, 19 nt, Artificial Sequence
  Description of Artificial Sequence: Synthetic oligonucleotide
  Sense strand starting at position 1777 of SEQ ID NO: 914191
gggacaaaggaucgguuua

SEQ ID NO: 985031 - RNA, 19 nt, Artificial Sequence
  Description of Artificial Sequence: Synthetic oligonucleotide
  Antisense strand to SEQ ID NO: 985030
uaaaccgauccuuuguccc

SEQ ID NO: 985032 - RNA, 19 nt, Artificial Sequence
  Description of Artificial Sequence: Synthetic oligonucleotide
  Sense strand starting at position 1032 of SEQ ID NO: 914191
agaugaugcugaucuuuaa

SEQ ID NO: 985033 - RNA, 19 nt, Artificial Sequence
  Description of Artificial Sequence: Synthetic oligonucleotide
  Antisense strand to SEQ ID NO: 985032
uuaaagaucagcaucaucu

SEQ ID NO: 985034 - RNA, 19 nt, Artificial Sequence
  Description of Artificial Sequence: Synthetic oligonucleotide
  Sense strand starting at position 97 of SEQ ID NO: 914191
gcgacagguggauaaacuu

SEQ ID NO: 985035 - RNA, 19 nt, Artificial Sequence
  Description of Artificial Sequence: Synthetic oligonucleotide
  Antisense strand to SEQ ID NO: 985034
aaguuuauccaccugucgc

SEQ ID NO: 985036 - RNA, 19 nt, Artificial Sequence
  Description of Artificial Sequence: Synthetic oligonucleotide
  Sense strand starting at position 3174 of SEQ ID NO: 914191
guauauaaacuaggcugaa

SEQ ID NO: 985037 - RNA, 19 nt, Artificial Sequence
  Description of Artificial Sequence: Synthetic oligonucleotide
  Antisense strand to SEQ ID NO: 985036
uucagccuaguuuauauac

SEQ ID NO: 985038 - RNA, 19 nt, Artificial Sequence
  Description of Artificial Sequence: Synthetic oligonucleotide
  Sense strand starting at position 3419 of SEQ ID NO: 914191
uuguuaugacauggaguaa

SEQ ID NO: 985039 - RNA, 19 nt, Artificial Sequence
  Description of Artificial Sequence: Synthetic oligonucleotide
  Antisense strand to SEQ ID NO: 985038
uuacuccaugucauaacaa

SEQ ID NO: 985040 - RNA, 19 nt, Artificial Sequence
  Description of Artificial Sequence: Synthetic oligonucleotide
  Sense strand starting at position 541 of SEQ ID NO: 914191
uccaguaaggcugacgaua

SEQ ID NO: 985041 - RNA, 19 nt, Artificial Sequence
  Description of Artificial Sequence: Synthetic oligonucleotide
  Antisense strand to SEQ ID NO: 985040
uaucgucagccuuacugga

SEQ ID NO: 985042 - RNA, 19 nt, Artificial Sequence
  Description of Artificial Sequence: Synthetic oligonucleotide
  Sense strand starting at position 1708 of SEQ ID NO: 914191
gcuccauggaaaggguaau

SEQ ID NO: 985043 - RNA, 19 nt, Artificial Sequence
  Description of Artificial Sequence: Synthetic oligonucleotide
  Antisense strand to SEQ ID NO: 985042
auuacccuuuccauggagc

SEQ ID NO: 985044 - RNA, 19 nt, Artificial Sequence
  Description of Artificial Sequence: Synthetic oligonucleotide
  Sense strand starting at position 534 of SEQ ID NO: 914191
ggugacauccaguaaggcu

SEQ ID NO: 985045 - RNA, 19 nt, Artificial Sequence
  Description of Artificial Sequence: Synthetic oligonucleotide
  Antisense strand to SEQ ID NO: 985044
agccuuacuggaugucacc

SEQ ID NO: 985046 - RNA, 19 nt, Artificial Sequence
  Description of Artificial Sequence: Synthetic oligonucleotide
  Sense strand starting at position 3714 of SEQ ID NO: 914191
cgucauugucaccaaugaa

SEQ ID NO: 985047 - RNA, 19 nt, Artificial Sequence
  Description of Artificial Sequence: Synthetic oligonucleotide
  Antisense strand to SEQ ID NO: 985046
uucauuggugacaaugacg

SEQ ID NO: 985048 - RNA, 19 nt, Artificial Sequence
  Description of Artificial Sequence: Synthetic oligonucleotide
  Sense strand starting at position 1636 of SEQ ID NO: 914191
gugguuucucaauaccuau

SEQ ID NO: 985049 - RNA, 19 nt, Artificial Sequence
  Description of Artificial Sequence: Synthetic oligonucleotide
  Antisense strand to SEQ ID NO: 985048
auagguauugagaaaccac

SEQ ID NO: 985050 - RNA, 19 nt, Artificial Sequence
  Description of Artificial Sequence: Synthetic oligonucleotide
  Sense strand starting at position 1884 of SEQ ID NO: 914191
aaugguuugcuguaauaau

SEQ ID NO: 985051 - RNA, 19 nt, Artificial Sequence
  Description of Artificial Sequence: Synthetic oligonucleotide
  Antisense strand to SEQ ID NO: 985050
auuauuacagcaaaccauu

SEQ ID NO: 985052 - RNA, 19 nt, Artificial Sequence
  Description of Artificial Sequence: Synthetic oligonucleotide
  Sense strand starting at position 3162 of SEQ ID NO: 914191
ucauuccucugaguauaua

SEQ ID NO: 985053 - RNA, 19 nt, Artificial Sequence
  Description of Artificial Sequence: Synthetic oligonucleotide
  Antisense strand to SEQ ID NO: 985052
uauauacucagaggaauga

SEQ ID NO: 985054 - RNA, 19 nt, Artificial Sequence
  Description of Artificial Sequence: Synthetic oligonucleotide
  Sense strand starting at position 1779 of SEQ ID NO: 914191
gacaaaggaucgguuuagu

SEQ ID NO: 985055 - RNA, 19 nt, Artificial Sequence
  Description of Artificial Sequence: Synthetic oligonucleotide
  Antisense strand to SEQ ID NO: 985054
acuaaaccgauccuuuguc

SEQ ID NO: 985056 - RNA, 19 nt, Artificial Sequence
  Description of Artificial Sequence: Synthetic oligonucleotide
  Sense strand starting at position 3418 of SEQ ID NO: 914191
cuuguuaugacauggagua

SEQ ID NO: 985057 - RNA, 19 nt, Artificial Sequence
  Description of Artificial Sequence: Synthetic oligonucleotide
  Antisense strand to SEQ ID NO: 985056
uacuccaugucauaacaag

SEQ ID NO: 985058 - RNA, 19 nt, Artificial Sequence
  Description of Artificial Sequence: Synthetic oligonucleotide
  Sense strand starting at position 1700 of SEQ ID NO: 914191
auuagugugcuccauggaa

SEQ ID NO: 985059 - RNA, 19 nt, Artificial Sequence
  Description of Artificial Sequence: Synthetic oligonucleotide
  Antisense strand to SEQ ID NO: 985058
uuccauggagcacacuaau

SEQ ID NO: 985060 - RNA, 19 nt, Artificial Sequence
  Description of Artificial Sequence: Synthetic oligonucleotide
  Sense strand starting at position 470 of SEQ ID NO: 914191
acagaaacuuuggugcauu

SEQ ID NO: 985061 - RNA, 19 nt, Artificial Sequence
  Description of Artificial Sequence: Synthetic oligonucleotide
  Antisense strand to SEQ ID NO: 985060
aaugcaccaaaguuucugu

SEQ ID NO: 985062 - RNA, 19 nt, Artificial Sequence
  Description of Artificial Sequence: Synthetic oligonucleotide
  Sense strand starting at position 3439 of SEQ ID NO: 914191
gcuccaagauugguuuaaa

SEQ ID NO: 985063 - RNA, 19 nt, Artificial Sequence
  Description of Artificial Sequence: Synthetic oligonucleotide
  Antisense strand to SEQ ID NO: 985062
uuuaaaccaaucuuggagc

SEQ ID NO: 985064 - RNA, 19 nt, Artificial Sequence
  Description of Artificial Sequence: Synthetic oligonucleotide
  Sense strand starting at position 3215 of SEQ ID NO: 914191
acgucaucuccacaguaca

SEQ ID NO: 985065 - RNA, 19 nt, Artificial Sequence
  Description of Artificial Sequence: Synthetic oligonucleotide
  Antisense strand to SEQ ID NO: 985064
uguacuguggagaugacgu

SEQ ID NO: 985066 - RNA, 19 nt, Artificial Sequence
  Description of Artificial Sequence: Synthetic oligonucleotide
  Sense strand starting at position 1782 of SEQ ID NO: 914191
aaaggaucgguuuaguguu

SEQ ID NO: 985067 - RNA, 19 nt, Artificial Sequence
  Description of Artificial Sequence: Synthetic oligonucleotide
  Antisense strand to SEQ ID NO: 985066
aacacuaaaccgauccuuu

SEQ ID NO: 985068 - RNA, 19 nt, Artificial Sequence
  Description of Artificial Sequence: Synthetic oligonucleotide
  Sense strand starting at position 1095 of SEQ ID NO: 914191
acuucuaucuuauuauggu

SEQ ID NO: 985069 - RNA, 19 nt, Artificial Sequence
  Description of Artificial Sequence: Synthetic oligonucleotide
  Antisense strand to SEQ ID NO: 985068
accauaauaagauagaagu

SEQ ID NO: 985070 - RNA, 19 nt, Artificial Sequence
  Description of Artificial Sequence: Synthetic oligonucleotide
  Sense strand starting at position 1792 of SEQ ID NO: 914191
uuuaguguucuagaaguuu

SEQ ID NO: 985071 - RNA, 19 nt, Artificial Sequence
  Description of Artificial Sequence: Synthetic oligonucleotide
  Antisense strand to SEQ ID NO: 985070
aaacuucuagaacacuaaa

SEQ ID NO: 985072 - RNA, 19 nt, Artificial Sequence
  Description of Artificial Sequence: Synthetic oligonucleotide
  Sense strand starting at position 2940 of SEQ ID NO: 914191
uaaucagagguguguuuaa

SEQ ID NO: 985073 - RNA, 19 nt, Artificial Sequence
  Description of Artificial Sequence: Synthetic oligonucleotide
  Antisense strand to SEQ ID NO: 985072
uuaaacacaccucugauua

SEQ ID NO: 985074 - RNA, 19 nt, Artificial Sequence
  Description of Artificial Sequence: Synthetic oligonucleotide
  Sense strand starting at position 3500 of SEQ ID NO: 914191
gcaaacuugucaguagaca

SEQ ID NO: 985075 - RNA, 19 nt, Artificial Sequence
  Description of Artificial Sequence: Synthetic oligonucleotide
  Antisense strand to SEQ ID NO: 985074
ugucuacugacaaguuugc

SEQ ID NO: 985076 - RNA, 19 nt, Artificial Sequence
  Description of Artificial Sequence: Synthetic oligonucleotide
  Sense strand starting at position 2922 of SEQ ID NO: 914191
gaugguguuaggugaaucu

SEQ ID NO: 985077 - RNA, 19 nt, Artificial Sequence
  Description of Artificial Sequence: Synthetic oligonucleotide
  Antisense strand to SEQ ID NO: 985076
agauucaccuaacaccauc

SEQ ID NO: 985078 - RNA, 19 nt, Artificial Sequence
  Description of Artificial Sequence: Synthetic oligonucleotide
  Sense strand starting at position 3688 of SEQ ID NO: 914191
guuuguuguauaugaugaa

SEQ ID NO: 985079 - RNA, 19 nt, Artificial Sequence
  Description of Artificial Sequence: Synthetic oligonucleotide
  Antisense strand to SEQ ID NO: 985078
uucaucauauacaacaaac

SEQ ID NO: 985080 - RNA, 19 nt, Artificial Sequence
  Description of Artificial Sequence: Synthetic oligonucleotide
  Sense strand starting at position 1702 of SEQ ID NO: 914191
uagugugcuccauggaaag

SEQ ID NO: 985081 - RNA, 19 nt, Artificial Sequence
  Description of Artificial Sequence: Synthetic oligonucleotide
  Antisense strand to SEQ ID NO: 985080
cuuuccauggagcacacua

SEQ ID NO: 985082 - RNA, 19 nt, Artificial Sequence
  Description of Artificial Sequence: Synthetic oligonucleotide
  Sense strand starting at position 3159 of SEQ ID NO: 914191
uucucauuccucugaguau

SEQ ID NO: 985083 - RNA, 19 nt, Artificial Sequence
  Description of Artificial Sequence: Synthetic oligonucleotide
  Antisense strand to SEQ ID NO: 985082
auacucagaggaaugagaa

SEQ ID NO: 985084 - RNA, 19 nt, Artificial Sequence
  Description of Artificial Sequence: Synthetic oligonucleotide
  Sense strand starting at position 3686 of SEQ ID NO: 914191
guguuuguuguauaugaug

SEQ ID NO: 985085 - RNA, 19 nt, Artificial Sequence
  Description of Artificial Sequence: Synthetic oligonucleotide
  Antisense strand to SEQ ID NO: 985084
caucauauacaacaaacac

SEQ ID NO: 985086 - RNA, 19 nt, Artificial Sequence
  Description of Artificial Sequence: Synthetic oligonucleotide
  Sense strand starting at position 2938 of SEQ ID NO: 914191
ucuaaucagagguguguuu

SEQ ID NO: 985087 - RNA, 19 nt, Artificial Sequence
  Description of Artificial Sequence: Synthetic oligonucleotide
  Antisense strand to SEQ ID NO: 985086
aaacacaccucugauuaga

SEQ ID NO: 985088 - RNA, 19 nt, Artificial Sequence
  Description of Artificial Sequence: Synthetic oligonucleotide
  Sense strand starting at position 3713 of SEQ ID NO: 914191
ucgucauugucaccaauga

SEQ ID NO: 985089 - RNA, 19 nt, Artificial Sequence
  Description of Artificial Sequence: Synthetic oligonucleotide
  Antisense strand to SEQ ID NO: 985088
ucauuggugacaaugacga

SEQ ID NO: 985090 - RNA, 19 nt, Artificial Sequence
  Description of Artificial Sequence: Synthetic oligonucleotide
  Sense strand starting at position 1097 of SEQ ID NO: 914192
gcuuuacauuugucuaaug

SEQ ID NO: 985091 - RNA, 19 nt, Artificial Sequence
  Description of Artificial Sequence: Synthetic oligonucleotide
  Antisense strand to SEQ ID NO: 985090
cauuagacaaauguaaagc

SEQ ID NO: 985092 - RNA, 19 nt, Artificial Sequence
  Description of Artificial Sequence: Synthetic oligonucleotide
  Sense strand starting at position 172 of SEQ ID NO: 914192
guguuacgcaagucucacu

SEQ ID NO: 985093 - RNA, 19 nt, Artificial Sequence
  Description of Artificial Sequence: Synthetic oligonucleotide
  Antisense strand to SEQ ID NO: 985092
agugagacuugcguaacac

SEQ ID NO: 985094 - RNA, 19 nt, Artificial Sequence
  Description of Artificial Sequence: Synthetic oligonucleotide
  Sense strand starting at position 2224 of SEQ ID NO: 914192
cgcucucguggaguuuaca

SEQ ID NO: 985095 - RNA, 19 nt, Artificial Sequence
  Description of Artificial Sequence: Synthetic oligonucleotide
  Antisense strand to SEQ ID NO: 985094
uguaaacuccacgagagcg

SEQ ID NO: 985096 - RNA, 19 nt, Artificial Sequence
  Description of Artificial Sequence: Synthetic oligonucleotide
  Sense strand starting at position 1327 of SEQ ID NO: 914192
gaaagugcacagggaauua

SEQ ID NO: 985097 - RNA, 19 nt, Artificial Sequence
  Description of Artificial Sequence: Synthetic oligonucleotide
  Antisense strand to SEQ ID NO: 985096
uaauucccugugcacuuuc

SEQ ID NO: 985098 - RNA, 19 nt, Artificial Sequence
  Description of Artificial Sequence: Synthetic oligonucleotide
  Sense strand starting at position 371 of SEQ ID NO: 914192
cuguauugacauuaaguca

SEQ ID NO: 985099 - RNA, 19 nt, Artificial Sequence
  Description of Artificial Sequence: Synthetic oligonucleotide
  Antisense strand to SEQ ID NO: 985098
ugacuuaaugucaauacag

SEQ ID NO: 985100 - RNA, 19 nt, Artificial Sequence
  Description of Artificial Sequence: Synthetic oligonucleotide
  Sense strand starting at position 2911 of SEQ ID NO: 914192
aacaaaucacagugguuga

SEQ ID NO: 985101 - RNA, 19 nt, Artificial Sequence
  Description of Artificial Sequence: Synthetic oligonucleotide
  Antisense strand to SEQ ID NO: 985100
ucaaccacugugauuuguu

SEQ ID NO: 985102 - RNA, 19 nt, Artificial Sequence
  Description of Artificial Sequence: Synthetic oligonucleotide
  Sense strand starting at position 1433 of SEQ ID NO: 914192
cagagaaauacgcgagaaa

SEQ ID NO: 985103 - RNA, 19 nt, Artificial Sequence
  Description of Artificial Sequence: Synthetic oligonucleotide
  Antisense strand to SEQ ID NO: 985102
uuucucgcguauuucucug

SEQ ID NO: 985104 - RNA, 19 nt, Artificial Sequence
  Description of Artificial Sequence: Synthetic oligonucleotide
  Sense strand starting at position 208 of SEQ ID NO: 914192
gugagucuuccuuauaaga

SEQ ID NO: 985105 - RNA, 19 nt, Artificial Sequence
  Description of Artificial Sequence: Synthetic oligonucleotide
  Antisense strand to SEQ ID NO: 985104
ucuuauaaggaagacucac

SEQ ID NO: 985106 - RNA, 19 nt, Artificial Sequence
  Description of Artificial Sequence: Synthetic oligonucleotide
  Sense strand starting at position 3848 of SEQ ID NO: 914192
gaggccuguaagggauaua

SEQ ID NO: 985107 - RNA, 19 nt, Artificial Sequence
  Description of Artificial Sequence: Synthetic oligonucleotide
  Antisense strand to SEQ ID NO: 985106
uauaucccuuacaggccuc

SEQ ID NO: 985108 - RNA, 19 nt, Artificial Sequence
  Description of Artificial Sequence: Synthetic oligonucleotide
  Sense strand starting at position 3686 of SEQ ID NO: 914192
ggagcuuaaaugggaugua

SEQ ID NO: 985109 - RNA, 19 nt, Artificial Sequence
  Description of Artificial Sequence: Synthetic oligonucleotide
  Antisense strand to SEQ ID NO: 985108
uacaucccauuuaagcucc

SEQ ID NO: 985110 - RNA, 19 nt, Artificial Sequence
  Description of Artificial Sequence: Synthetic oligonucleotide
  Sense strand starting at position 940 of SEQ ID NO: 914192
ggcauacgucuuucgcuua

SEQ ID NO: 985111 - RNA, 19 nt, Artificial Sequence
  Description of Artificial Sequence: Synthetic oligonucleotide
  Antisense strand to SEQ ID NO: 985110
uaagcgaaagacguaugcc

SEQ ID NO: 985112 - RNA, 19 nt, Artificial Sequence
  Description of Artificial Sequence: Synthetic oligonucleotide
  Sense strand starting at position 2573 of SEQ ID NO: 914192
gauauuugcagaugugugu

SEQ ID NO: 985113 - RNA, 19 nt, Artificial Sequence
  Description of Artificial Sequence: Synthetic oligonucleotide
  Antisense strand to SEQ ID NO: 985112
acacacaucugcaaauauc

SEQ ID NO: 985114 - RNA, 19 nt, Artificial Sequence
  Description of Artificial Sequence: Synthetic oligonucleotide
  Sense strand starting at position 996 of SEQ ID NO: 914192
ggauacugcgacuaauccu

SEQ ID NO: 985115 - RNA, 19 nt, Artificial Sequence
  Description of Artificial Sequence: Synthetic oligonucleotide
  Antisense strand to SEQ ID NO: 985114
aggauuagucgcaguaucc

SEQ ID NO: 985116 - RNA, 19 nt, Artificial Sequence
  Description of Artificial Sequence: Synthetic oligonucleotide
  Sense strand starting at position 2310 of SEQ ID NO: 914192
aagugaauggccugaauau

SEQ ID NO: 985117 - RNA, 19 nt, Artificial Sequence
  Description of Artificial Sequence: Synthetic oligonucleotide
  Antisense strand to SEQ ID NO: 985116
auauucaggccauucacuu

SEQ ID NO: 985118 - RNA, 19 nt, Artificial Sequence
  Description of Artificial Sequence: Synthetic oligonucleotide
  Sense strand starting at position 2308 of SEQ ID NO: 914192
ugaagugaauggccugaau

SEQ ID NO: 985119 - RNA, 19 nt, Artificial Sequence
  Description of Artificial Sequence: Synthetic oligonucleotide
  Antisense strand to SEQ ID NO: 985118
auucaggccauucacuuca

SEQ ID NO: 985120 - RNA, 19 nt, Artificial Sequence
  Description of Artificial Sequence: Synthetic oligonucleotide
  Sense strand starting at position 669 of SEQ ID NO: 914192
guuaaaguuuaaguacaga

SEQ ID NO: 985121 - RNA, 19 nt, Artificial Sequence
  Description of Artificial Sequence: Synthetic oligonucleotide
  Antisense strand to SEQ ID NO: 985120
ucuguacuuaaacuuuaac

SEQ ID NO: 985122 - RNA, 19 nt, Artificial Sequence
  Description of Artificial Sequence: Synthetic oligonucleotide
  Sense strand starting at position 291 of SEQ ID NO: 914192
gaaugacugaguggucuug

SEQ ID NO: 985123 - RNA, 19 nt, Artificial Sequence
  Description of Artificial Sequence: Synthetic oligonucleotide
  Antisense strand to SEQ ID NO: 985122
caagaccacucagucauuc

SEQ ID NO: 985124 - RNA, 19 nt, Artificial Sequence
  Description of Artificial Sequence: Synthetic oligonucleotide
  Sense strand starting at position 231 of SEQ ID NO: 914192
gaauuaucugagggcuuuc

SEQ ID NO: 985125 - RNA, 19 nt, Artificial Sequence
  Description of Artificial Sequence: Synthetic oligonucleotide
  Antisense strand to SEQ ID NO: 985124
gaaagcccucagauaauuc

SEQ ID NO: 985126 - RNA, 19 nt, Artificial Sequence
  Description of Artificial Sequence: Synthetic oligonucleotide
  Sense strand starting at position 813 of SEQ ID NO: 914192
agaucuggcuaagcuuaaa

SEQ ID NO: 985127 - RNA, 19 nt, Artificial Sequence
  Description of Artificial Sequence: Synthetic oligonucleotide
  Antisense strand to SEQ ID NO: 985126
uuuaagcuuagccagaucu

SEQ ID NO: 985128 - RNA, 19 nt, Artificial Sequence
  Description of Artificial Sequence: Synthetic oligonucleotide
  Sense strand starting at position 414 of SEQ ID NO: 914192
ccaaauagguuguuauauu

SEQ ID NO: 985129 - RNA, 19 nt, Artificial Sequence
  Description of Artificial Sequence: Synthetic oligonucleotide
  Antisense strand to SEQ ID NO: 985128
aauauaacaaccuauuugg

SEQ ID NO: 985130 - RNA, 19 nt, Artificial Sequence
  Description of Artificial Sequence: Synthetic oligonucleotide
  Sense strand starting at position 303 of SEQ ID NO: 914192
ggucuuguaaaugguagaa

SEQ ID NO: 985131 - RNA, 19 nt, Artificial Sequence
  Description of Artificial Sequence: Synthetic oligonucleotide
  Antisense strand to SEQ ID NO: 985130
uucuaccauuuacaagacc

SEQ ID NO: 985132 - RNA, 19 nt, Artificial Sequence
  Description of Artificial Sequence: Synthetic oligonucleotide
  Sense strand starting at position 3689 of SEQ ID NO: 914192
gcuuaaaugggauguaccu

SEQ ID NO: 985133 - RNA, 19 nt, Artificial Sequence
  Description of Artificial Sequence: Synthetic oligonucleotide
  Antisense strand to SEQ ID NO: 985132
agguacaucccauuuaagc

SEQ ID NO: 985134 - RNA, 19 nt, Artificial Sequence
  Description of Artificial Sequence: Synthetic oligonucleotide
  Sense strand starting at position 89 of SEQ ID NO: 914192
acugucuacuagucuugaa

SEQ ID NO: 985135 - RNA, 19 nt, Artificial Sequence
  Description of Artificial Sequence: Synthetic oligonucleotide
  Antisense strand to SEQ ID NO: 985134
uucaagacuaguagacagu

SEQ ID NO: 985136 - RNA, 19 nt, Artificial Sequence
  Description of Artificial Sequence: Synthetic oligonucleotide
  Sense strand starting at position 2143 of SEQ ID NO: 914192
ugccuuugauaagugaauu

SEQ ID NO: 985137 - RNA, 19 nt, Artificial Sequence
  Description of Artificial Sequence: Synthetic oligonucleotide
  Antisense strand to SEQ ID NO: 985136
aauucacuuaucaaaggca

SEQ ID NO: 985138 - RNA, 19 nt, Artificial Sequence
  Description of Artificial Sequence: Synthetic oligonucleotide
  Sense strand starting at position 302 of SEQ ID NO: 914192
uggucuuguaaaugguaga

SEQ ID NO: 985139 - RNA, 19 nt, Artificial Sequence
  Description of Artificial Sequence: Synthetic oligonucleotide
  Antisense strand to SEQ ID NO: 985138
ucuaccauuuacaagacca

SEQ ID NO: 985140 - RNA, 19 nt, Artificial Sequence
  Description of Artificial Sequence: Synthetic oligonucleotide
  Sense strand starting at position 2599 of SEQ ID NO: 914192
cccaauacauuguuaguuu

SEQ ID NO: 985141 - RNA, 19 nt, Artificial Sequence
  Description of Artificial Sequence: Synthetic oligonucleotide
  Antisense strand to SEQ ID NO: 985140
aaacuaacaauguauuggg

SEQ ID NO: 985142 - RNA, 19 nt, Artificial Sequence
  Description of Artificial Sequence: Synthetic oligonucleotide
  Sense strand starting at position 117 of SEQ ID NO: 914192
uucugugacucuccucaca

SEQ ID NO: 985143 - RNA, 19 nt, Artificial Sequence
  Description of Artificial Sequence: Synthetic oligonucleotide
  Antisense strand to SEQ ID NO: 985142
ugugaggagagucacagaa

SEQ ID NO: 985144 - RNA, 19 nt, Artificial Sequence
  Description of Artificial Sequence: Synthetic oligonucleotide
  Sense strand starting at position 2528 of SEQ ID NO: 914192
acgcuuuaacuauagcacu

SEQ ID NO: 985145 - RNA, 19 nt, Artificial Sequence
  Description of Artificial Sequence: Synthetic oligonucleotide
  Antisense strand to SEQ ID NO: 985144
agugcuauaguuaaagcgu

SEQ ID NO: 985146 - RNA, 19 nt, Artificial Sequence
  Description of Artificial Sequence: Synthetic oligonucleotide
  Sense strand starting at position 1137 of SEQ ID NO: 914192
aguaauuuauagugaaagg

SEQ ID NO: 985147 - RNA, 19 nt, Artificial Sequence
  Description of Artificial Sequence: Synthetic oligonucleotide
  Antisense strand to SEQ ID NO: 985146
ccuuucacuauaaauuacu

SEQ ID NO: 985148 - RNA, 19 nt, Artificial Sequence
  Description of Artificial Sequence: Synthetic oligonucleotide
  Sense strand starting at position 293 of SEQ ID NO: 914192
augacugaguggucuugua

SEQ ID NO: 985149 - RNA, 19 nt, Artificial Sequence
  Description of Artificial Sequence: Synthetic oligonucleotide
  Antisense strand to SEQ ID NO: 985148
uacaagaccacucagucau

SEQ ID NO: 985150 - RNA, 19 nt, Artificial Sequence
  Description of Artificial Sequence: Synthetic oligonucleotide
  Sense strand starting at position 2522 of SEQ ID NO: 914192
guuuauacgcuuuaacuau

SEQ ID NO: 985151 - RNA, 19 nt, Artificial Sequence
  Description of Artificial Sequence: Synthetic oligonucleotide
  Antisense strand to SEQ ID NO: 985150
auaguuaaagcguauaaac

SEQ ID NO: 985152 - RNA, 19 nt, Artificial Sequence
  Description of Artificial Sequence: Synthetic oligonucleotide
  Sense strand starting at position 206 of SEQ ID NO: 914192
cugugagucuuccuuauaa

SEQ ID NO: 985153 - RNA, 19 nt, Artificial Sequence
  Description of Artificial Sequence: Synthetic oligonucleotide
  Antisense strand to SEQ ID NO: 985152
uuauaaggaagacucacag

SEQ ID NO: 985154 - RNA, 19 nt, Artificial Sequence
  Description of Artificial Sequence: Synthetic oligonucleotide
  Sense strand starting at position 2378 of SEQ ID NO: 914192
ucccuucgcacuugaggaa

SEQ ID NO: 985155 - RNA, 19 nt, Artificial Sequence
  Description of Artificial Sequence: Synthetic oligonucleotide
  Antisense strand to SEQ ID NO: 985154
uuccucaagugcgaaggga

SEQ ID NO: 985156 - RNA, 19 nt, Artificial Sequence
  Description of Artificial Sequence: Synthetic oligonucleotide
  Sense strand starting at position 110 of SEQ ID NO: 914192
uguagacuucugugacucu

SEQ ID NO: 985157 - RNA, 19 nt, Artificial Sequence
  Description of Artificial Sequence: Synthetic oligonucleotide
  Antisense strand to SEQ ID NO: 985156
agagucacagaagucuaca

SEQ ID NO: 985158 - RNA, 19 nt, Artificial Sequence
  Description of Artificial Sequence: Synthetic oligonucleotide
  Sense strand starting at position 2569 of SEQ ID NO: 914192
caaugauauuugcagaugu

SEQ ID NO: 985159 - RNA, 19 nt, Artificial Sequence
  Description of Artificial Sequence: Synthetic oligonucleotide
  Antisense strand to SEQ ID NO: 985158
acaucugcaaauaucauug

SEQ ID NO: 985160 - RNA, 19 nt, Artificial Sequence
  Description of Artificial Sequence: Synthetic oligonucleotide
  Sense strand starting at position 20 of SEQ ID NO: 914192
cuacuuacuucuguguaua

SEQ ID NO: 985161 - RNA, 19 nt, Artificial Sequence
  Description of Artificial Sequence: Synthetic oligonucleotide
  Antisense strand to SEQ ID NO: 985160
uauacacagaaguaaguag

SEQ ID NO: 985162 - RNA, 19 nt, Artificial Sequence
  Description of Artificial Sequence: Synthetic oligonucleotide
  Sense strand starting at position 22 of SEQ ID NO: 914192
acuuacuucuguguauauu

SEQ ID NO: 985163 - RNA, 19 nt, Artificial Sequence
  Description of Artificial Sequence: Synthetic oligonucleotide
  Antisense strand to SEQ ID NO: 985162
aauauacacagaaguaagu

SEQ ID NO: 985164 - RNA, 19 nt, Artificial Sequence
  Description of Artificial Sequence: Synthetic oligonucleotide
  Sense strand starting at position 509 of SEQ ID NO: 914192
acauguuagcgucaaagug

SEQ ID NO: 985165 - RNA, 19 nt, Artificial Sequence
  Description of Artificial Sequence: Synthetic oligonucleotide
  Antisense strand to SEQ ID NO: 985164
cacuuugacgcuaacaugu

SEQ ID NO: 985166 - RNA, 19 nt, Artificial Sequence
  Description of Artificial Sequence: Synthetic oligonucleotide
  Sense strand starting at position 3696 of SEQ ID NO: 914192
ugggauguaccuuguagca

SEQ ID NO: 985167 - RNA, 19 nt, Artificial Sequence
  Description of Artificial Sequence: Synthetic oligonucleotide
  Antisense strand to SEQ ID NO: 985166
ugcuacaagguacauccca

SEQ ID NO: 985168 - RNA, 19 nt, Artificial Sequence
  Description of Artificial Sequence: Synthetic oligonucleotide
  Sense strand starting at position 1105 of SEQ ID NO: 914192
uuugucuaaugaguaguuu

SEQ ID NO: 985169 - RNA, 19 nt, Artificial Sequence
  Description of Artificial Sequence: Synthetic oligonucleotide
  Antisense strand to SEQ ID NO: 985168
aaacuacucauuagacaaa

SEQ ID NO: 985170 - RNA, 19 nt, Artificial Sequence
  Description of Artificial Sequence: Synthetic oligonucleotide
  Sense strand starting at position 3058 of SEQ ID NO: 914193
uuuguugcacaagaaacaa

SEQ ID NO: 985171 - RNA, 19 nt, Artificial Sequence
  Description of Artificial Sequence: Synthetic oligonucleotide
  Antisense strand to SEQ ID NO: 985170
uuguuucuugugcaacaaa

SEQ ID NO: 985172 - RNA, 19 nt, Artificial Sequence
  Description of Artificial Sequence: Synthetic oligonucleotide
  Sense strand starting at position 753 of SEQ ID NO: 914193
auuuacauaccguguuuaa

SEQ ID NO: 985173 - RNA, 19 nt, Artificial Sequence
  Description of Artificial Sequence: Synthetic oligonucleotide
  Antisense strand to SEQ ID NO: 985172
uuaaacacgguauguaaau

SEQ ID NO: 985174 - RNA, 19 nt, Artificial Sequence
  Description of Artificial Sequence: Synthetic oligonucleotide
  Sense strand starting at position 1186 of SEQ ID NO: 914193
auuguugcucuuguguuau

SEQ ID NO: 985175 - RNA, 19 nt, Artificial Sequence
  Description of Artificial Sequence: Synthetic oligonucleotide
  Antisense strand to SEQ ID NO: 985174
auaacacaagagcaacaau

SEQ ID NO: 985176 - RNA, 19 nt, Artificial Sequence
  Description of Artificial Sequence: Synthetic oligonucleotide
  Sense strand starting at position 1297 of SEQ ID NO: 914193
uaucauggcgcuguguuaa

SEQ ID NO: 985177 - RNA, 19 nt, Artificial Sequence
  Description of Artificial Sequence: Synthetic oligonucleotide
  Antisense strand to SEQ ID NO: 985176
uuaacacagcgccaugaua

SEQ ID NO: 985178 - RNA, 19 nt, Artificial Sequence
  Description of Artificial Sequence: Synthetic oligonucleotide
  Sense strand starting at position 2551 of SEQ ID NO: 914193
cuuagaaucuagguuggaa

SEQ ID NO: 985179 - RNA, 19 nt, Artificial Sequence
  Description of Artificial Sequence: Synthetic oligonucleotide
  Antisense strand to SEQ ID NO: 985178
uuccaaccuagauucuaag

SEQ ID NO: 985180 - RNA, 19 nt, Artificial Sequence
  Description of Artificial Sequence: Synthetic oligonucleotide
  Sense strand starting at position 154 of SEQ ID NO: 914193
uuugucauugacgaaauga

SEQ ID NO: 985181 - RNA, 19 nt, Artificial Sequence
  Description of Artificial Sequence: Synthetic oligonucleotide
  Antisense strand to SEQ ID NO: 985180
ucauuucgucaaugacaaa

SEQ ID NO: 985182 - RNA, 19 nt, Artificial Sequence
  Description of Artificial Sequence: Synthetic oligonucleotide
  Sense strand starting at position 2571 of SEQ ID NO: 914193
cgucgcaugauggucuuua

SEQ ID NO: 985183 - RNA, 19 nt, Artificial Sequence
  Description of Artificial Sequence: Synthetic oligonucleotide
  Antisense strand to SEQ ID NO: 985182
uaaagaccaucaugcgacg

SEQ ID NO: 985184 - RNA, 19 nt, Artificial Sequence
  Description of Artificial Sequence: Synthetic oligonucleotide
  Sense strand starting at position 874 of SEQ ID NO: 914193
cgaagaaaguuccuggaga

SEQ ID NO: 985185 - RNA, 19 nt, Artificial Sequence
  Description of Artificial Sequence: Synthetic oligonucleotide
  Antisense strand to SEQ ID NO: 985184
ucuccaggaacuuucuucg

SEQ ID NO: 985186 - RNA, 19 nt, Artificial Sequence
  Description of Artificial Sequence: Synthetic oligonucleotide
  Sense strand starting at position 3612 of SEQ ID NO: 914193
uaagcaugagaauguggaa

SEQ ID NO: 985187 - RNA, 19 nt, Artificial Sequence
  Description of Artificial Sequence: Synthetic oligonucleotide
  Antisense strand to SEQ ID NO: 985186
uuccacauucucaugcuua

SEQ ID NO: 985188 - RNA, 19 nt, Artificial Sequence
  Description of Artificial Sequence: Synthetic oligonucleotide
  Sense strand starting at position 1162 of SEQ ID NO: 914193
gguuuaguaaaugaguaca

SEQ ID NO: 985189 - RNA, 19 nt, Artificial Sequence
  Description of Artificial Sequence: Synthetic oligonucleotide
  Antisense strand to SEQ ID NO: 985188
uguacucauuuacuaaacc

SEQ ID NO: 985190 - RNA, 19 nt, Artificial Sequence
  Description of Artificial Sequence: Synthetic oligonucleotide
  Sense strand starting at position 3848 of SEQ ID NO: 914193
uguuaaugcaucucagcgu

SEQ ID NO: 985191 - RNA, 19 nt, Artificial Sequence
  Description of Artificial Sequence: Synthetic oligonucleotide
  Antisense strand to SEQ ID NO: 985190
acgcugagaugcauuaaca

SEQ ID NO: 985192 - RNA, 19 nt, Artificial Sequence
  Description of Artificial Sequence: Synthetic oligonucleotide
  Sense strand starting at position 2785 of SEQ ID NO: 914193
gacguaucacgagauuagg

SEQ ID NO: 985193 - RNA, 19 nt, Artificial Sequence
  Description of Artificial Sequence: Synthetic oligonucleotide
  Antisense strand to SEQ ID NO: 985192
ccuaaucucgugauacguc

SEQ ID NO: 985194 - RNA, 19 nt, Artificial Sequence
  Description of Artificial Sequence: Synthetic oligonucleotide
  Sense strand starting at position 195 of SEQ ID NO: 914193
caauucuguggaugacaau

SEQ ID NO: 985195 - RNA, 19 nt, Artificial Sequence
  Description of Artificial Sequence: Synthetic oligonucleotide
  Antisense strand to SEQ ID NO: 985194
auugucauccacagaauug

SEQ ID NO: 985196 - RNA, 19 nt, Artificial Sequence
  Description of Artificial Sequence: Synthetic oligonucleotide
  Sense strand starting at position 3973 of SEQ ID NO: 914193
gucauauuggaguacagua

SEQ ID NO: 985197 - RNA, 19 nt, Artificial Sequence
  Description of Artificial Sequence: Synthetic oligonucleotide
  Antisense strand to SEQ ID NO: 985196
uacuguacuccaauaugac

SEQ ID NO: 985198 - RNA, 19 nt, Artificial Sequence
  Description of Artificial Sequence: Synthetic oligonucleotide
  Sense strand starting at position 122 of SEQ ID NO: 914193
aucugucaucaguauuaac

SEQ ID NO: 985199 - RNA, 19 nt, Artificial Sequence
  Description of Artificial Sequence: Synthetic oligonucleotide
  Antisense strand to SEQ ID NO: 985198
guuaauacugaugacagau

SEQ ID NO: 985200 - RNA, 19 nt, Artificial Sequence
  Description of Artificial Sequence: Synthetic oligonucleotide
  Sense strand starting at position 3446 of SEQ ID NO: 914193
ugauauauuuaggauucca

SEQ ID NO: 985201 - RNA, 19 nt, Artificial Sequence
  Description of Artificial Sequence: Synthetic oligonucleotide
  Antisense strand to SEQ ID NO: 985200
uggaauccuaaauauauca

SEQ ID NO: 985202 - RNA, 19 nt, Artificial Sequence
  Description of Artificial Sequence: Synthetic oligonucleotide
  Sense strand starting at position 191 of SEQ ID NO: 914193
ccaucaauucuguggauga

SEQ ID NO: 985203 - RNA, 19 nt, Artificial Sequence
  Description of Artificial Sequence: Synthetic oligonucleotide
  Antisense strand to SEQ ID NO: 985202
ucauccacagaauugaugg

SEQ ID NO: 985204 - RNA, 19 nt, Artificial Sequence
  Description of Artificial Sequence: Synthetic oligonucleotide
  Sense strand starting at position 766 of SEQ ID NO: 914193
guuuaacuccugggacaua

SEQ ID NO: 985205 - RNA, 19 nt, Artificial Sequence
  Description of Artificial Sequence: Synthetic oligonucleotide
  Antisense strand to SEQ ID NO: 985204
uaugucccaggaguuaaac

SEQ ID NO: 985206 - RNA, 19 nt, Artificial Sequence
  Description of Artificial Sequence: Synthetic oligonucleotide
  Sense strand starting at position 3321 of SEQ ID NO: 914193
auagaaagcuuuguaaauc

SEQ ID NO: 985207 - RNA, 19 nt, Artificial Sequence
  Description of Artificial Sequence: Synthetic oligonucleotide
  Antisense strand to SEQ ID NO: 985206
gauuuacaaagcuuucuau

SEQ ID NO: 985208 - RNA, 19 nt, Artificial Sequence
  Description of Artificial Sequence: Synthetic oligonucleotide
  Sense strand starting at position 118 of SEQ ID NO: 914193
agaaaucugucaucaguau

SEQ ID NO: 985209 - RNA, 19 nt, Artificial Sequence
  Description of Artificial Sequence: Synthetic oligonucleotide
  Antisense strand to SEQ ID NO: 985208
auacugaugacagauuucu

SEQ ID NO: 985210 - RNA, 19 nt, Artificial Sequence
  Description of Artificial Sequence: Synthetic oligonucleotide
  Sense strand starting at position 765 of SEQ ID NO: 914193
uguuuaacuccugggacau

SEQ ID NO: 985211 - RNA, 19 nt, Artificial Sequence
  Description of Artificial Sequence: Synthetic oligonucleotide
  Antisense strand to SEQ ID NO: 985210
augucccaggaguuaaaca

SEQ ID NO: 985212 - RNA, 19 nt, Artificial Sequence
  Description of Artificial Sequence: Synthetic oligonucleotide
  Sense strand starting at position 922 of SEQ ID NO: 914193
gguaaauaauuccugcaau

SEQ ID NO: 985213 - RNA, 19 nt, Artificial Sequence
  Description of Artificial Sequence: Synthetic oligonucleotide
  Antisense strand to SEQ ID NO: 985212
auugcaggaauuauuuacc

SEQ ID NO: 985214 - RNA, 19 nt, Artificial Sequence
  Description of Artificial Sequence: Synthetic oligonucleotide
  Sense strand starting at position 2576 of SEQ ID NO: 914193
caugauggucuuuacguaa

SEQ ID NO: 985215 - RNA, 19 nt, Artificial Sequence
  Description of Artificial Sequence: Synthetic oligonucleotide
  Antisense strand to SEQ ID NO: 985214
uuacguaaagaccaucaug

SEQ ID NO: 985216 - RNA, 19 nt, Artificial Sequence
  Description of Artificial Sequence: Synthetic oligonucleotide
  Sense strand starting at position 2601 of SEQ ID NO: 914193
gucucaacgcucuacagaa

SEQ ID NO: 985217 - RNA, 19 nt, Artificial Sequence
  Description of Artificial Sequence: Synthetic oligonucleotide
  Antisense strand to SEQ ID NO: 985216
uucuguagagcguugagac

SEQ ID NO: 985218 - RNA, 19 nt, Artificial Sequence
  Description of Artificial Sequence: Synthetic oligonucleotide
  Sense strand starting at position 3625 of SEQ ID NO: 914193
guggaaauuacucgucaaa

SEQ ID NO: 985219 - RNA, 19 nt, Artificial Sequence
  Description of Artificial Sequence: Synthetic oligonucleotide
  Antisense strand to SEQ ID NO: 985218
uuugacgaguaauuuccac

SEQ ID NO: 985220 - RNA, 19 nt, Artificial Sequence
  Description of Artificial Sequence: Synthetic oligonucleotide
  Sense strand starting at position 2652 of SEQ ID NO: 914193
guaaaucaagagcgugaaa

SEQ ID NO: 985221 - RNA, 19 nt, Artificial Sequence
  Description of Artificial Sequence: Synthetic oligonucleotide
  Antisense strand to SEQ ID NO: 985220
uuucacgcucuugauuuac

SEQ ID NO: 985222 - RNA, 19 nt, Artificial Sequence
  Description of Artificial Sequence: Synthetic oligonucleotide
  Sense strand starting at position 668 of SEQ ID NO: 914193
uccugugagcaguauuaau

SEQ ID NO: 985223 - RNA, 19 nt, Artificial Sequence
  Description of Artificial Sequence: Synthetic oligonucleotide
  Antisense strand to SEQ ID NO: 985222
auuaauacugcucacagga

SEQ ID NO: 985224 - RNA, 19 nt, Artificial Sequence
  Description of Artificial Sequence: Synthetic oligonucleotide
  Sense strand starting at position 2682 of SEQ ID NO: 914193
uucuguguagguuaacauu

SEQ ID NO: 985225 - RNA, 19 nt, Artificial Sequence
  Description of Artificial Sequence: Synthetic oligonucleotide
  Antisense strand to SEQ ID NO: 985224
aauguuaaccuacacagaa

SEQ ID NO: 985226 - RNA, 19 nt, Artificial Sequence
  Description of Artificial Sequence: Synthetic oligonucleotide
  Sense strand starting at position 1161 of SEQ ID NO: 914193
ugguuuaguaaaugaguac

SEQ ID NO: 985227 - RNA, 19 nt, Artificial Sequence
  Description of Artificial Sequence: Synthetic oligonucleotide
  Antisense strand to SEQ ID NO: 985226
guacucauuuacuaaacca

SEQ ID NO: 985228 - RNA, 19 nt, Artificial Sequence
  Description of Artificial Sequence: Synthetic oligonucleotide
  Sense strand starting at position 3767 of SEQ ID NO: 914193
uuuauugucagaggucuga

SEQ ID NO: 985229 - RNA, 19 nt, Artificial Sequence
  Description of Artificial Sequence: Synthetic oligonucleotide
  Antisense strand to SEQ ID NO: 985228
ucagaccucugacaauaaa

SEQ ID NO: 985230 - RNA, 19 nt, Artificial Sequence
  Description of Artificial Sequence: Synthetic oligonucleotide
  Sense strand starting at position 20 of SEQ ID NO: 914193
ucguaauaacacuguuaga

SEQ ID NO: 985231 - RNA, 19 nt, Artificial Sequence
  Description of Artificial Sequence: Synthetic oligonucleotide
  Antisense strand to SEQ ID NO: 985230
ucuaacaguguuauuacga

SEQ ID NO: 985232 - RNA, 19 nt, Artificial Sequence
  Description of Artificial Sequence: Synthetic oligonucleotide
  Sense strand starting at position 3624 of SEQ ID NO: 914193
uguggaaauuacucgucaa

SEQ ID NO: 985233 - RNA, 19 nt, Artificial Sequence
  Description of Artificial Sequence: Synthetic oligonucleotide
  Antisense strand to SEQ ID NO: 985232
uugacgaguaauuuccaca

SEQ ID NO: 985234 - RNA, 19 nt, Artificial Sequence
  Description of Artificial Sequence: Synthetic oligonucleotide
  Sense strand starting at position 2579 of SEQ ID NO: 914193
gauggucuuuacguaaaca

SEQ ID NO: 985235 - RNA, 19 nt, Artificial Sequence
  Description of Artificial Sequence: Synthetic oligonucleotide
  Antisense strand to SEQ ID NO: 985234
uguuuacguaaagaccauc

SEQ ID NO: 985236 - RNA, 19 nt, Artificial Sequence
  Description of Artificial Sequence: Synthetic oligonucleotide
  Sense strand starting at position 1417 of SEQ ID NO: 914193
ccaagugcuucccuggaga

SEQ ID NO: 985237 - RNA, 19 nt, Artificial Sequence
  Description of Artificial Sequence: Synthetic oligonucleotide
  Antisense strand to SEQ ID NO: 985236
ucuccagggaagcacuugg

SEQ ID NO: 985238 - RNA, 19 nt, Artificial Sequence
  Description of Artificial Sequence: Synthetic oligonucleotide
  Sense strand starting at position 3415 of SEQ ID NO: 914193
ccaagaauaucgcuaaugu

SEQ ID NO: 985239 - RNA, 19 nt, Artificial Sequence
  Description of Artificial Sequence: Synthetic oligonucleotide
  Antisense strand to SEQ ID NO: 985238
acauuagcgauauucuugg

SEQ ID NO: 985240 - RNA, 19 nt, Artificial Sequence
  Description of Artificial Sequence: Synthetic oligonucleotide
  Sense strand starting at position 1390 of SEQ ID NO: 914193
aggccauucuccucucuga

SEQ ID NO: 985241 - RNA, 19 nt, Artificial Sequence
  Description of Artificial Sequence: Synthetic oligonucleotide
  Antisense strand to SEQ ID NO: 985240
ucagagaggagaauggccu

SEQ ID NO: 985242 - RNA, 19 nt, Artificial Sequence
  Description of Artificial Sequence: Synthetic oligonucleotide
  Sense strand starting at position 3528 of SEQ ID NO: 914193
gaggaucagucgcuuuaca

SEQ ID NO: 985243 - RNA, 19 nt, Artificial Sequence
  Description of Artificial Sequence: Synthetic oligonucleotide
  Antisense strand to SEQ ID NO: 985242
uguaaagcgacugauccuc

SEQ ID NO: 985244 - RNA, 19 nt, Artificial Sequence
  Description of Artificial Sequence: Synthetic oligonucleotide
  Sense strand starting at position 3765 of SEQ ID NO: 914193
aauuuauugucagaggucu

SEQ ID NO: 985245 - RNA, 19 nt, Artificial Sequence
  Description of Artificial Sequence: Synthetic oligonucleotide
  Antisense strand to SEQ ID NO: 985244
agaccucugacaauaaauu

SEQ ID NO: 985246 - RNA, 19 nt, Artificial Sequence
  Description of Artificial Sequence: Synthetic oligonucleotide
  Sense strand starting at position 807 of SEQ ID NO: 914193
cgaauuugaucaggaaagu

SEQ ID NO: 985247 - RNA, 19 nt, Artificial Sequence
  Description of Artificial Sequence: Synthetic oligonucleotide
  Antisense strand to SEQ ID NO: 985246
acuuuccugaucaaauucg

SEQ ID NO: 985248 - RNA, 19 nt, Artificial Sequence
  Description of Artificial Sequence: Synthetic oligonucleotide
  Sense strand starting at position 3241 of SEQ ID NO: 914193
uuuagagguugugacauuu

SEQ ID NO: 985249 - RNA, 19 nt, Artificial Sequence
  Description of Artificial Sequence: Synthetic oligonucleotide
  Antisense strand to SEQ ID NO: 985248
aaaugucacaaccucuaaa

SEQ ID NO: 985250 - RNA, 19 nt, Artificial Sequence
  Description of Artificial Sequence: Synthetic oligonucleotide
  Sense strand starting at position 70 of SEQ ID NO: 914194
uggucaaauuucucugcau

SEQ ID NO: 985251 - RNA, 19 nt, Artificial Sequence
  Description of Artificial Sequence: Synthetic oligonucleotide
  Antisense strand to SEQ ID NO: 985250
augcagagaaauuugacca

SEQ ID NO: 985252 - RNA, 19 nt, Artificial Sequence
  Description of Artificial Sequence: Synthetic oligonucleotide
  Sense strand starting at position 77 of SEQ ID NO: 914194
auuucucugcauggcauaa

SEQ ID NO: 985253 - RNA, 19 nt, Artificial Sequence
  Description of Artificial Sequence: Synthetic oligonucleotide
  Antisense strand to SEQ ID NO: 985252
uuaugccaugcagagaaau

SEQ ID NO: 985254 - RNA, 19 nt, Artificial Sequence
  Description of Artificial Sequence: Synthetic oligonucleotide
  Sense strand starting at position 2138 of SEQ ID NO: 914194
gagaaagauugagucgauc

SEQ ID NO: 985255 - RNA, 19 nt, Artificial Sequence
  Description of Artificial Sequence: Synthetic oligonucleotide
  Antisense strand to SEQ ID NO: 985254
gaucgacucaaucuuucuc

SEQ ID NO: 985256 - RNA, 19 nt, Artificial Sequence
  Description of Artificial Sequence: Synthetic oligonucleotide
  Sense strand starting at position 886 of SEQ ID NO: 914194
agcuuaucucagcaaagaa

SEQ ID NO: 985257 - RNA, 19 nt, Artificial Sequence
  Description of Artificial Sequence: Synthetic oligonucleotide
  Antisense strand to SEQ ID NO: 985256
uucuuugcugagauaagcu

SEQ ID NO: 985258 - RNA, 19 nt, Artificial Sequence
  Description of Artificial Sequence: Synthetic oligonucleotide
  Sense strand starting at position 196 of SEQ ID NO: 914194
cagauucuuggugaaguac

SEQ ID NO: 985259 - RNA, 19 nt, Artificial Sequence
  Description of Artificial Sequence: Synthetic oligonucleotide
  Antisense strand to SEQ ID NO: 985258
guacuucaccaagaaucug

SEQ ID NO: 985260 - RNA, 19 nt, Artificial Sequence
  Description of Artificial Sequence: Synthetic oligonucleotide
  Sense strand starting at position 3059 of SEQ ID NO: 914194
cagacugaugucuauguag

SEQ ID NO: 985261 - RNA, 19 nt, Artificial Sequence
  Description of Artificial Sequence: Synthetic oligonucleotide
  Antisense strand to SEQ ID NO: 985260
cuacauagacaucagucug

SEQ ID NO: 985262 - RNA, 19 nt, Artificial Sequence
  Description of Artificial Sequence: Synthetic oligonucleotide
  Sense strand starting at position 1796 of SEQ ID NO: 914194
cagguaagaguccagguua

SEQ ID NO: 985263 - RNA, 19 nt, Artificial Sequence
  Description of Artificial Sequence: Synthetic oligonucleotide
  Antisense strand to SEQ ID NO: 985262
uaaccuggacucuuaccug

SEQ ID NO: 985264 - RNA, 19 nt, Artificial Sequence
  Description of Artificial Sequence: Synthetic oligonucleotide
  Sense strand starting at position 957 of SEQ ID NO: 914194
uguuaaauagauggucaaa

SEQ ID NO: 985265 - RNA, 19 nt, Artificial Sequence
  Description of Artificial Sequence: Synthetic oligonucleotide
  Antisense strand to SEQ ID NO: 985264
uuugaccaucuauuuaaca

SEQ ID NO: 985266 - RNA, 19 nt, Artificial Sequence
  Description of Artificial Sequence: Synthetic oligonucleotide
  Sense strand starting at position 2585 of SEQ ID NO: 914194
cuaaguuagaaaggcuaga

SEQ ID NO: 985267 - RNA, 19 nt, Artificial Sequence
  Description of Artificial Sequence: Synthetic oligonucleotide
  Antisense strand to SEQ ID NO: 985266
ucuagccuuucuaacuuag

SEQ ID NO: 985268 - RNA, 19 nt, Artificial Sequence
  Description of Artificial Sequence: Synthetic oligonucleotide
  Sense strand starting at position 1360 of SEQ ID NO: 914194
uugagcaauuacuuagaau

SEQ ID NO: 985269 - RNA, 19 nt, Artificial Sequence
  Description of Artificial Sequence: Synthetic oligonucleotide
  Antisense strand to SEQ ID NO: 985268
auucuaaguaauugcucaa

SEQ ID NO: 985270 - RNA, 19 nt, Artificial Sequence
  Description of Artificial Sequence: Synthetic oligonucleotide
  Sense strand starting at position 447 of SEQ ID NO: 914194
ucaguaucggaaugaaaug

SEQ ID NO: 985271 - RNA, 19 nt, Artificial Sequence
  Description of Artificial Sequence: Synthetic oligonucleotide
  Antisense strand to SEQ ID NO: 985270
cauuucauuccgauacuga

SEQ ID NO: 985272 - RNA, 19 nt, Artificial Sequence
  Description of Artificial Sequence: Synthetic oligonucleotide
  Sense strand starting at position 1127 of SEQ ID NO: 914194
gcuaaaugagaauggugau

SEQ ID NO: 985273 - RNA, 19 nt, Artificial Sequence
  Description of Artificial Sequence: Synthetic oligonucleotide
  Antisense strand to SEQ ID NO: 985272
aucaccauucucauuuagc

SEQ ID NO: 985274 - RNA, 19 nt, Artificial Sequence
  Description of Artificial Sequence: Synthetic oligonucleotide
  Sense strand starting at position 2050 of SEQ ID NO: 914194
cugccaaacguccaaagaa

SEQ ID NO: 985275 - RNA, 19 nt, Artificial Sequence
  Description of Artificial Sequence: Synthetic oligonucleotide
  Antisense strand to SEQ ID NO: 985274
uucuuuggacguuuggcag

SEQ ID NO: 985276 - RNA, 19 nt, Artificial Sequence
  Description of Artificial Sequence: Synthetic oligonucleotide
  Sense strand starting at position 614 of SEQ ID NO: 914194
guagaaaugcucugaaaua

SEQ ID NO: 985277 - RNA, 19 nt, Artificial Sequence
  Description of Artificial Sequence: Synthetic oligonucleotide
  Antisense strand to SEQ ID NO: 985276
uauuucagagcauuucuac

SEQ ID NO: 985278 - RNA, 19 nt, Artificial Sequence
  Description of Artificial Sequence: Synthetic oligonucleotide
  Sense strand starting at position 194 of SEQ ID NO: 914194
aacagauucuuggugaagu

SEQ ID NO: 985279 - RNA, 19 nt, Artificial Sequence
  Description of Artificial Sequence: Synthetic oligonucleotide
  Antisense strand to SEQ ID NO: 985278
acuucaccaagaaucuguu

SEQ ID NO: 985280 - RNA, 19 nt, Artificial Sequence
  Description of Artificial Sequence: Synthetic oligonucleotide
  Sense strand starting at position 1139 of SEQ ID NO: 914194
uggugaugauauucuuuag

SEQ ID NO: 985281 - RNA, 19 nt, Artificial Sequence
  Description of Artificial Sequence: Synthetic oligonucleotide
  Antisense strand to SEQ ID NO: 985280
cuaaagaauaucaucacca

SEQ ID NO: 985282 - RNA, 19 nt, Artificial Sequence
  Description of Artificial Sequence: Synthetic oligonucleotide
  Sense strand starting at position 2999 of SEQ ID NO: 914194
uucuguucccuagggagga

SEQ ID NO: 985283 - RNA, 19 nt, Artificial Sequence
  Description of Artificial Sequence: Synthetic oligonucleotide
  Antisense strand to SEQ ID NO: 985282
uccucccuagggaacagaa

SEQ ID NO: 985284 - RNA, 19 nt, Artificial Sequence
  Description of Artificial Sequence: Synthetic oligonucleotide
  Sense strand starting at position 1151 of SEQ ID NO: 914194
ucuuuagcauuuguguuua

SEQ ID NO: 985285 - RNA, 19 nt, Artificial Sequence
  Description of Artificial Sequence: Synthetic oligonucleotide
  Antisense strand to SEQ ID NO: 985284
uaaacacaaaugcuaaaga

SEQ ID NO: 985286 - RNA, 19 nt, Artificial Sequence
  Description of Artificial Sequence: Synthetic oligonucleotide
  Sense strand starting at position 395 of SEQ ID NO: 914194
acacuugaauuuggacaga

SEQ ID NO: 985287 - RNA, 19 nt, Artificial Sequence
  Description of Artificial Sequence: Synthetic oligonucleotide
  Antisense strand to SEQ ID NO: 985286
ucuguccaaauucaagugu

SEQ ID NO: 985288 - RNA, 19 nt, Artificial Sequence
  Description of Artificial Sequence: Synthetic oligonucleotide
  Sense strand starting at position 1142 of SEQ ID NO: 914194
ugaugauauucuuuagcau

SEQ ID NO: 985289 - RNA, 19 nt, Artificial Sequence
  Description of Artificial Sequence: Synthetic oligonucleotide
  Antisense strand to SEQ ID NO: 985288
augcuaaagaauaucauca

SEQ ID NO: 985290 - RNA, 19 nt, Artificial Sequence
  Description of Artificial Sequence: Synthetic oligonucleotide
  Sense strand starting at position 1113 of SEQ ID NO: 914194
ugugguuuccaagagcuaa

SEQ ID NO: 985291 - RNA, 19 nt, Artificial Sequence
  Description of Artificial Sequence: Synthetic oligonucleotide
  Antisense strand to SEQ ID NO: 985290
uuagcucuuggaaaccaca

SEQ ID NO: 985292 - RNA, 19 nt, Artificial Sequence
  Description of Artificial Sequence: Synthetic oligonucleotide
  Sense strand starting at position 3058 of SEQ ID NO: 914194
ccagacugaugucuaugua

SEQ ID NO: 985293 - RNA, 19 nt, Artificial Sequence
  Description of Artificial Sequence: Synthetic oligonucleotide
  Antisense strand to SEQ ID NO: 985292
uacauagacaucagucugg

SEQ ID NO: 985294 - RNA, 19 nt, Artificial Sequence
  Description of Artificial Sequence: Synthetic oligonucleotide
  Sense strand starting at position 1471 of SEQ ID NO: 914194
gguagaacuugcuuugaac

SEQ ID NO: 985295 - RNA, 19 nt, Artificial Sequence
  Description of Artificial Sequence: Synthetic oligonucleotide
  Antisense strand to SEQ ID NO: 985294
guucaaagcaaguucuacc

SEQ ID NO: 985296 - RNA, 19 nt, Artificial Sequence
  Description of Artificial Sequence: Synthetic oligonucleotide
  Sense strand starting at position 1569 of SEQ ID NO: 914194
gggaauauuuguggaauag

SEQ ID NO: 985297 - RNA, 19 nt, Artificial Sequence
  Description of Artificial Sequence: Synthetic oligonucleotide
  Antisense strand to SEQ ID NO: 985296
cuauuccacaaauauuccc

SEQ ID NO: 985298 - RNA, 19 nt, Artificial Sequence
  Description of Artificial Sequence: Synthetic oligonucleotide
  Sense strand starting at position 2753 of SEQ ID NO: 914194
agccuaguaaggugacaau

SEQ ID NO: 985299 - RNA, 19 nt, Artificial Sequence
  Description of Artificial Sequence: Synthetic oligonucleotide
  Antisense strand to SEQ ID NO: 985298
auugucaccuuacuaggcu

SEQ ID NO: 985300 - RNA, 19 nt, Artificial Sequence
  Description of Artificial Sequence: Synthetic oligonucleotide
  Sense strand starting at position 1666 of SEQ ID NO: 914194
gccauaaauuuaggaagag

SEQ ID NO: 985301 - RNA, 19 nt, Artificial Sequence
  Description of Artificial Sequence: Synthetic oligonucleotide
  Antisense strand to SEQ ID NO: 985300
cucuuccuaaauuuauggc

SEQ ID NO: 985302 - RNA, 19 nt, Artificial Sequence
  Description of Artificial Sequence: Synthetic oligonucleotide
  Sense strand starting at position 2402 of SEQ ID NO: 914194
uccagaaaggacugugcuu

SEQ ID NO: 985303 - RNA, 19 nt, Artificial Sequence
  Description of Artificial Sequence: Synthetic oligonucleotide
  Antisense strand to SEQ ID NO: 985302
aagcacaguccuuucugga

SEQ ID NO: 985304 - RNA, 19 nt, Artificial Sequence
  Description of Artificial Sequence: Synthetic oligonucleotide
  Sense strand starting at position 2039 of SEQ ID NO: 914194
gugaaauggagcugccaaa

SEQ ID NO: 985305 - RNA, 19 nt, Artificial Sequence
  Description of Artificial Sequence: Synthetic oligonucleotide
  Antisense strand to SEQ ID NO: 985304
uuuggcagcuccauuucac

SEQ ID NO: 985306 - RNA, 19 nt, Artificial Sequence
  Description of Artificial Sequence: Synthetic oligonucleotide
  Sense strand starting at position 2577 of SEQ ID NO: 914194
uucucugucuaaguuagaa

SEQ ID NO: 985307 - RNA, 19 nt, Artificial Sequence
  Description of Artificial Sequence: Synthetic oligonucleotide
  Antisense strand to SEQ ID NO: 985306
uucuaacuuagacagagaa

SEQ ID NO: 985308 - RNA, 19 nt, Artificial Sequence
  Description of Artificial Sequence: Synthetic oligonucleotide
  Sense strand starting at position 3416 of SEQ ID NO: 914194
agacaauggucuuuguucu

SEQ ID NO: 985309 - RNA, 19 nt, Artificial Sequence
  Description of Artificial Sequence: Synthetic oligonucleotide
  Antisense strand to SEQ ID NO: 985308
agaacaaagaccauugucu

SEQ ID NO: 985310 - RNA, 19 nt, Artificial Sequence
  Description of Artificial Sequence: Synthetic oligonucleotide
  Sense strand starting at position 2574 of SEQ ID NO: 914194
guauucucugucuaaguua

SEQ ID NO: 985311 - RNA, 19 nt, Artificial Sequence
  Description of Artificial Sequence: Synthetic oligonucleotide
  Antisense strand to SEQ ID NO: 985310
uaacuuagacagagaauac

SEQ ID NO: 985312 - RNA, 19 nt, Artificial Sequence
  Description of Artificial Sequence: Synthetic oligonucleotide
  Sense strand starting at position 3641 of SEQ ID NO: 914194
gugagaugagcuuggucag

SEQ ID NO: 985313 - RNA, 19 nt, Artificial Sequence
  Description of Artificial Sequence: Synthetic oligonucleotide
  Antisense strand to SEQ ID NO: 985312
cugaccaagcucaucucac

SEQ ID NO: 985314 - RNA, 19 nt, Artificial Sequence
  Description of Artificial Sequence: Synthetic oligonucleotide
  Sense strand starting at position 1086 of SEQ ID NO: 914194
ugaacaguugcauguauag

SEQ ID NO: 985315 - RNA, 19 nt, Artificial Sequence
  Description of Artificial Sequence: Synthetic oligonucleotide
  Antisense strand to SEQ ID NO: 985314
cuauacaugcaacuguuca

SEQ ID NO: 985316 - RNA, 19 nt, Artificial Sequence
  Description of Artificial Sequence: Synthetic oligonucleotide
  Sense strand starting at position 3262 of SEQ ID NO: 914194
gucuaauuauacucuuagu

SEQ ID NO: 985317 - RNA, 19 nt, Artificial Sequence
  Description of Artificial Sequence: Synthetic oligonucleotide
  Antisense strand to SEQ ID NO: 985316
acuaagaguauaauuagac

SEQ ID NO: 985318 - RNA, 19 nt, Artificial Sequence
  Description of Artificial Sequence: Synthetic oligonucleotide
  Sense strand starting at position 1187 of SEQ ID NO: 914194
ucauauacguuaucugauu

SEQ ID NO: 985319 - RNA, 19 nt, Artificial Sequence
  Description of Artificial Sequence: Synthetic oligonucleotide
  Antisense strand to SEQ ID NO: 985318
aaucagauaacguauauga

SEQ ID NO: 985320 - RNA, 19 nt, Artificial Sequence
  Description of Artificial Sequence: Synthetic oligonucleotide
  Sense strand starting at position 3635 of SEQ ID NO: 914194
cuuauugugagaugagcuu

SEQ ID NO: 985321 - RNA, 19 nt, Artificial Sequence
  Description of Artificial Sequence: Synthetic oligonucleotide
  Antisense strand to SEQ ID NO: 985320
aagcucaucucacaauaag

SEQ ID NO: 985322 - RNA, 19 nt, Artificial Sequence
  Description of Artificial Sequence: Synthetic oligonucleotide
  Sense strand starting at position 1092 of SEQ ID NO: 914194
guugcauguauagauaguu

SEQ ID NO: 985323 - RNA, 19 nt, Artificial Sequence
  Description of Artificial Sequence: Synthetic oligonucleotide
  Antisense strand to SEQ ID NO: 985322
aacuaucuauacaugcaac

SEQ ID NO: 985324 - RNA, 19 nt, Artificial Sequence
  Description of Artificial Sequence: Synthetic oligonucleotide
  Sense strand starting at position 740 of SEQ ID NO: 914194
ggugguucugcuuauaauc

SEQ ID NO: 985325 - RNA, 19 nt, Artificial Sequence
  Description of Artificial Sequence: Synthetic oligonucleotide
  Antisense strand to SEQ ID NO: 985324
gauuauaagcagaaccacc

SEQ ID NO: 985326 - RNA, 19 nt, Artificial Sequence
  Description of Artificial Sequence: Synthetic oligonucleotide
  Sense strand starting at position 2817 of SEQ ID NO: 914194
auaauaguguaggcuuauu

SEQ ID NO: 985327 - RNA, 19 nt, Artificial Sequence
  Description of Artificial Sequence: Synthetic oligonucleotide
  Antisense strand to SEQ ID NO: 985326
aauaagccuacacuauuau

SEQ ID NO: 985328 - RNA, 19 nt, Artificial Sequence
  Description of Artificial Sequence: Synthetic oligonucleotide
  Sense strand starting at position 3642 of SEQ ID NO: 914194
ugagaugagcuuggucagu

SEQ ID NO: 985329 - RNA, 19 nt, Artificial Sequence
  Description of Artificial Sequence: Synthetic oligonucleotide
  Antisense strand to SEQ ID NO: 985328
acugaccaagcucaucuca

SEQ ID NO: 985330 - RNA, 19 nt, Artificial Sequence
  Description of Artificial Sequence: Synthetic oligonucleotide
  Sense strand starting at position 1384 of SEQ ID NO: 914195
gugacagaucaguagagug

SEQ ID NO: 985331 - RNA, 19 nt, Artificial Sequence
  Description of Artificial Sequence: Synthetic oligonucleotide
  Antisense strand to SEQ ID NO: 985330
cacucuacugaucugucac

SEQ ID NO: 985332 - RNA, 19 nt, Artificial Sequence
  Description of Artificial Sequence: Synthetic oligonucleotide
  Sense strand starting at position 1389 of SEQ ID NO: 914195
agaucaguagagugaauug

SEQ ID NO: 985333 - RNA, 19 nt, Artificial Sequence
  Description of Artificial Sequence: Synthetic oligonucleotide
  Antisense strand to SEQ ID NO: 985332
caauucacucuacugaucu

SEQ ID NO: 985334 - RNA, 19 nt, Artificial Sequence
  Description of Artificial Sequence: Synthetic oligonucleotide
  Sense strand starting at position 2359 of SEQ ID NO: 914195
ggucucaagcuuuagaaau

SEQ ID NO: 985335 - RNA, 19 nt, Artificial Sequence
  Description of Artificial Sequence: Synthetic oligonucleotide
  Antisense strand to SEQ ID NO: 985334
auuucuaaagcuugagacc

SEQ ID NO: 985336 - RNA, 19 nt, Artificial Sequence
  Description of Artificial Sequence: Synthetic oligonucleotide
  Sense strand starting at position 1443 of SEQ ID NO: 914195
uuagauuccuggguaacag

SEQ ID NO: 985337 - RNA, 19 nt, Artificial Sequence
  Description of Artificial Sequence: Synthetic oligonucleotide
  Antisense strand to SEQ ID NO: 985336
cuguuacccaggaaucuaa

SEQ ID NO: 985338 - RNA, 19 nt, Artificial Sequence
  Description of Artificial Sequence: Synthetic oligonucleotide
  Sense strand starting at position 3870 of SEQ ID NO: 914195
agagaaauaccuugcauuc

SEQ ID NO: 985339 - RNA, 19 nt, Artificial Sequence
  Description of Artificial Sequence: Synthetic oligonucleotide
  Antisense strand to SEQ ID NO: 985338
gaaugcaagguauuucucu

SEQ ID NO: 985340 - RNA, 19 nt, Artificial Sequence
  Description of Artificial Sequence: Synthetic oligonucleotide
  Sense strand starting at position 1231 of SEQ ID NO: 914195
gggaaauuaucugucucac

SEQ ID NO: 985341 - RNA, 19 nt, Artificial Sequence
  Description of Artificial Sequence: Synthetic oligonucleotide
  Antisense strand to SEQ ID NO: 985340
gugagacagauaauuuccc

SEQ ID NO: 985342 - RNA, 19 nt, Artificial Sequence
  Description of Artificial Sequence: Synthetic oligonucleotide
  Sense strand starting at position 253 of SEQ ID NO: 914195
ucccucuggccauaaugau

SEQ ID NO: 985343 - RNA, 19 nt, Artificial Sequence
  Description of Artificial Sequence: Synthetic oligonucleotide
  Antisense strand to SEQ ID NO: 985342
aucauuauggccagaggga

SEQ ID NO: 985344 - RNA, 19 nt, Artificial Sequence
  Description of Artificial Sequence: Synthetic oligonucleotide
  Sense strand starting at position 3540 of SEQ ID NO: 914195
acucaaagucguuauugaa

SEQ ID NO: 985345 - RNA, 19 nt, Artificial Sequence
  Description of Artificial Sequence: Synthetic oligonucleotide
  Antisense strand to SEQ ID NO: 985344
uucaauaacgacuuugagu

SEQ ID NO: 985346 - RNA, 19 nt, Artificial Sequence
  Description of Artificial Sequence: Synthetic oligonucleotide
  Sense strand starting at position 1442 of SEQ ID NO: 914195
uuuagauuccuggguaaca

SEQ ID NO: 985347 - RNA, 19 nt, Artificial Sequence
  Description of Artificial Sequence: Synthetic oligonucleotide
  Antisense strand to SEQ ID NO: 985346
uguuacccaggaaucuaaa

SEQ ID NO: 985348 - RNA, 19 nt, Artificial Sequence
  Description of Artificial Sequence: Synthetic oligonucleotide
  Sense strand starting at position 2232 of SEQ ID NO: 914195
aagggcuuugccgaauaaa

SEQ ID NO: 985349 - RNA, 19 nt, Artificial Sequence
  Description of Artificial Sequence: Synthetic oligonucleotide
  Antisense strand to SEQ ID NO: 985348
uuuauucggcaaagcccuu

SEQ ID NO: 985350 - RNA, 19 nt, Artificial Sequence
  Description of Artificial Sequence: Synthetic oligonucleotide
  Sense strand starting at position 3489 of SEQ ID NO: 914195
ugguguaaggccuaauaua

SEQ ID NO: 985351 - RNA, 19 nt, Artificial Sequence
  Description of Artificial Sequence: Synthetic oligonucleotide
  Antisense strand to SEQ ID NO: 985350
uauauuaggccuuacacca

SEQ ID NO: 985352 - RNA, 19 nt, Artificial Sequence
  Description of Artificial Sequence: Synthetic oligonucleotide
  Sense strand starting at position 1219 of SEQ ID NO: 914195
uaacuugaggccgggaaau

SEQ ID NO: 985353 - RNA, 19 nt, Artificial Sequence
  Description of Artificial Sequence: Synthetic oligonucleotide
  Antisense strand to SEQ ID NO: 985352
auuucccggccucaaguua

SEQ ID NO: 985354 - RNA, 19 nt, Artificial Sequence
  Description of Artificial Sequence: Synthetic oligonucleotide
  Sense strand starting at position 1383 of SEQ ID NO: 914195
ggugacagaucaguagagu

SEQ ID NO: 985355 - RNA, 19 nt, Artificial Sequence
  Description of Artificial Sequence: Synthetic oligonucleotide
  Antisense strand to SEQ ID NO: 985354
acucuacugaucugucacc

SEQ ID NO: 985356 - RNA, 19 nt, Artificial Sequence
  Description of Artificial Sequence: Synthetic oligonucleotide
  Sense strand starting at position 1504 of SEQ ID NO: 914195
gggccaacuuccuccaaga

SEQ ID NO: 985357 - RNA, 19 nt, Artificial Sequence
  Description of Artificial Sequence: Synthetic oligonucleotide
  Antisense strand to SEQ ID NO: 985356
ucuuggaggaaguuggccc

SEQ ID NO: 985358 - RNA, 19 nt, Artificial Sequence
  Description of Artificial Sequence: Synthetic oligonucleotide
  Sense strand starting at position 1425 of SEQ ID NO: 914195
gagauuguaacuugagguu

SEQ ID NO: 985359 - RNA, 19 nt, Artificial Sequence
  Description of Artificial Sequence: Synthetic oligonucleotide
  Antisense strand to SEQ ID NO: 985358
aaccucaaguuacaaucuc

SEQ ID NO: 985360 - RNA, 19 nt, Artificial Sequence
  Description of Artificial Sequence: Synthetic oligonucleotide
  Sense strand starting at position 2695 of SEQ ID NO: 914195
cccucugaugugcaucaga

SEQ ID NO: 985361 - RNA, 19 nt, Artificial Sequence
  Description of Artificial Sequence: Synthetic oligonucleotide
  Antisense strand to SEQ ID NO: 985360
ucugaugcacaucagaggg

SEQ ID NO: 985362 - RNA, 19 nt, Artificial Sequence
  Description of Artificial Sequence: Synthetic oligonucleotide
  Sense strand starting at position 3401 of SEQ ID NO: 914195
uucccuggugcuuagaaca

SEQ ID NO: 985363 - RNA, 19 nt, Artificial Sequence
  Description of Artificial Sequence: Synthetic oligonucleotide
  Antisense strand to SEQ ID NO: 985362
uguucuaagcaccagggaa

SEQ ID NO: 985364 - RNA, 19 nt, Artificial Sequence
  Description of Artificial Sequence: Synthetic oligonucleotide
  Sense strand starting at position 2209 of SEQ ID NO: 914195
gucgucauuccucaaagag

SEQ ID NO: 985365 - RNA, 19 nt, Artificial Sequence
  Description of Artificial Sequence: Synthetic oligonucleotide
  Antisense strand to SEQ ID NO: 985364
cucuuugaggaaugacgac

SEQ ID NO: 985366 - RNA, 19 nt, Artificial Sequence
  Description of Artificial Sequence: Synthetic oligonucleotide
  Sense strand starting at position 2547 of SEQ ID NO: 914195
gcuacucuauucuuaagag

SEQ ID NO: 985367 - RNA, 19 nt, Artificial Sequence
  Description of Artificial Sequence: Synthetic oligonucleotide
  Antisense strand to SEQ ID NO: 985366
cucuuaagaauagaguagc

SEQ ID NO: 985368 - RNA, 19 nt, Artificial Sequence
  Description of Artificial Sequence: Synthetic oligonucleotide
  Sense strand starting at position 1439 of SEQ ID NO: 914195
agguuuagauuccugggua

SEQ ID NO: 985369 - RNA, 19 nt, Artificial Sequence
  Description of Artificial Sequence: Synthetic oligonucleotide
  Antisense strand to SEQ ID NO: 985368
uacccaggaaucuaaaccu

SEQ ID NO: 985370 - RNA, 19 nt, Artificial Sequence
  Description of Artificial Sequence: Synthetic oligonucleotide
  Sense strand starting at position 669 of SEQ ID NO: 914195
uggacuuuccuuugaggua

SEQ ID NO: 985371 - RNA, 19 nt, Artificial Sequence
  Description of Artificial Sequence: Synthetic oligonucleotide
  Antisense strand to SEQ ID NO: 985370
uaccucaaaggaaagucca

SEQ ID NO: 985372 - RNA, 19 nt, Artificial Sequence
  Description of Artificial Sequence: Synthetic oligonucleotide
  Sense strand starting at position 322 of SEQ ID NO: 914195
agggacuucugcuccauua

SEQ ID NO: 985373 - RNA, 19 nt, Artificial Sequence
  Description of Artificial Sequence: Synthetic oligonucleotide
  Antisense strand to SEQ ID NO: 985372
uaauggagcagaagucccu

SEQ ID NO: 985374 - RNA, 19 nt, Artificial Sequence
  Description of Artificial Sequence: Synthetic oligonucleotide
  Sense strand starting at position 1398 of SEQ ID NO: 914195
gagugaauugcaggaguca

SEQ ID NO: 985375 - RNA, 19 nt, Artificial Sequence
  Description of Artificial Sequence: Synthetic oligonucleotide
  Antisense strand to SEQ ID NO: 985374
ugacuccugcaauucacuc

SEQ ID NO: 985376 - RNA, 19 nt, Artificial Sequence
  Description of Artificial Sequence: Synthetic oligonucleotide
  Sense strand starting at position 75 of SEQ ID NO: 914195
aguucuaagguugggaagu

SEQ ID NO: 985377 - RNA, 19 nt, Artificial Sequence
  Description of Artificial Sequence: Synthetic oligonucleotide
  Antisense strand to SEQ ID NO: 985376
acuucccaaccuuagaacu

SEQ ID NO: 985378 - RNA, 19 nt, Artificial Sequence
  Description of Artificial Sequence: Synthetic oligonucleotide
  Sense strand starting at position 3577 of SEQ ID NO: 914195
gaauuagacuguguaguua

SEQ ID NO: 985379 - RNA, 19 nt, Artificial Sequence
  Description of Artificial Sequence: Synthetic oligonucleotide
  Antisense strand to SEQ ID NO: 985378
uaacuacacagucuaauuc

SEQ ID NO: 985380 - RNA, 19 nt, Artificial Sequence
  Description of Artificial Sequence: Synthetic oligonucleotide
  Sense strand starting at position 1230 of SEQ ID NO: 914195
cgggaaauuaucugucuca

SEQ ID NO: 985381 - RNA, 19 nt, Artificial Sequence
  Description of Artificial Sequence: Synthetic oligonucleotide
  Antisense strand to SEQ ID NO: 985380
ugagacagauaauuucccg

SEQ ID NO: 985382 - RNA, 19 nt, Artificial Sequence
  Description of Artificial Sequence: Synthetic oligonucleotide
  Sense strand starting at position 2545 of SEQ ID NO: 914195
uggcuacucuauucuuaag

SEQ ID NO: 985383 - RNA, 19 nt, Artificial Sequence
  Description of Artificial Sequence: Synthetic oligonucleotide
  Antisense strand to SEQ ID NO: 985382
cuuaagaauagaguagcca

SEQ ID NO: 985384 - RNA, 19 nt, Artificial Sequence
  Description of Artificial Sequence: Synthetic oligonucleotide
  Sense strand starting at position 3539 of SEQ ID NO: 914195
aacucaaagucguuauuga

SEQ ID NO: 985385 - RNA, 19 nt, Artificial Sequence
  Description of Artificial Sequence: Synthetic oligonucleotide
  Antisense strand to SEQ ID NO: 985384
ucaauaacgacuuugaguu

SEQ ID NO: 985386 - RNA, 19 nt, Artificial Sequence
  Description of Artificial Sequence: Synthetic oligonucleotide
  Sense strand starting at position 1415 of SEQ ID NO: 914195
caguauugucgagauugua

SEQ ID NO: 985387 - RNA, 19 nt, Artificial Sequence
  Description of Artificial Sequence: Synthetic oligonucleotide
  Antisense strand to SEQ ID NO: 985386
uacaaucucgacaauacug

SEQ ID NO: 985388 - RNA, 19 nt, Artificial Sequence
  Description of Artificial Sequence: Synthetic oligonucleotide
  Sense strand starting at position 1413 of SEQ ID NO: 914195
gucaguauugucgagauug

SEQ ID NO: 985389 - RNA, 19 nt, Artificial Sequence
  Description of Artificial Sequence: Synthetic oligonucleotide
  Antisense strand to SEQ ID NO: 985388
caaucucgacaauacugac

SEQ ID NO: 985390 - RNA, 19 nt, Artificial Sequence
  Description of Artificial Sequence: Synthetic oligonucleotide
  Sense strand starting at position 3547 of SEQ ID NO: 914195
gucguuauugaauaagcau

SEQ ID NO: 985391 - RNA, 19 nt, Artificial Sequence
  Description of Artificial Sequence: Synthetic oligonucleotide
  Antisense strand to SEQ ID NO: 985390
augcuuauucaauaacgac

SEQ ID NO: 985392 - RNA, 19 nt, Artificial Sequence
  Description of Artificial Sequence: Synthetic oligonucleotide
  Sense strand starting at position 3304 of SEQ ID NO: 914195
ugucauaaguucucauuau

SEQ ID NO: 985393 - RNA, 19 nt, Artificial Sequence
  Description of Artificial Sequence: Synthetic oligonucleotide
  Antisense strand to SEQ ID NO: 985392
auaaugagaacuuaugaca

SEQ ID NO: 985394 - RNA, 19 nt, Artificial Sequence
  Description of Artificial Sequence: Synthetic oligonucleotide
  Sense strand starting at position 858 of SEQ ID NO: 914195
gcuccuuccagauggaagu

SEQ ID NO: 985395 - RNA, 19 nt, Artificial Sequence
  Description of Artificial Sequence: Synthetic oligonucleotide
  Antisense strand to SEQ ID NO: 985394
acuuccaucuggaaggagc

SEQ ID NO: 985396 - RNA, 19 nt, Artificial Sequence
  Description of Artificial Sequence: Synthetic oligonucleotide
  Sense strand starting at position 104 of SEQ ID NO: 914195
gucuuugucuacccagaau

SEQ ID NO: 985397 - RNA, 19 nt, Artificial Sequence
  Description of Artificial Sequence: Synthetic oligonucleotide
  Antisense strand to SEQ ID NO: 985396
auucuggguagacaaagac

SEQ ID NO: 985398 - RNA, 19 nt, Artificial Sequence
  Description of Artificial Sequence: Synthetic oligonucleotide
  Sense strand starting at position 3828 of SEQ ID NO: 914195
ggaguuggcucagaauuua

SEQ ID NO: 985399 - RNA, 19 nt, Artificial Sequence
  Description of Artificial Sequence: Synthetic oligonucleotide
  Antisense strand to SEQ ID NO: 985398
uaaauucugagccaacucc

SEQ ID NO: 985400 - RNA, 19 nt, Artificial Sequence
  Description of Artificial Sequence: Synthetic oligonucleotide
  Sense strand starting at position 3198 of SEQ ID NO: 914195
uuauguguacuguauucuu

SEQ ID NO: 985401 - RNA, 19 nt, Artificial Sequence
  Description of Artificial Sequence: Synthetic oligonucleotide
  Antisense strand to SEQ ID NO: 985400
aagaauacaguacacauaa

SEQ ID NO: 985402 - RNA, 19 nt, Artificial Sequence
  Description of Artificial Sequence: Synthetic oligonucleotide
  Sense strand starting at position 1374 of SEQ ID NO: 914195
ccuuguggcggugacagau

SEQ ID NO: 985403 - RNA, 19 nt, Artificial Sequence
  Description of Artificial Sequence: Synthetic oligonucleotide
  Antisense strand to SEQ ID NO: 985402
aucugucaccgccacaagg

SEQ ID NO: 985404 - RNA, 19 nt, Artificial Sequence
  Description of Artificial Sequence: Synthetic oligonucleotide
  Sense strand starting at position 1418 of SEQ ID NO: 914195
uauugucgagauuguaacu

SEQ ID NO: 985405 - RNA, 19 nt, Artificial Sequence
  Description of Artificial Sequence: Synthetic oligonucleotide
  Antisense strand to SEQ ID NO: 985404
aguuacaaucucgacaaua

SEQ ID NO: 985406 - RNA, 19 nt, Artificial Sequence
  Description of Artificial Sequence: Synthetic oligonucleotide
  Sense strand starting at position 3193 of SEQ ID NO: 914195
uguacuuauguguacugua

SEQ ID NO: 985407 - RNA, 19 nt, Artificial Sequence
  Description of Artificial Sequence: Synthetic oligonucleotide
  Antisense strand to SEQ ID NO: 985406
uacaguacacauaaguaca

SEQ ID NO: 985408 - RNA, 19 nt, Artificial Sequence
  Description of Artificial Sequence: Synthetic oligonucleotide
  Sense strand starting at position 1411 of SEQ ID NO: 914195
gagucaguauugucgagau

SEQ ID NO: 985409 - RNA, 19 nt, Artificial Sequence
  Description of Artificial Sequence: Synthetic oligonucleotide
  Antisense strand to SEQ ID NO: 985408
aucucgacaauacugacuc

SEQ ID NO: 985410 - RNA, 19 nt, Artificial Sequence
  Description of Artificial Sequence: Synthetic oligonucleotide
  Sense strand starting at position 1176 of SEQ ID NO: 914196
ugaggaugaggcugaauca

SEQ ID NO: 985411 - RNA, 19 nt, Artificial Sequence
  Description of Artificial Sequence: Synthetic oligonucleotide
  Antisense strand to SEQ ID NO: 985410
ugauucagccucauccuca

SEQ ID NO: 985412 - RNA, 19 nt, Artificial Sequence
  Description of Artificial Sequence: Synthetic oligonucleotide
  Sense strand starting at position 3548 of SEQ ID NO: 914196
ccgugauucguagucucac

SEQ ID NO: 985413 - RNA, 19 nt, Artificial Sequence
  Description of Artificial Sequence: Synthetic oligonucleotide
  Antisense strand to SEQ ID NO: 985412
gugagacuacgaaucacgg

SEQ ID NO: 985414 - RNA, 19 nt, Artificial Sequence
  Description of Artificial Sequence: Synthetic oligonucleotide
  Sense strand starting at position 3415 of SEQ ID NO: 914196
cagugagaacagcaaaguu

SEQ ID NO: 985415 - RNA, 19 nt, Artificial Sequence
  Description of Artificial Sequence: Synthetic oligonucleotide
  Antisense strand to SEQ ID NO: 985414
aacuuugcuguucucacug

SEQ ID NO: 985416 - RNA, 19 nt, Artificial Sequence
  Description of Artificial Sequence: Synthetic oligonucleotide
  Sense strand starting at position 3958 of SEQ ID NO: 914196
guuugcuuugacgugcaga

SEQ ID NO: 985417 - RNA, 19 nt, Artificial Sequence
  Description of Artificial Sequence: Synthetic oligonucleotide
  Antisense strand to SEQ ID NO: 985416
ucugcacgucaaagcaaac

SEQ ID NO: 985418 - RNA, 19 nt, Artificial Sequence
  Description of Artificial Sequence: Synthetic oligonucleotide
  Sense strand starting at position 2309 of SEQ ID NO: 914196
ccggcugauuuccucuuaa

SEQ ID NO: 985419 - RNA, 19 nt, Artificial Sequence
  Description of Artificial Sequence: Synthetic oligonucleotide
  Antisense strand to SEQ ID NO: 985418
uuaagaggaaaucagccgg

SEQ ID NO: 985420 - RNA, 19 nt, Artificial Sequence
  Description of Artificial Sequence: Synthetic oligonucleotide
  Sense strand starting at position 1099 of SEQ ID NO: 914196
acaagugauugcccaagag

SEQ ID NO: 985421 - RNA, 19 nt, Artificial Sequence
  Description of Artificial Sequence: Synthetic oligonucleotide
  Antisense strand to SEQ ID NO: 985420
cucuugggcaaucacuugu

SEQ ID NO: 985422 - RNA, 19 nt, Artificial Sequence
  Description of Artificial Sequence: Synthetic oligonucleotide
  Sense strand starting at position 3455 of SEQ ID NO: 914196
gcguuagcaaaugaggaaa

SEQ ID NO: 985423 - RNA, 19 nt, Artificial Sequence
  Description of Artificial Sequence: Synthetic oligonucleotide
  Antisense strand to SEQ ID NO: 985422
uuuccucauuugcuaacgc

SEQ ID NO: 985424 - RNA, 19 nt, Artificial Sequence
  Description of Artificial Sequence: Synthetic oligonucleotide
  Sense strand starting at position 1631 of SEQ ID NO: 914196
gggauucgcauugaguaca

SEQ ID NO: 985425 - RNA, 19 nt, Artificial Sequence
  Description of Artificial Sequence: Synthetic oligonucleotide
  Antisense strand to SEQ ID NO: 985424
uguacucaaugcgaauccc

SEQ ID NO: 985426 - RNA, 19 nt, Artificial Sequence
  Description of Artificial Sequence: Synthetic oligonucleotide
  Sense strand starting at position 1497 of SEQ ID NO: 914196
caaucaguucgauaagcca

SEQ ID NO: 985427 - RNA, 19 nt, Artificial Sequence
  Description of Artificial Sequence: Synthetic oligonucleotide
  Antisense strand to SEQ ID NO: 985426
uggcuuaucgaacugauug

SEQ ID NO: 985428 - RNA, 19 nt, Artificial Sequence
  Description of Artificial Sequence: Synthetic oligonucleotide
  Sense strand starting at position 556 of SEQ ID NO: 914196
cuuuacucccuguaugauc

SEQ ID NO: 985429 - RNA, 19 nt, Artificial Sequence
  Description of Artificial Sequence: Synthetic oligonucleotide
  Antisense strand to SEQ ID NO: 985428
gaucauacagggaguaaag

SEQ ID NO: 985430 - RNA, 19 nt, Artificial Sequence
  Description of Artificial Sequence: Synthetic oligonucleotide
  Sense strand starting at position 3492 of SEQ ID NO: 914196
ggacuugaccgaggugauu

SEQ ID NO: 985431 - RNA, 19 nt, Artificial Sequence
  Description of Artificial Sequence: Synthetic oligonucleotide
  Antisense strand to SEQ ID NO: 985430
aaucaccucggucaagucc

SEQ ID NO: 985432 - RNA, 19 nt, Artificial Sequence
  Description of Artificial Sequence: Synthetic oligonucleotide
  Sense strand starting at position 3406 of SEQ ID NO: 914196
ucagaugcccagugagaac

SEQ ID NO: 985433 - RNA, 19 nt, Artificial Sequence
  Description of Artificial Sequence: Synthetic oligonucleotide
  Antisense strand to SEQ ID NO: 985432
guucucacugggcaucuga

SEQ ID NO: 985434 - RNA, 19 nt, Artificial Sequence
  Description of Artificial Sequence: Synthetic oligonucleotide
  Sense strand starting at position 238 of SEQ ID NO: 914196
acugucaucuugguaaaua

SEQ ID NO: 985435 - RNA, 19 nt, Artificial Sequence
  Description of Artificial Sequence: Synthetic oligonucleotide
  Antisense strand to SEQ ID NO: 985434
uauuuaccaagaugacagu

SEQ ID NO: 985436 - RNA, 19 nt, Artificial Sequence
  Description of Artificial Sequence: Synthetic oligonucleotide
  Sense strand starting at position 1296 of SEQ ID NO: 914196
uaccauguuuggguuaaau

SEQ ID NO: 985437 - RNA, 19 nt, Artificial Sequence
  Description of Artificial Sequence: Synthetic oligonucleotide
  Antisense strand to SEQ ID NO: 985436
auuuaacccaaacauggua

SEQ ID NO: 985438 - RNA, 19 nt, Artificial Sequence
  Description of Artificial Sequence: Synthetic oligonucleotide
  Sense strand starting at position 1212 of SEQ ID NO: 914196
aguuuacgacucggaaaua

SEQ ID NO: 985439 - RNA, 19 nt, Artificial Sequence
  Description of Artificial Sequence: Synthetic oligonucleotide
  Antisense strand to SEQ ID NO: 985438
uauuuccgagucguaaacu

SEQ ID NO: 985440 - RNA, 19 nt, Artificial Sequence
  Description of Artificial Sequence: Synthetic oligonucleotide
  Sense strand starting at position 1108 of SEQ ID NO: 914196
ugcccaagagcguaaugaa

SEQ ID NO: 985441 - RNA, 19 nt, Artificial Sequence
  Description of Artificial Sequence: Synthetic oligonucleotide
  Antisense strand to SEQ ID NO: 985440
uucauuacgcucuugggca

SEQ ID NO: 985442 - RNA, 19 nt, Artificial Sequence
  Description of Artificial Sequence: Synthetic oligonucleotide
  Sense strand starting at position 1767 of SEQ ID NO: 914196
caccgugcucgacaaggaa

SEQ ID NO: 985443 - RNA, 19 nt, Artificial Sequence
  Description of Artificial Sequence: Synthetic oligonucleotide
  Antisense strand to SEQ ID NO: 985442
uuccuugucgagcacggug

SEQ ID NO: 985444 - RNA, 19 nt, Artificial Sequence
  Description of Artificial Sequence: Synthetic oligonucleotide
  Sense strand starting at position 2056 of SEQ ID NO: 914196
ggaaguaguugacauuuac

SEQ ID NO: 985445 - RNA, 19 nt, Artificial Sequence
  Description of Artificial Sequence: Synthetic oligonucleotide
  Antisense strand to SEQ ID NO: 985444
guaaaugucaacuacuucc

SEQ ID NO: 985446 - RNA, 19 nt, Artificial Sequence
  Description of Artificial Sequence: Synthetic oligonucleotide
  Sense strand starting at position 3454 of SEQ ID NO: 914196
agcguuagcaaaugaggaa

SEQ ID NO: 985447 - RNA, 19 nt, Artificial Sequence
  Description of Artificial Sequence: Synthetic oligonucleotide
  Antisense strand to SEQ ID NO: 985446
uuccucauuugcuaacgcu

SEQ ID NO: 985448 - RNA, 19 nt, Artificial Sequence
  Description of Artificial Sequence: Synthetic oligonucleotide
  Sense strand starting at position 127 of SEQ ID NO: 914196
ggccucuugaugugaacua

SEQ ID NO: 985449 - RNA, 19 nt, Artificial Sequence
  Description of Artificial Sequence: Synthetic oligonucleotide
  Antisense strand to SEQ ID NO: 985448
uaguucacaucaagaggcc

SEQ ID NO: 985450 - RNA, 19 nt, Artificial Sequence
  Description of Artificial Sequence: Synthetic oligonucleotide
  Sense strand starting at position 3425 of SEQ ID NO: 914196
agcaaaguuugacucucuu

SEQ ID NO: 985451 - RNA, 19 nt, Artificial Sequence
  Description of Artificial Sequence: Synthetic oligonucleotide
  Antisense strand to SEQ ID NO: 985450
aagagagucaaacuuugcu

SEQ ID NO: 985452 - RNA, 19 nt, Artificial Sequence
  Description of Artificial Sequence: Synthetic oligonucleotide
  Sense strand starting at position 554 of SEQ ID NO: 914196
uccuuuacucccuguauga

SEQ ID NO: 985453 - RNA, 19 nt, Artificial Sequence
  Description of Artificial Sequence: Synthetic oligonucleotide
  Antisense strand to SEQ ID NO: 985452
ucauacagggaguaaagga

SEQ ID NO: 985454 - RNA, 19 nt, Artificial Sequence
  Description of Artificial Sequence: Synthetic oligonucleotide
  Sense strand starting at position 3902 of SEQ ID NO: 914196
cgaguuagguuucuaaauc

SEQ ID NO: 985455 - RNA, 19 nt, Artificial Sequence
  Description of Artificial Sequence: Synthetic oligonucleotide
  Antisense strand to SEQ ID NO: 985454
gauuuagaaaccuaacucg

SEQ ID NO: 985456 - RNA, 19 nt, Artificial Sequence
  Description of Artificial Sequence: Synthetic oligonucleotide
  Sense strand starting at position 1096 of SEQ ID NO: 914196
gucacaagugauugcccaa

SEQ ID NO: 985457 - RNA, 19 nt, Artificial Sequence
  Description of Artificial Sequence: Synthetic oligonucleotide
  Antisense strand to SEQ ID NO: 985456
uugggcaaucacuugugac

SEQ ID NO: 985458 - RNA, 19 nt, Artificial Sequence
  Description of Artificial Sequence: Synthetic oligonucleotide
  Sense strand starting at position 3505 of SEQ ID NO: 914196
gugauuacaucggucuuag

SEQ ID NO: 985459 - RNA, 19 nt, Artificial Sequence
  Description of Artificial Sequence: Synthetic oligonucleotide
  Antisense strand to SEQ ID NO: 985458
cuaagaccgauguaaucac

SEQ ID NO: 985460 - RNA, 19 nt, Artificial Sequence
  Description of Artificial Sequence: Synthetic oligonucleotide
  Sense strand starting at position 1483 of SEQ ID NO: 914196
gcagaaauuccacgcaauc

SEQ ID NO: 985461 - RNA, 19 nt, Artificial Sequence
  Description of Artificial Sequence: Synthetic oligonucleotide
  Antisense strand to SEQ ID NO: 985460
gauugcguggaauuucugc

SEQ ID NO: 985462 - RNA, 19 nt, Artificial Sequence
  Description of Artificial Sequence: Synthetic oligonucleotide
  Sense strand starting at position 3503 of SEQ ID NO: 914196
aggugauuacaucggucuu

SEQ ID NO: 985463 - RNA, 19 nt, Artificial Sequence
  Description of Artificial Sequence: Synthetic oligonucleotide
  Antisense strand to SEQ ID NO: 985462
aagaccgauguaaucaccu

SEQ ID NO: 985464 - RNA, 19 nt, Artificial Sequence
  Description of Artificial Sequence: Synthetic oligonucleotide
  Sense strand starting at position 3504 of SEQ ID NO: 914196
ggugauuacaucggucuua

SEQ ID NO: 985465 - RNA, 19 nt, Artificial Sequence
  Description of Artificial Sequence: Synthetic oligonucleotide
  Antisense strand to SEQ ID NO: 985464
uaagaccgauguaaucacc

SEQ ID NO: 985466 - RNA, 19 nt, Artificial Sequence
  Description of Artificial Sequence: Synthetic oligonucleotide
  Sense strand starting at position 1630 of SEQ ID NO: 914196
ugggauucgcauugaguac

SEQ ID NO: 985467 - RNA, 19 nt, Artificial Sequence
  Description of Artificial Sequence: Synthetic oligonucleotide
  Antisense strand to SEQ ID NO: 985466
guacucaaugcgaauccca

SEQ ID NO: 985468 - RNA, 19 nt, Artificial Sequence
  Description of Artificial Sequence: Synthetic oligonucleotide
  Sense strand starting at position 1985 of SEQ ID NO: 914196
gcgcuaacucaacaguacu

SEQ ID NO: 985469 - RNA, 19 nt, Artificial Sequence
  Description of Artificial Sequence: Synthetic oligonucleotide
  Antisense strand to SEQ ID NO: 985468
aguacuguugaguuagcgc

SEQ ID NO: 985470 - RNA, 19 nt, Artificial Sequence
  Description of Artificial Sequence: Synthetic oligonucleotide
  Sense strand starting at position 1494 of SEQ ID NO: 914196
acgcaaucaguucgauaag

SEQ ID NO: 985471 - RNA, 19 nt, Artificial Sequence
  Description of Artificial Sequence: Synthetic oligonucleotide
  Antisense strand to SEQ ID NO: 985470
cuuaucgaacugauugcgu

SEQ ID NO: 985472 - RNA, 19 nt, Artificial Sequence
  Description of Artificial Sequence: Synthetic oligonucleotide
  Sense strand starting at position 3961 of SEQ ID NO: 914196
ugcuuugacgugcagaauc

SEQ ID NO: 985473 - RNA, 19 nt, Artificial Sequence
  Description of Artificial Sequence: Synthetic oligonucleotide
  Antisense strand to SEQ ID NO: 985472
gauucugcacgucaaagca

SEQ ID NO: 985474 - RNA, 19 nt, Artificial Sequence
  Description of Artificial Sequence: Synthetic oligonucleotide
  Sense strand starting at position 1103 of SEQ ID NO: 914196
gugauugcccaagagcgua

SEQ ID NO: 985475 - RNA, 19 nt, Artificial Sequence
  Description of Artificial Sequence: Synthetic oligonucleotide
  Antisense strand to SEQ ID NO: 985474
uacgcucuugggcaaucac

SEQ ID NO: 985476 - RNA, 19 nt, Artificial Sequence
  Description of Artificial Sequence: Synthetic oligonucleotide
  Sense strand starting at position 705 of SEQ ID NO: 914196
ucuguaugccugugauacc

SEQ ID NO: 985477 - RNA, 19 nt, Artificial Sequence
  Description of Artificial Sequence: Synthetic oligonucleotide
  Antisense strand to SEQ ID NO: 985476
gguaucacaggcauacaga

SEQ ID NO: 985478 - RNA, 19 nt, Artificial Sequence
  Description of Artificial Sequence: Synthetic oligonucleotide
  Sense strand starting at position 2053 of SEQ ID NO: 914196
cgcggaaguaguugacauu

SEQ ID NO: 985479 - RNA, 19 nt, Artificial Sequence
  Description of Artificial Sequence: Synthetic oligonucleotide
  Antisense strand to SEQ ID NO: 985478
aaugucaacuacuuccgcg

SEQ ID NO: 985480 - RNA, 19 nt, Artificial Sequence
  Description of Artificial Sequence: Synthetic oligonucleotide
  Sense strand starting at position 3959 of SEQ ID NO: 914196
uuugcuuugacgugcagaa

SEQ ID NO: 985481 - RNA, 19 nt, Artificial Sequence
  Description of Artificial Sequence: Synthetic oligonucleotide
  Antisense strand to SEQ ID NO: 985480
uucugcacgucaaagcaaa

SEQ ID NO: 985482 - RNA, 19 nt, Artificial Sequence
  Description of Artificial Sequence: Synthetic oligonucleotide
  Sense strand starting at position 2170 of SEQ ID NO: 914196
gacggaguuucguucuuuc

SEQ ID NO: 985483 - RNA, 19 nt, Artificial Sequence
  Description of Artificial Sequence: Synthetic oligonucleotide
  Antisense strand to SEQ ID NO: 985482
gaaagaacgaaacuccguc

SEQ ID NO: 985484 - RNA, 19 nt, Artificial Sequence
  Description of Artificial Sequence: Synthetic oligonucleotide
  Sense strand starting at position 916 of SEQ ID NO: 914196
ggaacacaaucauaugcuu

SEQ ID NO: 985485 - RNA, 19 nt, Artificial Sequence
  Description of Artificial Sequence: Synthetic oligonucleotide
  Antisense strand to SEQ ID NO: 985484
aagcauaugauuguguucc

SEQ ID NO: 985486 - RNA, 19 nt, Artificial Sequence
  Description of Artificial Sequence: Synthetic oligonucleotide
  Sense strand starting at position 3969 of SEQ ID NO: 914196
cgugcagaaucgucgaaau

SEQ ID NO: 985487 - RNA, 19 nt, Artificial Sequence
  Description of Artificial Sequence: Synthetic oligonucleotide
  Antisense strand to SEQ ID NO: 985486
auuucgacgauucugcacg

SEQ ID NO: 985488 - RNA, 19 nt, Artificial Sequence
  Description of Artificial Sequence: Synthetic oligonucleotide
  Sense strand starting at position 2044 of SEQ ID NO: 914196
guucuuucccgcggaagua

SEQ ID NO: 985489 - RNA, 19 nt, Artificial Sequence
  Description of Artificial Sequence: Synthetic oligonucleotide
  Antisense strand to SEQ ID NO: 985488
uacuuccgcgggaaagaac

SEQ ID NO: 985490 - RNA, 19 nt, Artificial Sequence
  Description of Artificial Sequence: Synthetic oligonucleotide
  Sense strand starting at position 178 of SEQ ID NO: 914197
agagcuuuggcauagaaau

SEQ ID NO: 985491 - RNA, 19 nt, Artificial Sequence
  Description of Artificial Sequence: Synthetic oligonucleotide
  Antisense strand to SEQ ID NO: 985490
auuucuaugccaaagcucu

SEQ ID NO: 985492 - RNA, 19 nt, Artificial Sequence
  Description of Artificial Sequence: Synthetic oligonucleotide
  Sense strand starting at position 152 of SEQ ID NO: 914197
uggagagaaugcuuuacag

SEQ ID NO: 985493 - RNA, 19 nt, Artificial Sequence
  Description of Artificial Sequence: Synthetic oligonucleotide
  Antisense strand to SEQ ID NO: 985492
cuguaaagcauucucucca

SEQ ID NO: 985494 - RNA, 19 nt, Artificial Sequence
  Description of Artificial Sequence: Synthetic oligonucleotide
  Sense strand starting at position 154 of SEQ ID NO: 914197
gagagaaugcuuuacaguu

SEQ ID NO: 985495 - RNA, 19 nt, Artificial Sequence
  Description of Artificial Sequence: Synthetic oligonucleotide
  Antisense strand to SEQ ID NO: 985494
aacuguaaagcauucucuc

SEQ ID NO: 985496 - RNA, 19 nt, Artificial Sequence
  Description of Artificial Sequence: Synthetic oligonucleotide
  Sense strand starting at position 604 of SEQ ID NO: 914197
ccaaaugaggcaggaguaa

SEQ ID NO: 985497 - RNA, 19 nt, Artificial Sequence
  Description of Artificial Sequence: Synthetic oligonucleotide
  Antisense strand to SEQ ID NO: 985496
uuacuccugccucauuugg

SEQ ID NO: 985498 - RNA, 19 nt, Artificial Sequence
  Description of Artificial Sequence: Synthetic oligonucleotide
  Sense strand starting at position 3563 of SEQ ID NO: 914197
gucuaucaauuugcaguua

SEQ ID NO: 985499 - RNA, 19 nt, Artificial Sequence
  Description of Artificial Sequence: Synthetic oligonucleotide
  Antisense strand to SEQ ID NO: 985498
uaacugcaaauugauagac

SEQ ID NO: 985500 - RNA, 19 nt, Artificial Sequence
  Description of Artificial Sequence: Synthetic oligonucleotide
  Sense strand starting at position 2035 of SEQ ID NO: 914197
gaaaguugggcaggaaacu

SEQ ID NO: 985501 - RNA, 19 nt, Artificial Sequence
  Description of Artificial Sequence: Synthetic oligonucleotide
  Antisense strand to SEQ ID NO: 985500
aguuuccugcccaacuuuc

SEQ ID NO: 985502 - RNA, 19 nt, Artificial Sequence
  Description of Artificial Sequence: Synthetic oligonucleotide
  Sense strand starting at position 709 of SEQ ID NO: 914197
uggcgaucuguguauuuau

SEQ ID NO: 985503 - RNA, 19 nt, Artificial Sequence
  Description of Artificial Sequence: Synthetic oligonucleotide
  Antisense strand to SEQ ID NO: 985502
auaaauacacagaucgcca

SEQ ID NO: 985504 - RNA, 19 nt, Artificial Sequence
  Description of Artificial Sequence: Synthetic oligonucleotide
  Sense strand starting at position 583 of SEQ ID NO: 914197
acagaugggugucugaaau

SEQ ID NO: 985505 - RNA, 19 nt, Artificial Sequence
  Description of Artificial Sequence: Synthetic oligonucleotide
  Antisense strand to SEQ ID NO: 985504
auuucagacacccaucugu

SEQ ID NO: 985506 - RNA, 19 nt, Artificial Sequence
  Description of Artificial Sequence: Synthetic oligonucleotide
  Sense strand starting at position 3383 of SEQ ID NO: 914197
agcggaagauauuccauaa

SEQ ID NO: 985507 - RNA, 19 nt, Artificial Sequence
  Description of Artificial Sequence: Synthetic oligonucleotide
  Antisense strand to SEQ ID NO: 985506
uuauggaauaucuuccgcu

SEQ ID NO: 985508 - RNA, 19 nt, Artificial Sequence
  Description of Artificial Sequence: Synthetic oligonucleotide
  Sense strand starting at position 720 of SEQ ID NO: 914197
guauuuaucuugcuggcaa

SEQ ID NO: 985509 - RNA, 19 nt, Artificial Sequence
  Description of Artificial Sequence: Synthetic oligonucleotide
  Antisense strand to SEQ ID NO: 985508
uugccagcaagauaaauac

SEQ ID NO: 985510 - RNA, 19 nt, Artificial Sequence
  Description of Artificial Sequence: Synthetic oligonucleotide
  Sense strand starting at position 712 of SEQ ID NO: 914197
cgaucuguguauuuaucuu

SEQ ID NO: 985511 - RNA, 19 nt, Artificial Sequence
  Description of Artificial Sequence: Synthetic oligonucleotide
  Antisense strand to SEQ ID NO: 985510
aagauaaauacacagaucg

SEQ ID NO: 985512 - RNA, 19 nt, Artificial Sequence
  Description of Artificial Sequence: Synthetic oligonucleotide
  Sense strand starting at position 2033 of SEQ ID NO: 914197
gcgaaaguugggcaggaaa

SEQ ID NO: 985513 - RNA, 19 nt, Artificial Sequence
  Description of Artificial Sequence: Synthetic oligonucleotide
  Antisense strand to SEQ ID NO: 985512
uuuccugcccaacuuucgc

SEQ ID NO: 985514 - RNA, 19 nt, Artificial Sequence
  Description of Artificial Sequence: Synthetic oligonucleotide
  Sense strand starting at position 175 of SEQ ID NO: 914197
caaagagcuuuggcauaga

SEQ ID NO: 985515 - RNA, 19 nt, Artificial Sequence
  Description of Artificial Sequence: Synthetic oligonucleotide
  Antisense strand to SEQ ID NO: 985514
ucuaugccaaagcucuuug

SEQ ID NO: 985516 - RNA, 19 nt, Artificial Sequence
  Description of Artificial Sequence: Synthetic oligonucleotide
  Sense strand starting at position 3261 of SEQ ID NO: 914197
cggaaugaccucugcauga

SEQ ID NO: 985517 - RNA, 19 nt, Artificial Sequence
  Description of Artificial Sequence: Synthetic oligonucleotide
  Antisense strand to SEQ ID NO: 985516
ucaugcagaggucauuccg

SEQ ID NO: 985518 - RNA, 19 nt, Artificial Sequence
  Description of Artificial Sequence: Synthetic oligonucleotide
  Sense strand starting at position 707 of SEQ ID NO: 914197
gguggcgaucuguguauuu

SEQ ID NO: 985519 - RNA, 19 nt, Artificial Sequence
  Description of Artificial Sequence: Synthetic oligonucleotide
  Antisense strand to SEQ ID NO: 985518
aaauacacagaucgccacc

SEQ ID NO: 985520 - RNA, 19 nt, Artificial Sequence
  Description of Artificial Sequence: Synthetic oligonucleotide
  Sense strand starting at position 1176 of SEQ ID NO: 914197
uaagguugggcgugagaag

SEQ ID NO: 985521 - RNA, 19 nt, Artificial Sequence
  Description of Artificial Sequence: Synthetic oligonucleotide
  Antisense strand to SEQ ID NO: 985520
cuucucacgcccaaccuua

SEQ ID NO: 985522 - RNA, 19 nt, Artificial Sequence
  Description of Artificial Sequence: Synthetic oligonucleotide
  Sense strand starting at position 3373 of SEQ ID NO: 914197
ggguuugguaagcggaaga

SEQ ID NO: 985523 - RNA, 19 nt, Artificial Sequence
  Description of Artificial Sequence: Synthetic oligonucleotide
  Antisense strand to SEQ ID NO: 985522
ucuuccgcuuaccaaaccc

SEQ ID NO: 985524 - RNA, 19 nt, Artificial Sequence
  Description of Artificial Sequence: Synthetic oligonucleotide
  Sense strand starting at position 749 of SEQ ID NO: 914197
cccagucaacuuuguaacu

SEQ ID NO: 985525 - RNA, 19 nt, Artificial Sequence
  Description of Artificial Sequence: Synthetic oligonucleotide
  Antisense strand to SEQ ID NO: 985524
aguuacaaaguugacuggg

SEQ ID NO: 985526 - RNA, 19 nt, Artificial Sequence
  Description of Artificial Sequence: Synthetic oligonucleotide
  Sense strand starting at position 3715 of SEQ ID NO: 914197
gcaaauggcucaccuguaa

SEQ ID NO: 985527 - RNA, 19 nt, Artificial Sequence
  Description of Artificial Sequence: Synthetic oligonucleotide
  Antisense strand to SEQ ID NO: 985526
uuacaggugagccauuugc

SEQ ID NO: 985528 - RNA, 19 nt, Artificial Sequence
  Description of Artificial Sequence: Synthetic oligonucleotide
  Sense strand starting at position 534 of SEQ ID NO: 914197
ucuugcaucuuugcagaga

SEQ ID NO: 985529 - RNA, 19 nt, Artificial Sequence
  Description of Artificial Sequence: Synthetic oligonucleotide
  Antisense strand to SEQ ID NO: 985528
ucucugcaaagaugcaaga

SEQ ID NO: 985530 - RNA, 19 nt, Artificial Sequence
  Description of Artificial Sequence: Synthetic oligonucleotide
  Sense strand starting at position 2214 of SEQ ID NO: 914197
ggcugucucguugaauaug

SEQ ID NO: 985531 - RNA, 19 nt, Artificial Sequence
  Description of Artificial Sequence: Synthetic oligonucleotide
  Antisense strand to SEQ ID NO: 985530
cauauucaacgagacagcc

SEQ ID NO: 985532 - RNA, 19 nt, Artificial Sequence
  Description of Artificial Sequence: Synthetic oligonucleotide
  Sense strand starting at position 2258 of SEQ ID NO: 914197
gagugaggcucaucugcau

SEQ ID NO: 985533 - RNA, 19 nt, Artificial Sequence
  Description of Artificial Sequence: Synthetic oligonucleotide
  Antisense strand to SEQ ID NO: 985532
augcagaugagccucacuc

SEQ ID NO: 985534 - RNA, 19 nt, Artificial Sequence
  Description of Artificial Sequence: Synthetic oligonucleotide
  Sense strand starting at position 1408 of SEQ ID NO: 914197
gcgaguuuggcagaguuga

SEQ ID NO: 985535 - RNA, 19 nt, Artificial Sequence
  Description of Artificial Sequence: Synthetic oligonucleotide
  Antisense strand to SEQ ID NO: 985534
ucaacucugccaaacucgc

SEQ ID NO: 985536 - RNA, 19 nt, Artificial Sequence
  Description of Artificial Sequence: Synthetic oligonucleotide
  Sense strand starting at position 3701 of SEQ ID NO: 914197
gguacacgguucuugcaaa

SEQ ID NO: 985537 - RNA, 19 nt, Artificial Sequence
  Description of Artificial Sequence: Synthetic oligonucleotide
  Antisense strand to SEQ ID NO: 985536
uuugcaagaaccguguacc

SEQ ID NO: 985538 - RNA, 19 nt, Artificial Sequence
  Description of Artificial Sequence: Synthetic oligonucleotide
  Sense strand starting at position 532 of SEQ ID NO: 914197
ccucuugcaucuuugcaga

SEQ ID NO: 985539 - RNA, 19 nt, Artificial Sequence
  Description of Artificial Sequence: Synthetic oligonucleotide
  Antisense strand to SEQ ID NO: 985538
ucugcaaagaugcaagagg

SEQ ID NO: 985540 - RNA, 19 nt, Artificial Sequence
  Description of Artificial Sequence: Synthetic oligonucleotide
  Sense strand starting at position 2421 of SEQ ID NO: 914197
uugucucguucuuuccaaa

SEQ ID NO: 985541 - RNA, 19 nt, Artificial Sequence
  Description of Artificial Sequence: Synthetic oligonucleotide
  Antisense strand to SEQ ID NO: 985540
uuuggaaagaacgagacaa

SEQ ID NO: 985542 - RNA, 19 nt, Artificial Sequence
  Description of Artificial Sequence: Synthetic oligonucleotide
  Sense strand starting at position 593 of SEQ ID NO: 914197
gucugaaauucccaaauga

SEQ ID NO: 985543 - RNA, 19 nt, Artificial Sequence
  Description of Artificial Sequence: Synthetic oligonucleotide
  Antisense strand to SEQ ID NO: 985542
ucauuugggaauuucagac

SEQ ID NO: 985544 - RNA, 19 nt, Artificial Sequence
  Description of Artificial Sequence: Synthetic oligonucleotide
  Sense strand starting at position 2651 of SEQ ID NO: 914197
gucugauguuucucccugu

SEQ ID NO: 985545 - RNA, 19 nt, Artificial Sequence
  Description of Artificial Sequence: Synthetic oligonucleotide
  Antisense strand to SEQ ID NO: 985544
acagggagaaacaucagac

SEQ ID NO: 985546 - RNA, 19 nt, Artificial Sequence
  Description of Artificial Sequence: Synthetic oligonucleotide
  Sense strand starting at position 2212 of SEQ ID NO: 914197
uuggcugucucguugaaua

SEQ ID NO: 985547 - RNA, 19 nt, Artificial Sequence
  Description of Artificial Sequence: Synthetic oligonucleotide
  Antisense strand to SEQ ID NO: 985546
uauucaacgagacagccaa

SEQ ID NO: 985548 - RNA, 19 nt, Artificial Sequence
  Description of Artificial Sequence: Synthetic oligonucleotide
  Sense strand starting at position 3281 of SEQ ID NO: 914197
gccuaaccucugcgagcaa

SEQ ID NO: 985549 - RNA, 19 nt, Artificial Sequence
  Description of Artificial Sequence: Synthetic oligonucleotide
  Antisense strand to SEQ ID NO: 985548
uugcucgcagagguuaggc

SEQ ID NO: 985550 - RNA, 19 nt, Artificial Sequence
  Description of Artificial Sequence: Synthetic oligonucleotide
  Sense strand starting at position 2592 of SEQ ID NO: 914197
guguguauguccuucucuu

SEQ ID NO: 985551 - RNA, 19 nt, Artificial Sequence
  Description of Artificial Sequence: Synthetic oligonucleotide
  Antisense strand to SEQ ID NO: 985550
aagagaaggacauacacac

SEQ ID NO: 985552 - RNA, 19 nt, Artificial Sequence
  Description of Artificial Sequence: Synthetic oligonucleotide
  Sense strand starting at position 349 of SEQ ID NO: 914197
aguaaauaauggcagaguu

SEQ ID NO: 985553 - RNA, 19 nt, Artificial Sequence
  Description of Artificial Sequence: Synthetic oligonucleotide
  Antisense strand to SEQ ID NO: 985552
aacucugccauuauuuacu

SEQ ID NO: 985554 - RNA, 19 nt, Artificial Sequence
  Description of Artificial Sequence: Synthetic oligonucleotide
  Sense strand starting at position 1585 of SEQ ID NO: 914197
ggaagaagcuguugagaua

SEQ ID NO: 985555 - RNA, 19 nt, Artificial Sequence
  Description of Artificial Sequence: Synthetic oligonucleotide
  Antisense strand to SEQ ID NO: 985554
uaucucaacagcuucuucc

SEQ ID NO: 985556 - RNA, 19 nt, Artificial Sequence
  Description of Artificial Sequence: Synthetic oligonucleotide
  Sense strand starting at position 156 of SEQ ID NO: 914197
gagaaugcuuuacaguuua

SEQ ID NO: 985557 - RNA, 19 nt, Artificial Sequence
  Description of Artificial Sequence: Synthetic oligonucleotide
  Antisense strand to SEQ ID NO: 985556
uaaacuguaaagcauucuc

SEQ ID NO: 985558 - RNA, 19 nt, Artificial Sequence
  Description of Artificial Sequence: Synthetic oligonucleotide
  Sense strand starting at position 346 of SEQ ID NO: 914197
ccuaguaaauaauggcaga

SEQ ID NO: 985559 - RNA, 19 nt, Artificial Sequence
  Description of Artificial Sequence: Synthetic oligonucleotide
  Antisense strand to SEQ ID NO: 985558
ucugccauuauuuacuagg

SEQ ID NO: 985560 - RNA, 19 nt, Artificial Sequence
  Description of Artificial Sequence: Synthetic oligonucleotide
  Sense strand starting at position 2513 of SEQ ID NO: 914197
cucuuagacuaguacuagu

SEQ ID NO: 985561 - RNA, 19 nt, Artificial Sequence
  Description of Artificial Sequence: Synthetic oligonucleotide
  Antisense strand to SEQ ID NO: 985560
acuaguacuagucuaagag

SEQ ID NO: 985562 - RNA, 19 nt, Artificial Sequence
  Description of Artificial Sequence: Synthetic oligonucleotide
  Sense strand starting at position 535 of SEQ ID NO: 914197
cuugcaucuuugcagagaa

SEQ ID NO: 985563 - RNA, 19 nt, Artificial Sequence
  Description of Artificial Sequence: Synthetic oligonucleotide
  Antisense strand to SEQ ID NO: 985562
uucucugcaaagaugcaag

SEQ ID NO: 985564 - RNA, 19 nt, Artificial Sequence
  Description of Artificial Sequence: Synthetic oligonucleotide
  Sense strand starting at position 803 of SEQ ID NO: 914197
ggcccagguuucugcagaa

SEQ ID NO: 985565 - RNA, 19 nt, Artificial Sequence
  Description of Artificial Sequence: Synthetic oligonucleotide
  Antisense strand to SEQ ID NO: 985564
uucugcagaaaccugggcc

SEQ ID NO: 985566 - RNA, 19 nt, Artificial Sequence
  Description of Artificial Sequence: Synthetic oligonucleotide
  Sense strand starting at position 3702 of SEQ ID NO: 914197
guacacgguucuugcaaau

SEQ ID NO: 985567 - RNA, 19 nt, Artificial Sequence
  Description of Artificial Sequence: Synthetic oligonucleotide
  Antisense strand to SEQ ID NO: 985566
auuugcaagaaccguguac

SEQ ID NO: 985568 - RNA, 19 nt, Artificial Sequence
  Description of Artificial Sequence: Synthetic oligonucleotide
  Sense strand starting at position 1406 of SEQ ID NO: 914197
cggcgaguuuggcagaguu

SEQ ID NO: 985569 - RNA, 19 nt, Artificial Sequence
  Description of Artificial Sequence: Synthetic oligonucleotide
  Antisense strand to SEQ ID NO: 985568
aacucugccaaacucgccg

SEQ ID NO: 985570 - RNA, 19 nt, Artificial Sequence
  Description of Artificial Sequence: Synthetic oligonucleotide
  Sense strand starting at position 3615 of SEQ ID NO: 914198
gcaccuugagaacauguaa

SEQ ID NO: 985571 - RNA, 19 nt, Artificial Sequence
  Description of Artificial Sequence: Synthetic oligonucleotide
  Antisense strand to SEQ ID NO: 985570
uuacauguucucaaggugc

SEQ ID NO: 985572 - RNA, 19 nt, Artificial Sequence
  Description of Artificial Sequence: Synthetic oligonucleotide
  Sense strand starting at position 3591 of SEQ ID NO: 914198
ggugcuuugaaagaauauu

SEQ ID NO: 985573 - RNA, 19 nt, Artificial Sequence
  Description of Artificial Sequence: Synthetic oligonucleotide
  Antisense strand to SEQ ID NO: 985572
aauauucuuucaaagcacc

SEQ ID NO: 985574 - RNA, 19 nt, Artificial Sequence
  Description of Artificial Sequence: Synthetic oligonucleotide
  Sense strand starting at position 1037 of SEQ ID NO: 914198
agagaaagcuuacugaagu

SEQ ID NO: 985575 - RNA, 19 nt, Artificial Sequence
  Description of Artificial Sequence: Synthetic oligonucleotide
  Antisense strand to SEQ ID NO: 985574
acuucaguaagcuuucucu

SEQ ID NO: 985576 - RNA, 19 nt, Artificial Sequence
  Description of Artificial Sequence: Synthetic oligonucleotide
  Sense strand starting at position 3567 of SEQ ID NO: 914198
ugagcauaugguuacauau

SEQ ID NO: 985577 - RNA, 19 nt, Artificial Sequence
  Description of Artificial Sequence: Synthetic oligonucleotide
  Antisense strand to SEQ ID NO: 985576
auauguaaccauaugcuca

SEQ ID NO: 985578 - RNA, 19 nt, Artificial Sequence
  Description of Artificial Sequence: Synthetic oligonucleotide
  Sense strand starting at position 3428 of SEQ ID NO: 914198
uugggaauguucuuaacag

SEQ ID NO: 985579 - RNA, 19 nt, Artificial Sequence
  Description of Artificial Sequence: Synthetic oligonucleotide
  Antisense strand to SEQ ID NO: 985578
cuguuaagaacauucccaa

SEQ ID NO: 985580 - RNA, 19 nt, Artificial Sequence
  Description of Artificial Sequence: Synthetic oligonucleotide
  Sense strand starting at position 688 of SEQ ID NO: 914198
gagauugcuggccacaaca

SEQ ID NO: 985581 - RNA, 19 nt, Artificial Sequence
  Description of Artificial Sequence: Synthetic oligonucleotide
  Antisense strand to SEQ ID NO: 985580
uguuguggccagcaaucuc

SEQ ID NO: 985582 - RNA, 19 nt, Artificial Sequence
  Description of Artificial Sequence: Synthetic oligonucleotide
  Sense strand starting at position 3108 of SEQ ID NO: 914198
gacacucagguauauguuu

SEQ ID NO: 985583 - RNA, 19 nt, Artificial Sequence
  Description of Artificial Sequence: Synthetic oligonucleotide
  Antisense strand to SEQ ID NO: 985582
aaacauauaccugaguguc

SEQ ID NO: 985584 - RNA, 19 nt, Artificial Sequence
  Description of Artificial Sequence: Synthetic oligonucleotide
  Sense strand starting at position 736 of SEQ ID NO: 914198
ucuguuucccaaugggaaa

SEQ ID NO: 985585 - RNA, 19 nt, Artificial Sequence
  Description of Artificial Sequence: Synthetic oligonucleotide
  Antisense strand to SEQ ID NO: 985584
uuucccauugggaaacaga

SEQ ID NO: 985586 - RNA, 19 nt, Artificial Sequence
  Description of Artificial Sequence: Synthetic oligonucleotide
  Sense strand starting at position 3566 of SEQ ID NO: 914198
augagcauaugguuacaua

SEQ ID NO: 985587 - RNA, 19 nt, Artificial Sequence
  Description of Artificial Sequence: Synthetic oligonucleotide
  Antisense strand to SEQ ID NO: 985586
uauguaaccauaugcucau

SEQ ID NO: 985588 - RNA, 19 nt, Artificial Sequence
  Description of Artificial Sequence: Synthetic oligonucleotide
  Sense strand starting at position 3150 of SEQ ID NO: 914198
aaaucuaaguccgugaaag

SEQ ID NO: 985589 - RNA, 19 nt, Artificial Sequence
  Description of Artificial Sequence: Synthetic oligonucleotide
  Antisense strand to SEQ ID NO: 985588
cuuucacggacuuagauuu

SEQ ID NO: 985590 - RNA, 19 nt, Artificial Sequence
  Description of Artificial Sequence: Synthetic oligonucleotide
  Sense strand starting at position 3763 of SEQ ID NO: 914198
ggaagaauuuaguaaguug

SEQ ID NO: 985591 - RNA, 19 nt, Artificial Sequence
  Description of Artificial Sequence: Synthetic oligonucleotide
  Antisense strand to SEQ ID NO: 985590
caacuuacuaaauucuucc

SEQ ID NO: 985592 - RNA, 19 nt, Artificial Sequence
  Description of Artificial Sequence: Synthetic oligonucleotide
  Sense strand starting at position 2683 of SEQ ID NO: 914198
aguugcauacuguaugaau

SEQ ID NO: 985593 - RNA, 19 nt, Artificial Sequence
  Description of Artificial Sequence: Synthetic oligonucleotide
  Antisense strand to SEQ ID NO: 985592
auucauacaguaugcaacu

SEQ ID NO: 985594 - RNA, 19 nt, Artificial Sequence
  Description of Artificial Sequence: Synthetic oligonucleotide
  Sense strand starting at position 3644 of SEQ ID NO: 914198
cauccuagucagcagaagu

SEQ ID NO: 985595 - RNA, 19 nt, Artificial Sequence
  Description of Artificial Sequence: Synthetic oligonucleotide
  Antisense strand to SEQ ID NO: 985594
acuucugcugacuaggaug

SEQ ID NO: 985596 - RNA, 19 nt, Artificial Sequence
  Description of Artificial Sequence: Synthetic oligonucleotide
  Sense strand starting at position 3217 of SEQ ID NO: 914198
auaaauguugaauguguga

SEQ ID NO: 985597 - RNA, 19 nt, Artificial Sequence
  Description of Artificial Sequence: Synthetic oligonucleotide
  Antisense strand to SEQ ID NO: 985596
ucacacauucaacauuuau

SEQ ID NO: 985598 - RNA, 19 nt, Artificial Sequence
  Description of Artificial Sequence: Synthetic oligonucleotide
  Sense strand starting at position 3350 of SEQ ID NO: 914198
uggcuaacuugacuuugau

SEQ ID NO: 985599 - RNA, 19 nt, Artificial Sequence
  Description of Artificial Sequence: Synthetic oligonucleotide
  Antisense strand to SEQ ID NO: 985598
aucaaagucaaguuagcca

SEQ ID NO: 985600 - RNA, 19 nt, Artificial Sequence
  Description of Artificial Sequence: Synthetic oligonucleotide
  Sense strand starting at position 3149 of SEQ ID NO: 914198
uaaaucuaaguccgugaaa

SEQ ID NO: 985601 - RNA, 19 nt, Artificial Sequence
  Description of Artificial Sequence: Synthetic oligonucleotide
  Antisense strand to SEQ ID NO: 985600
uuucacggacuuagauuua

SEQ ID NO: 985602 - RNA, 19 nt, Artificial Sequence
  Description of Artificial Sequence: Synthetic oligonucleotide
  Sense strand starting at position 1555 of SEQ ID NO: 914198
guuccauaucugugaaaca

SEQ ID NO: 985603 - RNA, 19 nt, Artificial Sequence
  Description of Artificial Sequence: Synthetic oligonucleotide
  Antisense strand to SEQ ID NO: 985602
uguuucacagauauggaac

SEQ ID NO: 985604 - RNA, 19 nt, Artificial Sequence
  Description of Artificial Sequence: Synthetic oligonucleotide
  Sense strand starting at position 2638 of SEQ ID NO: 914198
augcgaacucaguauccca

SEQ ID NO: 985605 - RNA, 19 nt, Artificial Sequence
  Description of Artificial Sequence: Synthetic oligonucleotide
  Antisense strand to SEQ ID NO: 985604
ugggauacugaguucgcau

SEQ ID NO: 985606 - RNA, 19 nt, Artificial Sequence
  Description of Artificial Sequence: Synthetic oligonucleotide
  Sense strand starting at position 1554 of SEQ ID NO: 914198
gguuccauaucugugaaac

SEQ ID NO: 985607 - RNA, 19 nt, Artificial Sequence
  Description of Artificial Sequence: Synthetic oligonucleotide
  Antisense strand to SEQ ID NO: 985606
guuucacagauauggaacc

SEQ ID NO: 985608 - RNA, 19 nt, Artificial Sequence
  Description of Artificial Sequence: Synthetic oligonucleotide
  Sense strand starting at position 3180 of SEQ ID NO: 914198
accauaccauccguauaua

SEQ ID NO: 985609 - RNA, 19 nt, Artificial Sequence
  Description of Artificial Sequence: Synthetic oligonucleotide
  Antisense strand to SEQ ID NO: 985608
uauauacggaugguauggu

SEQ ID NO: 985610 - RNA, 19 nt, Artificial Sequence
  Description of Artificial Sequence: Synthetic oligonucleotide
  Sense strand starting at position 2696 of SEQ ID NO: 914198
augaauguugcuuaccuuu

SEQ ID NO: 985611 - RNA, 19 nt, Artificial Sequence
  Description of Artificial Sequence: Synthetic oligonucleotide
  Antisense strand to SEQ ID NO: 985610
aaagguaagcaacauucau

SEQ ID NO: 985612 - RNA, 19 nt, Artificial Sequence
  Description of Artificial Sequence: Synthetic oligonucleotide
  Sense strand starting at position 3086 of SEQ ID NO: 914198
gcacuaugucagcauauga

SEQ ID NO: 985613 - RNA, 19 nt, Artificial Sequence
  Description of Artificial Sequence: Synthetic oligonucleotide
  Antisense strand to SEQ ID NO: 985612
ucauaugcugacauagugc

SEQ ID NO: 985614 - RNA, 19 nt, Artificial Sequence
  Description of Artificial Sequence: Synthetic oligonucleotide
  Sense strand starting at position 3152 of SEQ ID NO: 914198
aucuaaguccgugaaagca

SEQ ID NO: 985615 - RNA, 19 nt, Artificial Sequence
  Description of Artificial Sequence: Synthetic oligonucleotide
  Antisense strand to SEQ ID NO: 985614
ugcuuucacggacuuagau

SEQ ID NO: 985616 - RNA, 19 nt, Artificial Sequence
  Description of Artificial Sequence: Synthetic oligonucleotide
  Sense strand starting at position 3224 of SEQ ID NO: 914198
uugaaugugugaguaauac

SEQ ID NO: 985617 - RNA, 19 nt, Artificial Sequence
  Description of Artificial Sequence: Synthetic oligonucleotide
  Antisense strand to SEQ ID NO: 985616
guauuacucacacauucaa

SEQ ID NO: 985618 - RNA, 19 nt, Artificial Sequence
  Description of Artificial Sequence: Synthetic oligonucleotide
  Sense strand starting at position 687 of SEQ ID NO: 914198
ggagauugcuggccacaac

SEQ ID NO: 985619 - RNA, 19 nt, Artificial Sequence
  Description of Artificial Sequence: Synthetic oligonucleotide
  Antisense strand to SEQ ID NO: 985618
guuguggccagcaaucucc

SEQ ID NO: 985620 - RNA, 19 nt, Artificial Sequence
  Description of Artificial Sequence: Synthetic oligonucleotide
  Sense strand starting at position 3368 of SEQ ID NO: 914198
uucugcuuugaguaaguaa

SEQ ID NO: 985621 - RNA, 19 nt, Artificial Sequence
  Description of Artificial Sequence: Synthetic oligonucleotide
  Antisense strand to SEQ ID NO: 985620
uuacuuacucaaagcagaa

SEQ ID NO: 985622 - RNA, 19 nt, Artificial Sequence
  Description of Artificial Sequence: Synthetic oligonucleotide
  Sense strand starting at position 783 of SEQ ID NO: 914198
cggcaaagccaucagaagu

SEQ ID NO: 985623 - RNA, 19 nt, Artificial Sequence
  Description of Artificial Sequence: Synthetic oligonucleotide
  Antisense strand to SEQ ID NO: 985622
acuucugauggcuuugccg

SEQ ID NO: 985624 - RNA, 19 nt, Artificial Sequence
  Description of Artificial Sequence: Synthetic oligonucleotide
  Sense strand starting at position 1488 of SEQ ID NO: 914198
caguuugggcucuaucuua

SEQ ID NO: 985625 - RNA, 19 nt, Artificial Sequence
  Description of Artificial Sequence: Synthetic oligonucleotide
  Antisense strand to SEQ ID NO: 985624
uaagauagagcccaaacug

SEQ ID NO: 985626 - RNA, 19 nt, Artificial Sequence
  Description of Artificial Sequence: Synthetic oligonucleotide
  Sense strand starting at position 3115 of SEQ ID NO: 914198
agguauauguuuccuacua

SEQ ID NO: 985627 - RNA, 19 nt, Artificial Sequence
  Description of Artificial Sequence: Synthetic oligonucleotide
  Antisense strand to SEQ ID NO: 985626
uaguaggaaacauauaccu

SEQ ID NO: 985628 - RNA, 19 nt, Artificial Sequence
  Description of Artificial Sequence: Synthetic oligonucleotide
  Sense strand starting at position 3206 of SEQ ID NO: 914198
gcagcuccucaauaaaugu

SEQ ID NO: 985629 - RNA, 19 nt, Artificial Sequence
  Description of Artificial Sequence: Synthetic oligonucleotide
  Antisense strand to SEQ ID NO: 985628
acauuuauugaggagcugc

SEQ ID NO: 985630 - RNA, 19 nt, Artificial Sequence
  Description of Artificial Sequence: Synthetic oligonucleotide
  Sense strand starting at position 3360 of SEQ ID NO: 914198
gacuuugauucugcuuuga

SEQ ID NO: 985631 - RNA, 19 nt, Artificial Sequence
  Description of Artificial Sequence: Synthetic oligonucleotide
  Antisense strand to SEQ ID NO: 985630
ucaaagcagaaucaaaguc

SEQ ID NO: 985632 - RNA, 19 nt, Artificial Sequence
  Description of Artificial Sequence: Synthetic oligonucleotide
  Sense strand starting at position 72 of SEQ ID NO: 914198
gauacagauuugggugaac

SEQ ID NO: 985633 - RNA, 19 nt, Artificial Sequence
  Description of Artificial Sequence: Synthetic oligonucleotide
  Antisense strand to SEQ ID NO: 985632
guucacccaaaucuguauc

SEQ ID NO: 985634 - RNA, 19 nt, Artificial Sequence
  Description of Artificial Sequence: Synthetic oligonucleotide
  Sense strand starting at position 3116 of SEQ ID NO: 914198
gguauauguuuccuacuag

SEQ ID NO: 985635 - RNA, 19 nt, Artificial Sequence
  Description of Artificial Sequence: Synthetic oligonucleotide
  Antisense strand to SEQ ID NO: 985634
cuaguaggaaacauauacc

SEQ ID NO: 985636 - RNA, 19 nt, Artificial Sequence
  Description of Artificial Sequence: Synthetic oligonucleotide
  Sense strand starting at position 2029 of SEQ ID NO: 914198
guuuacucgcaaggauaaa

SEQ ID NO: 985637 - RNA, 19 nt, Artificial Sequence
  Description of Artificial Sequence: Synthetic oligonucleotide
  Antisense strand to SEQ ID NO: 985636
uuuauccuugcgaguaaac

SEQ ID NO: 985638 - RNA, 19 nt, Artificial Sequence
  Description of Artificial Sequence: Synthetic oligonucleotide
  Sense strand starting at position 2023 of SEQ ID NO: 914198
aauggaguuuacucgcaag

SEQ ID NO: 985639 - RNA, 19 nt, Artificial Sequence
  Description of Artificial Sequence: Synthetic oligonucleotide
  Antisense strand to SEQ ID NO: 985638
cuugcgaguaaacuccauu

SEQ ID NO: 985640 - RNA, 19 nt, Artificial Sequence
  Description of Artificial Sequence: Synthetic oligonucleotide
  Sense strand starting at position 2291 of SEQ ID NO: 914198
gucuguguaacuuggagga

SEQ ID NO: 985641 - RNA, 19 nt, Artificial Sequence
  Description of Artificial Sequence: Synthetic oligonucleotide
  Antisense strand to SEQ ID NO: 985640
uccuccaaguuacacagac

SEQ ID NO: 985642 - RNA, 19 nt, Artificial Sequence
  Description of Artificial Sequence: Synthetic oligonucleotide
  Sense strand starting at position 827 of SEQ ID NO: 914198
gcgaaugucaucuggacaa

SEQ ID NO: 985643 - RNA, 19 nt, Artificial Sequence
  Description of Artificial Sequence: Synthetic oligonucleotide
  Antisense strand to SEQ ID NO: 985642
uuguccagaugacauucgc

SEQ ID NO: 985644 - RNA, 19 nt, Artificial Sequence
  Description of Artificial Sequence: Synthetic oligonucleotide
  Sense strand starting at position 729 of SEQ ID NO: 914198
agucacaucuguuucccaa

SEQ ID NO: 985645 - RNA, 19 nt, Artificial Sequence
  Description of Artificial Sequence: Synthetic oligonucleotide
  Antisense strand to SEQ ID NO: 985644
uugggaaacagaugugacu

SEQ ID NO: 985646 - RNA, 19 nt, Artificial Sequence
  Description of Artificial Sequence: Synthetic oligonucleotide
  Sense strand starting at position 557 of SEQ ID NO: 914198
gggcuaaucucagugaacg

SEQ ID NO: 985647 - RNA, 19 nt, Artificial Sequence
  Description of Artificial Sequence: Synthetic oligonucleotide
  Antisense strand to SEQ ID NO: 985646
cguucacugagauuagccc

SEQ ID NO: 985648 - RNA, 19 nt, Artificial Sequence
  Description of Artificial Sequence: Synthetic oligonucleotide
  Sense strand starting at position 3220 of SEQ ID NO: 914198
aauguugaaugugugagua

SEQ ID NO: 985649 - RNA, 19 nt, Artificial Sequence
  Description of Artificial Sequence: Synthetic oligonucleotide
  Antisense strand to SEQ ID NO: 985648
uacucacacauucaacauu

SEQ ID NO: 985650 - RNA, 19 nt, Artificial Sequence
  Description of Artificial Sequence: Synthetic oligonucleotide
  Sense strand starting at position 1098 of SEQ ID NO: 914199
cuuagagaggcugagugau

SEQ ID NO: 985651 - RNA, 19 nt, Artificial Sequence
  Description of Artificial Sequence: Synthetic oligonucleotide
  Antisense strand to SEQ ID NO: 985650
aucacucagccucucuaag

SEQ ID NO: 985652 - RNA, 19 nt, Artificial Sequence
  Description of Artificial Sequence: Synthetic oligonucleotide
  Sense strand starting at position 111 of SEQ ID NO: 914199
cuaaaugaucagugauuag

SEQ ID NO: 985653 - RNA, 19 nt, Artificial Sequence
  Description of Artificial Sequence: Synthetic oligonucleotide
  Antisense strand to SEQ ID NO: 985652
cuaaucacugaucauuuag

SEQ ID NO: 985654 - RNA, 19 nt, Artificial Sequence
  Description of Artificial Sequence: Synthetic oligonucleotide
  Sense strand starting at position 108 of SEQ ID NO: 914199
agccuaaaugaucagugau

SEQ ID NO: 985655 - RNA, 19 nt, Artificial Sequence
  Description of Artificial Sequence: Synthetic oligonucleotide
  Antisense strand to SEQ ID NO: 985654
aucacugaucauuuaggcu

SEQ ID NO: 985656 - RNA, 19 nt, Artificial Sequence
  Description of Artificial Sequence: Synthetic oligonucleotide
  Sense strand starting at position 1813 of SEQ ID NO: 914199
gcuccucagccaucgcaua

SEQ ID NO: 985657 - RNA, 19 nt, Artificial Sequence
  Description of Artificial Sequence: Synthetic oligonucleotide
  Antisense strand to SEQ ID NO: 985656
uaugcgauggcugaggagc

SEQ ID NO: 985658 - RNA, 19 nt, Artificial Sequence
  Description of Artificial Sequence: Synthetic oligonucleotide
  Sense strand starting at position 110 of SEQ ID NO: 914199
ccuaaaugaucagugauua

SEQ ID NO: 985659 - RNA, 19 nt, Artificial Sequence
  Description of Artificial Sequence: Synthetic oligonucleotide
  Antisense strand to SEQ ID NO: 985658
uaaucacugaucauuuagg

SEQ ID NO: 985660 - RNA, 19 nt, Artificial Sequence
  Description of Artificial Sequence: Synthetic oligonucleotide
  Sense strand starting at position 2621 of SEQ ID NO: 914199
gcccgaguaagugugucua

SEQ ID NO: 985661 - RNA, 19 nt, Artificial Sequence
  Description of Artificial Sequence: Synthetic oligonucleotide
  Antisense strand to SEQ ID NO: 985660
uagacacacuuacucgggc

SEQ ID NO: 985662 - RNA, 19 nt, Artificial Sequence
  Description of Artificial Sequence: Synthetic oligonucleotide
  Sense strand starting at position 19 of SEQ ID NO: 914199
uuuaaugcagagcaaauau

SEQ ID NO: 985663 - RNA, 19 nt, Artificial Sequence
  Description of Artificial Sequence: Synthetic oligonucleotide
  Antisense strand to SEQ ID NO: 985662
auauuugcucugcauuaaa

SEQ ID NO: 985664 - RNA, 19 nt, Artificial Sequence
  Description of Artificial Sequence: Synthetic oligonucleotide
  Sense strand starting at position 1014 of SEQ ID NO: 914199
uagugaauaguuugagaag

SEQ ID NO: 985665 - RNA, 19 nt, Artificial Sequence
  Description of Artificial Sequence: Synthetic oligonucleotide
  Antisense strand to SEQ ID NO: 985664
cuucucaaacuauucacua

SEQ ID NO: 985666 - RNA, 19 nt, Artificial Sequence
  Description of Artificial Sequence: Synthetic oligonucleotide
  Sense strand starting at position 3224 of SEQ ID NO: 914199
gguuguuagguagauuaaa

SEQ ID NO: 985667 - RNA, 19 nt, Artificial Sequence
  Description of Artificial Sequence: Synthetic oligonucleotide
  Antisense strand to SEQ ID NO: 985666
uuuaaucuaccuaacaacc

SEQ ID NO: 985668 - RNA, 19 nt, Artificial Sequence
  Description of Artificial Sequence: Synthetic oligonucleotide
  Sense strand starting at position 1876 of SEQ ID NO: 914199
ggaugacuccgucauggac

SEQ ID NO: 985669 - RNA, 19 nt, Artificial Sequence
  Description of Artificial Sequence: Synthetic oligonucleotide
  Antisense strand to SEQ ID NO: 985668
guccaugacggagucaucc

SEQ ID NO: 985670 - RNA, 19 nt, Artificial Sequence
  Description of Artificial Sequence: Synthetic oligonucleotide
  Sense strand starting at position 114 of SEQ ID NO: 914199
aaugaucagugauuagagu

SEQ ID NO: 985671 - RNA, 19 nt, Artificial Sequence
  Description of Artificial Sequence: Synthetic oligonucleotide
  Antisense strand to SEQ ID NO: 985670
acucuaaucacugaucauu

SEQ ID NO: 985672 - RNA, 19 nt, Artificial Sequence
  Description of Artificial Sequence: Synthetic oligonucleotide
  Sense strand starting at position 3510 of SEQ ID NO: 914199
gggagcugugucugauuuc

SEQ ID NO: 985673 - RNA, 19 nt, Artificial Sequence
  Description of Artificial Sequence: Synthetic oligonucleotide
  Antisense strand to SEQ ID NO: 985672
gaaaucagacacagcuccc

SEQ ID NO: 985674 - RNA, 19 nt, Artificial Sequence
  Description of Artificial Sequence: Synthetic oligonucleotide
  Sense strand starting at position 2669 of SEQ ID NO: 914199
ggcuguucccaggagggau

SEQ ID NO: 985675 - RNA, 19 nt, Artificial Sequence
  Description of Artificial Sequence: Synthetic oligonucleotide
  Antisense strand to SEQ ID NO: 985674
aucccuccugggaacagcc

SEQ ID NO: 985676 - RNA, 19 nt, Artificial Sequence
  Description of Artificial Sequence: Synthetic oligonucleotide
  Sense strand starting at position 1046 of SEQ ID NO: 914199
ggaccuuagaguugaucua

SEQ ID NO: 985677 - RNA, 19 nt, Artificial Sequence
  Description of Artificial Sequence: Synthetic oligonucleotide
  Antisense strand to SEQ ID NO: 985676
uagaucaacucuaaggucc

SEQ ID NO: 985678 - RNA, 19 nt, Artificial Sequence
  Description of Artificial Sequence: Synthetic oligonucleotide
  Sense strand starting at position 2752 of SEQ ID NO: 914199
cggaaucugagccaucuga

SEQ ID NO: 985679 - RNA, 19 nt, Artificial Sequence
  Description of Artificial Sequence: Synthetic oligonucleotide
  Antisense strand to SEQ ID NO: 985678
ucagauggcucagauuccg

SEQ ID NO: 985680 - RNA, 19 nt, Artificial Sequence
  Description of Artificial Sequence: Synthetic oligonucleotide
  Sense strand starting at position 3627 of SEQ ID NO: 914199
gggacuaucuuucucuaca

SEQ ID NO: 985681 - RNA, 19 nt, Artificial Sequence
  Description of Artificial Sequence: Synthetic oligonucleotide
  Antisense strand to SEQ ID NO: 985680
uguagagaaagauaguccc

SEQ ID NO: 985682 - RNA, 19 nt, Artificial Sequence
  Description of Artificial Sequence: Synthetic oligonucleotide
  Sense strand starting at position 3628 of SEQ ID NO: 914199
ggacuaucuuucucuacag

SEQ ID NO: 985683 - RNA, 19 nt, Artificial Sequence
  Description of Artificial Sequence: Synthetic oligonucleotide
  Antisense strand to SEQ ID NO: 985682
cuguagagaaagauagucc

SEQ ID NO: 985684 - RNA, 19 nt, Artificial Sequence
  Description of Artificial Sequence: Synthetic oligonucleotide
  Sense strand starting at position 291 of SEQ ID NO: 914199
caaacauggcauugaagua

SEQ ID NO: 985685 - RNA, 19 nt, Artificial Sequence
  Description of Artificial Sequence: Synthetic oligonucleotide
  Antisense strand to SEQ ID NO: 985684
uacuucaaugccauguuug

SEQ ID NO: 985686 - RNA, 19 nt, Artificial Sequence
  Description of Artificial Sequence: Synthetic oligonucleotide
  Sense strand starting at position 107 of SEQ ID NO: 914199
gagccuaaaugaucaguga

SEQ ID NO: 985687 - RNA, 19 nt, Artificial Sequence
  Description of Artificial Sequence: Synthetic oligonucleotide
  Antisense strand to SEQ ID NO: 985686
ucacugaucauuuaggcuc

SEQ ID NO: 985688 - RNA, 19 nt, Artificial Sequence
  Description of Artificial Sequence: Synthetic oligonucleotide
  Sense strand starting at position 1222 of SEQ ID NO: 914199
guaugagucagacaugguc

SEQ ID NO: 985689 - RNA, 19 nt, Artificial Sequence
  Description of Artificial Sequence: Synthetic oligonucleotide
  Antisense strand to SEQ ID NO: 985688
gaccaugucugacucauac

SEQ ID NO: 985690 - RNA, 19 nt, Artificial Sequence
  Description of Artificial Sequence: Synthetic oligonucleotide
  Sense strand starting at position 175 of SEQ ID NO: 914199
gguauuauugguuaguaga

SEQ ID NO: 985691 - RNA, 19 nt, Artificial Sequence
  Description of Artificial Sequence: Synthetic oligonucleotide
  Antisense strand to SEQ ID NO: 985690
ucuacuaaccaauaauacc

SEQ ID NO: 985692 - RNA, 19 nt, Artificial Sequence
  Description of Artificial Sequence: Synthetic oligonucleotide
  Sense strand starting at position 1012 of SEQ ID NO: 914199
cuuagugaauaguuugaga

SEQ ID NO: 985693 - RNA, 19 nt, Artificial Sequence
  Description of Artificial Sequence: Synthetic oligonucleotide
  Antisense strand to SEQ ID NO: 985692
ucucaaacuauucacuaag

SEQ ID NO: 985694 - RNA, 19 nt, Artificial Sequence
  Description of Artificial Sequence: Synthetic oligonucleotide
  Sense strand starting at position 1229 of SEQ ID NO: 914199
ucagacauggucuaugcca

SEQ ID NO: 985695 - RNA, 19 nt, Artificial Sequence
  Description of Artificial Sequence: Synthetic oligonucleotide
  Antisense strand to SEQ ID NO: 985694
uggcauagaccaugucuga

SEQ ID NO: 985696 - RNA, 19 nt, Artificial Sequence
  Description of Artificial Sequence: Synthetic oligonucleotide
  Sense strand starting at position 1224 of SEQ ID NO: 914199
augagucagacauggucua

SEQ ID NO: 985697 - RNA, 19 nt, Artificial Sequence
  Description of Artificial Sequence: Synthetic oligonucleotide
  Antisense strand to SEQ ID NO: 985696
uagaccaugucugacucau

SEQ ID NO: 985698 - RNA, 19 nt, Artificial Sequence
  Description of Artificial Sequence: Synthetic oligonucleotide
  Sense strand starting at position 3489 of SEQ ID NO: 914199
gacugucaacuaugugaag

SEQ ID NO: 985699 - RNA, 19 nt, Artificial Sequence
  Description of Artificial Sequence: Synthetic oligonucleotide
  Antisense strand to SEQ ID NO: 985698
cuucacauaguugacaguc

SEQ ID NO: 985700 - RNA, 19 nt, Artificial Sequence
  Description of Artificial Sequence: Synthetic oligonucleotide
  Sense strand starting at position 2895 of SEQ ID NO: 914199
aaguauguagccuauggau

SEQ ID NO: 985701 - RNA, 19 nt, Artificial Sequence
  Description of Artificial Sequence: Synthetic oligonucleotide
  Antisense strand to SEQ ID NO: 985700
auccauaggcuacauacuu

SEQ ID NO: 985702 - RNA, 19 nt, Artificial Sequence
  Description of Artificial Sequence: Synthetic oligonucleotide
  Sense strand starting at position 128 of SEQ ID NO: 914199
agaguaauauacuuagucu

SEQ ID NO: 985703 - RNA, 19 nt, Artificial Sequence
  Description of Artificial Sequence: Synthetic oligonucleotide
  Antisense strand to SEQ ID NO: 985702
agacuaaguauauuacucu

SEQ ID NO: 985704 - RNA, 19 nt, Artificial Sequence
  Description of Artificial Sequence: Synthetic oligonucleotide
  Sense strand starting at position 3772 of SEQ ID NO: 914199
ggaugugcucauuaaucug

SEQ ID NO: 985705 - RNA, 19 nt, Artificial Sequence
  Description of Artificial Sequence: Synthetic oligonucleotide
  Antisense strand to SEQ ID NO: 985704
cagauuaaugagcacaucc

SEQ ID NO: 985706 - RNA, 19 nt, Artificial Sequence
  Description of Artificial Sequence: Synthetic oligonucleotide
  Sense strand starting at position 3739 of SEQ ID NO: 914199
acccuagcuccaggauaua

SEQ ID NO: 985707 - RNA, 19 nt, Artificial Sequence
  Description of Artificial Sequence: Synthetic oligonucleotide
  Antisense strand to SEQ ID NO: 985706
uauauccuggagcuagggu

SEQ ID NO: 985708 - RNA, 19 nt, Artificial Sequence
  Description of Artificial Sequence: Synthetic oligonucleotide
  Sense strand starting at position 704 of SEQ ID NO: 914199
aggagaauccagugucuug

SEQ ID NO: 985709 - RNA, 19 nt, Artificial Sequence
  Description of Artificial Sequence: Synthetic oligonucleotide
  Antisense strand to SEQ ID NO: 985708
caagacacuggauucuccu

SEQ ID NO: 985710 - RNA, 19 nt, Artificial Sequence
  Description of Artificial Sequence: Synthetic oligonucleotide
  Sense strand starting at position 3563 of SEQ ID NO: 914199
agugaaugagcaggugaau

SEQ ID NO: 985711 - RNA, 19 nt, Artificial Sequence
  Description of Artificial Sequence: Synthetic oligonucleotide
  Antisense strand to SEQ ID NO: 985710
auucaccugcucauucacu

SEQ ID NO: 985712 - RNA, 19 nt, Artificial Sequence
  Description of Artificial Sequence: Synthetic oligonucleotide
  Sense strand starting at position 644 of SEQ ID NO: 914199
acuguuaacgcagauuaca

SEQ ID NO: 985713 - RNA, 19 nt, Artificial Sequence
  Description of Artificial Sequence: Synthetic oligonucleotide
  Antisense strand to SEQ ID NO: 985712
uguaaucugcguuaacagu

SEQ ID NO: 985714 - RNA, 19 nt, Artificial Sequence
  Description of Artificial Sequence: Synthetic oligonucleotide
  Sense strand starting at position 2928 of SEQ ID NO: 914199
ggcguuguuguguuaguaa

SEQ ID NO: 985715 - RNA, 19 nt, Artificial Sequence
  Description of Artificial Sequence: Synthetic oligonucleotide
  Antisense strand to SEQ ID NO: 985714
uuacuaacacaacaacgcc

SEQ ID NO: 985716 - RNA, 19 nt, Artificial Sequence
  Description of Artificial Sequence: Synthetic oligonucleotide
  Sense strand starting at position 852 of SEQ ID NO: 914199
uacacuuugggaugcauau

SEQ ID NO: 985717 - RNA, 19 nt, Artificial Sequence
  Description of Artificial Sequence: Synthetic oligonucleotide
  Antisense strand to SEQ ID NO: 985716
auaugcaucccaaagugua

SEQ ID NO: 985718 - RNA, 19 nt, Artificial Sequence
  Description of Artificial Sequence: Synthetic oligonucleotide
  Sense strand starting at position 3649 of SEQ ID NO: 914199
uagaguaguuaguuacaga

SEQ ID NO: 985719 - RNA, 19 nt, Artificial Sequence
  Description of Artificial Sequence: Synthetic oligonucleotide
  Antisense strand to SEQ ID NO: 985718
ucuguaacuaacuacucua

SEQ ID NO: 985720 - RNA, 19 nt, Artificial Sequence
  Description of Artificial Sequence: Synthetic oligonucleotide
  Sense strand starting at position 3645 of SEQ ID NO: 914199
agauuagaguaguuaguua

SEQ ID NO: 985721 - RNA, 19 nt, Artificial Sequence
  Description of Artificial Sequence: Synthetic oligonucleotide
  Antisense strand to SEQ ID NO: 985720
uaacuaacuacucuaaucu

SEQ ID NO: 985722 - RNA, 19 nt, Artificial Sequence
  Description of Artificial Sequence: Synthetic oligonucleotide
  Sense strand starting at position 3513 of SEQ ID NO: 914199
agcugugucugauuuccuu

SEQ ID NO: 985723 - RNA, 19 nt, Artificial Sequence
  Description of Artificial Sequence: Synthetic oligonucleotide
  Antisense strand to SEQ ID NO: 985722
aaggaaaucagacacagcu

SEQ ID NO: 985724 - RNA, 19 nt, Artificial Sequence
  Description of Artificial Sequence: Synthetic oligonucleotide
  Sense strand starting at position 3521 of SEQ ID NO: 914199
cugauuuccuuggcguuua

SEQ ID NO: 985725 - RNA, 19 nt, Artificial Sequence
  Description of Artificial Sequence: Synthetic oligonucleotide
  Antisense strand to SEQ ID NO: 985724
uaaacgccaaggaaaucag

SEQ ID NO: 985726 - RNA, 19 nt, Artificial Sequence
  Description of Artificial Sequence: Synthetic oligonucleotide
  Sense strand starting at position 2801 of SEQ ID NO: 914199
uugcauaaccuggaaacgu

SEQ ID NO: 985727 - RNA, 19 nt, Artificial Sequence
  Description of Artificial Sequence: Synthetic oligonucleotide
  Antisense strand to SEQ ID NO: 985726
acguuuccagguuaugcaa

SEQ ID NO: 985728 - RNA, 19 nt, Artificial Sequence
  Description of Artificial Sequence: Synthetic oligonucleotide
  Sense strand starting at position 402 of SEQ ID NO: 914199
caaucauggccaugguaga

SEQ ID NO: 985729 - RNA, 19 nt, Artificial Sequence
  Description of Artificial Sequence: Synthetic oligonucleotide
  Antisense strand to SEQ ID NO: 985728
ucuaccauggccaugauug

SEQ ID NO: 985730 - RNA, 19 nt, Artificial Sequence
  Description of Artificial Sequence: Synthetic oligonucleotide
  Sense strand starting at position 1100 of SEQ ID NO: 914200
augcauacugcagacaaga

SEQ ID NO: 985731 - RNA, 19 nt, Artificial Sequence
  Description of Artificial Sequence: Synthetic oligonucleotide
  Antisense strand to SEQ ID NO: 985730
ucuugucugcaguaugcau

SEQ ID NO: 985732 - RNA, 19 nt, Artificial Sequence
  Description of Artificial Sequence: Synthetic oligonucleotide
  Sense strand starting at position 592 of SEQ ID NO: 914200
guuacauuaccugauacuc

SEQ ID NO: 985733 - RNA, 19 nt, Artificial Sequence
  Description of Artificial Sequence: Synthetic oligonucleotide
  Antisense strand to SEQ ID NO: 985732
gaguaucagguaauguaac

SEQ ID NO: 985734 - RNA, 19 nt, Artificial Sequence
  Description of Artificial Sequence: Synthetic oligonucleotide
  Sense strand starting at position 1043 of SEQ ID NO: 914200
ggaagauaccuguaguagu

SEQ ID NO: 985735 - RNA, 19 nt, Artificial Sequence
  Description of Artificial Sequence: Synthetic oligonucleotide
  Antisense strand to SEQ ID NO: 985734
acuacuacagguaucuucc

SEQ ID NO: 985736 - RNA, 19 nt, Artificial Sequence
  Description of Artificial Sequence: Synthetic oligonucleotide
  Sense strand starting at position 347 of SEQ ID NO: 914200
ucauuaguagaguacaucu

SEQ ID NO: 985737 - RNA, 19 nt, Artificial Sequence
  Description of Artificial Sequence: Synthetic oligonucleotide
  Antisense strand to SEQ ID NO: 985736
agauguacucuacuaauga

SEQ ID NO: 985738 - RNA, 19 nt, Artificial Sequence
  Description of Artificial Sequence: Synthetic oligonucleotide
  Sense strand starting at position 1041 of SEQ ID NO: 914200
auggaagauaccuguagua

SEQ ID NO: 985739 - RNA, 19 nt, Artificial Sequence
  Description of Artificial Sequence: Synthetic oligonucleotide
  Antisense strand to SEQ ID NO: 985738
uacuacagguaucuuccau

SEQ ID NO: 985740 - RNA, 19 nt, Artificial Sequence
  Description of Artificial Sequence: Synthetic oligonucleotide
  Sense strand starting at position 344 of SEQ ID NO: 914200
uggucauuaguagaguaca

SEQ ID NO: 985741 - RNA, 19 nt, Artificial Sequence
  Description of Artificial Sequence: Synthetic oligonucleotide
  Antisense strand to SEQ ID NO: 985740
uguacucuacuaaugacca

SEQ ID NO: 985742 - RNA, 19 nt, Artificial Sequence
  Description of Artificial Sequence: Synthetic oligonucleotide
  Sense strand starting at position 964 of SEQ ID NO: 914200
ggcuauaaucaccagcaau

SEQ ID NO: 985743 - RNA, 19 nt, Artificial Sequence
  Description of Artificial Sequence: Synthetic oligonucleotide
  Antisense strand to SEQ ID NO: 985742
auugcuggugauuauagcc

SEQ ID NO: 985744 - RNA, 19 nt, Artificial Sequence
  Description of Artificial Sequence: Synthetic oligonucleotide
  Sense strand starting at position 327 of SEQ ID NO: 914200
gagaauuaaucagcaugug

SEQ ID NO: 985745 - RNA, 19 nt, Artificial Sequence
  Description of Artificial Sequence: Synthetic oligonucleotide
  Antisense strand to SEQ ID NO: 985744
cacaugcugauuaauucuc

SEQ ID NO: 985746 - RNA, 19 nt, Artificial Sequence
  Description of Artificial Sequence: Synthetic oligonucleotide
  Sense strand starting at position 1453 of SEQ ID NO: 914200
gguaaacauguuuacagca

SEQ ID NO: 985747 - RNA, 19 nt, Artificial Sequence
  Description of Artificial Sequence: Synthetic oligonucleotide
  Antisense strand to SEQ ID NO: 985746
ugcuguaaacauguuuacc

SEQ ID NO: 985748 - RNA, 19 nt, Artificial Sequence
  Description of Artificial Sequence: Synthetic oligonucleotide
  Sense strand starting at position 986 of SEQ ID NO: 914200
ugaaaugcauuugagaaca

SEQ ID NO: 985749 - RNA, 19 nt, Artificial Sequence
  Description of Artificial Sequence: Synthetic oligonucleotide
  Antisense strand to SEQ ID NO: 985748
uguucucaaaugcauuuca

SEQ ID NO: 985750 - RNA, 19 nt, Artificial Sequence
  Description of Artificial Sequence: Synthetic oligonucleotide
  Sense strand starting at position 1093 of SEQ ID NO: 914200
gagaguaaugcauacugca

SEQ ID NO: 985751 - RNA, 19 nt, Artificial Sequence
  Description of Artificial Sequence: Synthetic oligonucleotide
  Antisense strand to SEQ ID NO: 985750
ugcaguaugcauuacucuc

SEQ ID NO: 985752 - RNA, 19 nt, Artificial Sequence
  Description of Artificial Sequence: Synthetic oligonucleotide
  Sense strand starting at position 589 of SEQ ID NO: 914200
ucaguuacauuaccugaua

SEQ ID NO: 985753 - RNA, 19 nt, Artificial Sequence
  Description of Artificial Sequence: Synthetic oligonucleotide
  Antisense strand to SEQ ID NO: 985752
uaucagguaauguaacuga

SEQ ID NO: 985754 - RNA, 19 nt, Artificial Sequence
  Description of Artificial Sequence: Synthetic oligonucleotide
  Sense strand starting at position 448 of SEQ ID NO: 914200
ugcaacaaagcaugaaauu

SEQ ID NO: 985755 - RNA, 19 nt, Artificial Sequence
  Description of Artificial Sequence: Synthetic oligonucleotide
  Antisense strand to SEQ ID NO: 985754
aauuucaugcuuuguugca

SEQ ID NO: 985756 - RNA, 19 nt, Artificial Sequence
  Description of Artificial Sequence: Synthetic oligonucleotide
  Sense strand starting at position 505 of SEQ ID NO: 914200
cuccuuuacggaugacuaa

SEQ ID NO: 985757 - RNA, 19 nt, Artificial Sequence
  Description of Artificial Sequence: Synthetic oligonucleotide
  Antisense strand to SEQ ID NO: 985756
uuagucauccguaaaggag

SEQ ID NO: 985758 - RNA, 19 nt, Artificial Sequence
  Description of Artificial Sequence: Synthetic oligonucleotide
  Sense strand starting at position 1515 of SEQ ID NO: 914200
ugucgucagcaacaagaaa

SEQ ID NO: 985759 - RNA, 19 nt, Artificial Sequence
  Description of Artificial Sequence: Synthetic oligonucleotide
  Antisense strand to SEQ ID NO: 985758
uuucuuguugcugacgaca

SEQ ID NO: 985760 - RNA, 19 nt, Artificial Sequence
  Description of Artificial Sequence: Synthetic oligonucleotide
  Sense strand starting at position 499 of SEQ ID NO: 914200
augucacuccuuuacggau

SEQ ID NO: 985761 - RNA, 19 nt, Artificial Sequence
  Description of Artificial Sequence: Synthetic oligonucleotide
  Antisense strand to SEQ ID NO: 985760
auccguaaaggagugacau

SEQ ID NO: 985762 - RNA, 19 nt, Artificial Sequence
  Description of Artificial Sequence: Synthetic oligonucleotide
  Sense strand starting at position 952 of SEQ ID NO: 914200
aucaaauagcauggcuaua

SEQ ID NO: 985763 - RNA, 19 nt, Artificial Sequence
  Description of Artificial Sequence: Synthetic oligonucleotide
  Antisense strand to SEQ ID NO: 985762
uauagccaugcuauuugau

SEQ ID NO: 985764 - RNA, 19 nt, Artificial Sequence
  Description of Artificial Sequence: Synthetic oligonucleotide
  Sense strand starting at position 256 of SEQ ID NO: 914200
gugguuuccaaugacagca

SEQ ID NO: 985765 - RNA, 19 nt, Artificial Sequence
  Description of Artificial Sequence: Synthetic oligonucleotide
  Antisense strand to SEQ ID NO: 985764
ugcugucauuggaaaccac

SEQ ID NO: 985766 - RNA, 19 nt, Artificial Sequence
  Description of Artificial Sequence: Synthetic oligonucleotide
  Sense strand starting at position 1541 of SEQ ID NO: 914200
uucucuggcgaucaacauu

SEQ ID NO: 985767 - RNA, 19 nt, Artificial Sequence
  Description of Artificial Sequence: Synthetic oligonucleotide
  Antisense strand to SEQ ID NO: 985766
aauguugaucgccagagaa

SEQ ID NO: 985768 - RNA, 19 nt, Artificial Sequence
  Description of Artificial Sequence: Synthetic oligonucleotide
  Sense strand starting at position 2182 of SEQ ID NO: 914200
cguguaauuccuuauauag

SEQ ID NO: 985769 - RNA, 19 nt, Artificial Sequence
  Description of Artificial Sequence: Synthetic oligonucleotide
  Antisense strand to SEQ ID NO: 985768
cuauauaaggaauuacacg

SEQ ID NO: 985770 - RNA, 19 nt, Artificial Sequence
  Description of Artificial Sequence: Synthetic oligonucleotide
  Sense strand starting at position 963 of SEQ ID NO: 914200
uggcuauaaucaccagcaa

SEQ ID NO: 985771 - RNA, 19 nt, Artificial Sequence
  Description of Artificial Sequence: Synthetic oligonucleotide
  Antisense strand to SEQ ID NO: 985770
uugcuggugauuauagcca

SEQ ID NO: 985772 - RNA, 19 nt, Artificial Sequence
  Description of Artificial Sequence: Synthetic oligonucleotide
  Sense strand starting at position 339 of SEQ ID NO: 914200
gcauguggucauuaguaga

SEQ ID NO: 985773 - RNA, 19 nt, Artificial Sequence
  Description of Artificial Sequence: Synthetic oligonucleotide
  Antisense strand to SEQ ID NO: 985772
ucuacuaaugaccacaugc

SEQ ID NO: 985774 - RNA, 19 nt, Artificial Sequence
  Description of Artificial Sequence: Synthetic oligonucleotide
  Sense strand starting at position 2361 of SEQ ID NO: 914200
cagacauuucgcugcugca

SEQ ID NO: 985775 - RNA, 19 nt, Artificial Sequence
  Description of Artificial Sequence: Synthetic oligonucleotide
  Antisense strand to SEQ ID NO: 985774
ugcagcagcgaaaugucug

SEQ ID NO: 985776 - RNA, 19 nt, Artificial Sequence
  Description of Artificial Sequence: Synthetic oligonucleotide
  Sense strand starting at position 1389 of SEQ ID NO: 914200
gccuuacgaguguaauauu

SEQ ID NO: 985777 - RNA, 19 nt, Artificial Sequence
  Description of Artificial Sequence: Synthetic oligonucleotide
  Antisense strand to SEQ ID NO: 985776
aauauuacacucguaaggc

SEQ ID NO: 985778 - RNA, 19 nt, Artificial Sequence
  Description of Artificial Sequence: Synthetic oligonucleotide
  Sense strand starting at position 2181 of SEQ ID NO: 914200
acguguaauuccuuauaua

SEQ ID NO: 985779 - RNA, 19 nt, Artificial Sequence
  Description of Artificial Sequence: Synthetic oligonucleotide
  Antisense strand to SEQ ID NO: 985778
uauauaaggaauuacacgu

SEQ ID NO: 985780 - RNA, 19 nt, Artificial Sequence
  Description of Artificial Sequence: Synthetic oligonucleotide
  Sense strand starting at position 336 of SEQ ID NO: 914200
ucagcauguggucauuagu

SEQ ID NO: 985781 - RNA, 19 nt, Artificial Sequence
  Description of Artificial Sequence: Synthetic oligonucleotide
  Antisense strand to SEQ ID NO: 985780
acuaaugaccacaugcuga

SEQ ID NO: 985782 - RNA, 19 nt, Artificial Sequence
  Description of Artificial Sequence: Synthetic oligonucleotide
  Sense strand starting at position 1381 of SEQ ID NO: 914200
guugauaugccuuacgagu

SEQ ID NO: 985783 - RNA, 19 nt, Artificial Sequence
  Description of Artificial Sequence: Synthetic oligonucleotide
  Antisense strand to SEQ ID NO: 985782
acucguaaggcauaucaac

SEQ ID NO: 985784 - RNA, 19 nt, Artificial Sequence
  Description of Artificial Sequence: Synthetic oligonucleotide
  Sense strand starting at position 255 of SEQ ID NO: 914200
ggugguuuccaaugacagc

SEQ ID NO: 985785 - RNA, 19 nt, Artificial Sequence
  Description of Artificial Sequence: Synthetic oligonucleotide
  Antisense strand to SEQ ID NO: 985784
gcugucauuggaaaccacc

SEQ ID NO: 985786 - RNA, 19 nt, Artificial Sequence
  Description of Artificial Sequence: Synthetic oligonucleotide
  Sense strand starting at position 628 of SEQ ID NO: 914200
ucagacauauuccagaaag

SEQ ID NO: 985787 - RNA, 19 nt, Artificial Sequence
  Description of Artificial Sequence: Synthetic oligonucleotide
  Antisense strand to SEQ ID NO: 985786
cuuucuggaauaugucuga

SEQ ID NO: 985788 - RNA, 19 nt, Artificial Sequence
  Description of Artificial Sequence: Synthetic oligonucleotide
  Sense strand starting at position 1125 of SEQ ID NO: 914200
gugcuaaacagacgcaaau

SEQ ID NO: 985789 - RNA, 19 nt, Artificial Sequence
  Description of Artificial Sequence: Synthetic oligonucleotide
  Antisense strand to SEQ ID NO: 985788
auuugcgucuguuuagcac

SEQ ID NO: 985790 - RNA, 19 nt, Artificial Sequence
  Description of Artificial Sequence: Synthetic oligonucleotide
  Sense strand starting at position 1508 of SEQ ID NO: 914200
acacacaugucgucagcaa

SEQ ID NO: 985791 - RNA, 19 nt, Artificial Sequence
  Description of Artificial Sequence: Synthetic oligonucleotide
  Antisense strand to SEQ ID NO: 985790
uugcugacgacaugugugu

SEQ ID NO: 985792 - RNA, 19 nt, Artificial Sequence
  Description of Artificial Sequence: Synthetic oligonucleotide
  Sense strand starting at position 1387 of SEQ ID NO: 914200
augccuuacgaguguaaua

SEQ ID NO: 985793 - RNA, 19 nt, Artificial Sequence
  Description of Artificial Sequence: Synthetic oligonucleotide
  Antisense strand to SEQ ID NO: 985792
uauuacacucguaaggcau

SEQ ID NO: 985794 - RNA, 19 nt, Artificial Sequence
  Description of Artificial Sequence: Synthetic oligonucleotide
  Sense strand starting at position 1180 of SEQ ID NO: 914200
gacagcaagcgugguaaau

SEQ ID NO: 985795 - RNA, 19 nt, Artificial Sequence
  Description of Artificial Sequence: Synthetic oligonucleotide
  Antisense strand to SEQ ID NO: 985794
auuuaccacgcuugcuguc

SEQ ID NO: 985796 - RNA, 19 nt, Artificial Sequence
  Description of Artificial Sequence: Synthetic oligonucleotide
  Sense strand starting at position 90 of SEQ ID NO: 914200
uuucuaguuucggcaaacu

SEQ ID NO: 985797 - RNA, 19 nt, Artificial Sequence
  Description of Artificial Sequence: Synthetic oligonucleotide
  Antisense strand to SEQ ID NO: 985796
aguuugccgaaacuagaaa

SEQ ID NO: 985798 - RNA, 19 nt, Artificial Sequence
  Description of Artificial Sequence: Synthetic oligonucleotide
  Sense strand starting at position 2227 of SEQ ID NO: 914200
guugccgcccauuauuaua

SEQ ID NO: 985799 - RNA, 19 nt, Artificial Sequence
  Description of Artificial Sequence: Synthetic oligonucleotide
  Antisense strand to SEQ ID NO: 985798
uauaauaaugggcggcaac

SEQ ID NO: 985800 - RNA, 19 nt, Artificial Sequence
  Description of Artificial Sequence: Synthetic oligonucleotide
  Sense strand starting at position 2171 of SEQ ID NO: 914200
uccgaaauguacguguaau

SEQ ID NO: 985801 - RNA, 19 nt, Artificial Sequence
  Description of Artificial Sequence: Synthetic oligonucleotide
  Antisense strand to SEQ ID NO: 985800
auuacacguacauuucgga

SEQ ID NO: 985802 - RNA, 19 nt, Artificial Sequence
  Description of Artificial Sequence: Synthetic oligonucleotide
  Sense strand starting at position 2914 of SEQ ID NO: 914200
gcguuaaguggguaccuuu

SEQ ID NO: 985803 - RNA, 19 nt, Artificial Sequence
  Description of Artificial Sequence: Synthetic oligonucleotide
  Antisense strand to SEQ ID NO: 985802
aaagguacccacuuaacgc

SEQ ID NO: 985804 - RNA, 19 nt, Artificial Sequence
  Description of Artificial Sequence: Synthetic oligonucleotide
  Sense strand starting at position 2172 of SEQ ID NO: 914200
ccgaaauguacguguaauu

SEQ ID NO: 985805 - RNA, 19 nt, Artificial Sequence
  Description of Artificial Sequence: Synthetic oligonucleotide
  Antisense strand to SEQ ID NO: 985804
aauuacacguacauuucgg

SEQ ID NO: 985806 - RNA, 19 nt, Artificial Sequence
  Description of Artificial Sequence: Synthetic oligonucleotide
  Sense strand starting at position 1576 of SEQ ID NO: 914200
gcgaacagcucuuuccgaa

SEQ ID NO: 985807 - RNA, 19 nt, Artificial Sequence
  Description of Artificial Sequence: Synthetic oligonucleotide
  Antisense strand to SEQ ID NO: 985806
uucggaaagagcuguucgc

SEQ ID NO: 985808 - RNA, 19 nt, Artificial Sequence
  Description of Artificial Sequence: Synthetic oligonucleotide
  Sense strand starting at position 512 of SEQ ID NO: 914200
acggaugacuaacaucauu

SEQ ID NO: 985809 - RNA, 19 nt, Artificial Sequence
  Description of Artificial Sequence: Synthetic oligonucleotide
  Antisense strand to SEQ ID NO: 985808
aaugauguuagucauccgu

SEQ ID NO: 985810 - RNA, 19 nt, Artificial Sequence
  Description of Artificial Sequence: Synthetic oligonucleotide
  Sense strand starting at position 3571 of SEQ ID NO: 914201
agaaguaaaugcguuauuu

SEQ ID NO: 985811 - RNA, 19 nt, Artificial Sequence
  Description of Artificial Sequence: Synthetic oligonucleotide
  Antisense strand to SEQ ID NO: 985810
aaauaacgcauuuacuucu

SEQ ID NO: 985812 - RNA, 19 nt, Artificial Sequence
  Description of Artificial Sequence: Synthetic oligonucleotide
  Sense strand starting at position 3295 of SEQ ID NO: 914201
uuggaaauaacguaguaca

SEQ ID NO: 985813 - RNA, 19 nt, Artificial Sequence
  Description of Artificial Sequence: Synthetic oligonucleotide
  Antisense strand to SEQ ID NO: 985812
uguacuacguuauuuccaa

SEQ ID NO: 985814 - RNA, 19 nt, Artificial Sequence
  Description of Artificial Sequence: Synthetic oligonucleotide
  Sense strand starting at position 3848 of SEQ ID NO: 914201
ggucauagacuauggaauu

SEQ ID NO: 985815 - RNA, 19 nt, Artificial Sequence
  Description of Artificial Sequence: Synthetic oligonucleotide
  Antisense strand to SEQ ID NO: 985814
aauuccauagucuaugacc

SEQ ID NO: 985816 - RNA, 19 nt, Artificial Sequence
  Description of Artificial Sequence: Synthetic oligonucleotide
  Sense strand starting at position 3597 of SEQ ID NO: 914201
caugaaaugugacuguaaa

SEQ ID NO: 985817 - RNA, 19 nt, Artificial Sequence
  Description of Artificial Sequence: Synthetic oligonucleotide
  Antisense strand to SEQ ID NO: 985816
uuuacagucacauuucaug

SEQ ID NO: 985818 - RNA, 19 nt, Artificial Sequence
  Description of Artificial Sequence: Synthetic oligonucleotide
  Sense strand starting at position 3598 of SEQ ID NO: 914201
augaaaugugacuguaaau

SEQ ID NO: 985819 - RNA, 19 nt, Artificial Sequence
  Description of Artificial Sequence: Synthetic oligonucleotide
  Antisense strand to SEQ ID NO: 985818
auuuacagucacauuucau

SEQ ID NO: 985820 - RNA, 19 nt, Artificial Sequence
  Description of Artificial Sequence: Synthetic oligonucleotide
  Sense strand starting at position 2757 of SEQ ID NO: 914201
gaguaauacccacacggug

SEQ ID NO: 985821 - RNA, 19 nt, Artificial Sequence
  Description of Artificial Sequence: Synthetic oligonucleotide
  Antisense strand to SEQ ID NO: 985820
caccguguggguauuacuc

SEQ ID NO: 985822 - RNA, 19 nt, Artificial Sequence
  Description of Artificial Sequence: Synthetic oligonucleotide
  Sense strand starting at position 3245 of SEQ ID NO: 914201
guagcaguuauugauagag

SEQ ID NO: 985823 - RNA, 19 nt, Artificial Sequence
  Description of Artificial Sequence: Synthetic oligonucleotide
  Antisense strand to SEQ ID NO: 985822
cucuaucaauaacugcuac

SEQ ID NO: 985824 - RNA, 19 nt, Artificial Sequence
  Description of Artificial Sequence: Synthetic oligonucleotide
  Sense strand starting at position 3575 of SEQ ID NO: 914201
guaaaugcguuauuuauug

SEQ ID NO: 985825 - RNA, 19 nt, Artificial Sequence
  Description of Artificial Sequence: Synthetic oligonucleotide
  Antisense strand to SEQ ID NO: 985824
caauaaauaacgcauuuac

SEQ ID NO: 985826 - RNA, 19 nt, Artificial Sequence
  Description of Artificial Sequence: Synthetic oligonucleotide
  Sense strand starting at position 3587 of SEQ ID NO: 914201
uuuauugguccaugaaaug

SEQ ID NO: 985827 - RNA, 19 nt, Artificial Sequence
  Description of Artificial Sequence: Synthetic oligonucleotide
  Antisense strand to SEQ ID NO: 985826
cauuucauggaccaauaaa

SEQ ID NO: 985828 - RNA, 19 nt, Artificial Sequence
  Description of Artificial Sequence: Synthetic oligonucleotide
  Sense strand starting at position 2986 of SEQ ID NO: 914201
agaugugaucucugaaccu

SEQ ID NO: 985829 - RNA, 19 nt, Artificial Sequence
  Description of Artificial Sequence: Synthetic oligonucleotide
  Antisense strand to SEQ ID NO: 985828
agguucagagaucacaucu

SEQ ID NO: 985830 - RNA, 19 nt, Artificial Sequence
  Description of Artificial Sequence: Synthetic oligonucleotide
  Sense strand starting at position 3808 of SEQ ID NO: 914201
uuaagaguuguacaauguu

SEQ ID NO: 985831 - RNA, 19 nt, Artificial Sequence
  Description of Artificial Sequence: Synthetic oligonucleotide
  Antisense strand to SEQ ID NO: 985830
aacauuguacaacucuuaa

SEQ ID NO: 985832 - RNA, 19 nt, Artificial Sequence
  Description of Artificial Sequence: Synthetic oligonucleotide
  Sense strand starting at position 2971 of SEQ ID NO: 914201
gaagcaucggcugacagau

SEQ ID NO: 985833 - RNA, 19 nt, Artificial Sequence
  Description of Artificial Sequence: Synthetic oligonucleotide
  Antisense strand to SEQ ID NO: 985832
aucugucagccgaugcuuc

SEQ ID NO: 985834 - RNA, 19 nt, Artificial Sequence
  Description of Artificial Sequence: Synthetic oligonucleotide
  Sense strand starting at position 2347 of SEQ ID NO: 914201
gagggaucuggcugauucu

SEQ ID NO: 985835 - RNA, 19 nt, Artificial Sequence
  Description of Artificial Sequence: Synthetic oligonucleotide
  Antisense strand to SEQ ID NO: 985834
agaaucagccagaucccuc

SEQ ID NO: 985836 - RNA, 19 nt, Artificial Sequence
  Description of Artificial Sequence: Synthetic oligonucleotide
  Sense strand starting at position 3483 of SEQ ID NO: 914201
acagcugaagucugaugau

SEQ ID NO: 985837 - RNA, 19 nt, Artificial Sequence
  Description of Artificial Sequence: Synthetic oligonucleotide
  Antisense strand to SEQ ID NO: 985836
aucaucagacuucagcugu

SEQ ID NO: 985838 - RNA, 19 nt, Artificial Sequence
  Description of Artificial Sequence: Synthetic oligonucleotide
  Sense strand starting at position 3592 of SEQ ID NO: 914201
ugguccaugaaaugugacu

SEQ ID NO: 985839 - RNA, 19 nt, Artificial Sequence
  Description of Artificial Sequence: Synthetic oligonucleotide
  Antisense strand to SEQ ID NO: 985838
agucacauuucauggacca

SEQ ID NO: 985840 - RNA, 19 nt, Artificial Sequence
  Description of Artificial Sequence: Synthetic oligonucleotide
  Sense strand starting at position 219 of SEQ ID NO: 914201
cguguaauuccuuauauag

SEQ ID NO: 985841 - RNA, 19 nt, Artificial Sequence
  Description of Artificial Sequence: Synthetic oligonucleotide
  Antisense strand to SEQ ID NO: 985840
cuauauaaggaauuacacg

SEQ ID NO: 985842 - RNA, 19 nt, Artificial Sequence
  Description of Artificial Sequence: Synthetic oligonucleotide
  Sense strand starting at position 3160 of SEQ ID NO: 914201
cgaauaaggaaacgucuuu

SEQ ID NO: 985843 - RNA, 19 nt, Artificial Sequence
  Description of Artificial Sequence: Synthetic oligonucleotide
  Antisense strand to SEQ ID NO: 985842
aaagacguuuccuuauucg

SEQ ID NO: 985844 - RNA, 19 nt, Artificial Sequence
  Description of Artificial Sequence: Synthetic oligonucleotide
  Sense strand starting at position 2970 of SEQ ID NO: 914201
agaagcaucggcugacaga

SEQ ID NO: 985845 - RNA, 19 nt, Artificial Sequence
  Description of Artificial Sequence: Synthetic oligonucleotide
  Antisense strand to SEQ ID NO: 985844
ucugucagccgaugcuucu

SEQ ID NO: 985846 - RNA, 19 nt, Artificial Sequence
  Description of Artificial Sequence: Synthetic oligonucleotide
  Sense strand starting at position 3581 of SEQ ID NO: 914201
gcguuauuuauugguccau

SEQ ID NO: 985847 - RNA, 19 nt, Artificial Sequence
  Description of Artificial Sequence: Synthetic oligonucleotide
  Antisense strand to SEQ ID NO: 985846
auggaccaauaaauaacgc

SEQ ID NO: 985848 - RNA, 19 nt, Artificial Sequence
  Description of Artificial Sequence: Synthetic oligonucleotide
  Sense strand starting at position 2916 of SEQ ID NO: 914201
ggccaugaauuccuuccua

SEQ ID NO: 985849 - RNA, 19 nt, Artificial Sequence
  Description of Artificial Sequence: Synthetic oligonucleotide
  Antisense strand to SEQ ID NO: 985848
uaggaaggaauucauggcc

SEQ ID NO: 985850 - RNA, 19 nt, Artificial Sequence
  Description of Artificial Sequence: Synthetic oligonucleotide
  Sense strand starting at position 2979 of SEQ ID NO: 914201
ggcugacagaugugaucuc

SEQ ID NO: 985851 - RNA, 19 nt, Artificial Sequence
  Description of Artificial Sequence: Synthetic oligonucleotide
  Antisense strand to SEQ ID NO: 985850
gagaucacaucugucagcc

SEQ ID NO: 985852 - RNA, 19 nt, Artificial Sequence
  Description of Artificial Sequence: Synthetic oligonucleotide
  Sense strand starting at position 398 of SEQ ID NO: 914201
cagacauuucgcugcugca

SEQ ID NO: 985853 - RNA, 19 nt, Artificial Sequence
  Description of Artificial Sequence: Synthetic oligonucleotide
  Antisense strand to SEQ ID NO: 985852
ugcagcagcgaaaugucug

SEQ ID NO: 985854 - RNA, 19 nt, Artificial Sequence
  Description of Artificial Sequence: Synthetic oligonucleotide
  Sense strand starting at position 3624 of SEQ ID NO: 914201
gcuauacauuaugucuaua

SEQ ID NO: 985855 - RNA, 19 nt, Artificial Sequence
  Description of Artificial Sequence: Synthetic oligonucleotide
  Antisense strand to SEQ ID NO: 985854
uauagacauaauguauagc

SEQ ID NO: 985856 - RNA, 19 nt, Artificial Sequence
  Description of Artificial Sequence: Synthetic oligonucleotide
  Sense strand starting at position 3740 of SEQ ID NO: 914201
gaaacuuguguaugucaac

SEQ ID NO: 985857 - RNA, 19 nt, Artificial Sequence
  Description of Artificial Sequence: Synthetic oligonucleotide
  Antisense strand to SEQ ID NO: 985856
guugacauacacaaguuuc

SEQ ID NO: 985858 - RNA, 19 nt, Artificial Sequence
  Description of Artificial Sequence: Synthetic oligonucleotide
  Sense strand starting at position 3738 of SEQ ID NO: 914201
ccgaaacuuguguauguca

SEQ ID NO: 985859 - RNA, 19 nt, Artificial Sequence
  Description of Artificial Sequence: Synthetic oligonucleotide
  Antisense strand to SEQ ID NO: 985858
ugacauacacaaguuucgg

SEQ ID NO: 985860 - RNA, 19 nt, Artificial Sequence
  Description of Artificial Sequence: Synthetic oligonucleotide
  Sense strand starting at position 3197 of SEQ ID NO: 914201
uaaauaagcugagcuguau

SEQ ID NO: 985861 - RNA, 19 nt, Artificial Sequence
  Description of Artificial Sequence: Synthetic oligonucleotide
  Antisense strand to SEQ ID NO: 985860
auacagcucagcuuauuua

SEQ ID NO: 985862 - RNA, 19 nt, Artificial Sequence
  Description of Artificial Sequence: Synthetic oligonucleotide
  Sense strand starting at position 3713 of SEQ ID NO: 914201
cucgcuuuccuugauacca

SEQ ID NO: 985863 - RNA, 19 nt, Artificial Sequence
  Description of Artificial Sequence: Synthetic oligonucleotide
  Antisense strand to SEQ ID NO: 985862
ugguaucaaggaaagcgag

SEQ ID NO: 985864 - RNA, 19 nt, Artificial Sequence
  Description of Artificial Sequence: Synthetic oligonucleotide
  Sense strand starting at position 3568 of SEQ ID NO: 914201
uugagaaguaaaugcguua

SEQ ID NO: 985865 - RNA, 19 nt, Artificial Sequence
  Description of Artificial Sequence: Synthetic oligonucleotide
  Antisense strand to SEQ ID NO: 985864
uaacgcauuuacuucucaa

SEQ ID NO: 985866 - RNA, 19 nt, Artificial Sequence
  Description of Artificial Sequence: Synthetic oligonucleotide
  Sense strand starting at position 218 of SEQ ID NO: 914201
acguguaauuccuuauaua

SEQ ID NO: 985867 - RNA, 19 nt, Artificial Sequence
  Description of Artificial Sequence: Synthetic oligonucleotide
  Antisense strand to SEQ ID NO: 985866
uauauaaggaauuacacgu

SEQ ID NO: 985868 - RNA, 19 nt, Artificial Sequence
  Description of Artificial Sequence: Synthetic oligonucleotide
  Sense strand starting at position 2929 of SEQ ID NO: 914201
uuccuaaaugagcggucau

SEQ ID NO: 985869 - RNA, 19 nt, Artificial Sequence
  Description of Artificial Sequence: Synthetic oligonucleotide
  Antisense strand to SEQ ID NO: 985868
augaccgcucauuuaggaa

SEQ ID NO: 985870 - RNA, 19 nt, Artificial Sequence
  Description of Artificial Sequence: Synthetic oligonucleotide
  Sense strand starting at position 2930 of SEQ ID NO: 914201
uccuaaaugagcggucauc

SEQ ID NO: 985871 - RNA, 19 nt, Artificial Sequence
  Description of Artificial Sequence: Synthetic oligonucleotide
  Antisense strand to SEQ ID NO: 985870
gaugaccgcucauuuagga

SEQ ID NO: 985872 - RNA, 19 nt, Artificial Sequence
  Description of Artificial Sequence: Synthetic oligonucleotide
  Sense strand starting at position 3779 of SEQ ID NO: 914201
gguuaagugugaguucuuc

SEQ ID NO: 985873 - RNA, 19 nt, Artificial Sequence
  Description of Artificial Sequence: Synthetic oligonucleotide
  Antisense strand to SEQ ID NO: 985872
gaagaacucacacuuaacc

SEQ ID NO: 985874 - RNA, 19 nt, Artificial Sequence
  Description of Artificial Sequence: Synthetic oligonucleotide
  Sense strand starting at position 3787 of SEQ ID NO: 914201
gugaguucuuccucccuuu

SEQ ID NO: 985875 - RNA, 19 nt, Artificial Sequence
  Description of Artificial Sequence: Synthetic oligonucleotide
  Antisense strand to SEQ ID NO: 985874
aaagggaggaagaacucac

SEQ ID NO: 985876 - RNA, 19 nt, Artificial Sequence
  Description of Artificial Sequence: Synthetic oligonucleotide
  Sense strand starting at position 264 of SEQ ID NO: 914201
guugccgcccauuauuaua

SEQ ID NO: 985877 - RNA, 19 nt, Artificial Sequence
  Description of Artificial Sequence: Synthetic oligonucleotide
  Antisense strand to SEQ ID NO: 985876
uauaauaaugggcggcaac

SEQ ID NO: 985878 - RNA, 19 nt, Artificial Sequence
  Description of Artificial Sequence: Synthetic oligonucleotide
  Sense strand starting at position 208 of SEQ ID NO: 914201
uccgaaauguacguguaau

SEQ ID NO: 985879 - RNA, 19 nt, Artificial Sequence
  Description of Artificial Sequence: Synthetic oligonucleotide
  Antisense strand to SEQ ID NO: 985878
auuacacguacauuucgga

SEQ ID NO: 985880 - RNA, 19 nt, Artificial Sequence
  Description of Artificial Sequence: Synthetic oligonucleotide
  Sense strand starting at position 951 of SEQ ID NO: 914201
gcguuaaguggguaccuuu

SEQ ID NO: 985881 - RNA, 19 nt, Artificial Sequence
  Description of Artificial Sequence: Synthetic oligonucleotide
  Antisense strand to SEQ ID NO: 985880
aaagguacccacuuaacgc

SEQ ID NO: 985882 - RNA, 19 nt, Artificial Sequence
  Description of Artificial Sequence: Synthetic oligonucleotide
  Sense strand starting at position 2995 of SEQ ID NO: 914201
cucugaaccugauagauug

SEQ ID NO: 985883 - RNA, 19 nt, Artificial Sequence
  Description of Artificial Sequence: Synthetic oligonucleotide
  Antisense strand to SEQ ID NO: 985882
caaucuaucagguucagag

SEQ ID NO: 985884 - RNA, 19 nt, Artificial Sequence
  Description of Artificial Sequence: Synthetic oligonucleotide
  Sense strand starting at position 209 of SEQ ID NO: 914201
ccgaaauguacguguaauu

SEQ ID NO: 985885 - RNA, 19 nt, Artificial Sequence
  Description of Artificial Sequence: Synthetic oligonucleotide
  Antisense strand to SEQ ID NO: 985884
aauuacacguacauuucgg

SEQ ID NO: 985886 - RNA, 19 nt, Artificial Sequence
  Description of Artificial Sequence: Synthetic oligonucleotide
  Sense strand starting at position 3286 of SEQ ID NO: 914201
accggaguauuggaaauaa

SEQ ID NO: 985887 - RNA, 19 nt, Artificial Sequence
  Description of Artificial Sequence: Synthetic oligonucleotide
  Antisense strand to SEQ ID NO: 985886
uuauuuccaauacuccggu

SEQ ID NO: 985888 - RNA, 19 nt, Artificial Sequence
  Description of Artificial Sequence: Synthetic oligonucleotide
  Sense strand starting at position 3486 of SEQ ID NO: 914201
gcugaagucugaugauuua

SEQ ID NO: 985889 - RNA, 19 nt, Artificial Sequence
  Description of Artificial Sequence: Synthetic oligonucleotide
  Antisense strand to SEQ ID NO: 985888
uaaaucaucagacuucagc

SEQ ID NO: 985890 - RNA, 19 nt, Artificial Sequence
  Description of Artificial Sequence: Synthetic oligonucleotide
  Sense strand starting at position 1525 of SEQ ID NO: 914202
acagcaguccgcgugacaa

SEQ ID NO: 985891 - RNA, 19 nt, Artificial Sequence
  Description of Artificial Sequence: Synthetic oligonucleotide
  Antisense strand to SEQ ID NO: 985890
uugucacgcggacugcugu

SEQ ID NO: 985892 - RNA, 19 nt, Artificial Sequence
  Description of Artificial Sequence: Synthetic oligonucleotide
  Sense strand starting at position 1304 of SEQ ID NO: 914202
cgaaauacgagcuacagaa

SEQ ID NO: 985893 - RNA, 19 nt, Artificial Sequence
  Description of Artificial Sequence: Synthetic oligonucleotide
  Antisense strand to SEQ ID NO: 985892
uucuguagcucguauuucg

SEQ ID NO: 985894 - RNA, 19 nt, Artificial Sequence
  Description of Artificial Sequence: Synthetic oligonucleotide
  Sense strand starting at position 3717 of SEQ ID NO: 914202
acugauugaugaguagauu

SEQ ID NO: 985895 - RNA, 19 nt, Artificial Sequence
  Description of Artificial Sequence: Synthetic oligonucleotide
  Antisense strand to SEQ ID NO: 985894
aaucuacucaucaaucagu

SEQ ID NO: 985896 - RNA, 19 nt, Artificial Sequence
  Description of Artificial Sequence: Synthetic oligonucleotide
  Sense strand starting at position 1224 of SEQ ID NO: 914202
agauauccggaaugugaag

SEQ ID NO: 985897 - RNA, 19 nt, Artificial Sequence
  Description of Artificial Sequence: Synthetic oligonucleotide
  Antisense strand to SEQ ID NO: 985896
cuucacauuccggauaucu

SEQ ID NO: 985898 - RNA, 19 nt, Artificial Sequence
  Description of Artificial Sequence: Synthetic oligonucleotide
  Sense strand starting at position 3093 of SEQ ID NO: 914202
gggccugugauggagacuu

SEQ ID NO: 985899 - RNA, 19 nt, Artificial Sequence
  Description of Artificial Sequence: Synthetic oligonucleotide
  Antisense strand to SEQ ID NO: 985898
aagucuccaucacaggccc

SEQ ID NO: 985900 - RNA, 19 nt, Artificial Sequence
  Description of Artificial Sequence: Synthetic oligonucleotide
  Sense strand starting at position 2623 of SEQ ID NO: 914202
ugcugagcugcgguguaaa

SEQ ID NO: 985901 - RNA, 19 nt, Artificial Sequence
  Description of Artificial Sequence: Synthetic oligonucleotide
  Antisense strand to SEQ ID NO: 985900
uuuacaccgcagcucagca

SEQ ID NO: 985902 - RNA, 19 nt, Artificial Sequence
  Description of Artificial Sequence: Synthetic oligonucleotide
  Sense strand starting at position 2809 of SEQ ID NO: 914202
cgacuucuggcucagagga

SEQ ID NO: 985903 - RNA, 19 nt, Artificial Sequence
  Description of Artificial Sequence: Synthetic oligonucleotide
  Antisense strand to SEQ ID NO: 985902
uccucugagccagaagucg

SEQ ID NO: 985904 - RNA, 19 nt, Artificial Sequence
  Description of Artificial Sequence: Synthetic oligonucleotide
  Sense strand starting at position 3961 of SEQ ID NO: 914202
uuugacucuggguaugagu

SEQ ID NO: 985905 - RNA, 19 nt, Artificial Sequence
  Description of Artificial Sequence: Synthetic oligonucleotide
  Antisense strand to SEQ ID NO: 985904
acucauacccagagucaaa

SEQ ID NO: 985906 - RNA, 19 nt, Artificial Sequence
  Description of Artificial Sequence: Synthetic oligonucleotide
  Sense strand starting at position 2921 of SEQ ID NO: 914202
acgaacuauugagcauaca

SEQ ID NO: 985907 - RNA, 19 nt, Artificial Sequence
  Description of Artificial Sequence: Synthetic oligonucleotide
  Antisense strand to SEQ ID NO: 985906
uguaugcucaauaguucgu

SEQ ID NO: 985908 - RNA, 19 nt, Artificial Sequence
  Description of Artificial Sequence: Synthetic oligonucleotide
  Sense strand starting at position 3298 of SEQ ID NO: 914202
ucaagugccagauaguuga

SEQ ID NO: 985909 - RNA, 19 nt, Artificial Sequence
  Description of Artificial Sequence: Synthetic oligonucleotide
  Antisense strand to SEQ ID NO: 985908
ucaacuaucuggcacuuga

SEQ ID NO: 985910 - RNA, 19 nt, Artificial Sequence
  Description of Artificial Sequence: Synthetic oligonucleotide
  Sense strand starting at position 1292 of SEQ ID NO: 914202
aucccuaaaguucgaaaua

SEQ ID NO: 985911 - RNA, 19 nt, Artificial Sequence
  Description of Artificial Sequence: Synthetic oligonucleotide
  Antisense strand to SEQ ID NO: 985910
uauuucgaacuuuagggau

SEQ ID NO: 985912 - RNA, 19 nt, Artificial Sequence
  Description of Artificial Sequence: Synthetic oligonucleotide
  Sense strand starting at position 3053 of SEQ ID NO: 914202
cuaugaugguaaucaucuu

SEQ ID NO: 985913 - RNA, 19 nt, Artificial Sequence
  Description of Artificial Sequence: Synthetic oligonucleotide
  Antisense strand to SEQ ID NO: 985912
aagaugauuaccaucauag

SEQ ID NO: 985914 - RNA, 19 nt, Artificial Sequence
  Description of Artificial Sequence: Synthetic oligonucleotide
  Sense strand starting at position 3963 of SEQ ID NO: 914202
ugacucuggguaugaguaa

SEQ ID NO: 985915 - RNA, 19 nt, Artificial Sequence
  Description of Artificial Sequence: Synthetic oligonucleotide
  Antisense strand to SEQ ID NO: 985914
uuacucauacccagaguca

SEQ ID NO: 985916 - RNA, 19 nt, Artificial Sequence
  Description of Artificial Sequence: Synthetic oligonucleotide
  Sense strand starting at position 2505 of SEQ ID NO: 914202
uucuguaguccucauacaa

SEQ ID NO: 985917 - RNA, 19 nt, Artificial Sequence
  Description of Artificial Sequence: Synthetic oligonucleotide
  Antisense strand to SEQ ID NO: 985916
uuguaugaggacuacagaa

SEQ ID NO: 985918 - RNA, 19 nt, Artificial Sequence
  Description of Artificial Sequence: Synthetic oligonucleotide
  Sense strand starting at position 3086 of SEQ ID NO: 914202
uagaauagggccugugaug

SEQ ID NO: 985919 - RNA, 19 nt, Artificial Sequence
  Description of Artificial Sequence: Synthetic oligonucleotide
  Antisense strand to SEQ ID NO: 985918
caucacaggcccuauucua

SEQ ID NO: 985920 - RNA, 19 nt, Artificial Sequence
  Description of Artificial Sequence: Synthetic oligonucleotide
  Sense strand starting at position 2520 of SEQ ID NO: 914202
acaauuuacugagaacugu

SEQ ID NO: 985921 - RNA, 19 nt, Artificial Sequence
  Description of Artificial Sequence: Synthetic oligonucleotide
  Antisense strand to SEQ ID NO: 985920
acaguucucaguaaauugu

SEQ ID NO: 985922 - RNA, 19 nt, Artificial Sequence
  Description of Artificial Sequence: Synthetic oligonucleotide
  Sense strand starting at position 3957 of SEQ ID NO: 914202
aaucuuugacucuggguau

SEQ ID NO: 985923 - RNA, 19 nt, Artificial Sequence
  Description of Artificial Sequence: Synthetic oligonucleotide
  Antisense strand to SEQ ID NO: 985922
auacccagagucaaagauu

SEQ ID NO: 985924 - RNA, 19 nt, Artificial Sequence
  Description of Artificial Sequence: Synthetic oligonucleotide
  Sense strand starting at position 2752 of SEQ ID NO: 914202
ggguuacucagcugacaaa

SEQ ID NO: 985925 - RNA, 19 nt, Artificial Sequence
  Description of Artificial Sequence: Synthetic oligonucleotide
  Antisense strand to SEQ ID NO: 985924
uuugucagcugaguaaccc

SEQ ID NO: 985926 - RNA, 19 nt, Artificial Sequence
  Description of Artificial Sequence: Synthetic oligonucleotide
  Sense strand starting at position 2435 of SEQ ID NO: 914202
ucaauugccucaucuggaa

SEQ ID NO: 985927 - RNA, 19 nt, Artificial Sequence
  Description of Artificial Sequence: Synthetic oligonucleotide
  Antisense strand to SEQ ID NO: 985926
uuccagaugaggcaauuga

SEQ ID NO: 985928 - RNA, 19 nt, Artificial Sequence
  Description of Artificial Sequence: Synthetic oligonucleotide
  Sense strand starting at position 2495 of SEQ ID NO: 914202
acagauaacuuucuguagu

SEQ ID NO: 985929 - RNA, 19 nt, Artificial Sequence
  Description of Artificial Sequence: Synthetic oligonucleotide
  Antisense strand to SEQ ID NO: 985928
acuacagaaaguuaucugu

SEQ ID NO: 985930 - RNA, 19 nt, Artificial Sequence
  Description of Artificial Sequence: Synthetic oligonucleotide
  Sense strand starting at position 1190 of SEQ ID NO: 914202
agcaguuaccuuugaaaca

SEQ ID NO: 985931 - RNA, 19 nt, Artificial Sequence
  Description of Artificial Sequence: Synthetic oligonucleotide
  Antisense strand to SEQ ID NO: 985930
uguuucaaagguaacugcu

SEQ ID NO: 985932 - RNA, 19 nt, Artificial Sequence
  Description of Artificial Sequence: Synthetic oligonucleotide
  Sense strand starting at position 2289 of SEQ ID NO: 914202
gcgccugauuugcuggaga

SEQ ID NO: 985933 - RNA, 19 nt, Artificial Sequence
  Description of Artificial Sequence: Synthetic oligonucleotide
  Antisense strand to SEQ ID NO: 985932
ucuccagcaaaucaggcgc

SEQ ID NO: 985934 - RNA, 19 nt, Artificial Sequence
  Description of Artificial Sequence: Synthetic oligonucleotide
  Sense strand starting at position 1117 of SEQ ID NO: 914202
agcgcugaauacguaauuu

SEQ ID NO: 985935 - RNA, 19 nt, Artificial Sequence
  Description of Artificial Sequence: Synthetic oligonucleotide
  Antisense strand to SEQ ID NO: 985934
aaauuacguauucagcgcu

SEQ ID NO: 985936 - RNA, 19 nt, Artificial Sequence
  Description of Artificial Sequence: Synthetic oligonucleotide
  Sense strand starting at position 3301 of SEQ ID NO: 914202
agugccagauaguugauaa

SEQ ID NO: 985937 - RNA, 19 nt, Artificial Sequence
  Description of Artificial Sequence: Synthetic oligonucleotide
  Antisense strand to SEQ ID NO: 985936
uuaucaacuaucuggcacu

SEQ ID NO: 985938 - RNA, 19 nt, Artificial Sequence
  Description of Artificial Sequence: Synthetic oligonucleotide
  Sense strand starting at position 3367 of SEQ ID NO: 914202
ugaaaucccucgucuacaa

SEQ ID NO: 985939 - RNA, 19 nt, Artificial Sequence
  Description of Artificial Sequence: Synthetic oligonucleotide
  Antisense strand to SEQ ID NO: 985938
uuguagacgagggauuuca

SEQ ID NO: 985940 - RNA, 19 nt, Artificial Sequence
  Description of Artificial Sequence: Synthetic oligonucleotide
  Sense strand starting at position 3802 of SEQ ID NO: 914202
gcaagaaacuaugugcaca

SEQ ID NO: 985941 - RNA, 19 nt, Artificial Sequence
  Description of Artificial Sequence: Synthetic oligonucleotide
  Antisense strand to SEQ ID NO: 985940
ugugcacauaguuucuugc

SEQ ID NO: 985942 - RNA, 19 nt, Artificial Sequence
  Description of Artificial Sequence: Synthetic oligonucleotide
  Sense strand starting at position 3302 of SEQ ID NO: 914202
gugccagauaguugauaag

SEQ ID NO: 985943 - RNA, 19 nt, Artificial Sequence
  Description of Artificial Sequence: Synthetic oligonucleotide
  Antisense strand to SEQ ID NO: 985942
cuuaucaacuaucuggcac

SEQ ID NO: 985944 - RNA, 19 nt, Artificial Sequence
  Description of Artificial Sequence: Synthetic oligonucleotide
  Sense strand starting at position 3974 of SEQ ID NO: 914202
augaguaauucccugucug

SEQ ID NO: 985945 - RNA, 19 nt, Artificial Sequence
  Description of Artificial Sequence: Synthetic oligonucleotide
  Antisense strand to SEQ ID NO: 985944
cagacagggaauuacucau

SEQ ID NO: 985946 - RNA, 19 nt, Artificial Sequence
  Description of Artificial Sequence: Synthetic oligonucleotide
  Sense strand starting at position 3314 of SEQ ID NO: 914202
ugauaagggucuuuacgua

SEQ ID NO: 985947 - RNA, 19 nt, Artificial Sequence
  Description of Artificial Sequence: Synthetic oligonucleotide
  Antisense strand to SEQ ID NO: 985946
uacguaaagacccuuauca

SEQ ID NO: 985948 - RNA, 19 nt, Artificial Sequence
  Description of Artificial Sequence: Synthetic oligonucleotide
  Sense strand starting at position 3975 of SEQ ID NO: 914202
ugaguaauucccugucuga

SEQ ID NO: 985949 - RNA, 19 nt, Artificial Sequence
  Description of Artificial Sequence: Synthetic oligonucleotide
  Antisense strand to SEQ ID NO: 985948
ucagacagggaauuacuca

SEQ ID NO: 985950 - RNA, 19 nt, Artificial Sequence
  Description of Artificial Sequence: Synthetic oligonucleotide
  Sense strand starting at position 957 of SEQ ID NO: 914202
auguauagcuauguaccaa

SEQ ID NO: 985951 - RNA, 19 nt, Artificial Sequence
  Description of Artificial Sequence: Synthetic oligonucleotide
  Antisense strand to SEQ ID NO: 985950
uugguacauagcuauacau

SEQ ID NO: 985952 - RNA, 19 nt, Artificial Sequence
  Description of Artificial Sequence: Synthetic oligonucleotide
  Sense strand starting at position 3982 of SEQ ID NO: 914202
uucccugucugaucuuaca

SEQ ID NO: 985953 - RNA, 19 nt, Artificial Sequence
  Description of Artificial Sequence: Synthetic oligonucleotide
  Antisense strand to SEQ ID NO: 985952
uguaagaucagacagggaa

SEQ ID NO: 985954 - RNA, 19 nt, Artificial Sequence
  Description of Artificial Sequence: Synthetic oligonucleotide
  Sense strand starting at position 3069 of SEQ ID NO: 914202
cuuugcauuccugagccua

SEQ ID NO: 985955 - RNA, 19 nt, Artificial Sequence
  Description of Artificial Sequence: Synthetic oligonucleotide
  Antisense strand to SEQ ID NO: 985954
uaggcucaggaaugcaaag

SEQ ID NO: 985956 - RNA, 19 nt, Artificial Sequence
  Description of Artificial Sequence: Synthetic oligonucleotide
  Sense strand starting at position 349 of SEQ ID NO: 914202
uuagaaaguuaggaaacaa

SEQ ID NO: 985957 - RNA, 19 nt, Artificial Sequence
  Description of Artificial Sequence: Synthetic oligonucleotide
  Antisense strand to SEQ ID NO: 985956
uuguuuccuaacuuucuaa

SEQ ID NO: 985958 - RNA, 19 nt, Artificial Sequence
  Description of Artificial Sequence: Synthetic oligonucleotide
  Sense strand starting at position 1336 of SEQ ID NO: 914202
cuaacuugucuguagccua

SEQ ID NO: 985959 - RNA, 19 nt, Artificial Sequence
  Description of Artificial Sequence: Synthetic oligonucleotide
  Antisense strand to SEQ ID NO: 985958
uaggcuacagacaaguuag

SEQ ID NO: 985960 - RNA, 19 nt, Artificial Sequence
  Description of Artificial Sequence: Synthetic oligonucleotide
  Sense strand starting at position 3773 of SEQ ID NO: 914202
gcugacucugaccgacauu

SEQ ID NO: 985961 - RNA, 19 nt, Artificial Sequence
  Description of Artificial Sequence: Synthetic oligonucleotide
  Antisense strand to SEQ ID NO: 985960
aaugucggucagagucagc

SEQ ID NO: 985962 - RNA, 19 nt, Artificial Sequence
  Description of Artificial Sequence: Synthetic oligonucleotide
  Sense strand starting at position 2119 of SEQ ID NO: 914202
uggagguugugaguuacga

SEQ ID NO: 985963 - RNA, 19 nt, Artificial Sequence
  Description of Artificial Sequence: Synthetic oligonucleotide
  Antisense strand to SEQ ID NO: 985962
ucguaacucacaaccucca

SEQ ID NO: 985964 - RNA, 19 nt, Artificial Sequence
  Description of Artificial Sequence: Synthetic oligonucleotide
  Sense strand starting at position 2750 of SEQ ID NO: 914202
guggguuacucagcugaca

SEQ ID NO: 985965 - RNA, 19 nt, Artificial Sequence
  Description of Artificial Sequence: Synthetic oligonucleotide
  Antisense strand to SEQ ID NO: 985964
ugucagcugaguaacccac

SEQ ID NO: 985966 - RNA, 19 nt, Artificial Sequence
  Description of Artificial Sequence: Synthetic oligonucleotide
  Sense strand starting at position 3059 of SEQ ID NO: 914202
ugguaaucaucuuugcauu

SEQ ID NO: 985967 - RNA, 19 nt, Artificial Sequence
  Description of Artificial Sequence: Synthetic oligonucleotide
  Antisense strand to SEQ ID NO: 985966
aaugcaaagaugauuacca

SEQ ID NO: 985968 - RNA, 19 nt, Artificial Sequence
  Description of Artificial Sequence: Synthetic oligonucleotide
  Sense strand starting at position 3071 of SEQ ID NO: 914202
uugcauuccugagccuaga

SEQ ID NO: 985969 - RNA, 19 nt, Artificial Sequence
  Description of Artificial Sequence: Synthetic oligonucleotide
  Antisense strand to SEQ ID NO: 985968
ucuaggcucaggaaugcaa

SEQ ID NO: 985970 - RNA, 19 nt, Artificial Sequence
  Description of Artificial Sequence: Synthetic oligonucleotide
  Sense strand starting at position 1606 of SEQ ID NO: 914203
acagcaguccgcgugacaa

SEQ ID NO: 985971 - RNA, 19 nt, Artificial Sequence
  Description of Artificial Sequence: Synthetic oligonucleotide
  Antisense strand to SEQ ID NO: 985970
uugucacgcggacugcugu

SEQ ID NO: 985972 - RNA, 19 nt, Artificial Sequence
  Description of Artificial Sequence: Synthetic oligonucleotide
  Sense strand starting at position 1385 of SEQ ID NO: 914203
cgaaauacgagcuacagaa

SEQ ID NO: 985973 - RNA, 19 nt, Artificial Sequence
  Description of Artificial Sequence: Synthetic oligonucleotide
  Antisense strand to SEQ ID NO: 985972
uucuguagcucguauuucg

SEQ ID NO: 985974 - RNA, 19 nt, Artificial Sequence
  Description of Artificial Sequence: Synthetic oligonucleotide
  Sense strand starting at position 3798 of SEQ ID NO: 914203
acugauugaugaguagauu

SEQ ID NO: 985975 - RNA, 19 nt, Artificial Sequence
  Description of Artificial Sequence: Synthetic oligonucleotide
  Antisense strand to SEQ ID NO: 985974
aaucuacucaucaaucagu

SEQ ID NO: 985976 - RNA, 19 nt, Artificial Sequence
  Description of Artificial Sequence: Synthetic oligonucleotide
  Sense strand starting at position 1305 of SEQ ID NO: 914203
agauauccggaaugugaag

SEQ ID NO: 985977 - RNA, 19 nt, Artificial Sequence
  Description of Artificial Sequence: Synthetic oligonucleotide
  Antisense strand to SEQ ID NO: 985976
cuucacauuccggauaucu

SEQ ID NO: 985978 - RNA, 19 nt, Artificial Sequence
  Description of Artificial Sequence: Synthetic oligonucleotide
  Sense strand starting at position 3174 of SEQ ID NO: 914203
gggccugugauggagacuu

SEQ ID NO: 985979 - RNA, 19 nt, Artificial Sequence
  Description of Artificial Sequence: Synthetic oligonucleotide
  Antisense strand to SEQ ID NO: 985978
aagucuccaucacaggccc

SEQ ID NO: 985980 - RNA, 19 nt, Artificial Sequence
  Description of Artificial Sequence: Synthetic oligonucleotide
  Sense strand starting at position 2704 of SEQ ID NO: 914203
ugcugagcugcgguguaaa

SEQ ID NO: 985981 - RNA, 19 nt, Artificial Sequence
  Description of Artificial Sequence: Synthetic oligonucleotide
  Antisense strand to SEQ ID NO: 985980
uuuacaccgcagcucagca

SEQ ID NO: 985982 - RNA, 19 nt, Artificial Sequence
  Description of Artificial Sequence: Synthetic oligonucleotide
  Sense strand starting at position 2890 of SEQ ID NO: 914203
cgacuucuggcucagagga

SEQ ID NO: 985983 - RNA, 19 nt, Artificial Sequence
  Description of Artificial Sequence: Synthetic oligonucleotide
  Antisense strand to SEQ ID NO: 985982
uccucugagccagaagucg

SEQ ID NO: 985984 - RNA, 19 nt, Artificial Sequence
  Description of Artificial Sequence: Synthetic oligonucleotide
  Sense strand starting at position 3002 of SEQ ID NO: 914203
acgaacuauugagcauaca

SEQ ID NO: 985985 - RNA, 19 nt, Artificial Sequence
  Description of Artificial Sequence: Synthetic oligonucleotide
  Antisense strand to SEQ ID NO: 985984
uguaugcucaauaguucgu

SEQ ID NO: 985986 - RNA, 19 nt, Artificial Sequence
  Description of Artificial Sequence: Synthetic oligonucleotide
  Sense strand starting at position 3379 of SEQ ID NO: 914203
ucaagugccagauaguuga

SEQ ID NO: 985987 - RNA, 19 nt, Artificial Sequence
  Description of Artificial Sequence: Synthetic oligonucleotide
  Antisense strand to SEQ ID NO: 985986
ucaacuaucuggcacuuga

SEQ ID NO: 985988 - RNA, 19 nt, Artificial Sequence
  Description of Artificial Sequence: Synthetic oligonucleotide
  Sense strand starting at position 1373 of SEQ ID NO: 914203
aucccuaaaguucgaaaua

SEQ ID NO: 985989 - RNA, 19 nt, Artificial Sequence
  Description of Artificial Sequence: Synthetic oligonucleotide
  Antisense strand to SEQ ID NO: 985988
uauuucgaacuuuagggau

SEQ ID NO: 985990 - RNA, 19 nt, Artificial Sequence
  Description of Artificial Sequence: Synthetic oligonucleotide
  Sense strand starting at position 3134 of SEQ ID NO: 914203
cuaugaugguaaucaucuu

SEQ ID NO: 985991 - RNA, 19 nt, Artificial Sequence
  Description of Artificial Sequence: Synthetic oligonucleotide
  Antisense strand to SEQ ID NO: 985990
aagaugauuaccaucauag

SEQ ID NO: 985992 - RNA, 19 nt, Artificial Sequence
  Description of Artificial Sequence: Synthetic oligonucleotide
  Sense strand starting at position 2586 of SEQ ID NO: 914203
uucuguaguccucauacaa

SEQ ID NO: 985993 - RNA, 19 nt, Artificial Sequence
  Description of Artificial Sequence: Synthetic oligonucleotide
  Antisense strand to SEQ ID NO: 985992
uuguaugaggacuacagaa

SEQ ID NO: 985994 - RNA, 19 nt, Artificial Sequence
  Description of Artificial Sequence: Synthetic oligonucleotide
  Sense strand starting at position 3167 of SEQ ID NO: 914203
uagaauagggccugugaug

SEQ ID NO: 985995 - RNA, 19 nt, Artificial Sequence
  Description of Artificial Sequence: Synthetic oligonucleotide
  Antisense strand to SEQ ID NO: 985994
caucacaggcccuauucua

SEQ ID NO: 985996 - RNA, 19 nt, Artificial Sequence
  Description of Artificial Sequence: Synthetic oligonucleotide
  Sense strand starting at position 2601 of SEQ ID NO: 914203
acaauuuacugagaacugu

SEQ ID NO: 985997 - RNA, 19 nt, Artificial Sequence
  Description of Artificial Sequence: Synthetic oligonucleotide
  Antisense strand to SEQ ID NO: 985996
acaguucucaguaaauugu

SEQ ID NO: 985998 - RNA, 19 nt, Artificial Sequence
  Description of Artificial Sequence: Synthetic oligonucleotide
  Sense strand starting at position 2833 of SEQ ID NO: 914203
ggguuacucagcugacaaa

SEQ ID NO: 985999 - RNA, 19 nt, Artificial Sequence
  Description of Artificial Sequence: Synthetic oligonucleotide
  Antisense strand to SEQ ID NO: 985998
uuugucagcugaguaaccc

SEQ ID NO: 986000 - RNA, 19 nt, Artificial Sequence
  Description of Artificial Sequence: Synthetic oligonucleotide
  Sense strand starting at position 2516 of SEQ ID NO: 914203
ucaauugccucaucuggaa

SEQ ID NO: 986001 - RNA, 19 nt, Artificial Sequence
  Description of Artificial Sequence: Synthetic oligonucleotide
  Antisense strand to SEQ ID NO: 986000
uuccagaugaggcaauuga

SEQ ID NO: 986002 - RNA, 19 nt, Artificial Sequence
  Description of Artificial Sequence: Synthetic oligonucleotide
  Sense strand starting at position 2576 of SEQ ID NO: 914203
acagauaacuuucuguagu

SEQ ID NO: 986003 - RNA, 19 nt, Artificial Sequence
  Description of Artificial Sequence: Synthetic oligonucleotide
  Antisense strand to SEQ ID NO: 986002
acuacagaaaguuaucugu

SEQ ID NO: 986004 - RNA, 19 nt, Artificial Sequence
  Description of Artificial Sequence: Synthetic oligonucleotide
  Sense strand starting at position 1271 of SEQ ID NO: 914203
agcaguuaccuuugaaaca

SEQ ID NO: 986005 - RNA, 19 nt, Artificial Sequence
  Description of Artificial Sequence: Synthetic oligonucleotide
  Antisense strand to SEQ ID NO: 986004
uguuucaaagguaacugcu

SEQ ID NO: 986006 - RNA, 19 nt, Artificial Sequence
  Description of Artificial Sequence: Synthetic oligonucleotide
  Sense strand starting at position 2370 of SEQ ID NO: 914203
gcgccugauuugcuggaga

SEQ ID NO: 986007 - RNA, 19 nt, Artificial Sequence
  Description of Artificial Sequence: Synthetic oligonucleotide
  Antisense strand to SEQ ID NO: 986006
ucuccagcaaaucaggcgc

SEQ ID NO: 986008 - RNA, 19 nt, Artificial Sequence
  Description of Artificial Sequence: Synthetic oligonucleotide
  Sense strand starting at position 1198 of SEQ ID NO: 914203
agcgcugaauacguaauuu

SEQ ID NO: 986009 - RNA, 19 nt, Artificial Sequence
  Description of Artificial Sequence: Synthetic oligonucleotide
  Antisense strand to SEQ ID NO: 986008
aaauuacguauucagcgcu

SEQ ID NO: 986010 - RNA, 19 nt, Artificial Sequence
  Description of Artificial Sequence: Synthetic oligonucleotide
  Sense strand starting at position 3382 of SEQ ID NO: 914203
agugccagauaguugauaa

SEQ ID NO: 986011 - RNA, 19 nt, Artificial Sequence
  Description of Artificial Sequence: Synthetic oligonucleotide
  Antisense strand to SEQ ID NO: 986010
uuaucaacuaucuggcacu

SEQ ID NO: 986012 - RNA, 19 nt, Artificial Sequence
  Description of Artificial Sequence: Synthetic oligonucleotide
  Sense strand starting at position 3448 of SEQ ID NO: 914203
ugaaaucccucgucuacaa

SEQ ID NO: 986013 - RNA, 19 nt, Artificial Sequence
  Description of Artificial Sequence: Synthetic oligonucleotide
  Antisense strand to SEQ ID NO: 986012
uuguagacgagggauuuca

SEQ ID NO: 986014 - RNA, 19 nt, Artificial Sequence
  Description of Artificial Sequence: Synthetic oligonucleotide
  Sense strand starting at position 3883 of SEQ ID NO: 914203
gcaagaaacuaugugcaca

SEQ ID NO: 986015 - RNA, 19 nt, Artificial Sequence
  Description of Artificial Sequence: Synthetic oligonucleotide
  Antisense strand to SEQ ID NO: 986014
ugugcacauaguuucuugc

SEQ ID NO: 986016 - RNA, 19 nt, Artificial Sequence
  Description of Artificial Sequence: Synthetic oligonucleotide
  Sense strand starting at position 3383 of SEQ ID NO: 914203
gugccagauaguugauaag

SEQ ID NO: 986017 - RNA, 19 nt, Artificial Sequence
  Description of Artificial Sequence: Synthetic oligonucleotide
  Antisense strand to SEQ ID NO: 986016
cuuaucaacuaucuggcac

SEQ ID NO: 986018 - RNA, 19 nt, Artificial Sequence
  Description of Artificial Sequence: Synthetic oligonucleotide
  Sense strand starting at position 3395 of SEQ ID NO: 914203
ugauaagggucuuuacgua

SEQ ID NO: 986019 - RNA, 19 nt, Artificial Sequence
  Description of Artificial Sequence: Synthetic oligonucleotide
  Antisense strand to SEQ ID NO: 986018
uacguaaagacccuuauca

SEQ ID NO: 986020 - RNA, 19 nt, Artificial Sequence
  Description of Artificial Sequence: Synthetic oligonucleotide
  Sense strand starting at position 1038 of SEQ ID NO: 914203
auguauagcuauguaccaa

SEQ ID NO: 986021 - RNA, 19 nt, Artificial Sequence
  Description of Artificial Sequence: Synthetic oligonucleotide
  Antisense strand to SEQ ID NO: 986020
uugguacauagcuauacau

SEQ ID NO: 986022 - RNA, 19 nt, Artificial Sequence
  Description of Artificial Sequence: Synthetic oligonucleotide
  Sense strand starting at position 3150 of SEQ ID NO: 914203
cuuugcauuccugagccua

SEQ ID NO: 986023 - RNA, 19 nt, Artificial Sequence
  Description of Artificial Sequence: Synthetic oligonucleotide
  Antisense strand to SEQ ID NO: 986022
uaggcucaggaaugcaaag

SEQ ID NO: 986024 - RNA, 19 nt, Artificial Sequence
  Description of Artificial Sequence: Synthetic oligonucleotide
  Sense strand starting at position 430 of SEQ ID NO: 914203
uuagaaaguuaggaaacaa

SEQ ID NO: 986025 - RNA, 19 nt, Artificial Sequence
  Description of Artificial Sequence: Synthetic oligonucleotide
  Antisense strand to SEQ ID NO: 986024
uuguuuccuaacuuucuaa

SEQ ID NO: 986026 - RNA, 19 nt, Artificial Sequence
  Description of Artificial Sequence: Synthetic oligonucleotide
  Sense strand starting at position 1417 of SEQ ID NO: 914203
cuaacuugucuguagccua

SEQ ID NO: 986027 - RNA, 19 nt, Artificial Sequence
  Description of Artificial Sequence: Synthetic oligonucleotide
  Antisense strand to SEQ ID NO: 986026
uaggcuacagacaaguuag

SEQ ID NO: 986028 - RNA, 19 nt, Artificial Sequence
  Description of Artificial Sequence: Synthetic oligonucleotide
  Sense strand starting at position 3854 of SEQ ID NO: 914203
gcugacucugaccgacauu

SEQ ID NO: 986029 - RNA, 19 nt, Artificial Sequence
  Description of Artificial Sequence: Synthetic oligonucleotide
  Antisense strand to SEQ ID NO: 986028
aaugucggucagagucagc

SEQ ID NO: 986030 - RNA, 19 nt, Artificial Sequence
  Description of Artificial Sequence: Synthetic oligonucleotide
  Sense strand starting at position 2200 of SEQ ID NO: 914203
uggagguugugaguuacga

SEQ ID NO: 986031 - RNA, 19 nt, Artificial Sequence
  Description of Artificial Sequence: Synthetic oligonucleotide
  Antisense strand to SEQ ID NO: 986030
ucguaacucacaaccucca

SEQ ID NO: 986032 - RNA, 19 nt, Artificial Sequence
  Description of Artificial Sequence: Synthetic oligonucleotide
  Sense strand starting at position 2831 of SEQ ID NO: 914203
guggguuacucagcugaca

SEQ ID NO: 986033 - RNA, 19 nt, Artificial Sequence
  Description of Artificial Sequence: Synthetic oligonucleotide
  Antisense strand to SEQ ID NO: 986032
ugucagcugaguaacccac

SEQ ID NO: 986034 - RNA, 19 nt, Artificial Sequence
  Description of Artificial Sequence: Synthetic oligonucleotide
  Sense strand starting at position 3140 of SEQ ID NO: 914203
ugguaaucaucuuugcauu

SEQ ID NO: 986035 - RNA, 19 nt, Artificial Sequence
  Description of Artificial Sequence: Synthetic oligonucleotide
  Antisense strand to SEQ ID NO: 986034
aaugcaaagaugauuacca

SEQ ID NO: 986036 - RNA, 19 nt, Artificial Sequence
  Description of Artificial Sequence: Synthetic oligonucleotide
  Sense strand starting at position 3152 of SEQ ID NO: 914203
uugcauuccugagccuaga

SEQ ID NO: 986037 - RNA, 19 nt, Artificial Sequence
  Description of Artificial Sequence: Synthetic oligonucleotide
  Antisense strand to SEQ ID NO: 986036
ucuaggcucaggaaugcaa

SEQ ID NO: 986038 - RNA, 19 nt, Artificial Sequence
  Description of Artificial Sequence: Synthetic oligonucleotide
  Sense strand starting at position 3141 of SEQ ID NO: 914203
gguaaucaucuuugcauuc

SEQ ID NO: 986039 - RNA, 19 nt, Artificial Sequence
  Description of Artificial Sequence: Synthetic oligonucleotide
  Antisense strand to SEQ ID NO: 986038
gaaugcaaagaugauuacc

SEQ ID NO: 986040 - RNA, 19 nt, Artificial Sequence
  Description of Artificial Sequence: Synthetic oligonucleotide
  Sense strand starting at position 3446 of SEQ ID NO: 914203
agugaaaucccucgucuac

SEQ ID NO: 986041 - RNA, 19 nt, Artificial Sequence
  Description of Artificial Sequence: Synthetic oligonucleotide
  Antisense strand to SEQ ID NO: 986040
guagacgagggauuucacu

SEQ ID NO: 986042 - RNA, 19 nt, Artificial Sequence
  Description of Artificial Sequence: Synthetic oligonucleotide
  Sense strand starting at position 3274 of SEQ ID NO: 914203
ucaggcagguguguuuaaa

SEQ ID NO: 986043 - RNA, 19 nt, Artificial Sequence
  Description of Artificial Sequence: Synthetic oligonucleotide
  Antisense strand to SEQ ID NO: 986042
uuuaaacacaccugccuga

SEQ ID NO: 986044 - RNA, 19 nt, Artificial Sequence
  Description of Artificial Sequence: Synthetic oligonucleotide
  Sense strand starting at position 1191 of SEQ ID NO: 914203
aggcaauagcgcugaauac

SEQ ID NO: 986045 - RNA, 19 nt, Artificial Sequence
  Description of Artificial Sequence: Synthetic oligonucleotide
  Antisense strand to SEQ ID NO: 986044
guauucagcgcuauugccu

SEQ ID NO: 986046 - RNA, 19 nt, Artificial Sequence
  Description of Artificial Sequence: Synthetic oligonucleotide
  Sense strand starting at position 429 of SEQ ID NO: 914203
auuagaaaguuaggaaaca

SEQ ID NO: 986047 - RNA, 19 nt, Artificial Sequence
  Description of Artificial Sequence: Synthetic oligonucleotide
  Antisense strand to SEQ ID NO: 986046
uguuuccuaacuuucuaau

SEQ ID NO: 986048 - RNA, 19 nt, Artificial Sequence
  Description of Artificial Sequence: Synthetic oligonucleotide
  Sense strand starting at position 2836 of SEQ ID NO: 914203
uuacucagcugacaaagaa

SEQ ID NO: 986049 - RNA, 19 nt, Artificial Sequence
  Description of Artificial Sequence: Synthetic oligonucleotide
  Antisense strand to SEQ ID NO: 986048
uucuuugucagcugaguaa

SEQ ID NO: 986050 - RNA, 19 nt, Artificial Sequence
  Description of Artificial Sequence: Synthetic oligonucleotide
  Sense strand starting at position 51 of SEQ ID NO: 914204
ucacaucaugcugagauua

SEQ ID NO: 986051 - RNA, 19 nt, Artificial Sequence
  Description of Artificial Sequence: Synthetic oligonucleotide
  Antisense strand to SEQ ID NO: 986050
uaaucucagcaugauguga

SEQ ID NO: 986052 - RNA, 19 nt, Artificial Sequence
  Description of Artificial Sequence: Synthetic oligonucleotide
  Sense strand starting at position 2246 of SEQ ID NO: 914204
aaaugauguccuggaacau

SEQ ID NO: 986053 - RNA, 19 nt, Artificial Sequence
  Description of Artificial Sequence: Synthetic oligonucleotide
  Antisense strand to SEQ ID NO: 986052
auguuccaggacaucauuu

SEQ ID NO: 986054 - RNA, 19 nt, Artificial Sequence
  Description of Artificial Sequence: Synthetic oligonucleotide
  Sense strand starting at position 663 of SEQ ID NO: 914204
gacaaaucucgguaguaaa

SEQ ID NO: 986055 - RNA, 19 nt, Artificial Sequence
  Description of Artificial Sequence: Synthetic oligonucleotide
  Antisense strand to SEQ ID NO: 986054
uuuacuaccgagauuuguc

SEQ ID NO: 986056 - RNA, 19 nt, Artificial Sequence
  Description of Artificial Sequence: Synthetic oligonucleotide
  Sense strand starting at position 3779 of SEQ ID NO: 914204
ccguguggcccaguuaauu

SEQ ID NO: 986057 - RNA, 19 nt, Artificial Sequence
  Description of Artificial Sequence: Synthetic oligonucleotide
  Antisense strand to SEQ ID NO: 986056
aauuaacugggccacacgg

SEQ ID NO: 986058 - RNA, 19 nt, Artificial Sequence
  Description of Artificial Sequence: Synthetic oligonucleotide
  Sense strand starting at position 857 of SEQ ID NO: 914204
cugaguauaggaugauauc

SEQ ID NO: 986059 - RNA, 19 nt, Artificial Sequence
  Description of Artificial Sequence: Synthetic oligonucleotide
  Antisense strand to SEQ ID NO: 986058
gauaucauccuauacucag

SEQ ID NO: 986060 - RNA, 19 nt, Artificial Sequence
  Description of Artificial Sequence: Synthetic oligonucleotide
  Sense strand starting at position 1584 of SEQ ID NO: 914204
gcugaaaggcaggaucauu

SEQ ID NO: 986061 - RNA, 19 nt, Artificial Sequence
  Description of Artificial Sequence: Synthetic oligonucleotide
  Antisense strand to SEQ ID NO: 986060
aaugauccugccuuucagc

SEQ ID NO: 986062 - RNA, 19 nt, Artificial Sequence
  Description of Artificial Sequence: Synthetic oligonucleotide
  Sense strand starting at position 2404 of SEQ ID NO: 914204
acguacucacccuaacaga

SEQ ID NO: 986063 - RNA, 19 nt, Artificial Sequence
  Description of Artificial Sequence: Synthetic oligonucleotide
  Antisense strand to SEQ ID NO: 986062
ucuguuagggugaguacgu

SEQ ID NO: 986064 - RNA, 19 nt, Artificial Sequence
  Description of Artificial Sequence: Synthetic oligonucleotide
  Sense strand starting at position 358 of SEQ ID NO: 914204
gacugagggucuuuaugag

SEQ ID NO: 986065 - RNA, 19 nt, Artificial Sequence
  Description of Artificial Sequence: Synthetic oligonucleotide
  Antisense strand to SEQ ID NO: 986064
cucauaaagacccucaguc

SEQ ID NO: 986066 - RNA, 19 nt, Artificial Sequence
  Description of Artificial Sequence: Synthetic oligonucleotide
  Sense strand starting at position 3964 of SEQ ID NO: 914204
uaaggaacuucuuuagagu

SEQ ID NO: 986067 - RNA, 19 nt, Artificial Sequence
  Description of Artificial Sequence: Synthetic oligonucleotide
  Antisense strand to SEQ ID NO: 986066
acucuaaagaaguuccuua

SEQ ID NO: 986068 - RNA, 19 nt, Artificial Sequence
  Description of Artificial Sequence: Synthetic oligonucleotide
  Sense strand starting at position 1789 of SEQ ID NO: 914204
ccacaaagucuguaccuga

SEQ ID NO: 986069 - RNA, 19 nt, Artificial Sequence
  Description of Artificial Sequence: Synthetic oligonucleotide
  Antisense strand to SEQ ID NO: 986068
ucagguacagacuuugugg

SEQ ID NO: 986070 - RNA, 19 nt, Artificial Sequence
  Description of Artificial Sequence: Synthetic oligonucleotide
  Sense strand starting at position 964 of SEQ ID NO: 914204
aguagaaugccauauaagu

SEQ ID NO: 986071 - RNA, 19 nt, Artificial Sequence
  Description of Artificial Sequence: Synthetic oligonucleotide
  Antisense strand to SEQ ID NO: 986070
acuuauauggcauucuacu

SEQ ID NO: 986072 - RNA, 19 nt, Artificial Sequence
  Description of Artificial Sequence: Synthetic oligonucleotide
  Sense strand starting at position 797 of SEQ ID NO: 914204
ccuggacugaaaugugauu

SEQ ID NO: 986073 - RNA, 19 nt, Artificial Sequence
  Description of Artificial Sequence: Synthetic oligonucleotide
  Antisense strand to SEQ ID NO: 986072
aaucacauuucaguccagg

SEQ ID NO: 986074 - RNA, 19 nt, Artificial Sequence
  Description of Artificial Sequence: Synthetic oligonucleotide
  Sense strand starting at position 959 of SEQ ID NO: 914204
uagggaguagaaugccaua

SEQ ID NO: 986075 - RNA, 19 nt, Artificial Sequence
  Description of Artificial Sequence: Synthetic oligonucleotide
  Antisense strand to SEQ ID NO: 986074
uauggcauucuacucccua

SEQ ID NO: 986076 - RNA, 19 nt, Artificial Sequence
  Description of Artificial Sequence: Synthetic oligonucleotide
  Sense strand starting at position 674 of SEQ ID NO: 914204
guaguaaauucuccaggaa

SEQ ID NO: 986077 - RNA, 19 nt, Artificial Sequence
  Description of Artificial Sequence: Synthetic oligonucleotide
  Antisense strand to SEQ ID NO: 986076
uuccuggagaauuuacuac

SEQ ID NO: 986078 - RNA, 19 nt, Artificial Sequence
  Description of Artificial Sequence: Synthetic oligonucleotide
  Sense strand starting at position 476 of SEQ ID NO: 914204
acccauaggcuccaaguua

SEQ ID NO: 986079 - RNA, 19 nt, Artificial Sequence
  Description of Artificial Sequence: Synthetic oligonucleotide
  Antisense strand to SEQ ID NO: 986078
uaacuuggagccuaugggu

SEQ ID NO: 986080 - RNA, 19 nt, Artificial Sequence
  Description of Artificial Sequence: Synthetic oligonucleotide
  Sense strand starting at position 3581 of SEQ ID NO: 914204
uggcgagaggcuuaaauga

SEQ ID NO: 986081 - RNA, 19 nt, Artificial Sequence
  Description of Artificial Sequence: Synthetic oligonucleotide
  Antisense strand to SEQ ID NO: 986080
ucauuuaagccucucgcca

SEQ ID NO: 986082 - RNA, 19 nt, Artificial Sequence
  Description of Artificial Sequence: Synthetic oligonucleotide
  Sense strand starting at position 677 of SEQ ID NO: 914204
guaaauucuccaggaaagu

SEQ ID NO: 986083 - RNA, 19 nt, Artificial Sequence
  Description of Artificial Sequence: Synthetic oligonucleotide
  Antisense strand to SEQ ID NO: 986082
acuuuccuggagaauuuac

SEQ ID NO: 986084 - RNA, 19 nt, Artificial Sequence
  Description of Artificial Sequence: Synthetic oligonucleotide
  Sense strand starting at position 673 of SEQ ID NO: 914204
gguaguaaauucuccagga

SEQ ID NO: 986085 - RNA, 19 nt, Artificial Sequence
  Description of Artificial Sequence: Synthetic oligonucleotide
  Antisense strand to SEQ ID NO: 986084
uccuggagaauuuacuacc

SEQ ID NO: 986086 - RNA, 19 nt, Artificial Sequence
  Description of Artificial Sequence: Synthetic oligonucleotide
  Sense strand starting at position 221 of SEQ ID NO: 914204
gccuuugccagagaacuag

SEQ ID NO: 986087 - RNA, 19 nt, Artificial Sequence
  Description of Artificial Sequence: Synthetic oligonucleotide
  Antisense strand to SEQ ID NO: 986086
cuaguucucuggcaaaggc

SEQ ID NO: 986088 - RNA, 19 nt, Artificial Sequence
  Description of Artificial Sequence: Synthetic oligonucleotide
  Sense strand starting at position 118 of SEQ ID NO: 914204
ggaagagcacagugaucuu

SEQ ID NO: 986089 - RNA, 19 nt, Artificial Sequence
  Description of Artificial Sequence: Synthetic oligonucleotide
  Antisense strand to SEQ ID NO: 986088
aagaucacugugcucuucc

SEQ ID NO: 986090 - RNA, 19 nt, Artificial Sequence
  Description of Artificial Sequence: Synthetic oligonucleotide
  Sense strand starting at position 3685 of SEQ ID NO: 914204
guaugagaugcccagcaga

SEQ ID NO: 986091 - RNA, 19 nt, Artificial Sequence
  Description of Artificial Sequence: Synthetic oligonucleotide
  Antisense strand to SEQ ID NO: 986090
ucugcugggcaucucauac

SEQ ID NO: 986092 - RNA, 19 nt, Artificial Sequence
  Description of Artificial Sequence: Synthetic oligonucleotide
  Sense strand starting at position 121 of SEQ ID NO: 914204
agagcacagugaucuuaca

SEQ ID NO: 986093 - RNA, 19 nt, Artificial Sequence
  Description of Artificial Sequence: Synthetic oligonucleotide
  Antisense strand to SEQ ID NO: 986092
uguaagaucacugugcucu

SEQ ID NO: 986094 - RNA, 19 nt, Artificial Sequence
  Description of Artificial Sequence: Synthetic oligonucleotide
  Sense strand starting at position 219 of SEQ ID NO: 914204
gggccuuugccagagaacu

SEQ ID NO: 986095 - RNA, 19 nt, Artificial Sequence
  Description of Artificial Sequence: Synthetic oligonucleotide
  Antisense strand to SEQ ID NO: 986094
aguucucuggcaaaggccc

SEQ ID NO: 986096 - RNA, 19 nt, Artificial Sequence
  Description of Artificial Sequence: Synthetic oligonucleotide
  Sense strand starting at position 662 of SEQ ID NO: 914204
agacaaaucucgguaguaa

SEQ ID NO: 986097 - RNA, 19 nt, Artificial Sequence
  Description of Artificial Sequence: Synthetic oligonucleotide
  Antisense strand to SEQ ID NO: 986096
uuacuaccgagauuugucu

SEQ ID NO: 986098 - RNA, 19 nt, Artificial Sequence
  Description of Artificial Sequence: Synthetic oligonucleotide
  Sense strand starting at position 3813 of SEQ ID NO: 914204
auccgauggcuuuauauua

SEQ ID NO: 986099 - RNA, 19 nt, Artificial Sequence
  Description of Artificial Sequence: Synthetic oligonucleotide
  Antisense strand to SEQ ID NO: 986098
uaauauaaagccaucggau

SEQ ID NO: 986100 - RNA, 19 nt, Artificial Sequence
  Description of Artificial Sequence: Synthetic oligonucleotide
  Sense strand starting at position 3674 of SEQ ID NO: 914204
caccguauccuguaugaga

SEQ ID NO: 986101 - RNA, 19 nt, Artificial Sequence
  Description of Artificial Sequence: Synthetic oligonucleotide
  Antisense strand to SEQ ID NO: 986100
ucucauacaggauacggug

SEQ ID NO: 986102 - RNA, 19 nt, Artificial Sequence
  Description of Artificial Sequence: Synthetic oligonucleotide
  Sense strand starting at position 2036 of SEQ ID NO: 914204
acgucuaguccucaacaca

SEQ ID NO: 986103 - RNA, 19 nt, Artificial Sequence
  Description of Artificial Sequence: Synthetic oligonucleotide
  Antisense strand to SEQ ID NO: 986102
uguguugaggacuagacgu

SEQ ID NO: 986104 - RNA, 19 nt, Artificial Sequence
  Description of Artificial Sequence: Synthetic oligonucleotide
  Sense strand starting at position 2083 of SEQ ID NO: 914204
acaguaaaccugugagcaa

SEQ ID NO: 986105 - RNA, 19 nt, Artificial Sequence
  Description of Artificial Sequence: Synthetic oligonucleotide
  Antisense strand to SEQ ID NO: 986104
uugcucacagguuuacugu

SEQ ID NO: 986106 - RNA, 19 nt, Artificial Sequence
  Description of Artificial Sequence: Synthetic oligonucleotide
  Sense strand starting at position 2338 of SEQ ID NO: 914204
ugggaagucucugccaaca

SEQ ID NO: 986107 - RNA, 19 nt, Artificial Sequence
  Description of Artificial Sequence: Synthetic oligonucleotide
  Antisense strand to SEQ ID NO: 986106
uguuggcagagacuuccca

SEQ ID NO: 986108 - RNA, 19 nt, Artificial Sequence
  Description of Artificial Sequence: Synthetic oligonucleotide
  Sense strand starting at position 661 of SEQ ID NO: 914204
cagacaaaucucgguagua

SEQ ID NO: 986109 - RNA, 19 nt, Artificial Sequence
  Description of Artificial Sequence: Synthetic oligonucleotide
  Antisense strand to SEQ ID NO: 986108
uacuaccgagauuugucug

SEQ ID NO: 986110 - RNA, 19 nt, Artificial Sequence
  Description of Artificial Sequence: Synthetic oligonucleotide
  Sense strand starting at position 927 of SEQ ID NO: 914204
uguccuuauuuagagauaa

SEQ ID NO: 986111 - RNA, 19 nt, Artificial Sequence
  Description of Artificial Sequence: Synthetic oligonucleotide
  Antisense strand to SEQ ID NO: 986110
uuaucucuaaauaaggaca

SEQ ID NO: 986112 - RNA, 19 nt, Artificial Sequence
  Description of Artificial Sequence: Synthetic oligonucleotide
  Sense strand starting at position 1797 of SEQ ID NO: 914204
ucuguaccugagcaaguau

SEQ ID NO: 986113 - RNA, 19 nt, Artificial Sequence
  Description of Artificial Sequence: Synthetic oligonucleotide
  Antisense strand to SEQ ID NO: 986112
auacuugcucagguacaga

SEQ ID NO: 986114 - RNA, 19 nt, Artificial Sequence
  Description of Artificial Sequence: Synthetic oligonucleotide
  Sense strand starting at position 1211 of SEQ ID NO: 914204
gugagagccucucuacaau

SEQ ID NO: 986115 - RNA, 19 nt, Artificial Sequence
  Description of Artificial Sequence: Synthetic oligonucleotide
  Antisense strand to SEQ ID NO: 986114
auuguagagaggcucucac

SEQ ID NO: 986116 - RNA, 19 nt, Artificial Sequence
  Description of Artificial Sequence: Synthetic oligonucleotide
  Sense strand starting at position 1592 of SEQ ID NO: 914204
gcaggaucauucccaguau

SEQ ID NO: 986117 - RNA, 19 nt, Artificial Sequence
  Description of Artificial Sequence: Synthetic oligonucleotide
  Antisense strand to SEQ ID NO: 986116
auacugggaaugauccugc

SEQ ID NO: 986118 - RNA, 19 nt, Artificial Sequence
  Description of Artificial Sequence: Synthetic oligonucleotide
  Sense strand starting at position 3947 of SEQ ID NO: 914204
gggaaucucagacguguua

SEQ ID NO: 986119 - RNA, 19 nt, Artificial Sequence
  Description of Artificial Sequence: Synthetic oligonucleotide
  Antisense strand to SEQ ID NO: 986118
uaacacgucugagauuccc

SEQ ID NO: 986120 - RNA, 19 nt, Artificial Sequence
  Description of Artificial Sequence: Synthetic oligonucleotide
  Sense strand starting at position 950 of SEQ ID NO: 914204
ugacauauuuagggaguag

SEQ ID NO: 986121 - RNA, 19 nt, Artificial Sequence
  Description of Artificial Sequence: Synthetic oligonucleotide
  Antisense strand to SEQ ID NO: 986120
cuacucccuaaauauguca

SEQ ID NO: 986122 - RNA, 19 nt, Artificial Sequence
  Description of Artificial Sequence: Synthetic oligonucleotide
  Sense strand starting at position 1734 of SEQ ID NO: 914204
caguguuaguuacuacaga

SEQ ID NO: 986123 - RNA, 19 nt, Artificial Sequence
  Description of Artificial Sequence: Synthetic oligonucleotide
  Antisense strand to SEQ ID NO: 986122
ucuguaguaacuaacacug

SEQ ID NO: 986124 - RNA, 19 nt, Artificial Sequence
  Description of Artificial Sequence: Synthetic oligonucleotide
  Sense strand starting at position 903 of SEQ ID NO: 914204
guguuacuuugaucuugaa

SEQ ID NO: 986125 - RNA, 19 nt, Artificial Sequence
  Description of Artificial Sequence: Synthetic oligonucleotide
  Antisense strand to SEQ ID NO: 986124
uucaagaucaaaguaacac

SEQ ID NO: 986126 - RNA, 19 nt, Artificial Sequence
  Description of Artificial Sequence: Synthetic oligonucleotide
  Sense strand starting at position 2474 of SEQ ID NO: 914204
gagcacugaccacgucaaa

SEQ ID NO: 986127 - RNA, 19 nt, Artificial Sequence
  Description of Artificial Sequence: Synthetic oligonucleotide
  Antisense strand to SEQ ID NO: 986126
uuugacguggucagugcuc

SEQ ID NO: 986128 - RNA, 19 nt, Artificial Sequence
  Description of Artificial Sequence: Synthetic oligonucleotide
  Sense strand starting at position 1724 of SEQ ID NO: 914204
ccuaaauggucaguguuag

SEQ ID NO: 986129 - RNA, 19 nt, Artificial Sequence
  Description of Artificial Sequence: Synthetic oligonucleotide
  Antisense strand to SEQ ID NO: 986128
cuaacacugaccauuuagg

SEQ ID NO: 986130 - RNA, 19 nt, Artificial Sequence
  Description of Artificial Sequence: Synthetic oligonucleotide
  Sense strand starting at position 890 of SEQ ID NO: 914205
aaaugauguccuggaacau

SEQ ID NO: 986131 - RNA, 19 nt, Artificial Sequence
  Description of Artificial Sequence: Synthetic oligonucleotide
  Antisense strand to SEQ ID NO: 986130
auguuccaggacaucauuu

SEQ ID NO: 986132 - RNA, 19 nt, Artificial Sequence
  Description of Artificial Sequence: Synthetic oligonucleotide
  Sense strand starting at position 3105 of SEQ ID NO: 914205
uuggaagacucacugugaa

SEQ ID NO: 986133 - RNA, 19 nt, Artificial Sequence
  Description of Artificial Sequence: Synthetic oligonucleotide
  Antisense strand to SEQ ID NO: 986132
uucacagugagucuuccaa

SEQ ID NO: 986134 - RNA, 19 nt, Artificial Sequence
  Description of Artificial Sequence: Synthetic oligonucleotide
  Sense strand starting at position 2423 of SEQ ID NO: 914205
ccguguggcccaguuaauu

SEQ ID NO: 986135 - RNA, 19 nt, Artificial Sequence
  Description of Artificial Sequence: Synthetic oligonucleotide
  Antisense strand to SEQ ID NO: 986134
aauuaacugggccacacgg

SEQ ID NO: 986136 - RNA, 19 nt, Artificial Sequence
  Description of Artificial Sequence: Synthetic oligonucleotide
  Sense strand starting at position 3094 of SEQ ID NO: 914205
uccuacaugaguuggaaga

SEQ ID NO: 986137 - RNA, 19 nt, Artificial Sequence
  Description of Artificial Sequence: Synthetic oligonucleotide
  Antisense strand to SEQ ID NO: 986136
ucuuccaacucauguagga

SEQ ID NO: 986138 - RNA, 19 nt, Artificial Sequence
  Description of Artificial Sequence: Synthetic oligonucleotide
  Sense strand starting at position 3751 of SEQ ID NO: 914205
agggcuucuccucagauga

SEQ ID NO: 986139 - RNA, 19 nt, Artificial Sequence
  Description of Artificial Sequence: Synthetic oligonucleotide
  Antisense strand to SEQ ID NO: 986138
ucaucugaggagaagcccu

SEQ ID NO: 986140 - RNA, 19 nt, Artificial Sequence
  Description of Artificial Sequence: Synthetic oligonucleotide
  Sense strand starting at position 228 of SEQ ID NO: 914205
gcugaaaggcaggaucauu

SEQ ID NO: 986141 - RNA, 19 nt, Artificial Sequence
  Description of Artificial Sequence: Synthetic oligonucleotide
  Antisense strand to SEQ ID NO: 986140
aaugauccugccuuucagc

SEQ ID NO: 986142 - RNA, 19 nt, Artificial Sequence
  Description of Artificial Sequence: Synthetic oligonucleotide
  Sense strand starting at position 1048 of SEQ ID NO: 914205
acguacucacccuaacaga

SEQ ID NO: 986143 - RNA, 19 nt, Artificial Sequence
  Description of Artificial Sequence: Synthetic oligonucleotide
  Antisense strand to SEQ ID NO: 986142
ucuguuagggugaguacgu

SEQ ID NO: 986144 - RNA, 19 nt, Artificial Sequence
  Description of Artificial Sequence: Synthetic oligonucleotide
  Sense strand starting at position 2608 of SEQ ID NO: 914205
uaaggaacuucuuuagagu

SEQ ID NO: 986145 - RNA, 19 nt, Artificial Sequence
  Description of Artificial Sequence: Synthetic oligonucleotide
  Antisense strand to SEQ ID NO: 986144
acucuaaagaaguuccuua

SEQ ID NO: 986146 - RNA, 19 nt, Artificial Sequence
  Description of Artificial Sequence: Synthetic oligonucleotide
  Sense strand starting at position 433 of SEQ ID NO: 914205
ccacaaagucuguaccuga

SEQ ID NO: 986147 - RNA, 19 nt, Artificial Sequence
  Description of Artificial Sequence: Synthetic oligonucleotide
  Antisense strand to SEQ ID NO: 986146
ucagguacagacuuugugg

SEQ ID NO: 986148 - RNA, 19 nt, Artificial Sequence
  Description of Artificial Sequence: Synthetic oligonucleotide
  Sense strand starting at position 3862 of SEQ ID NO: 914205
auguaaauuccugacaugu

SEQ ID NO: 986149 - RNA, 19 nt, Artificial Sequence
  Description of Artificial Sequence: Synthetic oligonucleotide
  Antisense strand to SEQ ID NO: 986148
acaugucaggaauuuacau

SEQ ID NO: 986150 - RNA, 19 nt, Artificial Sequence
  Description of Artificial Sequence: Synthetic oligonucleotide
  Sense strand starting at position 3108 of SEQ ID NO: 914205
gaagacucacugugaagug

SEQ ID NO: 986151 - RNA, 19 nt, Artificial Sequence
  Description of Artificial Sequence: Synthetic oligonucleotide
  Antisense strand to SEQ ID NO: 986150
cacuucacagugagucuuc

SEQ ID NO: 986152 - RNA, 19 nt, Artificial Sequence
  Description of Artificial Sequence: Synthetic oligonucleotide
  Sense strand starting at position 2225 of SEQ ID NO: 914205
uggcgagaggcuuaaauga

SEQ ID NO: 986153 - RNA, 19 nt, Artificial Sequence
  Description of Artificial Sequence: Synthetic oligonucleotide
  Antisense strand to SEQ ID NO: 986152
ucauuuaagccucucgcca

SEQ ID NO: 986154 - RNA, 19 nt, Artificial Sequence
  Description of Artificial Sequence: Synthetic oligonucleotide
  Sense strand starting at position 3092 of SEQ ID NO: 914205
uuuccuacaugaguuggaa

SEQ ID NO: 986155 - RNA, 19 nt, Artificial Sequence
  Description of Artificial Sequence: Synthetic oligonucleotide
  Antisense strand to SEQ ID NO: 986154
uuccaacucauguaggaaa

SEQ ID NO: 986156 - RNA, 19 nt, Artificial Sequence
  Description of Artificial Sequence: Synthetic oligonucleotide
  Sense strand starting at position 3001 of SEQ ID NO: 914205
gccugaaaucuugacucuc

SEQ ID NO: 986157 - RNA, 19 nt, Artificial Sequence
  Description of Artificial Sequence: Synthetic oligonucleotide
  Antisense strand to SEQ ID NO: 986156
gagagucaagauuucaggc

SEQ ID NO: 986158 - RNA, 19 nt, Artificial Sequence
  Description of Artificial Sequence: Synthetic oligonucleotide
  Sense strand starting at position 3630 of SEQ ID NO: 914205
aauugacgauugucccaaa

SEQ ID NO: 986159 - RNA, 19 nt, Artificial Sequence
  Description of Artificial Sequence: Synthetic oligonucleotide
  Antisense strand to SEQ ID NO: 986158
uuugggacaaucgucaauu

SEQ ID NO: 986160 - RNA, 19 nt, Artificial Sequence
  Description of Artificial Sequence: Synthetic oligonucleotide
  Sense strand starting at position 2329 of SEQ ID NO: 914205
guaugagaugcccagcaga

SEQ ID NO: 986161 - RNA, 19 nt, Artificial Sequence
  Description of Artificial Sequence: Synthetic oligonucleotide
  Antisense strand to SEQ ID NO: 986160
ucugcugggcaucucauac

SEQ ID NO: 986162 - RNA, 19 nt, Artificial Sequence
  Description of Artificial Sequence: Synthetic oligonucleotide
  Sense strand starting at position 2992 of SEQ ID NO: 914205
cucuaacaggccugaaauc

SEQ ID NO: 986163 - RNA, 19 nt, Artificial Sequence
  Description of Artificial Sequence: Synthetic oligonucleotide
  Antisense strand to SEQ ID NO: 986162
gauuucaggccuguuagag

SEQ ID NO: 986164 - RNA, 19 nt, Artificial Sequence
  Description of Artificial Sequence: Synthetic oligonucleotide
  Sense strand starting at position 3087 of SEQ ID NO: 914205
cccucuuuccuacaugagu

SEQ ID NO: 986165 - RNA, 19 nt, Artificial Sequence
  Description of Artificial Sequence: Synthetic oligonucleotide
  Antisense strand to SEQ ID NO: 986164
acucauguaggaaagaggg

SEQ ID NO: 986166 - RNA, 19 nt, Artificial Sequence
  Description of Artificial Sequence: Synthetic oligonucleotide
  Sense strand starting at position 2457 of SEQ ID NO: 914205
auccgauggcuuuauauua

SEQ ID NO: 986167 - RNA, 19 nt, Artificial Sequence
  Description of Artificial Sequence: Synthetic oligonucleotide
  Antisense strand to SEQ ID NO: 986166
uaauauaaagccaucggau

SEQ ID NO: 986168 - RNA, 19 nt, Artificial Sequence
  Description of Artificial Sequence: Synthetic oligonucleotide
  Sense strand starting at position 2318 of SEQ ID NO: 914205
caccguauccuguaugaga

SEQ ID NO: 986169 - RNA, 19 nt, Artificial Sequence
  Description of Artificial Sequence: Synthetic oligonucleotide
  Antisense strand to SEQ ID NO: 986168
ucucauacaggauacggug

SEQ ID NO: 986170 - RNA, 19 nt, Artificial Sequence
  Description of Artificial Sequence: Synthetic oligonucleotide
  Sense strand starting at position 3750 of SEQ ID NO: 914205
gagggcuucuccucagaug

SEQ ID NO: 986171 - RNA, 19 nt, Artificial Sequence
  Description of Artificial Sequence: Synthetic oligonucleotide
  Antisense strand to SEQ ID NO: 986170
caucugaggagaagcccuc

SEQ ID NO: 986172 - RNA, 19 nt, Artificial Sequence
  Description of Artificial Sequence: Synthetic oligonucleotide
  Sense strand starting at position 3860 of SEQ ID NO: 914205
guauguaaauuccugacau

SEQ ID NO: 986173 - RNA, 19 nt, Artificial Sequence
  Description of Artificial Sequence: Synthetic oligonucleotide
  Antisense strand to SEQ ID NO: 986172
augucaggaauuuacauac

SEQ ID NO: 986174 - RNA, 19 nt, Artificial Sequence
  Description of Artificial Sequence: Synthetic oligonucleotide
  Sense strand starting at position 3852 of SEQ ID NO: 914205
gagcuaaaguauguaaauu

SEQ ID NO: 986175 - RNA, 19 nt, Artificial Sequence
  Description of Artificial Sequence: Synthetic oligonucleotide
  Antisense strand to SEQ ID NO: 986174
aauuuacauacuuuagcuc

SEQ ID NO: 986176 - RNA, 19 nt, Artificial Sequence
  Description of Artificial Sequence: Synthetic oligonucleotide
  Sense strand starting at position 680 of SEQ ID NO: 914205
acgucuaguccucaacaca

SEQ ID NO: 986177 - RNA, 19 nt, Artificial Sequence
  Description of Artificial Sequence: Synthetic oligonucleotide
  Antisense strand to SEQ ID NO: 986176
uguguugaggacuagacgu

SEQ ID NO: 986178 - RNA, 19 nt, Artificial Sequence
  Description of Artificial Sequence: Synthetic oligonucleotide
  Sense strand starting at position 3851 of SEQ ID NO: 914205
ugagcuaaaguauguaaau

SEQ ID NO: 986179 - RNA, 19 nt, Artificial Sequence
  Description of Artificial Sequence: Synthetic oligonucleotide
  Antisense strand to SEQ ID NO: 986178
auuuacauacuuuagcuca

SEQ ID NO: 986180 - RNA, 19 nt, Artificial Sequence
  Description of Artificial Sequence: Synthetic oligonucleotide
  Sense strand starting at position 727 of SEQ ID NO: 914205
acaguaaaccugugagcaa

SEQ ID NO: 986181 - RNA, 19 nt, Artificial Sequence
  Description of Artificial Sequence: Synthetic oligonucleotide
  Antisense strand to SEQ ID NO: 986180
uugcucacagguuuacugu

SEQ ID NO: 986182 - RNA, 19 nt, Artificial Sequence
  Description of Artificial Sequence: Synthetic oligonucleotide
  Sense strand starting at position 982 of SEQ ID NO: 914205
ugggaagucucugccaaca

SEQ ID NO: 986183 - RNA, 19 nt, Artificial Sequence
  Description of Artificial Sequence: Synthetic oligonucleotide
  Antisense strand to SEQ ID NO: 986182
uguuggcagagacuuccca

SEQ ID NO: 986184 - RNA, 19 nt, Artificial Sequence
  Description of Artificial Sequence: Synthetic oligonucleotide
  Sense strand starting at position 441 of SEQ ID NO: 914205
ucuguaccugagcaaguau

SEQ ID NO: 986185 - RNA, 19 nt, Artificial Sequence
  Description of Artificial Sequence: Synthetic oligonucleotide
  Antisense strand to SEQ ID NO: 986184
auacuugcucagguacaga

SEQ ID NO: 986186 - RNA, 19 nt, Artificial Sequence
  Description of Artificial Sequence: Synthetic oligonucleotide
  Sense strand starting at position 236 of SEQ ID NO: 914205
gcaggaucauucccaguau

SEQ ID NO: 986187 - RNA, 19 nt, Artificial Sequence
  Description of Artificial Sequence: Synthetic oligonucleotide
  Antisense strand to SEQ ID NO: 986186
auacugggaaugauccugc

SEQ ID NO: 986188 - RNA, 19 nt, Artificial Sequence
  Description of Artificial Sequence: Synthetic oligonucleotide
  Sense strand starting at position 2591 of SEQ ID NO: 914205
gggaaucucagacguguua

SEQ ID NO: 986189 - RNA, 19 nt, Artificial Sequence
  Description of Artificial Sequence: Synthetic oligonucleotide
  Antisense strand to SEQ ID NO: 986188
uaacacgucugagauuccc

SEQ ID NO: 986190 - RNA, 19 nt, Artificial Sequence
  Description of Artificial Sequence: Synthetic oligonucleotide
  Sense strand starting at position 378 of SEQ ID NO: 914205
caguguuaguuacuacaga

SEQ ID NO: 986191 - RNA, 19 nt, Artificial Sequence
  Description of Artificial Sequence: Synthetic oligonucleotide
  Antisense strand to SEQ ID NO: 986190
ucuguaguaacuaacacug

SEQ ID NO: 986192 - RNA, 19 nt, Artificial Sequence
  Description of Artificial Sequence: Synthetic oligonucleotide
  Sense strand starting at position 1118 of SEQ ID NO: 914205
gagcacugaccacgucaaa

SEQ ID NO: 986193 - RNA, 19 nt, Artificial Sequence
  Description of Artificial Sequence: Synthetic oligonucleotide
  Antisense strand to SEQ ID NO: 986192
uuugacguggucagugcuc

SEQ ID NO: 986194 - RNA, 19 nt, Artificial Sequence
  Description of Artificial Sequence: Synthetic oligonucleotide
  Sense strand starting at position 368 of SEQ ID NO: 914205
ccuaaauggucaguguuag

SEQ ID NO: 986195 - RNA, 19 nt, Artificial Sequence
  Description of Artificial Sequence: Synthetic oligonucleotide
  Antisense strand to SEQ ID NO: 986194
cuaacacugaccauuuagg

SEQ ID NO: 986196 - RNA, 19 nt, Artificial Sequence
  Description of Artificial Sequence: Synthetic oligonucleotide
  Sense strand starting at position 2114 of SEQ ID NO: 914205
ggaguuaauucuguccuug

SEQ ID NO: 986197 - RNA, 19 nt, Artificial Sequence
  Description of Artificial Sequence: Synthetic oligonucleotide
  Antisense strand to SEQ ID NO: 986196
caaggacagaauuaacucc

SEQ ID NO: 986198 - RNA, 19 nt, Artificial Sequence
  Description of Artificial Sequence: Synthetic oligonucleotide
  Sense strand starting at position 981 of SEQ ID NO: 914205
cugggaagucucugccaac

SEQ ID NO: 986199 - RNA, 19 nt, Artificial Sequence
  Description of Artificial Sequence: Synthetic oligonucleotide
  Antisense strand to SEQ ID NO: 986198
guuggcagagacuucccag

SEQ ID NO: 986200 - RNA, 19 nt, Artificial Sequence
  Description of Artificial Sequence: Synthetic oligonucleotide
  Sense strand starting at position 376 of SEQ ID NO: 914205
gucaguguuaguuacuaca

SEQ ID NO: 986201 - RNA, 19 nt, Artificial Sequence
  Description of Artificial Sequence: Synthetic oligonucleotide
  Antisense strand to SEQ ID NO: 986200
uguaguaacuaacacugac

SEQ ID NO: 986202 - RNA, 19 nt, Artificial Sequence
  Description of Artificial Sequence: Synthetic oligonucleotide
  Sense strand starting at position 3436 of SEQ ID NO: 914205
caaggcacuccgugaggau

SEQ ID NO: 986203 - RNA, 19 nt, Artificial Sequence
  Description of Artificial Sequence: Synthetic oligonucleotide
  Antisense strand to SEQ ID NO: 986202
auccucacggagugccuug

SEQ ID NO: 986204 - RNA, 19 nt, Artificial Sequence
  Description of Artificial Sequence: Synthetic oligonucleotide
  Sense strand starting at position 3695 of SEQ ID NO: 914205
uuaguugacuuugucaauu

SEQ ID NO: 986205 - RNA, 19 nt, Artificial Sequence
  Description of Artificial Sequence: Synthetic oligonucleotide
  Antisense strand to SEQ ID NO: 986204
aauugacaaagucaacuaa

SEQ ID NO: 986206 - RNA, 19 nt, Artificial Sequence
  Description of Artificial Sequence: Synthetic oligonucleotide
  Sense strand starting at position 1222 of SEQ ID NO: 914205
aaugaaauaccgugcucca

SEQ ID NO: 986207 - RNA, 19 nt, Artificial Sequence
  Description of Artificial Sequence: Synthetic oligonucleotide
  Antisense strand to SEQ ID NO: 986206
uggagcacgguauuucauu

SEQ ID NO: 986208 - RNA, 19 nt, Artificial Sequence
  Description of Artificial Sequence: Synthetic oligonucleotide
  Sense strand starting at position 2464 of SEQ ID NO: 914205
ggcuuuauauuagugacuu

SEQ ID NO: 986209 - RNA, 19 nt, Artificial Sequence
  Description of Artificial Sequence: Synthetic oligonucleotide
  Antisense strand to SEQ ID NO: 986208
aagucacuaauauaaagcc

SEQ ID NO: 986210 - RNA, 19 nt, Artificial Sequence
  Description of Artificial Sequence: Synthetic oligonucleotide
  Sense strand starting at position 2492 of SEQ ID NO: 914206
ggaacaaaugcugagccua

SEQ ID NO: 986211 - RNA, 19 nt, Artificial Sequence
  Description of Artificial Sequence: Synthetic oligonucleotide
  Antisense strand to SEQ ID NO: 986210
uaggcucagcauuuguucc

SEQ ID NO: 986212 - RNA, 19 nt, Artificial Sequence
  Description of Artificial Sequence: Synthetic oligonucleotide
  Sense strand starting at position 2750 of SEQ ID NO: 914206
ggugacuuugagggagacu

SEQ ID NO: 986213 - RNA, 19 nt, Artificial Sequence
  Description of Artificial Sequence: Synthetic oligonucleotide
  Antisense strand to SEQ ID NO: 986212
agucucccucaaagucacc

SEQ ID NO: 986214 - RNA, 19 nt, Artificial Sequence
  Description of Artificial Sequence: Synthetic oligonucleotide
  Sense strand starting at position 3797 of SEQ ID NO: 914206
cgugacgucagagaacaau

SEQ ID NO: 986215 - RNA, 19 nt, Artificial Sequence
  Description of Artificial Sequence: Synthetic oligonucleotide
  Antisense strand to SEQ ID NO: 986214
auuguucucugacgucacg

SEQ ID NO: 986216 - RNA, 19 nt, Artificial Sequence
  Description of Artificial Sequence: Synthetic oligonucleotide
  Sense strand starting at position 3326 of SEQ ID NO: 914206
gcacuaaauccucacguua

SEQ ID NO: 986217 - RNA, 19 nt, Artificial Sequence
  Description of Artificial Sequence: Synthetic oligonucleotide
  Antisense strand to SEQ ID NO: 986216
uaacgugaggauuuagugc

SEQ ID NO: 986218 - RNA, 19 nt, Artificial Sequence
  Description of Artificial Sequence: Synthetic oligonucleotide
  Sense strand starting at position 3331 of SEQ ID NO: 914206
aaauccucacguuaacgua

SEQ ID NO: 986219 - RNA, 19 nt, Artificial Sequence
  Description of Artificial Sequence: Synthetic oligonucleotide
  Antisense strand to SEQ ID NO: 986218
uacguuaacgugaggauuu

SEQ ID NO: 986220 - RNA, 19 nt, Artificial Sequence
  Description of Artificial Sequence: Synthetic oligonucleotide
  Sense strand starting at position 2105 of SEQ ID NO: 914206
gucagauuacauuggcuau

SEQ ID NO: 986221 - RNA, 19 nt, Artificial Sequence
  Description of Artificial Sequence: Synthetic oligonucleotide
  Antisense strand to SEQ ID NO: 986220
auagccaauguaaucugac

SEQ ID NO: 986222 - RNA, 19 nt, Artificial Sequence
  Description of Artificial Sequence: Synthetic oligonucleotide
  Sense strand starting at position 740 of SEQ ID NO: 914206
gccggcuuccuggacagau

SEQ ID NO: 986223 - RNA, 19 nt, Artificial Sequence
  Description of Artificial Sequence: Synthetic oligonucleotide
  Antisense strand to SEQ ID NO: 986222
aucuguccaggaagccggc

SEQ ID NO: 986224 - RNA, 19 nt, Artificial Sequence
  Description of Artificial Sequence: Synthetic oligonucleotide
  Sense strand starting at position 547 of SEQ ID NO: 914206
uuguuuacauuccuggagu

SEQ ID NO: 986225 - RNA, 19 nt, Artificial Sequence
  Description of Artificial Sequence: Synthetic oligonucleotide
  Antisense strand to SEQ ID NO: 986224
acuccaggaauguaaacaa

SEQ ID NO: 986226 - RNA, 19 nt, Artificial Sequence
  Description of Artificial Sequence: Synthetic oligonucleotide
  Sense strand starting at position 3325 of SEQ ID NO: 914206
ggcacuaaauccucacguu

SEQ ID NO: 986227 - RNA, 19 nt, Artificial Sequence
  Description of Artificial Sequence: Synthetic oligonucleotide
  Antisense strand to SEQ ID NO: 986226
aacgugaggauuuagugcc

SEQ ID NO: 986228 - RNA, 19 nt, Artificial Sequence
  Description of Artificial Sequence: Synthetic oligonucleotide
  Sense strand starting at position 549 of SEQ ID NO: 914206
guuuacauuccuggagugu

SEQ ID NO: 986229 - RNA, 19 nt, Artificial Sequence
  Description of Artificial Sequence: Synthetic oligonucleotide
  Antisense strand to SEQ ID NO: 986228
acacuccaggaauguaaac

SEQ ID NO: 986230 - RNA, 19 nt, Artificial Sequence
  Description of Artificial Sequence: Synthetic oligonucleotide
  Sense strand starting at position 2635 of SEQ ID NO: 914206
ggguaagcgaguugguaac

SEQ ID NO: 986231 - RNA, 19 nt, Artificial Sequence
  Description of Artificial Sequence: Synthetic oligonucleotide
  Antisense strand to SEQ ID NO: 986230
guuaccaacucgcuuaccc

SEQ ID NO: 986232 - RNA, 19 nt, Artificial Sequence
  Description of Artificial Sequence: Synthetic oligonucleotide
  Sense strand starting at position 990 of SEQ ID NO: 914206
ggaaauuacuuucguauuu

SEQ ID NO: 986233 - RNA, 19 nt, Artificial Sequence
  Description of Artificial Sequence: Synthetic oligonucleotide
  Antisense strand to SEQ ID NO: 986232
aaauacgaaaguaauuucc

SEQ ID NO: 986234 - RNA, 19 nt, Artificial Sequence
  Description of Artificial Sequence: Synthetic oligonucleotide
  Sense strand starting at position 3795 of SEQ ID NO: 914206
ggcgugacgucagagaaca

SEQ ID NO: 986235 - RNA, 19 nt, Artificial Sequence
  Description of Artificial Sequence: Synthetic oligonucleotide
  Antisense strand to SEQ ID NO: 986234
uguucucugacgucacgcc

SEQ ID NO: 986236 - RNA, 19 nt, Artificial Sequence
  Description of Artificial Sequence: Synthetic oligonucleotide
  Sense strand starting at position 3057 of SEQ ID NO: 914207
cagagacgaucccuuaaga

SEQ ID NO: 986237 - RNA, 19 nt, Artificial Sequence
  Description of Artificial Sequence: Synthetic oligonucleotide
  Antisense strand to SEQ ID NO: 986236
ucuuaagggaucgucucug

SEQ ID NO: 986238 - RNA, 19 nt, Artificial Sequence
  Description of Artificial Sequence: Synthetic oligonucleotide
  Sense strand starting at position 521 of SEQ ID NO: 914207
guauauacacuguauauga

SEQ ID NO: 986239 - RNA, 19 nt, Artificial Sequence
  Description of Artificial Sequence: Synthetic oligonucleotide
  Antisense strand to SEQ ID NO: 986238
ucauauacaguguauauac

SEQ ID NO: 986240 - RNA, 19 nt, Artificial Sequence
  Description of Artificial Sequence: Synthetic oligonucleotide
  Sense strand starting at position 3562 of SEQ ID NO: 914207
ugugauauacacuagucaa

SEQ ID NO: 986241 - RNA, 19 nt, Artificial Sequence
  Description of Artificial Sequence: Synthetic oligonucleotide
  Antisense strand to SEQ ID NO: 986240
uugacuaguguauaucaca

SEQ ID NO: 986242 - RNA, 19 nt, Artificial Sequence
  Description of Artificial Sequence: Synthetic oligonucleotide
  Sense strand starting at position 3098 of SEQ ID NO: 914207
agauaagcauacuuugaua

SEQ ID NO: 986243 - RNA, 19 nt, Artificial Sequence
  Description of Artificial Sequence: Synthetic oligonucleotide
  Antisense strand to SEQ ID NO: 986242
uaucaaaguaugcuuaucu

SEQ ID NO: 986244 - RNA, 19 nt, Artificial Sequence
  Description of Artificial Sequence: Synthetic oligonucleotide
  Sense strand starting at position 3873 of SEQ ID NO: 914207
aaggcacucgaguaagaca

SEQ ID NO: 986245 - RNA, 19 nt, Artificial Sequence
  Description of Artificial Sequence: Synthetic oligonucleotide
  Antisense strand to SEQ ID NO: 986244
ugucuuacucgagugccuu

SEQ ID NO: 986246 - RNA, 19 nt, Artificial Sequence
  Description of Artificial Sequence: Synthetic oligonucleotide
  Sense strand starting at position 943 of SEQ ID NO: 914207
agccuaagcgaggaagaua

SEQ ID NO: 986247 - RNA, 19 nt, Artificial Sequence
  Description of Artificial Sequence: Synthetic oligonucleotide
  Antisense strand to SEQ ID NO: 986246
uaucuuccucgcuuaggcu

SEQ ID NO: 986248 - RNA, 19 nt, Artificial Sequence
  Description of Artificial Sequence: Synthetic oligonucleotide
  Sense strand starting at position 972 of SEQ ID NO: 914207
ccguguaugauagccggua

SEQ ID NO: 986249 - RNA, 19 nt, Artificial Sequence
  Description of Artificial Sequence: Synthetic oligonucleotide
  Antisense strand to SEQ ID NO: 986248
uaccggcuaucauacacgg

SEQ ID NO: 986250 - RNA, 19 nt, Artificial Sequence
  Description of Artificial Sequence: Synthetic oligonucleotide
  Sense strand starting at position 243 of SEQ ID NO: 914207
cuguauaugacccagggua

SEQ ID NO: 986251 - RNA, 19 nt, Artificial Sequence
  Description of Artificial Sequence: Synthetic oligonucleotide
  Antisense strand to SEQ ID NO: 986250
uacccugggucauauacag

SEQ ID NO: 986252 - RNA, 19 nt, Artificial Sequence
  Description of Artificial Sequence: Synthetic oligonucleotide
  Sense strand starting at position 3083 of SEQ ID NO: 914207
uuaagaaagguucggagau

SEQ ID NO: 986253 - RNA, 19 nt, Artificial Sequence
  Description of Artificial Sequence: Synthetic oligonucleotide
  Antisense strand to SEQ ID NO: 986252
aucuccgaaccuuucuuaa

SEQ ID NO: 986254 - RNA, 19 nt, Artificial Sequence
  Description of Artificial Sequence: Synthetic oligonucleotide
  Sense strand starting at position 453 of SEQ ID NO: 914207
cuauguaauguauacauac

SEQ ID NO: 986255 - RNA, 19 nt, Artificial Sequence
  Description of Artificial Sequence: Synthetic oligonucleotide
  Antisense strand to SEQ ID NO: 986254
guauguauacauuacauag

SEQ ID NO: 986256 - RNA, 19 nt, Artificial Sequence
  Description of Artificial Sequence: Synthetic oligonucleotide
  Sense strand starting at position 3089 of SEQ ID NO: 914207
aagguucggagauaagcau

SEQ ID NO: 986257 - RNA, 19 nt, Artificial Sequence
  Description of Artificial Sequence: Synthetic oligonucleotide
  Antisense strand to SEQ ID NO: 986256
augcuuaucuccgaaccuu

SEQ ID NO: 986258 - RNA, 19 nt, Artificial Sequence
  Description of Artificial Sequence: Synthetic oligonucleotide
  Sense strand starting at position 258 of SEQ ID NO: 914207
gguacuagauacccugaau

SEQ ID NO: 986259 - RNA, 19 nt, Artificial Sequence
  Description of Artificial Sequence: Synthetic oligonucleotide
  Antisense strand to SEQ ID NO: 986258
auucaggguaucuaguacc

SEQ ID NO: 986260 - RNA, 19 nt, Artificial Sequence
  Description of Artificial Sequence: Synthetic oligonucleotide
  Sense strand starting at position 3070 of SEQ ID NO: 914207
uuaagacucugguuuaaga

SEQ ID NO: 986261 - RNA, 19 nt, Artificial Sequence
  Description of Artificial Sequence: Synthetic oligonucleotide
  Antisense strand to SEQ ID NO: 986260
ucuuaaaccagagucuuaa

SEQ ID NO: 986262 - RNA, 19 nt, Artificial Sequence
  Description of Artificial Sequence: Synthetic oligonucleotide
  Sense strand starting at position 3191 of SEQ ID NO: 914207
cugaaauucggugaguaca

SEQ ID NO: 986263 - RNA, 19 nt, Artificial Sequence
  Description of Artificial Sequence: Synthetic oligonucleotide
  Antisense strand to SEQ ID NO: 986262
uguacucaccgaauuucag

SEQ ID NO: 986264 - RNA, 19 nt, Artificial Sequence
  Description of Artificial Sequence: Synthetic oligonucleotide
  Sense strand starting at position 3022 of SEQ ID NO: 914207
gguuaucuucuauggagag

SEQ ID NO: 986265 - RNA, 19 nt, Artificial Sequence
  Description of Artificial Sequence: Synthetic oligonucleotide
  Antisense strand to SEQ ID NO: 986264
cucuccauagaagauaacc

SEQ ID NO: 986266 - RNA, 19 nt, Artificial Sequence
  Description of Artificial Sequence: Synthetic oligonucleotide
  Sense strand starting at position 472 of SEQ ID NO: 914207
uguacaugccaccagauau

SEQ ID NO: 986267 - RNA, 19 nt, Artificial Sequence
  Description of Artificial Sequence: Synthetic oligonucleotide
  Antisense strand to SEQ ID NO: 986266
auaucugguggcauguaca

SEQ ID NO: 986268 - RNA, 19 nt, Artificial Sequence
  Description of Artificial Sequence: Synthetic oligonucleotide
  Sense strand starting at position 3964 of SEQ ID NO: 914207
uuauacuuuguagggauca

SEQ ID NO: 986269 - RNA, 19 nt, Artificial Sequence
  Description of Artificial Sequence: Synthetic oligonucleotide
  Antisense strand to SEQ ID NO: 986268
ugaucccuacaaaguauaa

SEQ ID NO: 986270 - RNA, 19 nt, Artificial Sequence
  Description of Artificial Sequence: Synthetic oligonucleotide
  Sense strand starting at position 3881 of SEQ ID NO: 914207
cgaguaagacaacaucgua

SEQ ID NO: 986271 - RNA, 19 nt, Artificial Sequence
  Description of Artificial Sequence: Synthetic oligonucleotide
  Antisense strand to SEQ ID NO: 986270
uacgauguugucuuacucg

SEQ ID NO: 986272 - RNA, 19 nt, Artificial Sequence
  Description of Artificial Sequence: Synthetic oligonucleotide
  Sense strand starting at position 3552 of SEQ ID NO: 914207
ugaauaggucugugauaua

SEQ ID NO: 986273 - RNA, 19 nt, Artificial Sequence
  Description of Artificial Sequence: Synthetic oligonucleotide
  Antisense strand to SEQ ID NO: 986272
uauaucacagaccuauuca

SEQ ID NO: 986274 - RNA, 19 nt, Artificial Sequence
  Description of Artificial Sequence: Synthetic oligonucleotide
  Sense strand starting at position 3869 of SEQ ID NO: 914207
agagaaggcacucgaguaa

SEQ ID NO: 986275 - RNA, 19 nt, Artificial Sequence
  Description of Artificial Sequence: Synthetic oligonucleotide
  Antisense strand to SEQ ID NO: 986274
uuacucgagugccuucucu

SEQ ID NO: 986276 - RNA, 19 nt, Artificial Sequence
  Description of Artificial Sequence: Synthetic oligonucleotide
  Sense strand starting at position 3343 of SEQ ID NO: 914207
ggcagguguguauaggaga

SEQ ID NO: 986277 - RNA, 19 nt, Artificial Sequence
  Description of Artificial Sequence: Synthetic oligonucleotide
  Antisense strand to SEQ ID NO: 986276
ucuccuauacacaccugcc

SEQ ID NO: 986278 - RNA, 19 nt, Artificial Sequence
  Description of Artificial Sequence: Synthetic oligonucleotide
  Sense strand starting at position 3013 of SEQ ID NO: 914207
cgagaaguagguuaucuuc

SEQ ID NO: 986279 - RNA, 19 nt, Artificial Sequence
  Description of Artificial Sequence: Synthetic oligonucleotide
  Antisense strand to SEQ ID NO: 986278
gaagauaaccuacuucucg

SEQ ID NO: 986280 - RNA, 19 nt, Artificial Sequence
  Description of Artificial Sequence: Synthetic oligonucleotide
  Sense strand starting at position 3533 of SEQ ID NO: 914207
uuuagaaaugggugguacu

SEQ ID NO: 986281 - RNA, 19 nt, Artificial Sequence
  Description of Artificial Sequence: Synthetic oligonucleotide
  Antisense strand to SEQ ID NO: 986280
aguaccacccauuucuaaa

SEQ ID NO: 986282 - RNA, 19 nt, Artificial Sequence
  Description of Artificial Sequence: Synthetic oligonucleotide
  Sense strand starting at position 3534 of SEQ ID NO: 914207
uuagaaaugggugguacuu

SEQ ID NO: 986283 - RNA, 19 nt, Artificial Sequence
  Description of Artificial Sequence: Synthetic oligonucleotide
  Antisense strand to SEQ ID NO: 986282
aaguaccacccauuucuaa

SEQ ID NO: 986284 - RNA, 19 nt, Artificial Sequence
  Description of Artificial Sequence: Synthetic oligonucleotide
  Sense strand starting at position 561 of SEQ ID NO: 914207
cguauaugacauugaauac

SEQ ID NO: 986285 - RNA, 19 nt, Artificial Sequence
  Description of Artificial Sequence: Synthetic oligonucleotide
  Antisense strand to SEQ ID NO: 986284
guauucaaugucauauacg

SEQ ID NO: 986286 - RNA, 19 nt, Artificial Sequence
  Description of Artificial Sequence: Synthetic oligonucleotide
  Sense strand starting at position 3015 of SEQ ID NO: 914207
agaaguagguuaucuucua

SEQ ID NO: 986287 - RNA, 19 nt, Artificial Sequence
  Description of Artificial Sequence: Synthetic oligonucleotide
  Antisense strand to SEQ ID NO: 986286
uagaagauaaccuacuucu

SEQ ID NO: 986288 - RNA, 19 nt, Artificial Sequence
  Description of Artificial Sequence: Synthetic oligonucleotide
  Sense strand starting at position 290 of SEQ ID NO: 914207
cuguguacacaguacauau

SEQ ID NO: 986289 - RNA, 19 nt, Artificial Sequence
  Description of Artificial Sequence: Synthetic oligonucleotide
  Antisense strand to SEQ ID NO: 986288
auauguacuguguacacag

SEQ ID NO: 986290 - RNA, 19 nt, Artificial Sequence
  Description of Artificial Sequence: Synthetic oligonucleotide
  Sense strand starting at position 3518 of SEQ ID NO: 914207
cuaagacuguuagaauuua

SEQ ID NO: 986291 - RNA, 19 nt, Artificial Sequence
  Description of Artificial Sequence: Synthetic oligonucleotide
  Antisense strand to SEQ ID NO: 986290
uaaauucuaacagucuuag

SEQ ID NO: 986292 - RNA, 19 nt, Artificial Sequence
  Description of Artificial Sequence: Synthetic oligonucleotide
  Sense strand starting at position 3961 of SEQ ID NO: 914207
caguuauacuuuguaggga

SEQ ID NO: 986293 - RNA, 19 nt, Artificial Sequence
  Description of Artificial Sequence: Synthetic oligonucleotide
  Antisense strand to SEQ ID NO: 986292
ucccuacaaaguauaacug

SEQ ID NO: 986294 - RNA, 19 nt, Artificial Sequence
  Description of Artificial Sequence: Synthetic oligonucleotide
  Sense strand starting at position 3551 of SEQ ID NO: 914207
uugaauaggucugugauau

SEQ ID NO: 986295 - RNA, 19 nt, Artificial Sequence
  Description of Artificial Sequence: Synthetic oligonucleotide
  Antisense strand to SEQ ID NO: 986294
auaucacagaccuauucaa

SEQ ID NO: 986296 - RNA, 19 nt, Artificial Sequence
  Description of Artificial Sequence: Synthetic oligonucleotide
  Sense strand starting at position 374 of SEQ ID NO: 914207
augcauggugcauaugaca

SEQ ID NO: 986297 - RNA, 19 nt, Artificial Sequence
  Description of Artificial Sequence: Synthetic oligonucleotide
  Antisense strand to SEQ ID NO: 986296
ugucauaugcaccaugcau

SEQ ID NO: 986298 - RNA, 19 nt, Artificial Sequence
  Description of Artificial Sequence: Synthetic oligonucleotide
  Sense strand starting at position 3559 of SEQ ID NO: 914207
gucugugauauacacuagu

SEQ ID NO: 986299 - RNA, 19 nt, Artificial Sequence
  Description of Artificial Sequence: Synthetic oligonucleotide
  Antisense strand to SEQ ID NO: 986298
acuaguguauaucacagac

SEQ ID NO: 986300 - RNA, 19 nt, Artificial Sequence
  Description of Artificial Sequence: Synthetic oligonucleotide
  Sense strand starting at position 245 of SEQ ID NO: 914207
guauaugacccaggguacu

SEQ ID NO: 986301 - RNA, 19 nt, Artificial Sequence
  Description of Artificial Sequence: Synthetic oligonucleotide
  Antisense strand to SEQ ID NO: 986300
aguacccugggucauauac

SEQ ID NO: 986302 - RNA, 19 nt, Artificial Sequence
  Description of Artificial Sequence: Synthetic oligonucleotide
  Sense strand starting at position 3550 of SEQ ID NO: 914207
cuugaauaggucugugaua

SEQ ID NO: 986303 - RNA, 19 nt, Artificial Sequence
  Description of Artificial Sequence: Synthetic oligonucleotide
  Antisense strand to SEQ ID NO: 986302
uaucacagaccuauucaag

SEQ ID NO: 986304 - RNA, 19 nt, Artificial Sequence
  Description of Artificial Sequence: Synthetic oligonucleotide
  Sense strand starting at position 343 of SEQ ID NO: 914207
cugaguacagcuuauguga

SEQ ID NO: 986305 - RNA, 19 nt, Artificial Sequence
  Description of Artificial Sequence: Synthetic oligonucleotide
  Antisense strand to SEQ ID NO: 986304
ucacauaagcuguacucag

SEQ ID NO: 986306 - RNA, 19 nt, Artificial Sequence
  Description of Artificial Sequence: Synthetic oligonucleotide
  Sense strand starting at position 3884 of SEQ ID NO: 914207
guaagacaacaucguauca

SEQ ID NO: 986307 - RNA, 19 nt, Artificial Sequence
  Description of Artificial Sequence: Synthetic oligonucleotide
  Antisense strand to SEQ ID NO: 986306
ugauacgauguugucuuac

SEQ ID NO: 986308 - RNA, 19 nt, Artificial Sequence
  Description of Artificial Sequence: Synthetic oligonucleotide
  Sense strand starting at position 3016 of SEQ ID NO: 914207
gaaguagguuaucuucuau

SEQ ID NO: 986309 - RNA, 19 nt, Artificial Sequence
  Description of Artificial Sequence: Synthetic oligonucleotide
  Antisense strand to SEQ ID NO: 986308
auagaagauaaccuacuuc

SEQ ID NO: 986310 - RNA, 19 nt, Artificial Sequence
  Description of Artificial Sequence: Synthetic oligonucleotide
  Sense strand starting at position 3067 of SEQ ID NO: 914207
cccuuaagacucugguuua

SEQ ID NO: 986311 - RNA, 19 nt, Artificial Sequence
  Description of Artificial Sequence: Synthetic oligonucleotide
  Antisense strand to SEQ ID NO: 986310
uaaaccagagucuuaaggg

SEQ ID NO: 986312 - RNA, 19 nt, Artificial Sequence
  Description of Artificial Sequence: Synthetic oligonucleotide
  Sense strand starting at position 853 of SEQ ID NO: 914207
ucguauauaacauggagua

SEQ ID NO: 986313 - RNA, 19 nt, Artificial Sequence
  Description of Artificial Sequence: Synthetic oligonucleotide
  Antisense strand to SEQ ID NO: 986312
uacuccauguuauauacga

SEQ ID NO: 986314 - RNA, 19 nt, Artificial Sequence
  Description of Artificial Sequence: Synthetic oligonucleotide
  Sense strand starting at position 413 of SEQ ID NO: 914207
gcauaugacauuggguacu

SEQ ID NO: 986315 - RNA, 19 nt, Artificial Sequence
  Description of Artificial Sequence: Synthetic oligonucleotide
  Antisense strand to SEQ ID NO: 986314
aguacccaaugucauaugc

SEQ ID NO: 986316 - RNA, 19 nt, Artificial Sequence
  Description of Artificial Sequence: Synthetic oligonucleotide
  Sense strand starting at position 2057 of SEQ ID NO: 914208
cagagacgaucccuuaaga

SEQ ID NO: 986317 - RNA, 19 nt, Artificial Sequence
  Description of Artificial Sequence: Synthetic oligonucleotide
  Antisense strand to SEQ ID NO: 986316
ucuuaagggaucgucucug

SEQ ID NO: 986318 - RNA, 19 nt, Artificial Sequence
  Description of Artificial Sequence: Synthetic oligonucleotide
  Sense strand starting at position 3658 of SEQ ID NO: 914208
ggaccaagacgugggaaua

SEQ ID NO: 986319 - RNA, 19 nt, Artificial Sequence
  Description of Artificial Sequence: Synthetic oligonucleotide
  Antisense strand to SEQ ID NO: 986318
uauucccacgucuuggucc

SEQ ID NO: 986320 - RNA, 19 nt, Artificial Sequence
  Description of Artificial Sequence: Synthetic oligonucleotide
  Sense strand starting at position 2562 of SEQ ID NO: 914208
ugugauauacacuagucaa

SEQ ID NO: 986321 - RNA, 19 nt, Artificial Sequence
  Description of Artificial Sequence: Synthetic oligonucleotide
  Antisense strand to SEQ ID NO: 986320
uugacuaguguauaucaca

SEQ ID NO: 986322 - RNA, 19 nt, Artificial Sequence
  Description of Artificial Sequence: Synthetic oligonucleotide
  Sense strand starting at position 2098 of SEQ ID NO: 914208
agauaagcauacuuugaua

SEQ ID NO: 986323 - RNA, 19 nt, Artificial Sequence
  Description of Artificial Sequence: Synthetic oligonucleotide
  Antisense strand to SEQ ID NO: 986322
uaucaaaguaugcuuaucu

SEQ ID NO: 986324 - RNA, 19 nt, Artificial Sequence
  Description of Artificial Sequence: Synthetic oligonucleotide
  Sense strand starting at position 2873 of SEQ ID NO: 914208
aaggcacucgaguaagaca

SEQ ID NO: 986325 - RNA, 19 nt, Artificial Sequence
  Description of Artificial Sequence: Synthetic oligonucleotide
  Antisense strand to SEQ ID NO: 986324
ugucuuacucgagugccuu

SEQ ID NO: 986326 - RNA, 19 nt, Artificial Sequence
  Description of Artificial Sequence: Synthetic oligonucleotide
  Sense strand starting at position 2083 of SEQ ID NO: 914208
uuaagaaagguucggagau

SEQ ID NO: 986327 - RNA, 19 nt, Artificial Sequence
  Description of Artificial Sequence: Synthetic oligonucleotide
  Antisense strand to SEQ ID NO: 986326
aucuccgaaccuuucuuaa

SEQ ID NO: 986328 - RNA, 19 nt, Artificial Sequence
  Description of Artificial Sequence: Synthetic oligonucleotide
  Sense strand starting at position 2089 of SEQ ID NO: 914208
aagguucggagauaagcau

SEQ ID NO: 986329 - RNA, 19 nt, Artificial Sequence
  Description of Artificial Sequence: Synthetic oligonucleotide
  Antisense strand to SEQ ID NO: 986328
augcuuaucuccgaaccuu

SEQ ID NO: 986330 - RNA, 19 nt, Artificial Sequence
  Description of Artificial Sequence: Synthetic oligonucleotide
  Sense strand starting at position 3748 of SEQ ID NO: 914208
uggcuauugggacaguaua

SEQ ID NO: 986331 - RNA, 19 nt, Artificial Sequence
  Description of Artificial Sequence: Synthetic oligonucleotide
  Antisense strand to SEQ ID NO: 986330
uauacugucccaauagcca

SEQ ID NO: 986332 - RNA, 19 nt, Artificial Sequence
  Description of Artificial Sequence: Synthetic oligonucleotide
  Sense strand starting at position 2070 of SEQ ID NO: 914208
uuaagacucugguuuaaga

SEQ ID NO: 986333 - RNA, 19 nt, Artificial Sequence
  Description of Artificial Sequence: Synthetic oligonucleotide
  Antisense strand to SEQ ID NO: 986332
ucuuaaaccagagucuuaa

SEQ ID NO: 986334 - RNA, 19 nt, Artificial Sequence
  Description of Artificial Sequence: Synthetic oligonucleotide
  Sense strand starting at position 2191 of SEQ ID NO: 914208
cugaaauucggugaguaca

SEQ ID NO: 986335 - RNA, 19 nt, Artificial Sequence
  Description of Artificial Sequence: Synthetic oligonucleotide
  Antisense strand to SEQ ID NO: 986334
uguacucaccgaauuucag

SEQ ID NO: 986336 - RNA, 19 nt, Artificial Sequence
  Description of Artificial Sequence: Synthetic oligonucleotide
  Sense strand starting at position 3458 of SEQ ID NO: 914208
agguuugagguuuggagga

SEQ ID NO: 986337 - RNA, 19 nt, Artificial Sequence
  Description of Artificial Sequence: Synthetic oligonucleotide
  Antisense strand to SEQ ID NO: 986336
uccuccaaaccucaaaccu

SEQ ID NO: 986338 - RNA, 19 nt, Artificial Sequence
  Description of Artificial Sequence: Synthetic oligonucleotide
  Sense strand starting at position 2022 of SEQ ID NO: 914208
gguuaucuucuauggagag

SEQ ID NO: 986339 - RNA, 19 nt, Artificial Sequence
  Description of Artificial Sequence: Synthetic oligonucleotide
  Antisense strand to SEQ ID NO: 986338
cucuccauagaagauaacc

SEQ ID NO: 986340 - RNA, 19 nt, Artificial Sequence
  Description of Artificial Sequence: Synthetic oligonucleotide
  Sense strand starting at position 3451 of SEQ ID NO: 914208
ggaccaaagguuugagguu

SEQ ID NO: 986341 - RNA, 19 nt, Artificial Sequence
  Description of Artificial Sequence: Synthetic oligonucleotide
  Antisense strand to SEQ ID NO: 986340
aaccucaaaccuuuggucc

SEQ ID NO: 986342 - RNA, 19 nt, Artificial Sequence
  Description of Artificial Sequence: Synthetic oligonucleotide
  Sense strand starting at position 3716 of SEQ ID NO: 914208
uagaaugaguguccagauc

SEQ ID NO: 986343 - RNA, 19 nt, Artificial Sequence
  Description of Artificial Sequence: Synthetic oligonucleotide
  Antisense strand to SEQ ID NO: 986342
gaucuggacacucauucua

SEQ ID NO: 986344 - RNA, 19 nt, Artificial Sequence
  Description of Artificial Sequence: Synthetic oligonucleotide
  Sense strand starting at position 2964 of SEQ ID NO: 914208
uuauacuuuguagggauca

SEQ ID NO: 986345 - RNA, 19 nt, Artificial Sequence
  Description of Artificial Sequence: Synthetic oligonucleotide
  Antisense strand to SEQ ID NO: 986344
ugaucccuacaaaguauaa

SEQ ID NO: 986346 - RNA, 19 nt, Artificial Sequence
  Description of Artificial Sequence: Synthetic oligonucleotide
  Sense strand starting at position 2881 of SEQ ID NO: 914208
cgaguaagacaacaucgua

SEQ ID NO: 986347 - RNA, 19 nt, Artificial Sequence
  Description of Artificial Sequence: Synthetic oligonucleotide
  Antisense strand to SEQ ID NO: 986346
uacgauguugucuuacucg

SEQ ID NO: 986348 - RNA, 19 nt, Artificial Sequence
  Description of Artificial Sequence: Synthetic oligonucleotide
  Sense strand starting at position 3776 of SEQ ID NO: 914208
agguaauaauugcucaaac

SEQ ID NO: 986349 - RNA, 19 nt, Artificial Sequence
  Description of Artificial Sequence: Synthetic oligonucleotide
  Antisense strand to SEQ ID NO: 986348
guuugagcaauuauuaccu

SEQ ID NO: 986350 - RNA, 19 nt, Artificial Sequence
  Description of Artificial Sequence: Synthetic oligonucleotide
  Sense strand starting at position 2552 of SEQ ID NO: 914208
ugaauaggucugugauaua

SEQ ID NO: 986351 - RNA, 19 nt, Artificial Sequence
  Description of Artificial Sequence: Synthetic oligonucleotide
  Antisense strand to SEQ ID NO: 986350
uauaucacagaccuauuca

SEQ ID NO: 986352 - RNA, 19 nt, Artificial Sequence
  Description of Artificial Sequence: Synthetic oligonucleotide
  Sense strand starting at position 2869 of SEQ ID NO: 914208
agagaaggcacucgaguaa

SEQ ID NO: 986353 - RNA, 19 nt, Artificial Sequence
  Description of Artificial Sequence: Synthetic oligonucleotide
  Antisense strand to SEQ ID NO: 986352
uuacucgagugccuucucu

SEQ ID NO: 986354 - RNA, 19 nt, Artificial Sequence
  Description of Artificial Sequence: Synthetic oligonucleotide
  Sense strand starting at position 2343 of SEQ ID NO: 914208
ggcagguguguauaggaga

SEQ ID NO: 986355 - RNA, 19 nt, Artificial Sequence
  Description of Artificial Sequence: Synthetic oligonucleotide
  Antisense strand to SEQ ID NO: 986354
ucuccuauacacaccugcc

SEQ ID NO: 986356 - RNA, 19 nt, Artificial Sequence
  Description of Artificial Sequence: Synthetic oligonucleotide
  Sense strand starting at position 2013 of SEQ ID NO: 914208
cgagaaguagguuaucuuc

SEQ ID NO: 986357 - RNA, 19 nt, Artificial Sequence
  Description of Artificial Sequence: Synthetic oligonucleotide
  Antisense strand to SEQ ID NO: 986356
gaagauaaccuacuucucg

SEQ ID NO: 986358 - RNA, 19 nt, Artificial Sequence
  Description of Artificial Sequence: Synthetic oligonucleotide
  Sense strand starting at position 2533 of SEQ ID NO: 914208
uuuagaaaugggugguacu

SEQ ID NO: 986359 - RNA, 19 nt, Artificial Sequence
  Description of Artificial Sequence: Synthetic oligonucleotide
  Antisense strand to SEQ ID NO: 986358
aguaccacccauuucuaaa

SEQ ID NO: 986360 - RNA, 19 nt, Artificial Sequence
  Description of Artificial Sequence: Synthetic oligonucleotide
  Sense strand starting at position 2534 of SEQ ID NO: 914208
uuagaaaugggugguacuu

SEQ ID NO: 986361 - RNA, 19 nt, Artificial Sequence
  Description of Artificial Sequence: Synthetic oligonucleotide
  Antisense strand to SEQ ID NO: 986360
aaguaccacccauuucuaa

SEQ ID NO: 986362 - RNA, 19 nt, Artificial Sequence
  Description of Artificial Sequence: Synthetic oligonucleotide
  Sense strand starting at position 2015 of SEQ ID NO: 914208
agaaguagguuaucuucua

SEQ ID NO: 986363 - RNA, 19 nt, Artificial Sequence
  Description of Artificial Sequence: Synthetic oligonucleotide
  Antisense strand to SEQ ID NO: 986362
uagaagauaaccuacuucu

SEQ ID NO: 986364 - RNA, 19 nt, Artificial Sequence
  Description of Artificial Sequence: Synthetic oligonucleotide
  Sense strand starting at position 2518 of SEQ ID NO: 914208
cuaagacuguuagaauuua

SEQ ID NO: 986365 - RNA, 19 nt, Artificial Sequence
  Description of Artificial Sequence: Synthetic oligonucleotide
  Antisense strand to SEQ ID NO: 986364
uaaauucuaacagucuuag

SEQ ID NO: 986366 - RNA, 19 nt, Artificial Sequence
  Description of Artificial Sequence: Synthetic oligonucleotide
  Sense strand starting at position 2961 of SEQ ID NO: 914208
caguuauacuuuguaggga

SEQ ID NO: 986367 - RNA, 19 nt, Artificial Sequence
  Description of Artificial Sequence: Synthetic oligonucleotide
  Antisense strand to SEQ ID NO: 986366
ucccuacaaaguauaacug

SEQ ID NO: 986368 - RNA, 19 nt, Artificial Sequence
  Description of Artificial Sequence: Synthetic oligonucleotide
  Sense strand starting at position 2551 of SEQ ID NO: 914208
uugaauaggucugugauau

SEQ ID NO: 986369 - RNA, 19 nt, Artificial Sequence
  Description of Artificial Sequence: Synthetic oligonucleotide
  Antisense strand to SEQ ID NO: 986368
auaucacagaccuauucaa

SEQ ID NO: 986370 - RNA, 19 nt, Artificial Sequence
  Description of Artificial Sequence: Synthetic oligonucleotide
  Sense strand starting at position 3777 of SEQ ID NO: 914208
gguaauaauugcucaaacu

SEQ ID NO: 986371 - RNA, 19 nt, Artificial Sequence
  Description of Artificial Sequence: Synthetic oligonucleotide
  Antisense strand to SEQ ID NO: 986370
aguuugagcaauuauuacc

SEQ ID NO: 986372 - RNA, 19 nt, Artificial Sequence
  Description of Artificial Sequence: Synthetic oligonucleotide
  Sense strand starting at position 2559 of SEQ ID NO: 914208
gucugugauauacacuagu

SEQ ID NO: 986373 - RNA, 19 nt, Artificial Sequence
  Description of Artificial Sequence: Synthetic oligonucleotide
  Antisense strand to SEQ ID NO: 986372
acuaguguauaucacagac

SEQ ID NO: 986374 - RNA, 19 nt, Artificial Sequence
  Description of Artificial Sequence: Synthetic oligonucleotide
  Sense strand starting at position 2550 of SEQ ID NO: 914208
cuugaauaggucugugaua

SEQ ID NO: 986375 - RNA, 19 nt, Artificial Sequence
  Description of Artificial Sequence: Synthetic oligonucleotide
  Antisense strand to SEQ ID NO: 986374
uaucacagaccuauucaag

SEQ ID NO: 986376 - RNA, 19 nt, Artificial Sequence
  Description of Artificial Sequence: Synthetic oligonucleotide
  Sense strand starting at position 2884 of SEQ ID NO: 914208
guaagacaacaucguauca

SEQ ID NO: 986377 - RNA, 19 nt, Artificial Sequence
  Description of Artificial Sequence: Synthetic oligonucleotide
  Antisense strand to SEQ ID NO: 986376
ugauacgauguugucuuac

SEQ ID NO: 986378 - RNA, 19 nt, Artificial Sequence
  Description of Artificial Sequence: Synthetic oligonucleotide
  Sense strand starting at position 2016 of SEQ ID NO: 914208
gaaguagguuaucuucuau

SEQ ID NO: 986379 - RNA, 19 nt, Artificial Sequence
  Description of Artificial Sequence: Synthetic oligonucleotide
  Antisense strand to SEQ ID NO: 986378
auagaagauaaccuacuuc

SEQ ID NO: 986380 - RNA, 19 nt, Artificial Sequence
  Description of Artificial Sequence: Synthetic oligonucleotide
  Sense strand starting at position 2067 of SEQ ID NO: 914208
cccuuaagacucugguuua

SEQ ID NO: 986381 - RNA, 19 nt, Artificial Sequence
  Description of Artificial Sequence: Synthetic oligonucleotide
  Antisense strand to SEQ ID NO: 986380
uaaaccagagucuuaaggg

SEQ ID NO: 986382 - RNA, 19 nt, Artificial Sequence
  Description of Artificial Sequence: Synthetic oligonucleotide
  Sense strand starting at position 2178 of SEQ ID NO: 914208
agaguccucugcucugaaa

SEQ ID NO: 986383 - RNA, 19 nt, Artificial Sequence
  Description of Artificial Sequence: Synthetic oligonucleotide
  Antisense strand to SEQ ID NO: 986382
uuucagagcagaggacucu

SEQ ID NO: 986384 - RNA, 19 nt, Artificial Sequence
  Description of Artificial Sequence: Synthetic oligonucleotide
  Sense strand starting at position 3297 of SEQ ID NO: 914208
uacugaugguuagcgaaau

SEQ ID NO: 986385 - RNA, 19 nt, Artificial Sequence
  Description of Artificial Sequence: Synthetic oligonucleotide
  Antisense strand to SEQ ID NO: 986384
auuucgcuaaccaucagua

SEQ ID NO: 986386 - RNA, 19 nt, Artificial Sequence
  Description of Artificial Sequence: Synthetic oligonucleotide
  Sense strand starting at position 2189 of SEQ ID NO: 914208
cucugaaauucggugagua

SEQ ID NO: 986387 - RNA, 19 nt, Artificial Sequence
  Description of Artificial Sequence: Synthetic oligonucleotide
  Antisense strand to SEQ ID NO: 986386
uacucaccgaauuucagag

SEQ ID NO: 986388 - RNA, 19 nt, Artificial Sequence
  Description of Artificial Sequence: Synthetic oligonucleotide
  Sense strand starting at position 2811 of SEQ ID NO: 914208
uuuaaacagucuguuacuu

SEQ ID NO: 986389 - RNA, 19 nt, Artificial Sequence
  Description of Artificial Sequence: Synthetic oligonucleotide
  Antisense strand to SEQ ID NO: 986388
aaguaacagacuguuuaaa

SEQ ID NO: 986390 - RNA, 19 nt, Artificial Sequence
  Description of Artificial Sequence: Synthetic oligonucleotide
  Sense strand starting at position 3916 of SEQ ID NO: 914208
gaguguaaacgucacagca

SEQ ID NO: 986391 - RNA, 19 nt, Artificial Sequence
  Description of Artificial Sequence: Synthetic oligonucleotide
  Antisense strand to SEQ ID NO: 986390
ugcugugacguuuacacuc

SEQ ID NO: 986392 - RNA, 19 nt, Artificial Sequence
  Description of Artificial Sequence: Synthetic oligonucleotide
  Sense strand starting at position 3092 of SEQ ID NO: 914208
uuccaaguaaggugguauu

SEQ ID NO: 986393 - RNA, 19 nt, Artificial Sequence
  Description of Artificial Sequence: Synthetic oligonucleotide
  Antisense strand to SEQ ID NO: 986392
aauaccaccuuacuuggaa

SEQ ID NO: 986394 - RNA, 19 nt, Artificial Sequence
  Description of Artificial Sequence: Synthetic oligonucleotide
  Sense strand starting at position 2190 of SEQ ID NO: 914208
ucugaaauucggugaguac

SEQ ID NO: 986395 - RNA, 19 nt, Artificial Sequence
  Description of Artificial Sequence: Synthetic oligonucleotide
  Antisense strand to SEQ ID NO: 986394
guacucaccgaauuucaga

SEQ ID NO: 986396 - RNA, 19 nt, Artificial Sequence
  Description of Artificial Sequence: Synthetic oligonucleotide
  Sense strand starting at position 2499 of SEQ ID NO: 914209
uaagaaaguuacuccugga

SEQ ID NO: 986397 - RNA, 19 nt, Artificial Sequence
  Description of Artificial Sequence: Synthetic oligonucleotide
  Antisense strand to SEQ ID NO: 986396
uccaggaguaacuuucuua

SEQ ID NO: 986398 - RNA, 19 nt, Artificial Sequence
  Description of Artificial Sequence: Synthetic oligonucleotide
  Sense strand starting at position 3509 of SEQ ID NO: 914209
uccaauaugccuuaaugga

SEQ ID NO: 986399 - RNA, 19 nt, Artificial Sequence
  Description of Artificial Sequence: Synthetic oligonucleotide
  Antisense strand to SEQ ID NO: 986398
uccauuaaggcauauugga

SEQ ID NO: 986400 - RNA, 19 nt, Artificial Sequence
  Description of Artificial Sequence: Synthetic oligonucleotide
  Sense strand starting at position 656 of SEQ ID NO: 914209
ucguuaaguagccuuugua

SEQ ID NO: 986401 - RNA, 19 nt, Artificial Sequence
  Description of Artificial Sequence: Synthetic oligonucleotide
  Antisense strand to SEQ ID NO: 986400
uacaaaggcuacuuaacga

SEQ ID NO: 986402 - RNA, 19 nt, Artificial Sequence
  Description of Artificial Sequence: Synthetic oligonucleotide
  Sense strand starting at position 1773 of SEQ ID NO: 914209
uguugauuagcauaacaga

SEQ ID NO: 986403 - RNA, 19 nt, Artificial Sequence
  Description of Artificial Sequence: Synthetic oligonucleotide
  Antisense strand to SEQ ID NO: 986402
ucuguuaugcuaaucaaca

SEQ ID NO: 986404 - RNA, 19 nt, Artificial Sequence
  Description of Artificial Sequence: Synthetic oligonucleotide
  Sense strand starting at position 2057 of SEQ ID NO: 914209
aguauaagugaguaacauu

SEQ ID NO: 986405 - RNA, 19 nt, Artificial Sequence
  Description of Artificial Sequence: Synthetic oligonucleotide
  Antisense strand to SEQ ID NO: 986404
aauguuacucacuuauacu

SEQ ID NO: 986406 - RNA, 19 nt, Artificial Sequence
  Description of Artificial Sequence: Synthetic oligonucleotide
  Sense strand starting at position 3471 of SEQ ID NO: 914209
guuuaagugcacuuguguu

SEQ ID NO: 986407 - RNA, 19 nt, Artificial Sequence
  Description of Artificial Sequence: Synthetic oligonucleotide
  Antisense strand to SEQ ID NO: 986406
aacacaagugcacuuaaac

SEQ ID NO: 986408 - RNA, 19 nt, Artificial Sequence
  Description of Artificial Sequence: Synthetic oligonucleotide
  Sense strand starting at position 2833 of SEQ ID NO: 914209
ucugguaagcguuugucau

SEQ ID NO: 986409 - RNA, 19 nt, Artificial Sequence
  Description of Artificial Sequence: Synthetic oligonucleotide
  Antisense strand to SEQ ID NO: 986408
augacaaacgcuuaccaga

SEQ ID NO: 986410 - RNA, 19 nt, Artificial Sequence
  Description of Artificial Sequence: Synthetic oligonucleotide
  Sense strand starting at position 930 of SEQ ID NO: 914209
ccaaguuccuaauugaaga

SEQ ID NO: 986411 - RNA, 19 nt, Artificial Sequence
  Description of Artificial Sequence: Synthetic oligonucleotide
  Antisense strand to SEQ ID NO: 986410
ucuucaauuaggaacuugg

SEQ ID NO: 986412 - RNA, 19 nt, Artificial Sequence
  Description of Artificial Sequence: Synthetic oligonucleotide
  Sense strand starting at position 111 of SEQ ID NO: 914209
auuugcauguaguuaucau

SEQ ID NO: 986413 - RNA, 19 nt, Artificial Sequence
  Description of Artificial Sequence: Synthetic oligonucleotide
  Antisense strand to SEQ ID NO: 986412
augauaacuacaugcaaau

SEQ ID NO: 986414 - RNA, 19 nt, Artificial Sequence
  Description of Artificial Sequence: Synthetic oligonucleotide
  Sense strand starting at position 531 of SEQ ID NO: 914209
guaucuuuggcagagacag

SEQ ID NO: 986415 - RNA, 19 nt, Artificial Sequence
  Description of Artificial Sequence: Synthetic oligonucleotide
  Antisense strand to SEQ ID NO: 986414
cugucucugccaaagauac

SEQ ID NO: 986416 - RNA, 19 nt, Artificial Sequence
  Description of Artificial Sequence: Synthetic oligonucleotide
  Sense strand starting at position 808 of SEQ ID NO: 914209
gcaucuaaagaaugugaaa

SEQ ID NO: 986417 - RNA, 19 nt, Artificial Sequence
  Description of Artificial Sequence: Synthetic oligonucleotide
  Antisense strand to SEQ ID NO: 986416
uuucacauucuuuagaugc

SEQ ID NO: 986418 - RNA, 19 nt, Artificial Sequence
  Description of Artificial Sequence: Synthetic oligonucleotide
  Sense strand starting at position 106 of SEQ ID NO: 914209
acaucauuugcauguaguu

SEQ ID NO: 986419 - RNA, 19 nt, Artificial Sequence
  Description of Artificial Sequence: Synthetic oligonucleotide
  Antisense strand to SEQ ID NO: 986418
aacuacaugcaaaugaugu

SEQ ID NO: 986420 - RNA, 19 nt, Artificial Sequence
  Description of Artificial Sequence: Synthetic oligonucleotide
  Sense strand starting at position 3251 of SEQ ID NO: 914209
gguauuccugaauauucuc

SEQ ID NO: 986421 - RNA, 19 nt, Artificial Sequence
  Description of Artificial Sequence: Synthetic oligonucleotide
  Antisense strand to SEQ ID NO: 986420
gagaauauucaggaauacc

SEQ ID NO: 986422 - RNA, 19 nt, Artificial Sequence
  Description of Artificial Sequence: Synthetic oligonucleotide
  Sense strand starting at position 3517 of SEQ ID NO: 914209
gccuuaauggaaggaauuc

SEQ ID NO: 986423 - RNA, 19 nt, Artificial Sequence
  Description of Artificial Sequence: Synthetic oligonucleotide
  Antisense strand to SEQ ID NO: 986422
gaauuccuuccauuaaggc

SEQ ID NO: 986424 - RNA, 19 nt, Artificial Sequence
  Description of Artificial Sequence: Synthetic oligonucleotide
  Sense strand starting at position 2574 of SEQ ID NO: 914209
gguaacauucuuggauuag

SEQ ID NO: 986425 - RNA, 19 nt, Artificial Sequence
  Description of Artificial Sequence: Synthetic oligonucleotide
  Antisense strand to SEQ ID NO: 986424
cuaauccaagaauguuacc

SEQ ID NO: 986426 - RNA, 19 nt, Artificial Sequence
  Description of Artificial Sequence: Synthetic oligonucleotide
  Sense strand starting at position 2966 of SEQ ID NO: 914209
cugaaaucuccuugaccug

SEQ ID NO: 986427 - RNA, 19 nt, Artificial Sequence
  Description of Artificial Sequence: Synthetic oligonucleotide
  Antisense strand to SEQ ID NO: 986426
caggucaaggagauuucag

SEQ ID NO: 986428 - RNA, 19 nt, Artificial Sequence
  Description of Artificial Sequence: Synthetic oligonucleotide
  Sense strand starting at position 3676 of SEQ ID NO: 914209
agguguccacuuuaucuaa

SEQ ID NO: 986429 - RNA, 19 nt, Artificial Sequence
  Description of Artificial Sequence: Synthetic oligonucleotide
  Antisense strand to SEQ ID NO: 986428
uuagauaaaguggacaccu

SEQ ID NO: 986430 - RNA, 19 nt, Artificial Sequence
  Description of Artificial Sequence: Synthetic oligonucleotide
  Sense strand starting at position 1169 of SEQ ID NO: 914209
agauguuucuuacuacaca

SEQ ID NO: 986431 - RNA, 19 nt, Artificial Sequence
  Description of Artificial Sequence: Synthetic oligonucleotide
  Antisense strand to SEQ ID NO: 986430
uguguaguaagaaacaucu

SEQ ID NO: 986432 - RNA, 19 nt, Artificial Sequence
  Description of Artificial Sequence: Synthetic oligonucleotide
  Sense strand starting at position 2338 of SEQ ID NO: 914209
ugacaucgcguuguuugua

SEQ ID NO: 986433 - RNA, 19 nt, Artificial Sequence
  Description of Artificial Sequence: Synthetic oligonucleotide
  Antisense strand to SEQ ID NO: 986432
uacaaacaacgcgauguca

SEQ ID NO: 986434 - RNA, 19 nt, Artificial Sequence
  Description of Artificial Sequence: Synthetic oligonucleotide
  Sense strand starting at position 3565 of SEQ ID NO: 914209
gugacaucuaauggugaac

SEQ ID NO: 986435 - RNA, 19 nt, Artificial Sequence
  Description of Artificial Sequence: Synthetic oligonucleotide
  Antisense strand to SEQ ID NO: 986434
guucaccauuagaugucac

SEQ ID NO: 986436 - RNA, 19 nt, Artificial Sequence
  Description of Artificial Sequence: Synthetic oligonucleotide
  Sense strand starting at position 244 of SEQ ID NO: 914209
caaggaguuguacauagcu

SEQ ID NO: 986437 - RNA, 19 nt, Artificial Sequence
  Description of Artificial Sequence: Synthetic oligonucleotide
  Antisense strand to SEQ ID NO: 986436
agcuauguacaacuccuug

SEQ ID NO: 986438 - RNA, 19 nt, Artificial Sequence
  Description of Artificial Sequence: Synthetic oligonucleotide
  Sense strand starting at position 2748 of SEQ ID NO: 914209
gagguuaaacccuggaugu

SEQ ID NO: 986439 - RNA, 19 nt, Artificial Sequence
  Description of Artificial Sequence: Synthetic oligonucleotide
  Antisense strand to SEQ ID NO: 986438
acauccaggguuuaaccuc

SEQ ID NO: 986440 - RNA, 19 nt, Artificial Sequence
  Description of Artificial Sequence: Synthetic oligonucleotide
  Sense strand starting at position 2056 of SEQ ID NO: 914209
caguauaagugaguaacau

SEQ ID NO: 986441 - RNA, 19 nt, Artificial Sequence
  Description of Artificial Sequence: Synthetic oligonucleotide
  Antisense strand to SEQ ID NO: 986440
auguuacucacuuauacug

SEQ ID NO: 986442 - RNA, 19 nt, Artificial Sequence
  Description of Artificial Sequence: Synthetic oligonucleotide
  Sense strand starting at position 1145 of SEQ ID NO: 914209
cuguuagugggcuauaaag

SEQ ID NO: 986443 - RNA, 19 nt, Artificial Sequence
  Description of Artificial Sequence: Synthetic oligonucleotide
  Antisense strand to SEQ ID NO: 986442
cuuuauagcccacuaacag

SEQ ID NO: 986444 - RNA, 19 nt, Artificial Sequence
  Description of Artificial Sequence: Synthetic oligonucleotide
  Sense strand starting at position 3244 of SEQ ID NO: 914209
guuuaaagguauuccugaa

SEQ ID NO: 986445 - RNA, 19 nt, Artificial Sequence
  Description of Artificial Sequence: Synthetic oligonucleotide
  Antisense strand to SEQ ID NO: 986444
uucaggaauaccuuuaaac

SEQ ID NO: 986446 - RNA, 19 nt, Artificial Sequence
  Description of Artificial Sequence: Synthetic oligonucleotide
  Sense strand starting at position 2395 of SEQ ID NO: 914209
ggcacuuuaguuuauuaua

SEQ ID NO: 986447 - RNA, 19 nt, Artificial Sequence
  Description of Artificial Sequence: Synthetic oligonucleotide
  Antisense strand to SEQ ID NO: 986446
uauaauaaacuaaagugcc

SEQ ID NO: 986448 - RNA, 19 nt, Artificial Sequence
  Description of Artificial Sequence: Synthetic oligonucleotide
  Sense strand starting at position 2625 of SEQ ID NO: 914209
aggaaacagcauuguuauu

SEQ ID NO: 986449 - RNA, 19 nt, Artificial Sequence
  Description of Artificial Sequence: Synthetic oligonucleotide
  Antisense strand to SEQ ID NO: 986448
aauaacaaugcuguuuccu

SEQ ID NO: 986450 - RNA, 19 nt, Artificial Sequence
  Description of Artificial Sequence: Synthetic oligonucleotide
  Sense strand starting at position 2584 of SEQ ID NO: 914209
uuggauuagguguaaguuu

SEQ ID NO: 986451 - RNA, 19 nt, Artificial Sequence
  Description of Artificial Sequence: Synthetic oligonucleotide
  Antisense strand to SEQ ID NO: 986450
aaacuuacaccuaauccaa

SEQ ID NO: 986452 - RNA, 19 nt, Artificial Sequence
  Description of Artificial Sequence: Synthetic oligonucleotide
  Sense strand starting at position 2346 of SEQ ID NO: 914209
cguuguuuguaauuugauc

SEQ ID NO: 986453 - RNA, 19 nt, Artificial Sequence
  Description of Artificial Sequence: Synthetic oligonucleotide
  Antisense strand to SEQ ID NO: 986452
gaucaaauuacaaacaacg

SEQ ID NO: 986454 - RNA, 19 nt, Artificial Sequence
  Description of Artificial Sequence: Synthetic oligonucleotide
  Sense strand starting at position 3695 of SEQ ID NO: 914209
ggcacugugcuagacacaa

SEQ ID NO: 986455 - RNA, 19 nt, Artificial Sequence
  Description of Artificial Sequence: Synthetic oligonucleotide
  Antisense strand to SEQ ID NO: 986454
uugugucuagcacagugcc

SEQ ID NO: 986456 - RNA, 19 nt, Artificial Sequence
  Description of Artificial Sequence: Synthetic oligonucleotide
  Sense strand starting at position 2335 of SEQ ID NO: 914209
uguugacaucgcguuguuu

SEQ ID NO: 986457 - RNA, 19 nt, Artificial Sequence
  Description of Artificial Sequence: Synthetic oligonucleotide
  Antisense strand to SEQ ID NO: 986456
aaacaacgcgaugucaaca

SEQ ID NO: 986458 - RNA, 19 nt, Artificial Sequence
  Description of Artificial Sequence: Synthetic oligonucleotide
  Sense strand starting at position 2796 of SEQ ID NO: 914209
ucucuuaacucagcaugga

SEQ ID NO: 986459 - RNA, 19 nt, Artificial Sequence
  Description of Artificial Sequence: Synthetic oligonucleotide
  Antisense strand to SEQ ID NO: 986458
uccaugcugaguuaagaga

SEQ ID NO: 986460 - RNA, 19 nt, Artificial Sequence
  Description of Artificial Sequence: Synthetic oligonucleotide
  Sense strand starting at position 2792 of SEQ ID NO: 914209
ggauucucuuaacucagca

SEQ ID NO: 986461 - RNA, 19 nt, Artificial Sequence
  Description of Artificial Sequence: Synthetic oligonucleotide
  Antisense strand to SEQ ID NO: 986460
ugcugaguuaagagaaucc

SEQ ID NO: 986462 - RNA, 19 nt, Artificial Sequence
  Description of Artificial Sequence: Synthetic oligonucleotide
  Sense strand starting at position 246 of SEQ ID NO: 914209
aggaguuguacauagcuuu

SEQ ID NO: 986463 - RNA, 19 nt, Artificial Sequence
  Description of Artificial Sequence: Synthetic oligonucleotide
  Antisense strand to SEQ ID NO: 986462
aaagcuauguacaacuccu

SEQ ID NO: 986464 - RNA, 19 nt, Artificial Sequence
  Description of Artificial Sequence: Synthetic oligonucleotide
  Sense strand starting at position 1147 of SEQ ID NO: 914209
guuagugggcuauaaagua

SEQ ID NO: 986465 - RNA, 19 nt, Artificial Sequence
  Description of Artificial Sequence: Synthetic oligonucleotide
  Antisense strand to SEQ ID NO: 986464
uacuuuauagcccacuaac

SEQ ID NO: 986466 - RNA, 19 nt, Artificial Sequence
  Description of Artificial Sequence: Synthetic oligonucleotide
  Sense strand starting at position 2052 of SEQ ID NO: 914209
uuaucaguauaagugagua

SEQ ID NO: 986467 - RNA, 19 nt, Artificial Sequence
  Description of Artificial Sequence: Synthetic oligonucleotide
  Antisense strand to SEQ ID NO: 986466
uacucacuuauacugauaa

SEQ ID NO: 986468 - RNA, 19 nt, Artificial Sequence
  Description of Artificial Sequence: Synthetic oligonucleotide
  Sense strand starting at position 240 of SEQ ID NO: 914209
ggagcaaggaguuguacau

SEQ ID NO: 986469 - RNA, 19 nt, Artificial Sequence
  Description of Artificial Sequence: Synthetic oligonucleotide
  Antisense strand to SEQ ID NO: 986468
auguacaacuccuugcucc

SEQ ID NO: 986470 - RNA, 19 nt, Artificial Sequence
  Description of Artificial Sequence: Synthetic oligonucleotide
  Sense strand starting at position 2901 of SEQ ID NO: 914209
uuaucaugcugaguuuaaa

SEQ ID NO: 986471 - RNA, 19 nt, Artificial Sequence
  Description of Artificial Sequence: Synthetic oligonucleotide
  Antisense strand to SEQ ID NO: 986470
uuuaaacucagcaugauaa

SEQ ID NO: 986472 - RNA, 19 nt, Artificial Sequence
  Description of Artificial Sequence: Synthetic oligonucleotide
  Sense strand starting at position 2965 of SEQ ID NO: 914209
gcugaaaucuccuugaccu

SEQ ID NO: 986473 - RNA, 19 nt, Artificial Sequence
  Description of Artificial Sequence: Synthetic oligonucleotide
  Antisense strand to SEQ ID NO: 986472
aggucaaggagauuucagc

SEQ ID NO: 986474 - RNA, 19 nt, Artificial Sequence
  Description of Artificial Sequence: Synthetic oligonucleotide
  Sense strand starting at position 1166 of SEQ ID NO: 914209
guaagauguuucuuacuac

SEQ ID NO: 986475 - RNA, 19 nt, Artificial Sequence
  Description of Artificial Sequence: Synthetic oligonucleotide
  Antisense strand to SEQ ID NO: 986474
guaguaagaaacaucuuac

SEQ ID NO: 986476 - RNA, 19 nt, Artificial Sequence
  Description of Artificial Sequence: Synthetic oligonucleotide
  Sense strand starting at position 2038 of SEQ ID NO: 914210
cagagacgaucccuuaaga

SEQ ID NO: 986477 - RNA, 19 nt, Artificial Sequence
  Description of Artificial Sequence: Synthetic oligonucleotide
  Antisense strand to SEQ ID NO: 986476
ucuuaagggaucgucucug

SEQ ID NO: 986478 - RNA, 19 nt, Artificial Sequence
  Description of Artificial Sequence: Synthetic oligonucleotide
  Sense strand starting at position 3639 of SEQ ID NO: 914210
ggaccaagacgugggaaua

SEQ ID NO: 986479 - RNA, 19 nt, Artificial Sequence
  Description of Artificial Sequence: Synthetic oligonucleotide
  Antisense strand to SEQ ID NO: 986478
uauucccacgucuuggucc

SEQ ID NO: 986480 - RNA, 19 nt, Artificial Sequence
  Description of Artificial Sequence: Synthetic oligonucleotide
  Sense strand starting at position 2543 of SEQ ID NO: 914210
ugugauauacacuagucaa

SEQ ID NO: 986481 - RNA, 19 nt, Artificial Sequence
  Description of Artificial Sequence: Synthetic oligonucleotide
  Antisense strand to SEQ ID NO: 986480
uugacuaguguauaucaca

SEQ ID NO: 986482 - RNA, 19 nt, Artificial Sequence
  Description of Artificial Sequence: Synthetic oligonucleotide
  Sense strand starting at position 2079 of SEQ ID NO: 914210
agauaagcauacuuugaua

SEQ ID NO: 986483 - RNA, 19 nt, Artificial Sequence
  Description of Artificial Sequence: Synthetic oligonucleotide
  Antisense strand to SEQ ID NO: 986482
uaucaaaguaugcuuaucu

SEQ ID NO: 986484 - RNA, 19 nt, Artificial Sequence
  Description of Artificial Sequence: Synthetic oligonucleotide
  Sense strand starting at position 2854 of SEQ ID NO: 914210
aaggcacucgaguaagaca

SEQ ID NO: 986485 - RNA, 19 nt, Artificial Sequence
  Description of Artificial Sequence: Synthetic oligonucleotide
  Antisense strand to SEQ ID NO: 986484
ugucuuacucgagugccuu

SEQ ID NO: 986486 - RNA, 19 nt, Artificial Sequence
  Description of Artificial Sequence: Synthetic oligonucleotide
  Sense strand starting at position 2064 of SEQ ID NO: 914210
uuaagaaagguucggagau

SEQ ID NO: 986487 - RNA, 19 nt, Artificial Sequence
  Description of Artificial Sequence: Synthetic oligonucleotide
  Antisense strand to SEQ ID NO: 986486
aucuccgaaccuuucuuaa

SEQ ID NO: 986488 - RNA, 19 nt, Artificial Sequence
  Description of Artificial Sequence: Synthetic oligonucleotide
  Sense strand starting at position 2070 of SEQ ID NO: 914210
aagguucggagauaagcau

SEQ ID NO: 986489 - RNA, 19 nt, Artificial Sequence
  Description of Artificial Sequence: Synthetic oligonucleotide
  Antisense strand to SEQ ID NO: 986488
augcuuaucuccgaaccuu

SEQ ID NO: 986490 - RNA, 19 nt, Artificial Sequence
  Description of Artificial Sequence: Synthetic oligonucleotide
  Sense strand starting at position 3729 of SEQ ID NO: 914210
uggcuauugggacaguaua

SEQ ID NO: 986491 - RNA, 19 nt, Artificial Sequence
  Description of Artificial Sequence: Synthetic oligonucleotide
  Antisense strand to SEQ ID NO: 986490
uauacugucccaauagcca

SEQ ID NO: 986492 - RNA, 19 nt, Artificial Sequence
  Description of Artificial Sequence: Synthetic oligonucleotide
  Sense strand starting at position 2051 of SEQ ID NO: 914210
uuaagacucugguuuaaga

SEQ ID NO: 986493 - RNA, 19 nt, Artificial Sequence
  Description of Artificial Sequence: Synthetic oligonucleotide
  Antisense strand to SEQ ID NO: 986492
ucuuaaaccagagucuuaa

SEQ ID NO: 986494 - RNA, 19 nt, Artificial Sequence
  Description of Artificial Sequence: Synthetic oligonucleotide
  Sense strand starting at position 2172 of SEQ ID NO: 914210
cugaaauucggugaguaca

SEQ ID NO: 986495 - RNA, 19 nt, Artificial Sequence
  Description of Artificial Sequence: Synthetic oligonucleotide
  Antisense strand to SEQ ID NO: 986494
uguacucaccgaauuucag

SEQ ID NO: 986496 - RNA, 19 nt, Artificial Sequence
  Description of Artificial Sequence: Synthetic oligonucleotide
  Sense strand starting at position 3439 of SEQ ID NO: 914210
agguuugagguuuggagga

SEQ ID NO: 986497 - RNA, 19 nt, Artificial Sequence
  Description of Artificial Sequence: Synthetic oligonucleotide
  Antisense strand to SEQ ID NO: 986496
uccuccaaaccucaaaccu

SEQ ID NO: 986498 - RNA, 19 nt, Artificial Sequence
  Description of Artificial Sequence: Synthetic oligonucleotide
  Sense strand starting at position 2003 of SEQ ID NO: 914210
gguuaucuucuauggagag

SEQ ID NO: 986499 - RNA, 19 nt, Artificial Sequence
  Description of Artificial Sequence: Synthetic oligonucleotide
  Antisense strand to SEQ ID NO: 986498
cucuccauagaagauaacc

SEQ ID NO: 986500 - RNA, 19 nt, Artificial Sequence
  Description of Artificial Sequence: Synthetic oligonucleotide
  Sense strand starting at position 3432 of SEQ ID NO: 914210
ggaccaaagguuugagguu

SEQ ID NO: 986501 - RNA, 19 nt, Artificial Sequence
  Description of Artificial Sequence: Synthetic oligonucleotide
  Antisense strand to SEQ ID NO: 986500
aaccucaaaccuuuggucc

SEQ ID NO: 986502 - RNA, 19 nt, Artificial Sequence
  Description of Artificial Sequence: Synthetic oligonucleotide
  Sense strand starting at position 3697 of SEQ ID NO: 914210
uagaaugaguguccagauc

SEQ ID NO: 986503 - RNA, 19 nt, Artificial Sequence
  Description of Artificial Sequence: Synthetic oligonucleotide
  Antisense strand to SEQ ID NO: 986502
gaucuggacacucauucua

SEQ ID NO: 986504 - RNA, 19 nt, Artificial Sequence
  Description of Artificial Sequence: Synthetic oligonucleotide
  Sense strand starting at position 2945 of SEQ ID NO: 914210
uuauacuuuguagggauca

SEQ ID NO: 986505 - RNA, 19 nt, Artificial Sequence
  Description of Artificial Sequence: Synthetic oligonucleotide
  Antisense strand to SEQ ID NO: 986504
ugaucccuacaaaguauaa

SEQ ID NO: 986506 - RNA, 19 nt, Artificial Sequence
  Description of Artificial Sequence: Synthetic oligonucleotide
  Sense strand starting at position 2862 of SEQ ID NO: 914210
cgaguaagacaacaucgua

SEQ ID NO: 986507 - RNA, 19 nt, Artificial Sequence
  Description of Artificial Sequence: Synthetic oligonucleotide
  Antisense strand to SEQ ID NO: 986506
uacgauguugucuuacucg

SEQ ID NO: 986508 - RNA, 19 nt, Artificial Sequence
  Description of Artificial Sequence: Synthetic oligonucleotide
  Sense strand starting at position 3757 of SEQ ID NO: 914210
agguaauaauugcucaaac

SEQ ID NO: 986509 - RNA, 19 nt, Artificial Sequence
  Description of Artificial Sequence: Synthetic oligonucleotide
  Antisense strand to SEQ ID NO: 986508
guuugagcaauuauuaccu

SEQ ID NO: 986510 - RNA, 19 nt, Artificial Sequence
  Description of Artificial Sequence: Synthetic oligonucleotide
  Sense strand starting at position 2533 of SEQ ID NO: 914210
ugaauaggucugugauaua

SEQ ID NO: 986511 - RNA, 19 nt, Artificial Sequence
  Description of Artificial Sequence: Synthetic oligonucleotide
  Antisense strand to SEQ ID NO: 986510
uauaucacagaccuauuca

SEQ ID NO: 986512 - RNA, 19 nt, Artificial Sequence
  Description of Artificial Sequence: Synthetic oligonucleotide
  Sense strand starting at position 2850 of SEQ ID NO: 914210
agagaaggcacucgaguaa

SEQ ID NO: 986513 - RNA, 19 nt, Artificial Sequence
  Description of Artificial Sequence: Synthetic oligonucleotide
  Antisense strand to SEQ ID NO: 986512
uuacucgagugccuucucu

SEQ ID NO: 986514 - RNA, 19 nt, Artificial Sequence
  Description of Artificial Sequence: Synthetic oligonucleotide
  Sense strand starting at position 2324 of SEQ ID NO: 914210
ggcagguguguauaggaga

SEQ ID NO: 986515 - RNA, 19 nt, Artificial Sequence
  Description of Artificial Sequence: Synthetic oligonucleotide
  Antisense strand to SEQ ID NO: 986514
ucuccuauacacaccugcc

SEQ ID NO: 986516 - RNA, 19 nt, Artificial Sequence
  Description of Artificial Sequence: Synthetic oligonucleotide
  Sense strand starting at position 1994 of SEQ ID NO: 914210
cgagaaguagguuaucuuc

SEQ ID NO: 986517 - RNA, 19 nt, Artificial Sequence
  Description of Artificial Sequence: Synthetic oligonucleotide
  Antisense strand to SEQ ID NO: 986516
gaagauaaccuacuucucg

SEQ ID NO: 986518 - RNA, 19 nt, Artificial Sequence
  Description of Artificial Sequence: Synthetic oligonucleotide
  Sense strand starting at position 2514 of SEQ ID NO: 914210
uuuagaaaugggugguacu

SEQ ID NO: 986519 - RNA, 19 nt, Artificial Sequence
  Description of Artificial Sequence: Synthetic oligonucleotide
  Antisense strand to SEQ ID NO: 986518
aguaccacccauuucuaaa

SEQ ID NO: 986520 - RNA, 19 nt, Artificial Sequence
  Description of Artificial Sequence: Synthetic oligonucleotide
  Sense strand starting at position 2515 of SEQ ID NO: 914210
uuagaaaugggugguacuu

SEQ ID NO: 986521 - RNA, 19 nt, Artificial Sequence
  Description of Artificial Sequence: Synthetic oligonucleotide
  Antisense strand to SEQ ID NO: 986520
aaguaccacccauuucuaa

SEQ ID NO: 986522 - RNA, 19 nt, Artificial Sequence
  Description of Artificial Sequence: Synthetic oligonucleotide
  Sense strand starting at position 1996 of SEQ ID NO: 914210
agaaguagguuaucuucua

SEQ ID NO: 986523 - RNA, 19 nt, Artificial Sequence
  Description of Artificial Sequence: Synthetic oligonucleotide
  Antisense strand to SEQ ID NO: 986522
uagaagauaaccuacuucu

SEQ ID NO: 986524 - RNA, 19 nt, Artificial Sequence
  Description of Artificial Sequence: Synthetic oligonucleotide
  Sense strand starting at position 2499 of SEQ ID NO: 914210
cuaagacuguuagaauuua

SEQ ID NO: 986525 - RNA, 19 nt, Artificial Sequence
  Description of Artificial Sequence: Synthetic oligonucleotide
  Antisense strand to SEQ ID NO: 986524
uaaauucuaacagucuuag

SEQ ID NO: 986526 - RNA, 19 nt, Artificial Sequence
  Description of Artificial Sequence: Synthetic oligonucleotide
  Sense strand starting at position 2942 of SEQ ID NO: 914210
caguuauacuuuguaggga

SEQ ID NO: 986527 - RNA, 19 nt, Artificial Sequence
  Description of Artificial Sequence: Synthetic oligonucleotide
  Antisense strand to SEQ ID NO: 986526
ucccuacaaaguauaacug

SEQ ID NO: 986528 - RNA, 19 nt, Artificial Sequence
  Description of Artificial Sequence: Synthetic oligonucleotide
  Sense strand starting at position 2532 of SEQ ID NO: 914210
uugaauaggucugugauau

SEQ ID NO: 986529 - RNA, 19 nt, Artificial Sequence
  Description of Artificial Sequence: Synthetic oligonucleotide
  Antisense strand to SEQ ID NO: 986528
auaucacagaccuauucaa

SEQ ID NO: 986530 - RNA, 19 nt, Artificial Sequence
  Description of Artificial Sequence: Synthetic oligonucleotide
  Sense strand starting at position 3758 of SEQ ID NO: 914210
gguaauaauugcucaaacu

SEQ ID NO: 986531 - RNA, 19 nt, Artificial Sequence
  Description of Artificial Sequence: Synthetic oligonucleotide
  Antisense strand to SEQ ID NO: 986530
aguuugagcaauuauuacc

SEQ ID NO: 986532 - RNA, 19 nt, Artificial Sequence
  Description of Artificial Sequence: Synthetic oligonucleotide
  Sense strand starting at position 2540 of SEQ ID NO: 914210
gucugugauauacacuagu

SEQ ID NO: 986533 - RNA, 19 nt, Artificial Sequence
  Description of Artificial Sequence: Synthetic oligonucleotide
  Antisense strand to SEQ ID NO: 986532
acuaguguauaucacagac

SEQ ID NO: 986534 - RNA, 19 nt, Artificial Sequence
  Description of Artificial Sequence: Synthetic oligonucleotide
  Sense strand starting at position 2531 of SEQ ID NO: 914210
cuugaauaggucugugaua

SEQ ID NO: 986535 - RNA, 19 nt, Artificial Sequence
  Description of Artificial Sequence: Synthetic oligonucleotide
  Antisense strand to SEQ ID NO: 986534
uaucacagaccuauucaag

SEQ ID NO: 986536 - RNA, 19 nt, Artificial Sequence
  Description of Artificial Sequence: Synthetic oligonucleotide
  Sense strand starting at position 2865 of SEQ ID NO: 914210
guaagacaacaucguauca

SEQ ID NO: 986537 - RNA, 19 nt, Artificial Sequence
  Description of Artificial Sequence: Synthetic oligonucleotide
  Antisense strand to SEQ ID NO: 986536
ugauacgauguugucuuac

SEQ ID NO: 986538 - RNA, 19 nt, Artificial Sequence
  Description of Artificial Sequence: Synthetic oligonucleotide
  Sense strand starting at position 1997 of SEQ ID NO: 914210
gaaguagguuaucuucuau

SEQ ID NO: 986539 - RNA, 19 nt, Artificial Sequence
  Description of Artificial Sequence: Synthetic oligonucleotide
  Antisense strand to SEQ ID NO: 986538
auagaagauaaccuacuuc

SEQ ID NO: 986540 - RNA, 19 nt, Artificial Sequence
  Description of Artificial Sequence: Synthetic oligonucleotide
  Sense strand starting at position 3974 of SEQ ID NO: 914210
gugugucuagugaguguca

SEQ ID NO: 986541 - RNA, 19 nt, Artificial Sequence
  Description of Artificial Sequence: Synthetic oligonucleotide
  Antisense strand to SEQ ID NO: 986540
ugacacucacuagacacac

SEQ ID NO: 986542 - RNA, 19 nt, Artificial Sequence
  Description of Artificial Sequence: Synthetic oligonucleotide
  Sense strand starting at position 2048 of SEQ ID NO: 914210
cccuuaagacucugguuua

SEQ ID NO: 986543 - RNA, 19 nt, Artificial Sequence
  Description of Artificial Sequence: Synthetic oligonucleotide
  Antisense strand to SEQ ID NO: 986542
uaaaccagagucuuaaggg

SEQ ID NO: 986544 - RNA, 19 nt, Artificial Sequence
  Description of Artificial Sequence: Synthetic oligonucleotide
  Sense strand starting at position 2159 of SEQ ID NO: 914210
agaguccucugcucugaaa

SEQ ID NO: 986545 - RNA, 19 nt, Artificial Sequence
  Description of Artificial Sequence: Synthetic oligonucleotide
  Antisense strand to SEQ ID NO: 986544
uuucagagcagaggacucu

SEQ ID NO: 986546 - RNA, 19 nt, Artificial Sequence
  Description of Artificial Sequence: Synthetic oligonucleotide
  Sense strand starting at position 3278 of SEQ ID NO: 914210
uacugaugguuagcgaaau

SEQ ID NO: 986547 - RNA, 19 nt, Artificial Sequence
  Description of Artificial Sequence: Synthetic oligonucleotide
  Antisense strand to SEQ ID NO: 986546
auuucgcuaaccaucagua

SEQ ID NO: 986548 - RNA, 19 nt, Artificial Sequence
  Description of Artificial Sequence: Synthetic oligonucleotide
  Sense strand starting at position 2170 of SEQ ID NO: 914210
cucugaaauucggugagua

SEQ ID NO: 986549 - RNA, 19 nt, Artificial Sequence
  Description of Artificial Sequence: Synthetic oligonucleotide
  Antisense strand to SEQ ID NO: 986548
uacucaccgaauuucagag

SEQ ID NO: 986550 - RNA, 19 nt, Artificial Sequence
  Description of Artificial Sequence: Synthetic oligonucleotide
  Sense strand starting at position 2792 of SEQ ID NO: 914210
uuuaaacagucuguuacuu

SEQ ID NO: 986551 - RNA, 19 nt, Artificial Sequence
  Description of Artificial Sequence: Synthetic oligonucleotide
  Antisense strand to SEQ ID NO: 986550
aaguaacagacuguuuaaa

SEQ ID NO: 986552 - RNA, 19 nt, Artificial Sequence
  Description of Artificial Sequence: Synthetic oligonucleotide
  Sense strand starting at position 3897 of SEQ ID NO: 914210
gaguguaaacgucacagca

SEQ ID NO: 986553 - RNA, 19 nt, Artificial Sequence
  Description of Artificial Sequence: Synthetic oligonucleotide
  Antisense strand to SEQ ID NO: 986552
ugcugugacguuuacacuc

SEQ ID NO: 986554 - RNA, 19 nt, Artificial Sequence
  Description of Artificial Sequence: Synthetic oligonucleotide
  Sense strand starting at position 3073 of SEQ ID NO: 914210
uuccaaguaaggugguauu

SEQ ID NO: 986555 - RNA, 19 nt, Artificial Sequence
  Description of Artificial Sequence: Synthetic oligonucleotide
  Antisense strand to SEQ ID NO: 986554
aauaccaccuuacuuggaa

SEQ ID NO: 986556 - RNA, 19 nt, Artificial Sequence
  Description of Artificial Sequence: Synthetic oligonucleotide
  Sense strand starting at position 2596 of SEQ ID NO: 914211
cgaacugauuacucaagag

SEQ ID NO: 986557 - RNA, 19 nt, Artificial Sequence
  Description of Artificial Sequence: Synthetic oligonucleotide
  Antisense strand to SEQ ID NO: 986556
cucuugaguaaucaguucg

SEQ ID NO: 986558 - RNA, 19 nt, Artificial Sequence
  Description of Artificial Sequence: Synthetic oligonucleotide
  Sense strand starting at position 99 of SEQ ID NO: 914211
uccauagcucuagaugaca

SEQ ID NO: 986559 - RNA, 19 nt, Artificial Sequence
  Description of Artificial Sequence: Synthetic oligonucleotide
  Antisense strand to SEQ ID NO: 986558
ugucaucuagagcuaugga

SEQ ID NO: 986560 - RNA, 19 nt, Artificial Sequence
  Description of Artificial Sequence: Synthetic oligonucleotide
  Sense strand starting at position 751 of SEQ ID NO: 914211
ccaggacuuuaucuggaua

SEQ ID NO: 986561 - RNA, 19 nt, Artificial Sequence
  Description of Artificial Sequence: Synthetic oligonucleotide
  Antisense strand to SEQ ID NO: 986560
uauccagauaaaguccugg

SEQ ID NO: 986562 - RNA, 19 nt, Artificial Sequence
  Description of Artificial Sequence: Synthetic oligonucleotide
  Sense strand starting at position 2571 of SEQ ID NO: 914211
guuauugaacuuuagacuu

SEQ ID NO: 986563 - RNA, 19 nt, Artificial Sequence
  Description of Artificial Sequence: Synthetic oligonucleotide
  Antisense strand to SEQ ID NO: 986562
aagucuaaaguucaauaac

SEQ ID NO: 986564 - RNA, 19 nt, Artificial Sequence
  Description of Artificial Sequence: Synthetic oligonucleotide
  Sense strand starting at position 3490 of SEQ ID NO: 914211
uauugcagugauuaaauga

SEQ ID NO: 986565 - RNA, 19 nt, Artificial Sequence
  Description of Artificial Sequence: Synthetic oligonucleotide
  Antisense strand to SEQ ID NO: 986564
ucauuuaaucacugcaaua

SEQ ID NO: 986566 - RNA, 19 nt, Artificial Sequence
  Description of Artificial Sequence: Synthetic oligonucleotide
  Sense strand starting at position 2625 of SEQ ID NO: 914211
auguguaauggacauccca

SEQ ID NO: 986567 - RNA, 19 nt, Artificial Sequence
  Description of Artificial Sequence: Synthetic oligonucleotide
  Antisense strand to SEQ ID NO: 986566
ugggauguccauuacacau

SEQ ID NO: 986568 - RNA, 19 nt, Artificial Sequence
  Description of Artificial Sequence: Synthetic oligonucleotide
  Sense strand starting at position 3867 of SEQ ID NO: 914211
uaaagcauuggguaaacga

SEQ ID NO: 986569 - RNA, 19 nt, Artificial Sequence
  Description of Artificial Sequence: Synthetic oligonucleotide
  Antisense strand to SEQ ID NO: 986568
ucguuuacccaaugcuuua

SEQ ID NO: 986570 - RNA, 19 nt, Artificial Sequence
  Description of Artificial Sequence: Synthetic oligonucleotide
  Sense strand starting at position 2595 of SEQ ID NO: 914211
ucgaacugauuacucaaga

SEQ ID NO: 986571 - RNA, 19 nt, Artificial Sequence
  Description of Artificial Sequence: Synthetic oligonucleotide
  Antisense strand to SEQ ID NO: 986570
ucuugaguaaucaguucga

SEQ ID NO: 986572 - RNA, 19 nt, Artificial Sequence
  Description of Artificial Sequence: Synthetic oligonucleotide
  Sense strand starting at position 70 of SEQ ID NO: 914211
uccuguuuaucuguauuua

SEQ ID NO: 986573 - RNA, 19 nt, Artificial Sequence
  Description of Artificial Sequence: Synthetic oligonucleotide
  Antisense strand to SEQ ID NO: 986572
uaaauacagauaaacagga

SEQ ID NO: 986574 - RNA, 19 nt, Artificial Sequence
  Description of Artificial Sequence: Synthetic oligonucleotide
  Sense strand starting at position 3626 of SEQ ID NO: 914211
gggcaauggccagagaucu

SEQ ID NO: 986575 - RNA, 19 nt, Artificial Sequence
  Description of Artificial Sequence: Synthetic oligonucleotide
  Antisense strand to SEQ ID NO: 986574
agaucucuggccauugccc

SEQ ID NO: 986576 - RNA, 19 nt, Artificial Sequence
  Description of Artificial Sequence: Synthetic oligonucleotide
  Sense strand starting at position 2220 of SEQ ID NO: 914211
caagaugggagugguuaua

SEQ ID NO: 986577 - RNA, 19 nt, Artificial Sequence
  Description of Artificial Sequence: Synthetic oligonucleotide
  Antisense strand to SEQ ID NO: 986576
uauaaccacucccaucuug

SEQ ID NO: 986578 - RNA, 19 nt, Artificial Sequence
  Description of Artificial Sequence: Synthetic oligonucleotide
  Sense strand starting at position 2581 of SEQ ID NO: 914211
uuuagacuuguauaucgaa

SEQ ID NO: 986579 - RNA, 19 nt, Artificial Sequence
  Description of Artificial Sequence: Synthetic oligonucleotide
  Antisense strand to SEQ ID NO: 986578
uucgauauacaagucuaaa

SEQ ID NO: 986580 - RNA, 19 nt, Artificial Sequence
  Description of Artificial Sequence: Synthetic oligonucleotide
  Sense strand starting at position 183 of SEQ ID NO: 914211
guuuacuuagucuaugaag

SEQ ID NO: 986581 - RNA, 19 nt, Artificial Sequence
  Description of Artificial Sequence: Synthetic oligonucleotide
  Antisense strand to SEQ ID NO: 986580
cuucauagacuaaguaaac

SEQ ID NO: 986582 - RNA, 19 nt, Artificial Sequence
  Description of Artificial Sequence: Synthetic oligonucleotide
  Sense strand starting at position 1303 of SEQ ID NO: 914211
guuaaaccugagugacaga

SEQ ID NO: 986583 - RNA, 19 nt, Artificial Sequence
  Description of Artificial Sequence: Synthetic oligonucleotide
  Antisense strand to SEQ ID NO: 986582
ucugucacucagguuuaac

SEQ ID NO: 986584 - RNA, 19 nt, Artificial Sequence
  Description of Artificial Sequence: Synthetic oligonucleotide
  Sense strand starting at position 2310 of SEQ ID NO: 914211
ccagaauuggaaugguucu

SEQ ID NO: 986585 - RNA, 19 nt, Artificial Sequence
  Description of Artificial Sequence: Synthetic oligonucleotide
  Antisense strand to SEQ ID NO: 986584
agaaccauuccaauucugg

SEQ ID NO: 986586 - RNA, 19 nt, Artificial Sequence
  Description of Artificial Sequence: Synthetic oligonucleotide
  Sense strand starting at position 3478 of SEQ ID NO: 914211
gaguaucuggacuauugca

SEQ ID NO: 986587 - RNA, 19 nt, Artificial Sequence
  Description of Artificial Sequence: Synthetic oligonucleotide
  Antisense strand to SEQ ID NO: 986586
ugcaauaguccagauacuc

SEQ ID NO: 986588 - RNA, 19 nt, Artificial Sequence
  Description of Artificial Sequence: Synthetic oligonucleotide
  Sense strand starting at position 74 of SEQ ID NO: 914211
guuuaucuguauuuagcau

SEQ ID NO: 986589 - RNA, 19 nt, Artificial Sequence
  Description of Artificial Sequence: Synthetic oligonucleotide
  Antisense strand to SEQ ID NO: 986588
augcuaaauacagauaaac

SEQ ID NO: 986590 - RNA, 19 nt, Artificial Sequence
  Description of Artificial Sequence: Synthetic oligonucleotide
  Sense strand starting at position 185 of SEQ ID NO: 914211
uuacuuagucuaugaagac

SEQ ID NO: 986591 - RNA, 19 nt, Artificial Sequence
  Description of Artificial Sequence: Synthetic oligonucleotide
  Antisense strand to SEQ ID NO: 986590
gucuucauagacuaaguaa

SEQ ID NO: 986592 - RNA, 19 nt, Artificial Sequence
  Description of Artificial Sequence: Synthetic oligonucleotide
  Sense strand starting at position 3464 of SEQ ID NO: 914211
acucgcaaucuagagagua

SEQ ID NO: 986593 - RNA, 19 nt, Artificial Sequence
  Description of Artificial Sequence: Synthetic oligonucleotide
  Antisense strand to SEQ ID NO: 986592
uacucucuagauugcgagu

SEQ ID NO: 986594 - RNA, 19 nt, Artificial Sequence
  Description of Artificial Sequence: Synthetic oligonucleotide
  Sense strand starting at position 2438 of SEQ ID NO: 914211
cagucaucugaccagcuga

SEQ ID NO: 986595 - RNA, 19 nt, Artificial Sequence
  Description of Artificial Sequence: Synthetic oligonucleotide
  Antisense strand to SEQ ID NO: 986594
ucagcuggucagaugacug

SEQ ID NO: 986596 - RNA, 19 nt, Artificial Sequence
  Description of Artificial Sequence: Synthetic oligonucleotide
  Sense strand starting at position 477 of SEQ ID NO: 914211
gcugacuuguggcuauuua

SEQ ID NO: 986597 - RNA, 19 nt, Artificial Sequence
  Description of Artificial Sequence: Synthetic oligonucleotide
  Antisense strand to SEQ ID NO: 986596
uaaauagccacaagucagc

SEQ ID NO: 986598 - RNA, 19 nt, Artificial Sequence
  Description of Artificial Sequence: Synthetic oligonucleotide
  Sense strand starting at position 2558 of SEQ ID NO: 914211
gugggacauaaauguuauu

SEQ ID NO: 986599 - RNA, 19 nt, Artificial Sequence
  Description of Artificial Sequence: Synthetic oligonucleotide
  Antisense strand to SEQ ID NO: 986598
aauaacauuuaugucccac

SEQ ID NO: 986600 - RNA, 19 nt, Artificial Sequence
  Description of Artificial Sequence: Synthetic oligonucleotide
  Sense strand starting at position 806 of SEQ ID NO: 914211
aagaguaagccgcauauaa

SEQ ID NO: 986601 - RNA, 19 nt, Artificial Sequence
  Description of Artificial Sequence: Synthetic oligonucleotide
  Antisense strand to SEQ ID NO: 986600
uuauaugcggcuuacucuu

SEQ ID NO: 986602 - RNA, 19 nt, Artificial Sequence
  Description of Artificial Sequence: Synthetic oligonucleotide
  Sense strand starting at position 652 of SEQ ID NO: 914211
gguuucuuugcauacaaac

SEQ ID NO: 986603 - RNA, 19 nt, Artificial Sequence
  Description of Artificial Sequence: Synthetic oligonucleotide
  Antisense strand to SEQ ID NO: 986602
guuuguaugcaaagaaacc

SEQ ID NO: 986604 - RNA, 19 nt, Artificial Sequence
  Description of Artificial Sequence: Synthetic oligonucleotide
  Sense strand starting at position 3191 of SEQ ID NO: 914211
ugccuuauuguuuacaaag

SEQ ID NO: 986605 - RNA, 19 nt, Artificial Sequence
  Description of Artificial Sequence: Synthetic oligonucleotide
  Antisense strand to SEQ ID NO: 986604
cuuuguaaacaauaaggca

SEQ ID NO: 986606 - RNA, 19 nt, Artificial Sequence
  Description of Artificial Sequence: Synthetic oligonucleotide
  Sense strand starting at position 2698 of SEQ ID NO: 914211
acagucuucuucccaggga

SEQ ID NO: 986607 - RNA, 19 nt, Artificial Sequence
  Description of Artificial Sequence: Synthetic oligonucleotide
  Antisense strand to SEQ ID NO: 986606
ucccugggaagaagacugu

SEQ ID NO: 986608 - RNA, 19 nt, Artificial Sequence
  Description of Artificial Sequence: Synthetic oligonucleotide
  Sense strand starting at position 6 of SEQ ID NO: 914211
cuaguaacugccuaaggua

SEQ ID NO: 986609 - RNA, 19 nt, Artificial Sequence
  Description of Artificial Sequence: Synthetic oligonucleotide
  Antisense strand to SEQ ID NO: 986608
uaccuuaggcaguuacuag

SEQ ID NO: 986610 - RNA, 19 nt, Artificial Sequence
  Description of Artificial Sequence: Synthetic oligonucleotide
  Sense strand starting at position 3466 of SEQ ID NO: 914211
ucgcaaucuagagaguauc

SEQ ID NO: 986611 - RNA, 19 nt, Artificial Sequence
  Description of Artificial Sequence: Synthetic oligonucleotide
  Antisense strand to SEQ ID NO: 986610
gauacucucuagauugcga

SEQ ID NO: 986612 - RNA, 19 nt, Artificial Sequence
  Description of Artificial Sequence: Synthetic oligonucleotide
  Sense strand starting at position 742 of SEQ ID NO: 914211
acuuuagguccaggacuuu

SEQ ID NO: 986613 - RNA, 19 nt, Artificial Sequence
  Description of Artificial Sequence: Synthetic oligonucleotide
  Antisense strand to SEQ ID NO: 986612
aaaguccuggaccuaaagu

SEQ ID NO: 986614 - RNA, 19 nt, Artificial Sequence
  Description of Artificial Sequence: Synthetic oligonucleotide
  Sense strand starting at position 3486 of SEQ ID NO: 914211
ggacuauugcagugauuaa

SEQ ID NO: 986615 - RNA, 19 nt, Artificial Sequence
  Description of Artificial Sequence: Synthetic oligonucleotide
  Antisense strand to SEQ ID NO: 986614
uuaaucacugcaauagucc

SEQ ID NO: 986616 - RNA, 19 nt, Artificial Sequence
  Description of Artificial Sequence: Synthetic oligonucleotide
  Sense strand starting at position 3265 of SEQ ID NO: 914211
agauuaucauaucugucuu

SEQ ID NO: 986617 - RNA, 19 nt, Artificial Sequence
  Description of Artificial Sequence: Synthetic oligonucleotide
  Antisense strand to SEQ ID NO: 986616
aagacagauaugauaaucu

SEQ ID NO: 986618 - RNA, 19 nt, Artificial Sequence
  Description of Artificial Sequence: Synthetic oligonucleotide
  Sense strand starting at position 1299 of SEQ ID NO: 914211
cgaaguuaaaccugaguga

SEQ ID NO: 986619 - RNA, 19 nt, Artificial Sequence
  Description of Artificial Sequence: Synthetic oligonucleotide
  Antisense strand to SEQ ID NO: 986618
ucacucagguuuaacuucg

SEQ ID NO: 986620 - RNA, 19 nt, Artificial Sequence
  Description of Artificial Sequence: Synthetic oligonucleotide
  Sense strand starting at position 2616 of SEQ ID NO: 914211
ugcauuugcauguguaaug

SEQ ID NO: 986621 - RNA, 19 nt, Artificial Sequence
  Description of Artificial Sequence: Synthetic oligonucleotide
  Antisense strand to SEQ ID NO: 986620
cauuacacaugcaaaugca

SEQ ID NO: 986622 - RNA, 19 nt, Artificial Sequence
  Description of Artificial Sequence: Synthetic oligonucleotide
  Sense strand starting at position 26 of SEQ ID NO: 914211
ccaaaugaauaagaaauga

SEQ ID NO: 986623 - RNA, 19 nt, Artificial Sequence
  Description of Artificial Sequence: Synthetic oligonucleotide
  Antisense strand to SEQ ID NO: 986622
ucauuucuuauucauuugg

SEQ ID NO: 986624 - RNA, 19 nt, Artificial Sequence
  Description of Artificial Sequence: Synthetic oligonucleotide
  Sense strand starting at position 111 of SEQ ID NO: 914211
gaugacaguuuagcucuaa

SEQ ID NO: 986625 - RNA, 19 nt, Artificial Sequence
  Description of Artificial Sequence: Synthetic oligonucleotide
  Antisense strand to SEQ ID NO: 986624
uuagagcuaaacugucauc

SEQ ID NO: 986626 - RNA, 19 nt, Artificial Sequence
  Description of Artificial Sequence: Synthetic oligonucleotide
  Sense strand starting at position 14 of SEQ ID NO: 914211
ugccuaagguauccaaaug

SEQ ID NO: 986627 - RNA, 19 nt, Artificial Sequence
  Description of Artificial Sequence: Synthetic oligonucleotide
  Antisense strand to SEQ ID NO: 986626
cauuuggauaccuuaggca

SEQ ID NO: 986628 - RNA, 19 nt, Artificial Sequence
  Description of Artificial Sequence: Synthetic oligonucleotide
  Sense strand starting at position 3323 of SEQ ID NO: 914211
gaaguaauacagugguuug

SEQ ID NO: 986629 - RNA, 19 nt, Artificial Sequence
  Description of Artificial Sequence: Synthetic oligonucleotide
  Antisense strand to SEQ ID NO: 986628
caaaccacuguauuacuuc

SEQ ID NO: 986630 - RNA, 19 nt, Artificial Sequence
  Description of Artificial Sequence: Synthetic oligonucleotide
  Sense strand starting at position 3746 of SEQ ID NO: 914211
uuaguaagguaguuacuaa

SEQ ID NO: 986631 - RNA, 19 nt, Artificial Sequence
  Description of Artificial Sequence: Synthetic oligonucleotide
  Antisense strand to SEQ ID NO: 986630
uuaguaacuaccuuacuaa

SEQ ID NO: 986632 - RNA, 19 nt, Artificial Sequence
  Description of Artificial Sequence: Synthetic oligonucleotide
  Sense strand starting at position 181 of SEQ ID NO: 914211
agguuuacuuagucuauga

SEQ ID NO: 986633 - RNA, 19 nt, Artificial Sequence
  Description of Artificial Sequence: Synthetic oligonucleotide
  Antisense strand to SEQ ID NO: 986632
ucauagacuaaguaaaccu

SEQ ID NO: 986634 - RNA, 19 nt, Artificial Sequence
  Description of Artificial Sequence: Synthetic oligonucleotide
  Sense strand starting at position 1066 of SEQ ID NO: 914211
gacacuguguaacuugauu

SEQ ID NO: 986635 - RNA, 19 nt, Artificial Sequence
  Description of Artificial Sequence: Synthetic oligonucleotide
  Antisense strand to SEQ ID NO: 986634
aaucaaguuacacaguguc

SEQ ID NO: 986636 - RNA, 19 nt, Artificial Sequence
  Description of Artificial Sequence: Synthetic oligonucleotide
  Sense strand starting at position 2974 of SEQ ID NO: 914212
cccagugacuauuugcauu

SEQ ID NO: 986637 - RNA, 19 nt, Artificial Sequence
  Description of Artificial Sequence: Synthetic oligonucleotide
  Antisense strand to SEQ ID NO: 986636
aaugcaaauagucacuggg

SEQ ID NO: 986638 - RNA, 19 nt, Artificial Sequence
  Description of Artificial Sequence: Synthetic oligonucleotide
  Sense strand starting at position 81 of SEQ ID NO: 914212
ucucaaacaccaugggauu

SEQ ID NO: 986639 - RNA, 19 nt, Artificial Sequence
  Description of Artificial Sequence: Synthetic oligonucleotide
  Antisense strand to SEQ ID NO: 986638
aaucccaugguguuugaga

SEQ ID NO: 986640 - RNA, 19 nt, Artificial Sequence
  Description of Artificial Sequence: Synthetic oligonucleotide
  Sense strand starting at position 1236 of SEQ ID NO: 914212
agggcuuucgauuaaacaa

SEQ ID NO: 986641 - RNA, 19 nt, Artificial Sequence
  Description of Artificial Sequence: Synthetic oligonucleotide
  Antisense strand to SEQ ID NO: 986640
uuguuuaaucgaaagcccu

SEQ ID NO: 986642 - RNA, 19 nt, Artificial Sequence
  Description of Artificial Sequence: Synthetic oligonucleotide
  Sense strand starting at position 2888 of SEQ ID NO: 914212
uuuacugggcuuuauaaag

SEQ ID NO: 986643 - RNA, 19 nt, Artificial Sequence
  Description of Artificial Sequence: Synthetic oligonucleotide
  Antisense strand to SEQ ID NO: 986642
cuuuauaaagcccaguaaa

SEQ ID NO: 986644 - RNA, 19 nt, Artificial Sequence
  Description of Artificial Sequence: Synthetic oligonucleotide
  Sense strand starting at position 807 of SEQ ID NO: 914212
gaauaaauucuuggaggca

SEQ ID NO: 986645 - RNA, 19 nt, Artificial Sequence
  Description of Artificial Sequence: Synthetic oligonucleotide
  Antisense strand to SEQ ID NO: 986644
ugccuccaagaauuuauuc

SEQ ID NO: 986646 - RNA, 19 nt, Artificial Sequence
  Description of Artificial Sequence: Synthetic oligonucleotide
  Sense strand starting at position 518 of SEQ ID NO: 914212
ugugcugccauuuaacgaa

SEQ ID NO: 986647 - RNA, 19 nt, Artificial Sequence
  Description of Artificial Sequence: Synthetic oligonucleotide
  Antisense strand to SEQ ID NO: 986646
uucguuaaauggcagcaca

SEQ ID NO: 986648 - RNA, 19 nt, Artificial Sequence
  Description of Artificial Sequence: Synthetic oligonucleotide
  Sense strand starting at position 238 of SEQ ID NO: 914212
acaguuaaauauguagaca

SEQ ID NO: 986649 - RNA, 19 nt, Artificial Sequence
  Description of Artificial Sequence: Synthetic oligonucleotide
  Antisense strand to SEQ ID NO: 986648
ugucuacauauuuaacugu

SEQ ID NO: 986650 - RNA, 19 nt, Artificial Sequence
  Description of Artificial Sequence: Synthetic oligonucleotide
  Sense strand starting at position 1387 of SEQ ID NO: 914212
auggauuucgguugcccaa

SEQ ID NO: 986651 - RNA, 19 nt, Artificial Sequence
  Description of Artificial Sequence: Synthetic oligonucleotide
  Antisense strand to SEQ ID NO: 986650
uugggcaaccgaaauccau

SEQ ID NO: 986652 - RNA, 19 nt, Artificial Sequence
  Description of Artificial Sequence: Synthetic oligonucleotide
  Sense strand starting at position 2351 of SEQ ID NO: 914212
ccaggagcuguucaagaug

SEQ ID NO: 986653 - RNA, 19 nt, Artificial Sequence
  Description of Artificial Sequence: Synthetic oligonucleotide
  Antisense strand to SEQ ID NO: 986652
caucuugaacagcuccugg

SEQ ID NO: 986654 - RNA, 19 nt, Artificial Sequence
  Description of Artificial Sequence: Synthetic oligonucleotide
  Sense strand starting at position 352 of SEQ ID NO: 914212
acaauaaaccuuuggaugu

SEQ ID NO: 986655 - RNA, 19 nt, Artificial Sequence
  Description of Artificial Sequence: Synthetic oligonucleotide
  Antisense strand to SEQ ID NO: 986654
acauccaaagguuuauugu

SEQ ID NO: 986656 - RNA, 19 nt, Artificial Sequence
  Description of Artificial Sequence: Synthetic oligonucleotide
  Sense strand starting at position 1374 of SEQ ID NO: 914212
gaagcuucucgggauggau

SEQ ID NO: 986657 - RNA, 19 nt, Artificial Sequence
  Description of Artificial Sequence: Synthetic oligonucleotide
  Antisense strand to SEQ ID NO: 986656
auccaucccgagaagcuuc

SEQ ID NO: 986658 - RNA, 19 nt, Artificial Sequence
  Description of Artificial Sequence: Synthetic oligonucleotide
  Sense strand starting at position 3141 of SEQ ID NO: 914212
ggauaaucucuugacguca

SEQ ID NO: 986659 - RNA, 19 nt, Artificial Sequence
  Description of Artificial Sequence: Synthetic oligonucleotide
  Antisense strand to SEQ ID NO: 986658
ugacgucaagagauuaucc

SEQ ID NO: 986660 - RNA, 19 nt, Artificial Sequence
  Description of Artificial Sequence: Synthetic oligonucleotide
  Sense strand starting at position 3644 of SEQ ID NO: 914212
accacauggcugggaugau

SEQ ID NO: 986661 - RNA, 19 nt, Artificial Sequence
  Description of Artificial Sequence: Synthetic oligonucleotide
  Antisense strand to SEQ ID NO: 986660
aucaucccagccauguggu

SEQ ID NO: 986662 - RNA, 19 nt, Artificial Sequence
  Description of Artificial Sequence: Synthetic oligonucleotide
  Sense strand starting at position 3677 of SEQ ID NO: 914212
guuuauaaccauuaaguuc

SEQ ID NO: 986663 - RNA, 19 nt, Artificial Sequence
  Description of Artificial Sequence: Synthetic oligonucleotide
  Antisense strand to SEQ ID NO: 986662
gaacuuaaugguuauaaac

SEQ ID NO: 986664 - RNA, 19 nt, Artificial Sequence
  Description of Artificial Sequence: Synthetic oligonucleotide
  Sense strand starting at position 1275 of SEQ ID NO: 914212
ccaagaggcuagguaaauu

SEQ ID NO: 986665 - RNA, 19 nt, Artificial Sequence
  Description of Artificial Sequence: Synthetic oligonucleotide
  Antisense strand to SEQ ID NO: 986664
aauuuaccuagccucuugg

SEQ ID NO: 986666 - RNA, 19 nt, Artificial Sequence
  Description of Artificial Sequence: Synthetic oligonucleotide
  Sense strand starting at position 2984 of SEQ ID NO: 914212
auuugcauuccuuggcuua

SEQ ID NO: 986667 - RNA, 19 nt, Artificial Sequence
  Description of Artificial Sequence: Synthetic oligonucleotide
  Antisense strand to SEQ ID NO: 986666
uaagccaaggaaugcaaau

SEQ ID NO: 986668 - RNA, 19 nt, Artificial Sequence
  Description of Artificial Sequence: Synthetic oligonucleotide
  Sense strand starting at position 969 of SEQ ID NO: 914212
agggacauuucagggagau

SEQ ID NO: 986669 - RNA, 19 nt, Artificial Sequence
  Description of Artificial Sequence: Synthetic oligonucleotide
  Antisense strand to SEQ ID NO: 986668
aucucccugaaaugucccu

SEQ ID NO: 986670 - RNA, 19 nt, Artificial Sequence
  Description of Artificial Sequence: Synthetic oligonucleotide
  Sense strand starting at position 118 of SEQ ID NO: 914212
ucucaaauacccugggagu

SEQ ID NO: 986671 - RNA, 19 nt, Artificial Sequence
  Description of Artificial Sequence: Synthetic oligonucleotide
  Antisense strand to SEQ ID NO: 986670
acucccaggguauuugaga

SEQ ID NO: 986672 - RNA, 19 nt, Artificial Sequence
  Description of Artificial Sequence: Synthetic oligonucleotide
  Sense strand starting at position 3129 of SEQ ID NO: 914212
cuggcuaaucugggauaau

SEQ ID NO: 986673 - RNA, 19 nt, Artificial Sequence
  Description of Artificial Sequence: Synthetic oligonucleotide
  Antisense strand to SEQ ID NO: 986672
auuaucccagauuagccag

SEQ ID NO: 986674 - RNA, 19 nt, Artificial Sequence
  Description of Artificial Sequence: Synthetic oligonucleotide
  Sense strand starting at position 681 of SEQ ID NO: 914212
ccacuuagcacugggauga

SEQ ID NO: 986675 - RNA, 19 nt, Artificial Sequence
  Description of Artificial Sequence: Synthetic oligonucleotide
  Antisense strand to SEQ ID NO: 986674
ucaucccagugcuaagugg

SEQ ID NO: 986676 - RNA, 19 nt, Artificial Sequence
  Description of Artificial Sequence: Synthetic oligonucleotide
  Sense strand starting at position 3653 of SEQ ID NO: 914212
cugggaugauugguuucau

SEQ ID NO: 986677 - RNA, 19 nt, Artificial Sequence
  Description of Artificial Sequence: Synthetic oligonucleotide
  Antisense strand to SEQ ID NO: 986676
augaaaccaaucaucccag

SEQ ID NO: 986678 - RNA, 19 nt, Artificial Sequence
  Description of Artificial Sequence: Synthetic oligonucleotide
  Sense strand starting at position 3654 of SEQ ID NO: 914212
ugggaugauugguuucauu

SEQ ID NO: 986679 - RNA, 19 nt, Artificial Sequence
  Description of Artificial Sequence: Synthetic oligonucleotide
  Antisense strand to SEQ ID NO: 986678
aaugaaaccaaucauccca

SEQ ID NO: 986680 - RNA, 19 nt, Artificial Sequence
  Description of Artificial Sequence: Synthetic oligonucleotide
  Sense strand starting at position 1370 of SEQ ID NO: 914212
aggagaagcuucucgggau

SEQ ID NO: 986681 - RNA, 19 nt, Artificial Sequence
  Description of Artificial Sequence: Synthetic oligonucleotide
  Antisense strand to SEQ ID NO: 986680
aucccgagaagcuucuccu

SEQ ID NO: 986682 - RNA, 19 nt, Artificial Sequence
  Description of Artificial Sequence: Synthetic oligonucleotide
  Sense strand starting at position 793 of SEQ ID NO: 914212
ugcucugaggaguggaaua

SEQ ID NO: 986683 - RNA, 19 nt, Artificial Sequence
  Description of Artificial Sequence: Synthetic oligonucleotide
  Antisense strand to SEQ ID NO: 986682
uauuccacuccucagagca

SEQ ID NO: 986684 - RNA, 19 nt, Artificial Sequence
  Description of Artificial Sequence: Synthetic oligonucleotide
  Sense strand starting at position 28 of SEQ ID NO: 914212
guuagagcucuccaccaua

SEQ ID NO: 986685 - RNA, 19 nt, Artificial Sequence
  Description of Artificial Sequence: Synthetic oligonucleotide
  Antisense strand to SEQ ID NO: 986684
uaugguggagagcucuaac

SEQ ID NO: 986686 - RNA, 19 nt, Artificial Sequence
  Description of Artificial Sequence: Synthetic oligonucleotide
  Sense strand starting at position 623 of SEQ ID NO: 914212
augguaagcuccuugaaga

SEQ ID NO: 986687 - RNA, 19 nt, Artificial Sequence
  Description of Artificial Sequence: Synthetic oligonucleotide
  Antisense strand to SEQ ID NO: 986686
ucuucaaggagcuuaccau

SEQ ID NO: 986688 - RNA, 19 nt, Artificial Sequence
  Description of Artificial Sequence: Synthetic oligonucleotide
  Sense strand starting at position 430 of SEQ ID NO: 914212
gaaggaagcuuaguucuua

SEQ ID NO: 986689 - RNA, 19 nt, Artificial Sequence
  Description of Artificial Sequence: Synthetic oligonucleotide
  Antisense strand to SEQ ID NO: 986688
uaagaacuaagcuuccuuc

SEQ ID NO: 986690 - RNA, 19 nt, Artificial Sequence
  Description of Artificial Sequence: Synthetic oligonucleotide
  Sense strand starting at position 624 of SEQ ID NO: 914212
ugguaagcuccuugaagaa

SEQ ID NO: 986691 - RNA, 19 nt, Artificial Sequence
  Description of Artificial Sequence: Synthetic oligonucleotide
  Antisense strand to SEQ ID NO: 986690
uucuucaaggagcuuacca

SEQ ID NO: 986692 - RNA, 19 nt, Artificial Sequence
  Description of Artificial Sequence: Synthetic oligonucleotide
  Sense strand starting at position 3303 of SEQ ID NO: 914212
cggucuccuccucagagau

SEQ ID NO: 986693 - RNA, 19 nt, Artificial Sequence
  Description of Artificial Sequence: Synthetic oligonucleotide
  Antisense strand to SEQ ID NO: 986692
aucucugaggaggagaccg

SEQ ID NO: 986694 - RNA, 19 nt, Artificial Sequence
  Description of Artificial Sequence: Synthetic oligonucleotide
  Sense strand starting at position 685 of SEQ ID NO: 914212
uuagcacugggaugaguau

SEQ ID NO: 986695 - RNA, 19 nt, Artificial Sequence
  Description of Artificial Sequence: Synthetic oligonucleotide
  Antisense strand to SEQ ID NO: 986694
auacucaucccagugcuaa

SEQ ID NO: 986696 - RNA, 19 nt, Artificial Sequence
  Description of Artificial Sequence: Synthetic oligonucleotide
  Sense strand starting at position 3624 of SEQ ID NO: 914212
ggcagagguuguuugagaa

SEQ ID NO: 986697 - RNA, 19 nt, Artificial Sequence
  Description of Artificial Sequence: Synthetic oligonucleotide
  Antisense strand to SEQ ID NO: 986696
uucucaaacaaccucugcc

SEQ ID NO: 986698 - RNA, 19 nt, Artificial Sequence
  Description of Artificial Sequence: Synthetic oligonucleotide
  Sense strand starting at position 205 of SEQ ID NO: 914212
aaaguacgacuugguaauu

SEQ ID NO: 986699 - RNA, 19 nt, Artificial Sequence
  Description of Artificial Sequence: Synthetic oligonucleotide
  Antisense strand to SEQ ID NO: 986698
aauuaccaagucguacuuu

SEQ ID NO: 986700 - RNA, 19 nt, Artificial Sequence
  Description of Artificial Sequence: Synthetic oligonucleotide
  Sense strand starting at position 469 of SEQ ID NO: 914212
ugaugcauagccuaguuga

SEQ ID NO: 986701 - RNA, 19 nt, Artificial Sequence
  Description of Artificial Sequence: Synthetic oligonucleotide
  Antisense strand to SEQ ID NO: 986700
ucaacuaggcuaugcauca

SEQ ID NO: 986702 - RNA, 19 nt, Artificial Sequence
  Description of Artificial Sequence: Synthetic oligonucleotide
  Sense strand starting at position 2738 of SEQ ID NO: 914212
agagauguugccuggaccu

SEQ ID NO: 986703 - RNA, 19 nt, Artificial Sequence
  Description of Artificial Sequence: Synthetic oligonucleotide
  Antisense strand to SEQ ID NO: 986702
agguccaggcaacaucucu

SEQ ID NO: 986704 - RNA, 19 nt, Artificial Sequence
  Description of Artificial Sequence: Synthetic oligonucleotide
  Sense strand starting at position 2354 of SEQ ID NO: 914212
ggagcuguucaagaugcuu

SEQ ID NO: 986705 - RNA, 19 nt, Artificial Sequence
  Description of Artificial Sequence: Synthetic oligonucleotide
  Antisense strand to SEQ ID NO: 986704
aagcaucuugaacagcucc

SEQ ID NO: 986706 - RNA, 19 nt, Artificial Sequence
  Description of Artificial Sequence: Synthetic oligonucleotide
  Sense strand starting at position 464 of SEQ ID NO: 914212
aguucugaugcauagccua

SEQ ID NO: 986707 - RNA, 19 nt, Artificial Sequence
  Description of Artificial Sequence: Synthetic oligonucleotide
  Antisense strand to SEQ ID NO: 986706
uaggcuaugcaucagaacu

SEQ ID NO: 986708 - RNA, 19 nt, Artificial Sequence
  Description of Artificial Sequence: Synthetic oligonucleotide
  Sense strand starting at position 891 of SEQ ID NO: 914212
guaucuuaaugucccuaca

SEQ ID NO: 986709 - RNA, 19 nt, Artificial Sequence
  Description of Artificial Sequence: Synthetic oligonucleotide
  Antisense strand to SEQ ID NO: 986708
uguagggacauuaagauac

SEQ ID NO: 986710 - RNA, 19 nt, Artificial Sequence
  Description of Artificial Sequence: Synthetic oligonucleotide
  Sense strand starting at position 1340 of SEQ ID NO: 914212
cccgaucucuguccuaaag

SEQ ID NO: 986711 - RNA, 19 nt, Artificial Sequence
  Description of Artificial Sequence: Synthetic oligonucleotide
  Antisense strand to SEQ ID NO: 986710
cuuuaggacagagaucggg

SEQ ID NO: 986712 - RNA, 19 nt, Artificial Sequence
  Description of Artificial Sequence: Synthetic oligonucleotide
  Sense strand starting at position 3315 of SEQ ID NO: 914212
cagagaugcugucuuaccu

SEQ ID NO: 986713 - RNA, 19 nt, Artificial Sequence
  Description of Artificial Sequence: Synthetic oligonucleotide
  Antisense strand to SEQ ID NO: 986712
agguaagacagcaucucug

SEQ ID NO: 986714 - RNA, 19 nt, Artificial Sequence
  Description of Artificial Sequence: Synthetic oligonucleotide
  Sense strand starting at position 2967 of SEQ ID NO: 914212
uccaguucccagugacuau

SEQ ID NO: 986715 - RNA, 19 nt, Artificial Sequence
  Description of Artificial Sequence: Synthetic oligonucleotide
  Antisense strand to SEQ ID NO: 986714
auagucacugggaacugga

SEQ ID NO: 986716 - RNA, 19 nt, Artificial Sequence
  Description of Artificial Sequence: Synthetic oligonucleotide
  Sense strand starting at position 2973 of SEQ ID NO: 914213
cccagugacuauuugcauu

SEQ ID NO: 986717 - RNA, 19 nt, Artificial Sequence
  Description of Artificial Sequence: Synthetic oligonucleotide
  Antisense strand to SEQ ID NO: 986716
aaugcaaauagucacuggg

SEQ ID NO: 986718 - RNA, 19 nt, Artificial Sequence
  Description of Artificial Sequence: Synthetic oligonucleotide
  Sense strand starting at position 80 of SEQ ID NO: 914213
ucucaaacaccaugggauu

SEQ ID NO: 986719 - RNA, 19 nt, Artificial Sequence
  Description of Artificial Sequence: Synthetic oligonucleotide
  Antisense strand to SEQ ID NO: 986718
aaucccaugguguuugaga

SEQ ID NO: 986720 - RNA, 19 nt, Artificial Sequence
  Description of Artificial Sequence: Synthetic oligonucleotide
  Sense strand starting at position 1235 of SEQ ID NO: 914213
agggcuuucgauuaaacaa

SEQ ID NO: 986721 - RNA, 19 nt, Artificial Sequence
  Description of Artificial Sequence: Synthetic oligonucleotide
  Antisense strand to SEQ ID NO: 986720
uuguuuaaucgaaagcccu

SEQ ID NO: 986722 - RNA, 19 nt, Artificial Sequence
  Description of Artificial Sequence: Synthetic oligonucleotide
  Sense strand starting at position 2887 of SEQ ID NO: 914213
uuuacugggcuuuauaaag

SEQ ID NO: 986723 - RNA, 19 nt, Artificial Sequence
  Description of Artificial Sequence: Synthetic oligonucleotide
  Antisense strand to SEQ ID NO: 986722
cuuuauaaagcccaguaaa

SEQ ID NO: 986724 - RNA, 19 nt, Artificial Sequence
  Description of Artificial Sequence: Synthetic oligonucleotide
  Sense strand starting at position 806 of SEQ ID NO: 914213
gaauaaauucuuggaggca

SEQ ID NO: 986725 - RNA, 19 nt, Artificial Sequence
  Description of Artificial Sequence: Synthetic oligonucleotide
  Antisense strand to SEQ ID NO: 986724
ugccuccaagaauuuauuc

SEQ ID NO: 986726 - RNA, 19 nt, Artificial Sequence
  Description of Artificial Sequence: Synthetic oligonucleotide
  Sense strand starting at position 517 of SEQ ID NO: 914213
ugugcugccauuuaacgaa

SEQ ID NO: 986727 - RNA, 19 nt, Artificial Sequence
  Description of Artificial Sequence: Synthetic oligonucleotide
  Antisense strand to SEQ ID NO: 986726
uucguuaaauggcagcaca

SEQ ID NO: 986728 - RNA, 19 nt, Artificial Sequence
  Description of Artificial Sequence: Synthetic oligonucleotide
  Sense strand starting at position 237 of SEQ ID NO: 914213
acaguuaaauauguagaca

SEQ ID NO: 986729 - RNA, 19 nt, Artificial Sequence
  Description of Artificial Sequence: Synthetic oligonucleotide
  Antisense strand to SEQ ID NO: 986728
ugucuacauauuuaacugu

SEQ ID NO: 986730 - RNA, 19 nt, Artificial Sequence
  Description of Artificial Sequence: Synthetic oligonucleotide
  Sense strand starting at position 1386 of SEQ ID NO: 914213
auggauuucgguugcccaa

SEQ ID NO: 986731 - RNA, 19 nt, Artificial Sequence
  Description of Artificial Sequence: Synthetic oligonucleotide
  Antisense strand to SEQ ID NO: 986730
uugggcaaccgaaauccau

SEQ ID NO: 986732 - RNA, 19 nt, Artificial Sequence
  Description of Artificial Sequence: Synthetic oligonucleotide
  Sense strand starting at position 2350 of SEQ ID NO: 914213
ccaggagcuguucaagaug

SEQ ID NO: 986733 - RNA, 19 nt, Artificial Sequence
  Description of Artificial Sequence: Synthetic oligonucleotide
  Antisense strand to SEQ ID NO: 986732
caucuugaacagcuccugg

SEQ ID NO: 986734 - RNA, 19 nt, Artificial Sequence
  Description of Artificial Sequence: Synthetic oligonucleotide
  Sense strand starting at position 351 of SEQ ID NO: 914213
acaauaaaccuuuggaugu

SEQ ID NO: 986735 - RNA, 19 nt, Artificial Sequence
  Description of Artificial Sequence: Synthetic oligonucleotide
  Antisense strand to SEQ ID NO: 986734
acauccaaagguuuauugu

SEQ ID NO: 986736 - RNA, 19 nt, Artificial Sequence
  Description of Artificial Sequence: Synthetic oligonucleotide
  Sense strand starting at position 1373 of SEQ ID NO: 914213
gaagcuucucgggauggau

SEQ ID NO: 986737 - RNA, 19 nt, Artificial Sequence
  Description of Artificial Sequence: Synthetic oligonucleotide
  Antisense strand to SEQ ID NO: 986736
auccaucccgagaagcuuc

SEQ ID NO: 986738 - RNA, 19 nt, Artificial Sequence
  Description of Artificial Sequence: Synthetic oligonucleotide
  Sense strand starting at position 3140 of SEQ ID NO: 914213
ggauaaucucuugacguca

SEQ ID NO: 986739 - RNA, 19 nt, Artificial Sequence
  Description of Artificial Sequence: Synthetic oligonucleotide
  Antisense strand to SEQ ID NO: 986738
ugacgucaagagauuaucc

SEQ ID NO: 986740 - RNA, 19 nt, Artificial Sequence
  Description of Artificial Sequence: Synthetic oligonucleotide
  Sense strand starting at position 3643 of SEQ ID NO: 914213
accacauggcugggaugau

SEQ ID NO: 986741 - RNA, 19 nt, Artificial Sequence
  Description of Artificial Sequence: Synthetic oligonucleotide
  Antisense strand to SEQ ID NO: 986740
aucaucccagccauguggu

SEQ ID NO: 986742 - RNA, 19 nt, Artificial Sequence
  Description of Artificial Sequence: Synthetic oligonucleotide
  Sense strand starting at position 3676 of SEQ ID NO: 914213
guuuauaaccauuaaguuc

SEQ ID NO: 986743 - RNA, 19 nt, Artificial Sequence
  Description of Artificial Sequence: Synthetic oligonucleotide
  Antisense strand to SEQ ID NO: 986742
gaacuuaaugguuauaaac

SEQ ID NO: 986744 - RNA, 19 nt, Artificial Sequence
  Description of Artificial Sequence: Synthetic oligonucleotide
  Sense strand starting at position 1274 of SEQ ID NO: 914213
ccaagaggcuagguaaauu

SEQ ID NO: 986745 - RNA, 19 nt, Artificial Sequence
  Description of Artificial Sequence: Synthetic oligonucleotide
  Antisense strand to SEQ ID NO: 986744
aauuuaccuagccucuugg

SEQ ID NO: 986746 - RNA, 19 nt, Artificial Sequence
  Description of Artificial Sequence: Synthetic oligonucleotide
  Sense strand starting at position 2983 of SEQ ID NO: 914213
auuugcauuccuuggcuua

SEQ ID NO: 986747 - RNA, 19 nt, Artificial Sequence
  Description of Artificial Sequence: Synthetic oligonucleotide
  Antisense strand to SEQ ID NO: 986746
uaagccaaggaaugcaaau

SEQ ID NO: 986748 - RNA, 19 nt, Artificial Sequence
  Description of Artificial Sequence: Synthetic oligonucleotide
  Sense strand starting at position 968 of SEQ ID NO: 914213
agggacauuucagggagau

SEQ ID NO: 986749 - RNA, 19 nt, Artificial Sequence
  Description of Artificial Sequence: Synthetic oligonucleotide
  Antisense strand to SEQ ID NO: 986748
aucucccugaaaugucccu

SEQ ID NO: 986750 - RNA, 19 nt, Artificial Sequence
  Description of Artificial Sequence: Synthetic oligonucleotide
  Sense strand starting at position 117 of SEQ ID NO: 914213
ucucaaauacccugggagu

SEQ ID NO: 986751 - RNA, 19 nt, Artificial Sequence
  Description of Artificial Sequence: Synthetic oligonucleotide
  Antisense strand to SEQ ID NO: 986750
acucccaggguauuugaga

SEQ ID NO: 986752 - RNA, 19 nt, Artificial Sequence
  Description of Artificial Sequence: Synthetic oligonucleotide
  Sense strand starting at position 3128 of SEQ ID NO: 914213
cuggcuaaucugggauaau

SEQ ID NO: 986753 - RNA, 19 nt, Artificial Sequence
  Description of Artificial Sequence: Synthetic oligonucleotide
  Antisense strand to SEQ ID NO: 986752
auuaucccagauuagccag

SEQ ID NO: 986754 - RNA, 19 nt, Artificial Sequence
  Description of Artificial Sequence: Synthetic oligonucleotide
  Sense strand starting at position 680 of SEQ ID NO: 914213
ccacuuagcacugggauga

SEQ ID NO: 986755 - RNA, 19 nt, Artificial Sequence
  Description of Artificial Sequence: Synthetic oligonucleotide
  Antisense strand to SEQ ID NO: 986754
ucaucccagugcuaagugg

SEQ ID NO: 986756 - RNA, 19 nt, Artificial Sequence
  Description of Artificial Sequence: Synthetic oligonucleotide
  Sense strand starting at position 3652 of SEQ ID NO: 914213
cugggaugauugguuucau

SEQ ID NO: 986757 - RNA, 19 nt, Artificial Sequence
  Description of Artificial Sequence: Synthetic oligonucleotide
  Antisense strand to SEQ ID NO: 986756
augaaaccaaucaucccag

SEQ ID NO: 986758 - RNA, 19 nt, Artificial Sequence
  Description of Artificial Sequence: Synthetic oligonucleotide
  Sense strand starting at position 3653 of SEQ ID NO: 914213
ugggaugauugguuucauu

SEQ ID NO: 986759 - RNA, 19 nt, Artificial Sequence
  Description of Artificial Sequence: Synthetic oligonucleotide
  Antisense strand to SEQ ID NO: 986758
aaugaaaccaaucauccca

SEQ ID NO: 986760 - RNA, 19 nt, Artificial Sequence
  Description of Artificial Sequence: Synthetic oligonucleotide
  Sense strand starting at position 1369 of SEQ ID NO: 914213
aggagaagcuucucgggau

SEQ ID NO: 986761 - RNA, 19 nt, Artificial Sequence
  Description of Artificial Sequence: Synthetic oligonucleotide
  Antisense strand to SEQ ID NO: 986760
aucccgagaagcuucuccu

SEQ ID NO: 986762 - RNA, 19 nt, Artificial Sequence
  Description of Artificial Sequence: Synthetic oligonucleotide
  Sense strand starting at position 792 of SEQ ID NO: 914213
ugcucugaggaguggaaua

SEQ ID NO: 986763 - RNA, 19 nt, Artificial Sequence
  Description of Artificial Sequence: Synthetic oligonucleotide
  Antisense strand to SEQ ID NO: 986762
uauuccacuccucagagca

SEQ ID NO: 986764 - RNA, 19 nt, Artificial Sequence
  Description of Artificial Sequence: Synthetic oligonucleotide
  Sense strand starting at position 27 of SEQ ID NO: 914213
guuagagcucuccaccaua

SEQ ID NO: 986765 - RNA, 19 nt, Artificial Sequence
  Description of Artificial Sequence: Synthetic oligonucleotide
  Antisense strand to SEQ ID NO: 986764
uaugguggagagcucuaac

SEQ ID NO: 986766 - RNA, 19 nt, Artificial Sequence
  Description of Artificial Sequence: Synthetic oligonucleotide
  Sense strand starting at position 622 of SEQ ID NO: 914213
augguaagcuccuugaaga

SEQ ID NO: 986767 - RNA, 19 nt, Artificial Sequence
  Description of Artificial Sequence: Synthetic oligonucleotide
  Antisense strand to SEQ ID NO: 986766
ucuucaaggagcuuaccau

SEQ ID NO: 986768 - RNA, 19 nt, Artificial Sequence
  Description of Artificial Sequence: Synthetic oligonucleotide
  Sense strand starting at position 429 of SEQ ID NO: 914213
gaaggaagcuuaguucuua

SEQ ID NO: 986769 - RNA, 19 nt, Artificial Sequence
  Description of Artificial Sequence: Synthetic oligonucleotide
  Antisense strand to SEQ ID NO: 986768
uaagaacuaagcuuccuuc

SEQ ID NO: 986770 - RNA, 19 nt, Artificial Sequence
  Description of Artificial Sequence: Synthetic oligonucleotide
  Sense strand starting at position 623 of SEQ ID NO: 914213
ugguaagcuccuugaagaa

SEQ ID NO: 986771 - RNA, 19 nt, Artificial Sequence
  Description of Artificial Sequence: Synthetic oligonucleotide
  Antisense strand to SEQ ID NO: 986770
uucuucaaggagcuuacca

SEQ ID NO: 986772 - RNA, 19 nt, Artificial Sequence
  Description of Artificial Sequence: Synthetic oligonucleotide
  Sense strand starting at position 3302 of SEQ ID NO: 914213
cggucuccuccucagagau

SEQ ID NO: 986773 - RNA, 19 nt, Artificial Sequence
  Description of Artificial Sequence: Synthetic oligonucleotide
  Antisense strand to SEQ ID NO: 986772
aucucugaggaggagaccg

SEQ ID NO: 986774 - RNA, 19 nt, Artificial Sequence
  Description of Artificial Sequence: Synthetic oligonucleotide
  Sense strand starting at position 684 of SEQ ID NO: 914213
uuagcacugggaugaguau

SEQ ID NO: 986775 - RNA, 19 nt, Artificial Sequence
  Description of Artificial Sequence: Synthetic oligonucleotide
  Antisense strand to SEQ ID NO: 986774
auacucaucccagugcuaa

SEQ ID NO: 986776 - RNA, 19 nt, Artificial Sequence
  Description of Artificial Sequence: Synthetic oligonucleotide
  Sense strand starting at position 3623 of SEQ ID NO: 914213
ggcagagguuguuugagaa

SEQ ID NO: 986777 - RNA, 19 nt, Artificial Sequence
  Description of Artificial Sequence: Synthetic oligonucleotide
  Antisense strand to SEQ ID NO: 986776
uucucaaacaaccucugcc

SEQ ID NO: 986778 - RNA, 19 nt, Artificial Sequence
  Description of Artificial Sequence: Synthetic oligonucleotide
  Sense strand starting at position 204 of SEQ ID NO: 914213
aaaguacgacuugguaauu

SEQ ID NO: 986779 - RNA, 19 nt, Artificial Sequence
  Description of Artificial Sequence: Synthetic oligonucleotide
  Antisense strand to SEQ ID NO: 986778
aauuaccaagucguacuuu

SEQ ID NO: 986780 - RNA, 19 nt, Artificial Sequence
  Description of Artificial Sequence: Synthetic oligonucleotide
  Sense strand starting at position 468 of SEQ ID NO: 914213
ugaugcauagccuaguuga

SEQ ID NO: 986781 - RNA, 19 nt, Artificial Sequence
  Description of Artificial Sequence: Synthetic oligonucleotide
  Antisense strand to SEQ ID NO: 986780
ucaacuaggcuaugcauca

SEQ ID NO: 986782 - RNA, 19 nt, Artificial Sequence
  Description of Artificial Sequence: Synthetic oligonucleotide
  Sense strand starting at position 2737 of SEQ ID NO: 914213
agagauguugccuggaccu

SEQ ID NO: 986783 - RNA, 19 nt, Artificial Sequence
  Description of Artificial Sequence: Synthetic oligonucleotide
  Antisense strand to SEQ ID NO: 986782
agguccaggcaacaucucu

SEQ ID NO: 986784 - RNA, 19 nt, Artificial Sequence
  Description of Artificial Sequence: Synthetic oligonucleotide
  Sense strand starting at position 2353 of SEQ ID NO: 914213
ggagcuguucaagaugcuu

SEQ ID NO: 986785 - RNA, 19 nt, Artificial Sequence
  Description of Artificial Sequence: Synthetic oligonucleotide
  Antisense strand to SEQ ID NO: 986784
aagcaucuugaacagcucc

SEQ ID NO: 986786 - RNA, 19 nt, Artificial Sequence
  Description of Artificial Sequence: Synthetic oligonucleotide
  Sense strand starting at position 463 of SEQ ID NO: 914213
aguucugaugcauagccua

SEQ ID NO: 986787 - RNA, 19 nt, Artificial Sequence
  Description of Artificial Sequence: Synthetic oligonucleotide
  Antisense strand to SEQ ID NO: 986786
uaggcuaugcaucagaacu

SEQ ID NO: 986788 - RNA, 19 nt, Artificial Sequence
  Description of Artificial Sequence: Synthetic oligonucleotide
  Sense strand starting at position 890 of SEQ ID NO: 914213
guaucuuaaugucccuaca

SEQ ID NO: 986789 - RNA, 19 nt, Artificial Sequence
  Description of Artificial Sequence: Synthetic oligonucleotide
  Antisense strand to SEQ ID NO: 986788
uguagggacauuaagauac

SEQ ID NO: 986790 - RNA, 19 nt, Artificial Sequence
  Description of Artificial Sequence: Synthetic oligonucleotide
  Sense strand starting at position 1339 of SEQ ID NO: 914213
cccgaucucuguccuaaag

SEQ ID NO: 986791 - RNA, 19 nt, Artificial Sequence
  Description of Artificial Sequence: Synthetic oligonucleotide
  Antisense strand to SEQ ID NO: 986790
cuuuaggacagagaucggg

SEQ ID NO: 986792 - RNA, 19 nt, Artificial Sequence
  Description of Artificial Sequence: Synthetic oligonucleotide
  Sense strand starting at position 3314 of SEQ ID NO: 914213
cagagaugcugucuuaccu

SEQ ID NO: 986793 - RNA, 19 nt, Artificial Sequence
  Description of Artificial Sequence: Synthetic oligonucleotide
  Antisense strand to SEQ ID NO: 986792
agguaagacagcaucucug

SEQ ID NO: 986794 - RNA, 19 nt, Artificial Sequence
  Description of Artificial Sequence: Synthetic oligonucleotide
  Sense strand starting at position 2966 of SEQ ID NO: 914213
uccaguucccagugacuau

SEQ ID NO: 986795 - RNA, 19 nt, Artificial Sequence
  Description of Artificial Sequence: Synthetic oligonucleotide
  Antisense strand to SEQ ID NO: 986794
auagucacugggaacugga

SEQ ID NO: 986796 - RNA, 19 nt, Artificial Sequence
  Description of Artificial Sequence: Synthetic oligonucleotide
  Sense strand starting at position 397 of SEQ ID NO: 914214
auugccuuagacuagauau

SEQ ID NO: 986797 - RNA, 19 nt, Artificial Sequence
  Description of Artificial Sequence: Synthetic oligonucleotide
  Antisense strand to SEQ ID NO: 986796
auaucuagucuaaggcaau

SEQ ID NO: 986798 - RNA, 19 nt, Artificial Sequence
  Description of Artificial Sequence: Synthetic oligonucleotide
  Sense strand starting at position 922 of SEQ ID NO: 914214
gaagcaagugaccauuacu

SEQ ID NO: 986799 - RNA, 19 nt, Artificial Sequence
  Description of Artificial Sequence: Synthetic oligonucleotide
  Antisense strand to SEQ ID NO: 986798
aguaauggucacuugcuuc

SEQ ID NO: 986800 - RNA, 19 nt, Artificial Sequence
  Description of Artificial Sequence: Synthetic oligonucleotide
  Sense strand starting at position 1060 of SEQ ID NO: 914214
agauaacuccuggaacguu

SEQ ID NO: 986801 - RNA, 19 nt, Artificial Sequence
  Description of Artificial Sequence: Synthetic oligonucleotide
  Antisense strand to SEQ ID NO: 986800
aacguuccaggaguuaucu
